United States Patent Application Publication US 2019/0348154 A1 - sequence listing, part 123

SEQ ID NO: 461400 - DNA, 1083 bp, Shigella boydii
atgacagaacaattttcagagaaaaaaatagatgttgttggaattgttggattgccagcatgttatggtggatttgaatcattagttcaaaatttagttgattatcaaagtcaaaatataaaatacaatgtatattgttcacgaaaaaaatataaaaacaccccaaaaaaatacaagcgtgctgacttgaagtatataccatttgacgccaatggtagttctagtatcttgtatgatatctattcgttatttttgtcattgtttaacaaggtagatgttgtcctaattctcggggtttcagggtgtgtttttctaccaatttacagatttttttcgtcatcaaaggttattgtaaatattgatggattagaatggaaaagagcaaaatggaagggtattgctaagtggtatttaaaaaattcagagaaaatagctgttaaatattcagatgttgttgtggctgataatgaagctattgctaaatatgtcttaaaaaaatacggtttagaagctaaaattattgcttatggtggtgatcattcattggttaagaagccaatatcagttataaaagaggactatttttttactgtctgcaggattgaaccagaaaataacataagaatgatattagaagcatttaaaaatacaacacacagtctaaaaattgttggtaattgggattccagtttgtatgggcgacgactaaaagaagaatttgggaattataataatattgaaattatagaccctatatatgattctgatatcctttttaactttaggtctttatgccgtggctatattcatgggcattcagctggtgggacaaatccttctttagtcgaggctatgcattttcaaattcctattattgcctttgattgtgatttcaatcggtttacaactgacaactatgcgttttattttaaaaataaaaatgagctatcttttatcgtcaatgatatattaaatggcaatcagaatgaacaggcagaaatctgcgcaaaaaaaatgaaggaaattgctacaaaaaaatacacgtgggataccatagccaaaatgtatgaagaactttattga

SEQ ID NO: 461401 - DNA, 1695 bp, Shigella boydii
atggcgtatggtgaagggcttccgctgccggagacatatgaccgtccggacccgcgtattaaacagctggcgcgtcgcagcactgtcacgccgggtggtgcgtcctgtaactacaatgacattattcctgcggaccactgcctgcatgatgttcaggatttgagtaagttttcacacccgaaagccagcgcagctcagtatggatgcgtggggcagggattacatatcgcgaagaaattgttgccgtttattccggcgaatgccggtattcttctggttccgtgctgccgtggtggttctgcatttttggcgggcgatgaaggtaccttcagcgaatccaccggcgcaagcgagacctcggcacgctggggtgtagataagccactgtacaaggacctgcttacccgtactcaggccgcactgaaggctaaccctaaaaatattctgcttgcagtggtctggatgcagggcgagtttgatttgaaacagggtgcatacgccactcagccggggctgtttgattccatggtggaaaaatatcgttctgacctgtcggaattcggaggtcagtgtctcgggggctctccgtcatcggttccctggatttgtggcgacacgacctactactggaagcagacttattcttcgcaatacgatgcggtgtatggtgcatacaagacgaaatccgcaaaaaaaatcttctttgtgccgtttatgacggatgaaaacgggcgaaatgtgggtaccaacgagccgtcagaagatccggatgttgcggatattgggtattacggagccggtggtcgaacggacgccaaaacctggacgacggccgaccgtaaaacgcattttggatcatgggcacgtcgtgggattatttccgaccgtctggcaacggcgattcttgtgcatgccgggagaaccgctgaattcattaccggaaaacagcctgatacggtgaagcccaccggaccttccggtgaaggtacggagagagagccggaagccccggtcagtaaccgaaccctgatgagtctgctggcgtccggcgaagacctggcatcacagggctggcgctattatcacaaaccggcgagcggagacaatgttaacaaaaacattgctgaagcggtggtcagtgatgcgggggctacgggaggtaaggccctgcaactgaataaaccggaaaaccacatctggtttctggagcatgatgcagccggacagggagtggagttactgaagaaggggggacgtgtgagcgtacagtttaagttgccgggttcactggtgccgaatcggtttgccctgggcatttactggcagttgtcgtccctgccggagggagtgacgctggcagaggaaggcaacgacatgctgatgtccttcttcctgcagacggatgcgacgaacctgaacgcgatgtaccacaagaagccgaatgcgaagctggatacgttcggggtctttgataacggatggcacacactggattttgagtttgccggaaacaacagcattcaggtgacgccggtactggatgagaaacgggggacgccgttcacactggtgaaatctccggcatcaggggcggcggacaaactgcaactgacaggcatatcaaaggcggcgacatatacgctgctgattgccagtgtgaaggtggaagtgaacaacgcggatgccgcggcatga

SEQ ID NO: 461402 - DNA, 234 bp, Shigella boydii
atggcatttaaacactatgacgtggtcagggcggcgtcgccgtcagaccttgcggagcgactgacacaaaaactgaaggaggggtggcagccatttggcagtccggtggccatcacgccttataccctgatgcaggccattgcggcggaaggtgatgtcaccacacctgtggtggtgaagccgtcggatggagaaggcgcagttatcagcaccaccagcaacccggagtattaa

SEQ ID NO: 461403 - DNA, 675 bp, Shigella boydii
atgaaaacaatccatgacatccggcggtctaacgccagaaaactgagagatggtgttggcgggaattcttcctttgccactatgattgatcgcgagccaacccagaccagcaggtttatgggagatggtgctactaaaaatatcggtgacagcatggcacgacacattgaaaaatgtttcgacctgcctatcggatggctcgatcaagaacaccagacaacgaacatcacaaaaaaacctgatgtttcaatcactaacaaacaaataacgttagtccctgtcatatcatgggtacaggccggagcatggaaagaagttggctattctgaggttgatttgagcacagcagaaacttatccctgccctgtaccctgtggcgaaatgacttatatcttgcgggtgattggtgattcaatgattgatgagtaccgtccgggagacatgatttttgttgatcctgaagtccctgcttgccacggtgacgacgttattgcgttgatgcacgatacaggcgaaaccaccttcaagcgattgatagaagatggaacacagcgttatctcaaagcattacacccaaactggcctgagccctacattaagattaacggtaattgctctataattggcactgtgattttctcgggaaaaccaagaagatacaaaataaaggcctaa

SEQ ID NO: 461404 - DNA, 201 bp, Shigella boydii
atgaaagcgtattgggactctttaaccaaagaacagcagggtgagttggccggaaaagttggctcaacacaaggctacttacggctggttttcaatggctataaaaaagccagttttgtgctggctaaaaaacttgagcaatgcacgtcaggtgcaattacgaaatctgacttaagaccggatatctatccgaaagattag

SEQ ID NO: 461405 - DNA, 558 bp, Shigella boydii
gtgggtaagcatcactggaaaatagaaaaacagcctgagtggtacgtgaaagctgtcagaaaaactatcgcaaagttgccgggtggttacgctgaagcggctgactggctcgatgtaacagaaaacgctttattcaaccgccttcgtgcagatggcgatcagattttcccgctgggatgggcaatggttttacagcgtgctggtggcactcacttcattgctgatgctgtggcgcagtctgcaaatggcgtctttgtgtctcttcctgacatcgaggatgtggacaacgccgatattaaccagcgtctgctggaagtcattgaacagatcggcagttattcaaaacagattcgttcagcaatcgaagacggtgtagtggaaccgcatgagaagacagcaattaacgacgagctgtatctctcaatttcgaagctgcaggagcatgcagcacttgtctacaaaattttttgcatttcagaaagtaatgacgcccgcgagtgtgcagctccgggcgtcgtggcgtcgattgcttctggttgtggagaaactaacgcatga

SEQ ID NO: 461406 - DNA, 339 bp, Shigella boydii
atgaacagtttaacaacacactaccgtcgctcgcaactgattgcgctttctgtaccgggtggaaaagcgaaggtgaaatattgctatgcagtgaatgtaccaggtgacagggaaattgtaacccacagctttgcagagtgggctgtgggtgatttcaaccggcagaaggagacagtcctttgcgacaagttaaccgctggttcaaagatcactacggagtgcccgtcagagtcattcgttgggagccggaaacacagcgggttatctacctccgcggaggttatgagcatgaatgcttcagtccgctcgaacagtttcgtcgtaaattcagggaaatag

SEQ ID NO: 461407 - DNA, 243 bp, Shigella boydii
atgagcactaaattaaccggctatgtatgggatggttgcgctgcatcaggcatgaagttatccagcgtggcaattatggcccgcctggctgatttcagtaatgacgaaggtgtgtgctggccatcaattgaaaccattgcccgtcagattggcgcggggatgagtaccgtcagaacggctatcgcacggctggaagcagaaggctggttaacgcgtaaggcgcgtcgccagggtaaccgctga

SEQ ID NO: 461408 - DNA, 726 bp, Shigella boydii
atgaaaatactcaattcgaatctcataacaaacatatcatcaacaataagaaatcaccttctaacatcatccaaaaatataaaaacacacccatcaccaaacatagacgtaacaagtcatcgtcgtttattccagaaagacggaataggattgagccaaacaggaaaagcaacacaacttgtcattatgtcgcatggtggatggaaagagatctcccatccacaaacactattcacgcgtcaaaaaggcgatggatggactgtagtccccaaaaacctaagacttgatttttatacaaaagacaacgacttcacaaagggactaagcgttctttcagaggtaaacaaacgccatactgaagctcaaaaagggttaacaccatcactaaacataagcaaagatgacctaaaagttctagcgaacgcgcgcaatatacctcaatcaaaattagaagaagaaatgatgtcacaagccatatatagaaaagaatacgcaacaagtaatgagaagataaaaaactatgctctatattaccatgaacaagcccaaaatattatacaaagacatcaagatggcttaggaaacaaaaatattgatatagcatttataactgataaaaatcataagaagcacctttctgacatatttaaagtaataaatgaatcaggagtaaaatatgatgtaattcactttggcgcttgccgagtaaatagagaggagagataa

SEQ ID NO: 461409 - DNA, 324 bp, Shigella boydii
atgacaaaacgaagtggaagtaatacgcgcaggcgggctatcagtcgccctgttcgtctgacggcagaagaagaccaggaaatcagaaaaagggctgctgaatgcggcaagaccgtttctggttttttacgggcggcagttctcggtaagaaagttaactcactgactgatgacagggtgcttaaagaagttatgcgcctggggacgttgcagaaaaaactctttatcgacggcaagcgtgtcggggacagggagtatgcggaggtgctgatagctattacggagtatcaccgggccctgttatccaggcttatggcagattag

SEQ ID NO: 461410 - DNA, 195 bp, Shigella boydii
atgaacaagcagcagcaagccgtactcaacatggcaggattcataaaaagccagagtctgacgctgctcgaaaaactggacgcactcgatgctgacgagcaggccaccatgtgtgagaagctgcacgaactcgcagaagaactccagaacagcatacggacacgctttgaagtagaaaataacacagagagataa

SEQ ID NO: 461411 - DNA, 357 bp, Shigella boydii
atgaaaatcaagagcatcagtaaggctgtattactgtttgcactgctaacctccacgagctttgctgcgggtaagaatgtcaatgttgagttcagaaaaggccatagcagcgctcagtactccggcgaaataaagggatacgattacgatacatataccttctatgccaaaaaaggtcagaaagtacatgtgagtatctctaatgaaggcgctgatacttacctcttcgggccaggaatcgatgattctgttgatttatccagatattccccagaactcgatcgtcacggacaatactcactccctgcttctggcaaatatgagctgcgagtgctgcaaacccgaaacgacgggtaa

SEQ ID NO: 461412 - DNA, 294 bp, Shigella boydii
atgttttgtgtgatttatcgaagcagcaagcgtgaccagacctatttatatgtcgaaaaaaaagacgatttttcgcgtgttcctgaggaactgatgaaaggttttggtcagcctcagttagcgatgattctgccgttggatgggcggaagaaactggtcaatgctgatattgaaaaggttaaactggcattaaccgagcaaggttactatttgcagttaccgccaccacccgaagatttgctgaagcaacatctttccgtcatggggcagaaaacagacgacacgaacaaataa

SEQ ID NO: 461413 - DNA, 660 bp, Shigella boydii
atgtatcaacatcacaactggcaaggtgcgctgctggattatccggtgagtaaagtagtctgtgttggcagtaactatgccaaacatattaaagagatgggcagcgcagtgcccgaagagccagtgctgtttattaaaccagaaacggcactgtgcgatctgcggcagccattggcgatcccatccgatttcggttcagttcatcatgaagtcgaactggcggtgttgattggtgcgacgctgcgtcaggcaacggaagagcatgtccgcaaagccattgccggttacggcgtggcgcttgatctgacattgcgtgatgttcagggaaaaatgaagaaagccgggcagccgtgggaaaaggctaaagcgtttgataactcttgtccgctttccgggtttatccccgcggcggaatttaccggcgatccacaaaatacaacgctgggcctgagcgtaaacggcgaacaacgccagcaaggtacgactgcggacatgatccataaaatcgttccgttgatcgcttatatgagcaagttttttaccctcaaggccggtgacgttgtgttgacaggcacgcctgatggcgtcggcccgttgcaaagcggtgatgagctgacagtcactttcgatgggcattctttgacaactcgcgttttgtaa

SEQ ID NO: 461414 - DNA, 447 bp, Shigella boydii
atgaacgatgtacctttctggcaaagtaaaaccctggacgaaatgagcgatgcggaatgggagtcgttgtgtgatggttgcggtcagtgttgcctgcataaactgatggatgaagacaccgacgaaatctacttcactaacgtcgcctgtcgccagctcaatattaaaacctgtcaatgtcggaactacgaacgtcgtttcgagtttgaacccgactgcattaaattaacccgtgaaaatctgccaacattcgaatggctgccaatgacctgcgcttatcgtttgctggcggaaggtaaagatttacctgtgtggcatccgctacttactggttcgaaagcggcaatgcatggtgaacgtatctctgtgcgtcatatcgcagtgaaagaatcagaagtgattgactggcaggatcatatcttaaataaacctgactgggcgcagtga

SEQ ID NO: 461415 - DNA, 408 bp, Shigella boydii
atggtgtcagcgaaaaacgaaaccgctgttgaaatccctggaaagctggttgcggaaaagatgaagaccctgtcgcgacactcagagttggcgaaggcgttcgcgtacgcacttaaccagtggccggcactgacgtactatgcgaacgatagctgggtggaaatcgacaacaacatcgctgaaaatgccttgcgggcggtcagtctgggtcgtaaaaacttcctattcttcggctctgaccatggtggtgagcggggagcgctactgtacagcctgatcgggacgtgcaaactgaatgacgtggatccagaaagctaccttcgccatgtgcttggcgtcatagcagactggccggtcaaccgggtcagcgaactgcttccgtggcgcatagcactgccagctgaataa

SEQ ID NO: 461416 - DNA, 507 bp, Shigella boydii
atggtggcccggggatttacaggcagtgaaaccatcgtcagggatgcggttgccaaatggcgtaaaggctggaacccaccggttactactgccgtcagacttccttcagtgtcccgggtaagccgctggttgatgccctggagaataaccagggatgaagaaaattatgcttcccgatttattagtctgatgtgtgaaaaagaacctgagctgaaaatagcgcagcaactggcactcgagttctaccgtattctgaaaacccaaaataaatcacagctaagcagttggttcactcgagtccacgaaagcggttcagcagaatttcggcgcgtggcggcggggatgcaagctgatgctgcagctatatgtgaggcaatcagtagtcgctggagtaatggtgttgtcgaaggtcatgtaaatcgcctgaagaagatgctgaaacgccagatgtatggtcgagcaggatttgaactactcaggcagagggtaatgagtccactggcatga

SEQ ID NO: 461417 - DNA, 912 bp, Shigella boydii
gtggagctgagccgtgccacactgggtcgctggaccggtgccgttgctgaactgctggagccgctgtatgacgtcctgcgccagtatgtgctgatgcccggtaaagttcatgcggatgatatccccgttccggtccaggagccgggcagtggtaaaacaagaactgcccggctgtgggtctatgtccgtgatgaccgtaacgccggttcacagatgcccccggcggtctggttcgcgtacagcccggaccggaaaggtatccatccacagaatcacctggccggttacagcggtgtgcttcaggcagatgcttacggtggttaccgggcgttatacgaatccggcagaataacggaagccgcgtgtatggcccatgcccggagaaaaatccacgatgtgcatgcaagagtgccaaccgacatcaccacggaagccctgcagcgtatcggtgaactgtataccatcgaggcagaagtccggggatgttcagcagaacagcgtctggcggcaagaaaagcaagagccgcgccactgatgcagtcactgtatgaccggatacagcaacagatgaaaacactgtcgcgtcactcggatacggcaaaagcgttcgcatacctactgaaacagtggaaggccctgaacgtgtactgcagtaatggctgggtggaaatcgacaacaacatcgcagagaacgccttacggggagtggccgtaggccggaaaaactggctcttcgcgggttccgacagcggtggcgaacatgcggtggtgttgtactcgctgatcggcacatgccgtctgaacaatgtagagccagaaaaatggctgcgttacgttattgagcatctccaggactggccggcaaaccgggtacgcgatctgttgccctggaatgaggtgtactggcaatag

SEQ ID NO: 461418 - DNA, 396 bp, Shigella boydii
atggtcgcagtggtacaggtgaatttttcgcgccggcgtgtacaccgggtccatctggtttttcatctgcgccacggtcaggccgcacgatgccagccagcggcggctttcctcactcacccggtcagccaggatttcactttccagccggtcgagcatctgcaccagcaccggcgggaacaccacactgccaccgtcttcgccgccggactgctgaagggcatccgccaggctgcggcgctgcgttttcgccagctcaccggtggcggtttcaactctgatgagtggcgtgaagcttcccggctgataaaccgtctggatgcgggttctgtcgttctgtattgtggtcagccggtcgccgtcccagccgtaccaggtcacttccggtttccgtga

SEQ ID NO: 461419 - DNA, 378 bp, Shigella boydii
atggtaccggtgggtgcgctcatcatccgtgcggatacccccttccgggatgaggtcggttttctctgtcagcctgccgtgacggtcataccggtaaagatagtgcgcgtcacgggcgatacggttatccggccacatgctgagggtgctgtccgggtgcagctccgggtcgggcaggcggttacctgccgggtctgtggcatacgggatgcggatatcaaggttcgctgcggtggtgtgaacgccggtcagcctgccggtggtgctgtagctgtaactccgggtctggcgcgggctgctgatgcggatgagttcgccgttgtcgttccaggtgtaatcgcggtcatactgcaggctgttcaggtgctggctctgtaa

SEQ ID NO: 461420 - DNA, 471 bp, Shigella boydii
atgacgcagtatggcggtagcattgttcagggttcagccggagtgcgcattggtgcccccaccggcgtggcctgttcggtgtgccccggcgaagtgacgtccggccatccggtcaatcccctgctcggtgcaaaggtccttcccggtgaaaccgacatcgccctgcccggcccgctgccgttcatcctctcccgcacctacagcagttaccggacaaaaacgcccgcgccggtggggagcctcggccccggctggaaaatgcctgcggatatccgcttacagctgcgcgataacacactgatactcagtgataacggcggcagaagcctgtattttgagcacctgtttcccggtgaggacggttacagccgcagcgagtcactgggctggtgcgcggcggcgtggcgaaactggatgaaggtctccggctggccgcactctggcaggcgctgccggaagaactccgcttaa

SEQ ID NO: 461421 - DNA, 798 bp, Shigella boydii
atgcatcatattaaaacagccgcggatcttaattgttttttaaattcaatggttgctgtttcgcaaccaacagttgataaaattatttttggtgctgaggcgacacttattaataaaattgggacctgctggattgcctcaatggatgttttaagaaaggctgtttttgaaggtgtcaatatcattattacacatgagactacattttattcttatgctgatctggagggtgacgatcttgagttttcatgggccagaaaaataatggattatactcgcggtgaactcagttatttaaaaataattgagcaaaaaaaggagtttttgcataaaaataatttggtaatcattcgttgccatgatgtcatggatcgagagcctacgttcggaatgtctaaggctttggctcagcagttagaactggatgttacaaatattgttgcttctgatgagatgtactgtgtatatgctatagaacctgacagtgccattaacattaccaaacgttttgccaaaaatttgaaaatatataatcttcctggcattcaattttatggagataaagccagagtagtcagaactgttggcattggggcaggctgtttttgtgatccaatacaatatatggaatatcaggctgattattatattacgattaacgattcaattaaaacatgggtgcagacacaatactccaaagatagtggcttaccgatggcagttattggacatagtgttgcagaggaagcgggtatgcgacgtcttgcaagctatttagatcttagactggccccctga

SEQ ID NO: 461422 - DNA, 609 bp, Shigella boydii
atgcttttttctcaaattcacaatacgacggtgttatcattgtggggattgataacgcatcgtctcatggtaaattcagccgtatggatgagtattctccatggccgcgaaacacatcttttcccttacctggctgggaccctgctgtggattatagtggaggaaaaggcgtttattgtgaatacgctcaagaactatgttgacagtaattttagaactctcccagatcgtaataatacagcgatagcaggtagttctatgggtgcgtacatcagtttgtttgccgcaattcttcgtcaggacgttttttcaaaagttggcgtcttttcgccggcactatggttcaatgacagcgcaatgctgaattttattcaggaaaacaacatcgttgaagatcttactgtatatctcgatgtcggtacgcaggaaaccagtggtatgcgcgaagactttcctgaagtctatatttccggtgctgaaaaattatgcgtgagtctccgtaaacaacgcaatgtaactatagattatcatttatggggaggtgatacccactctgagtctgcatgggcaaaacgtttcccagaaatgttgaaattattttattgctga

SEQ ID NO: 461423 - DNA, 558 bp, Shigella boydii
atgtggattaagcctcgtctggaaagttgtgatcaagactttgaagatatgattgccagcaatcgagatatcatttatggcatcaaagttcacccttatcattcaaaaatggctttcaactcagaaaaagttcaggattatatacgccttgctcaaaaatatgatctcccggtagttagccatacttctaatgattatgaatccagcccacagttattttatgagatggcacttaagtatccagacgtgaattttgttatgtgtcatatggggctcgcgacagataatcaggaagcaatcgaattgattgcaaaacttcctaatctctatggcgatactgtgtgggttagggcggatatggtttaccaggcgataaaaatctgtggtagtgataagattttattcggtaccgataatcctattaatgggctggatacgtacaatgatgatgatttttataataagtattttactgaattaaaaagtaaattaacgcaaagtgagtttgaacaacttatgtttaccaatgcgaaaaaaaattttaagataaaaatatag

SEQ ID NO: 461424 - DNA, 666 bp, Shigella boydii
atgacagttgctgatttcaaacggcccaaattggagctcccaaacggggcaaacaaactactactgcactcttgctgtgctccatgttccggtgaggtgatggaggcgcttcaggcctcgggaatcgactacaccatctttttctacaacccgaacattcatcctcagaaagagtatttaattcgtaaggatgagaatattcgctttgctgaacaacacggcgtgccgtttattgatgctgattacgacacagacaactggtttgaacgagccaaaggaatggaatgggagcccgaacgagggatccgttgcaccatgtgttttgacatgcgttttgagcggacagcgctgtacgccgctgaaaatggtttcagtgtgatcagcagttcactgggcatttcacgctggaaaaatatgcagcaggttaacgactgtgggcggcgagccgtcgcgcattatccgggcatggtgtactgggattataactggcgcaagcagggaggctcgtcccgtatgattgaaatcagcaagcgcgaaaaattctatcagcaggaatattgtggctgtgtgtattctctgcgcgataccaatctacaccgcaaatctcagggacgccctcttatcaaaattggtcaactccactacggtaaagaagagaaggagtga

SEQ ID NO: 461425 - DNA, 213 bp, Shigella boydii
atgctttgcacatgtaggttagcctcttacatgccgaaaggcaaggagaagcaggctatgaagcagcaaaaggcgatgttaatcgccctgatcgtcatctgtttaaccgtcatagtgacggcactggtaacgaggaaagacctctgtgaggtacgaatccgaaccggccagacggaggtcgctgtcttcgtagactacgaatccaggaagtaa

SEQ ID NO: 461426 - DNA, 288 bp, Shigella boydii
atgaaaatcgaagaattgcgtgaaatttttagtgaaaatggcctctatgctgtgcgcgttgagaatggagcgattgtcagccattgccgcattagatgtttgcaatctcaacaaaggaagagcggtgctgtgttattttatttttgtaatggacttctgacggacggttttattttgcgtgaggacgaatttgtcacatcattacgggttttgaaagagattggttttaaggctggttttctgcttttgctgaagaataaactcatctacaatcttgagcaggattga

SEQ ID NO: 461427 - DNA, 651 bp, Shigella boydii
ttgagcaggattgaactcctgctgtgtaacaccgtgccaccggagaaagccgatggccatatacaactgatcaaacaaacctcttccggattacttctcccggcgacgccggagagttgcgattttctgcatcaaatcaaaacaggtgagtggatacacgcagactttaagcgtgtgcgtaactacgcattccacaagcgttttttcaaactcctgcaactgggattcgattactggactccgatcggtggggcgattacgcctcgcgaacgagaactggtatcaggcttcgttgagtacctgtgcgaatcagtaggccgggaacatacgccagctctgagcgaagccgcagagcaatatctgaatacagttgcgacacgcagaacccgagatacagcattgctaaagtcgtttgaggctttccgcgagtgggtaaccattcaggccggattttacaccgagcatatttatccggacggtagccgtgggcgcagggcgaaatccatctcgtttgcgaatatggacgaaaccgagtttcagcaggtttataaatctgtgctgaatgtactgttgaactggatcctgttccgtaaattttcctctccggaacaagtcgaaaatgtggccgcgcagctactggagtttgcgtaa

SEQ ID NO: 461428 - DNA, 198 bp, Shigella boydii
atggtggatttacgtaaagcggcgcgggggcagatgtgcaccgtcagaattcctggctactgcaatcacgatccggaaacgtctgtgctggcgcattaccgactggcgggtaaaaacaagcgattacaccaaagaagaattacgcctgatgcatgcagaaggtgtttttcgcacgcaagaaatctggagaaaggatga

SEQ ID NO: 461429 - DNA, 1365 bp, Shigella boydii
atgtcccagccggttggtgatcttgttattgacctgagtctggatgctgtccgtttcgatgagcagatgagccgggtaaggcgtcatttttcaggtctggataccgacgccagaaaaaccgccagtgctgttgaacagggcctgagccgccaggcgctggctgcacaaaaagccgggatttccgtcgggcagtataaagcggccatgcgaaccctgcccgcacagtttacggatatcgccacgcagcttgcaggtggtcagaatccctggctgatcctgctgcaacagggcggtcaggtgaaggactccttcggcgggatgatccccatgttcagggggcttgccggtgcgatcaccctgccgatggtcggggtcacctcgctggcggtggcgacaggtgcgctggtgtacgcctggtaccagggagattccacgctttcagcgtttaataaaaccctggttctttccggtaatcagtcaggactgactgccgatcgtatgctgactctctcaagagccgggcaggcagcagggctgacgtttaaccaggcgaaagagtcactggcagccctggtgaatgccggtgtgcgtggtggtgaacagtttgatgccatcaaccagagtgtcgcgcgttttgcgtctgcatccggtgtggaggtggataaagtcgctgaagccttcgggaagctgaccactgacccgacgtcgggactgatggcgatggcgcgccagttccgtaacgtgacggcagagcagattgcgtatgttgcacagctgcagcgttccggagacgaggccggggcattgcaggcggcgaacgatatcgccacgaaaggctttgatgagcagacccgtcgcctgaaagaaaacatgggaacactggagacctgggcggataaaacagggaaggcattcaaatcgatgtgggatgccattctggatatcggtcgtcctgaatcctcagcggatatgctcgccagtgcgcagaaggcatttgatgaggcggataaaaaatggcagtggtaccagagccggagccagcgccggggaaagacctcctcttttcgtgcgaaccttcagggggcatgggatgaccgggaaaatgcccgtctgggtctggcagcggccacgctgcagtcggatatggaaaaagccggtgaactggcggcaagggaccgggctgagcgtgaggcgtcacagctgaagtataccggagaggcgcagaaggcgtatgagcgcctgcagacgccgctggataaatataccgcccgtcagaaagagctgaataaggccctgaaagacggaaaaatcctgcaggcggattgcaacacgctgatggcgtcggcaaaaaaggattatgaatag

SEQ ID NO: 461430 - DNA, 414 bp, Shigella boydii
atggggagactcgactggcgcgccatgcttgccgggatgacatccaccgaatatgccgactggcaccgtttttaccgcacgcattattttcaggatacccagctggatatgcatttttccgggctgacgtacgctgtactcagcctgtttttttgcgatccggatatgcatccctctgatttcagtctgcttgtcccccggcatgaggaagagcaggtggagaggccggatgaggacaaaatgctgatgcagaaagcggcaggacttgccggaggcgtccggttcggtggggacggagggcgcgatattttatcgtctgcggatgtggcggatgtcatggtggatgatgccgcattaatgatggcttcagcggggattccgggaggtgtgagatatgtcccagccggttggtga

SEQ ID NO: 461431 - DNA, 396 bp, Shigella boydii
gtgtctgtcacgctttccgaattgtctgcgctgcagcgtatcgagcatcttgccctcctgaaacggcgtgcagaacaggcagaatcctgcggcaacctgcaggtaagcgtggaagatctcgtcagaaccggcgcgtttctggtggcgatgtccctgtggcataaccatccacagaaaacgcagtcaccgtcaatgaatgaggccgtgatgaagatagagcaggaagtgctcaccacctggcctgccgatgccattgcccgggcggaagacgtggtgttgtgcctgtccgggatgatcgaagctgttcgtccggatactgatattactgaagtggcgaaaaataacacgctgactgatgatgatttttctgcgggaaagtcttcgacggcgagctga

SEQ ID NO: 461432 - DNA, 921 bp, Shigella boydii
atgatgaataataaagtcagcttcactaacagcaataatccaaccatctctttgtctgcagtgatctatttccctccaaaatttgatgaaacccgtcagtatcaggcaattgtggtatctcacccaagtgggggcgttaaagaacaaacggccggaacctatgccaaaaaactggcggaaaagggatttgtcactattgcttatgacgcatcttatcaaggtgaaagtggcggcgagccgcgtcagttagaaaacccatacattcgtactgaagacatcagtgccgtgattgattacctgacaacgctttcttatgtcgacaatacccgaattggtgcgatgggaatttgtgccggtgcaggatatacagccaatgctgcaattcaggatcgccgcatcaaggccatcggtaccgttagtgcggtcaatattggttcgatgttccgtaatggttgggaaaacaatgtgaaatctattgatgccctgccatacgttgaagcgggttcaaacgcccgaaccagcgatattagcagcggagaatatgccgttatgccactggcaccaatgaaggagtccgatgcgccgaacgaagaactgcgtcaggcctgggagtattaccacacccctcgcgcgcagtatccaacagcaccgggttacgctactttgcgcagccttaaccagattattacctttgatgcttaccatatggcggaagtgtacctgactcagccgatgcagattgtggcgggcagccaggcagggagcaaatggatgagtgacgatctgtacgatcgagcatcaagccaagataaacgctatcacattgttgaaggcgcaaaccatatggatctttatgacggcaaagcctatgtggctgaagcaatttcagtattagctccgttctttgaggaaactctgtaa

SEQ ID NO: 461433 - DNA, 579 bp, Shigella boydii
atgaaacatattcaaatccgcaatagtgatatggcctggcatattgctgccaatattcagtttccaccaaattttgatgagtcaaaacagtatccggcgattatcagcgtccatccttttggcagttgtaaggagcagacgtctggcaatatctatggcaaagcattggctgaaaaaggctatctcgttctcgcttatgacgccagtttccagggagaatctggtggggagcctcgctggatagaagatccgacacagcgcgtagaggatattagccgtgttatcgattatgcagtaactctgccatatgttaatgctgaacgtattggcgtgctgggagtgtgtgggggtggtggctatgccattaatgccgcgctgacagaaaaacgaattaaagcagtagtgagtattacgggtgttaatatcgggcgtctttttcgggaaggtttcagcaattacgatccgattggcgcattgaatgcaatggcgtcgcaacgaaccaaagaggctcgtggtggagattacagatcaacgaattacttcccgccagcctggatgcagcaaaagcccatggactga

SEQ ID NO: 461434 - DNA, 279 bp, Shigella boydii
atgttgttctcacatgcacagaaaacgctggcctgggatgccttcgcatttactgaagtgttactgactcagccggtgatggtagtagttggtgaaaaagtcggtgccttcggtgcttatcgtgatggactggaagtctatggccgggcgatggtttcgcaggatcgtcagttagtttcattacccgatttctcacattatgaactgtatgacaaaccggaagcagttcaggaggcgctggaaaaagttattccttttttcaacccccatctgggataa

SEQ ID NO: 461435 - DNA, 489 bp, Shigella boydii
atgagaaatattatgaaaaatgtactgattcttggtgctggcggtcagatagcccgccatgtgattaatcaactggcagataaacaaaccattaaacaaactttatttgcccgtcagccagcaaaaatccacaaaccctatccaactaatagcaagattattatgggagatgtactgaatcatgcagcactgaagcaggccatgcagggacaggacgttgtgtatgccaaccttacgggggaagatttagatattcaggcaaattcagtgatcgctgcgatgaaagcctgtgatgttaaacgtctgatctttgttctttccctcggtatttatgatgaagttccaggaaaatttggcgaatggaataatgcagttattggtgaacccctaaaaccattccgcagggctgcggatgcaattgaggcttctggactggaatatacaattcttcgccctgaagtggtcaacaaaaactggccaccgagttag

SEQ ID NO: 461436 - DNA, 879 bp, Shigella boydii
atgagctctatctccctgatccaaccggatcgcgacctgttctcctggccgcagtactgggccgcctgttttggaccggcaccgtttttgccgatgtctcgtgaagagatggatcaacttggctgggatagctgcgacatcattttggttactggcgacgcgtatgtcgatcacccaagcttcgggatggcgatttgcggtcgtatgctggaagcgcagggctttcgcgtcgggatcatcgcccagccggactggagcagcaaagacgactttatgcgtctgggtaaaccgaatctgtttttcggtgttactgctggcaacatggattcgatgatcaaccgttataccgccgatcgccgtttacgtcatgacgatgcctacacgccggataacgtcgcgggtaagcgcccggatcgcgccacactggtttatacccagcgttgtaaagaggcgtggaaagatgtaccggtgatcctcggcggtattgaggctagtctgcgtcgtaccgcacattatgattactggtccgataccgtgcgccgttccgtgctggtggattcgaaagccgacatgctgatgtttggtaacggtgagcgtccgctggtggaggtggcgcaccgtctggcgatgggcgagccgattagtgaaatccgcgatgtgcgtaataccgcgattatcgtgaaagaggccctgcctggctggagcggcgtggattccacccgtcttgatacccctggaaaaatcgacccaatcccgcatccgtatggtgaagatttgccgtgcgcggataacaaaccggtggcaccgaaaaagcaggaagccaaagccgtaaccgtgcagccaccgcgcccgaaaccgtgggaaaaaacctacgtgtag

SEQ ID NO: 461437 - DNA, 993 bp, Shigella boydii
atgtttttagcatcattgttgagacgtattgcatttagttactacgattataaagcttataatttcaatattgaaaaaacagactttgttgtcatccatattcccgaccagattggcgatgctacggccatctttcctgttattcgggcgcttgaattgcataaaattaagcatcttttaattgttacgtcgacaattaatttagaagtgtttaatgcacttaaacttgaaaagactaaattaacattagtcacaatgactatgcaggatcacgcaacattaaaagaaataaaagatttagcaaagaacataacacagcaatacggtacgccggatctttgtatagaggcgatgcgtaaaaagaacctgaaaacgatgatatttatcagtcagttgaaagcaaaaacgaattttcaggttgttggtttaaccatgaagtgctactcccctttgtgcaagaacgcgtcccggatggatcagaatctccgggctcctgtacccatgacatgggcatttatgatgcgtgaggcgggttttccagcagtcaggccaatatatgaattgccactaagtgaggatgtactcgatgaggtgcgcgaggaaatgcgatcgttaggatcttacattgcgcttaatttagaaggtagctcgcaggaacgtacattttcattatcgattgcagaaaatctaatagcaaaaattcaaagtgaaacagatataccaatagtgatcgttcatggaccaaaaggggaagataaagccagggtattagtggattgttataataatgtctaccgtttatccttatcaccctcgattaaacgttcagcagcaattataaaagatgcttatatcgcaataactcctgacacctcaatattacatatggcaagtgcctataatactcccgttgttgcaatttatgctgattacaaaacgcgatggccgatgtttcggagtcagtcgtcgttgggcaaaaaattgacaatataa

SEQ ID NO: 461438 - DNA, 276 bp, Shigella boydii
atgtcccttaatcaggctgctgctcactttatgcttgctggtagtggttctgtagccaggtggctgaaggtttatgaagagcgcggagaagctggtttacgcgcgctcaagattggcaccaaaagaaacattgcaatatcagttgatccagaaaaagcggcatcagcattggagctgtcaaaagtgaagtggcacactgaatttggccacctgaacagaggtgatatgctcacctcagaacaacacaggtgctccaatgaaaaaaagaaattttag

SEQ ID NO: 461439 - DNA, 321 bp, Shigella boydii
atggacttcctggagcatctgcttcatgaagaaaaactggcacgtcatcaacgtaaacaggcgatgtatacccgaatggtagccttcccggcggtgaaaacgttcgaagagtatgacttcacattcgccaccagagcaccgcagaagcaactccagtcgttacgctcactcagcttcatagaacgtaatgaaaatatcgtattactagggccatcaggtgtggggaaaacccatctggcaatagcgatgggctatgaagcatttaaaattttttatgatataagtaaaatttctttggagttataccataatattcattaa

SEQ ID NO: 461440 - DNA, 705 bp, Shigella boydii
atgacggttagctcaggcaatgaaactttgactatcgatgaagggcaaattgcttttatagagcgaaatatacaaataaacgtctccataaaaaaatctgatagcattaatccatttgagattataagccttgacagaaatttattattaagcattattagaataatggaaccaatttattcatttcaacactcctattctgaggagaaaagggggttaaacaaaaaaatattcctcctctctgaggaggaggtttctatcgatttgttcaaatctataaaagagatgcctttcggcaaaagaaagatctatagtttagcttgccttttatcagctgtttctgatgaggaagctttatatacttcgatatcgatagcttcttctcttagtttttctgatcagataaggaagattgttgaaaaaaacatcgagaagagatggcgtctttctgatatttcaaataacttgaatttatcagaaatagctgttagaaaacgactggagagtgaaaaattaacatttcaacaaatccttcttgatattcgcatgcatcatgcagcaaagcttttattgaatagtcaaagctatattaatgatgtatcaagacttatcggaatatcaagcccatcttattttataaggaaatttaatgaatattatggtataactccaaagaaattttacttatatcataaaaaattttaa

SEQ ID NO: 461441 - DNA, 1998 bp, Shigella boydii
atgagtgaaaatgatacaatcccaaagaagtctacaagtcagattaacaaagcggtattctttacatctgctttgctaattttccttcttgtcgcctttgccgccgtattcccggatgtcgccgacaaaaattttaaactacttcagcaacaaatcttcacgaatgccagctggttctacatccttgctgtggccctgattttactgagtgtcacgttccttggactctcacgctacggtgatatcaagctgggcccggaccatgcgcagcctgatttcagctaccactcctggtttgcgatgcttttttcggcagggatggggatcggcctgatgttctttggcgttgccgaacctgtaatgcattatctttcgccacccgttggcactccagaaaccgttgcggcagccaaggaagcaatgcgtctgacctttttccactggggactgcacgcatgggcaatttatgccattgtggcgctgattctggcgttcttcagttaccgtcacggtctgcctttaactctgcgctccgcactctatcccattattggcgatcgcatatacggacctgtaggacatgcggttgatattttcgctgttataggcacggtctttggcgttgcgacatcactgggttacggtgttttgcaggtgaatgccggtttgaaccatcttttcggggtgcccatcaatgaaacggtgcaggtaattctgatcgtggtcatcacggggttagcgacgatttcagtggtgtccggtctggataagggaatacgtatcctgtctgaactcaatctgggtctggctttgttgctcctggcgctggtcctgtgtctgggaccaaccgtgcttctgctgaagtcatttgtggaaaatacgggcggttatctttcggaactggtgagtaaaacgttcaacctttacgcgtatgagcccaagtcgagcaactggctggggggctggacattactgtactggggatggtggctttcatggtcgccgtttgtggggatgttcatcgcacgggtctcccgcgggcgaaccattcgcgagtttgtcaccggcgtgctgtttgttcccgcgggttttacgctaatgtggatgacggtgtttggtaacagcgcgatctatctcattatgaaccagggggccacagacctcgccaatactgttcagcaggatgtagcgctggccctgtttaatttcctggagcatttcccgttctcttccgtgctgtcattcattgcaatggcgatggtcatcgtcttctttgtaacgtctgctgattcgggggcaatggttgtggatactctggcatcaggtggagtggcaaacacacccgtctggcagcgaatattctgggcctcgctcatgggcattgttgcaattgcgcttctccttgccggagggctaagtgcgctgcaaacggtgacaatagcgagtgcattgcccttctcagtgatcttactaatatccatatacggacttttaaaagctttgcgccgggatttgaccaagcgtgaaagcctgagcatggcgacaattgctcctacggctgcacgtaacccaattccttggcagagaaggttacgcaatatcgtgtatctgccgaagcgatctcttgtgaaacgttttatggtcgacgtcatccagcccgccatgacgctggttcaggaggaactgaacaagcaggggacgataagccacattagtgatgcagtcgacgatcgtattcgtcttgaagtcgatttgggcaacgagctgaattttatatatgaagtgaggcttcgcgggtatatctcaccgaccttcgcgctcgccgcaatggataatgatgagcagcagactgaacaacatcgatattatcgcgctgaggtttatctcaaagaaggcggtcaaaattatgatgtgatgggctggaaccaggaacagttgattaatgacatactggaccagtacgaaaaacacctgcacttcctgcacctggttcgttaa

SEQ ID NO: 461442 - DNA, 276 bp, Shigella boydii; identical to SEQ ID NO: 458859

SEQ ID NO: 461443 - DNA, 462 bp, Shigella boydii
atgaaagcatgcttgttactatttttttatttttctcttattggtcaattgcatggtgctgatgtgaaaataaaagaaaacgaaagtgtgatgggatctacagcaatgacctatgatttaagtgaagaaaagctgatgaaactgaagtataaatcacaacatggtgattcagaggcatcatttcgactatatcaatattactgctttactaaaaataatattgataaacaattgcgattcttggaaagatcagcatctcaggggaatgttacagcgcagtttaattatggggtctttttatcagatacaaatccaacattatcagaatattataatttgaatagagctatttattggatggaattcgctgtaaataacggtaatattgatgcaaagagcaaacttcaagagctcaaaaagctaaagcgaatggatagaaggaagaataaggagaatccgtaa

SEQ ID NO: 461444 - DNA, 339 bp, Shigella boydii
atggctgcgaatgataacaaggaatttctcacatccttatctaatataatgaggtacaaaatagatgctggactttccgaatcctatacatgctatttattaagtaagggaaagatcataagaccatatctgaaaaatctaaatccactccaacttgccgctgattgcattgaaacagtaaataaaataaaagataagaataaaaaaatcattgatataaattcagttaatatttgtagtgatgataaaaatataaaattgagagttaatagtactattatggccattgatgattctataaaatgcatcgatgaatgggtgatgatgccaacttactga

SEQ ID NO: 461445 - DNA, 180 bp, Shigella boydii
atgcttacacaaactatattcccttgtcttcccaaaaaacaagaaaatatcatccctgaagtatcaaatactatattagtatcttctactgttactacagatggatgtactgtttttaataaacaaaaacagccatatacgaattgcaaatacctgctaccaaccgaacgaaaaagttga

SEQ ID NO: 461446 - DNA, 756 bp, Shigella boydii
atggaactcattgaaaaacatgccagctttggcggctggcaaaatgtgtatcggcattattcccaatcattgaaatgtgaaatgaatgtcggcgtctatctcccgccaaaagccgcaagtgaaaaattaccggtgctgtactggctttcgggcctgacctgcaatgagcagaatttcattactaaatcggggatgcagcgttacgcggctgagcacaacattattattgttgcgccggacaccagtccgcgaggcagtcatgtcgcagatgccgaccgttacgatctcgggcaaggtgccgggttttacctgaacgcgacgcaagcgccgtggaatgaacattacaaaatgtatgactatatccgcaacgagctgccggatttagtgatgcatcattttccggcaacggccaaaaagtctatctctggtcattctatgggcgggctgggcgcgctggtgctggcgttacgtaacccagatgaatatgtcagcgtctcggcgttttcgcccattgtctccccatcgcaagtaccgtggggacagcaagcctttgccgcatatcttggtgaaaataaagatgcctggttggattacgatccggtgagtcttatttcacaaggtcaacgcgttgcggaaatcatggttgatcaggggttgagtgatgatttttacgcggaacagctgcggactccaaatcttgaaaagatctgccaggagatgaatatcaagacgttggtaatgactccaacttactga

SEQ ID NO: 461447 - DNA, 1110 bp, Shigella boydii
atgaaatcacgtgctgccgttgcatttgctcccggtaaaccgctggaaatcgttgaaattgacgttgcaccaccgaaaaaaggtgaagtgctgattaaagtcacccataccggcgtttgccataccgacgcatttaccctctccggggatgacccggaaggtgtattcccggtggttctcggtcacgaaggggccggcgttgtggttgaagtcggtgaaggcgtaaccagcgtcaaacctggcgaccatgtgatcccgctttacaccgcggagtgcggcgagtgtgagttctgtcgttctggcaaaactaacctctgtgttgcggttcgcgaaacccagggtaaaggcttgatgccagacggcaccacccgtttttcttacaacgggcagccgctttatcactacatggggtgctctacattcagtgaatacaccgtggtcgcggaagtgtctctggccaaaattaatccagaagcaaaccatgaacacgtctgcctgctgggctgtggcgtgaccaccggtattggcgcggtgcacaacacagctaaagtccagccaggtgattctgttgccgtgtttggtcttggcgcgattggtctggcagtggttcagggcgcgcgtcaggcgaaagcgggacggattatcgctattgatacgaacccgaagaaattcgatctggcgcgtcgcttcggtgctaccgactgcattaacccgaatgactacgacaaaccgattaaagatgtcctgctggatatcaacaaatggggtatcgaccatacctttgaatgcatcggtaacgtcaacgtgatgcgtgcggcgctggaaagtgcgcaccgcggctggggtcagtcggtgatcatcggggtcgcgggttctggtcaggaaatctccacccgtccattccagttggtcactggtcgcgtatggaaaggttccgcgtttggcggcgtgaaaggtcgttcccagttaccgggcatggttgaagatgcgatgaaaggtgatatcgatctggaaccgtttgtcacgcataccatgagccttgatgaaattaatgacgccttcgacctgatgcatgaaggcaaatccattcgaaccgtaattcgttactga

SEQ ID NO: 461448 - DNA, 276 bp, Shigella boydii
atgcccagtactccggaagagaagaaaaaggtccttactcgagttcgtcgtattcgagggcagattgatgctctggaacggtcgctggagggtgatgccgaatgccgtgccatactccaacagatcgctgccgttcggggcgcggctaatgggctgatggcagaagtgcttgaaagccatatccgggaaacgtttgaccgaaatgactgctacagccgcgaagtcagccaatccgttgacgacactattgaactggttcgagcctatcttaaatag

SEQ ID NO: 461449 - DNA, 1263 bp, Shigella boydii
atgtttttaaacgattctaaaatccgcaagttaaaaccttcttcccgtccggtaaaactctccgacgctcacggtctgtatctgctcgtcaatccgggcggttcacgcatctggtatctcaaatatcgtttcaacggaaaagaatccagagtcagtcttggcgcatacccgctggtctcactggcagaagccaggcaacagcgcgacggtatccgcaagctactggcgcagaatatcaacccggcgcaacagcgcatggcagagaaatccgcctgctcccctgaaaagtgttttaaggcggtggcgctggcctggcacaaaaccaacaaaaaatggtcggctgattatgccgcccgtattctcgccagtatggaaaaccatatcttcccggcggttggtcacctgcccgttgctgcgcttaaaacgcaggatttcacggctttgttgcgggttatcgagaataaaggctttctggaagtcgcgtcccgaacccggcagcaactcagcaacatcatgcgctatgccgttcagcagggacttaccgacagtaatccggcgcagcatctggaaggtgtaactgcctcccccgtcaagaatcactatcccgctttaccgctggagcgattgcctgaactgcttgaccgcattggcgactaccggcagggccgggagttaacccggctggcggtggtgctgacgttgcacctgttcatccgttccagcgaactgcgtttcgcccgctggagtgagattgatttcaggcacaaaatctggaccatccccgcaacccgcgaggccattgataaagtacggttttcggggcgtggcgcaaaaatacgcaccccgcatatcgtaccgctctcccgccaggcgattgccattctgaaacagatacaggagctttccggccatctggatctggtgtttcccggcgaccataatccgtacaagccaatgagcgaaaacaccaccaaccgggcgctgcgtctgatggggtatgatacgaaaactgaaatctgcgggcatggactcagggcaatggcctgtagcgccctggtggagtcggatctgtggtcacgcgatacagtggagcggcaaatgagccaccaggagcgcaacagcgtgcgtgcggcatatgtgcataaggcggagcatctggaggcccgaaaggccatgatgcagtggtggtcggattatctggatgtgtgccgcgaggggtatgtcgcgccgtacatttatgcgcggcagcatgaggcagcctga

SEQ ID NO: 461450 - DNA, 273 bp, Shigella boydii
atgactaccgttactgttcattgtccgcgctgtaattccgatgaagtttatcgacatggccgtagttgttcccggcatgagcgtttccgttgtcgctcatgtaaacgtgttttccagctcacttactcttatgaagccagaaaactcggcgttaaggagcagatcgttgaaatggcacataacggcgcagggggctgttataccgccagaacactgaaaatcggcattaataccgtcatacggacattaaaaagctctcgccccggcggataa

SEQ ID NO: 461451 - DNA, 252 bp, Shigella boydii
atgaaaaaaagaaattttagcgcagagtttaaacgcgaatccgctcaactggttgttgaccagaaatacacggtggcagatgccgccaaagctatggatgttggcctttccacaatgacaagatgggtcaaacaactgcgtgatgagcgtcagggcaaaacaccaaaagcctctccgataacaccagaacaaatcgaaatacgtaagctgaggaaaaagctacaacgcatggtgatgctgccaacttactga

SEQ ID NO: 461452 - DNA, 345 bp, Shigella boydii; identical to SEQ ID NO: 17687

SEQ ID NO: 461453 - DNA, 273 bp, Shigella boydii; identical to SEQ ID NO: 7046

SEQ ID NO: 461454 - DNA, 534 bp, Shigella boydii
atgaacgcaaaaatcagatacggcctgtcggctgccgttctggcgctgattgccgctggtgcgcctgcgcctgacattctcgaccagtttctggatgaaaaggaaggtaaccacaccacggcataccgtgatggcgcgggtatctggaccatctgccgcggtgccattctggtggatggtaaacctgtcgtcccgggcatgaagttgtcgaaggagaaatgcgaccaggttaacgccattgaacgtgataaggcgctggcatgggtggagaaaaacatcaaagtgccgctgaccgaacctcagaaatcggggatcgcgtcattctgtccgtacaacattggccccggtaagtgtttcccgtcgacgttttacagacggattaatgctggtgaccgcaggggagcatgcgaagcgattcgctggtggattaaggacggtggcagagactgccgtatccgctcaaataactgttacgggcaggtatcgcggcgtgaccaggagagcgcgctggcgtgctggggtatcgacaggtag

SEQ ID NO: 461455 - DNA, 657 bp, Shigella boydii
atgaaaaaaaacacagatgatggggctaaaatttacacaccacttaccctaaagctttatgactggtgggttttgggagtatcaaatcggcttgcatggggatgtcctacaaaggaacaccttcttccacactttctggaacatttaggtaacaaccatctggatattggtgttggaactgggttttaccttactcatgtacctgagagtagtctgatatctttaatggatttgaacgaagctagcctgaacgcggcatctaaaagggctggggaatcaaaaattaaacataaaattagccatgatgtttttgaaccttatcccgcggcgttacatggtcaatttgattccatttccatgttttaccttcttcactgcctgcctggaaatatatctacaaaaagctgtgtaatacgcaatgcggcgcaggccttaactgacgatggaactctatacggagccacaattcttggcgatggagttgtgcacaatagcttcggtcaaaaactgatgcgcatttacaatcagaaaggcatcttttcaaacacaaaagattccgaagaaggcttaacacatatactctcagagcatttcgagaatgttaaaaccaaggttcaaggtactgtagtaatgttttccgcttcagggaaaaaatag

SEQ ID NO: 461456 - DNA, 270 bp, Shigella boydii
atgctgccgcagcatagcgatattgaaatagcctggtatgcttcgatacagcaggagccgaatggctggaagaccgtcaccacacagttctacatccaggaattcagtgagcatattgcgccacttcaggatgctgtagatctggagatcgcaacggaggaagaaaactcgttgctggaagcctggaagaagtatcgggtgttgctgaaccgtgttgatacatcaactgcacctgatattgagtggccggaagaaccagacacaatgtaa

SEQ ID NO: 461457 - DNA, 492 bp, Shigella boydii
atgattaggcagaagattctacagcagctcctggagtggattgagtgcaatcttgagcaccctatttcaatcgaagatatcgcacagaaatctggctacagcagacgcaacatccagcttctgttccgaaatttcatgcatgtgcctttgggagaatacattcgcaaacgaaggctttgccgtgccgccattcttgtccggctcaccgcgaaatctatgcttgatattgcactctctttgcattttgattcacagcagtcattcagccgcgaatttaaaaagttattcggctgctctccccgtgaataccgccaccgtgattattgggatctcgcaaatatcttcccttcttttttaatacgtcaacagcaaaagacggagtgtagattagtcaattttcctgagacacctatttttggcaactcatttaaatatgacattgaagtgtcgaataaatcaccggatgaagaggtaatgctgccaacttactga

SEQ ID NO: 461458 - DNA, 870 bp, Shigella boydii
gtggaattttccgtattaagtaacaatctgaaaatgccgatgatgggatttggtgtttttcaggttaccgataaaaacgtgtgcaaacagtcagtgttgaacgctatccgcacaggttatcgactcatcgacactgcagcggtatacggtaatgaagatgccgtcggtgaagccgttcgtgaagctatatctgaaggtttatgtacccgagatgagttatttataacgtctaaattgtgggtgcaggatatgttgaatcaggatacggcagcagcaggtattgaagcatcattaaaaaaatcgggactagagtacttcgacctctatttattgcaccaggctatgcgcgattatttcagtgcgtggcgtgcactcgaagatgcctatgaagagggcaaattaaaagcaattggggtttccaatttctatcctcatgttctggcgaacttttgtgaaacggtaagagttaaaccgatggtcaaccaggtcgagttgcatccctattttgcccaaccagaggcgctggcaaccatgaagtattataacgtgcagcctgaagcatgggctccgttaggtggtggacgacataaaccctttgaaaataatctgcttcagagtattgcagatgcccatcaaaaatcgatttctcaagtcattctgcgttggaatattcaacggggagtggtcgttattccgaaatcgacacatcaacagcgtatcgaagaaaattttgctatctgggatttctcactgacagagaaagaaatggcacaaattagttcgcttgatttgggttatgttggggagtcggtaaaacattttaatcctgaatttgttcgtggttgtcttgctgtaaaaatacatgattga

SEQ ID NO: 461459 - DNA, 237 bp, Shigella boydii
atggcatttaccacgccgctggtaacactctcatttttaatcaccaccccggaggcatgggtacccgcattgggtgacgctcattatggtttcccttatttatccggtgctggtcgcttggtattgaaagatactctgatgctggctggtgctgtcatgataatggcagattcggcgcgggaaattcttaaacaacgcagtaatgaatccagttcaacgttaaaaactgaatattga

SEQ ID NO: 461460 - DNA, 741 bp, Shigella boydii
atgttagatcaagtatgccagcttgcacggaatgcaggcgatgccattatgcaggtctacgacgggacgaaaccgatggacgtcgtcagcaaagcggacaattctccggtaacggcagcggatattgccgcacacaccgttatcatggacggtttacgtacgctgacaccggatattccggtcctttctgaagaagatcctcccggttgggaagtccgtcagcactggcagcgttactggctggtagacccgctggatggtactaaagagtttattaaacgcaatggcgaattcaccgttaacattgcgctcattgaccatggcaaaccgattttaggtgtggtgtatgcgccggtaatgaacgtaatgtacagcgcggcagaaggcaaggcctggaaagaagagtgcggtgtgcgcaagcagattcaggtccgcgatgcgcgcccgccgctggtggttatcagccgttcccatgcagatgcggagctgaaagagtatctgcaacagcttggcgaacatcagaccacgtccatcggctcttcgctgaaattctgcctggtggcggaaggacaggcgcagctgtacccgcgcttcggaccaacgaatatttgggacaccgccgctggacatgctgtggccgcagctgccggagcgcacgttcacgactggcagggtaaaccgctggattacactccgcgcgagtcgttcctgaatcctgggttcagagtgtctatttactaa

SEQ ID NO: 461461 - DNA, 1278 bp, Shigella boydii
atgattaagtttagcgcaacgctcctggccacgctgattgccgccagtgtgaatgcagcgacggtcgatctgcgtatcatggaaaccactgatctgcatagcaacatgatggatttcgattattacaaagacaccgccacggaaaaattcggactggtacgtacggcaagcctgattaacgatgcccgcaatgaagtgaaaaacagcgtactggtcgataacggcgatttgattcaggggagtccgctggccgattacatgtcggcgaaaggattaaaagcaggtgatgttcatccggtttataaggcgctgaatacgctggattatacggtcggtacactcggcaatcatgaatttaactacggtctggattacctgaaaaatgcgctggcgggagcgaaattcccttatgtaaatgccaacgtcattgacgccagaaccaaacagccaatgtttacaccgtatttaattaaagataccgaagtggtcgataaagacggaaaaaaacagacgctgaagattggctatattggcgtcgtgccgccgcaaatcatgggctgggataaagctaatttatccggaaaagtgacggtgaatgatattaccgaaaccgtgcgcaaatacgtgcctgaaatgcgcgagaaaggtgccgatgtcgttgtcgttctggcgcattccgggctgtctgccgatccgtataaagtaatggcggaaaactcagtttattacctcagtgaaattccgggcgttaacgccattatgtttggccatgctcacgccgttttcccgggtaaagattttgctgatatcgaagaggctgatatcaccaaaggcacgctgaatggtgttccggcggtaatgccgggcatgtggggcgatcatcttggggtggtcgacttacaactcagtaatgacagcggtaaatggcaggtgacgcaggcgaaagcggaagcacggccgatttacgacatcgccaataaaaaatccctcgcggcggaagacagcaagctggtagaaacactcaaagccgatcacgatgccacacgccagttcgtcagcaagccaatcggtaaatctgccgacaatatgtatagctatctggcgctggtgcaggacgatccgaccgtgcaagtcgtgaacaacgcgcaaaaagcgtatgtcgaacattacattcagggcgatccggatctggcaaaactgccggtgctttcagctgccgcaccgtttaaagttggtggtcgcaaaaatgacccggcaagctatgtggaggtggaatga

SEQ ID NO: 461462 - DNA, 897 bp, Shigella boydii
atggacatttttatttcgaaaaagatgcgcaatttcattttattagcgcaaaccaataatattgcccgggcggcagaaaaaatccatatgacggcttcgccatttggtaaaagcattgccgcgctggaagaacaaattggctatacgctatttacccgcaaagataataatatcagcctcaataaagccggtcaggaactgtatcaaaaactgttcccggtttatcaacgactttctgcgattgataatgaaatccataactcagggcgtcgttcacgagaaattgtgattggcatagataatacttatccgacaattattttcgatcagttgattagtctcggagataagtatgaaggcgtgaccgcccagccagttgagttcagcgaaaacggcgttatcgataatctttttgaccgtcagttagattttattatctccccacagcatgtatctgcacgagttcaggaactggaaaacctgactatcagtgaattaccaccgctgcgattgggctttctcgtttctcgccgttatgaagagcgtcaagagcaagagctgcttcaggagctgccctggctacaaatgcgctttcaaaaccgggctaacttcgaagcaatgattgatgcgaatatgcgaccttgtgggatcaatcccaccattatttatcgtccctacagttttatggccaaaatcagcgccgtggagcgcggacattttctgacggtgatcccgcattttgcctggcgactggtgaatccggcaacgctgaaatattttgatgcgccgcacaggccgatgtatatgcaggaatatctttattcaatcagaaatcatcgttataccgccacgatgcttcagcatattgctgaagatcgtgacgggacaaaccattaa

SEQ ID NO: 461463 - DNA, 1182 bp, Shigella boydii
gtgagtttcgttgacctgcatttgagcgaagtggcgcaaatggtcaattacggtttcttcggcgacattgatgttgccgtcattgaagcatcggcactggcaccggatggtcgagtctggttaaccagcgggatcggtaatgcgccgacctggctgctgcgagcgaagaaagtgatcattgaacttaatcactatcacgatccgcgcgttgcagaactggcagatattgtgattcctggcgcgccaccgcggcgcaatagcgtgtcgatcttccatgcaatggatcgcgtcggtacccgctatgtgcaaatcgatccgaaaaagattgtcgccgtcgtagaaaccaacttgcccgacgccggtaatatgctggataagcaaaatcccatgtgccagcagattgccgataacgtggtcacgttcttattgcaggaaatggcgcatgggcgtattccgccggaatttctgccgctgcaaagtggcgtgggcaatatcaataatgcggtaatggcgcgtctgggggaaaacccggaaattcctccgttcatgatgtattcggaagtgctacaggaatcggtggtgcatttactggaaaccgacaaaatcagcggggccagcgcctccagcctgacaatctcggccgattccctgcgcaagatttacgacaatatggattactttgccagccgcattgtgttgcgtccgcaggagatttccaataacccggaaatcatccgtcgtctgggcgtcatcgctctgaacgtcggcctagagtttgatatttacgggcatgcaaattcaacgcacgtagccggggtcgatctgatgaacggcatcggcggcagcggtgattttgaacgcaacgcgtatctgtcgatctttatggctccgtcgattgctaaagaaggcaagatctcaaccgtcgtgccaatgtgcagccatgttgatcacagcgaacacagcgtcaaagtgatcatcaccgaacaagggatcgccgatctgcgcggtctttccccgcttcaacgcgcccgcactatcattgataattgtgcacatcctatgtatcgggattatctgcatcgctatctggaaaatgcgcccggcggacatattcaccacgatcttagccacgtcttcgacttacaccgtaatttaattgcaaccggctcgatgctgggttaa

SEQ ID NO: 461464 - DNA, 750 bp, Shigella boydii
atgaaaagacagctttttactcttagtattgtcggggtattttctttaaatacctttgcatcattccctccgggaaatgatgtgacaacaaaacctgacctttactacctgacaaacgataatgctattgacagtctggcattattaccgcctccaccacaaatcggaagtattgccttcctgaatgaccaggccatgtatgaaaaggggcgtttattgcgaaatactgaaagagggaagctggcagctgaggatgccaatctcagtagtggtggcgtggcaaatgtattttctgctgcttttggttctccgataacggctaaagattcaccagaattgcataaattactgacaaatatgattgaggatgccggagacttggcaacgcgttcagcaaaagaatattatatgcgtattcgaccttttgctttttatggtgtttctacgtgtaatacaaaagaacaggatacattatccagaaatggctcttatccatcaggtcatacatcgattggttgggcaacagcacttgtattgtccgaaataaatccggcacgccaggataccattctgaaacggggttatgaactgggggacagcagggttatttgcggttatcactggcaaagtgatgttgacgcagcacgtattgttggctctgctattgtagcaacactgcactcaaatcctgtgttccaggcacaattacaaaaagcgaaagatgaattcgctaacaatcagaaaaaataa

SEQ ID NO: 461465 - DNA, 222 bp, Shigella boydii
ttgacgggtaaagccctgtttatggtgctcaggagccagcgcccacctgccgggctaatccaccactccgatcgaggttcacagtactgcgcatacgattaccgggtcatacaggagcagtctggtctgaaaacatcaatgtcgcgtaaaggtcactgttacgacaacgctccgatggaaagcttctggggaacgctgaaaaatggtacagggacggagtaa

SEQ ID NO: 461466 - DNA, 663 bp, Shigella boydii
ttgccccattgtgctgatggtgcggcggcaaccacgggcgacaatgccgatgggaggactgctgtaaaatcggcaaagccatttcctgtaagtaaacgacaggtatgggaagcttataaacgagtaaaagccaaccgtggggcggcaggcattgacgggcagacactggccgggtttgacgagaatgttacagacaatctctacaaactgtggaacagaatggcttccggcagttatatgccgcaggcggtaaggcgtgtggacattcccaaagctgacggtggtgtacgtccgctcggtattccggccgtgtcggaccggatcgcccagatggtcgttaagcagatactcgagccggtactggaacccctgttccatgcagactcgtatggttatcgaccgggtaaatccgcacaccaggcgattgcgcaggcgaggaaacgctgctggaagtttgactgggtggtggaagtcgatattaaaggcttctttgatgatatcgatcatgacctgctactgaagacagtgcagcatcatactcaggcacgctgggtggtgatgtacattgagcgcaggctgaaggcaccggtgcaaatgccggatggagcaatgctggcacggggtcgaggaacgccgcagggcggcgtaatctcccccctgtga

SEQ ID NO: 461467 - DNA, 738 bp, Shigella boydii
gtggcgctgctcttcgctgctgacgcttgtctggtcgcctcatcttttgaagcagacgccgatgatgccgatgacgccgccgaactggcggacgatgcggcagccgtttttgaggattctgcgctggtttccgacgctttcgcgttcgtttcggatgtcttcgctgcggaagcagacctcgctgctgcgctggcctgttcagtggcttcgccagccttcgttgtggctgttgaagcagacgatgcggagctttctgccgattttccggcggcggtggcactggctgaggcctgcccggcacttgttgacgctgcactggcagacgacgcagccgctgtttttgagcctgccgcagctgaggcactctgttccgctgccgtttcagaagacctggcgtttgtctcagacgtttttgccgccttcgcagaatttgctgccgccgttgccgaggaagctgcgctgctggcgctcgaggctgcgttcgtttctgatgattttgccgcctcttttgaagccgacgcatcccgtgctgaagtggctgcttctgacgctttcgtggtcgcggtggatgcagaagtggctgctgattgttgtgacgctgccgcattcgtttctgacgttttcgccgcaccggcactggtagccgccgcgctttttgaggactctgcagcggcagcactttttaatgcttcagtggcctttgttgatgccgttcctgcgctggaagacgctgactga

SEQ ID NO: 461468 - DNA, 519 bp, Shigella boydii
atggaagacgcaagccttacaactaaaggtgttgtgaaacttagcagtgctgttgatagcaccagtgaatcgctggccgcaacgccaaaagcagttaaagcagccaatgacaatgcgaatagcagggtgccatctaaccgaaaagttaacggaaaagcattgactgcggatataacattaacgccgaaagatattggtactttaaattcagtaacgatgtctttctctggcggggctgggtggttcaaactggctacggttaccatgccacaagcgagttccatcgtttacatcgcattgattggtggcgctggttacaacgtcggttccccacatcaggcaggcatttcagaactggttctacgagcaggcaatggaaaccccaaaggaattaccggggctttgtggaagcgtacagccgtcggattaacgaatttcgcctggatcaacacatccggcgatacatatgatatttacgttgagattggcaattatgcggtaatgactccaacttattga

SEQ ID NO: 461469 - DNA, 1455 bp, Shigella boydii
atgaaaatacctgaagcagtaaatcatattaatgttcagaacaatattgatcttgttgatggaaaaataaatccgaacaaagatacaaaagcattacaaaaaaacatatcatgcgtaacaaactcatcctcttctggcataagtgaaaaacatttagatcactgtgctgatactgtgaaaagctttttaaggaagtctatagcagcgcaaagttatagtaaaatgttctctcaagggaccagtttcaaatcattaaatctttctattgaagcgccatctggagcacggtcatcatttcggtcacttgagcacctcgataaggtgtccagacactatctttctgaaataatacaaaaaactcatcctctttcttcggatgaacgtcacttgctctctattattattaattctgattttaacttcagacatcaaagtaacgctaacctgtcaaataatactcttaatattaagtcctttgataaaattaagtctgagaatatacaaacatataaaaacacattttctgaggatattgaagaaatagctaaccacgattttgttttttttggggttgaaatttccaatcatcaagaaacactcccactaaataaaacacatcatactgtggattttggtgctaatgcgtatatcattgatcatgactctccatatggatatatgacattaaccgaccactttgataatgctattccacctgttttttaccatgagcaccaatcatttttcttagataactttaaagaggttgtggatgaagttagcaggtatgtgcatggtaatcagggaaaaactgatgtgccaatatttaatactaaagatatgaggcttggaattgggttgcatcttattgattttataagaaagagtaaagatcaaagattccgagagttttgttataataaaaacattgatcctgttagtctggatagaattataaactttgtgtttcagcttgagtatcatataccaagaatgctaagcacagataacttcaaaaagataagactcagagatatatctttggaggatgccattaaagcatccaattatgaagaaattaacaataaggtgactgataaaaaaatggctcatcaagctcttgcttattctctaggcaatgcaaaatctgatatggcactttatttactatctaaatttaattttacaaaacaagatgtcgcagagatggagaaaatgaacaacaatatgtattgtgagctgtatgatgttgagtatttacttagtgaagatagtgccaactataaagtgctagaatattttattaataatggattggttgatgtaaacaaaagatttcaaaaagcaaatagtggggacactatgcttgacaatgcaatgaaaagcaaagattcaaaaacaattgattttttattaaaaaatggagcggtatcaggcaaacgatttgggaggtga

SEQ ID NO: 461470 - DNA, 339 bp, Shigella boydii
atggcgcatcggctactcattggtaaaggaatgatcaccttgaatctcaaacggatttttctcaccctcaccttacttcccttgttttctgttgccgctgatgattgcgcactctcagatccgacgctgaccgtacaggcgtataccgttaatcctcaaacagagcgggtgaaaatgtactggcaaaaagccaatggcgaagcgtggggaacgttacatgctctgctggcggatattaatagtcagggtcaggtgcagatggcgatgaacggcggcatctatgatgaaagctatgcgccgctcggtttgtacatcgaaaacggtcagcagaaggtgtaa

SEQ ID NO: 461471 - DNA, 951 bp, Shigella boydii
atgctgagcgcatttcaactggaaaataaccgactgacccggctggaagttgaagagtcacaaccccttgtaaatgcagtatggattgatcttgtcgaaccggacgacgacgagcgactgcgtgtacaatctgaacttggccagagcctggcaacccgcccggaactggaagacatcgaagcatcggcacgtttctttgaagacgacgacggcctgcatattcactccttcttcttctttgaagatgcggaagatcacgccggtaactccactgtggcatttaccatccgtgatggtcgtctgtttactctgcgtgagcgtgaactgcccgcttttcgtctgtatcgtatgcgtgcccgtagccagtcgatggtagacggtaacgcctacgagctgctgctggatctgttcgaaaccaaaatcgaacagttggcagatgaaattgaaaatatctatagcgacctggagcagttgagccgggtgattatggaagggcatcagggcgatgagtacgatgaggcgctctccacgctggcggaactggaagatatcggctggaaagtacgcctgtgtctgatggatacccagcgcgcgctcaacttcctggtacgtaaagcacgcttaccgggtggacaactggagcaggcgcgtgaaatcctgcgagatatcgaatccctgctgccgcataacgaatctctgttccagaaggtgaacttcctgatgcaggcggcgatgggttttatcaacatcgagcagaaccgcatcatcaaaatcttctcggtggtatccgtggtattcctgccgccgacgctcgttgcttccagctatggcatgaactttgagtttatgccagaactgaagtggagcttcggctaccctggcgcgattatctttatgatcctcgcgggcctggcaccgtatctgtactttaagcggaagaactggttgtaa

SEQ ID NO: 461472 - DNA, 276 bp, Shigella boydii; identical to SEQ ID NO: 458859

SEQ ID NO: 461473 - DNA, 495 bp, Shigella boydii
atgaacattacgctcgcccgcattgatgaccgcctgatccacggtcaggtcactaccgtctggtcgaaagtggctaacgcccagcgcattattatctgcaatgacgaagtttataacgatgaagttcgccggacattattgcgtcaggctgcgccaccgggaatgaaggttaacgtggtcaatattgaaaaagccgtcgctgtttatcacaacccgcaatatcaggacgaaaccgttttttatcttttcactcgcccacaggatgccttagcgatggttcaccaaggggtaaaaatagacaccctaaatattggcggcatggtctggcggcccggtaaaaaacagttaaccaaagcggtttcattagatgatgatgatattaacgcatttcatgagttaaataatcttggcgtcatactggatttacgcgtcgtagcgtcagatccctcaatcaatattatcgacaaaataaacgaacagttaatcgcaaattaa

SEQ ID NO: 461474 - DNA, 408 bp, Shigella boydii
atggtcaatgccattttttgcgcccacgtcaaattagcttgcgccatgctggaatcggttcagatggtgtacggcgacgccagggtcgaggcagttgaatttgtgcccggcgagaacgccggagacatcgtagcaaagctgggaaggttagtaagcattcacaatcaagatgagtggctgattgccgtggatttacagtgcggcagcccgtggaatgcggcagcgatgcttgcgatgcgcaatcctcgtctgcgggtaatcagcggcctttctctgccgctggcgctcgaactggttgataaccaggacagcatgaatgttgatgaagtgtgtgaacacctgacgcaaatcgcaaagcaaacctgcgttgtctggaaacaactggcaacggcagaggaggatttctga

SEQ ID NO: 461475 - DNA, 807 bp, Shigella boydii
atgcaaacgtggttaaatttgcaggataaaatcattattgtcaccggcggcgcatccggtattggtctggcgattgtagaggaattattagcacaaggcgcaaacgtacagatggtagatattcacggtggcgatggtcaatatgaaggtcataaaggctatcagttttggccgaccgatatttccagcgccaaagaggtaaatcatacggtagcggaaattatccagcgttttggtcgcatcgacggtctggtcaataacgccggggtcaatttcccgcgtctgctggtcgatgagaaagcgcctgccgggcagtatgaactcaacgaagctgcattcgaaaaaatggtcaatatcaaccagaaaggcgtttttctgatgtcgcaggcggtggcgcgacagatggtcaaacaacatgatggcgtgattgtgaatgtttcctcagaaagtggactggaaggctcagaaggccaaagctgttacgccgctaccaaagccgcgcttaatagcttcacgcgatcctggtcgaaagaattgggtaaacacggtatccgtgtggtcggtatcgcgccggggattctggaaaaaacaggactgcgcacgccggaatatgaagaagcgctggcgtggacgcgcaatatcaccgtcgagcagctgcgtgaaggctataccaaaaacgccattcctattgggcgcgccggaagattagcagaagtcgctgattttgtttgttatctgctgtctgaacgcgccagctatatcaccggagtaaccactaacattgcgggcggcaaaacgcgcggctaa

SEQ ID NO: 461476 - DNA, 507 bp, Shigella boydii
gtgcgggtattacttcgacctgttctggttccggaactcgggctggtggtccttaagccaggccgtgaatccatgccggtattccacaatacccgggtactggtggagccggaaccgaaaagcatgcgtaatctgccgtccggggtcgttcctgccgttcgccagccgctagtggaagacaaaacattgctgccgtttttcagtaacgcacgggtgattcgtgctgctggtggtgctggtgcattgtctgactggctgttgcgccatattaaatcctgccagtggccacacggcgattataatcacagcgaaaccgtcattcaccgttatggtaccggcgcaatggtgttgtgctggcactgcgacaaccagttgcgtgaccagacatccgaatcactcgagcaacttgctcatcaaaacctgtcagcatggatgattgacgtcatcggtcacgcaataagcgtaagcgtacagcctgaaccgtctggtcagaatctgacgaattag

SEQ ID NO: 461477 - DNA, 213 bp, Shigella boydii
atgctgaacacatgtaggttagcctcttacgtgccgaaaggcaaggagaagcaggctatgaagcagcaaaaggcgatgttaatcgcccttatcgtcatctgtttaaccgtcatagtgacggcactggtaacgaggaaagacctctgcgaggtacgaatccgaaccggccagacggaggtcgctgtcttcacagcttacgaacctgaggagtaa

SEQ ID NO: 461478 - DNA, 180 bp, Shigella boydii; identical to SEQ ID NO: 18953

SEQ ID NO: 461479 - DNA, 354 bp, Shigella boydii
atgccaccccaattcagggatggcgcgagtagagggcgagttattcaaaattgcacggcatcgctggaagcagagccgatagcgtggcgatatcgctacgtgaaaaaaggtgttatggactctcagggggagttgtgggttggtgactggaaatatgtaccgaaaaaagaggattgtaacgacaggccgaactatgaaattcaggccttattcactgccccaccagtcccggttacatcaaaagaactggttaaagctgtgcacttttatgaacaactaaaacgcgaaaatccaccagcatccggcaaccagattaatgggttaactatgtcggttaaacgaccagccaactga

SEQ ID NO: 461480 - DNA, 1305 bp, Shigella boydii
atgatccacgcctttattaaaaaagggtgttttcaggattcggtcagtttaatgattatttcacgaaaactcagcgaatcagaaaatgttgatgatgtttccgtaatgatgggtacgcccgccaataaagcgttattagataccacaggtttctggcatgacgattttaataacgccacgccgaacgatatttgcgtggcaattcgtagcgaagcggcggatgcggggatcgcgcaggcgattatgcagcagcttgaagaggcgctaaaacaactggcgcagggggcaggcagcagccagtccttgacgcaggtgcgtcgctgggacagtgcctgtcagaaattatccgatgccaatctggcgctgatttcagtggctggcgagtatgcggcggagctggcgaatcaggcgctggatcgcaacctcaacgtgatgatgttctccgataacgtcacgctggaagatgaaatccaacttaaaacccgcgcgcgagaaaaaggcttgctggtgatggggccggactgcggtacgtcgatgattgccggcacgccgctggcttttgctaacgtgatgccggaaggcaacattggcgtcattggcgcttccggtaccgggattcaggaactgtgttcgcagattgcgcaggcaggggagggaattactcacgcgattggtcttggcgagcgcgacctcagccgtgaagtaggcggcatcagtgcgctgacggcgctggaaatgctcagtgcagacgagaaaagcgaagtgctggcatttgtttcaaagccacctgccgaagctgtgcgtctgaaaattgttaatgccatgaaagcaaccggcaaaccgacggtggcgctgtttttaggttataccccggcggtggcccgcgacgagaatgtctggtttgcctcctcgctggatgaggccgcacgcctggcttgcctgctttcacgcgtcacggcgcgacgtaacgcaatagcgcctgtcagcagcggatttatttgcggtttgtataccagcggtacgctggctgccgaagcggcgggattacttgctggacaccttggcgtggaagccgacgatacccatcatcacggcatgatgctcgacgccgatggtcaccagattattgacctcggcgatgatttctacaccgtcgggcgtccccatccgatgatcgacccagccttacgcaaccagttaattgccgatctcggcgctaaaccacaagtgcgcgtattgctacttgatgtcgtgattggcttcggtgcgactgccgatcctgccgcctcgctggtaagcgcctag

SEQ ID NO: 461481 - DNA, 273 bp, Shigella boydii; identical to SEQ ID NO: 461110

SEQ ID NO: 461482 - DNA, 291 bp, Shigella boydii
atgtctacagctgcaagcgtccgtaaaacaccgcgagaacatcagattaacatccgggcaactgatgaggaacgagccgttattgattatgctgcgagcttggtcaataagaaccgtaccgatttcatcatggaactggcgtaccaggaagctaaaaacattatcttggatcaacgtttatttgtgctggataacgaacgttatgattcgtttattacgcaactggaagctcctgtgcagaatgcagaagggcgtgaacgtctgatggcggtaaagcctgaatggaaataa

SEQ ID NO: 461483 - DNA, 483 bp, Shigella boydii
atggaaataaatgtcaccgcgccagcattgttgacggatgagcatatacttcagccatttgactgtggaaatgaggtgctaagtaactggttacgtggtcgggctatgaaaaaccagatgctcaatgcttctcgcacgttcgttatttgcttggaggatactttacgtgttgtgggatactactcattagctactggttccgtcactcatgccgagcttggtcgcagtttgcggcataacatgcccaatcctgtccctgttgttctgttagggcgtctggctgttgatgtttgtacccaggggcatggtttcggtaaatggctactaagtgatgccattcaccgggttgtcaatctggctgatcaggttggcattaaggctgttatggtacatgcaattgatgatgacgccagagcattttatgagcgttttggttttgttcagtcagttgtggcacctaataccttgttttataaagtctga

SEQ ID NO: 461484 - DNA, 303 bp, Shigella boydii; identical to SEQ ID NO: 458125

SEQ ID NO: 461485 - DNA, 276 bp, Shigella boydii; identical to SEQ ID NO: 458859

SEQ ID NO: 461486 - DNA, 837 bp, Shigella boydii
atggaatatattgaaaacattactgcgtgtgatgatgttttttctgagtattgtttagatgatgaaaatatgagtatccagccagaacagataaatacgccgggaatatctgatttagatactggtattgatttgtctggcatatcttttattcagagtgaaattaataaaacatatggattaaaatacgctccagtagatggcgatggatattgtctgttaagagccatactggttttaaaagaacatgagtattcatgggcgctgggcggccataagacgcaaaagcaagtatacgaagagtttattaaaattgttgataaacaaacgatcgaggctcttgttgatacgtcattctataatctcagggaagatgtaaagacgttatttggcgttaatctacaatctgacaacaaaattcaggggcagggtggttttttatcatggagttttttgccttttaaaaaagaatttattgatagttgcttgaatgacaaaaaatgcatactgcatttacccgaatttatatttaatgataacaaggtacgccttgttttagacaccgacccagagcagagggttaatgaggtgaaaaatttcctcactgctctttcagatagcattttctcattatttattgttaatagtaatatggcatcaatctccttggggaatgaatccttttcaacagatgacgaccttgagtatggttatttaataaacactggcaatcattatgatgtttacctccctcctgaactttttgctcaggcttataagttaaaaaataaggaaatgaatgcgcaactcgactatttaaatcgttatgcaatttaa

SEQ ID NO: 461487 - DNA, 342 bp, Shigella boydii
atgcggttatacaatgaactcagacgtaaagtaaatgaagaggatactccatgtctggaatgtgaatcactagaaaaagaatttgaggaaatgcagaatgataatgttctatcattatttatgagaacattgcgtactaatgatacacaaatttattcagggtttcaggaggtattacatatactatacaatatgttcaaaatgttgatattgttagagtgtccttgccgggcagaggttcagagtctatcacagattttaaaggttattattggtatggctttatggaatatattgaaaacattactgcgtgtgatgatgttttttctgagtattgtttag

SEQ ID NO: 461488 - DNA, 276 bp, Shigella boydii; identical to SEQ ID NO: 458859

SEQ ID NO: 461489 - DNA, 1455 bp, Shigella boydii
atgaaaatacctgaagcagtaaatcatattaatgttcagaataatattgatcttgttaatggaaaaacgaatccgaataaagcaacaaaagcattacaaaaaaatatattacgcgtaacaaactcatcttcttctggcataagtgaaaaacatttagatcactgtgctaatactgtgaaaaactttttaaggaagtctatagcagcgcaaagttatagcaaaatgttttctcaagggaccagtttcaaatcactaaatctttctattgaagcgccatctggagcacggtcatcatttcggtcacttgagcatctcgataaggtgtccaggcactatatctctgagataatacaaaaagttcatcctctttcttcagacgaacgtcacttactttctattattattaattctaattttaacttcagacatcaaagtaactctaatctgtcaaataatattcttaatattaaatcctttgataaaattcagtctgaaaatatacaaacacataagaatacatactctgaggatattaaagaaatctctaaccacgattttgttttttttggggttgaaatttccaatcatcaagaaaaactcccactaaataaaacacatcatactgtagattttggcgccaatgcgtatatcattgatcatgactctccatatggatatatgacattaaccgatcactttgataatgctattccacctgttttttaccatgagcaccaatcatttttcttagataactttaaagaggttgtggatgaagttagcaggtatgtgcatggtaatcaggggaaaactgatgttccaatatttaacactaaagatatgaggcttggaattgggttgcatcttattgattttataagaaagagtaaagatcaaggattcagagagttttgttataacaaaaatattgatcctgttagtctggatagaattataaactttgtgtttcagcttgagtatcatataccaagaatgctaagtacagataacttcaaaaaaataaaactcagagacatatctttggaggatgcgattaaagcatctaattatgaagagattaacaataaagtgactgataaaaaaatggctcatcaggcccttgcttattctttaggcaataaaaaagctgatatagcactttatttactatctaaatttaattttacaaaacaagatgtcgcagagatggagaaaatgaacaacaatagatattgtaatctgtatgatgttgaatacttacttagtaaagatggtgccaactataaagtgctagaatattttatcaataatggattggttgatgtaaacaaaaaatttcaaaaagcaaatagtggggacactatgcttgacaatgcaatgaaaagcaaaaatccaaaaatgattgattttttattaaaaaatggagcaatattaggcaaacgatttgagatatga

SEQ ID NO: 461490 - DNA, 975 bp, Shigella boydii
atgacagacttaatccaacgccctcgtcgcctgcgcaaatctcctgcgctgcgcgctatgtttgaagagacaacacttagccttaacgacctggtgttgccgatctttgttgaagaagaaattgacgactacaaagccgttgaagccatgccaggcgtgatgcgcattccagagaaacatctggcacgcgaaattgaacgcatcgccaatgccggtattcgttccgtgatgactttcggcatctctcaccataccgatgaaaccggcagcgacgcctggcgggaagatggactggtggcgcgtatgtcgcgcatctgcaagcagactgtgccagaaatgatcgtcatgtcagacacttgtttctgtgaatacacttctcacggtcactgcggtgtgctgtgcgagcatggcgtcgacaacgacgcgactctggaaaatttaggcaagcaagccgtggttgcagctgctgcaggcgcagacttcatcgccccttccgccgcgatggacggccaggtacaggcgattcgtcaggcgctggacgctgcaggctttaaagatacggcgattatgtcgtattcgaccaagttcgcctcttccttttatggcccgttccgtgaagctgccggaagcgcattaaaaggcgaccgcaaaagctatcagatgaacccaatgaaccgtcgcgaggcgattcgtgagtcactgctggatgaagcccagggcgcagactgcctgatggttaaacctgctggagcgtacctcgacatcgtgcgtgagctgcgtgaacgtactgaattgccgattggcgcgtatcaggtgagcggtgagtacgcgatgattaagttcgccgcgctggcgggtgctatagatgaagagaaagtcgtgctcgaaagcttaggttcaattaagcgtgcgggtgcggatctgattttcagctactttgcgctggatttggctgagaagaagattctgcgttaa

SEQ ID NO: 461491 - DNA, 1179 bp, Shigella boydii
atgtgcgtcgcaacaagggagccccccggatgcgacgggcagactttgaaaatgttcgaccagcaacgtgatggcaatctatacaagatctggaaccggctatgttcgggaacatggtttccgccaccagtgctggaaaaacggatcccgaagtcgaatggcaaggaacgcattctggggatcccaacagtatccgatcgaattgctcagggagcgataaaacttttcatggaagaaaagcttgactcgattttccatgctgattcatatggttaccgaccaggcaaatcagctcatgacgctctgaaacaatgtgccatccggtgctggcgttatagctggatactggaagtggacatcagtgcgtttttcgaccatgtgaaacatgatctggtgctcaaagctctggaacaccacgggatgcctaaatgggtcatcctgtactgtcgacgctggatggaagcgccaatgcagagttgtgaaaatggagaattaataacccgaacacgaggcactccgcagggcggggtcattagtccgctacttgctaacttgttccttcactatgcatttgatttgtggatggaaagagaatatcggggggtaccgtttgagaggtacgctgacgatattgtagtacattgttcacgaatgagtgatgcaacaaggctaaagaacaggttatcggagcgcttctcggaagtcgggctggtcctgaatgcagggaaaacgaatatcgcctacattgacacgtttaaaaggagaaacgtcgcaacgagtttcacctttctcggatatgacttcaaagtgcgtacgctgaagaatttcaaaggcgaacggtaccgaaaatgcatgccgggtgcgtcaaatgcagcaatgcgcaaaataacagaaacaatcaagaagtggcgtatacatcgctcaacagctgagagtttgctggattttgcgaggcgctacaatgcgatagtgagaggctggatcgagtactacggaaagttctggtccagaaatttcaactatcgactgtggagtgcaatgcagtcacgtctgctcaagtggatgcagtctaaatacagactttcgaaccggaaggctcagcgaaagctgacgctggtaaggaaggagtatccgaagctatttgttcactggtatttactacgtgcatcaaatgagtga

SEQ ID NO: 461492 - DNA, 1329 bp, Shigella boydii
atgattggggccatttttgttttattagtggcctggttattcctgtcacaatggattcgcattaccgtttttgtggttgccatactgctatggctgaacgtacttaccctggcgggaccaagtttctccttgtggccagccggacaaccgacgaccactgtaacaacgacgggtggtaacgcagcggcaaccgttgcgacgacgggtggcgcaccggtagtgggtgatatgcccgcacaaactacaccgccaacaacggcgaaccttaacgcctggctgaataatttctataacgcggaggcgaaacgtaaatcgaccttcccgtcttcgctgcccgctgatgctcagccatttgaactactggtgattaacatctgttcgctttcctggtcggatatagaagccgccgggttgatgtcgcatccactgtggtcgcatttcgatattgagttcaagaactttaactccgccacctcctacagtggcccggcggcgatccgtttactgcgcgccagctgcgggcagacttcgcacactaatctgtatcaaccggcaaataacgactgctatctgtttgataacctttcgaaactgggctttacccagcacctgatgatggaacataacggccagttcggcggttttttgaaagaagttcgcgaaaatggcggcatgcagactgaattgatggatcaaacaaatctgccggttattttgctgggctttgatggttcgccggtttatgacgataccgccgtgcttaaccgctggctggacgttaccgaaaaagataaaaacagccgtagtgccacgttctacaacacgcttccactgcatgacggcaaccattatccgggggtcagcaaaacagcggattacaaagcgcgggcgcagaaattctttgatgaactggacgccttctttactgaactggagaaatcgggtcgtaaagtgatggtggtcgtggtgccggaacacggcggcgcgctgaagggcgacagaatgcaggtatctggcctacgtgatatccctagcccgtctatcacagacgtccccgttggggtgaaattcttcggcatgaaggcaccacatcagggggcaccgattgtcatcgaccaaccgagcagcttcctggctatctccgatctggtggttcgcgttcttgatggcaagattttcaccgaagacaatgttgactggaaaaaactcaccagtgggttgccacaaacagcaccggtctccgagaactcaaatgcagtagttattcaataccaggataaaccgtacgttcgcctgaacggcggcgactgggtgccttacccgcagtaa

SEQ ID NO: 461493 - DNA, 1080 bp, Shigella boydii
atgaaaatcaccatttccggtactggctatgtaggcttgtcaaacgggcttctaatcgcacaaaatcatgaggttgtggcattagatattttaccgtcacgcgttgctatgctgaatgatcggatatctcctattgttgataaggaaattcagcagtttttgcaatcagataaaatacactttaatgccacattagatacaaatgaagcctaccaggatgctgattatgtcatcatcgccactccaaccgactatgatcctaaaactaattattttaatacatccagtgtagaatcagtaattaaagacgtagtagagataaatccttatgcggttatggtcatcaaatccacggttcccgttggttttaccgcagcgatgcataagaaatatcgtactgaaaatattattttctcccccgaattcctccgtgaaggtaaagctctttacgataaccttcatccgtcacgtattgtcattggtgagcgttcggaacgcgcagaacgttttgcggcgttattacaggaaggcgcgattaagcaaaatatcccgaccctgttcaccgattcaaccgaagcagaagcgattaaactgtttgctaatacctatctggcgatgcgcgtagcatactttaatgaactggatagctatgcagaaagtttaggtctgaatactcgtcagattatcgaaggtgtttgtctcgatccgcgtattggcaaccattacaacaatccgtcgtttggttatggtggctattgtttgccgaaagataccaagcagttactggcgaactaccagtctgtgccgaataacctgatctcggcaattgtcgatgcaaaccgcacgcgtaaagattttattgccgatgccattttgtcacgcaaaccgcaagtggtgggtatttatcgtctgattatgaagagcggttcagataacttccgtgcgtcttccattcagggaattatgaaacgtatcaaggcgaaaggtgttgaagtaatcatctacgagccggtgatgaaagaagacacattcttcaactctcgtctggaacgcgatctcgccaccttcaaactgaggtag

SEQ ID NO: 461494 - DNA, 192 bp, Shigella boydii
atggttgctgtaaatcatataccacaccttgtacacacacaaacggcctttgtgtggcgttttctggcactgagtgccggagaatctcaaatcatccacgtaaccgcctggacggaacgcgaagcgcgtagccgttgcccgtccggttgtgttgctgtattcgctgcaaaaatccgccagggagtgaggtag

SEQ ID NO: 461495 - DNA, 306 bp, Shigella boydii
atggcaacggctaacaaaaacgcaaaatcacaactgacaactgtcagagtcccactagatgttatgcaagggatggaatccgttaagctggacggtgaaagcaatgccggatttatcgtaaccgccatgcgcggagaaatggcccgccgccaagcagaaggcagcggagaaaatccccttgtgtcgtcactggatgccctggctaaggtcgaacaaatcggcatcaaagcagccgaggagatcgggcaactcgtcaccgtcgcgcgtgaagaactccagcgacgcaaggtcaaagagcatgaatag

SEQ ID NO: 461496 - DNA, 324 bp, Shigella boydii
atgagaattatctctgagtcaggtttctacaaactaatagcccgcagccgcaaagcaacgacgcctggcacatttgctcatcgtttcagtaactgggtattcagaaatgtgataccaggtatcagaaaaacggggacttatggtatcccgtggggtgcattacaggatttttcccgccgtaaagagcaatatcaaataagtgccagcgagaaggggagggagctacaggcatgtaagcgcaaaaagcgtgagcaggaggaagaagaaaaaacgctgatacgtgaatatcagcctgagttttactttggtaaccgcattcagtga

SEQ ID NO: 461497 - DNA, 597 bp, Shigella boydii
atgacagacgacgagaagaagattcaaacgctggaacagcagctttcacaagcaagatcattacttagtcatacgatggatacactccaagaggaacggtacttagcatcgctcagaaaaaaccgcgtaacaggtggttattacatgatgagcagagcagcagaaaaaaacttaagagccttgcaaaccgcaaatccagcggcagcactggtatttagtgtgatccgtgaaaacatgcagattggaaccaatgccgtagccatcagtaacacagcgttctgcaagattattggtaaatcacgggctactgtgactagagcgatcaaacacttggctgatcataactacgttcagattgtgaaggtcggcacgacaaacacttacgtggtcaatgagcaagtagcgtttgcaggcagccgtggtcagcggaaagcagtattttcggcaactgttgttgctcatgaatgtgagcaagacgaaggttgggagcaggttaagaagctaaaagccatacctgtcatctgtgaggatgaaagacctgtcattggttgtgatgatcttccacctccagaccagcaagacctagagttgaactaa

SEQ ID NO: 461498 - DNA, 1044 bp, Shigella boydii
gtgaccaccggtttaggtaaacgtattgcctatctgctgattggtaaaatcggtaacaccacgctgggtctgggttacgttacggtattcctcgatctggtactggctccggcaacaccgtctaacaccgcgcgtgcgggcggcattgtgttaccgatcatcaacagcgtggcggtggctttggggtccgaaccggaaaaaagtccgcgtcgtgtcggacattacctgatgatgtccatttacatggtcaccaaaaccaccagctatatgttctttaccgcaatggcggggaacattctggcgctgaaaatgatcaacgatattctgcacctgcaaattagctggggtggatgggcgctggccgccggattgccgggcatcattatgctgcccggcaatccgctggtaatttacaccatgtatccaccagaaattaaaaaggtggataacaaaaccatcgctaaagcgggccttgccgaactgggaccgatgaaaatccgcgaaaaaatgctgctcggtgtctttgtgctggcgctactgggctggattttcagtaagtctctgggggttgatgaatccactgtggcaatcgttgttatggcgaccatgctgctgctgggtatcgttacctgggaagacgtggttaaaaataaaggcggctggaataccttaatctggtacggcggtattatcggattaagctccttattatcgaaagttaaattcttcgaatggttagctgaagtctttaaaaataacctggcatttgatggtcacggtaacgttgctttcttcgttattattttcctcagcattatcgtgcgttatttcttcgcttccggtagtgcctatatcgttgctatgttaccggtatttgccatgctggcgaacgtctccggcgcaccgttaatgttaaccgcgctggcactgttgttctccaactcctatggcggcatggttactcactatggcggcgcggcaggtccggtcatctttggcgtgggttataacgatattaaatcctggtggtcggtgcggtactga

SEQ ID NO: 461499 - DNA, 243 bp, Shigella boydii
atgttcgctttgattcaacgcggtcagatatacacggacagagctggataccccgtggtgattactcgcatcactgagcactcagtgttctttcgacggatggacggacgatccgggcgggtacgcattggtgagttaaactgcctgttcgaacatattgaccaccaggagtaccgcaaaattctcgcggacactgagcaggaaaagcacctgaaaaaattacgagccataaaaaggaagtaa

SEQ ID NO: 461500 - DNA, 945 bp, Shigella boydii
atgatcactattaccaaagggcgactgctgacaatcaagcagtggcgcgaaacatacggaccgggtagcaacgttgtactgccagcagaagaagcggaagaactggcacggattgcactggcatcattggaagcagatccagttaaacgagttaactcagatcagatgcaccgagtctgcttagaagctaatcgctatttagataaatatgacgcgatggcgaaagaggtaaataagttgcttggacgcatcgccccgccagcgccagtatttaacggcgaatacggtgacgcatatcagggcgctcgtgaagacctgtccatctggaaacggcgagcgcttgaagctgatgagcacgttcggcgactggagcaaatcaatgaccacatggtgaaagaggcgcagggagaatcacgcatgggcgagcctgtaatacgtgagccagcaccggtagtgcctgaagaagcaactccggaaaacgtagaaatgctctctggctatgtttcaacgtacaaattaaccgatagcgagcgcgatattgctgccgaaatatggaacgcctgccgcgccgccatgcttcagtccggaaactttcgggaaaacaagaattcgtcaaccaataattttcgggaaatcgcggaaacgtcaaccaactatccggcaattcctagtgaggtgttgtccgcaatcctgaaggttgccaggattcgtgccgatttcgatgattttgacggtgacaggcgaggtatcggtgattgtctggatgaggctgagcaagagcttatcgttaccattaacaaatatgccagtcagttggcagcagaacctatagcgcctaatgacgttcgagagcagacagccattccacaagttccggtaactccggatggttggataagctgtagtgagcgaatgccggacgacaggcaggaggtgaatcaatga

SEQ ID NO: 461501 - DNA, 699 bp, Shigella boydii
atgtctatgccattaagcaatgcccttcagagtcaaattattacagataatcacttccttcatcatccaaaagtcgacaataagttaacacgtgaatatgcacgcatggatacggaaaatatctatcttctgcctcttactcgtggaaataaccataattacgatggaaaaagcgttgtcgaaattagaaaacttaatattggcaaacagtcctggccatttaattatgcgacagatacatgcagagaattcaatggtattacaacaacaggacgtatgctctatcgaaacttgaaaatcacctcagctttagacgaaatatatggtggtatatgtaaaaaggcgcatgctgctacagagttagcagaaggtttacggctaaatttatttatgaagagccctttcgatcctgttgaggactatacagttcatgaaataacattaggccctggttgcaatgttcctggttatgccggaaccacgataggatatatttcaacccttccagcttctcaggcaaaaagatggaccaatgagcagccaagaattgatatctatattgatcagataataactgtctcaggggtggcaaattcttccggattcgcccttgccgcattacttaatgctaatattggaatgggaaatgacccaataattggtatagaagctggtgatgctgccaacttactgatttag

SEQ ID NO: 461502 - DNA, 327 bp, Shigella boydii
atgaaaagaaaccttccgttaattattttgttgtcttctctggttatgggctgtacgcaacataaaacagatatgccccgacagttggttaaggcattaccacaatatccggcctatgcagcggcaaattatataaagggacgggttgatgtgaggtttgatattggtgctgatggtactgtcacccgaattgagtttattcgttcagagccgcaccatctgtttgatgagcaggttgtaaaggcgatggcaaaatggcgatttgagaaggacaggccgtgtaaaggcgtgaagaaaacgtttatctttagtccttccgcaccctga

SEQ ID NO: 461503 - DNA, 225 bp, Shigella boydii
atgaagaaattactggtaaccgtaaagccttttcagggaacaattccgttccgtattttgcagcgtggtcgtgttcttgttgaaggttcgttcagtggtaaatgtacgcaattacactcccggacctttcaggtgaatgccacgaatgaagagctaaccgttgagtgtacgatgaatgccgctaaatgccgcatggtatccgctgcattacagccagtgtgttga

SEQ ID NO: 461504 - DNA, 486 bp, Shigella boydii
atgggatgtgtaactgcaccagaacctttatcctcatttcatcaggtcgctgaatttgtcagcggtgaagctgtacttgatgactggttaaagcagaaggggctaaaaaatcaggcaatcggagccacccggacttttgttgtatgcagaaaaggtacgcaacaaatagtcggtttttactcactggccactggtagtgtcaatcatacagaagctacaggtaaccttcggcgcaatatgccagaccccattcctgtaattatacttgcacgcctggctgtagatgtgtcatttcgaggaaaagggcttggcgcggatttacttcatgatgcagttcgtcgttgttacagggttgccgaaaatatcggtgtgcgtgcaattatggttcatgcgcttacggaaaacgcaaaacagttttatattcatcatggttttaagccatcaaaaactcaggtgcaaacattgtttcttaaactccctcaatag

SEQ ID NO: 461505 - DNA, 267 bp, Shigella boydii
atgaaatcaggtgttcagctcaatctcagagcaagagaatcacagcggatactcattgatgctgctgcagaaattcttcataagtcgcgtacagatttcattctggaaatggcctgtaaagctgctgaagatgttattctcgaccggcgggtgtttaattttaatgacaggcaatatgaagagttcattgaaatgcttgatgctccggttgcagatgatcctgccatcgaaaaattgctggcaaggaaacctcaatgggatgtgtaa

SEQ ID NO: 461506 - DNA, 303 bp, Shigella boydii
atgaaaaaaagaaattttagcgcagagtttaaacgcgaatccgctcaactggttgttgaccagaaatacacggtggcagatgccgccaaagctatggatgttggcctttccacaatgacaagatgggtcaaacaactgcgtgatgagcgtcagggcaaaacaccaaaagcctctccgataacaccagaacaaatcgaaatacgtaagctgaggaaaaagctacaacgcattgaaatggagaatgaaatattaaaaaaggctaccgcgctcttgatgtcagactccctgaactgttctcgataa

SEQ ID NO: 461507 - DNA, 1359 bp, Shigella boydii
atgaaaaatagaaatcgtatgatcgtgaactgtgttactgcttccctgatgtattattggagcttacctgcactggctgagcagtcgtcaagtgagataaagattgttcgcgatgaatacggcatgccgcatatttatgccaatgatacatggcacctattttatggctatgtagtagcacaagatcgcctttttcagatggaaatggcacgtcgcagtactcaagggactgtcgcggaagtgcttggcaaagattttgtgaaatttgataaagatatccgtcgtaactactggccggatgctatccgggcgcaaattgatgccctttccccagaggatatgtccattctgcaaggctacgctgatggaatgaatgcctggattgataaggtaaataccaatccagagacgctcttaccaaaacagtttaatacatttggctttactcctaagcgctgggaaccgtttgatgtcgcgatgatatttgtgggcaccatggcaaaccgcttctctgatagcactagcgaaattgataatctggcactgctaacggctttaaaagataaatatggtgtatcacaaggcatggcggtatttaatcagttgaaatggctggtaaacccatcagcgccaaccactattgccgtacaagagagtagctacccacttaaatttaatcagcaaaactcgcaaacagcagctctgttgccacgctacgatttacctgcaccaatgcttgaccgaccagcaaaaggggcggatggcgcactgctggcgttaacagcagggaagaaccgggaaactattgctgcacaatttgcacagggtggtgccaatggtctggcggggtatccaacgaccaccaatatgtgggtgatcggcaaaagcaaagcccaggatgcgaaagcaatcatggtaaatggtccgcagtttggctggtatgcgcctgcgtatacttatggtattggtctgcacggtgctggttatgatgtcactggcaatacaccatttgcctatcctgggctggtttttggtcataatggtgtgatttcctggggatcaacggcaggtttcggcgatgatgtcgatatttttgctgaacggctgtcggcagagaaaccaggctactacttacataattgtaagtgggtgaaaatgttaagccgtgaggaaaccattacggtgaaaaatggtcaggcagagacctttactgtctggcgtacggtgcatggcaacattctccaaactgaccagacgacacaaacggcttacgctaaatcccgcgcatgggatggtaaagaggtggcgtctttgctggcctggactcatcagatgaaggccaaaaattggcaggagtag

SEQ ID NO: 461508 - DNA, 1107 bp, Shigella boydii
ttgaatatctcctctgctttacgccaggttgttcacggcactcgctggcacgctaaacgcaagagctacaaagtgttgttctggcgcgagataaccccacttgctgttcctatcttcatggagaatgcctgtgtcctgttgatgggggttctgagcacttttctggtcagctggctgggaaaagatgcgatggccggcgtgggattggcggacagcttcaatatggtcattatggctttttttgctgctatcgatcttggtactactgtcgttgtggcatttagtctcggtaagcgggatcgacgacgagcgagggtggcgacgcggcagtcattggtgatcatgacgttgtttgccgtactgttggcaacgcttattcatcattttggcgaacaaattattgatttcgtcgcgggtgatgccacgacagaagttaaagcactggcgttgacttatctggagctgacggtactcagttatccagcagctgccatcactcttattggtagcggggcacttcgtggtgcagggaatacgaaaataccgctattgattaacggtagcctgaatattcttaatattattattagcggcatattgatttacggccttttctcttggccgggactgggatttgtcggggcagggctgggtttaaccatttctcgttatattggcgcagttgcaattttgtgggtgctggcgattggttttaatcctgcgctaaggatttcgttaaagagctattttaaaccgctgaattttagcattatctgggaagtcatggggattggtattcccgcgagtgtcgaatcagtgttatttaccagtggtcggttattaacccaaatgttcgttgccgggatggggaccagtgttattgccggaaattttatcgcgttttcaattgcggctcttatcaacttacccggaagtgcgctcggctctgcttctacgatcattacaggccgaaggttgggggtagggcagatagcgcaagcagagattcagttgcggcatgtgttctggctttccactcttggattaacggccatcgcctggctaacggctccctttgccggggttatggcatcgttttacacctag

SEQ ID NO: 461509 - DNA, 363 bp, Shigella boydii
atgactcaatttacgcaaaataccgccatgccttcttccctctggcaatactggcgcggcctttccggctggaacttctattttctggttaagttcggcctgttgtgggcgggatatcttaacttccatccgctcctcaatttggtgtttgccgcgtttctgctgatgcccattccgcgctacagcctgcatcgcttgcgccactggattgccctgccgatcggctttgctttgttctggcatgacacctggttgcctggcccggaaagcataatgagccagggttcgcaggtggcggggttcagtaccgattatttaatcgaccttgtcacacgctttattaactggcagatgattgggtaa

SEQ ID NO: 461510 - DNA, 192 bp, Shigella boydii
atgatgaccatcagcgatatcattgaaattattgtcgtttgcgcactgatatttttcccgctgggctatctggcgcggcactctttgcgacgcattcgcgacaccttacgtttgttctttgctaaacctcgttatgttaaaccggccgggacattacgccgcacggaaaaagccagggcaaccaaaaaatga

SEQ ID NO: 461511 - DNA, 1092 bp, Shigella boydii
ttgcttgaggaataccgttcactttttggtcttgccagtttgcgttttcagggtgaccaacatttgctggatattgccttctggtgcaacgaaaaaggggtcagcgcccgtcagcagcttagcgttcagcaacaaaatggtatctggacattagttcaaagcgaagaggcggagatccaaccacgcagcgacgaaaaacgcattctgagtaatgttgctgtactggaaggtgcgccgccgctatcggaacactggcaactgttcaacaataacgaagtcctgttcaatgaagcccgtaccgctcaggcggcgacggtggtcttttctttacagcaaaatgcgcaaatcgagccactggcccgcagcattcataccctgcgtcgccagcgcggtagtgcgatgaaaatcctcgtgcgggaaaataccgctagcctgcgcgccaccgatgaacgtttgttattggcctgcggtgcaaatatggttattccgtggaatgcgccactctcccgttgtctgacgatgatcgaaagcgtgcaagggcagaagtttagtcgctatgtgccggaagatatcactaccttgctgtcaatgacccagccgctcaaactgcgtggtttccagaagtgggatgtgttctgtaatgccgtcaacaacatgatgaataaccctctattacctgcccacggtaaaggcgttctggttgccctacgtccggtaccgggtatccgcgttgaacaagccctgacgctgtgtcgccctaaccgtaccggcgatatcatgaccattggcggtaatcggctggtgctgtttctctcattctgtcggattaacgatctggataccgcgttgaatcatattttcccattgcctactggcgacattttctcaaaccgtatggtctggtttgaagatgatcaaatcagtgccgagctggtgcagatgcgcctgcttgccccagaacaatggggcatgccgctgcctttaacgcaaagttctaaaccggtcatcaatgccgagcacgatggtcgccactggcgacgaataccagaacccatgcgactgttagatgatgctgtggagcgctcatcatga

SEQ ID NO: 461512 - DNA, 1416 bp, Shigella boydii
gtgataacagatgtctggaaatataggggcaaatccaccgagcggattgagcaagggctgtatcgtcacggggataaattgccgtcggtgcgcagcttaagtcaggagcacggcgtcagcatcagcaccgtgcagcaggcgtaccagacgctggagacgatgaagctcatcactccgcagccgcgttcgggttattttgtcgcacaacgtaaagcccagccgcctgtaccgccgatgacgcgtccggtgcagcgcccggtggaaattacccagtgggatcaggtgctggatatgctggaggcgcatagcgacaattccattgttccgttaagcaaaagcacgccggatgtcgaaacgcccagcctgaaaccactctggcgtgagctaagccgggtggtgcagcataatctacaaaccgtgctcggttatgacttgttagccggtcagcgagtgttgcgggagcagattgcccgccagatgctcgacagcggctcggtggtcaccgccgatgacatcatcatcaccagcggctgccataactcgatgtcgctggcgttaatggcggtgtgtaaaccgggcgatattgtcgcggtcgaatctccctgttattacggttcgatgcagatgctgcgaggcatgggcgtgaaagtgattgaaatcccaaccgatccagaaactggcatcagcgttgaagcactggaactggcgctggaacagtggccgattaaaggcatcattctggtgccaaactgtaataatccgctgggatttattatgccggacgcacgcaaacgggccgttctctctctcgctcagcgtcatgatattgtgatttttgaagatgatgtctacggcgaactggcaacggagtatccgcgcccgcggaccatccattcatgggatatcgacgggcgagtgctgttgtgcagctcgttcagtaaaagtattgctccaggcctgcgcgtgggttgggtcgcaccggggcgttatcacgataaactgatgcatatgaaatacgccatcagcagctttaatgtgccgtccacgcaaatggcggcggcaacgtttgtgttggaaggccactatcatcgccatatccggcggatgcggcagacttatcagcgcaatctggcgctttatacctgctggatacgggaatattttccctacgaaatctgtattacgcgcccgaaaggcggatttttactgtggatcgaattgcctgaacaggtcgatatggtctgcgtcgcgcggcagctgtaccgcatgaaaatccaggtggcggcaggctcgattttctcggcttccggcaaataccgtaattgtctgcgcatcaactgcgctttgccgctcagcgaaacctatcgcgaagcactaaagcaaattggcgatgccgtgtatcgggcaatggaataa

SEQ ID NO: 461513 - DNA, 222 bp, Shigella boydii
atggagtttgatatacagatcaaccagattgtcccttctatgggctatcgcacgctttatatcgaagcgaatcagcctggcaacgtgattgcggcaaaaagtgacgctgaagggatactggaaaatgctttctggcaaattgcgctcaatgaggatggttctctgcaactggtagataaagacagcggtgtgcgctatgaccgagtattgcaaattgggtaa

SEQ ID NO: 461514 - DNA, 282 bp, Shigella boydii
atgactgaatccgaaatactgcgattaatccgccgtgcttgtggaatcagcaagcagcatgacgaacaggccacgcagccggacagcgtgaccgcagataattatgtgcgtgtagtggctgaggtgatgcgccgtgacggtattgagcttaacggcgtggatatgcgcaacatacgaacaagagtccttgagttgctggcatatcgtcgccgttctcaacaacggagggagagcgcgaaaaatacttaccagtggaagaagccggaacgattgcggcggtaa

SEQ ID NO: 461515 - DNA, 1227 bp, Shigella boydii
atgaataaatatcaggcagttattattggttttggcaaggctggaaaaacattagccgtcacgctggcaaaagcaggttggcgagtggctctcatcgaacaatcaaatgcaatgtatggcgggacctgtattaatatcggctgcatcccaactaaaacattggttcatgacgcacagcagcacacagattttgtccgtgccatacagcgtaaaaatgaagtggttaattttttacgtaataagaattttcataatcttgcggatatgcctaatatcgacgtgatcgacggccaggcggagtttatcaataatcatagcctgcgtgttcatcggcctgagggaaatctggagattcatggcgagaaaatttttattaataccggtgcacaaaccgtggttccgccaattcctggaattaccaccacgccaggagtatatgacagcaccggattatttaatctaaaagaattgcctgggcatttaggtattttgggcggcggatatattggcgttgagttcgcctctatgttcgctaattttggcagcaaggtaaccattttagaagcagcttcgctgtttttgcctcgggaagatcgggatattgctgataatatcgcgacgattttacgcgatcagggcgtcgatattatcctcaatgcccatgtggagcgaatcagtcaccatgaaaatcaagtgcaagtgcatagcgagcacgcccaactggcggtggatgcactgttaatagcttccggtcgtcaaccggctaccgcttcgttacatccagaaaatgccggtatcgcagtaaacgagcgcggggcaattgtcgttgacaagcgattacataccaccgcagacaatatttgggcgatgggagatgttaccggcgggctgcaatttacttacatatcactggatgattaccgcattgtacgtgatgagttactgggtgaaggcaaacgtagtactgatgatcggaaaaatgtgccttattccgtatttatgacaccgcccctgtccagggttggtatgacagaagaacaagccagagagagtggtgctgatattcaggtggtgatattgcctgtagctgcaattccgcgtgccagagtgatgaacgatacccgtggggtattaaaagcgattgttgataataaaacccaacgtatattaggggcatcactgctgtgtgttgactcccacgagatgattaatatagtaaaatggtga

SEQ ID NO: 461516 - DNA, 1338 bp, Shigella boydii
ttgggattattaaaagagaaagatgataaagcctatggcgctttttctggcttaattggctttatggcgatgcatcttggaacgaacttttatcttaaacagcacgacttattggtagctgctgaccaaatgtcgacacatgggcaaaccatcatactcgggatccagtcctacaataccagcgtgttgggtgggattgtggcagggttattagtcgccagcatgtataaaaagatcgttaacttacgtattcctgaatcattagggttttatagtggcccacgccttgtgcctatcattacactgattgtgatgagtggatttggtctgatcattccttttatctggccgccatttttcaatcttttcatgctcattggtcactggatttcaacttccggtcctgttggttatttcttctatgctgttgccgaacgcgtgacgataccttttggcttaaatcacttggtgacatcagttttccgctttaccccaatcggcggatcggcagtgattggcggtgaagagtattacggcaccctgaacatgtttatggcatacgtcaaagagaatgcggtcattccgctggatttggcggggaaaatggagcagggcaaactgatgattcagtatggtctggctggcgccgcgctggcgatgtatcgcactgctcatgctcaaaacagaagggctatcaaagcattgctgatttccggtgtgctcacggtaattattggcggcgtcagcgagccgattgaatttctgttcttatttgtcagcccgctgttgtttgtcttccatgcctttatgaatggattggctaacatggttctgccatatatgggcgtgaagatgggctttactggcgatctgattcaatttattaactttggtgtcttacgtggcacaagaacgggatggccattagcggtatgtgttgaagtggcttatttcttcatttattactttgtgttccgttggaccattctcaaatttaacctgatgactgtaggccgtgaagagtccagtcctgtcacgctgaacgctcacgaagaaactgcaatagctaacatcccagttcatgataaatcagagttgcaggcagcggagcaaatggttaaggctctgggtggtaaagaaaatattaaatcactggataattgtgtaactcgtttgcgtttaactatcgcggatatgggattgatagatgaggctgcaataaaaagggccggaggaattgcggttgtgaaacttgatcaaaataccttacaagtcattatcggtacaaaagtcatcgccctacgtcgggatatggataattacatggggatatgttga

SEQ ID NO: 461517 - DNA, 237 bp, Shigella boydii
atggatatttttaatacctcaatttctcgtaaaggaacatattgcacacaatgggacttttgtgaagacagatttggtgtaaaagatgtattaccattctctatttcagatatggatcttccgataccggaagctatcatcagaacattaaaaaaacgtctggaacacccgattttagggtacagtcgttggcagcatgatgactatctgggtaatgctgccaacttactgatttag

SEQ ID NO: 461518 - DNA, 369 bp, Shigella boydii
atgacgttggcatatagatcactgcgaataatccacctctaccactgcgactatcgcggcctgccgctgacgcttatcagccctgacggggcaacagaatggtgcgcagaatatgatgaatggggcaacctgctgaatgaagagaacccgcagcacctgcagcagcttatccgtctgccggggcagcagtatgatgaggagtacggcctgtattacaaccgccaccgctattatgacccgctgcaggggcggtatatcactcaggatccgattgggctggaaggcgggtggaatcagtatgtatatgcttccatacatccaacatattctattgatccgctgggtaatgctgccaacttactgatttag

SEQ ID NO: 461519 - DNA, 522 bp, Shigella boydii
ttgcagtggcttaataaaatgaaaaaaataattttctctaacgagagtgcagtctatgatgaacttatgattcatttcccatgccagccattacctcatatttcaaatgatattataggactggaggaactggatattgtatataattttttccaaaagaaacaatggaatgaaatagccaataatttaaaaataaaggataactcttatgctttagagttaggaattacattcctccctgagaaagtattctgctattacatccctctgtatatttatgtctcgttgtttaataagaatgatttttgggtttttgaatccgattttattcaacaatatttatgtcctgagtatcgggattacgatgattttttgaattttgtttttaatttttcagatatacaactatctattattgcacagtttatgtcttatgaatcagacgctggattcttttatgcaagtaaagcttgtatggatttttgggaagattattcacctctattacataagaaaatttaa

SEQ ID NO: 461520 - DNA, 1014 bp, Shigella boydii
atggctgtgctgatttttctgggctgtctgttgggtggtattgctatcggtttgcctattgcctgggcactgttgttgtgcggggcggcgttaatgttctggctggacatgtttgatgtccagatcatggcacaaacgctggtgaacggagccgatagcttctccctgctggcgattccgttctttgtgctggcgggtgaaatcatgaatgcgggcggcttgtcaaaacgcattgttgacctgccgatgaaactggtggggcataaaccaggcgggctgggctacgtcggcgtgctggcagctatgattatggcgagcctttctggttctgccgttgcggataccgccgccgttgccgctctactggtgccgatgatgcgcagcgccaactacccggtcaaccgggcggcggggctgattgcctctggcggcattatcgcgccaattattcccccttccattccgtttattatcttcggcgtttccagcggattatccatcagtaagctgtttatggcgggcattgcccctggcatgatgatgggcgcaacgctgatgcttacctggtggtggcaggccagtcgccttaatttaccccgccagcaaaaagcaacgatgcaggaaatctggcactcttttgtctccggtatctgggctctgtttctttcagtcatcattattggcgggtttcgctccggtctgtttacccctaccgaagccggggccgttgctgctttctatgcgctgtttgtcgccacagttatttaccgtgaaatggccttcgccacactttggcatgtactcattggcgcggcgaaaaccacctcagtggttatgtttctggtggcctcggcacaagtttccgcctggctgattaccattgctgaactgccgatgatggtttctgatttactgcaaccgttggtcgattcaccgcgtctgctgtttatcgtcattatggtggctatcctgattgtcggcatggtcggtaatgctgccaacttactgatttag

SEQ ID NO: 461521 - DNA, 303 bp, Shigella boydii
atggataacgcccacgttcaggtcacctttctggtggagaaactctcccccgcatggcaacgacgagtcgctctggttacccattccttaatcttatttatttgtggcgcactggcctggggcgcaacgctaaaaacaattcaggactggagcgattattcaccgatcctcggtttgcccatcggcctgatgtatgccgcttgtctgcccaccagcctcgttatcgcattctttgaactgcgtcatttatatcaactcatcacgcgtagcaattctctaacgtcgccaccgcaaggagcttaa

SEQ ID NO: 461522 - DNA, 759 bp, Shigella boydii
atgtccttcatgtcttcgttcttgctcggcagatttctgcatccaggcgtgttttcgttatgcgttttgctccctttactcgccagcgccaccacatcacatatctctttcagctacgccgcccgccagcggatgcaaaaccgtgcgcgtttattaaaacagtaccaaacccatctgaaaaaacaggccagctacattgtggaaggcaatgccgaaagcagaagggcgctacgccagcacaaccgggagcagataaaacagcatccagaatggtttcctgcgccgctcaaggcaagtgacagacgctggcaggcgttggtagaaaacaatcatttcctcagcagcaaccacctgcataatatcaccgaagtggcgattcaccgtctggagcaacagcttggcaagccttacgtctggggcggcacgcggcccgatcaaggcttcgactgtagcgggttggttttttatgcctacaacaagatccttgaggctaagctcccgcgcacggctaatgagatgtatcactaccatcgggcaaccattgtggcaaataacgacctgcgccggggagatttgctgtttttccatatccacagccgtgaaattgccgaccatatgggcgtgtatctgggagacggtcagtttattgagtcgccgcgcatgggggaaaccattcgggtaagtcggttagctgaacctttctggcaggatcattttttgggcgcgcggtggatattgacggaagagacgattttgtag

SEQ ID NO: 461523 - DNA, 222 bp, Shigella boydii
atgtctgaatatcgtcgttattacatcaaggggggaacctggtttttcacggtgaatttacgcaatcgtcgaagccaactcttgaccacccagtaccagatgctccgtaacgccattattaaacgttccattgggctgttatcccagcagtttccgcgccggctcatactctgtctgatctggtatcgccacaataactgccggaactgcctgctcgtataa

SEQ ID NO: 461524 - DNA, 624 bp, Shigella boydii
atgatgacgaccagaatagtggttggcctcacggcagggacgtgtctgattttctcgcaaaacctgatggccgaggtcagtgtattcaatccggcgcttctggaaatcgaccatcaatccggagtcgatattcgccagtttaatcgggcaaacctgatgcccccaggtgtttatagcgttgatatttttatcaacggtaaaatgtttgaacgtcaggatgtgacatttgttcagaataatccagatgctgatctgcacgcttgctttattgccattaaaaaaacactgtcctcctttggcataaaagttgatgcgctcaaatcgttcaatgatgtggatgagacggtttgcctcgatcctgctccacgtattgaaggctcatcctggcagtttgacagtgataaattgcagctgaatatatccattccccaaatctacatggacgcgatggcttatgattacatcagccccacgcgttgggatgaggggattaacgcgctcaccatcaactacgatttttctggttcacatacactacgttcagattatggttcacaagagacagataccagttatctcaatctgcgcaatggactgaatattggacgtaagcgtacagcctga

SEQ ID NO: 461525 - DNA, 201 bp, Shigella boydii
atggccatcaacgatgacatccatcacactgatatgaattgggttgggattctctgctatcagatttcgcccttcccggcgccatttcactttcggcgcagcatcttcgggaataaggcggatatttgctggtcgccagaacagcttgatacgcgtttttactgctatttccagcgagttcgtcgctttgttgctcgctga

SEQ ID NO: 461526 - DNA, 246 bp, Shigella boydii
atgtttaagccccgcctgctcaaaaagaaattaaaaaacgaaaataccagctatagccagattgtcacagagtgtcgtatgcgttacgccgtacagatgttattgatggataacaaaaatatcactcaggtggcgcaattatgtggctatagcagcacgtcgtactttatctctgtttttaaggcgttttacggcctgacaccgttgaattatctcgccaaacagcgacaaaaagtgatgtggtga

SEQ ID NO: 461527 - DNA, 600 bp, Shigella boydii
atgaaaccaacgtcggtgatcattatggatactcatcctatcatcagaatgtctattgaagttctgttgcaaaaaaacagtgaattgcagattgtcctgaaaacggatgattaccgcataaccatcgattatctccgaacccgtcctgttgatttaatcattatggatatagacttgcccggaacagacggttttaccttcctgaaaaggatcaaacaaatccagagcacagtgaaagtgttatttttatcatcgaaatcagaatgcttttatgctggcagagcgatacaagctggtgctaacggttttgtcagtaaatgcaatgatcagaatgatatttttcatgccgttcagatgatcctctccggatacacgttttttcccagcgaaacgcttaactatataaaaagcaataaatgtagtacgaatagttcaacggtcactgtgctatctaatcgtgaagtgaccatattacgttatctggttagcggattatctaataaagaaattgccgataagttattgcttagcaataaaacagttagtgcgcataaatctaatatttatggcaagggtaatgctgccaacttactgatttag

SEQ ID NO: 461528 - DNA, 381 bp, Shigella boydii; identical to SEQ ID NO: 458903

SEQ ID NO: 461529 - DNA, 381 bp, Shigella boydii; identical to SEQ ID NO: 458903

SEQ ID NO: 461530 - DNA, 213 bp, Shigella boydii
atgcttgaagatactacaattcataatgcaataactgataaagcgttagcaagttactttcgcagttcgggtaatttgttagaagaagagtcagcagtgttagggcaggctgtcaccaatttaatgtggatttgcccctatatttccagacatctgttatcacttaacccattacaagcccgctgccgcagatattcccgtggcgagcgataa

SEQ ID NO: 461531 - DNA, 237 bp, Shigella boydii
atgcatcaaaattcagtgactttagattctgcgggagcaatcactcgttactttgcaaaagctaactggcctactcagcaggaaactctcggggaaattgtgactgagattttgaaagatggacgtaatctgagtcgaaagtcgctttgtgccaaacttctttgccgactggaacacgcgactggggaagaggaacagaaacattataatgcactaattgggttgctttttgaataa

SEQ ID NO: 461532 - DNA, 1185 bp, Shigella boydii
atggtggggtttggtaataaatacattgccgctcaattcggcatttcgccgggtcttgctgcaaccgtcaatgcatcagtattaatcgctgcgttaattggcggtttattagcgaaccgagtaataaaccgctttgggcaaaagcgggcatttattattggcatggggctgtgcaccatcggtgttgcagcggtagctattgctcccagtatctggtgggtgctggtgtgccgcgtcatcatgggctttggtttaggcatcgacttccctttggcaaccaatgccgtggcagagcttcgtggttcaacgtcgaagaaaaccggaacgtcggtcaacctctggcaaatggcctggtatgtttcgacaaccgttgtttatttggtacttttgccgctgcttctgtcgggtatcgctgaagaacaattgtggcgttacggaatattcatcggagctatttttgcagtcatcttcatgattttgcgttacttctttattggtgaatccgcaatgtgggccgcacgcgtcgggcgttaccaggaagcgtgcgacattctgggaaaacgttatggtgttcaggctcgcgttgcggcatcgggtacaacagaagcgaaattctcggaaaaagcagagaataaatacagtggtggatatggcatcttatttaatgatcgttaccgcaaacgcaccattcttggctgtgtcgtggcaaccatgcaggcgtggcaatataacgccgtaggtgtttatcttcctcttacgttggcgggaataataagtggcgggcttactggcgcgttgaccggttctgccgtcgtgaatgccctttgtggggtgacaggcgggatgatcggctcgtttattctccaacgactgggtactcgccgacagtcgatgtatggatttgctgttgtgaccttagcattgctgtcgttaggcgcactggcaacgactaatccctggctgtctttagggttattgggatcaattattttcttccattcagcgggtcctggtgggctgggcatgaccattgccacactctcttatcttcccgctattcgccctactggggtcggatttgcccgcgctattatgcgcacaggggcaattgcaggactcattttctggccgatgctgtggggtgcgttgaaaactgaagcgttttactggttggcaatcgggtaa

SEQ ID NO: 461533 - DNA, 1209 bp, Shigella boydii
atgtcaattgactttaccccaggtataataaatacatatcacggcgatatttataactgcacaacaaataccgataatgttaaaacgccagacacaccgaagtggccttgtgataattgggaagaacaacaacccattaattccacattctctggagaaggatacaaccctgaacaatttgatttagcgcaacaacaactccaacaaattaatgcatgccacacgaacaccacatatacaaatgcagactactcaaaagttgtggttcaacttgtaagtcttattaataacattgaaacgataagttcgacaccacttacgcaacagacacaatcaatacttaatcagattaataacattagatatgaaaaaaacaaaagtgctgaatgtcgaatcattgttgtcgctaatcctaaacccgacaaggcaatcataactaaaattagcgtagaagagggaatacccataacattcagtgtccaaaccatgttttcagatactaattttattgctgaacaacgagctgacttaccaactaatataaaagatattcaaagcctgtatcaaaaaatgacgaagttatatattgagcacagtgaaaataaaaacaggatgaaagtctttgccggaaccaactttattgatttcaatatgacaggacagaacctttccgggttcgttctaaccttgtcaaggttttatttcgaagatctacttaatataaatttcactgacgcaaatttaggtgacactattttttacataaagaacaccctaccccccaaattatataaagatggacaatatcttgacaaacaaatcgaaggtttattttcaacattattaaccattaatgacaactttttacgagcaaaagcggaaattgcttcaacaataattaaatttttagaggccaggataaccaatctttcatacaatgacatattaaaatatcagcaagaattccaaaaacaatgttataagcaagttaaagcctctacgacactctctcgatacaataaaattcaaacatgggcagaaatgtctgaatatcagttcgaagtatttcaattcgagacgcttaacccaaaaaaaatgtcacacacgccttatttaaagaggccacttcctaatgaaaaagatataaattatggggtggaaatagaaataccatctggcaaaagaattcgcttatcaaatcattggtaa

SEQ ID NO: 461534 - DNA, 411 bp, Shigella boydii
atgactagtctaaaaactagtattaagactatcacttatttaagtgatactggttgtctggagattctgggggccagtctagtcctgaagcaaggcagatggaaaattatcgccaccatgttggcagtgacctggctgaatccgcatgtttacctggatacttttgttgtactgggcagccttggcgggcagcttgacgtcgaaccaaaacgttggtttgcgctcgggacaattagcgcctctttcctgtggttctttggtctggctattctcgcagcctggctggcaccgcgcctgcgcacggcaaaatcacagcgcattatcaatctggtagtgggatgtgtcatgtggtttatagccttgcagctggcgagagacggtattgctcatgcacaagccttgttcagttag

SEQ ID NO: 461535 - DNA, 741 bp, Shigella boydii
gtgaagttcaaagttatcgccctagcggcattaatgggtattagcgggatggcagcgcaggctaacgaattgccggatggaccgcatattgtcacctccggtacggcaagtgtggatgcggtgccagacattgccactcttgcgattgaagttaacgtggccgcgaaggatgccgctacagccaagaaacaggcagatgagcgcgtcgcacaatacatttccttccttgaactcaatcagatcgcgaaaaaagatatcagctcagcgaatttacgcacccagccagattatgattatcaggatggtaaaagtatcctgaaaggctaccgcgctgtgagaacggtggaagtcacgctccgtcagttagacaaactgaattccttgctggatggcgcgctgaaggcgggtcttaacgaaattcgttcagtgtcgctgggcgtggcgcagccggatgcctataaagacaaagcgcgtaaggcagcgattgataacgcgattcatcaggcgcaggaactggcgaacggctttcatcgtaaactggggccggtatatagcgtgcgctaccatgtttccaactatcagcccagcccaatggtgcggatgatgaaagccgatgccgcgccggtgtctgcccaggaaacttacgagcaggccgctattcagtttgatgatcaggtcgatgtggtcttccagttagaacctgtggatcaacaacccgctaaaacacctgcagcacaataa

SEQ ID NO: 461536 - DNA, 375 bp, Shigella boydii; identical to SEQ ID NO: 459802

SEQ ID NO: 461537 - DNA, 255 bp, Shigella boydii
atgttgaagataatacccggtgcaactggatactttaataaaacactcaattcaaatcaattcgataatgaagatgcaatcaaagataaattagataatagaggttcaatcaaaggtaaattaaataatatatatggtaaatctattgattatgcagcgctgcgtcatcgggatataattattgcaaaaatagatttgtttattcaacgaatcacgcataatttatggcatgcacgtaaaaaaatgtgtttttaa

SEQ ID NO: 461538 - DNA, 708 bp, Shigella boydii
atgtgggtcaataagtatattgacgattgcactgatgaggatttaaacgatcgtgactttattgcatcagttgttgaccgggctatttttcatttcgcgattaatagtatatgtaatcctggggataataaagatgcgactcccattgaacaatgtacttttgatgtagaaactaagaatggccttccctccacggttcagctattttatgaggaatctaaggataatgaacctttagcgaatatacattttcaagcaataggttctggttttttaacgtttgttaatacctgccaggaacatgatgacaacagcttaaaattatttgcttcgctgttaatttcactttcatattctagtgcctacgcagatttatcagaaacagtgtatattaatgaaaataatgagagctacctgaaagctcagtttgaaaaattatctcaacgtgatatgaagaagtacctgggagagatgaagcgtctggctgatgggggagaaatgaattttgatggctatctggataagatgtcacatctggtgaatgaagggacgctcgatcctgatattttaagcaaaatgcgagatgctgcaccacaattaattagcttcgcgaagtcgtttgacccaacctcaaaggaagagattaaaatacttacagacacttctaaattaatttatgatttgttcggggttaaatcggagaaataa

SEQ ID NO: 461539 - DNA, 513 bp, Shigella boydii
atgttctggcgtacctggcgcggcgaacgcaactggctggagaatatgcacgggcatgattatgagcatcatcatcacgatcacgaacatcaccacgaccatggacatcatcaccatcacgaacatggcgagtatcaggatgcccatgcacgagcccatgccaatgacattaaacgacgctttgatggtagagaggtcaccaactggcaaattttgttatttggcttaaccggtggccttatcccctgcccggcagcaattaccgtgctgttgatatgcattcagttgaaagccctgacactgggcgcaacactggtcgtcagtttcagcattggcctggcgttaacgcttgtcaccgtaggcgttggcgcagcaatcagcgttcagcaggtcgcaaaacgctggagcggatttaacactctcgctaaacgcgccccctatttttccagtctgttgattggcttagtcggtgtgtatatgggcgtacatggcttcatgggcataatgcgataa

SEQ ID NO: 461540 - DNA, 339 bp, Shigella boydii
atgaccattaaaaataagatgttgctgggtgcgcttttgctggttaccagtgccgcctgggccgcaccagccaccgcgggttcgaccaatacctcgggaatttctaagtatgagttaagcagtttcattgctgactttaagcatttcaaaccaggcgataccgtcccagagatgtaccgcaccgatgagtacaacattaagcagtggcagttacgtaacctgcccgcgcctgatgccgggacgcactggacctatatgggtggcgcgtacgtgttgatcagcgacaccgacggtaaaatcattaaagcctacgacggtgagattttttatcatcgctaa

SEQ ID NO: 461541 - DNA, 1128 bp, Shigella boydii
atgaacaacaataacacattgtacgtcgggttagatgttcacaaagaatcgattactgtcgcttatgctatcaattcagaacctgttgaactgatgggtaaaattggcacatcacctactgatattcagaatctttgtaaacgtctcaggtcaaagtcatcgcaggtcagtatcgtttatgaagcggggccctgtggttatggactttatcgtcggctggtgaaatccggttttgactgcatggtctgcgccccctcacttatcccgaaaaaaccgggggagcgggttaaaaccgatcgccgtgatgccatcagacttgtgcgttcactgcgtgcaggagatctttctgctgtctacgtacccggtattgaagatgaggcattccgggatttggcccgggcatgggcatctgcccgcgatgatttacggcatgcaaggcaacgtctgaaatcgtttcttctggttcatggggtccattatgtcgggcgagcagattggggccctgcacaccgacgctggctcagcaaatactcattcgaaagtccctggcgacaattagcttttgacgaacaccgtcgtacaatagaagaccggcaggcacaatgtgaacggctggaatccgccctgaaggaggccgttaccgaatggaggctgtatccggtagtagaggcgctgcaagccatgcgagggattcagtttattactgcggttggattaatttctgaactgggtgatctgacccgttttgaacatccacgacaactgatgtcatggtttggtatcacgccatcagaatattcatcgggtggaagcagacatcagggcagcattaccaaagccggaaacagctatgccagaaagctattggtcgaggcagcgtggagttaccgtcatccggcacgcatcagtccggcaatacaaaaaaggcaggaaaatttaccccgccccgtcattgacagagcatgggatgctcaactcaggctttgtaagaggtatcgaaaacttcaggccaaaggaaagaatgtcaatattacaattgttgctgttgcacgtgagctggcgggttttatctgggatatgggccgaatagcaatgtctgtcgcacaacaaccacaatgtcacaaataa

SEQ ID NO: 461542 - DNA, 306 bp, Shigella boydii
ttgcgggaatttatcgacgaaaactccggtgaattttttgttcaggtctggggaaatggaaccaacttcgacaacacgattttgcgccgttcatacgaacggcaggggatcccctgcccgtggcgttactacaacgatcgcgatgtacgcacaatcgttgagctggggaaagccatagacttcgatgccagaacggctattccattcgaaggtgagcgccataatgcacttgatgacgctcgttaccaggcaaaatacgtttcagctatctggcaaaaactgatcccgagtcaggctgatttttaa

SEQ ID NO: 461543 - DNA, 204 bp, Shigella boydii; identical to SEQ ID NO: 3627

SEQ ID NO: 461544 - DNA, 585 bp, Shigella boydii; identical to SEQ ID NO: 460740

SEQ ID NO: 461545 - DNA, 912 bp, Shigella boydii
gtggcggctattggtcaggctggggaaaaccttgttcctctctctggcatgttgaatagccgtaaccacagcggcggtgcgggaactggcgcaattatgggttcgaaaaacctgaaagcgattgcggttgaagggacgaaaggggtcaacattgccgatcgtcaggagatgaagcgtctcaacgattacatgatgactgaacttattggtgcgaataacaaccatgtcgtgccaagtacgccgcaatcgtgggcagagtattcagatcccaagtcacgttggacagcacgtaaagggctgttttggggcgcggctgaaggtggtccgattgaaacgggggaaattccgccaggcaatcagaacacggtcggctttcgtacctataaatccgtttttgacttaggtccggcggcagagaaatacacagtaaaaatgagtggctgccactcttgcccgatccgttgtatgacccaaatgaatattcctcgggtgaaagagtttggcgtgcccagcacaggtggtaacacttgtgtagccaactttgtccataccaccatctttccgaacggtccgaaagattttgaagataaagacgatggccgtgtgattggtaacttggttggtctgaatttgttcgatgactacggcctatggtgtaactacgggcagttgcatcgcgactttacttattgttacagcaaaggggtgttcaagcgtgttctgcctgctgaagagtatgcggaaattcactgggatcaactggaagcgggtgacgttaatttcattaaagatttttactaccgtctggcgcatcgtgtgggtgagctgagtcacctggctgatggttcatatgccatcgcagaacgctggaatttgggtgaagtgaaccgccccgggaatcctggagactaa

SEQ ID NO: 461546 - DNA, 540 bp, Shigella boydii
ttgctgaaaccgcaacggacagacggcggtcatcggctgttcaacgatgccgatattgaccggatccgcgagatcaaacgctggatcgacaacggcgtgcaggtcagcaaagttaaaatgctgctcagtaatgaaaatgttgatgtgcagaacggctggcgcgatcagcaagaaacattactgacttacttgcaaagcggcaatctgcatagcctgcgaacgtggatcaaagagcgcggtcaggattaccccgcccagacgctcaccacgcatttgtttattcctctgcgtcgacggcttcagtgccaacaaccgactctccaggcgctgctggcgatcctcgacggcgtactgatcaactacatcgccatctgtctggcttcggcacgtaaaaaacagggtaaagatgcgctggtggttggctggaatattcacgataccacccgtctgtggctggagggctggattgccagtcaacaaggatggcgcattgatgtcctcgcccactcgctcaatgtaaggcagtatgactttccgtga

SEQ ID NO: 461547 - DNA, 489 bp, Shigella boydii
atgacaaaaaaatatgatattacctggcttttttcggaggacgacaaaaactggtatgaagaactgaagaatttcgccagcgacacaattaaaatagcttacaccggagacgggcgcgtggtgtgggtcggtaaggatgtgacaggcattgaaccccgtaacgccagtgttattgaagttcctgatattaccgccaaccgccgcattaccgcgccgggttactggttttaccgcaatgatgaatttgtctttgactacagactcaaagcggaagatgagcgtgatgcccttctggctcaggtcagagcccggacaggggaatgggaagaagacctgctgctggggttaatcagcgacgaagataaagaaaagctgaaagcctgtcgtatttacgcgaaatcgctgcaggcgatggatttcagcaccatcacagataaagccacatataacgccatcaactggccggagcgtcccgatgccgcagcttaa

SEQ ID NO: 461548 - DNA, 270 bp, Shigella boydii
atgtcagaaataaaatcgctggtcactgctgaggcagtgaaggaagtcctgcgctctgaagaagtccggagcgcactgaaacagcaacttcggcagaaccttgaggcgcgtcttgatgcagaagtggattcaattctggatgaactgctgggcgcaccgactgttccggagccggaaggcattgcggatgacagtgctgtttcagatggcgtcgggtctcagcctgacggtagtgaagggcctcagcctgacggcgaaatgatgatgtaa

SEQ ID NO: 461549 - DNA, 420 bp, Shigella boydii; identical to SEQ ID NO: 459063

SEQ ID NO: 461550 - DNA, 753 bp, Shigella boydii
atggcaacaccaaatccccttgagccggtaaaaggtgccggtaccactctgtgggtttacaacggcaagggtgatgcttatgcaaacccgttgtcagacgatgactggcagcgactggctaaggtgaaggatctgacgccgggcgagatgacggcagaatcctacgatgataactacctggatgatgaagacgcggactggaccgcgaccgggcaggggcagaaatctgcaggtgataccagttttacgctggcctggaaaccgggagaggaaggccagaaagggcttataggctggtttgaaagcggcgatgtccgggcctataaaatccgttttccgaatggcacggtggatgtgtttcgtggctgggtcagcagtatcggtaaggccgtgacggcgaaagaagtgatcacccgcacggtgaaagtcactaacgtgggtaaaccttctgtagcggaagaacgcagcaaaattacgccggtcagtgcgattaagatgacgccgacatccggtacggtggcaaaagggaaaacaaccaccctgacggtttcttttgagccggaaagtgcaaccgacaagacgttcagagcggtttccgccgatccgtcgaaagccaccattagtgtgaaagatatgacaattacggtaaacggcgtggcgacaggtaaggtgcagatccttgtggtgagcggaaatggtcagttcgccgcagtggctgaagtcaccgttactgaagcgggcgctgcagggtaa

SEQ ID NO: 461551 - DNA, 396 bp, Shigella boydii
atgaaacacactgacattcgtgccgcagtgctggatgcactcgagcagcatgaacacggggcgacgctgtttgatggtcgccccgttgtttttgacgaagaggattttcctgcgatcgcggtttatctgacggatgcagagtataccggtgaagagctggatgcagatacctggcgggccacgctgcatattgaggtgtttttaccggcacaggtaccggattcagagcttgatcagtggatggaaagccggatttacccggcgatgactgcgatcccggcactggcaggactgattaccacgatggttacgcagggctatgagtatcgtcgtgatgacgatatggcgttatggagttctgcagatctgacttattccattacatacgagatgtga

SEQ ID NO: 461552 - DNA, 456 bp, Shigella boydii
atgcgggcattctgctggttccgtgctgtcgtggtggttcagcgttcaccaccggagctgatggcacatacagtgacgcgagtggtgcctcggagaattcaacccgctggggtgtggacaagccgctgtataaggaccttatcggtcgaacaaaagcggcactggagaagaacccgaaaaatgtgctgtttgccgtggtgtggatgcagggggaatttgattttggcggtacgccggcaaatcatgccgcacagtttggtgcgctggttgataaattccgtgcagacctggcggatatggcaggccagtgcgtcggtggctctgctggcggtgttccctggatatgcggggacacgacgtatttctggaagcagaagaacgaatccacgtaccagacggtgtacggcagctataaaaataaaacggaaaagaatatccatttcgtaccgttcatga

SEQ ID NO: 461553 - DNA, 948 bp, Shigella boydii
atggctgaaagtactgtaacggcagacagcaaactgacaagtagtgatactcgtcgccgcatttgggcgattgtgggggcctcttcaggtaatctggtcgagtggttcgatttctatgtctactcgttctgttcactctacttcgcccacattttcttcccttccgggaacacgacgactcaactactacaaacagcaggtgtttttgctgcgggattcctgatgcgcccaataggcggttggctatttggccgcatagccgataaacatggtcgcaaaaaatcgatgctgttatcggtgtgtatgatgtgtttcggatcgctggttatcgcctgcctcccaggttatgaaactataggtacgtgggctccggcattattgcttctcgcgcgtttatttcagggattatccgttggcggagaatatggcaccagcgccacctatatgagtgaagttgccgttgaagggcgcaaaggtttttacgcatcatttcagtatgtgacgttgatcggcggacaactgctagccctactggttgtcgtggttttacaacacaccatggaagacgctgcactcagagagtggggatggcgtattcctttcgcgttaggagctgtgttagctgttgtggcgttgtggttacgtcgtcaattagatgaaacttcgcaacaagaaacgcgcgctttaaaagaagctggatctctgaaaggattatggcgcaatcgccgtgcattcatcatggttctcggttttaccgctgcgggctccctttgtttctataccttcaccacttatatgcagaagtatctggtaaatactgcggggatgcatgccaacgtggcgagtggcattatgactgccgcattgtttgtattcatgcttattcaaccactcattggcgcgctgtcggataagattggtgtaagcgtgcagcaagaaccgtattga

SEQ ID NO: 461554 - DNA, 948 bp, Shigella boydii
atgaaaaatgttctggtcaccgtccccagcttttcagcacgctgtgtttccgccagcaagttgctaagagagaataattttaatcttattattaagaataatgtggagcatctgcttaaatcagaatccactgcattacgagaatctatttgcgcggtcatcgccggaaaagattgttatcaggcggacacgctatcattgctgcctggtgtgaaaataatatcgagattcaggacggggatagataatattgatcttcgtgcagcacaacaatccggtattgtagtcaataatgcggttgggattaattcaaatgctgtcgcggaatttatcattggacttatcttcgcgagcatgagaaatattcccggcagctatcatgcgatgcaaaatggctactggggtgagtcgcatggctatgaattacaaggcaaacggattggcatggttggctacggcaatataggtaaaaccctggcaaaaaggttatccggttttgatgttgagcttttagcttatgacaaacaacccgattatcaggttgctgacaaagttggagttcagtttgtatcaattgaagatatctttatgcagtcgcatgtcatcattgttcttttgcctttttctcctgagctggagaacttcattagtcataaatatttgtcgatgatgcgcaatggtgctctaatcatcaatgccgcaaggggaaagttgctggatgagggcgctttactacaggtgattgaagaacgaaatgtgtttgcggcgctggatgtgtttagctctgaaccgttggcgcaatttagcccactgctacatgccaaaaatatcattacaacgccgcatattgcggccgccaccgttgagtcataccagcaaaccggtacacacgttgcccagtcgataattgattacttcgcaggaagggagataaaaaacgtgttgtga

SEQ ID NO: 461555 - DNA, 861 bp, Shigella boydii
ttgccagtacacctcagtttactggtgggctacatcgcctggctggcgaccgcttaccggatgagcttttcccgcgaaatcaatctgggcctggcgcaacatgagttcgaattgttctgtcagcctttgcttaatgcgcgcagccagcaatgtattggtgtagagattttgctgcgctggaacaatccgcgtcagggccggatttcaccggatgtgtttattcctatcgcggaagaacatcatttaattgtgccactgacccgctatgtgatggcagaaaccattcgtcagcgccatgttttcccgatgagtagtcagtttcatgttggcattaacgtcgcacccagccattttcgccgtggtgtgctgataaaagatctcaatcagtactggtttagcgctcacccgattcagcaactgatcctcgaaatcaccgaacgcgatgccttactggatgttgattatcggattgcccgcgagctacatcgtaaaaacgtcaaactggcgattgatgacttcggcaccggcaacagttcattttcctggcttgaaacattacgtcctgacgtgctgaaaattgataagtcatttaccgcagctataggttctgacgcggttaactcgacggtgaccgatatcatcatcgcgctggggcaaagactgaatattgaactggtggcggagggcgtggaaacgcaagaacaggcgaagtatttgcgccgtcatggcgtgcatattttgcaagggtatttgtacgcacagccgatgccgctacgtgattttcccaaatggctggcgggcagccaaccgccgcccgcccggcataatggacatatcacgcccattatgccgttacgttaa

SEQ ID NO: 461556 - DNA, 375 bp, Shigella boydii
atgacaaaagagctgacaggtaaagccctgtttatggcgctcaggagccagcgcccacttgccgggctaatccaccactctgatcgaggttcacagtactgcgcatacgattaccgggtcatacaggagcagtctggtctgaaaacatcaatgtcgcgtaaaggtcactgttacgacaacgctccgatggaaagcttctggggaacgctgaaaaatgagagcctgagccactatcgttttaataaccgggatgaagccatctcagtaatacgggaatacattgagattttctacaatcgtcagcgtcgtcactctcgtctggggaatatctccccggcagccttcagggaaaaatatcatcagatggctgcttaa

SEQ ID NO: 461557 - DNA, 1197 bp, Shigella boydii
atgaccgaatccagcgattacgaatccgtccaggtctttatcggcgttgatgtcggtaaagatacgcatcacgctgttgccattaatcgttcaggtaaacgcctgttcgataaagcattacccaacgacgaaaacaaactcaggtcgctaatatctgacctgaaacaacatggtcagatactgctggttgttgatcagccagctaccatcggtgcgttacctgtcgccgttgcccgctcagaaggagtccttgtcggatacctccctggactggccatgcgccgcatagccgacttacacgccggtgaagctaaaactgatgctcgtgacgctgccatcattgccgaagctgcccgtaccctgcctcacgcgctacgcacgctgaaactggctgacgagcaaatcgccgaactctccatgctctgcggcttcgatgatgatcttgccgcacagacaacgcaggccagcaaccgtatccgcggccttctgacccagatacatccggcactggagcgcgttctcggtccgagacttgagcacccggcggtactcgatcttctccagcgatatccctcaccagaaaaactcgcttcgctgggtgagaagaagctggcagcccagctctgcaaacttgcgcctcgtctgggtaaacgccttgcagcagacatagctcaggcactggccgaacaaaccgtcgtcgttcccggcacgaatgccgctgccgtagtactgccacgtctggcactccagctcatcacgctgcgtaagcaaagagacgaggtggcgcttgaggtagaacagcgagttcttgctcaccctctttacccggtcctgaccagtatgcccggagtcggtgtcaggaccgcagccagactcctcacggaggtcgcctgccgcgccttcgcctctgccgcacatctcgctgcttatgctggccttgcgccggtaactcggcgatccggctcgtcaatacgcggtgagcatccctcgcgacggggtaataaagctctcaaacgggcgttgttcctgtcggccttcgccgcgctcagggatccgctctccagggcttactacacccgcaaaatgagtcagggaaaacgacacaatcaggcgcttatcgccctggcgagacgacgctgcgacgttctgttcgccatgatgcgcgacgggactttttataccccgcaggggtcataa

SEQ ID NO: 461558 - DNA, 384 bp, Shigella boydii
atggcaacaaaagaagaaaatctgaatcgtcttcgtcaactggctggcctgccggggcgcgaggcggatatgtcggggagtgctgcggatattgctcaacgtgtgtctgagtgggaagaggagcttgctgtttccccggagggcattatgcactctgatgagagcggggctgatcaaaatcacacagacgatggtgagcagttgaacaacacggatgctacggatgatgttaaagcggtccgtgtgcggaaatgcctgcatgtgatggggtattgcccggagacaggccgtcccgttgaactgacgtaccggggcatgcgtgttatggtgccatcaccactggcgacagccatgatacagcacggaacggctgagcatgcgtga

SEQ ID NO: 461559 - DNA, 354 bp, Shigella boydii
atgcgtgattttcagaatgcctttgatgctgcccttgccggggtggacagcacgattgttgaagtgatggggctctgtgcgcagttcacctcgggagcacagcgtggaagcgaagttcagggggtttttgacgatccggagtcgctgggttttgccggtggcggggtccgtattgaaggaagcagcccgtcattatttgtgcggacggatacggtgcgtgccgtgcggcgtggtgacacgctgaccattaacggcgagatgttctgggtggatcgtatttctccggatgacgggggaagctgttatctctggctcaaccgtgggcaaccacccgctgttaaccggcgacgataa

SEQ ID NO: 461560 - DNA, 546 bp, Shigella boydii
atgttgcatttaaaaaatattactgcgggcaatccgaaaaccgtggaacaatatcagctgacaaaacaatatgatgtcacctggcttttttcggaagacggaaaaaactggtatgaagagctgaagaatttcgccagcgacacaattaaaataacttacaccggagacggtcgcgtggtgtgggtcggtaaggatgtgacaggcattgaaccccgtaacgccagtgttattgaagttcctgatattaccgccaaccgccgcattaccgcgccgggttactggttttaccgcaatgatgaatttgtctttgactacagactcaaagcggaagatgagcgtgatgcccttctggctcaggtcagtgcccggacaggggaatgggaagaagacctgctgctggggctaatcagcgacgaagaccgggaaaaactgaaagcgtaccgcatttacgcgaaatcgctgcaggcgatggatttcagtgtcatcactgataaaacctcatacaacgccattgaatggcccgtctctccggaaggttcttcctga

SEQ ID NO: 461561 - DNA, 477 bp, Shigella boydii
atgaaaggtgatgttaaaatcataaattatctcaataaactattgggaaatgagcttgtcgcaatcaatcagtattttctccatgcccggatgtttaaaaactggggcctgatgcgtctcaatgacgtcgaataccatgaatccatcgatgagatgaaacacgctgataaatatatcgagcgtattttgtttttagaaggaatccccaacttacaggatttaggcaaactggggattggtgaagatgtcgaggagatgctgcaatccgacctgcgattagaactggaaggcgcgaaggatctgcgtgaggctatcgcatatgccgacagcgttcatgactatgttagccgcgatatgatgatcgagctccttgctgatgaagaaggtcatatcgactggctcgaaactgaactggatctcatcggtaaaattggcctacaaaattacctgcaatcacaaattaaagttaaagattaa

SEQ ID NO: 461562 - DNA, 195 bp, Shigella boydii; identical to SEQ ID NO: 263930

SEQ ID NO: 461563 - DNA, 960 bp, Shigella boydii
atggataattttcttgctctgaccttaacgggtaaaaaaccggttatcaccgagcgagaaatcaacggcgttcgctggcgctggctgggcgatggtgtgctggaactgacgccattaacgccaccgcaaggcgcgctggtgatttctgcggggatccacggtaatgagacggcacctgtggaaatgctggacgcgttgcttggcgcgatatctcacggcgagatcccgttacgttggcggttgctggtgatcctcgggaatcctcctgcgctgaagcaagggaaacgttattgccatagcgatatgaatcgaatgtttggcggtcgttggcagctatttgctgaaagcggagaaacctgtcgggcgcgcgaactggaacagtgcctggaagatttttatgaccagggcaaagaatctgtgcgctggcaccttgatctacataccgcaattcgtggctccttgcatccgcagttcggtgtattaccgcaacgcgacattccctgggacgagaaatttctgacgtggctgggtgcggcggggctggaggcgctggtgttccatcaggaacctggtggtacgtttacccatttcagcgccagacattttggcgcgctggcctgtacgctggaacttggcaaagcgttgccctttgggcaaaacgatcttcgccagtttgcagtaactgccagcgcaattgctgcgctgctatctggtgagagtgtcggtatcgtgagaacaccgccgctccgttatcgggtggtttcgcaaattactcgccactcgccgtccttcgaaatgcatatggcaagtgacacgctgaattttatgccgtttgagaaaggaacattgctggcgcaggacggagaggaacgttttaccgtaacccatgatgtagagtatgtgttattccctaatccgttggtagcgttgggattacgcgcgggattaatgctcgggtga

SEQ ID NO: 461564 - DNA, 270 bp, Shigella boydii
atggcacaggttaatatgagtgtaagaatcgacgcagaactgaaggatgcttttatggccgctgcaaaaagcatggaccgtaatggctctcagttaatccgggattttatgcgccagaccgttgaacggcagcacaattcttggttccgtgaccaggttgcggcaggccgtcagcaactcgaatgcggtgatgtgcttccccatgacatggtcgaatcctctgctgctgcatggcgggatgaaatgagcaggaagattgctgataaatga

SEQ ID NO: 461565 - DNA, 150 bp, Shigella boydii
atggccgccattgaaccggacgaacggattggttattcagccagcagcctggcagggcagccgtataaaggccgcaacggtcgtgtggaaggaacatctggaccacacaaggtagcgtgtaacgttattttgtgtgaaaatctcttgtga

SEQ ID NO: 461566 - DNA, 486 bp, Shigella boydii
atgaaaataacatctaccattattcaaacaccttttccatttgagaataataattctcatgctggcatagtaacggagcccattctcggtaagttaataggtcaggggtcgacagcagaaatctttgaagatgtgaatgattcatctgctttgtataaaaagtatgatcttattggcaaccagtacaatgagattctggaaacggcttggcaagaatctgagctttttaatgctttttatggcgatgaagcatccgttgttatacagtatggcggagatgtgtacctccgaatgctgcgcgtgcctgggactccccttagtgacattgatacagctgatatccctgataatatagagagcctttatctacagttgatatgtaaattgaatgagttgagtataatccattacgatcttaatacaggtaatatgctgtatgataaagaaagtgaaagtttattcccaatagattttcgcaatatttag

SEQ ID NO: 461567 - DNA, 933 bp, Shigella boydii
gtgacgctgcgtgccattcagggatttgccgtcggcggcgaatggggaggcgcggcgttgctttccgttgaaagtgcaccaaaaaataaaaaagccttttacagtagcggtgtacaagttggctacggtgtaggtttactgctttcaactggactggtttcattgatcagtatgatgacgactgacgaacagtttttaagctggggctggcgcattcctttcctgtttagcatcgtactggtactgggagcattgtgggtgcgcaatggcatggaggagtccgcggaatttgaacaacagcaacattatcaagctgccgcgaaaaaacgcatcccggttatcgaagcgctgttacgacatcccggtgctttcctgaagattattgcgctacgactgtgcgaattgctgacgatgtacatcgttactgcctttgcacttaattattcaacccagaatatggggctaccgcgcgaacttttccttaatattggtttgctggtaggtggattaagctgcctgacaattccctgttttgcctggcttgccgatcgttttggtcgccgtagggtttatatcacaggtgcgttaatcggaacgttgagcgcatttcctttctttatggcgcttgaagcacaatctattttctggatagttttcttctccataatgctggcaaacattgcgcatgacatggtggtgtgtgtgcaacaaccgatgtttaccgaaatgtttggtgccagttatcgctatagtggcgctggagtcggttatcaggttgccagtgtggttggcggtggatttacaccttttattgccgctgcactcatcacttactttgccgggaactggcatagcgtcgccatttatttgctggctggatgcctgatttccgcaatgaccgctttgttgatgaaagacagtcaacgcgcttga

SEQ ID NO: 461568 - DNA, 195 bp, Shigella boydii
atgataggtcatatcacaaattctggtggcaataactctttgatgaaacatgatgtggttcaaggaaataatatagtagatcttgatttactacgtaatttcaatggggtgacaggtttaaacagagataactttatttatatcagtgatatatttttaaatataaaacaacggaacgaaaaaatcatgcaataa

SEQ ID NO: 461569 - DNA, 834 bp, Shigella boydii
atgttacgtgaagtctcaattagtaatgatactataagtgtaaaattctacagaaatgaaaaaatagaatgcgcttgtaatcttctgatggataaagatgcgcaggggtatatcgacctgtctgattttgatgtaacaaattgtcattttaaaggtgacgttatttctaaggtgtcttttttatcatcaaatctacaacatgtaactttcgaatgtaaagaaattgagaattgcaattttactaaggcaacagttgataatgttatatttaaatgtcgacgtttacacaatgtgatttttctcaaaacgagtggcgaatgtgttgattttagccaaaatattcttgatacagttgacttctcgcagagtcaacttggtcatagtaattttcgcgaatgtcagattagaaattcaaacttcgataattgttatctttacgcttcgcacttcaccagagcagagtttctgtctgccaaagaaatatcatttattaaatcgaatttgacagctgttatgtttgatcatgtgcgaatgtcgacagggaatgttaaagattgcattacagaacaattggaattaactattgattattcagatatatttgggaatgaagatctcgatggttatatcaataacattataaaaatgattgatacattgccagataatgcaatgatattgaaatccgttctgccagtaaaactggttatgcaattaaaaattcttaatattgttaataaaaactttattgagaatatgaagaaaacatttagccattgtccttatataaaagatccaattatacgcagttatatccattctggtgaagggtga

SEQ ID NO: 461570 - DNA, 1194 bp, Shigella boydii
gtgcttttgccgttacgcaccacgccttcagtagcggagcaagaggcgggcaagagtttttgctgcctgcgcattgataatcttgagtttatgagtcgtcattacggcttaatgatgcgcgttcactgtatccgctcaatttgccgtacgctgctgccgttgatgcaggaaaacgaaaagttgtatcaattgccgggtagtgaactgctgttagtgctgagcgggccggaaacggaagggcgactccagcatatggttaacatcctgaatagtcggcaaattcactggaacaataccgggctggatatgggctatggtgctgcctgggggcgttttgatggaaatcaggaaaccctgcaacccttgttggggcagttaagctggctggcggagcaatcctgcgcacatcatcatgtgctggcgctggatagcagagaggagatggtttccgggcagaccactaaacaggtgctattgctgaataccattcgcacggcgttagatcagggtgatttgctgctctacgcccagccaattcgcaacaaagagggtgaaggttatgatgagatcctcgcgcgactgaaatatgacggcggcattatgaccccggataagtttctgccccttattgctcagtttaaccttagcgcgcgttttgatttgcaagtgctggaatccttgttgaagtggctggcaacacacccttgcgacaaaaaaggaccgcgcttttcagtcaatttaatgccgctcacgctgctgcaaaagaatattgccgggcggattattcgtctgtttaagcgttatcacatctccccgcaggcggtcattcttgagatcaccgaggagcaggcgttttctaacgcagaaagcagcatgtacaacatcgagcagctgcataagtttggtttccggattgcgattgatgactttggcaccggctatgccaactacgaacggttaaagcgtttgcaggctgatatcatcaaaattgatggcgtctttgtgaaagatattgtcacgaacacgctggatgcgatgattgtgagatcaattaccgatctggcgaaagcgaagtcattgagtgtggtcgcggagtttgtcgagacgcaacagcagcaggcgctattgcataagctcggggtgcaatatctgcaagggtatttgattggtcgcccgcagccattagctgattaa

SEQ ID NO: 461571 - DNA, 603 bp, Shigella boydii
atgcaaatagtcatgtttgacaggcagtcaatatttattcatggaatgaaaatcagtttacagcagcgtattccaggggtgagtattcagggggccagtcaggcagacgagttatggcaaaagctggaaagttaccctgaagccttagttatgctcgatggcgatcaggatggtgagttttgctactggttgctgcaaaaaaccgtggtgcagtttcctgaggttaaggtgttaatcacggcgacggattgcaataaacggtggttacaggaagttatccattttaatgtgctggccattgtgcctcgtgattcaaccgtcgagacatttgcgttggcggtaaatagtgcggcgatggggatgatgtttctgcctggagactggcggacgacgccggaaaaggacattaaagatctcaaatcgttaagcgcccgccagcgggagattttaaccatgttagcggcgggcgagtcaaataaggagatcggcagagcgctgaatatcagtaccggaacggtaaaagcgcatctggaatccctgtatcgccgtctggaagtgaaaaatcgcacccaggcggcaatgatgttaaatatctcctcctga

SEQ ID NO: 461572 - DNA, 762 bp, Shigella boydii
atggggattattgcctgggcgttgaatacctggggcaccaacttccatcagatcattatggataccatctcaaccccactggcatcgttgggtagcgtggtgggctgggcctatgtgatctttgttccactgctctggttcttcggtattcatggcgcgctggcgctgaccgcactggacaacggcattatgacgccgtgggcgctggaaaatatcgcgacctatcagcaatatggttccgtcgaagcggcgctggcagccggtaagaccttccatatctgggccaagccgatgctggactcctttattttccttgggggcagtggtgcgactttaggcctgatcctggctatctttatcgcctctcgccgtgctgattatcgtcaggtggcaaaactggcgctgccgtccggcatcttccagattaacgaaccgattctgtttggtctgccaattatcatgaacccggtgatgtttatcccgtttgtactggtacaaccgattctggcggcaatcaccctcgcagcgtactacatgggcattattcctccggtgaccaatattgcaccgtggaccatgccaaccggtctgggagccttctttaacaccaacggtagcgtcgctgcattgctggtcgcactcttcaaccttgatatcgcaacgttaatttatctgccctttgttgtggtggctaacaaagcgcaaaacgcgattgataaagaagagagcgaagaagatatcgctaacgccctgaaattttaa

SEQ ID NO: 461573 - DNA, 252 bp, Shigella boydii
atgatggatctcgataacattcccgatacgcaaacagaagctgaagagctggaagaagtggtgatggggcttatcatcaactccggacaagcgcgcagcctggcgtatgcggcactgaaacaggcgaagcagggcgattttgccgcagcaaaagccatgatggatcagtcacggatggcattgaatgaagcgcatctggtacagacgaaactgattgaaggcgatgcgggcgaaggtaagatgaaagggtaa

SEQ ID NO: 461574 - DNA, 267 bp, Shigella boydii
atgcttacacaaactatattcccttgccttccacaaaaacaagaaaatatcatccttgaagtgtcaaatcctgtattattatcttctactgttactacagatggatatactgttttcaataaaaaagcagctatatacgaattacaaatacctgctaccaaccggacgaaaacgttgaaattcactgctacagaaatgcaatggttgacaaagataaatgaagtaggaattgttgaaaaacaaagccaacggcattctaatatctga

SEQ ID NO: 461575 - DNA, 537 bp, Shigella boydii
gtgatcgctgagatatttcagggaggctttgtagtcttccagcaacagttcaacaaagtccatttcgaagccgcgacgacacataatgcgcatcaccacgatgtcggtggcttcaccgccgagagtgaaggccggaacctgccagccgcgcagacgcagacgttcagagaggtcgtacagggtgtatcccggatcttcaccatctttcagtttgaagcaaaccgccgggatgccttcgtccgggcgacccgtacagatgaactcatacggccccagtttggcgatttcatccgccagataagcggcaacctggtaagaggcgttctgtactttggtgtagccttcacgaccgaggcgcaggaattcatagtactgtgcaattacctgacccgccgggcgggagaagttgatggcgaaagtaccaatttgaccacccaggtagtcaacgttgaacaccagttcctgcggcagcgcttcttcgtcacgccagataacccagccgcagcccagcggagccagaccgaatttatggcctga

SEQ ID NO: 461576 - DNA, 276 bp, Shigella boydii; identical to SEQ ID NO: 458859

SEQ ID NO: 461577 - DNA, 267 bp, Shigella boydii
atgagactccctgatttggaatcacttgagcatttcggagccagaggagcagtatcaggaagaccatttaatcccgaccttgccggtggtccaatagaaaatctgacgacagatggcgtaacaatcaacagggaaggtatcgctattgttgaaaaacacatagccagatttggtcatgaccctgtaaatgaagtgatgatcaatagactgaaagacattgagaaaggaaaaatccccccagaacaagtagatcttaacttctggtga

SEQ ID NO: 461578 - DNA, 360 bp, Shigella boydii
atggaaaaatacctgcacctgttaagtcggggagataaaattggcctgacattgattcgtctgagtattgcaattgtttttatgtggattgggttattaaagtttgtcccttacgaggcagacagcattacaccattcgtcgcaaacagtccactaatgtcgttcttttatgaacacccggaagactataaacagtatctgactcacgaaggcgaatacaaaccagaagcaagggcatggcaaacggccaataatatctatggtttttccaacggtcttggcgtcgtggaggtgattattgctctgctggttttggctaatcctgtcaatcgctggttaggtttattgggaggactgtga

SEQ ID NO: 461579 - DNA, 375 bp, Shigella boydii
atgacaaaagagctgacaggtaaagccctgtttatggcgctcaggagccagcgcccacctgccgggctaatccaccactctgatcgaggttcacagtactgcgcatacgattaccgggtcatacaggagcagtctggtctgaaaacatcaatgtcgcgtaaaggtcactgttacgacaacgctccgatggaaagcttctggggaacgctgaaaaatgagagcctgagccactatcgttttaataaccgggatgaagccatctcagtaatacgggaatacattgagattttctacaatcgtcagcgtcgtcactctcgtctggggaatatctccccggcagccttcagggaaaaatatcatcagatggctgcttaa

SEQ ID NO: 461580 - DNA, 468 bp, Shigella boydii
ttgttctataagttgctcagcaagctcattttcgctgttcttcatcgtgccgaaggctgcagccgtcagcagatggctggtcagttccatctggcagaccattttgacctgcgggtggagcgccgggttcccggcatgtgtctggcgggggaaggctgcatcgttctctggtgtatccggtgtgcgccagaacacaccatcgatggccagcagggtcaggccgcaccagtgcggatgcggcgtggcgttatgccagagctgcgctgttttcgtgaacacgcggcggacagcctcacttcccaggcgctggcgggcctgaataacggcactgggggcaacgaaggggcgattgcccggcagcatgatgtccaggcgattcacaatctggtgaagaggttctttacgctcaagcgccatgccaacaatacaccagaccatcatttcgaggggaagacggcgcttgcgtag

SEQ ID NO: 461581 - DNA, 420 bp, Shigella boydii
atggaacagaaagcattatctgcagaatcccgcagatcattttcaaatgagtttaaacttcaaatggttaaactggcttcacaaccaggagcctctgttgcccgtattgcccgggaacacgatatcaatgataacctgctgttcaaatggctcaggctctggcagaacgaagggcgcatatcgcggcgtcttccggtaacaacctcttctgacactggcgttgaattattacctgtggagataacgccggatgagccgaaagaaccggtggctgctcttactccgtctttatctactcagactacagttagtgccagctcctgcaaggtggagttccgtcacggtaacatgacgctggaaaatccttcaccagagctgctcacagtgttgatccgtgaactgaccgggaggggacgatga

SEQ ID NO: 461582 - DNA, 297 bp, Shigella boydii
atgaattcccagacaacaaaagatattccctgcttccgttcttatttgcctgatgccctgcgtttaagatttgaagataaactgaccatccgggccatcgctcagcgtctgggtctcagtcattccacaatacatacgctttttcagcgatttcttgcatccggtatcgcatggccattgcccgattcagtttcattcgctcaacttgacgccatcctttatgccaacagaaagaaggaattaacagagcctcaaatcagaggtaagcgtaaactgaccgccgtatgtagccattaa

SEQ ID NO: 461583 - DNA, 474 bp, Shigella boydii
atgaaaaaggtatttgcaaaatctcttctggtcgcagcgatgttttctgttgcaggctccgcattggcagtacaaaaggatattactgtaacggccaacgttgatgccgctctggatatgacacagaccgataacaccgcgttgccgaaagcagtagaaatgcaatatctgccggggcagggtctgcaatcttaccagttgatgaccaaaatctggtctaacgacgttaccaaagatgtaaaaatgcagttagtttccccggcgcaactggttcaaagcctggatgctagcaagattgttccgctgacagtaacctggggcggtgaagaaattaaagctgatgcggcaaccacttttaccgcaaccaaaatctttgcttccgatgcgttaactaacggttctctggctaaaaacctgatgtttgctcaaaccaccaaaggtgttctggagacaggcattagactggccccctga

SEQ ID NO: 461584 - DNA, 309 bp, Shigella boydii
atgcagttaacagttagcttaatttgggggattgttgttagtgttccacctcagcaacctattgctaagttagaagtaaatgctgcccaaaaattagttaatgcagggaatcaacgcttaaagattttaacgatcgcttattgtaaaaataatagcaaagaaaattgtaagatacagaccgtaaataaaaacatcttccctggtcaggaaagaaatcttgaaagcatatctggctacgacaaaatcgttgtcaaatataataactggatcaccaaagataatggcgagtttgaactggcggtccattaa

SEQ ID NO: 461585 - DNA, 720 bp, Shigella boydii
atgctcccctggctgggcgttttgttagtctcagtagtcggaggtgagtactggtggatagtcattatacccgttggcgcgcatatcagtttttcgctggggtacggccggccaaccagacatcctttaaccggtacatccgggctacgttgccgtaattccctcctgtttatccttctcatgcttggttttgtcgctggttatcagggttatttatataaacagctcaatcccggcgtcggtgtgcgcgaaaatattgatacctgggcctggcgacccgataaactcaataatcaactgacaccactgcgtggtaaaccgcaaattcagtttacgcaaaactggctgcgactcgatggtgctacggcggcgtacccaatttatgcctctgcattttatgctttaagcgttataccggaagattttcacaccagggaatatctggagagctctcgtacccccgatgcgtataacaggattgttaaaggtgatgctgatattatttttgtggcgcaaccttccggtgggcagaaaaaacgcgctgaggaatcgggcattactttgctgtacacgccttttgcccgtgaagcgtttgttttcatcgtcaatgcggataatccggttaattccctgactgaacaacaggtgcgtgacatcttcagtggtgcaattaccaactggcgtactgttggcggtaacgatcaggagatccagacctag

SEQ ID NO: 461586 - DNA, 225 bp, Shigella boydii
atgcatggggcggtcaaatatctcggctacgctgatgaacacagtgcagagcctgatcaggtgatccttatcgaagcggggcagtttgcggtgttccctccagaaaagtggcacaacattgaagccatgactgacgatacttatttcaacattgacttcttcgtggctcctgaagtcctgatggaaggtgcgcaacaacggaaagtcattcataacgggaaatga

SEQ ID NO: 461587 - DNA, 183 bp, Shigella boydii
atgggcaaagcaacgtataccgtgaccgtcaccaataacagtaatggcgtttctgtcgattatgaaacagagacgccgatgactttgctggtgccagaagtggcggctgaagtgataaaagatctggtgaataccgtgcgttcttatgacacggaaaacgaacatgatgtttgtggttggtaa

SEQ ID NO: 461588 - DNA, 249 bp, Shigella boydii
atgggcattctgtcatggattatttttgggcttattgccggtattctggcgaagtggatcatgccaggtaaagatggtggtggattctttatgactatcctgctggggatagtcggtgccgtagtcggcggatggatcagcacgctgtttggctttggtaaagtcgatggcttcaattttggcagcttcgtggttgccgttattggtgcgattgtcgtgctatttatctacaggaagattaaaagttaa

SEQ ID NO: 461589 - DNA, 432 bp, Shigella boydii
atgatgaatgatttagactatccatttgaagcaccgctcaaggaatcatttattgaaagtataatccaaatagaatttaattctaattcaactaattgcctggagaagttatgtaatgaagttagtattctttttaagaatcaacctgattatcttacttttttaagagcaatggatggattcgaagttaatggattacgattatttagcctctcgattccagaaccttcagttaaaaacctttttgccgtaaatgaattttatagaaataatgatgatttcataaaccctgatctacaagaacggttagtgatcggggatgatagcatttcaatatttacttatgacattaaaagtaacttttttgaaattagagataatattggcacagaaaatatattcagttcgttggtaatgactcccacttactga

SEQ ID NO: 461590 - DNA, 555 bp, Shigella boydii
atgaaatatacaccggttggcgttgatatcgcaaaacatgtcattcagattcacttcatcaatgagcacacaggtgaagtggttgataaacagttgcgtagacaggattttctgacgttcttcggcaaccgtgagccatgcctgattggtatggaggcctgtggaggttctcagcactgggcacgggaactgacaaaacttggtcataaagtccggttgttgcaggcccgcttcgttaaggcattcgtcatgggcaataagaatgatgtgatggatgcccgggctatctggatggcggttcagcagccgggtaaagaaatcgccgtaaaaacagaagaacagcagtcggtactggttctgcaccgtacccgcatgcaactggtgaagttccggaccgcacaaattaatgccctgcacgggacgttactggagtttggtgaaaccatccataaaggccgggcagcgatggagcgggagttccccgaagcactggaacggatgaaagagatactgccaccgtatctcattatggttctggaaaaccagtacaactga

SEQ ID NO: 461591 - DNA, 330 bp, Shigella boydii
atgggggaagcatcagcgtttaaatcggggcgagagttcgccgcatatgttggtctggttccaaaacaaactggctccggagggaaagtacgtctgctggggataagcaaacgtggtgacacttatctcaggacattatttatccacggtgcaagagcggtggcattagtagctaaagagcctggcccgtggataaccgaactgaaaaaacgtcgtccagccagtgtggcaatcgtcgccatggcaaacaagctggcacgaacagtatgggcgataaccgcccatgaccgtaagtatgacaggaaccacgtcagtatcagaccatattaa

SEQ ID NO: 461592 - DNA, 381 bp, Shigella boydii; identical to SEQ ID NO: 458155

SEQ ID NO: 461593 - DNA, 375 bp, Shigella boydii; identical to SEQ ID NO: 460058

SEQ ID NO: 461594 - DNA, 234 bp, Shigella boydii
gtgacggcggcagccacagccaccattatcatgatgaaaaaccagatggagccggaatacacgccgctgcgtaaaattcacctgtaccactgcgaccaccggggactgccgctggcgctgatacgcagtgacggccgaaccggatggcgtgtagagtatgacgaatggggcaacctgctgagtgaggataacccgcacagggaaagatcatcagaagttcactttttgtactaa

SEQ ID NO: 461595 - DNA, 381 bp, Shigella boydii; identical to SEQ ID NO: 458155

SEQ ID NO: 461596 - DNA, 546 bp, Shigella boydii
atgttgcatttaaaaaatattactgcgggcaatccgaaaaccgtggaacaatatcagctgacaaaacaatatgatgtcacctggcttttttcggaagacggaaaaaactggtatgaagagctgaagaatttcgccagcgacacaattaaaataacttacaccggagacggtcgcgtggtgtgggtcggtaaggatgtgacaggcattgaaccccgtaacgccagtgttattgaagttcctgatattaccgccaaccgccgcattaccgcgccgggttactggttttaccgcaatgatgaatttgtctttgactacagactcaaagcggaagatgagcgtgatgcccttctggctcaggtcagtgcccggacaggggaatgggaagaagacctgctgctggggctaatcagcgacgaagaccgggaaaaactgaaagcgtaccgtatttacgcgaaatcgctgcaggcgatggatttcagcgccatcactgataaatcctcatacaacgccattgaatggcccgtctctccggaaggttcttcctga

SEQ ID NO: 461597 - DNA, 567 bp, Shigella boydii
atgctgccagagcagtgcttccggctgcgggtgatgcaccgtctggcgctcaccggtcagccggcctttctcatcatacctgtaatgcaccgtcacccggtgcccttcgctgagatggctgatgtctgtcagccagccacgtttgtcatactgccactgctctgcggtttcgccattcacggtgcggtgcgtgaggcggtctgcttcgtcatagtgccagtgggtgaccagcccctcatcctcgctgcggataagtttgccggtcaggtcgtggtgataacgctgtgtgcggccgtcaaagccggtttcctgtatcagccggtcgagtacatcgtaacggaaggtggtgtggctgccgttttcactggtcaggcggatgacccgtcctgcagcatcgtattccatactgcgcgtcagctcgccctgcgtggtacggatggcctttccccacgcatcgtactgtgtcccgtttctgctgccgtccggggcaatgacggcggtcaggtcaccggcggcgttgtattcataccgcgtttcatggccctgcgtgtctttcacggcaattaa

SEQ ID NO: 461598 - DNA, 330 bp, Shigella boydii
atgtctgcttttaaaaagtcacttcttgttgctggcgtagcaatgattctttccaataacgtatttgctgacgaaggtcacggcattgttaaatttaaaggtgaagttatctctgctccatgttcaattaaaccaggtgacgaagacttaactgtaaatctgggtgaagtagcagataccgttctgaaaagcgaccagaaatctttggctgagcctttcactattcacctgcaagactgcatgttgagccagggtggaaccacttattcaaaagcgaaggttactttcaccacagcgaatactatgacggtaatgactccaacttactga

SEQ ID NO: 461599 - DNA, 291 bp, Shigella boydii
atgattgacccgaaaaaaattgagcaaatcgctcgccaggttcacgaatcaatgcctaaaggaatcagggagttcggggaagatgtggagaaaaaaatccgccaaaccctacaagctcagctgacgcgcctcgaccttgtaagccgtgaagagttcgacgtccaaacgcaagtcctgttacggactcgtgagaaactggcgctgcttgaacaaagaatgagcgaactggaaaatcgcagtactgagattaaaaagcagccagatccagagactctccccccaacgctgtaa

SEQ ID NO: 461600 - DNA, 198 bp, Shigella boydii; identical to SEQ ID NO: 263519

SEQ ID NO: 461601 - DNA, 1014 bp, Shigella boydii
gtgccgtattttcaattatcagtcagggatacaggtattgatacctacgtgttgattgtgggggagtctgtacgtgtcgacaatatgtctttgtatggatatacacgctctacgacaccgcaagttgaagcacaaagaaaacagatcaaactgtttaatcaagcaataagcggcgcaccttacactgcgctgtcggttcccctttctttaactgctgattctgttttgagtcatgacattcataattaccccgacaacattattaatatggctaatcaagcaggatttcagactttctggctaagctcgcaatccgcttttcggcagaatggtacagcagttaccagtatcgccatgcgcgccatggaaacagtttatgtcagaggatttgatgaattgttgttgccgcatttatcgcaagcattacagcaaaatacgcagcaaaagaaactgattgttcttcatttaaatggaagccatgaaccggcttgtagcgcctatccgcaatccagcgccgtgtttcaaccgcaggacgatcaggatgcctgctatgacaactccattcattacacagatagtttgctaggtcaggtttttgaattattaaaagatcgccgcgcctcggtcatgtattttgccgaccacggcctggaacgtgaccctacgaagaagaacgtctattttcatggaggcagggaggctagccagcaggcatatcatgtcccgatgtttatctggtatagccccgttcttggggatggcgtggatcgcacaacggaaaacaacatcttttcgacagcttacaataattaccttattaatgcgtggatgggggtaacaaagccggaacagccgcaaacgcttgaggaagtgattgcacactataaaggagactcacgggttgtggatgcaaaccatgatgttttcgattatgtgatgttcagaaaggagtttacagaggataagcaaggtaaccccgttactttattcgtaccccttataatggggtgttag

SEQ ID NO: 461602 - DNA, 384 bp, Shigella boydii; identical to SEQ ID NO: 461558

SEQ ID NO: 461603 - DNA, 354 bp, Shigella boydii
atgcgtgattttcagaatgcctttgatgctgcccttgccggggtggacagcacgattgttgaagtgatggggctctgtgcgcagttcacctcgggagcacagcgtggaagcgaagttcagggggtttttgacgatccggagtcgctgggttttgccggtggcggggtccgtattgaaggaagcagcccgtcattatttgtgcggacggatacggttcgtgccgtgcggcgtggtgacacgctgaccattaacggcgagatgttctgggtggatcgtatttctccggatgacgggggaagctgttatctctggctcaaccgtgggcaaccacccgctgttaaccggcgacgataa

SEQ ID NO: 461604 - DNA, 207 bp, Shigella boydii; identical to SEQ ID NO: 24440

SEQ ID NO: 461605 - DNA, 495 bp, Shigella boydii
atgcagttcggtaaaagctcagaaaaacttcgcgcaaaaaccgaacggcggatacaggaagcacaggagcgaatcagcgcacttcaggaggaaatggcggaaacactgggtgagcaatatgacccggtactgccatcttccctgcgccagtcttcagcccgtaaaccgttaccagcctcacttccccgtgccccccgggtcatccggccggaagaggaatgctgtccggcctgtggtggtgaactcagtccactgggatgtgatgtgtcagagcagctggagcttatcagcagcgcctttaaggttatcgaaaaacaacgccctaaactggcctgtcgccggtgcgaccatatcgtgcaggcaccggtgccttcaaaacccattgcacgcagttatgccggagcggggcttctggcccatgttgttaccggaaagtatgcagacgatctgccattataccgccaaagtgatctactattccacacagctatttag

SEQ ID NO: 461606 - DNA, 561 bp, Shigella boydii
atgctcggtagccagacgtttgtcgtgttgtgtgcctgcgcaatattacgctggcagctggggacgcgttggcgttatggattgaccagccgatatgtctggcaacgtctgttctggcttggtttggtgacgccgatcggcatcaaatgcagcatgtatcttgtggggagcttctttgatttcccgctaaagatatccacctttttcggcgatgcggatgccattttcacggtcgttgatttgctaagccttttcaccgctgtgctgatttacaatatgcttttctactatctcactcgcatgattgtaagtccccactttgcgcagatattgtggcgcagggatatcgcgccgtcgttgggcaaagagaaacgcgcatttaccttaagctggctggcagcgttaagcgtgcttctacttctgttgtgcacaccttatgaaaacgactttattgccggttacctggtacccgttttcttcatcatctttaccctcggggtcggtaagcttcgctatccgtttttaaatctcacctgggctgtttcaacgctttgccggtaa

SEQ ID NO: 461607 - DNA, 237 bp, Shigella boydii
gtgagtaataaaaacgccaatgtaaggaaatcgcaggaaataacattctgcttgctggcaggtatcctgatgttcatggcaatgatggttgccggacgcgctgaagcgggagtggccttaggtgcgactcgcgtaatttatccggcagggcaaaaacaagtgcaacttgccgtgacaaataatgatgaaaatagtacctatttaattcaatcatgggtaatgactccaacttactga

SEQ ID NO: 461608 - DNA, 498 bp, Shigella boydii
atgtttgctctggccggaaataaatggaataccacgctgcccggcggaaatatgcaatttcagggcgtcattattgcggaaacttgccggattgaagccggtgataaacaaatgacggtcaatatggggcaaatcagcagtaaccggtttcatgcggtaggggaagatagcgcaccggtgccttttgttattcatttacgggaatgtagcacggtggtgagtgaacgtgtgggtgtggcgtttcacggtgtcgcggatggtaaaaatccggatgtgctttccgtgggagaggggccagggatagccaccaatattggcgtagcgttgtttgatgatgaaggaaacctcgtaccgattaatcgtcctccagtaaactggaaacggctttactcaggctctacttcgctacatttcatcgccaaatatcgtgctaccgggcgttgggttactggcggcatcgccaatgcccaggcctggttctctttaacctatcagtaa

SEQ ID NO: 461609 - DNA, 291 bp, Shigella boydii
atgcaaaatcttaatcctcagcgtaaagctttcctcgatatggtggcatggtcagaaggaacggataacgggcgacaaccgacacgtaaccacggttatgatattattgtcggtggtgaactcttcactgattactccgatcaccctcgcaaacttgtcacgctaaaccccaaactcaaatcaacagctgcaggccgttatcaacttctttcacgctggtgggatgcttaccgcaagcagcttgggctgaaagactttgaagtggtcaacaaaaactggccaccgagttag

SEQ ID NO: 461610 - DNA, 264 bp, Shigella boydii
ttgctgatcatcgcaggttggggcggtctggtccgctacctgatagatgtgaagcagagtaaagcaacgtggagttggataaatgctctggctcagatagtggtatcaggattcaccggtgttattggtggcctgatcagcatcgaaagtggattcagtatttacatgattctcgcgacagcggggattagtggtgcgatgggttcggttgcactgacgtacttctgggaacgactgacaggggtgaaaaatgcaaaatcttaa

SEQ ID NO: 461611 - DNA, 381 bp, Shigella boydii; identical to SEQ ID NO: 458903

SEQ ID NO: 461612 - DNA, 234 bp, Shigella boydii
atgaaaagaaatcttccgttaattattttgttgtcttctctggttatgggctgtacgcaacataaaacagatatgccccgacagttggttaaggcattaccacaatatccggcctatgcagcggcaaattatataaagggacgggttgatgtgaggtttgatattggtgctgatggtactgtcacccgaattgagtttattcgttcagagccgcaccatctgtttgatgggtga

SEQ ID NO: 461613 - DNA, 177 bp, Shigella boydii
atgctaccatctatttcaatcaacaataccagcgcaacttacccagaatccattaatgaaaataacaatgatgaagttaatggattagtacaagagctcaaaaacctttttaatggtaaggaaggaataagcacctgtattaaacatctacttgagcttataaaaaacgccatatga

SEQ ID NO: 461614 - DNA, 450 bp, Shigella boydii
atgatcttcagcgcattaaaagaaatatatgatggagatcctagttttatcttcgataagatatcacacaaactcagacatacggtaacggaatttgatgagagcgggaaaagcgaaccaacggacttatttacctggtacggtaaagataaaaaaggcgactctctcgctattgtaattaaaaataaaaacggaaatgattacttatctctcggttactacgatcaggacgactaccacattcaaagaggaattcgtattaatggtgatagtctcacccaatattgtagtgaaaacgccaggagtgcttcagcgtggtttgaaagcagtaaagctatcatggcagaatcatttgcaacaggttccgatcatcaggttgtaaacgagctcaacggggaaagactgagagaacctaacgaagtttttaaacgtttaggtcgagcaaggtaa

SEQ ID NO: 461615 - DNA, 294 bp, Shigella boydii
gtggcgcacgtcttcggtgaacgcactctggcgacgctggggcgtcttatgagcttgctgtcaccctttgacgtggtgatatggatgacggatggctggccactgtatgaatcccgcctgaagggaaagctgcacgtaatcagcaagcgatatacgcagcgaattgagcggcataacctgaatctgaggcagcacctggcacggctgggacggaagtcgctgtcgttctcaaaatcggtggagctgcatgacaaggtcatcgggcattatctgaacataaaacactatcagtaa

SEQ ID NO: 461616 - DNA, 474 bp, Shigella boydii
ttgcagtttcatataaattctcccgatataaataacgaaaaagccgttctgcttgccagggatgaaacactcggcaattgccttaatttgacggaaattatccctcagacttctgttcgttatgacgttaacgagcaacgtctggatatagacgttcctcaggcatgggtaatgaaaaattaccaaaactatgttgatccagcgttatgggaaaatggcattaatgcggccatgttgtcatacaacctcaacggatatcatagtgaaactcctggtcgaagaaatgacagcatttatgctgcttttaacggtgggatgaatttaggtgcatggcgactgcgtgcctcaggcaactacaactggatgaccgattctggcagtaattatgattttaagaatcggtatatacagcgtgatatcgcctcgctgcgttctcaactcattcttggtaatgctgccaacttactgatttag

SEQ ID NO: 461617 - DNA, 318 bp, Shigella boydii
gtgactataaaaccaactaaaaattatcataatcatctgacccgtatcgctacgttttgcgcgctgctgtattgcaatagtgctttctgtgctgaacttgttgaatatgaccataccttcctgatggggcagaatgcctcaaatattgatctcagccggtatagtgaaggtaaccctgctataccgggtatgtacgacgtcagtgtttatgtcaacgatcaacctattattaaccaaagcattacatttattgaaattgaaggaaaaaaaacgcacaagcctgtatcacacttaagaatttattgcagtttcatataa

SEQ ID NO: 461618 - DNA, 393 bp, Shigella boydii
atggatctgcgccgttttattacgcttaaaaccgtggtggaagagggttcctttttgcgagcttcgcaaaaattgtgctgtacacaatcgacggtgacttttcatattcagcagcttgagcaggagttttcagtccagttatttgagaaaattggccgacggatgtgccttacccgcgaaggaaaaaagttgctgccgcacatttatgaacttacccgagtgatggatacgcttcgtgaggctgccaaaaaggagtcagatccggacggggaactacgcgttgtttcgggcgaaacgttgctctcttaccgaatgccgcaggtgttgcagcgttttcggcaacgcgcaccaaaagtgcgtttatcgttgcagtcgctgaactgttacgtgtaa

SEQ ID NO: 461619 - DNA, 381 bp, Shigella boydii; identical to SEQ ID NO: 458903

SEQ ID NO: 461620 - DNA, 159 bp, Shigella boydii
atgttccctgtttcatcaattggtaatgatattagtagtgatttagtccgtcgaaaaatgaatgaccttcctgaaatccccatagaaaataatctcgaagcactagcaccaggtatagaaaaactaaaacagacctcggtgatgctgccaacttactga

SEQ ID NO: 461621 - DNA, 642 bp, Shigella boydii
atgttacccaggatcagacacaataattttattggtgcggtggagttattcgtaaaatcatcgcatacaaaaacacattcaaacaatttttttaataatattcagcatgcatttaagaaaaaagattgggtttcgaattatgatagcctgttaactttgtgggagttttttcgttgcgcaactcagattgataaagatagttatcaagtgctttcatcaaaaaatgaaactgttaaagccatggataagtttcttatcagtttcagccttaaagataacggtgccgaatatacaatgacattgcgaggcagtggatttgaatacgaagaaatccccataacaataaatgagtataactcattcatggatttcaaaaaccgtgaatttccgttagaacaaaacagaagattgtatgcctgggatattctgcagaaaaaacagtctgacataccgaaaaggattaaaggttatattcaccaggcgattggtgacgtgtctttaggttatgccttattggaggatatagtaagcaaattaaaacggggtaaatttgaactccaaataccaggaggtggaattaaagaatgcgatggatggtatatttacgaaaaaataggtaatgctgccaacttactgatttag

SEQ ID NO: 461622 - DNA, 855 bp, Shigella boydii
atggatgcccttagccgtttgttgatgcttaacgctccacaaggaacgatcgataagaattgcgtgttaggaagtgactggcagcttccacatggtgccggggaattatcggttattcgttggcatgcgttaacgcaaggagcggcgaagctggaaatgccgacgggagagatttttacattacgcccgggaaatgtggtcctgctaccacaaaattcagctcatcgcctgagtcatgtcgataatgaatcgacctgtattgtctgtggtactcttcggttgcaacattcggcgcgttattttttaacgtctttgccggaaacgctgtttttagcaccggttaaccacagcgtggaatataactggctgagggaggcgatcccgtttttacaacaggaatccagatcggcgatgccgggagtggatgcactgtgtagccagatctgcgctacattctttaccctcgcggtgcgtgagtggattgcacaggttaatacagagaaaaacattctcagtttgcttctgcatccacgtcttggtgcggtaatacagcaaatgctggaaatgctaggacacgcctggaccgtcgaatcgctggccagcatcgcccacatgtcccgggcaagttttgcccagcttttccgtgatgtttccggaaccacgccgctggctgtattaacaaagttgcgtctacaaatagcggcccagatgttttcccgggaaacgctccctgttgtggtgatcgctgagtcagtaggctatgccagcgaatcatcttttcacaaggcgtttgtccgcgagtttggttgtactccgggagaatatcgggaaagggtaatgctgccaacttactga

SEQ ID NO: 461623 - DNA, 375 bp, Shigella boydii
atgacaaaagagctgacaggtaaagccctgtttatggcgctcaggagccagcgcccacctgccgggctaatccaccactctgatcgaggttcacagtactgcgcatacgattaccgggtcatacaggagcagtctggtctgaaaacatcaatgtcgcgtaaaggtcactgttacgacaacgctctgatggaaagcttctggggaacgctgaaaaatgagagcctgagccactatcgttttaataaccgggatgaagccatctcagtaatacgggaatacattgagattttctacaatcgtcagcgtcgtcactctcgtctggggaatatctccccggcagccttcagggaaaaatatcatcagatggctgcttaa

SEQ ID NO: 461624 - DNA, 240 bp, Shigella boydii
atgaaacagcctgcgcccgtttatcagagaattgcgggtcatcaatggcgacatatctggctttctggcgatatacacggttctcttgagcagttgcgccgcaaattatggcattgtcgttttgatccgtggcgagatttacttatctcagtgggagacgttatcgatcgtgggccgcaaagtttacgttgtctgaggtgtactggcaatagcggacactaccatttgttctttttttaa

SEQ ID NO: 461625 - DNA, 135 bp, Shigella boydii
atggattggcatgaccttatatcaaaggtaattatcggacttgttacaggctcaatcgcagcttacttaactgcgcgatatgcactcggccgttattataaagaaaaatggtgggacaaaagaatagatttgtag

SEQ ID NO: 461626 - DNA, 375 bp, Shigella boydii
ttgacggacttcgggggaaaaacgagtatttttagtcatcctgtttacctctttctcaggaagtttagtctccaggattcccggggcggttcagatagcctgaacgtgtactgtcgtaatggccaggtggaaatcgacaacaacatcggtgaaaacgcgctgcgatcggtggcggttggaagaaaaaattatctcttcttcggttctgacaacggtggagaaagcgcggcgattatctacagtctgctggtcacctgcaaactgaacggagtggagccggaggactggttgcgcgaagtgatcgtgaagctcaatgactggccgtcgaaccgagtgcatgaactgctgccctggaacttctcagctgtaaaataa

SEQ ID NO: 461627 - DNA, 321 bp, Shigella boydii
gtggcaagtatgatggagggaatgattaaagtcgttgccgaataccgtaatacaaacaacgcaataggttacaccttccgttattacgcaacacaaatgaacgccgataaaaatataaaactgctagcgattaacggtattgcaccgactgccgaaaacattcgcaacggcaaatatccctatatcatcgatgcctttatggtaacgcgggaaaatacgacgtcagagacacaaaaattgttggagtggtttttaacgccgcagggacagagtttggtggaagatgtaggttatgtcccgatgtataagacgctaccttaa

SEQ ID NO: 461628 - DNA, 432 bp, Shigella boydii
gtggcgttaaatctcgcttcaggtgaagggaatttctttatccgtcctggcggcgtgttttatgtcgcgggagataaagtcggcatcattcgtctggatgcctttaaaaccagtaaagagattcagtttgcggtgcagtcagggccaatgttattagaaaacggcgtaattaatccacgcattcacccgaatgttgcctcgcgtaaaattcgtaacggtgtagggattaataaacaaaggaacgccgtgtttttgttgagccagcaggcgacaaatttttatgattttgcctgttatgccaaagcgaaactgaacgttgagcagttgctttatcttgatggcacaatttcacatatgtatatgaaaggcggggcaatcccgtggcaacgctatccttttgtcaccatgatttccgtcgagcggaaaggttaa

SEQ ID NO: 461629 - DNA, 285 bp, Shigella boydii
atgtacatgcggatgccagttgagacgacggccatacgtgtggatggcgcagaagataccgggttcctgcccccgtttccgggcggcatacagcagattctccaccgccagacggcacacgtcattcagcagccaccggttgctttcgaacaccggccacagcgtgtccggcagggtgaagaccaggtgtacccagtcgcagtcaggaagacgattcagctgtgtcgctatccacaggtctgtggccttttttccgcaggacgggcaggcacggctgccgcatga

SEQ ID NO: 461630 - DNA, 375 bp, Shigella boydii; identical to SEQ ID NO: 461626

SEQ ID NO: 461631 - DNA, 426 bp, Shigella boydii
ttggagtcattaccgcgtaatgattacgcaggtgtcgaaaaactcggatataaccgtgcgattaaccgtaaaaaatatcacagtaaagagataacccgagaactgaacgatgaagctacattaaggcatgcggtatatcatgagttgtcgcgtttaattacacctcgtcgcagccataacgagtttcatccggataataattttaccatcgatacgattaattcatccgtaatgcgtattcaaagaagtaacgctgatggtaattgtctgactggattgtttaatgtcagtaaaaatattcagcatgtaaatattactaatctgcatggtcgggatctgattagtgaagttgatatattgggtaatgaaataacgctgcgcccctggcaggttatgtggattaaggtaatgactccaaattattga

SEQ ID NO: 461632 - DNA, 294 bp, Shigella boydii
gtggcgcacgtcttcggtgaacgcactctggccacactggagcgtcttctgagcctgctgtcggcctttgaggtcgtggtatggatgacggatggctggccgctgtatgaatcacgcctgaagggaaagctgcacgttatcagcaagtgttacactcagcgcattgagcgacataatctgaatctgagacaacatctggcaaggctgggacggaagtcactgtcgttctcaaaatcggtggagctgcatgacaaggtcatcgggcattatctgaacataaaacactatcagtaa

SEQ ID NO: 461633 - DNA, 381 bp, Shigella boydii; identical to SEQ ID NO: 458155

SEQ ID NO: 461634 - DNA, 294 bp, Shigella boydii
gtggcgcacgtcttcggtgaacgcactctggccacactggagcgtcttctgagcctgctgtcggcctttgaggtcgtggtatggatgacggatggctggccactgtatgaatcccgcctgaagggaaagctgcacgtaatcagcaagtgttacactcagcgaattgagcggcataatctgaatctgaggcagcacctggcacggctgggacggaagtcgctgtcgttctcaaaatcggtggagctgcatgacaaagtcatcgggcattatctgaacataaaacactatcaataa

SEQ ID NO: 461635 - DNA, 426 bp, Shigella boydii; identical to SEQ ID NO: 461631

SEQ ID NO: 461636 - DNA, 369 bp, Shigella boydii
atgcagtggtatttagccgtattaaaaaattatgttggtttctctggtcgcgcacgtcgtaaagagtactggatgtttactctgattaacgccatcgtcggcgctattatcaatgtcattcaattgattttaggtttagagtttccattcctttctctcatttacctggcagcaacaatcattccggtcattgctctgtgtgttcgtcgtctgcacgatactgaccgttcaggtgcgtgggcgcttctctatctggtaccgatcattggctggttagttctgtttgtatttgcctgtttagaaggcaattctggcagcaatcgttacggaaacgatcctaagtttggggtaatgactccaacttactga

SEQ ID NO: 461637 - DNA, 276 bp, Shigella boydii; identical to SEQ ID NO: 458859

SEQ ID NO: 461638 - DNA, 300 bp, Shigella boydii
atggtgcagtacacccgtaacagtttttacatcccactaatgactcgcctgcgcccgatggggagcactgtcgatgttgaaacagccaaccgccacggtctgcgctggctgcacgatgtcgctaaccaacgaaagcatgaaacaatccaggcccgtccctgtgatcgctggctcgaagagcagcagtccatgctggcactgcctccggagaaaaaagagtatgacgtgcatcctggtgaaaatctggtgagcttcgacaaccccgttactttattcgtaccccttataatggggtgttag

SEQ ID NO: 461639 - DNA, 420 bp, Shigella boydii; identical to SEQ ID NO: 459063

SEQ ID NO: 461640 - DNA, 528 bp, Shigella boydii
atgttttctataaaaccaggacccagaaatttacctatcgacaaccccacattgttatcatggaacattactgacggggatctaaattccaaattaaatacattagaatatctaaactgtataacaaatattattaattcttgtggagtttaccctcaaggattaaaagacagagaaattatatcaacttttcacgcagaaaaagttattaatgatctgttaaaaaacgattataaaatttccctttctccagatacaacttaccgagagttgaataaagcagcacagcgtagcattacagcgccagacaggataggagaaggaaaaacattggtttatcaacgagatacaatggttgaaagaggtgataacagcggtatttatcagtatggtcctgctgaacacttcacccacattatatctgacaaaccttccccaaaagataaatatgttgcatatgctattaacattcctgactatgagctggtggatttgcccctatatttccagacatctgttatcacttaa

SEQ ID NO: 461641 - DNA, 381 bp, Shigella boydii; identical to SEQ ID NO: 458155

SEQ ID NO: 461642 - DNA, 498 bp, Shigella boydii
ttgtctatagactacaacatcgaaggttttggttttgtaggtgcatatagcaaatctgatcgtactaatgaacaagttggtgacggctacggtgataacgctgaagtgtggtcattagcagccaagtatgatgcaaataatatctatgcagcaatgatgtacggtgaaacccgcaacatgaccgttttggctaatgatcattttgcaaataaaacccaaaactttgaagctgttgtacagtatcagttcgacttcggtttacgtccgtctttaggctacgtatattccaaaggcaaagatctttatgctcgtgatggacataaaggtgttgatgctgaccgcgtaaattatatcgaagttggtacctggtactacttcaataagaacatgaacgtctacacagcatacaaatttaacctgctggataaagacgatgcagcgattaccgatgccgcaactgatgaccagtttgcagttggtatcgtctaccagttctaa

SEQ ID NO: 461643 - DNA, 234 bp, Shigella boydii
atggaacagaaagcattatctgcagaaccccgcagatcattttcaaatgagtttaaacttcaaatggttaaactggcttcacaaccaggagcctctgttgcccgtattgcccgggaacacgatatcaatgataacctgctgttcaaatggctcaggctctggcagaacgaagggcgcatatcgcggcgtcttccggtaacaacctcttctgacactgtaatgccagtcagttaa

SEQ ID NO: 461644 - DNA, 336 bp, Shigella boydii
gtgttgcccgaaaactggtggcaacatccagctgcattaggtgcaactgacagtgatatcgaaatcatcaaacgtcagtggggtgcgttttacggtacggatctggagttgcaactgcgccgccgaggtatcgatacaatagtgttatgtgggatctcgaccaatatcggtgttgaatccaccgcccgcaatgcctgggaacttggctttaatctggtgattgccgaagacgcctgtagtgccgccagcgccgagcaacacaataacagcattaatcatatctacccgcgcatcgcccgtgtgcgtagcgtggaagagatccttcacgcgttatga

SEQ ID NO: 461645 - DNA, 375 bp, Shigella boydii; identical to SEQ ID NO: 461579

SEQ ID NO: 461646 - DNA, 300 bp, Shigella boydii
atgatccgcaaagcctttgtcatgcaggttaaccccgacgcccacgaagagtatcagcgtcggcataaccccatctggccggaactggaagcagtgttgaaatctcacggtgcgcataactacgccatttacctcgacaaagcgcgtaatctgctgtttgccacggtagagattgaatctgaagaacggtggaatgcggtagccagtactgatgtttgccaacgttggtggaaatatatgaccgatgttatgcccgctaacccggataacagcccggtgagtagcgagctgcaagggtaa

SEQ ID NO: 461647 - DNA, 336 bp, Shigella boydii
atgaagtggattgtgattgatacagttatccagccatcatgcggaatatctttttcagtcatatggagtaaaataaaattaataatctggtatcaatcggatgctttcttacctcctgaaagtatatttacactgactcacacaggcatcatgctcaataacaaagtgctacctgtaaccatttacaacgtagtaccattcaataaaacattctggaatttaatcaaaaacagccaggaatgccctacaaatacagataacgtattgaatgaatgctttaataaccgttgcactctgcaaatatgtccttatgggctaaaacaacaaagtccataa

SEQ ID NO: 461648 - DNA, 168 bp, Shigella boydii
atggacgaaaagaagcttaaagcccttgcggctgaactggctaaaggcctcaaaaccgaggccgacctcaatcagttttcccgtatgcagacgaaattaactgtcgaaacggtgcttaatgcggaactaactgaccatctcgggcatgaaaaaagctacatccggtag

SEQ ID NO: 461649 - DNA, 312 bp, Shigella boydii
atgccatggtccccagagggagaaccagtccttaaattcattctcttcacggcttctgaccatggcttcggcagtgcggaggtcatttgctgtcactcccgacacgccatagaaacgcatttccttcacggcagtggagagctgaagtttctctgcgagcatggtctggaaggccaggtagacttctatctcatccacaaaatggagagttctgactttatcccgggcaatgtcctccagaatttcgaggcggaacatttccctgcccagggagagcagagcgccggtatcattatcgaaaaggccttctga

SEQ ID NO: 461650 - DNA, 621 bp, Shigella boydii
atggcggttatgggacttgccggtgttctccggggtaaaaaggtccgtacgaccatcagccggaaagccgttgccgcaggcgaccgcgtaaaccgtcagttcgtggcagaacgacctgaccagctgtgggtggctgattttacttacgtcagcacatggcagggcttcgtctatgtggcgttcatcattgatgtgtttgccggatacatcgtggggtggcgggtctcatcgtccatggaaacgacattcgtgctggatgctctggagcaggcgttatgggcccgtcgaccgtccggcacggtccatcacagtgataaaggttctcagtatgtatcgctggcctacacacagcggcttaaggaagccggattactggcatcaacaggaagtacaggcgactcgtatgacaacgcgatggcggagagcatcaatggtctttacaaagcggaggtaatacaccgtaagagctggaaaaaccgtgcagaagtggaactggccacactcacgtgggtggactggtataataatcgacgattgctggaaaggctgggccatactcctccggcagaagcagaaaaagcttattatgcttccatcggaaacgatgatctggcagcctga

SEQ ID NO: 461651 - DNA, 273 bp, Shigella boydii
atgccaatggcggattttcgccgtgcttatgaactgaatgtgttttcttttttccatctgtcacaacttgttgcgccagaaatggaaaaaaatggcggtggcgttattctgaccatcacttctatggcggcagaaaataaaaatataaacatgacttcctatgcatcatctaaagctgcggccagtcatctggtcagaaatatggcatttgacctgggtgaaaaaaatattcgggtgaatggcattgcgccgggggcaatattaaccgggtaa

SEQ ID NO: 461652 - DNA, 420 bp, Shigella boydii
atggaacagaaagcattatctgcagaaccccgcagatcattttcaaatgagtttaaacttcaaatggttaaactggcttcacaaccaggagcctctgttgcccgtattgcccgggaacacgatatcaatgataacctgctgttcaaatggctcaggctctggcagaacggagggcgcatatcgcggcgtcttccggtaacaacctcttctgacactggcgttgaattattacctgtggagataacgccggatgagccgaaagaaccggtggctgctcttactccgtctttatctactcagactacagttagtgccagctcctgcaaggtggagttccgtcacggtaacatgacgctggaaaatccttcaccagagctgctcacagtgttgatccgtgaactgaccgggaggggacgatga

SEQ ID NO: 461653 - DNA, 381 bp, Shigella boydii; identical to SEQ ID NO: 458903

SEQ ID NO: 461654 - DNA, 507 bp, Shigella boydii
atgattcacccatggcgagtaaaccggctgataaatgaccctgaacttcgggttctccttcagccagctctgtgtttcccggcttttgtggataatgtagttgtccacgatcagcgtgatggttttcgcccgacggtatgtcgctttaagccgcttcagcaggctgatgaacagcgccgaacttttgctgttgccgcccacatagctgactttacctgtcccgctgtgcagcgctccggccagataatatttttcattctgtcccggcgtgaccacccgtttttgctgtccgcgcagttaccagtccgcaccgattttgggatgaagatggatatccacttcatcttcataaaagaccggatgttctgcgctgcattcgtccagtgctttatggattgctgccatcttttcatctttatgcgggtcacggatacgcagagttggcgcagcccttcgccacacaatccccgcagacggcaaccagcggcgaacggttccggcatttaa

SEQ ID NO: 461655 - DNA, 246 bp, Shigella boydii
gtggcgcacgtcttcggtgaacgcactctggccacactggagcgtcttctgagcctgctgtcggcctttgaggtcgtggtatggatgacggatggctggccgctgtatgaatcacgcctgaagggaaagctgcacgttatcagcaagcgttacactcagtggatttgcccctatatttccagacatctgttatcacttaacccattacaagcccgctgccgcagatattcccgtggcgagcgataa

SEQ ID NO: 461656 - DNA, 381 bp, Shigella boydii; identical to SEQ ID NO: 458903

SEQ ID NO: 461657 - DNA, 219 bp, Shigella boydii
atgtttgtaacgagcaaaaaaatgaccgcggctgttctggcaattactttggcaatgtctctgagtgcctgttctaactggtctaaacgggaccgcaacaccgcaatcggcgcgggtgcaggggcattaggcggtgcagtactgaccgatggcagtacgttgggtacattaggtggtgcagctgtcggtggtgttattggtcaccaggtcggtaaataa

SEQ ID NO: 461658 - DNA, 276 bp, Shigella boydii
gtggcttctgtttctatcagctgtccctcctgttcagctactgacggggtggtgcgtaacggcaaaagcactgccggacatcagcgctatctctgctctcactgccgtaaaacatggcaactgcagttcacttacaccgcttctcaacccggtacgcaccagaaaattattgatatggccatgaatggcgttggatgccgggcaactgcacgcattatgggcgttggcctcaacacggttttacgtcacttaaaaaactcaggccgcagtcggtaa

SEQ ID NO: 461659 - DNA, 276 bp, Shigella boydii; identical to SEQ ID NO: 461658

SEQ ID NO: 461660 - DNA, 405 bp, Shigella boydii
gtgatactggttgtctggagattcagggggccagtctacattaacgcacgtattgatgatgatataaagaaccaagcagatgaagtgctgaagctgatgaatatcagtcaaactcaggctattgcagctttttatcagtatattactgaacaaaagaaactgccatttgtgatcacctcaattgtaaaaacgccgcatgatttattacgtgaaagtacagacatgttagctgaagctcttgcagtgatttccaatctacaggtgtggactgaacagcaggatgggattggaaaagcaaagctaatggagtattaccgccgcctcgacgcactgtactgttgtgcaaaagagaaaataggtcttctttcagataaccgggatgctgaactaggctgtgtcccttaa

SEQ ID NO: 461661 - DNA, 303 bp, Shigella boydii
atgaaaaaaagaaattttagcgcagagtttaaacgcgaatccgctcaactggttgttgaccagaaatacacggtggcagatgccgccaaagctatggatgttggcctttccacaatgacaagatgggtcaaacaactgcgtgatgagcgtcagggcaaaacaccaaaagtctctccgataacaccagaacaaatcgaaatacgtaagctgaggaaaaagctacaacgcattgaaatggagaatgaaatattaaaaaaggctaccgcgctcttgatgtcagactccctgaactgttctcgataa

SEQ ID NO: 461662 - DNA, 276 bp, Shigella boydii; identical to SEQ ID NO: 458859

SEQ ID NO: 461663 - DNA, 525 bp, Shigella boydii
atgttctatttcccgttcatcttcttcgatcttttcttcggcgcgggccagtgcagagcgcaggaaggcctccgtctcttcaaccagactcagttgctggtctttctgacggagctggcattccagttctgcaatgcgaatgaggtatttttgattcatggccgtttttataatccggccatgacatttttacaacattgtcagtgcgttaaggcgggatgtttttggctgacgccagtccagcttatcgaggagcattgccagttgctagcgggtaatggataccttgccgtcacgcacagcaggccagataaactggccttcctccaggcgtctggtgaacaggcacagaccatcagcatcagcccacaggattttaatcatgtcaccccgtcggccacggaagatgaacaggtgaccggagaagggattatcattcagcacatgctgtacctgttcacccagcccgttgaaagacttacgcatatcggttatcccagcaacgagccagatgcgggtgcctga

SEQ ID NO: 461664 - DNA, 303 bp, Shigella boydii
atgagcagaaaaacccaacgttactctacggagtttaaagccgaagccgtcaaaacggttcctgaaaatcagctttcgatcagtgaaggcgcttcccgattatctgttcctgaaggcactttaggacaatgggttaccgccgcaagaaaagggctcaatacaccaggctcccgcacagtggctgagctggaatctgaagttatgcaactgcgtaaggctttaaatgaagcacgacttgagcgagatatattaaaaaaagcaacagcgtattttgcccaggagtcgctgaaaaatacgcgttag

SEQ ID NO: 461665 - DNA, 372 bp, Shigella boydii
atgccattctatttcaggaaggagtgtccgttaaactcaggctacctcagggaacagagtaaaacgcaagccaaccatgaaaaaagcagtatgtcccgcgtttacagttgggggtatgagcgagggtacgtgaaggctaacccatgtgcaggtgtaagtaaattcaaggccaaaaaccgcgaacgatatgtaaccgacaaagaataccaggcagtattaagcgttgcacctcttcctgtttttatcgcaatggaaattgcctatctgtgtgcagcgagggtttccgatgtgggtaatgactccaacttactgatagtgttttatgttcagataatgcccgatgaccttgtcatgcagctccaccgattttga

SEQ ID NO: 461666 - DNA, 210 bp, Shigella boydii; identical to SEQ ID NO: 9340

SEQ ID NO: 461667 - DNA, 237 bp, Shigella boydii
gtggcggacgcgctaccggaagcggtattacgtcgttcgctggggttgcgtgcggaaaaaatccgctcaatgtaccgtgaaagcgacatcgtgccgggagagcagaccgccaccagcatactgaagcagcgcacaaaaaatcttgcgctgctgcctcacgcccaccagcaacagaatccaccacaggaagagacggtggtcagcattgccgttgatccggaatctccggctcagtga

SEQ ID NO: 461668 - DNA, 294 bp, Shigella boydii; identical to SEQ ID NO: 25632

SEQ ID NO: 461669 - DNA, 381 bp, Shigella boydii
atgctgggagcggtggaacgccgcttcggcaacgatcttccgtcgtctccagtggagtggctgacggataatggttcatgctaccgggctaatgaaacacgccagttcgcccggatgttgggacttgaaccgaagaacacggcggtgcggagtccggagagtaacggaatagcagagagcttcgtgaaaacgataaagcgtgactacatcagtatcatgcccaaaccagacgggttaacggcagcaaagaaccttgcagaggcgttcgaacattataacgaatggcatccgcatagtgcgctgggttatcgctcgccacgggaatatctgcggcagcgggcttgtaatgggttaagtgataacagatgtctggaaatatag

SEQ ID NO: 461670 - DNA, 426 bp, Shigella boydii; identical to SEQ ID NO: 461631

SEQ ID NO: 461671 - DNA, 396 bp, Shigella boydii
atgagtggtgaaaaaaaggcgaaaggctggcggttctatggtcttgtaggttttggcgcaatagtactgctttccgctggcgtctgggcgttgcaatatgctggcagtgggccagaaaaaacgttgtcgccgctggtggtgcacaacaatctgcaaatcgatctcaatgagccggacctctttctcgacagcgactctctgagccagcttcccaaagatctcctcaccattccgtttctccacgatgttctgagtgaagatttcgttttctattatcagaatcatgccgatcgtctgggcattgaaggcagcattcgtcgcattgtctatgaacacgatctcacgctgaaagataaactcttttcgtcactcttagatcagcctgaggtagcctga

SEQ ID NO: 461672 - DNA, 204 bp, Shigella boydii
atggaaatggaagccacgcaagcacctggatttgcccctatatttccagacatctgttatcacttaacccattacaagcccgctgccgcagatattcccgtggcgagcgataacccagcgcactatgcggatgccattcgttataatgctcgaacgcctctgcaaggttctttgctgccgttaacccgtctggtttgggcatga

SEQ ID NO: 461673 - DNA, 207 bp, Shigella boydii
atgtatgatatgaatttctcttctatcgtggctgatgaatatgggataccacgacaattgaatgaaaattccttcgcaataacgacatcgttagccgcaagtgaaatcgaagatttaatcaggcttaaatgcttagacttaccggatattgattttgacctcaacattatgacagttgatgactatttccgtcagatttacaagtag

SEQ ID NO: 461674 - DNA, 378 bp, Shigella boydii
atggacgaacagtggggatacgtcggggctaaatcgcgccagcgctggctgttttacgcgtatgacaggctccggaagacggttgttgcgcacgtcttcggtgaacgcactctggccacactggagcgtcttctgagcctgctgtcggcctttgaggtcgtggtatggatgacggatggctggccgctgtatgaatcacgcctgaagggaaagctgcacgttatcagcaagcgttacactcagcgcattgagcgacataatctgaatctgagacaacatctggcaaggctgggacggaagtcgctgtcgttctcaaaatcggtggagctgcatgacaaggtcatcgggcattatctgaacataaaacactatcagtaa

SEQ ID NO: 461675 - DNA, 198 bp, Shigella boydii
gtgtttaattctgacaacctgagactcgacggaaaatgcgccatcatcacaggtgcgggtgcaggtattggtaaagaaatcgccattacattcgcgacagctggcgcatctgtggtggtcagtgatattaacgccgacgcagctaaccatgttgtagacgaaattcaactgaaccgccccgggaatcctggagactaa

SEQ ID NO: 461676 - DNA, 375 bp, Shigella boydii
atgtccggcagtgcttttgccgttacgcaccacgccttcagtagcggagcaggaaggacatctgatggaaatggaagccacgcaagcaccttaaaatcaccatcatacactaaatcagtaagttggcagcattaccatgccaatgaagccataaaccacggatttgctctggtaactgaggagcgccgctcaacgggaatttatgcctatctggatatcggttttaactcgttaatttccaatattcgcaactacaaaaataaagttggtttactggataactcgcggatgaaaagcgatacccagtgggtgattgattcgatgcgggtaaaaacgccgggtcatcggacgcaaattggttcgctctccgggtaa

SEQ ID NO: 461677 - DNA, 123 bp, Shigella boydii
atgggatataacgttatccccggtgatgaagatgcgccactcaaacgcatgactctgcaaccgtcatctcttccagaactgtttgaattaaaaaatggtgaatggaattatattggcaaataa

SEQ ID NO: 461678 - DNA, 258 bp, Shigella boydii
gtggcagaggacggtaccgaaaaacgttatctgccggagggcacactggtcctggggaatacggcagcagagggcattcgttgctatggtgccattcaggatgcgcaggcgttgtccgaaggtgtggtggcctcttcccgttatccgaaacactggctgactgtgggcgatccggcccgtgaattcaccatgacgcagtccgcaccgctgatggtgctgccggatccggatgagtttgtggtggtacaggtgaaataa

SEQ ID NO: 461679 - DNA, 258 bp, Shigella boydii
gtggcagaggacggtaccgaaaaacgttatctgccggagggcatgctggtgctggggaatacggcggcagaggggattcgttgctatggtgccattaaggatgcacaggcgttgtctgaaggagtggtggcttcttcccgttacccgaaacactggctgaccgtgggcgatccgtcctgtgaattcaccatgacgcagtccgctccgctgatggtgctgccggatccggatgagtttgtggtggtacaggtgaaataa

SEQ ID NO: 461680 - DNA, 942 bp, Shigella boydii
atgattggcgtggcgctggagcaactgactccggcgctaaaactggacgctgactggattggcttgttgggcgcgggaacgctcgccgggctgttcgttggcacatcgctgtttggctatatttccgataaagtcggacggcgcaaaatgttcctcattgatatcatcgccatcggcgtgatatcggtggcgacgatgtttgtttcatcccccgtcgaactgttggtgatgcgggtacttatcggcattgtcatcggtgcagattatcccatcgccacctcaatgatcaccgagttctccagtacccgtcagcgggcattttccatcagctttatcgccgccatgtggtatgtcggcgcgacctgcgccgatctggtcggctactggctttatgatgtggaaggcggctggcgctggatgctgggtagcgcggcgatcccctgtttgttgattttgattggtcgattcgaactgcctgaatctccccgctggttattacgcaaagggcgagtaaaagagtgcgaagagatgatgataaaactgtttggcgaaccggtggctttcgatgaagagcagccgcagcaaacccgttttcgcgatctgtttaatcgccgccattttccttttgttctgtttgttgccgccatctggacctgccaggtgatcccaatgttcgccatttacacctttggcccgcaaatcgttggtttgttgggattgggtgttggcaaaaacgcggcgctggggaacgtggtgattagcctgttctttatgctcggctgtattccgccgatgctgtggttaaacactgccggacggcattggcagctttgccatgatgacgctggcgctggcggttttggggctgatcccggatatggggatctggctggtagtgatggcctttgcggtgtatgcctttttctctggcgggccgggtaa

SEQ ID NO: 461681 - DNA, 153 bp, Shigella boydii
atggggggcgcttttgctgaagtatcgcctgatatctgcttttgtgttaatacccgtcgtcatcgcggcgttgtttctgttgccgccggtggggttcgccattgtaacgctggtggtctgcatgctggcagcgtgggaatggggacagcttag

SEQ ID NO: 461682 - DNA, 1041 bp, Shigella boydii; identical to SEQ ID NO: 457883

SEQ ID NO: 461683 - DNA, 936 bp, Shigella boydii
atggcactgccaattctgttagattgcgacccaggtcatgacgacgctatcgcaatagttctcgccctcgcctcaccagagcttgatgtcaaagcaattacgtcttccgccggaaaccagacaccagaaaaaaccttacgcaatgttctgcgtatgctgaccttgcttaatcgcaccgatattccggtagcaggcggcgcggtaaaaccgttaatgcgtgagttgattatcgcggacaatgtgcacggcgaaagcggtctggatggcccggcattaccggaaccgacgttcgcaccgcaaaactgtacggcggtagagctgatggcgaaaacgctgcgcgaaagtgcggaacctgtcacgattgtgtctaccggaccgcaaactaacgttgccttgctgctcaatagccatccggaactgcatagcaaaattgcccgtatcgtgattatgggcgccgcaatggggcttggtaactggacgcctgcggctgaatttaatatttacgttgacccggaagcggcagaaattgtcttccagtcagggatcccagtggtgatggccggtctggatgttactcataaagcgcaaatccacattgaagacaccgagcgtttccgcgcgattggcaaccctgtttcaaccattgttgccgaactgctggatttcttcctcgaatatcataaagacgaaaaatggggctttgtcggtgcaccgctgcatgacccatgcaccatcgcctggctgttgaaacccgagttgtttaccactgttgagcgctgggttggcgtggaaacacaggggaaatataccctgggtatgacggttgttgattattattatctgactggcaataaaccgaatgccactgtaatggtcgatgttgatcgtcagggctttgttgatttactggctgatcgtctgaaattttacgcttaa

SEQ ID NO: 461684 - DNA, 1116 bp, Shigella boydii; identical to SEQ ID NO: 461034

SEQ ID NO: 461685 - DNA, 303 bp, Shigella boydii; identical to SEQ ID NO: 458125

SEQ ID NO: 461686 - DNA, 414 bp, Shigella boydii
atgaaaacacaacgtggttatacgctgattgaaacgctggtcgcgatgctgattttggtcatgctaagcgcaagtggactctatggctggcaatactggcagcagtcgcaacggctatggcataaccgcgaccacagtatcagcgttatcagggaggggacgttatggtgccttgtgagttccgctgctggggccaatacctgtcatggcagttcaccattggtctttgtgccacgctggcccgaagtcgaaatgagcgacctgacaccttcgcttgctttctttggcctgcgcaataccgcatgggccgggcatattcgcttcaaaaactcaacgggcgagtggtggctggtggtttcgccgtggggaagactccggctttgtcagcaaggagaaacagaaggatgcctgtaa

SEQ ID NO: 461687 - DNA, 2889 bp, Shigella boydii
atgccccgcagcacttggttcaaagcattattgttgttagttgccctttgggcacccttaagtcaggcagaaacgggatggcagccgattcaggaaaccatccgtaaaagtgataaagataaccgccagtatcaggctatacgtctggataacggtatggtggtcttgctggtttctgatccgcaggcagttaaatcgctctcggcgctggtggtgcccgttgggtcgctggaagatcccgaggcgtaccaggggctggcacattaccttgaacatatgagtctgatggggtcgaaaaagtacccgcaggctgacagtctggccgaatatctcaaaatgcacggcggtagtcacaatgccagcactgcgccgtatcgcacggctttctatctggaagttgagaacgacgccttgcctggtgcggtagaccgcctggccgatgctattgctgaacctttgctcgacaagaaatatgccgaacgtgagcgtaatgcggtgaacgctgaattaaccatggcgcgtacgcgtgacgggatgcgcatggcacaggtcagcgcagaaaccattaacccggcacaccccggttcaaagttttctggtggtaacctcgaaactttaagcgataaacctggtaatccggtgcagcaggcgctgaaagatttccacgagaagtactattccgccaatctgatgaaggcggttatttacagcaataaaccgctgccggagttggcaaaaatggcggcggacacctttggtcgcgtgccgaacaaagagagcaaaaaaccggaaatcaccgtgccggtagtcaccgacgcgcaaaagggcattatcattcattacgtcccggcactgccgcgtaaagttctgcgcgttgagtttcgcatcgataacaactcagcgaagttccgtagtaaaacggatgaattgattacctatctgattggtaatcgcagcccaggtacactttccgactggctgcaaaagcagggattagttgagggcattagcgccaactccgatcctatcgtcaacggcaacagcggcgtattagcgatctctgcgtctttaaccgataaaggcctggctaatcgcgatcaggttgtggcggcaatttttagctatctcaatctgttacgtgaaaaaggcattgataaacaatacttcgatgaactggcgaatgtgctggatatcgacttccgttatccgtcgatcacccgtgatatggattacgtcgaatggctggcagataccatgattcgcgttccggttgagcatacgctggatgcagtcaatattgccgatcggtacgatgctaaagcagtaaaagaacgtctggcgatgatgacgccgcagaatgcgcgtatctggtatatcagcccgaaagagccgcacaataaaacggcttattttgtcgatgcgccgtatcaggtcgataaaatcagcgaacaaactttcgctgactggcagcaaaaagctgccaatattgcgctctccttaccggagcttaacccctatattcctgacgatttctcgctgattaagtcagagaagaaatatgaccatccagagctgattgttgatgagtcgaatctgcgcgtggtgtatgcgccaagccgttatttttccagcgaacccaaagctgatgtcagcctgattttgcgtaatccgaaagccatggacagcgcccgcaatcaggtgatgtttgcgctcaatgattatctcgcagggctggcgcttgatcagttaagcaaccaggcgtcggttggtggcataagtttttccaccaacgctaacaacggccttatggttaatgctaatggttacacccagcgtctgccgcagctgttccaggcattgctcgaggggtactttagctataccgctacgaaagatcagcttgagcaggcgaagtcttggtataaccagatgatggattccgcagaaaagggtaaagcgtttgagcaggcgattatgcccgcgcagatgctctcgcaagtgccgtacttctcgcgagatgaacggcgtaaaattttgccctccattacgttgaaagaggtgctggcctatcgcgacgccttaaaatcaggggctcgaccagagtttatggttatcggcaacatgaccgaggcccaggcaacaacgcaggcacgcgatgtgcaaaaacagttgggcgctgatggttcagagtggtgtcgaaacaaagatgtagtggtcgataaaaaacaatccgtcatctttgaaaaagccggtaacagcaccgactccgcactggcagcggtatttgtaccgactggctacgatgaatacaccagctcagcctatagctctctgttggggcagatcgtacagccgtggttctacaatcagttgcgtaccgaagaacaattgggctatgccgtgtttgcgtttccaatgagcgtggggcgtcagtggggcatgggcttccttttgcaaagcaatgataaacagccttcattcttgtgggagcgttacaaggcgtttttcccaaccgcagaggcaaaattgcgagcgatgaagccagatgagtttgcgcaaatccagcaggcggtaattacccagatgctgcaggcaccgcaaacgctcggcgaagaagcatcgaagttaagtaaagatttcgatcgcggcaatatgcgcttcgattcgcgtgataaaatcgtggcccagataaaactgctgacgccgcaaaaacttgctgatttcttccatcaggcggtggtcgagccgcaaggcatggctattctgtcgcagatttccggcagccagaacgggaaagccgaatatgtacaccctgaaggctggaaagtgtgggagaacgtcagcgcgttgcagcaaacaatgcccctgatgagtgaaaagaatgagtga

SEQ ID NO: 461688 - DNA, 678 bp, Shigella boydii; identical to SEQ ID NO: 458153

SEQ ID NO: 461689 - DNA, 180 bp, Shigella boydii
atgaaaaaaataaaacagaaaaatattggtgatatctatgagcagtttcttgaaaaagattttcagttacaacgtgccattcatgaaattgaaagatatctgtacgcaacttttaaatatgatttgattctggaagagaaactatatctttctattcgcatcaaagtattaatggactaa

SEQ ID NO: 461690 - DNA, 855 bp, Shigella boydii; identical to SEQ ID NO: 458088

SEQ ID NO: 461691 - DNA, 438 bp, Shigella boydii
atgagcaaaatatcagatttgaattattctcaacacattacattagccgacaattttaaacaaaaaagtgaagttttaaatacctggcgtgttggaatgaataattttgcccgtaatgccgaggggcaggataacacaagaaatatccttgatcctaagacatttttggaatttttggtaaaaatatttactctaggttatgtggattttagcaaacgctccaacgaagcgggaagaaatatgatggctcatattgagtcctcatcttatatcaaaaataatgatggcagtgagataataaagtttgttatgaataatcctgaaggggaacgagcggatttatctaaggtggaaatagaaatcacactttccactttccactttcactactatggggactcgtcaaggacatacggctattatatttcaacaacctga

SEQ ID NO: 461692 - DNA, 162 bp, Shigella boydii
atgtatagaactcatcgacaacacagcctgttaagctctggtggagtgccatcgtttattggggggctggtggtgtttgtgtcggcagcgttcaatgcacaagctgaaacctggttcgatcctgcttttttcaaagatgatccctcaatggtggccgattag

SEQ ID NO: 461693 - DNA, 1539 bp, Shigella boydii; identical to SEQ ID NO: 459180

SEQ ID NO: 461694 - DNA, 348 bp, Shigella boydii
atgatcccgttaccttccgggaccaaaatttggctggttgccggtatcaccgatatgagaaatggcttcaacggcctggcggcaaaggtgcagacgacgctgaaagacgatccgatgtcaggtcacgtttttatcttccgtgggcgtaatggcagtcaggtaaagctcctctggtctaccggcgatggactgtgtctgctgaccaaacggctggagcgcggccgcttcgcctggccgtcagcccgggatggcaaagtgttcctcacaccggcacagctggcgatgctccttgaaggtatcgactggcggcagcctaaaagactgcttacgtccctgactatgttgtaa

SEQ ID NO: 461695 - DNA, 261 bp, Shigella boydii
atgattaaaatggcggaacatctgaaaggttactggccgaatcaactgagtttctcagaatcatgcggaatggtgatgagaatgctgatgacattgcagggcgcttcaccgggacgtataccggagctgatgcgcgatcttgcaagtatgggacaacttgtgaaattaccgacgagaaggggaagggccttcccgagagtggtaaaggagaggccctggaaataccccacagccccgaaaaagagccagtcagttgcttaa

SEQ ID NO: 461696 - DNA, 267 bp, Shigella boydii
atgttttctgggctgttaatcattctggttcccctgattgtgggttacctcattccgcttcgccaacaagctgcgttaaaagttattaatcagctattaagctggatggtttaccttattctcttttttatgggtatcagtctggcgtttctcgataacctcgccagtaacctgttggcgattctgcattattctgccgtcagtattaccgttattttactgtgtaatattgccgccctgatgtggctggagcgaggcctgccgtag

SEQ ID NO: 461697 - DNA, 1017 bp, Shigella boydii
atgagtgcccactattttaatccacaagagatgatcaataagacaatcatcttcgatgaaaggccagcggcgtcagtagcatcatcattccatgttgcttatggcattgataaaaactttctttttggttgtggtgtttcaatcacgtcagttttgttacataacaacgacgtgagttttgttttccacgtttttattgatgatatccctgaagccgatatccagcgtttagcccaattggcgaaaagctatcgtacctgtatccagatccatctagtaaattgtgaacggcttaaggcattaccgacgaccaaaaattggtctattgccatgtatttccgttttgtaattgcagattactttattgatcaacaagataagatcctttacctggatgctgatatcgcctgtcagggaaacttaaagccgctgataacaatggatcttgccaataacgttgctgctgttgttactgaacgcgatgctaactggtggtcgttacggggtcaaagtctgcagtgtaatgaacttgaaaagggctactttaattcaggtgtcctgttaattaatacgctagcgtgggcgcaggagtccgtttctgctaaagcgatgtcgatgcttgctgataaagccatcgtttcccgtttcacctatatggatcaagatatccttaatcttatcctgttagggaaagttaaattcattgatgctaaatacaatacgcaatttagtttaaattatgaattaaaaaaatcatttgtttgtccaattaatgatgaaaccgtattaattcattatgtcggcccgacaaaaccctggcattactgggccggttatccaagtgcgcaaccttttatcaaagccaaagaagcatcgccctggaaaaatgaaccgttaatgcggccagttaactcaaactatgctcgttattgcgccaagcataattttaaacaaaataaaccaattaacgggataatgaattatatttattatttttatttaaagataataaaatga

SEQ ID NO: 461698 - DNA, 540 bp, Shigella boydii
atgggacgctggcttgctggcaggctcatgaaagagctggggctggtcagctgtcagcagccgactcaccggtataaacgtggtggtcatgaacatgttgctatccctaactaccttgaaaggcagttcgccgtgaccgagccaaatcaggtgtggtgcggtgatgtgacctgtatctggacgggtaagcgctgggcgtacctcgccgttgttctcgacctgttcgcaagaaaaccagtgggctgggccatgtcgttctcgccggacagcaggctcaccatgaaagcgctggaaatggcatgggaaacccgtggtaagcccggcggggtgatgttccacagcgatcagggcagtcattatacgagcaggcagttccggcagttattgtggcgataccagatcagacagagtatgagccggcgcggaaactgctgggataacagcccaatggaacgcttcttcaggagtctgaagaacgaatggatgccggtggtgggttaccccaaacgaatcggaaaatcgatactggaaaaactctaa

SEQ ID NO: 461699 - DNA, 2427 bp, Shigella boydii; identical to SEQ ID NO: 458376

SEQ ID NO: 461700 - DNA, 2232 bp, Shigella boydii; identical to SEQ ID NO: 458377

SEQ ID NO: 461701 - DNA, 1257 bp, Shigella boydii
atgttccgccgtctgcttatcgcaacagtcgtcggtattctcgcggcctttgccgttgccgggtttcgtcatgcgatgctgctactggagtggttgttcctcaataatgactccggcagtctggtcaatgcagcgacaaacctttccccctggcgacggttgctaactccggcgctcggcggactggcggcgggtttgttgctgatgggctggcagaaatttacccaacaacgccctcatgcgccgaccgattacatggaagcgttgcaaaccgatggacagttcgattacgcagcaagcctggttaaatcgcttgcctcgctgctggtagtaaccagcggcagtgcaattggtcgcgaaggtgcgatgattcttttagctgcccttgccgcctcctgttttgcccaacgttttacgccacgccaggagtggaaattatggatcgcctgtggggccgcggcgggaatggctgcggcctatcgtgccccgcttgctggcagtttatttatagccgaagtgctgtttggcactatgatgttggcctctctcggcccggtgattatttccgccgtcgtggcattgctggttagcaatctgattaatcatagcgacgcgttactctacaacgtacaactctcagtgacggttcaggctcgtgactatgcgctgattatcagtacaggtgtgctggcaggtctgtgcggaccactgttgttaacgttaatgaacgcctgtcatcgtggatttgtgagtctcaaacttgcgccgccctggcaactggcactaggcggggtgatcgtgggtctgctttccctgttcacacctgcagtgtggggcaacggctatagcaccgtacaatcctttttaaccgccccaccactgttaatgatcattgccgggatcttcctttgtaaactgtgtgccgtgctggcgagtagcggttccggcgcacccggtggtgtctttacaccgacgctatttatcggtcttgccattggcatgttgtatggtcgtagcctgggattatggttccctgatggcgaagaaattacgcttttactcggattgaccgagatggcgacactgttggcggcaaccacgcacgcgccgattatgtcgacgttgatgatatgtgaaatgaccggggagtatcagctactccccggtttattgattgcctgcgtcattgcgtcggtaatttcgcggacgttacaccgtgactctatctaccgccagcacactgcgcagcatagctaa

SEQ ID NO: 461702 - DNA, 696 bp, Shigella boydii
atgctgaagcgtttctttattaccggtacagacacttctgtagggaaaacggtggtttcccgcgcattgctacaagcgttagcctcccagggaaaaacagttgcgggatataaacccgtagcgaaggggagcaaagagacacccgaagggctgcgtaataaagatgccctggtgttgcagagtgtttcaaccatcgaactgccttatgaagcagttaatcctatcgcgttaagcgaagaagaaagtagcgtggcgcacagttgcccaatcaattacaccctcatttcaaacggcctggcaaacctgaccgataaagtcgatcatgtcgtggtagaagggactggcggctggcgcagtctgatgaatgatttgcgtccactctctgaatgggtggtgcaggaacagttgccggtgttgatggttgtcggtattcaggaaggttgcattaaccatgcactgctaacagctcaggcgattgccaacgacgggctgccgctcattggctgggtggctaaccgaatcaacccaggactggcgcattatgcggaaatcattgatgtgctgggtaaaaaacttccggcaccgctcattggtgaactgccttatctgccgcgcgccgaacagcgagaactggggcaatacatccgcttagctatgctgcgcagtgtgctggcggtagatagagtcacggtgtaa

SEQ ID NO: 461703 - DNA, 540 bp, Shigella boydii
atggcgctccggcaagcgacactgacaagcaaagcatttctcagccaaatcaatttattaaacgcggtacgccgcaatttatgcgcgtcaccctggcatgtcagtcaggccgtggttggcttattatcgctggcttatttgaccggtacacggagctcacccaaagccggaaccatgaccacccgctacgggcgcggtccggtgatgttgttttcgacgggggttatgctgtttggtttactgatgaccttattcagctcgctgtggctgatctttgccggaatgttactcttctcagcaggattcttcgcagcccactcagttgccagcagctggatcggcccccgcgcaaaacgcgctaaaggccaggcctcctcgctgtatctgttcagttactatctggggtcgagtattgccgggacgctgggtggtgttttctggcataactatggctggaacggcgtcggcgcatttattgctctgatgctggtcattgctctgctggtcaggacgcgtttgcatcgtcgtctgcacgcctga

SEQ ID NO: 461704 - DNA, 1035 bp, Shigella boydii; identical to SEQ ID NO: 458389

SEQ ID NO: 461705 - DNA, 1707 bp, Shigella boydii; identical to SEQ ID NO: 458491

SEQ ID NO: 461706 - DNA, 222 bp, Shigella boydii
atgattgatgtcttagggccggagaaacgcagacggcgtaccacacaggaaaagatcgcaattgttcagcagagctttgaaccggggatgacggtctccctcgttgcccggcaacatggtgtagcagccagccagttatttctctggctgaagtggtcaacaaaaactggccaccgagttagagtttttccagtatcgattttccgattcgtttgggggtaa

SEQ ID NO: 461707 - DNA, 555 bp, Shigella boydii
atggagcgggagttccccgaagcactggaacggatgaaagagagactgccaccgtatctcattatggttctggaaaaccagtacaaccgactgaatgagctggactcactgatagaggatattgaaaaacagcttaccagcgtggcgaggcagaatgaaacctgtaagcggttgctggatattcctggcgttggaccacttattgcgacggcagcggtggccaccatgggggaagcatcagcgtttaaatcggggcgagagttcgccgcatatgttggtctggttccaaaacaaacaggctccggagggaaagtacgtctgctggggataagcaaacgtggtgacacttatctcaggacattatttatccacggtgcaagagcggtggcattagtagctaaagagcctggcccgtggataaccgaactgaaaaaacgtcgtccagccagtgtggcaatcgtcgccatggcaaacaagctggcacgaacagtatgggcgataaccgcccatgaccgtaagtatgacaggaaccacgtcagtatcagaccatattaa

SEQ ID NO: 461708 - DNA, 906 bp, Shigella boydii; identical to SEQ ID NO: 458720

SEQ ID NO: 461709 - DNA, 231 bp, Shigella boydii
atgcgaccgttcgccgccgtcgtttaccgggggacatggttatctggatggtggtgcaatgagccaattaccgatgttgttcgccgtctgaacctgagcgcggatggcgaagcggggatgaacctgctggcccgcagcgctgtcacccaagcgcgtcagcgcgtgggggccgccccagtggaatggctcttccgccagaccgcacagacaggggcgcggaacgttacctga

SEQ ID NO: 461710 - DNA, 984 bp, Shigella boydii
atgccattacccgattttcatgtttctgaaccttttacactcggtattgaactggaaatgcaggtggttaatccgccgggctatgacttaagccaggactcttcaatactgattgacgcggttaaaaataagatcacggccggagaggtaaagcacgatatcaccgaaagtatgctggagctggcgacggatgtttgccgtgatatcaaccaggctgccgggcaattttcagcgatgcagaaagtcgtattgcaggcagccgcagaccatcatctggaaatttgcggcggtggcacacacccgtttcagaaatggcagcgacaggaggtatgcgataacgagcgctatcaacgaacgctggaaaactttggttatctcattcaacaggcgaccgtttttggtcagcatgttcatgttggctgcgccagtggcgatgacgccatttatttgctgcacggcctgtcacggtttgtgccgcacttcatcgccctttccgccgcgtcgccatatatgcaaggaacggatacgcgttttgcctcctcacgaccgaatattttttccgcctttcctgataatggtccgatgccgtgggtcagtaactggcaacaatttgaagccctgtttcgctgtctgagttacaccacgatgatcgacagcattaaagatctgcactgggatattcgccccagtcctcattttggcacggtggaggttcgggtgatggataccccgttaacccttagccacgcggtaaatatggcgggattaattcaggctaccgcccactggttactgacagaacgcccgttcaaacatcaggagaaagattacctgctgtataaattcaaccgtttccaggactgtcgctatgggctggaaggcgtcattaccgatccgcacactggcgatcgtcgaccgctaacggaagacaccttgcgattgctggaaaaaatcgccccttccgcactaatgccgatcagttaa

SEQ ID NO: 461711 - DNA, 1392 bp, Shigella boydii
gtggcagaaagtccgacctgggcaccgtactttgactttaccggcgtgcagctgacctggatgctggtgggttacggttttgtggcggcggtgctgccggtgtggttgctgctggccccgcgtgactacctctctaccttcctgaaaatcgggacgatcgtcggtctggcggtaggcattttgattatgcgcccgacgctgaccatgcctgcgctgaccaaatttgtcgatggcactggcccggtatggaccggtaacctgttcccgttcctgtttatcaccatcgcctgtggcgcggtgtctggcttccatgcgctgatctcttccggcaccacgccgaagatgctggcgaacgaagggcaggcttgttttatcggctacggtggaatgttaatggaatccttcgtggcgattatggcgctggtttccgcctgtatcatcgatccgggcgtttactttgccatgaacagcccaatggcggtgctggctccggcagggacggcggatgtggtcgcttctgtcgcgcaggtggtgagtagctggggctttagcattacaccagatacgctcaaccagattgccagcgaagtgggtgaacagtcgatcatttcccgtgcgggcggtgcgccgacgttggcggtggggatggcttacatcctgcacggtgcgctgggtggtatgatggatgtggcgttctggtatcacttcgccattctgtttgaagctctgtttattctgacggcggtagatgcgggtacgcgtgctgcgcgctttatgttgcaggatctgctgggcgtggtgtctcctggcctgaagcggaccgattcactgcctgctaacctgctggcaacggcgctgtgcgtactggcgtggggctacttcctccatcagggcgtggtcgatccgctgggcggtattaacactctgtggccgctgtttggtattgccaaccagatgctggcagggatggcgctgatgctctgtgccgtggtgttgttcaagatgaaacgtcaacgttacgcctgggcggcgctggtaccaacggcctggctgctgatttgtaccctgaccgctggctggcagaaagcgtttagcccggatgcgaaagtcggcttcctagccattgctaacaagttccaggcaatgatcgacagcggcaatattccgtcgcagtatactgagtcacagctggcgcaactggtgttcaacaaccgtctggatgccgggttaaccatcttctttatggtggtcgtggtggttctggcactgttctcgattaagacggcacttgcggcattgaaagatccgaagccaacggcgaaagaaacgccgtatgagccgatgccggaaaatgtcgaggagatcgtagcgcaggcgaaaggcgcgcactaa

SEQ ID NO: 461712 - DNA, 198 bp, Shigella boydii
atgtttgattcactggcaaaagccggaaaatatttaggtcaggcggcgaagctgatgattggtatgcctgattacgacaactatgtcgaacatatgcgggttaaccatcccgatcaaacgccgatgacctacgaggagtttttccgtgagcggcaggacgcgcgctacggtggaaaaggcggcgcgcgctgctgctaa

SEQ ID NO: 461713 - DNA, 1089 bp, Shigella boydii
atgcctcacaatcctatccgcgtggtcgtcggcccggctaactacttttcacatccaagaagtttcaatcacctgaacgattttttcactgatgaacaactttctcgcgcggtgtggatctacggcaaacgcgccattgctgtggcgcaaaccaaacttccgccagcgtttggacttccaggggcaaagcatattttgtttcgtggtcattgcagcgaaagcgatgtacagcaactggcggctgagtccggtgacgatcgcagcgtggtgattggcgtcggcggcggcgcactgctcgacaccgcgaaagccctcgcccgccgtctcggtctgccatttgttgccgttccgacgatcgccgctacctgcgccgcctggacaccgctctccgtctggtataacgatgccggacaggcgctgcattatgagattttcgacgacgccaattttatggtgctggtggaaccggagattatcctcaatgcaccgcaacaatatctgctggcggggatcggtgacacgctggcgaaatggtatgaagcggtggtgctggctccgcaaccagaaacgttgccgctaaccgtgcggctggggatcaataatgcgcaggccattcacgacgtcttgttaaacagtagcgaacaggcacttgccgatcagcaaaatcagcagttaacgcaatcattttgcgatgtggtggatgctattattgctggtggtgggatggtcggtggtctgggcgatcgttttacgcgtgtggcggcggctcatgccgtgcataacggtctgactgtcctgccgcaaaccgagaagtttcttcacggcaccaaagtcgcttacggaattctggtgcaaagcgccttgctgggtcaggatgatgtgctggcgcaattaaccggggcgtatcagcgttttcatctgccgactacgctggcggagctggaagtggatatcaataatcaggcggagatcgacaaagtgattgcccacaccttgcgcccggtggagtccattcattacctgccagtcacgctgacaccagatacgttgcgtgcagcgttcgaaaaagtggaatcgtttaaagcctga

SEQ ID NO: 461714 - DNA, 444 bp, Shigella boydii
atgacaaataaccctctgattccacaaagcaaacttccacaacttggcaccactattttcacccagatgagcgcgctggcgcagcaacaccaggcgattaacctgtcgcaaggctttcctgattttgatggtccgcgctatttacaggagcggctggcgtaccacgttgcccagggggcaaaccaatacgcgcccatgaccggcgtgcaggccttgcgcgaggcgattgctcagaaaacggaacgtttgtatggctatcaaccagatgccgatagcgatatcaccgtaacggcaggggcgacggaagcgttatacgcggcgattaccgcactggtgcgcaatggcgatgaagtgatttgttttgatcccagctatgacagttacgcccccgccatcgcgctttctgggggaatagtgaagcgtatggcactgcaaccaccttga

SEQ ID NO: 461715 - DNA, 663 bp, Shigella boydii
gtgatcctcaacactccgcataaccccagtgcaactgtctggcagcaggctgatttcgccgctttgtggcaggcgatcgccgggcacgagatttttgtcattagcgatgaagtctacgagcacatcaacttttcacaacagggccatgccagtgtgctggcgcatccgcagctgcgtgagcgggcagtggcggtttcttcatttggcaagatctatcatatgaccggctggaaagtgggttattgtgttgcgccagcgcccatcagcgccgaaattcgcaaggtacatcagtatctgaccttttcggtgaataccccggcacagctggcgcttgctgatatgctacgtgcagaacctgagcattatcttgcgttaccggacttttatcgccagaagcgcgatattctggtgaatgctttaaatgaaagccggctggagattttaccgtgtgaaggtacatactttttgctggtggattacagcgaggtttctaccctggatgatgttgagttttgccagtggctgacgcgggagcacggcgtggcggcgattccgctgtcggtgttttgcgccgatcccttcccacataaactgattcgtctctgttttgccaagaaggaatcgacgttgctggcagcagctgaacgcctgcgccagctttag

SEQ ID NO: 461716 - DNA, 252 bp, Shigella boydii
gtgacctgtctggaaggtacgcgtaatcaacgcatcgccgcgactattcgtcataatcgcgctcgtggacgccatcaaatcaccgccatgtcggaaatcgtccgtgaacttagccagttgggatgggacgataataaaattggcaaagagctgggaatggacagcgacgaagtgctgcgcctgaagcaaattaacggcctgcaagagttgtttgccgaccgtcaatattcccgcgcctggacggttaaatag

SEQ ID NO: 461717 - DNA, 1128 bp, Shigella boydii; identical to SEQ ID NO: 458921

SEQ ID NO: 461718 - DNA, 1038 bp, Shigella boydii; identical to SEQ ID NO: 460048

SEQ ID NO: 461719 - DNA, 3087 bp, Shigella boydii
gtgccgggtgctgaggacgtactgccagcgccgctgccgccgtaccgggtgcttaccgggatggcggaccgcttcgggcggacgctgacgtaccggcgtgaggccgcaggcgacctggccggggaaatcaccggcgtgacggacggtgccgggcgggagttccgtctggtgctgaccacacaggcgcagcgggcggaagaggcccggcagcaggcggaagaggcccggcagcaggcggtcgtcgccggagcaaaacgaccggacattcctgattcactgccggagagcacagagtacggccccgacaggggtatccgcctttcggcggtgtggctgatgcacgacccggcatacccggagagcctgcccggtgcgccactggcgcggtacacgtatacggaagccggtgaactgctggcggtatatgaccgcagcaatacgcaggtgcgcgctttcacgtatgacgcgcagcacccgggccggatggtggcgcaccgttacgcgggaaggccggagatgcgctaccgctacgacgatacggggcgggtggtggagcaactgaacccggcagggttaagctaccgctatctttatgagcaggaccgcatcaccgtcaccgacagcctgaaccggcgtgaggtgctgcatacagaaggcggggccgggctgaaacgggtggtgaaaaaagaactggcggacggcagcgtcacgcgcagcgggtatgacgcggcaggaaggctcacggcgcagacggacgcggcgggacggcggacagagtacggtctgaatgtggtgtccggcgatatcacggacatcaccacaccggacgggcgggagacgaaattttactataacgacgggaaccagctgacggcggtggtgtacccggacgggctggagagccgccgggaatatgatgaaccgggcaggctggtatcggagacatcgcgcagcggggagacagtacgctaccgctacgatgacgcgcacagtgagttaccggcgacgacaacggatgcgacgggcagcacccggcagatgacggcggttcaccgcgaggaaggtatcagcctttaccgccactatgacaaccgtggccggttaacctcggtgaaagacgcacagggccgtgaaacgcagtatgagtacaacgccgcaggcgacctgactgccgttatcaccccggacggcaaccggagcgagacacagtacgatgcgtggggaaaggcggtcagcaccacgcagggcgggctgacgcgcagtatggagtacgatgctgccggacgtgtcatcagtctgactaacgagaacggcagtcacagcgacttcagctacgatgcgctggaccggctggtacagcagggcggctttgacgggcggacgcaacgttatcattatgacctgaccggaaaactcacgcagagtgaggatgaggggcttgtcaccctctggcactacgatgcgtcggaccgcatcacgcaccggacggtgaacggcgacccggcagagcagtggcagtatgacggccacggctggctgagagaaatcagccacctgagcgaaggccaccgtgtcgctgtccactacggctacgacgataagggccgcctgacgggcgaacggcagacggtggagaacccggagacgggggaactgctgtggcagcatgagacgaaacacgcctacaacgaacaggggctggcaaaccgcgtcacgccggacagcctgccgccggtggagtggctgacctacggcagcggttacctggcgggcatgaagctgggcgggacgccgctggtcgagtatacgcgggacaggctgcaccgtgagacggtgcgcagcttcggcagcatggcaggcagtaatgccgcatatgaactgaccagcacatacacccccgcaggccagttacagagccagcacctgaacagcctggtgtatgaccgtgactacgggtggaatgacaacggcgacctggtgcgcatcagcggtccgcgacagacgcgggaatacggctacagcgccacgggcaggctggagagcgtgcgcaccctcgcaccggacctggacatccgcatcccgtatgcgaccgacccggcgggaaaccggctgccggacccggagctacacccggacagcacgctcacggcgtggccggataaccgcatcgcagaggatgcgcactatgtttaccactatgatgaatacggcagactgacggagaagacggaccgcatcccggcgggtgtgatacggacggacgacgagcggacccaccactaccactacgacagccagcaccgcctggtgttccacacgcggatacagcatggcgagccactggtcgagagccgctacctctacgacccgctgagccgccggacggggaaacgggtgtggcgtcgcgagcgtgacttgacggggtggatgtcgctgtcgcgtaaaccggaggtaacgtggtacggatgggacggcgaccggctgacgacggtacagaccgacaccacgcgtatccagacggtataccagccggggagcttcgcgccgctcatctgcatcgaaacagacaacggtgaacgggagaaagcgcagtgccgcagcctggcggagaagttacagcaggaagggagcgaagacggtcacggtgtggtgttcccggctgaactggtggggctgctggacaggctggagggggaaatccgggcaaactgcgtgagcagtgaaagccgccagtggcttgcgcagtgcgggctgacggtggagcggctggcggcacagatagagccggtttatttgcctgagcgaaaaatacatctttatcactgtgaccaccggggcttgccgctggcgcttatcagtgaagacggcaatacggcgtggagcgcggaatatgatgaatggggcaaccagcttaatgaggagaacccgcatcacctgcaccagccgtaccggctgccggggcagcagtatgataaggagtcggggctgtactacaaccggaaccggtactacgatccgttgcaggggcggtatatcactcaggacccgatagggctggaggggggggtaatgactccaacttattga

SEQ ID NO: 461720 - DNA, 564 bp, Shigella boydii
atgagcggaaaaccagcggcgcgtcagggagatatgactcagtatggcggtcccattgtccagggttcggcaggtgtaagaattggcgcgccaactggcgtggcgtgctcggtgtgtccgggcgggatgacctcgggcaacccggtgaacccgctgctcggtgcaaaagtacagcccggcgagacggaccttgcgctgcccgacccgctgccgttcattctctcccgcacctacagcagctaccggacgaagacgcctgcgccagtgggaatttttggccccggctggaaagcgccttctgatatccgcttacagatacgcgatgatgcactggtactcaacgacaacggcgggcggagcattcactttgagccgctgctgccgggggaggctgtgtacagccgcagtgagtcaatgtggctggtgcgtggcggtaaggcagcgcagccggacggccacacgctggcacggctgtgggcgtcgctgccgccggatatccggttaagcccgcatctttacctggcgaccaacagcgcacaggggccgtggtggatactggggtga

SEQ ID NO: 461721 - DNA, 1257 bp, Shigella boydii
atgagtggactcaaacaagaactggggctggcccagggcattggcctgctatcgacgtcattattaggcaccggcgtgtttgccgttcctgcgttagctgcacaggtagcaggcaataacagcctgtgggcgtggcccgttttgattatcttagtgttcccgattgcgattgtgtttgcgattctgggtcgccactatcccagcgcaggcggtgtcgcgcacttcgtcggtatggcgtttggttcgcggcttgagcgagtcaccggctggttgtttttatcggtcattcccgtgggtttgccagccgcgctacaaattgccgccgggttcggccaggcaatgtttggctggcatagctggcaactgttgttggcagaactcggtacgctggcgctggtgtggtatatcggtactcgcggtgccagttccagtgctaatctacaaaccgttattgccggacttatcgtcgcgctgattgtcgctatctggtgggcgggcgatatcaaacctgcgaatatccccttcccggcacctggtaatatcgaacttaccgggttatttgctgcgttatcagtgatgttctggtgttttgtcggtctggaagcatttgcccatcttgcctcggaatttaaaaatccagagcgtgattttcctcgcgcattgatgattggtctgctgctggcaggattagtctactggggctgtacggtagtcgtcttacacttcgacgcctatggtgaaaaaatggcggcggcagcatcgcttccaaaaattgtagtgcaactgttcggtgtaggagcgttatggattgcctgcgtgattggctatctggcctgctttgccagtctcaacatttatatacagagcttcgcccgcctggtatggtcgcaggcgcaacataatcctgaccactacctggcacgcctctcttctcgccatatcccgaataatgccctcaatgcggtgctcggctgctgtgtggtgagcactttggtgattcatgctttagagatcaatctggacgctcttattatttatgccaatggcatctttattatgatttatctgttatgcatgctggcaggctgtaaattattgcaaggacgttatcgactactggcggtggttggcgggctgttatgcgttctgttactggcaatggtcggcaggaaaagtctctatgcgctgatcgtgctggcgggattatggctgttgctgccaaaacgaaaaacgccggaaaatggcataaccacataa

SEQ ID NO: 461722 - DNA, 960 bp, Shigella boydii
atgctagttgtagaactcatcatagttttgctggcgatcttcttgggcgccagattggggggaataggtattggttttgcaggcggattgggggtgctggttcttgccgctattggcgttaaacccggtaacatcccgttcgatgtcatttccattatcatggcggttatcgccgctatttctgccatgcaggttgctggcggtctggactatctggttcatcagacagaaaagctgctgcgccgtaacccgaaatacatcacgatcctcgcacctatcgtgacctatttcctgacaatctttgctggtactggcaacatctctctggcgacactgccagttatcgctgaagttgcgaaggaacaaggcgttaaaccttgccgtccgctctctactgcagtggtatccgcgcagattgcgatcaccgcatcgccaatctcagcggcagtggtttacatgtcttccgtgatggaaggtcatggcatcagctacctccatctgctctccgtggtcatcccgtccaccctgctggcggttctggtgatgtcctttctggtcactatgctgttcaactccaaactctctgacgatccgatttatcgcaagcgtctggaagagggcctggttgaactgcgcggtgaaaagcagattgaaatcaaatccggtgcaaaaacgtccgtctggctgttcctgctgggcgtagttggcgtggttatctatgcaatcatcaacagcccaagcatgggtctggttgaaaaaccgctgatgaacaccaccaacgcaatcctgatcatcatgctcagcgttgcaactctgaccaccgttatctgtaaacaacatcctcaactccagcaccttcaaagcaggtatgagcgcctgtatttgtatcctgggtgttgcgtggctgggcgatactttcgtttccaacaacatcgactggatcaaagataccgctggtga

SEQ ID NO: 461723 - DNA, 1005 bp, Shigella boydii; identical to SEQ ID NO: 459016

SEQ ID NO: 461724 - DNA, 624 bp, Shigella boydii; identical to SEQ ID NO: 461524

SEQ ID NO: 461725 - DNA, 1299 bp, Shigella boydii
atgcgtaaaattaaagggttacgttggtatatgatcgcactggtgacgcttggcaccgtgcttggttacctgacgcgtaacactgtggcggcagctgagccaactctgatggaagagttaaacatctccacccaacagtattcctatatcatcgcagcctattctgctgcttatacggtcatgcaaccggtagcgggctatgtactggatgtgctgggtacgaaaatcggttatgcaatgtttgctgtactgtgggccgtattctgtggtgcaaccgcgctggctggtagcaggggtggcctggcgattgctcgtggtgcagtcggtgccgcggaagcagcgatgatcccggcgggtctgaaagccagctccgaatggttcccggcgaaagagcgttccatcgcggtaggttactttaacgtaggttcttcgattggtgcgatgattgcgccgccgctggtggtatgggcaatcgtaatgcacagctggcagatggcatttatcatctccggtgcattgagctttatctgggcgatggcatggctgattttctataaacatccgcgcgaccagaagcatctgaccgatgaagaacgcgactatattattaatggtcaggaagcccagcaccaggtgagcacggcgaagaaaatgtccgttggtcagatcctgcgtaaccgtcagttctggggtatcgcgctgccgcgtttcctggcagaaccagcctggggtacttttaacgcgtggatcccgctgttcatgtttaaagtttacggctttaacctgaaagagatcgcgatgttcacctggatgccgatgctgtttgctgacctcggttgtatcctcggtggttacctgccgccgctgttccaacgttggtttggtgtgaacctgatcgtttcccgtaagatggtcgtaacgctgggtgcagtgctgatgattggcccgggtatgatcggcctgttcaccaacccgtatgtcgcaattatgctgctgtgtatcggtggttttgctcatcaggcactgtctggcgcgctgattacgctctcttctgacgtgttcggtcgtaacgaagtggcgacggcgaacggtttaaccgggatgtccgcatggctggcaagtacgctgttttcgctggttgtcggtgcactggctgacaccatcggcttcagcccgctgttcgcagtactggcagtgttcgacctgttaggtgcgctggttatctggaccgtgttgcagaacaaaccggcgattgaggtagcgcaggaatcacataacgatcccgcaccgcaacattaa

SEQ ID NO: 461726 - DNA, 552 bp, Shigella boydii
atgaccgcgtattggctggcccagggcgtgggtttcatcgcctttctgattggtatcacaacatttttcaatcgtgacgaacgtcgcttcaaaaagcagctttcggtctatagcgccgttattggcgtacatttttttcttctgggcacctatcccgctggtgccagtgccatccttaatgccattcgtacattgattaccttacgcacgcgcagcttatgggtaatggcgatttttattgtgctgactggcggaattggcctcgcgaagttccatcatcctgtcgaactattgccggttatcggtacgattgtcagtaccagggcgctgttccgctgtaaagggctcaccatgcgctgcgtgatgtggttttcaacgtgttgctgggtgattcacaacttctgggcggggtcgataggcggcacaatgattgagggtagttttctgcttatgaatggcttgaatatcattcgtttctggcggatgcagaaaaggggaattgatccgtttaaagtagagaaaccccctcccgccgtagacgaaaggggttaa

SEQ ID NO: 461727 - DNA, 123 bp, Shigella boydii
atgttcgacgtactaatgtatttgtttgaaacctatattcacacagaagctgagttgcgtgtggatcaagacaaacttgaacaggatcttaccgacgcaggatttgatcgagaagatatctga

SEQ ID NO: 461728 - DNA, 1125 bp, Shigella boydii; identical to SEQ ID NO: 458830

SEQ ID NO: 461729 - DNA, 186 bp, Shigella boydii
gtgttcttcggtagcgatcacggcggcgagcgtggagcactgctgtacgggctgatcggcacctgccgactgaacggtatcgatccggaagcgtatctgcgccatgttctgagcgtactgccggaatggccctccaaccgtgttgacgaactcctgccatggaacgtagtactcaccaataaataa

SEQ ID NO: 461730 - DNA, 381 bp, Shigella boydii; identical to SEQ ID NO: 458903

SEQ ID NO: 461731 - DNA, 180 bp, Shigella boydii
atgggcatcggaccttttattgtgcacagaaaaggccagcctcgcttgagactggcctttctgacagatgcttacttactcgcggaacagcgcttcgatattcagcccctgcgtttgcaggatttcacgcaaacggcgcaggccttcaacctgaatctggcgaacaacgttcacgggtga

SEQ ID NO: 461732 - DNA, 1380 bp, Shigella boydii
atgatcaagattggcgttatcgccgatgattttaccggcgcgacggatatcgccagttttctggtggaaaacggtctaccaacggtacaaattaacggtgttccaacaggtaaaatgccggaagcaatcgacgcactggtgatcagcctgaaaacgcgctcctgtccggtggttgaagccacacagcaatcgctggcggctctgagctggttgcaacagcaaggttgcaaacagatctatttcaaatactgctctactttctacagtacggcgaaaggtaatatcggcccggttaccgatgcattaatggatgctctcgacacgccgtttacggtcttctctccggccctgtcggtcaacggacgtacggtttatcaggggtatttgttcgtaatgaatcaactgctggccgaatccgggatgcgccatcacccggtaaatcccatgaccgacagctatcttccccgtctggttgaagcgcaatccacagggcgctgcggcgtcgtttcggcacatgttttcgaacaaggtgtggatgccgttcgtcaagagctggctcgcttacagcaagagggctaccgctacgcggtgcttgatgcgctgaccgaacaccatctggaaattcagggagaagccttgcgcgatgccccactggtaacgggcggttctggtctggcgattggcctggcccggcagtgggcgcaagaaaacggtaaccaggctcgcgaagcagggcatccgctcgctgggcgcggcgtagtgctctccggttcatgctctcaaatgaccaaccgccaggtggcacattaccgtcaaattgcaccagcccgtgaagttgatgtggcacgctgcctctcaaccgaaactctggccgcttatgcacacgaactggcagagtgggttctgggtcaggaaagtgtacttgctccactggtttttgccaccgccagcactgacgcattggcagcaattcaacagcaatacggtgcacaaaaagccagtcaggcagtagaaactctgttttctcaactagcggcgcggttagcagcggaaggcgtgacacgctttattgtcgcaggcggtgagacctccggcgtagtcacacagagcctgggcataaaagggtttcatattggcccaaccatttcccccggcgtgccgtgggtaaacgcactggataagcctgtctcactcgcccttaaatctggcaacttcggtgatgaagccttttttcacgagcccaaagagagtttttatcatgagcgatttcgcaaaagtagagcagtctttgcgagaggagatgacgcggattgccagttcattctttcagcgcggctatgcaaccggttcggctggcaatctgtcgctgcttttacctga

SEQ ID NO: 461733 - DNA, 1200 bp, Shigella boydii
atgagtaatattgtttacctgacagtaacgggagaacaacaaggaagcatctccgcaggttgtgggacttctgagtctacaggtaatcgttggcagagcgggcatgaggatgaaatatttacattctcactcttaaataatattaataatacggggcttggttcacagttccatggtataacattttgtaaattaattgataaaagcactccattatttattaattccattaacaataatgaacaattatttatgggatttgacttctatcgaataaatagatttggtagattggaaaagtattattatatacaactaagaggcgcttttttatcggctattcatcaccagatcattgaaaaccaactggatacagaaacaataactattagttatgaatttatcctctgtcaacatcttatcgcaaataccgagttcagctatttggcactccctgaaaattataaccgtttgtttttaccaaattcaaaaaaccaaacaaataatcgtttcaaaacgttaaacagcaaagctattggcaggctacttgctgctggtggcgtatacaatgggaacattgaaggattcagagatactgcggaaaaactgggtggagatgcaataaaaggctatgatcaaatactaaatgaaaaaacagcgggcatagcgatagcaacagcatctattcttttaacaaagcgttctaatgttgatacatatacagaaataaatagttacttaggcaaacttagaggtcaacaaaaacttcttgatggtatagacagaatagaaataatatacattaagagaccttcaaaagacttagctaacttacgaaaggagtttaataaaactgtaagaaaaaattttcttatcaaacttgcaaaaacctccgaagcatctggaagattcaacgccgaagaccttttaagaatgagaaagggcaatgttcctctaaattataatgttcaccataaactatctctagatgatggtggtactaatgatttcgaaaatttagtattaatcgaaaacgaaccatatcataaagtttttactaacatgcaatcacgaatagctaagggaatattagtaggtgaaagcaaaatcactccctgggccattccatctggctcaatttatcctcccatgaaaaatgtaatgaacgcatcccacacaattaaacacggagcagtatga

SEQ ID NO: 461734 - DNA, 1089 bp, Shigella boydii
atgtatgattatttgattgtcggcagcgggctttttggcgcggtttgtgcaaatgagcttaaaaaaagaaatgtcaaaaatcttgtgatagataaacgcaaccatgtaggagggaatgtttataccgaaaacattaatggaattcaagtgcataaatatggtgcacatatatttcatactaatgataagtatatttgggagtatgtaaataaacttgttgagtttaatcgttttacaaattcacctctagcttattttaaaggggaactttttaatttaccatttaacatgaatactttttatcagttgtggggagtgaaaaaaccttcagaagctgccgctattatagaagaacaacgaaaagtaatgctaaaaaaagaacctacaaatttggaagagcaggctatttcactagttggagtagatatctatgagaaattgattaagggatataccgaaaaacagtggggacgtagttgtaaagagttaccatccttcattattcgacgactaccagtaagatttacatttgacaataattatttttctgacaaatatcagggtattcctgttgggggatatacgaatttaattgaaaaaatgcttgagggagttgaggttcatttaggcattgactatcttaaagaacgcaagaaatattcgaaaattgcaaaaaaaatcatatatacaggaccgattgatgagtattttgataatgtgctaggacagttggagtataggtcattaaaatttcaaacagaaaaaatggatattcctaattatcaggggaatgcagtggttaattacactgaaaaagaaataccatttacgcgaattatagaacataagcattttgattttgttgaatctaattttaccataattactaaagaataccctaaagagtggagtaatggtgatgagccatactaccctatcaatgatgagaaaaacatggctttatatagaaaatataaatctttggctgatgaggaaaatgtgatttttggtgggcgtttggctgaatataaatattatgacatgcaccaagttattcggtctgccttaaactgtgtgaagcatatttaa

SEQ ID NO: 461735 - DNA, 1263 bp, Shigella boydii
gtgaaaacagatttgactgtatttaagaatattatatcgctatttagcattcgttttgctggctacataatacctttaatcacgttgccgtatcttgtcaaggtacttcaacctgttggatttggatatttatcatttggtattgctgttttacaatattgtacgctagttgttaattatgggtttgatctttcagcaacaagaaaaattgcacagaatagagaaaatgtgcattacatcagcgatattttttggaatattctttttttgcggttgtttatttctcttgtaggttttttagtattagtggtttttatccatttatttcctgatttgtatcgaattaaatggattttgctttgggggtatttgtctgttttggggacagctctctttccaatgtggttatttcaggggaaagaacagcttggacgaatatcagcagctcgtatatttttacagatttcttgcgtacctttattttttgtttttgtaaaaaacactcaagatgattgggtcgcatcactaatatatgctctaccgcagttgttaatatcagtagtggcagtatatatcattcataaaaggaagtggattgtattaaaaaaaataaaacttgcaacaatcaagaaagaattaatagatggttggcatctttttatatctacggcagcaattagtctctatacaacaaccattactgtagtcttagggattgtatcaggtccctatagtgttgccatatatacttctgcaaataaaatattacaggcggctcaggggctttatcaaccaatatcctctgcattttacccgcgaataaataacctgatgaaagaaaataaacaattagcatttaaaactataagaaaactatttaaaatacagtttgttattactatttgcataagcgttgggttgtttttgttttctaatattgttgttgatattttatacggtgatgattatcgaaatgcggcattaattcttcagctattatcacctattcctatagttgtgggatgtagtaacatttttggaatacaaatattattaacatgtggttataaaaaggagttttccactattttactgatctcagggcttattaatatgattttgatatttcctctttgctataagtttaacgagtttggagcagcattttctgttttaattacagagatatttgttactgtttctatgctgtttgtggttattctgaaaaaaataccggtttgggagagtaagcgtaatgtatga

SEQ ID NO: 461736 - DNA, 1395 bp, Shigella boydii
atgccatttaaaaaactctcccgacgcaccttcctgacggcaagctcggcgcttgccttcctccatacccctttcgctcgcgcacttcctgcccgacaaagcgtcaatatcaacgactacaatccacacgactggatcgcctcatttaaacaagccttcagcgaagggcaaacggtcgtcgtgcctggcggattggtttgcgacaatatcaacactggcatcttcatcccccctggcaaaacgttacacatcctgggaagcctgcgcggcaacggcagagggcgatttgtcttacaggacggcagccaggtgacaggggaggagggcggcagtatgaataacatcaccctggatgtgcgtggttctgactgcaccatcaaagggctggcgatgagcggctttggtccggtaacgcagatttatatcggcggcaaaaacaaacgggtcatgcgcaacctgaccatcgataacctgaccgttagccacgctaattacgccatcttacgccagggatttcataaccagataatcggtgccaacatcaccaactgtaagttcagcgacttacagggcgacgccatcgaatggaacgtggcgattaacgacagtgatattttgatatctgaccatgtcatcgagcgcatcaactgtaccaacggcaaaatcaactggggaatcggcataggccttgcaggaagcacttacgataataattacccggaagaccaggcagtgaaaaactttgtcgtggcgaatatcacgggatcggattgtcggcagttgatccatgttgaaaatggcaaacattttgttatccgtaatatcaaagcccgcaatatcacgccggatttcagtaagaaagcaggcattgataacgcgacagttgctatttacggttgtgacaatttcgtgattgataatattgaaatgattaatagcgccgggatgttaatcggctatggggtaattaaaggcaaatatctctcgataccgcaaaatttccgagtgaataatattcaactggataatacccaccttgcttacaaattgcgcggtatccaaatctccgccgggaatgctgtctcctttgtggcgctgactaacattgagatgaagcgtgcgtcgctggagttacacaacaagccgcaacacctttttatgcgtaatatcaaggtaatgcaggaatcctctgttggaccagcattgagcatgaactttgacatgcgcaaagacgttcgcggcgtctttatggcgaaaaaagaaacactgctgtctcttgcaaatgttcatgcggtgaatgaaaaagggcaaagctccgtcgatatcgacaggataaatcaccatattgttaatgtggaaaagattaactttagattgccggaacggagggagtag

SEQ ID NO: 461737 - DNA, 174 bp, Shigella boydii; identical to SEQ ID NO: 459318

SEQ ID NO: 461738 - DNA, 315 bp, Shigella boydii; identical to SEQ ID NO: 459373

SEQ ID NO: 461739 - DNA, 789 bp, Shigella boydii; identical to SEQ ID NO: 459375

SEQ ID NO: 461740 - DNA, 231 bp, Shigella boydii
atgtatcgcaatggcgtgattgaagaaaccggcgtcgccgctggcgtgctgaatcatccggcaaacggcgtggcctggctggcgaacaaactcgcaccgtatgacgtacaactggaagccgggcaaatcattctcggtggttcgttcacccgcccggttccggcgcgtaagggcgacaccttccacgtcgattacggcaacatgggttccattagctgccgctttgtttaa

SEQ ID NO: 461741 - DNA, 1290 bp, Shigella boydii; identical to SEQ ID NO: 459380

SEQ ID NO: 461742 - DNA, 1167 bp, Shigella boydii
atgtcccgaaaagaccttgccaatgcgattcgcgcactcagtatggatgcggtacaaaaagccaactctggtcatcccggcgcgccgatgggcatggctgatattgccgaagtgctgtggaacgattttcttaaacataaccctaccgacccaacctggtatgatcgcgaccgctttattctttccaacggtcacgcgtcgatgctgctctacagtttgctgcatctgaccggttacgacctgccgctggaagagctgaagaacttccgtcagttgcattcgaaaaccccaggccacccggagattggttatacgcccggtgttgaaaccaccaccggtccacttggacaaggtttggcgaacgccgtcggactggcgatagcagagcgtacactggcggcgcagtttaatcagccggatcatgaaattgtcgatcacttcacctatgtgtttatgggcgacggctgcctgatggaaggtatttcccacgaagtctgttcgctggcgggcacgctaggactgggcaagctgattggtttttacgatcacaacggtatttcgattgatggagaaaccgaaggctggtttaccgacgatacggcaaaacgttttgaagcctatcactggcatgtgatccatgaaatcgacggtcacgatccgcaggcggtgaaggaagcgatccttgaagcgcaaagcgtgaaagataagccgtcgctgattatctgccgtacggtgattggctttggttcgccgaataaagcaggtaaggaagaggcgcacggcgcaccactgggggaagaagaagtggcgctggcacggcaaaaactgggctggcaccatccgccatttgagatccctaaagagatttatcacgcctgggatgcccgtgaaaaaggcgaaaaagcgcagcagagctggaatgagaagtttgccgcctataaaaaggctcatccgcaactggcagaagagtttacccgacggatgagcggtggtttaccgaaggactgggagaaaacgactcagaaatatatcaatgagttacaggcaaatccggcgaaaatcgctacccgtaaggcttcgcaaaatacgcttaacgctgatatgactttccgtgtcaaaccggaatctctaattttgacgattttctttttaggtttaattccctga

SEQ ID NO: 461743 - DNA, 375 bp, Shigella boydii
gtgggctttgccctggggaaccttgaccctgaattacgagaatttttcagcaaagcggtgcaaacgctgattccattctttgccttcgcgctgggcaataccattgatttgactgtgattgcccagactggtttgctggggatcctgttgggtgtggcagtaattatcgtgaccggtattccgttgattatcgccgataaattgattggcggtggcgatggcactgccggaattgccgcttccagttccgcaggggccgcggtagcgacggcggtcattgtgacttcgattctggtgccaattcttacctctatctggtcacgtaaagtcaaagccagagcagcgaaaatcgaaattttaggtacggtgaaataa

SEQ ID NO: 461744 - DNA, 939 bp, Shigella boydii; identical to SEQ ID NO: 459565

SEQ ID NO: 461745 - DNA, 2076 bp, Shigella boydii
atgagtcagcttgatgacaccatccttgatgcgctgacgcacgttactttcccaaagggttttgcacaggcagagcccgcatgggttgtcacggtagacggtgttaattacccactctggcaaacagatgccctggtagtcggcagtggtgcagcaagattacgtgcggcagttgaacttaaacgccgccagcaaaatgtgctgatcgctaccgccgggttatatatggggacgtcggcatgttctggttccgataaacagacactatttaccgccgctaccgcgggcaacggcgacaacttcaccaaactggcagaggcactggcgagcggtggggcgatggatcacgacaccgcttatgtcgaagcggtaggttctctgcacactctaggcgggttgcaatatcttggtctggaattaccggaagatcgctatggcgcgattcttcgttatcaaaccgaccatgacgaagccgggcgtgcaacctcgtgtgggccgcgtacctcaaggttaatggtgaaagtgctgttggaagaagtacagcgcctcgccattccagtgttgaccagtgcaacagtgattaaactgctgcatcagcgtgacgaaaacggcgaagaccgcgtggcaggggcaatcctcgcgaccggtcatcgcgcccataacccatgggggctggcaattgtgactgcgcccaatgtggtactggcaacgggcggaccgggcgagctttatcgcgacagtgtttatccacataaatgcttcggctcgctggggctggcgctggaggaaggtctgacgctaaccaatctgaccgaaagccagtttggtataggcacgccgcgtagcacgtttccgtggaatttatccggcacctatgtacaggtgatcccgtatatctattccgtggatgctgagggtaacgagtataacttcctcgcggattactatcgcaccacccaggagctggcttcaaacattttccgtaaaggctatcagtggccgttccacgccactcgggtgatggattttggctccagcttgttagatatggcagtagcgcaagagcagcaatcagggcgtcaggtatttatggatttcaatcgcaatcctgaagcggtgccgggtgacctgccgttctcattagatcgactggacgacgacgttcgcgcgtatctggaaaataacgacgctctggcaccatcgcccatcgaacggctgcaacgaatgaatccgctgtctatctcgctgtataagatgcacggttacgatctcaccacacagcctttgcagtttgccatgaataatcagcatatgaatggctgcattgaagtggatatctggggacaaacctccctgcccggctgtttcgccgtgggggaagttgctggcacacacggcgtcactcgcccaggtggtgcagcattgaatgccgggcaggtttttgctgttcgtctggcacgttttattggttgcacgcaaaagcggtctgttgagggtgatgtcgcgcagctggtagcctcatctctgaatatagtcagagaagttatcgctcaggcactggcaaacgagaacggaatggcgctggtaacggtgaaagacaaaatccaggcgcgaatgtctgattacgccggatttatttgtcatgccgataaagttcgtcatgccacccgtgacgccctgctgctaagtgagtttgtacaacaacacggtttaaccatcaatcacgcaggcgaaattgccgaactgtttatgtggcggcatatgacgctgacttctgccgccgtattaacgcaattgacgcattatattgacgcaggtggtggcagtcgtggagcacggatggttattgatccacaaggcaaatgcctcccacaaactcgtcgcggcgcaaaagaagaatggcgttttcgctctgaacgtgctgaagacaaaaatcacagattaacgattcaatattcgcaaggttcttttattaccgaagtgaagtctttacgtatgcaaccgtgtattaacggtatttactttgaaaaaaactggccagactttttaggtaatgctgccaacttactgatttag

SEQ ID NO: 461746 - DNA, 783 bp, Shigella boydii
gtgccaaaacctggtacgacgataactattccttcacaactgttattacctgatgcaccgcgtcaggggattatcgttaaccttgcagagctgcgcctttattattatccgccgggagaaaatatcgtgcaggtttatccgataggtattggcttgcaggggctggaaacgccggtgatggaaacgcgtgtggggcagaaaatccctaatccaacctggacgcctacggcaggcattcgtcaacgttcgctggagcgtggcattaaattactgccagtcgttcctgccggaccaaataacccgctaggacgttacgcactgcgcttcgcgcatggtaatggcgaatacctcattcatggtaccagtgcgccggacagcgtcggtttgcgcgtcagttcgggctgtattcgcatgaatgcaccggatattaaagccttattctccagcgtgcggacgggaacgccggtgaaagtgatcaacgaaccggtgaaatattccgtggagcctaacgggatgcgttatgttgaagtacatcgaccactatcggcagaagaacagcagaacgttcagacaatgccatacacactgccagcaggctttacgcaatttaaagacaataaggctgtagatcagaagttagtcgataaagcgttgtatcgtcgggcagggtatccggtttcggtgagcagtggagcaactcccgcagccagcaatgcgccttcagtagagtcagcgcagaatggtgaaccagagcaagggaatatgttacgcgcgaggcagtag

SEQ ID NO: 461747 - DNA, 345 bp, Shigella boydii
atgaagaaaacattacttctttgtgcgtttcttgttgggctggtaagcagcaatgtaatggcattgactctggatgaagccagaacgcaggggcgggtcggggaaacattttatggttatctggttgcgctgaaaacggatgctgaaacagagaaattagtaaccgacattaatgccgaacgtaaagcgagttaccaacaactggcaaagcaaaataatgtgtctgtagatgatatcgcgaaactcgccgggcaaaagctcgtagctcgggccaaaccgggggaatatgtacaagggataaacggtaaatgggtacgaaaattggtaatgactccaacttactga

SEQ ID NO: 461748 - DNA, 186 bp, Shigella boydii
atgaaaattttactggctgcgttgacgtcatcttttatgctggctgcctgtacgccgcgtattgaagtcgctgcgcccaaggaaccgatcactatcaatatgaacgttaaaattgagcatgagatcatcatcaaggcagacaaagatgtcgaagagctgcttgaaactcgtagcgatctttactga

SEQ ID NO: 461749 - DNA, 2640 bp, Shigella boydii
atgctgggtaaatataaagccgttctcgcgctgttattactgattattcttgtgccgttgacgctgctgatgacgctcgggctgtgggttcccacgctggcgggcatctggctaccgctcgggacacgtattgcattagatgaaagcccacgcattacgcgtaaaggtttaatcattcccgatctccgttatctggtgggagattgtcagcttgcgcatatcaccaacgccagcctttcacatcccagccgctggttattgaacgtcggcacggtagaatttgattctgcttgtctggcgaaattgccgcagacggagcaatcgccagctgctccaaaaaccctcgcgcagtggcagtccatgctgcctaacacctggatcaatatcgataaactgattttttctccctggcaggaatggcagggaaaactctctctcgcattaacctctgatatccagcaactgcgttatcagggcgaaaaagttaaatttcaaggccagctgaaagggcaacaacttacagtcagcgaactggatgtcatcgcgtttgaatatcagccgccggttaaactggtgggggaatttactatgccgctcgtgccggatggacttcctgtaagtgggcatgctactgcgacgttaaacttgccgcaggaaccgtcactggtggatgcagagctggactggcaggaaaatagcgggcaattgattgtgctggcacgtgataacggcgatccgttgctcgatttgccgtggcaaattactcgtcaacaattgaccgtaagcgatggtcgctggagttggccgtatgcaggttttcctttgagtggccgactgggtgtcaaagtcgacaactggcaggcagggcttgagaacgctctgatcagcggacgactgagtgtgctgacccaggggcaagcgggtaaaggtaacgcggtgctaaattttggcccaggaaaattaagcatggataacagccagctgcctctgcagctgaccggtgaagcgaaacaggcggacctcattttatatgcccgcttacccgcgcagctaagtggaagtctgactgacccaacgctggcctttgagccaggcgcgttacttcgttcaaagggaagagtcatcgattcgctggacatcgatgaaatccgctggcctttagcgggtgtaaaagtcacccaacgtggtgttgacggacgtttgcaggccattttgcaggcgcatgaaaatgaactgggcgatttcgtgctgcatatggatgggctggcgaatgattttctccctgacgcgggccgctggcagtggcgctactggggaaaaggcagttttacaccgatgaatgccacctgggatgtcgcaggaaaaggtgaatggcatgacagcacgattacgctgaccgacctctccaccggtttcgaccagttacaatacggtacgatgacggtagaaaagccgcgattaattctggacaagcccgtcgtctgggtacgtgacgcacagcatccctccttcagcggcgcgctgtcactggacgccgggcaaacgctgttcactggcggcagtgtgttaccgccatcaaccttaaaatttagcgtcgatgggcgcgatccgacgtatttcctctttaaaggcgatttacatgctggtgagattggcccggttcgggtaaatggtcgctgggacggtattcgtctgcgcggtaacgcctggtggccaaaacaatcactgactgtattccagccgctggtgccacccgactggaagatgaacttacgcgatggtgaactgtatgctcaggttgcattttctgctgcgcctgaacaaggattccgcgcgggagggcacggcgtgttgaaaggcggtagtgcctggatgccagataatcaggttaacggtgtcgattttgtcctgcctttccgttttgccgatggagcctggcatctggggactcgcggccccgttacgttgcgaattgccgaagtgattaatctggtgacagcgaaaaatattacggctgatttgcaagggcgttatccgtggactgaagaagaacccttgctgttgactgatgttagcgtcgatgtgttaggcggtaacgtactgatgaaacaattacgtatgccgcaacatgacccggcgctgttgcggctgaataatctctcatccagcgaactggttagcgccgtcaatccgaaacaattcgccatgtccggggcatttagtggtgcattgccgttatggctaaacaacgaaaaatggatagtgaaagatggttggctggcaaatagcgggccaatgaccttgcggctggataaagacaccgcagatgcggtggtgaaagacaatatgactgcgggttcagcaattaactggttgcgctatatggaaattagccgttcatcgacaaatattaatttagataatctcggtttattaaccatgcaggccaacattacaggtaccagtcgcgttgatggtaaaagcggtacggtaaaccttaattaccatcatgaagagaatatttttacgctgtggcgcagtttacgctttggcgataatctccaggcatggttggagcagaacgcacgtctgccgggaaatgactgtccgcaaggaaaagagtgtgaggaaaaacaatga

SEQ ID NO: 461750 - DNA, 990 bp, Shigella boydii
atgaaactcgccgtttatagcacaaaacagtacgacaagaagtacctgcaacaggtgaacgagtcctttggctttgagctggaattttttgactttctgctgacggaaaaaaccgctaaaactgccaatggctgcgaagcggtatgtattttcgtaaacgatgacggcagccgcccggtgctggaagagctgaaaaagcacggcgttaaatatatcgccctgcgctgtgccggtttcaataacgtcgaccttgatgcggcaaaagaactggggctgaaagtagtccgtgttccagcctatgatccagaggccgttgctgaacacgccatcggtatgatgatgacgctgaaccgccgtattcaccgcgcgtatcagcgtacccgtgacgctaacttctctctggaaggtctgaccggctttactatgtatggcaaaacggcaggcgttatcggtaccggtaaaatcggtgtggcgatgctgcgcattctgaaaggttttggtatgcgtctgctggcgttcgatccgtatccaagtgcagcggcgctggaactcggtgtggagtatgtcgatctgccaaccctgttctctgaatcagacgttatctctctgcactgcccgctgacaccggaaaactaccatctgttgaacgaagccgccttcgatcagatgaaaaatggcgtgatgatcgtcaataccagtcgcggtgcattgattgattctcaggcagcaattgaagcgctgaaaaatcagaaaattggttcgttgggtatggacgtgtatgagaacgaacgcgatctgttctttgaagataaatccaacgacgtgatccaggatgacgtattccgtcgcctgtctgcctgccacaacgtgctgtttaccgggcaccaggcattcctgacagcagaagctctgaccagtatttctcagactacgctgcaaaacttaagcaatctggaaaaaggcgaaacctgcccgaacgaactggtttaa

SEQ ID NO: 461751 - DNA, 423 bp, Shigella boydii
atgaagaaagtagccgcgtttgttgcgctaagcctgctgatggcgggatgtgtaagtaatgacaaaattgctgttacgccagaacagctacagcatcatcgctttgtgctggaaagcgtaaacggtaagcccgtgaccagcgataaaaatccgccagaaatcagctttggtgaaaaaatgatgatttccggcagcatgtgtaaccgctttagcggtgaaggcaaactgtctaatggtgaactgacagccaaagggctggcaatgacccgtatgatgtgcgctaacccgcagcttaatgaactcgataacaccattagcgaaatgctgaaagaaggtgcacaagtggatctgaccgcgaaccagttaacgctggcgaccgcgaaacagacattaacttataagctggcggatttaatgaattaa

SEQ ID NO: 461752 - DNA, 267 bp, Shigella boydii
atgcgagcagcgttttgggtagggtgtgccgctttattgttgtcggcgtgtagtagtgaacctgttcagcaggcgactgcggcgcacgtagcgccaggtttaaaagcgtcgatgtccagtagtggagaagcaaattgtgcaatgatcggcggttcgctttctgttgcccgtcaactggatggcacggcgattgggatgtgtgcattacccaacggcaaacgctgtagcgaacagtcacttgccgccgggagctgtggcagctattaa

SEQ ID NO: 461753 - DNA, 3525 bp, Shigella boydii
atgattactattgacggtaatggcgcggttgcttcggtggcgtttcgcaccagtgaagttatcgccatctaccctattacccccagttccacgatggcagaacaggctgatgcctgggccggaaacggcttgaagaacgtttggggagacacaccacgcgtggttgaaatgcagtcggaagcgggtgctatcgctaccgtgcatggcgctttgcagacgggtgccctttcaacatcgtttacgtcatcgcagggtttgctgctgatgatcccgacactgtacaaactggcaggcgaactcacaccgtttgtcctgcatgtagcggcacgtaccgttgccacacatgcactctctatttttggcgatcattccgacgtcatggcggtgcgccagacgggttgcgcgatgttgtgtgcggcaaacgtccaggaagcgcaagactttgctctcatttcgcacatcgcgacgctgaaaagccgcgtgccatttattcatttctttgatggtttccgcacgtcccacgaaatcaataaaattgtcccgctggccgatgacacgattcttgatctcatgccgcaggccgaaattgatgctcatcgcgcccgggcgctcaacccggaacatccggtgatccgtggtacgtccgccaatcctgacacttatttccagtctcgcgaagccaccaacccctggtacaacgcagtctatgaccatgttgaacaggcgatgaatgatttctctgccgcgacaggtcgtcagtatcagccgtttgaatattacgggcatccgcaagctgaacgggtgattatcctgatgggctcagccattggcacctgtgaagaagtggttgatgaattgctaacccgtggcgaaaaagtcggcgtgctgaaagttcgcctgtaccgccccttctcagccaaacacttgctacaaactctaccgggatccgtacgcagcgtggcggtactggacagaaccaaagaacccggtgcccaggcagaaccgctctatctggatgtgatgaccgcactggcagaagcctttaataatggcaagcgcgaaactctgccccgtgtcattggtgggcgctatggtctttcatccaaagaatttggcccggactgtgtactggcggtatttgccgagctcaacgcggctaaaccgaaagcgcgctttacggttggtatttacgatgatgtaaccaatctgtccctgccgttgccggaaaacacccagccaaactcggcgaaacttgaagccttgttttatggccttggtagtgatggcagcgtttccgcgaccaaaaacaatatcaagattatcggtaattccacgccgtggtacgcacagggctattttgtttacgactccaaaaaagcgggcggcctgacggtttctcaccttcgcgtgagcgaacagccgattcgttccgcttatctcatttcccaggctgattttgttggctgccaccagttgcagtttatcgataaatatcagatggctgagcgtttaaaacctggcgacactttcctgctcaacacgccgtacagcgcagatgaagtgtggtcgcgcttgccgcaagaagttcaggccgtgttaaaccagaaaaaagcgcgcttctatgtgattaacgcggcgaaaatcgcccgcgaatgtggcctggcggcccgtattaataccgtcatgcagatggcttttttccatctgacgcaaattctgcctggcgatagcgccctcgcagaattgcagggtgcgattgccaaaagttacagtagcaaaggccaggatctggtggaaggcaactggcaggctctggcgctggcgcgtgaatccgtagaagaagttccgttgcaaccggtaaatccgcacagcgccaatcgaccgccagtggtttccgatgccgcccctgatttcgtgaaaaccgtaaccgcagcgatgctcgcagggcttggtgatgccctccccgtttcggcgctgccgccagacggcacctggccgatggggaccactcgctgggaaaaacgcaatatcgccgaagagatccccatctggaaagaggaactctgtacccaatgtaaccactgcgtcgccgcttgcccacactcagctattcgcgcaaaagtggtaccacccgaagcgatggaaaacgcccctgccagcctgcattcgctggatgtgaaatcgcgtgatatgcgcgggcagaaatatgtcttgcaggtggctccggaagattgcaccggttgtaacctgtgcgtcgaagtttgcccggcgaaagaccgtcagaatccagagattaaagccatcaatatgatgtcgcgcctggaacatgtcgaagaagagaaaatcaattacgatttcttcctcaacctgccagaaatcgaccgtagcaaactggaacgtattgatattcgtacatcgcagctgattacaccgctgtttgaatattccggtgcttgctccggttgtggcgagacgccgtatattaaattgctgactcagctctatggcgaccggatgttgatcgctaacgccaccggctgttcttcaatttatggcggtaacctgccctctacaccgtataccaccgatgccaacggtcgtgggccggcatgggcgaactctctatttgaagataatgccgaatttggccttggtttccgcctgacggtcgatcaacaccgtgtccgcgtgctgcgtctgctggatcaatttgccgataaaatcccggcggaattactgacggcgttgaaatcagacgctacgccagaggttcgtcgagaacagatcgcagctttacgccagcaactcaacgatgttgccgaagcacatgaactgctacgtgatgcagatgcactggtggaaaaatcaatctggctgattggtggtgatggctgggcttacgatatcggctttggcggtctggatcatgtattgagtttgacggaaaacgtcaacattctggtgctggatacgcaatgctattccaacaccggtggtcaggcgtcgaaagcgacaccgctgggtgcagtaactaaatttggcgagcacggcaaacgtaaagcgcgtaaagatcttggcgtcagtatgatgatgtacggtcatgtttatgtggcgcagatttctctcggcgcgcagctgaaccagacggtgaaagcgattcaggaagcggaagcgtatccgggaccatcgctgatcattgcttatagcccgtgtgaagagcatggttacgatctggcactcagccatgaccagatgcgccaactcacagctaccggcttctggccgctatatcgcttcgatcctcgtcgtgccgatgaaggcaaactgccgctggcgctggattcacgcccgccgtcagaagcactggaagaaacgttacttcacgagcaacgtttccgtcgtctgaattcgcagcagccagaagtggcagaacagttatggaaagatgctgcagctgatttgcaaaaacgctatgacttcctggcacaaatggccggaaaagcggaaaaaagcaacaccgattaa

SEQ ID NO: 461754 - DNA, 1134 bp, Shigella boydii
atgaaaagcaaagtactggcacttttaattcctgccctgctcgccgcaggtgctgcacatgcagccgaagtttataataaagacggcaacaaattagatctgtatggcaaagttgatggcctgcattatttttctgataattcagcgaaagatggcgatcagagctatgcgcgtctgggttttaaaggcgaaacccaaattaacgatcaactcactggctacggtcaatgggaatacaatattcaggcaaacaacactgaatcttcaaaaaaccagtcatggacccgtctggcatttgccgggctgaaatttgcagattacggttctttcgattacggacgtaattatggcgtaatatacgacatcgaaggctggacagatatgctgcctgaatttggcggtgactcttataccaatgcagacaactttatgactggtcgagccaatggcgtcgcgacttatcgtaatactgatttcttcggtctggtaaatggtctgaacttcgcggtgcagtatcaaggtaacaacgaaggagccagtaatggtcaggaaggcaccaacaacggacgtgatgttcgccatgaaaacggtgacggctggggtttttccacaacatatgatttaggcatgggctttagcgctggtgcggcatacacctcttctgaccgcaccaatgaccaggttaaccatactgcggcgggtggtgataaagcagacgcgtggactgctgggctaaaatacgatgctaacaatatttacctggcaaccatgtattcagaaacgcgtaatatgaccccgtttggcgacagcgattatgctgtggcaaacaaaacccagaattttgaagtcactgcccagtaccagtttgattttggtctgcgtccggcagtctctttcctgatgtctaaaggccgtgacctgcacgctgccggtggtgcagacaacccggcaggtgttgatgataaagatctggttaaatacgccgatgttggcgcgacttactatttcaataaaaacatgtccacctacgttgactataaaatcaacctgttggatgaagatgacagcttctacgctgccaatggcatctctaccgatgatattgtcgctttaggtctggtttatcagttctaa

SEQ ID NO: 461755 - DNA, 435 bp, Shigella boydii
atgaacagaacgattcttgtccctatcgatatttccgattcagaattaactcaacgcgtgattagccacgttgaggcagaggcaaagattgacgatgcagaggttcatttcctgacggtaataccttcactgccctactatgcctctctgggtttagcgtattccgcagaattaccggcaatggatgacctgaaagcggaagccaaatcgcaactggaagagatcattaaaaaatttaaactgccaaccgacagagtgcatgtccatgttgaggaaggctcgcccaaagaccgcattctggaattggcgaagaagatccccgctcatatgatcatcattgcttcccatcgaccggatatcaccacttatctgctcggttccaacgccgcagctgtagtgcgtcacgcagagtgctccgtgctggttgtgcgctga

SEQ ID NO: 461756 - DNA, 915 bp, Shigella boydii
atgcactcaataaaaaaagtaaccatgctcttggggtgcctcgccctcacctgctcgatcgcatttcaggcaagtgcaactgaaaaattcaaggtcattacaacatttaccatcatcgcggatatggccaaaaacgtggctggagatgctgcagaagtctcatccataaccaagcctggtgcagaaattcatgagtatcagcctacccctggcgatattaaacgtgcacagggggcacaactgattctcgccaatggtatgaatctggaattgtggttccaacgcttttaccagcatctcaatggggttccagaagtaattgtctcttcgggtgtgacgccagtagggatcaccgaaggaccctatgagggcaaacctaatccccatgcatggatgtcgccagataatgctctgatttacgtcgataatattcgtgatgcgttgataaaatacgatccggcaaatgcacaaacctaccaacgtaatgccgatacttataaagccaagattacccaaacccttgcccccctgcgtaagcagattacggaactccctgagaatcagcgatggatggtcaccagtgaaggggctttttcttatctcgcacgcgatttggggctaaaagagctttatctgtggccgattaatgccgatcaacaaggaacaccgcagcaggtacgtaaggttgttgatatagttaagaaaaatcatatcccggcagtctttagcgagagtacgatttccgataaaccagcgcgtcaggttgcgcgtgaaaccggcgcacactacggcggcgtgctctatgtcgattccctgagcacagaaaacggcccggtacctacgtatatcgaccttcttaaggttactaccagtacgctggtacagggaattaaagccgggaaaagggagaaataa

SEQ ID NO: 461757 - DNA, 828 bp, Shigella boydii
atgatgcaatctgcaggcattgtcgttaatgatgttactgtcacctggcgtaacgggcacacagcactgcgcgatgcatccttcacagtaccaagtggatctattgccgctctggttggggtaaacggttccggaaaatcgacgttgtttaaagcgattatgggatttgtgcgtctgaccagcggaaagatatctgttctgggtattcccacgcgacaggcgctacagaaaaacctggttgcctacgtccctcagtcagaagaggttgactggtcatttcctgtactggtggaagatgtggtgatgatgggccgctatgggtatatgggtatgttgcgtatagccaaaaagagggatcgtcagattgtcaccgatgcgctggaacgtgtcgatatggtggattttcgccatcgtcaaatcggcgagctttccggtggacaaaagaaacgcgtctttctggcgagagcgattgcacagcagggtgatgtgatcctgctggatgaaccttttaccggcgttgatgtgaaaaccgaagcgaaaatcatcagcctgttgagggagttacgcgcggaaggcaaaacgatgcttgtctcaacgcacaatctcggctcagtcacgacattttgcgattatacggtcatggtcaaaggcaccgtcctggcaagcgggccgacagacaccacttttacagccgagaacctggagctggcttttagcggcgtactgcgccatgtcacacttaacggctcggaagaaagcattattactgacgatgaacgcccttttgtggcacatcgaccgtcagcggtgcagagggaagcaagatga

SEQ ID NO: 461758 - DNA, 858 bp, Shigella boydii
atgaacgtgctactggaacccttcagctatgaatatatgctcaatgcgatgtgggtctcggcaatggtcggcggtctctgcgctttcctgtcatgctatctgatgctaaaaggctggtcgctgattggcgatgcgctgtcgcactctattgtcccgggtgttgcgggggcatatatgctggggcttccgttttctctgggagccttcttttccggcggactggcagcgggcagcatgctgtttcttaaccaacgcacccgcttaaaagaagatgccatcatcggcctgatcttctcgtccttttttggcctggggctgtttatggtgtcattgaacccgacatccgtgaacattcagaccatcgtcctgggcaatattctggcaatcgatccggcggatatcctgcaactcactatcattggcattctctcgatcatcgtgctttttttcaaatggaaagatcttatggtgacctttttcgacgagaatcacgcccgtgctattggattacatccgggcagattaaaaatcctcttcttcaccctgctgtcggtttcgaccgttgcggcgctgcaaacggttggtgcctttctggtgatctgtctggtggtgactcccggtgcaacagcatggttgttaaccgatcgttttccccgcctgctcataattgctgtaactattggcagtgtaaccagtttcctcggcgcgtgggtcagttactttctggacggcgcgacaggtggaatcatcgtggtggcgcagacactgctgtttcttttagcatttgtatttgcgcccacccatggacttttggcaaatcgtcggcgtgcgcataaagcgctggaggatcgctcatga

SEQ ID NO: 461759 - DNA, 858 bp, Shigella boydii
atgatggcattattactggagccactgcagttcacctttatgagtcacgcactgctgatttcactggtagtttccataccctgtgcgctgctgtcggtctttctggtcctgaaaggttgggcactgatgggtgacgcgatgagtcatgcggtttttcctggcatcgtgcttacctggattctggggttacctctggctacaggggcattcgtcgccggagtattctgcgcggtggcgacgggatacctgaaagacaacagccgaatcaagcaagatacagttatggggattgttttttctggcatgtttgccgcaggtctgatcttgtatattgcaatcaaaccagacgtacatcttgaccatattcttttcggcgacatgctcgggataaccatcggcgatataatccagacggtgattattgccgggctggttacacttgttattagcgtaaaatggcgggattttttgctgttcagctttgattatcaacaggcgcaggtaagcggtttgcatacgagatggctgcattatgggctgctgtgcatggtttccctgaccattgtggcgacgctgaaagcagtaggtatcattctctctatttctctgctcattgcgcctggcgccattgcagtactcctgacacaacgctttcatattgcgctcctactggcgactggcatatcggtaatagtgtcaatgactggtgtctggctgtccttttttatcgacagcgcaccagctccgacgattgtcgtcttattcgcggtcgtgttcatcatgacgtttaccgttaccagcatcaacgcacgcacaaagggaaacgcccatacacaggatctgttatcacccaattag

SEQ ID NO: 461760 - DNA, 432 bp, Shigella boydii
ttgtctaattcgtcagattctgaccagacggttcaggctgtacgcttacagttgatgcagtcgttgtacgactggatacagttgcagaggaaaacgctgtcgaaacatgcggagatggcgaaggcgttcgactatatcctgaatcactggaatgcgctgaacgagttctgtcgtgacggctgggtggaaatagacaacaacatcggtgaaaacgcgttacgatcggtggcggttggaagaaaaaattatctctttttcggctcagacaagggaggagaaagtgcggcgatcatctacagtctgctggtcacctgcaaacagaacgaagtggagccggaggactggttgcgcgaagtgatcgagaagctcaatgactggccgtcgaaccaagtgcatgaactgctgccctggaacttctcgtctgtaaaataa

SEQ ID NO: 461761 - DNA, 222 bp, Shigella boydii
atggagctggcgttacgcaccagcgaagctttattacaattcaaccctgaagatccctatgaaattcgcgatcgcgggttgatttatgcgcaactggattgcgaacacgttgcgttgaacgatttaagttatttcgttgaacagtgtccggaagacccgatcagcgaaatgatccgtgcgcaaataaataacatcgcgcataaacatattgtgctgcattaa

SEQ ID NO: 461762 - DNA, 204 bp, Shigella boydii
atggtcgtgttcattcagatgtggaacaatttcctgtacggcttcatgcaggcgcagaatgacataacgccagggaacagtatgtttttctcgtttattgcgttcgacttcctggagatttttttctgcccagtcaaatgggtcgcgttgtttgcgctcggcaaaccaggcttgagcaaaggaatcgacattcaggctctctaa

SEQ ID NO: 461763 - DNA, 447 bp, Shigella boydii
atgctggtgctgattggtgtcggattctctatcggtaactatcccggcggcaaactggcagatcgttcagttaacggcacgttgaaaggctttttgttgttgttgatggtgattatgctggcaatcccgttcctggcccgcaatgagttcggcgcagctattagcatggtggtgtggggcgcagcaacctttgcggtcgtaccgccgttacagatgcgcgtgatgcgtgtcgccagtgaagcgccaggtctgtcttcatcagtcaatattggtgcctttaatcttggaaatgcgctgggagcagctgctggtggtgcggtaatttccgctgggctgggatacagctttgtgccggtgatgggagcgattgtcgcgggactggcattattgctggtgtttatgtcagccagaaaacaacctgaaacagtttgcgttgctaacagctaa

SEQ ID NO: 461764 - DNA, 360 bp, Shigella boydii
atgcaggagaaagaacacacgttatcgaaaaaatgccgtctgagagatgcgttccggtatatcaggaagcactgggttgcgttgtgcaacttcagtgatgatggtctggctgaggcggataataatgccgcggaaagagcgcttcgtgcagtctgtctcggaaagaaaaactttatgttcttcggcagcgatcacggtggagagcgtggtgcgctactgtacgggctgatcggcacctgccgactgaacggtatcgatccggaagcgtatctgcgctatatcctgagcgtactgccggaatggccttccaaccgtgttgacgaactcctgccatggaacgtagcactcaccaataaataa

SEQ ID NO: 461765 - DNA, 321 bp, Shigella boydii
atgaaagcggtatctcgcgttcacatcaccccgcatatgcactgggatcgagagtggtatttcaccaccgaagagtcacgtattctgctggtcaataatatggaagagatcctgtgccgactggaacaggacaacgaatacaaatattacgtactcgacgggcaaacggcgatcctcgaagattatttcgcggtgaaaccggaaaacaaagaccgtgtgaagaaacaggtagaagccggcggtaatgactccaaattattgatagtgttttatgttcagataatgcccgatgaccttgtcatgcagctccaccgattttga

SEQ ID NO: 461766 - DNA, 624 bp, Shigella boydii
atggcagtacgaaaactcaccactgggaaatggctttgcgaatgttaccccgccggacgaagtgggcgtcgtgtgcgtaaacaattcgccaccaaaggcgaagcactggcttttgagcgccacacgatggaagaaaccgaagcaaagccctggctgggtgaatcagtgaatcgtcgaacactgaaagacgtggttgagctatggttcaaactacatggtaaatctctgacagctgggcagcatgtctatgacaaattgctgttgatggttgacgctctgggcaatcctcttgcaaccgatctcacctctaaaatgtttgcccactatcgagataaacgcctgacaggcgagatctacttcagcgagaaatggaagaaaggagcaagcccggtcaccattaacctggagcaaagctatctaagtagtgtttttagcgaactatcccgtctgggcgaatggtcgtatccgaacccactggagaacatgcgaaaattcaccatcgcagaaaaagagatggcatggcttacccatgagcagattgttgaattgctggctgattgcaaacgtcaggacccaattctggcactggtagttaagatatgcttaagcacaggcgcacgctag

SEQ ID NO: 461767 - DNA, 1866 bp, Shigella boydii; identical to SEQ ID NO: 459907

SEQ ID NO: 461768 - DNA, 765 bp, Shigella boydii; identical to SEQ ID NO: 460340

SEQ ID NO: 461769 - DNA, 912 bp, Shigella boydii; identical to SEQ ID NO: 460342

SEQ ID NO: 461770 - DNA, 210 bp, Shigella boydii; identical to SEQ ID NO: 9340

SEQ ID NO: 461771 - DNA, 912 bp, Shigella boydii; identical to SEQ ID NO: 459946

SEQ ID NO: 461772 - DNA, 303 bp, Shigella boydii
atgaaaaaaagaaattttagcgcagagtttaaacgcgaatccgctcaactggttgttgaccagaaatacacggtggcagatgccgccaaagctatggatgttggcctttccacaatgacaagatgggtcaaacaactgcgtgatgagcgtcagggcaaaacaccaaaagtctctccgataacaccagaacaaatcgaaatacgtaagctgaggaaaaagctacaacgcattgaaatggagaatgaaatattaaaaaaggctaccgcgctcttgatgtcagactccctgaacagttctcgataa

SEQ ID NO: 461773 - DNA, 375 bp, Shigella boydii
atgccaaaattacgcctgatcggattaactttactcgcacttagcgccactgccgtctcacacgctgaagaaacgcgctatgtttctgatgaactgaatacctgggtccgtagcggtccgggagatcattatcgcctcgtgggcacggttaacgccggcgaggaagtgaccttattacaaactgacgccaacaccaattatgcccaggtgaaagacagctctggccgtaccgcctggatcccgttgaaacaacttagcactgagccaagcctgcgctcccgtgtgccagatctggaaaatcaggtcaaaaccctgaccgataaactcaccaatatcgataacacctggaatcagcgcaccgcagaaatgcagtaa

SEQ ID NO: 461774 - DNA, 1629 bp, Shigella boydii
atgtttaccgcgattattgccgtatgcattctgtttattattggaattattttcgccaggctctatcgtcgcgcttcggcagagcaagcttttgttcgtactggtttaggtgggcaaaaagtggtgatgagcggtggcgcaatcgtgatgccgatctttcatgaaataatccccatcaatatgaatactctgaagctggaagtcagccgctcaaccattgatagcctgattacgaaagatcgtatgcgtgtcgatgtagtagtcgctttctttgtacgggtaaaaccgtctgtagaaggcatcgccactgcggcgcagacgttggggcaacgcacgctatcaccagaagacttacgtatgttggttgaagataaatttgtcgatgccctccgtgcaacagctgcacaaatgaccatgcatgagttacaggatacccgcgagaacttcgtgcagggagtacaaaatactgtcgcagaagacctgtcgaaaaacggtcttgagctggaaagcgtttcacttaccaactttaaccagacctcgaaagaacatttcaatccgaacaatgcctttgacgccgaaggtttaaccaaactgattcaggagacggagcgccgtcgtcgcgaacgtaacgaagttgaacaggatgtagaagttgcggtgcgtgagaaaaaccgtgatgcactttcgcgcaagttggagattgaacaacaagaagcgtttatgacgcttgagcaggagcagcaggttaaaacccgtactgccgaacagaatgcacgtattgcggcttttgaagctgaacgtcgtcgtgaagcagagcagacgcgaattctggctgaacgacaaattcaggaaacggagatcgagcgcgagcaggccgtccgctcaagaaaggttgaggctgaacgtgaagttcgtattaaagagatcgaacagcagcaggtcaccgaaatcgccaaccagacgaaatcgatcgctattgccgccaaatcggaacaacagtcccaggcagaagcgcgtgctaaccttgcactcgcagaagcagtaagtgcgcaacaaaacgtagaaaccactcgccagaccgcagaagccgatcgtgctaaacaagttgccctaatcgctgccgcgcaggatgcagaaaccaaagcggttgaactgaccgtgcgggcgaaagcagaaaaagaagccgcagagatgcaggcggcggctatcgttgagttagccgaagctacacgtaaaaagggtctggcggaagcagaagcacaacgtgcgctgaacgatgctatcaacgtactttctgatgaacaaaccagccttaaattcaaactggccttgttgcaggcgctacctgcggtaatagaaaaatccgttgagccgatgaaatctattgacggtatcaagattattcaggtcgatggtctgaatcgtggcagcgctgcgggtgatgcaaacacgggtaatgtggggggcggaaacctggcggaacaagcattatcagccgctctctcttaccgcacacaggcaccgctaattgactccttgctcaatgaaattggcgtttcaggcggctcactggcggcattgacttcacccttaacctcaacaactcccgtcgccgaaaacgtagaataa

SEQ ID NO: 461775 - DNA, 2613 bp, Shigella boydii; identical to SEQ ID NO: 461301

SEQ ID NO: 461776 - DNA, 624 bp, Shigella boydii
atgtttctgaaaacagaacaatttgaatataacggtgtgtctgtcacgctttccgaattgtctgcgctgcagcggtttgattatataaagtttgtttcagacgcagaacaacaggagacaacgaagcatgatgtcgtgcacattaaccagcgatatctggaaacggcatccctgcttgtggcgatgtcgctatggcatacccattccctcaaaggcactctggcctctccggagacagagatgcagcagatccgccgtgaagtgatgctgggatggcctgctgatgcactgaatcaggcaacgaaccgggtgctttatctttcaggtatgctggataaccggcacgatgccgatcctgaacaaaccgggaaagcagaagcgactgagccggtaacttgtcctgaaactggcgcgagagatggggagacccgactggcgcgccatgcttgccgggatgacatccaccgaatatgccgactggcgacgtttttactgcacgcattattttcaggatacccaactggacgctcatttttccgggctgatgtacgccgtactcagcctgttttttggcgatccggatatgcatccggcggatttcagtctgcttgctccagcgtgtga

SEQ ID NO: 461777 - DNA, 396 bp, Shigella boydii
atgaaacacactgacattcgtgccgcagtgctggatgcgctcgagcagcatgaacacggggcgacgctgtttgatggtcgccccgttgtttttgacgaagaggattttcctgcgatcgcggtttatctgacggatgcagagtataccggtgaagagctggatgcagatacctggcgggccacgctgcatattgaggtgtttttaccggcacaggtaccggattcagagcttgatcagtggatggaaagccggatttacccggcgatgaccgcgatcccggcactggcaggactgattaccacgatggttacgcagggctatgagtatcgtcgtgatgacgatatggcgttatggagttctgcagatctgacttattccattacatacgagatgtga

SEQ ID NO: 461778 - DNA, 1029 bp, Shigella boydii
atgggattgtttacgacccgccagttactcggttataccgaacaaaaagtgaaattccgtgcgctgtttctggagctgtttttccgccgtacggtgaatttccacaccgaagaggtgatgctggacaaaattaccggaaaaacgccggtggcggcctatgtctccccgatcgttgaaggaaaagtgcttcgccatcgcggtggtgaaacccgcgtgttacgtccgggctacgtcaagcccaaacacgaatttaattaccagcaggcggttgagcgccttcctggtgaagatccggctcagctgaacgacccggcctaccgtcgtctgcgtatcattaccgataacctcaaacaggaagagcacgccattgtccaggtggaagaaatgcaggcggtgaatgccgtgctgtatggcaaatacaccatggaaggggatcagtttgatactgtcgaggtggatttcgggcgctctgaaggaaataacattgagcaggctgacggtaaaaaatggtctgagcaggaccgtgatacgtttgatccgacgcatgatattgacctctactgcgatcaggccagcggccttgtgaatatcgccattatggacggtacggtctggcgtctgctgaatggctttaagctgttccgcgaaaaactggatacccgtcgcggctcaaattcacaactcgaaacggcagtgaaagatctgggcgcagtggtgtccttcaaggggtattacggcgatctggccattgtggtggcgaaaacgtcttatgtggcagaggacggtaccgaaaaacgttatctgccggagggcacactggtcctggggaatacggcagcagagggcattcgttgctatggtgccattaaggatgcacaggcgttgtctgaaggagtggtggcttcttcccgttacccgaaacactggctgaccgtgggcgatccgtcctgtgaattcaccatgacgcagtccgctccgctgatggtgctgccggatccggatgagtttgtggtggtacaggtgaaataa

SEQ ID NO: 461779 - DNA, 1209 bp, Shigella boydii
atgactggctatgacggcattgtcgcctgtcttcagcaggcaatggcagatagccaggtgcggggcatactgctggacattgacagtccgggcgggcaggccgccggcgcgtttgactgcgctgacatgatttaccgcctccgtcagcagaagccggtctgggcactgtgcaatgacacggcctgttctgcagccatgctgctggcgtcggcctgctcccgacggctggttacccagacatcccgtatcggctccattggcgtgatgatgagccatgtcagctatgccggtcatctggcgcaggccggtgtggatatcacgctgatttatgccggggcgcacaaggtggatggcaatcagtttgaagcgttgccggcagaggttcgccaggatatgcagcagcggattgatgcggcgcgccggatgtttgccgaaaaagtggcgatgtttaccggtctgtctgttgatgcagtcacgggaacagaggccgctgtttttgaaggtcagtccggcattgaggccgggctggcggatgaattaatcaatgcgtcggatgccatcagtgtgatggccacggcgctgaacagtaatgtcagaggaggcactatgccgcaattaactgcaacggaagccgccgtgcaggagaaccagcgagtgatggggatcctgacatgccaggaagcgaaaggacgtgaacagcttgccacgatgctggcagggcaacagggcatgagcgttgaacaggcccgggcgattctggccgcggcggcaccgcagcagccggtggcatccgcgcagagtgaagccgatcgcattatggcgtgtgaagaagcgaacggtcgtgaacaactggcagcaacgctggcggcgatgccggagatgacggtggaaaaagcccgcccgatcctggcggctgcaccactggcggatgccgggccctcacttcgtgatcagatcatggccctggatgaggcaaaaggggcagaagcgcaggctgaaaaactggcggcctgcccgggaatgaccgtggagaacgcccgggctgtgctggctgcgggatcaggtaaggccgaaccggtctctgcatccacaaccgccctgtttgaacatttcatggcgaatcattcaccggcagcggtgcggggtggcgtgtcacagacgtcagcagacggtgatgcggacgtgaaaatgctcatggccatgccatga

SEQ ID NO: 461780 - DNA, 312 bp, Shigella boydii
gtgagacgtaatctttcacacattattgccgcagcattcaatgaaccgctgcttctggagcccgcctatgcgcgggttttcttttgcgcgctcgggcgcgagatgggcgcagcaagtctttcggtaccacaacagcaggtacagcttgatgctcccggaatgctggctgaaacggacgagtacatggccggaggtaaacgaccggcccgtgtttaccgggtggtgaacggtattgcggtactgccggtgaccggcacgctggtgcaccggctggggggggatgcggccattttccggaatgactggctatga

SEQ ID NO: 461781 - DNA, 1329 bp, Shigella boydii
atgattggggccatttttgttttattagtggcctggttattcctgtcacaatggattcgcattaccgtttttgtggttgccatactgctatggctgaacgtacttaccctggcgggaccaagtttctccttgtggccagccggacaaccgacgaccactgtaacaacgacgggtggtaacgcagcggcaaccgttgcgacgacgggtggcgcaccggtagtgggtgatatgcccgcacaaactacaccgccaacaacggcgaaccttaacgcctggctgaataatttctataacgcggaggcgaaacgtaaatcgaccttcccgtcttcgctgcccgctgatgctcagccatttgaactactggtgattaacatctgttcgctttcctggtcggatatagaagccgccgggttgatgtcgcatccactgtggtcgcatttcgatattgagttcaagaactttaactccgccacctcctacagtggcccggcggcgatccgtttactgcgcgccagctgcgggcagacttcgcacactaatctgtatcaaccggcaaataacgactgctatctgtttgataacctttcgaaactgggctttacccagcacctgatgatgggacataacggccagttcggcggttttttgaaagaagttcgcgaaaatggcggcatgcagactgaattgatggatcaaacaaatctgccggttattttgctgggctttgatggttcgccggtttatgacgataccgccgtgcttaaccgctggctggacgttaccgaaaaagataaaaacagccgtagtgccacgttctacaacacgcttccactgcatgacggcaaccattatccgggggtcagcaaaacagcggattacaaagcgcgggcgcagaaattctttgatgaactggacgccttctttactgaactggagaaatcgggtcgtaaagtgatggtggtcgtggtgccggaacacggcggcgcgctgaagggcgacagaatgcaggtatctggcctacgtgatatccctagcccgtctatcacagacgtccccgttggggtgaaattcttcggcatgaaggcaccacatcagggggcaccgattgtcatcgaccaaccgagcagcttcctggctatctccgatctggtggttcgcgttcttgatggcaagattttcaccgaagacaatgttgactggaaaaaactcaccagtgggttgccacaaacagcaccggtctccgagaactcaaatgcagtagttattcaataccaggataaaccgtacgttcgcctgaacggcggcgactgggtgccttacccgcagtaa

SEQ ID NO: 461782 - DNA, 627 bp, Shigella boydii
atgaaaactatcgtttataacgtcaatgacgacactctggatggcaacgacaccattgtttccgtggcgtcatgcaccactaactgccttgcgccgatggccaaagccttgcatgacagtttcgggatagaagtcggcacgatgacgaccattcatgcctatactggcacccagtcactggtggatggcccacgtggtaaagatttacgtgcttcacgcgcagcggcagaaaatatcattccccacactacgggggcggcaaaagccattggtctggagatcccggaactgagcggcaaactgaaaggtcatgcgcaacgcgtgccggtgaaaacaggttcggtcactgaactggtatcgattctcggaaaaaaagtgactgccgaagaggtgaataacgcacttaaacaagcaaccaccaataacgagtcatttggttataccgatgaagaaatagtctcttccgatatcattggcagccatttcggttcggtgtttgatgctacgcaaacggaaattaccgccgtgggcgatttacaactggtgaaaacggtcgcctggtacgataacgaatatggcttcgtcacgcagcttattcgcaccctcgaaaaattcgctaaactctga

SEQ ID NO: 461783 - DNA, 234 bp, Shigella boydii
atggctaatgacagtgattacggcctgacctcatcaatctatacccaaaatctgaacgtcgcgatgaaagccattaaagggctgaagtttggtgaaacttacatcaaccgtgaaaacttcgaagctatgcaaggcttccacgccggatggcgtaaatccggtattggcggcgcagatggtaaacatggcctgcatgaatatctgcagacccaggtggtttatttacagtcgtaa

SEQ ID NO: 461784 - DNA, 1194 bp, Shigella boydii
atgtcagtacccgttcaacatcctatgtatatcgatggacagtttgttacctggcgtggagacgcatggattgatgtggtaaaccctgctacagaggctgtcatttcccgcatacccgatggtcaggccgaggatgcccgtaaggcaatcgatgcagcagaacgtgcacaaccagaatgggaagcgttgcctgctattgaacgcgccagttggttgcgcaaaatctccgccgggatccgcgaacgcgccagtgaaatcagtgcgctgattgttgaagaagggggcaagatccagcagctggctgaagtcgaagtggcttttactgccgactatatcgattacatggcggagtgggcacggcgttacgagggcgagattattcaaagcgatcgtccaggagaaaatattcttttgtttaaacgtgcgcttggtgtgactaccggcattctgccgtggaacttcccgttcttcctcattgcccgcaaaatggctcccgctcttttgaccggtaataccatcgtcattaaacctagtgaatttacgccaaacaatgcgattgcattcgccaaaatcgtcgatgaaataggccttccgcgcggcgtgtttaaccttgtactggggcgtggtgaaaccgttgggcaagaactggcgggtaacccaaaggtcgcaatggtcagtatgacaggcagcgtctctgcaggtgagaagatcatggcgactgcggcgaaaaacatcaccaaagtgtgtctggaattggggggtaaagcaccagctatcgtaatggacgatgccgatcttgaactggcagtcaaagccatcgttgattcacgcgtcattaatagtgggcaagtgtgtaactgtgcagaacgtgtttatgtacagaaaggcatttatgatcagttcgtcaatcggctgggtgaagcgatgcaggcggttcaatttggtaaccccgctgaacgcaacgacattgcgatggggccgttgattaacgccgcggcgttggaaagggttgagcaaaaagtggcgcgcgcagtagaagaaggggcgagagtggcgttgggtggcaaagcggtagaggggaaaggatattattatccgccgacattgctgctggatgttcgccaggaaatgtcgattatgcatgaggaaacctttggcccggttctgccggtggtcgcatttgacacgctgtaa

SEQ ID NO: 461785 - DNA, 801 bp, Shigella boydii
atgaacattaccccgtttccgacgctttcgccggcaactatagatgccataaatgttatcggacagtggctggcgcaggatgatttctccggtgaggtgccgtatcaggccgattgcgtgatccttgcaggcaatgcggttatgccgactatcgacgcggcatgtaagattgctcgcgatcagcaaattcctttactgattagtggtggtatcggtcactcgacaacttttttgtatagcgccatcgcacagcatccgcactacaacactatccgcaccactggcagagcagaagcgaccatcctggcggatatcgctcatcagttctggcacattccgcatgaaaaaatctggattgaagaccagtcaacaaactgcggtgaaaacgcacgctttagcatcgcgctatttaatcaggccgtagaacgagttcatacggctatcgttgttcaggaccccaccatgcagcggcgcacgatggcgacgttccgccgtatgactggggacaatcccgatgcaccacgctggttaagttatcccggattcgttcctcagttaggaaataacgcagacagtgtaatctttattaatcagttacaaggattatggccggttgagcgttatctctcactactcactggcgagctgccgcgtttacgcgatgatagcgatggctacggtccccgcgggcgagattttatcgttcacgttgattttccggcagaagtcatccatgcatggcaaacgcttaaacacgatgcggtgctcatcgaggcgatggaaagtcgctcgttacgttaa

SEQ ID NO: 461786 - DNA, 3903 bp, Shigella boydii
atgacagaacaacaaaaattgacctttactgctttgcagcagcggctggattcgttgatgctgcgcgacagactgcgtttttctcgccgtctgcatggtgttaagaaggttaaaaatcctgatgcacaacaggacattttccaggagatggcgaaagagattgaccaggcggcagggaaagtcctgctgcgtgaagcggcacgaccggaaatcacttatccggacaatttgccagttagtcagaaaaaacaggatattctcgaagcgattcgtgatcaccaggtggtgatcgtcgccggggaaaccggttccggtaaaacgacccagctaccgaaaatctgtatggagctggggcgcgggattaaaggactgatcggccatacccagccgcgtcgtctggcggcaagaacggtggcgaaccgtattgcggaagagctgaaaacggagccaggcggttgcatcggttacaaagtgcgtttcagcgatcacgtaagtgataacacgatggtcaagctgatgaccgacggtatcctgctggcggagatccagcaagaccgcctgctgatgcagtacgacaccatcattattgacgaagcacacgaacgcagcctgaatatcgattttctgctcggctatttgaaagagttgctgccgcggcgtcctgacctaaaaatcattatcacttccgcgactatcgacccggaacgcttttctcgccactttaataatgcgccgattatcgaagtctccggtcggacctatccggtggaagtgcgctatcgcccgattgttgaagaagccgatgacaccgagcgcgatcagttgcaggcgatttttgacgccgtagacgaactgagccaggaaagccctggcgacattctgatctttatgagcggcgagcgggaaattcgcgataccgccgatgcgctgaacaagctgaacttacgccataccgaaatcttgccgctttatgcgcggctttcgaatagcgaacagaaccgcgtgttccagtcgcacagcgggcgacgcattgtgctggcgaccaacgtcgcggaaacctcgctgactgtaccggggattaaatacgttatcgaccccggtacggcgcgtatcagccgctacagctatcgcaccaaagtgcagcgtttgccgattgaacccatttcacaggcgtctgccaatcagcgtaaaggccgttgtggtcgtgtgtccgaagggatctgtattcgtctctattccgaagacgatttcctctcgcgcccggagtttaccgatccggagattctgcgtaccaacctggcctcggttattttgcagatgaccgcgctggggctgggcgatatcgctgcgttcccgtttgtcgaagcaccggataaacgcaatatccaggatggcgtgcgtctgctcgaagaactgggcgcgatcaccacggatgaacaggccagcgcctataaactgacgccgctcggtcgccagctctcgcaactgccggtcgatcctcgtctggcgcgtatggtgctggaagcgcagaaacatggctgcgtgcgtgaggcgatgattatcacgtccgcgctctccattcaggacccgcgtgagcggccgatggacaaacagcaggcatcggacgaaaaacatcgtcgcttccacgacaaagaatccgacttcctcgcgtttgtaaatctgtggaattatcttggcgagcagcaaaaggcgctttcttcaaacgccttccgtcgcctgtgtcgtaccgattatctcaactatctgcgcgtgcgcgaatggcaggatatctacacccagttgcgtcaggtggtgaaagaacttggcattccggttaacagcgaaccggcggagtatcgcgaaattcacattgcgttgctgacgggtttactttcccatatcggcatgaaagatgccgataaacaagaatataccggcgcacgtaacgcgcgtttctccatcttccccggttctggtttattcaaaaaaccgccgaaatgggtaatggtggcggaactggtagaaaccagccgcctgtgggggcgcattgctgcgcgtatcgacccggaatgggtggagcctgtcgctcagcatttgattaaacgtacctacagcgaaccgcactgggaacgggcgcagggcgcggtgatggcaacggaaaaagtcactgtttatggtttgccgattgttgcagcgcgcaaggtcaactacagccagatcgatccggcgttatgtcgtgaactctttattcgccatgcgctggtggaaggtgactggcagacgcgtcacgcattcttccgtgaaaacctgaaactgcgggccgaagtggaagagctggaacacaaatcacgtcgccgcgatattctggttgatgacgaaacgctgtttgagttctacgaccagcgcatcagccacgatgtaatctccgctcgtcacttcgatagctggtggaaaaaagtcagccgcgaaacgcctgatttgctcaactttgaaaagagcatgttgatcaaagaaggggcggaaaaaatcagcaagctggattacccgaacttctggcatcagggcaatctcaagctgcgtttgagctatcagtttgagccaggcgcagacgcggacggtgtgaccgtacatattccgctgccgttacttaaccaggttgaggaaagcgggtttgaatggcagatccccggtctgcgccgcgaattggtgattgctctgattaaatcgttgccgaaaccggtacgccgtaattttgtgcctgcaccaaactacgccgaagcgtttttaggccgcgtcacaccgctggagttaccgttgctcgacagccttgagcgcgagttacggcggatgaccggcgttaccgttgaccgcgaagactggcactgggatcaggtgcccgatcacctgaaaatcaccttccgcgtggtggatgacaaaaacaagaagctaaaagaagggcgctcgctacaagatctgaaagatgcgctgaaaggcaaagtgcaggaaacgctgtccgcggtggcggatgacggtatcgagcagagcggcttacatatctggagttttggtcagctgccggaaagttacgaacagaagcgtggcaactataaagtgaaggcgtggccggcgctggtggatgaacgcgacagcgtggcgatcaaactgtttgataacccgctggagcaaaaacaggcaatgtggaatggtcttcgccgtctactgctgctaaatattccctcgccgatcaagtatttacatgaaaagttaccgaacaaagccaagctgggactgtacttcaacccgtatggcaaagtgctggagctgatcgacgactgtatctcctgcggtgtggatcaactgatcgacgccaatggtggcccggtctggacggaagaaggctttgctgcgctgcatgagaaagtgcgtgccgaactgaacgacacggtggtagatattgcgaagcaggtcgagcaaattcttacggcagtgttcaatatcaacaaacgtctgaaagggcgggtggatatgaccatggcactggggctttctgacattaaagcgcagatgggcgggttggtatatcgcggttttgtcactggtaacggcttcaaacggctgggcgacacgctgcgatatttgcaggcgattgaaaaacgactggaaaaactggcggttgatccacatcgcgatcgtgcacagatgctgaaagtcgaaaacgtccagcaggcgtggcagcaatggatcaacaaactgccgcctgcacgtcgtgaggatgaagacgtgaaagagatccgttggatgatagaagagctgcgcgttagttacttcgctcaacaacttggtacgccttatccgatttcagataagcgtattttgcaggcgatggagcagattagcggttaa

SEQ ID NO: 461787 - DNA, 606 bp, Shigella boydii
atgagcaaggtattagttcttaaatccagcatcctggcagggtactctcagtctaatcagttgtccgattattttgttgaacaatggcgcgaaaagcactccgctgatgaaatcaccgttcgcgacctggctgcaaatccgattccggtactggatggcgaactggttggcgctctgcgtccgagcgatgcgccgctgactccgcgtcagcaggaagctctggcgctttccgatgagctgattgccgagctgaaagcccacgacgttatcgttattgcggcaccgatgtataacttcaacatctcaactcagttgaaaaactattttgacctggttgcacgcgcaggcgttactttccgctataccgagaacggtccggaaggtctggtaacgggtaaaaaagccatcgttattaccagccgcggtgggatccacaaagatggaccaacggacctggtgacgccgtatctgtccacgttcctcggctttatcggcattaccgatgtgaaatttgtcttcgccgaagggatcgcatacggtccggaaatggcagcgaaagcgcagtctgacgcgaaagcggccatcgacagcattgttgctgcataa

SEQ ID NO: 461788 - DNA, 1317 bp, Shigella boydii
gtgataactgaacgtcggaacgtattgctacaaggcgctggctggttattgttgctggccccgttttttttcttcacctatggatctcttaatcagttcaccgcggttcaggaccttaacagccatgatatccccagtcaggtattcggttgggaaacggcgatcccttttcttccctggactattgttccttactggagtctggatcttttatatggattttcgctgttcgtttgtagcacgacattcgaacagcgccgacttgtccaccggcttattctggcaacggtaatggcctgctgcggttttttgctctatccgctgaagtttagttttatccgtcctgaagtgagtggggtgacgggatggctattttcgcaacttgaactgtttgatctgccttataaccagtctccttcgctgcatattattctctgctggctactttggcgtcactttcgtcagcatctggctgagaggtggcgtaaagtctgtggcggatggtttttactcatcgctatttctactctgacgacctggcagcatcattttattgatgtcatcacagggctggcggtaggtatgttgattgactggatggtgcccgtcgatcgtcgttggaattatcagaaacctgatcaacgtcgaatcaaaatagcactgccatatgtcgtaggcgcgggctcgtgcattgtgttgatggagctaatggtgatgattcagttatggtggtcagtctggttatgttggccagtattatcgctactcattattggccgtgggtacggtgggcttggcgcgataacaacagggaaagatagtcaggggaaactcccgcccgccgtttactggctgacattgccctggcgcatcgggatgtggctgtctatgcgttggttttgtcgtcgcctggagccggtgagcaaaattactgctggtgtttatttaggggagtttccacgacatattccggcacagaatgcggttctggacgtcacctttgaattccctcggggacgagcgacaaaagatcgactctatttctgtgtaccgatgctggatctggtggttccggaagagggggagctccgacaggccgtggcgatgctggaaacattacgcgaagagcaaggcagcgttctggtccattgcgcgttgggattatcgcgcagtgcgctggtagtggcggcatggttgttatgttacggacactgtaaaaccgttgatgaagcgattagttatattcgagccagacgttcgcatattgtgcttaaggaagatcacaaagcgatgctgaaattatgggaaaacaggtaa

SEQ ID NO: 461789 - DNA, 1353 bp, Shigella boydii
gtgctggcttctccggcctttaaggttaaattgtatgtgccgctggcacgtcctgcgctggcgttatggcatcgtctgcgtggtctgttttttattaattcctatgtgaaaggacgctatttgacccacgatcggcaacgggtggcgagtttcaataatgatccgctgatcacacgggcgattgccgtcaatatcttgctcgatctctataaaacgtctgaacgtattattaaagatgcggcggcgattacgctccccacgcaacttctgatatcaggcgatgactatgtggtgcatcgccaaccgcagattgatttttatcagagattacgtagccctctgaaagagctgcatctgctgccaggcttttatcacgacacgttgggtgaagagaacagggcgctggcatttgaaaaaatgcaaagctttattagtcgtttatatgctaacaaatcgcaaaaatttgattatcagcatgaagactgcacaggaccatcagcggatcaatggcggctactttctggtggacccgtgccattatcgccggttgatttagcgtatcgctttatgcgaaaggcgatgaaattgttcgggacgcactctgcgggcctgcatctcggaatgagcaccggctttgattcaggcagttcgctggattatgtctatcaaaatcaaccgcaaggtagtaacgcattcgggcgcttaatcgacaaaatctacctgaacagtgttggctggcgcggtattcgccagcgcaaaacccatttacaaatactgattaaacaagccgttgccgatctccacgccaaaggtttagccgtccgcgtggttgacattgccgcagggcatgggcgctatgtactggatgcgctggcaaacgagcctgccgtaagcgatattttgttacgtgattacagcgagttaaatgttgcacaggggcaagagatgattgcccaacggggaatgtctgggcgggtgcgttttgaacagggcgatgcgtttaacccggaggaactcagcgcgttaactccgcggcctacgctggcaattgtctctggactgtatgagctttttcccgaaaatgagcaggtaaaaaactcactcgcaggtcttgccaatgccatcgaaccggtcggcattctcatctacaccgggcagccgtggcaccctcaactggagatgattgccggggtgttaaccagtcataaagatggtaaaccgtgggtaatgcgcgtgcgttcgcaaggggagatggattcactcgtgcgtgatgccggatttgataaatgcacacaacggattgatgagtggggtatttttacggtttcgatggcggtgcgtcgtgataactga

SEQ ID NO: 461790 - DNA, 174 bp, Shigella boydii
gtggcgaaagtgtgctatgcacaaatggtgaaacagttcctgagtcgtgacccgttcgaatgcgtgctgtgtggcggccggatggtataccgccgggccatcgcgggactgaatgtggaggggctgaagaaaaacgcgcgggatatcagtctgctgaggtatatcccggggtga

SEQ ID NO: 461791 - DNA, 4944 bp, Shigella boydii
ttgctgtccgtcatcacccgtgtggaggcactggcctccacacgggtgatgacggacggacagtcagaaacggtgctgaccggtaatctggtgatggcactgtttaaccacgacaccagtcgcgatcaggaaccacagttacacacgcatgcggtggtgactaatgttacgcagcataacggcgaatggaagacactgagcagtgacaaagtggggaaaacggggttcattgagaatgtgtacgctaatcagattgcctttggcaggctctaccgggaaaaactgaaagagcaggttgaggcgctgggctatgaaactgaagtggtcggtaagcacggtatgtgggaaatgccgggtgtaccggtggaggccttttccggacgctcacagactatccgggaggccgtcggggaagacgcctcgctgaaatcccgggatgtggcggcgctggatacgcgtaaatccaaacagcacgtcgatcctgaagtcagaatggccgagtggatgcagacgctgaaggaaaccgggttcgacatccgggcatatcgtgacgcagcggaacaacgggcatatacccgcacgcagacacccggacccgcttcacaggacgggccggatgtgcagcaggcggtgacacaggccattgccggattaagtgaacgcaaagtgcagtttatgtatacggacctgctggccaggacggtcggcatactgccgccggaaaatggtgtgattgaacgggcacgcgccggtatcgatgaggccatcagccgtgagcagcttatccccctcgatcgtgagaaggggctgttcacgtccgggattcatatgctcgatgagctgtcagtccgggcactcagtcgtgacatcatgaaacagaaccgggtgaccgtacatccggagaaaagtgtcccccggacggccggttacagcgatgccgtcagtgttctggcacaggaccgtccgtcgctggccattgtgtccgggcagggcggtgcagccgggcatcgtgagcgggtggctgaactggtcatgatggcccgggagcaggggcgggaggtgcagattatcgctgctgaccgtcgctcgcagatgaacctgaagcaggatgaacggctgtccggtgaactgataaccggacgtcgtcagttgctggaaggcatggccttcacgccgggcagtaccgttatcgtcgaccagggcgaaaaactctccctgaaagagacgttaaccctgctggatggtgccgcacgtcataacgtacaggtcctgataactgacagcgggcagcgaaccggtacaggcagtgcactgatggccatgaaggatgccggggtgaacacatatcgctggcaggggggagaacagcgaccggccaccatcatcagtgaaccggaccgttatgtccgctatgcccggctggccggagattttgcggccagcgtgaaagccggagaagagagcgtggcacaggtcagcggagtacgggaacaggccatactgacacaggccattcgcagtgagctgaaaacacagggcgtgctcggacacccggaggtaaccatgaccgccctgtcaccggtctggctggacagccggagccgttatctgcgggatatgtaccgcccgggaatggtgatggagcagtggaacccggagacacgcagtcatgaccgctatgtgacagaacgtgtgacggcgcagagtcacagcctgaccctgcggaatgcgcagggcgaaacgcaggtggtgcgtatttcttccctggacagcagctggtcgctgttccggccggaaaaaatgccggtggcagacggtgagcgtctgagggtgacagggaaaattcccggactccgcgtctccggcggtgaccgcctgcaggtggcatccgtcagtgaagatgcgatgacggttgttgtgccgggacgggctgaaccggccaccctgcctgtgagcgattcaccgttcacggcactgaagctggagaacggctgggtggaaacgcccgggcattccgtcagcgacagtgcgacggtttttgcctccgtcacacagatggcaatggacaatgccaccctgaacggtctggcccgcagtggtcgtgatgtccggctgtattcctcactggatgaaacccgtactgcggaaaaacttgcccgccatccctcctttacggtggtttctgagcagataaaggcgcgtgccggtgagacattgctggaaaccgctatcagtctgcagaaagccgggcttcacacgccggcacagcaggccattcatctggcccttcctgtgctggaaagtaaaaacctggccttcagcatggtggacctgctgacagaggcgaagtcgtttgctgcagaaggaaccggttttgctgacctgggaggggaaatcaatgcgcagataaaacggggtgatttactgtatgtggatgtggcaaaaggctatggcacaggcctgctggtttcccgtgcgtcgtatgaggcagaaaagagcattcttcgccatattctcgaaggtaaggaagcggtcacgccgctgatggagagagtacctggcgaactcatggagaaactgacatcaggacagcgcgccgccacccgtatgatactggaaacgtccgaccgtttcacggtggtgcagggctatgccggtgtgggtaagaccacacagttccgggcggtgatgtcagccgtgaacatgctgccggagagtgaacgtccccgtgtcgtggggctggggcccacacaccgtgcggtcggggagatgcgcagcgccggcgtggatgcacagacactggcgtcctttctgcatgacacgcagctgcagcagcgcagcggagaaacgccggatttcagcaacacgctgttccttctcgatgagagctctatggtgggcaataccgacatggcacgggcatacgccctgattgcggccggtggcggtcgggctgtggccagcggtgacacggaccagctgcaggccatcgcgcccggtcagcctttccgtctccagcagacgcgcagtgctgccgatgtggtcatcatgaaggagattgtgcgtcagacgccggaactgcgggaggcggtatacagcctgattaaccgggatgtggaaagggcgctgtccgggcttgagcgtgtgaaaccgtctcaggtgccacgtctggagggcgcatgggcaccggagcactccgtgacggagttcagtcacagccaggaagcgaaactggcagaagcgcagcagaaggcgatgctgaaaggcgaggcttttccggatgtccccatgacactgtatgaagccattgtccgcgactataccggcaggacaccggaagcacgggagcagacgctgattgtcacgcacctgaatgaggaccggcgcgtactgaacagcatgattcatgatgcacgggaaaaggccggagaactggggcaggtgcaggtcatggtgcctgtcctgaacacagcgaatatacgcgacggggagctgcgtcgtctctccacctgggagaataacccggatgcccttgccctggtggataatgtgtatcaccggattgccggtatcagcaaggatgacgggctgataaccctgcaggatgcggaaggtaacacgcggctgatttcgccccgggaggcggtggctgaaggcgtcacgctgtacaccccggacaccatccgggtggggaccggtgacaggatacgcttcacgaagagtgaccgggagcgcggttatgtggccaacagcgtctggacggtgacagcggtttccggtgacagtgtcacactttctgacggtcagcagacccgtgtgattcgccctggtcaggagcgggcagagcaacatattgacctggcctatgccatcaccgcccacggtgcacagggggcgagtgaaacctttgccatcgcgcttgaaggcacggaaggtaaccggaaactgatggccggctttgagtcagcctacgtggccctgtcgcgtatgaagcagcatgtgcaggtgtacaccgataaccgtcagggctggacggatgccatcaacaatgccgtacagaaaggaactgcccacgatgtgtttgagccgaaaccggaccgggaggtcatgaatgcagagcggctgttcagtacggcgcgggagctgcgggacgtggcggcaggccgtgccgttctccgtcaggcggggctggccgggggagacagtcctgcacggtttattgctccgggacgtaaatatccgcaaccgtatgtggcactgccggcgtttgaccgtaacggcaagtccgccggtatctggctgaacccgctgaccacggatgacggaaacgggctgcggggattcagcggtgaaggtcgggtaaaaggcagcggggatgcgcagttcgtggccctgcagggcagccgtaacggagaaagcctgctggctgataatatgcaggatggcgtccggattgcccgtgataatcctgacagtggtgtggtggtaagaatcgccggtgaaggccgtccgtggaatcccggtgccatcaccggtggccgcgtgtggggggatatcccggacaacagcgtccagccgggagccggaaatggcgaaccggtcacggcagaggtactggcacagcggcaggctgaagaggccatccgccgtgaaacggaacgtcgcgcagatgaaattgtccgtaaaatggcagagaacaaacctgacctgccggacggcaaaacagagcaggctgtcagggaaattgccgggcaggagcgtgaccgggctgccataactgaacgggaagccgcgctgccggagagtgtactgcgtgaaccacaacgggtgcgggaagcggtctgggaagttgcccgggaaaatttgctgcaggagcgtctgcagcagatggagcgggatatggttcgtgacctgcagaaagagaaaaccccgggcggagactga

SEQ ID NO: 461792 - DNA, 747 bp, Shigella boydii; identical to SEQ ID NO: 460259

SEQ ID NO: 461793 - DNA, 240 bp, Shigella boydii
atgaaaccactttcatccgcaatagcagctgcgcttattctcttttccgcgcagggcgttgcggaacaaaccacgcagccagttgttacttcttgtgccaatgtcgtggttgttcccccatcgcaggaacaaccaccgtttgatttaaatcacatgggtactggcagtgataagtcggatgcgctcggcgtgccctattataatcaacacgctggtaatgctgccaacttactgatttag

SEQ ID NO: 461794 - DNA, 384 bp, Shigella boydii
atgtccagacgcaatactgacgctattaccattcatagcattttggactggatcgaggacaacctggaatcgccactgtcactggagaaagtgtcagagcgttcaggttactctaaatggcacctgcaacggatgtttaaaaaagaaaccggtcattcattaggccaatacatccgcagccgtaagatgacggaaatcgcgcaaaagctgaaggaaagtaacgagccgatactctatctggcagaacgatatggcttcgagtcgcaacaaactctgacccgaaccttcaaaaattactttgatgttccgccacataaataccggatgaccaatatgcagggcgaatcgcgctttttacatccattaaatcattacaatagctag

SEQ ID NO: 461795 - DNA, 435 bp, Shigella boydii
gtgaaaagtaccagcgatctgttcaatgaaattattccattgggtcgcttaatccatatggttaatcagaagaaagatcgtctgcttaacgagtatctgtctccgctggatattaccgcggcacagtttaaggtgctctgctctatccgctgcgcggcgtgtattactccggttgaactgaaaaaagtgttgtctgtcgaccttggagcactgacccgtatgctggatcgcctggtctgtaaaggctgggttgaaaggttgccgaacccgaatgataagcgcggcgtactggtaaaacttaccaccagcggcgcggcaatatgcgaacaatgccatcaattagttggccaggacctgcatcaagaattaacaaaaaacctgacggcggacgaagtggcaacacttgagcatttgcttaagaaagtcctgccgtaa

SEQ ID NO: 461796 - DNA, 666 bp, Shigella boydii
atgttagatttgtttaaagcaattggcctggggctggtggtgttactgccgttagctaacccattaacaactgtcgcgttatttcttggcctggcaggcaacatgaacagtgccgaacgtaatcgtcagtcgttgatggcctcggtgtacgtatttgccatcatgatggtggcgtattacgccgggcaactggtgatggatacatttggcatttcgattcccggtctgcgaattgcaggcggcttaatcgtcgcgtttatcggttttcggatgctctttccgcaacagaaagcgattgattcaccggaggcgaaaagcaagtcggaagagctggaagatgaacccagtgccaatattgcctttgtgccgctagcaatgccaagtaccgctggtccgggaaccatagcgatgattattagctcggcgtccacagtgcgtcagagttcaaccttcgctgattgggtactgatggttgcgccgccgctgatctttttcctggtggcggttattttgtggggaagcctacgcagctccggcgcaattatgcggctggtgggcaagggtggcattgaagcgatctcccgtctgatgggattcctgctggtatgtatgggtgtgcagtttattattaacggcatcctggaaatcattaaaacgaaccattaa

SEQ ID NO: 461797 - DNA, 1191 bp, Shigella boydii
atgacaacaaacactgtttcccgcaaagtggcgtggctacgggtcgttacgctggcagtcgccgccttcatcttcaacaccaccgaatttgtccctgttggcctgctctctgacattgcgcaaagttttcacatgcaaaccgctcaggtcggcatcatgttgaccatttacgcatgggtagtagcgctaatgtcattgccttttatgttaatgaccagtcaggttgaacggcgcaaattactgatctgcctgtttgtggtgtttattgccagccacgtactgtcgtttttatcgtggagctttaccgttctggtgatcagtcgcattggtgtggcttttgcacatgcgattttctggtcgattacggcgtctctggcgatccgtatggctccggccgggaagcgggcacaggccttgagtttaattgccaccggtacagcactggcgatggtcttaggtttacctctcgggcgcattgtggggcagtatttcggttggcgaatgaccttcttcgcgattggtattggggcgcttatcacccttttgtgcctgattaagttacttcccttactgcccagtgagcattccggttcattgaaaagcctcccgctattgttccgccgcccggcattgatgagcatttatttgttaactgtggtggttgtcaccgcccattacacggcatacagctatatcgagccttttgtgcaaaacattgcgggattcagcgccaactttgccacggcattactgttattactcggtggtgcgggcattattggcagcgtgattttcggtaaactgggtaatcagtatgcgtctgcgttggtgagtacggcgattgcgctgttgctggtgtgtctggcactgctgctacctgcggcgaacagtgaaatacacctcggggtgctgagtattttctgggggatcgcgatgatgatcatcgggcttggtatgcaggttaaagtgctggcgctggcaccagatgctaccgacgtcgcgatggcgctattctccggcatatttaatattggaatcggggcgggtgcgttggtaggtaatcaggtgagtttgcactggtcaatgtcgatgattggttatgtgggcgcggtgcctgcttttgccgcgttaatatggtcaatcattatatttcgccgctggccagtgacactcgaagaacagacgcaatag

SEQ ID NO: 461798 - DNA, 225 bp, Shigella boydii
atgaatcccaatgaaagtgatctgaatgacgtgttgatgccagcatcattaagtgatgataaaattatcaagcatatggcgcgcaggaccctcaaactgtttgtaaaaaatgaaacgccgccaaaagttactcacgaagacctggtgaaaaacaggcctcgctcccctgtcagaccacctatacccgcaaccgccaaaacgccagacctccctgaacgtcattaa

SEQ ID NO: 461799 - DNA, 486 bp, Shigella boydii
atggggcgcgtatttcacaccggcgtcgagcgtgtgctctttctgtttctgaatgattttattgaacaatttccaatgatccaccttggcgtccccatcaaaaaagcgcatacaccacatattgaacccctgcctccggatcaccataccgctgcagattacttacgccagtttgatttgcttgtcctgaattttatctctcgcggtaattttgtcatactcccccgattatggagtaactctgaggttcacagatggttcgtcaataaagatcctaacttgatcaccgccattctcgacataacagacggcgaattaaaagaggatttattgcaaagcctgatggattcattaggttctaacaaacatgtactacccgaagtctgcatctgctttttatcccttttagcagaacaagaatctcctcattttcaggactttttttatttttcgccaatatgttattgcactatcaccaatttatga

SEQ ID NO: 461800 - DNA, 459 bp, Shigella boydii
atggttacgccagtaagcatcagtaattacatatctcttcctgatgattttcccgtacgtaatattgcacctcaggtaaaagaagttttaaagaattttattgatgcactcagtaccataatatgtgatgaagagtggcgcacgtctttaaacaccaactcagccacaaaaaagacatttaacaaccttgataacttatcatatattcagaagacttcttttcggggtaacgacacactatacaatgaaaaggttcagtttaaactcacttatcccgtcaagaatggaagacacaaagaaaatattgaatttcaggtagtaataaatttaagccctatttatttagataattttcgccatgatggagaaattaatatttttgcgctcccaacccaaagcctgtcactatggggcgcgtatttcacaccggcgtcgagcgtgtgctctttctgtttctga

SEQ ID NO: 461801 - DNA, 882 bp, Shigella boydii
atggatctgacccaactggagatgttcaacgcggttgccgaagctggcagcataacccaggcagcagcaatagtgcttcgcgtgccgtcgaatctcactacccgtctacgccagctggaaacagaactgggggtagatctgtttattcgcgagaatcagcgtttacgtctctctcctgccgggcataactttttacgctatagccaacaaattctcgcgttagtggatgaagcgcggagcgttgtcgctggcgatgagccgcaaggtttattttctcttggttcgctggaaagtaccgcagcagtgcgcattccggccacgctggcggaattcaaccatcgttatcccaaaattcagttttcactttccaccggcccttccggcactatgctggaaggagtgctggagggaaaactgaatgcggcatttattgatgggcccattaaccatactgccattgacgggataccggtataccgcgaggagctgatgatcgtcacgccacaaggtcatgcgccagtaatccgcgccagtcaggttaacggcagtaacatttatgccttccgcgccaattgttcgtatcgtcgccacttcgagagctggtttcatgctgacggtgccgctccgggaactattcacgagatggagtcgtatcacgggatgttggcctgtgtggtcgcaggagcaggcattgcgcttattccacgctctatgctggaaagtatgccggggcattaccaggttgaagcgtggccgttagctgagcaatggcgttggttaacaacctggctggtctggcgtcgtggtgcgaaaacgcgtccgcttgaggcatttattcaactactggatgtgcctgactcggcaaaacagggttaccaatga

SEQ ID NO: 461802 - DNA, 1389 bp, Shigella boydii
atgaccattactccggcaactcatgcaatttcgataaatcctgccacgggtgaacaactttctgtgctgccgtgggctggcgctaacgatatcgaaaacgcacttcagctggcggcagcaggctttcgcgactggcgcgagacaaatatagattatcgtgctgaaaaactgcgtggtatcggtaaggctctgcgcgcccgtagcgaagaaatggcgcaaatgatcacccgtgaaatgggcaaaccaatcaatcaggcgcgcgctgaagtggcgaaatcggcgaatttgtgtgactggtatgcagaacatggtccggcaatgctgaaggcggaacctacgctggtggaaaatcagcaggcagttattgagtatcgaccgttggggacgattctggcgattatgccgtggaactttccgttatggcaggtgatgcgtggcgcggttcccatcattcttgcaggtaacggctacttacttaaacatgcgccgaatgtgatgggctgtgctcagctcattgcccaggtgtttaaagatgcgggaatcccgcaaggcgtatatggctggctgaatgccgacaacgacggtgtcagtcaaatgattaaagattcgcgcattgctgctgtcacggtgaccggaagtgttcgtgcgggagcggctattggcgcacaggctggagcggcactgaaaaaatgcgtactggaactgggcggttcggatccatttattgtgcttaacgatgccgatctggaactggcggttaaagcggcggtagccggacgttatcagaataccggacaggtttgtgcagcggcaaaacgctttattatcgaagagggaattgcttctgcatttaccgaacgttttgtggcagctgcggcagccttgaaaatgggcgatccccgtgatgaagagaacgctctcggaccaatggctcgttttgatttacgtgatgagctgcatcatcaggtggagaaaaccctggcgcagggtgcgcgtttgttactgggcggggaaaagatggctggggcaggtaactactatccgccaacggttctggcgaatgttaccccagaaatgaccgcgtttcgggaagaaatgtttggccctgttgcggcaatcaccgttgcgaaagatgcagaacatgcgctggaactggctaatgatagtgagttcggcctttcagcgaccatttttaccaccgacgaaacacaggccagacagatggcggcacgtctggaatgcggtggggtgtttatcaatggttattgtgccagcgacgcgcgagtggcctttggtggcgtgaaaaagagtggctttggtcgtgagctttcccatttcggcttacacgaattctgtaatatccagacggtgtggaaagaccggatctga

SEQ ID NO: 461803 - DNA, 927 bp, Shigella boydii
gtggcagtcgccatggataatgcaattttagaaaacatcttgcggcaagtgcggccgctcattggtcagggtaaagtcgcggattatattccggcgctggctacagtagacggttcccgattgggcattgctatctgtaccgttgacggacagctttttcaggccggagacgcgcaagaacgtttttccattcagtctatttccaaagtgctgagtctcgttgtcgccatgcgtcattactccgaagaggaaatctggcaacgcgtcggcaaagatccgtctggatcaccgttcaattctttagtgcaactggaaatggagcagggtattccgcgtaatccgtttattaatgctggtgcgctggtggtctgcgatatgttgcaagggcgattaagcgcaccacggcaacgtatgctggaagtcgtgcgcggcttaagcggtgtgtctgatatttcatacgatacggtggtagcgcgttccgaatttgaacattccgcgcgaaatgcggctatcgcctggctgatgaagtcgtttggcaatttccatcatgacgtgacaaccgttctgcaaaactactttcattactgcgctctgaaaatgagctgtgtagagctggcccggacgtttgtctttctggctaatcaggggaaagctattcatattgatgaacctgtggtgacgccaatgcaggcgcggcaaattaacgcgctgatggcgaccagtggtatgtaccagaacgcgggggagtttgcctggcgggtggggctaccggcgaaatctggcgttggtggcggtattgtggcgattgttccgcatgaaatggccatcgctgtctggagtccggaactggatgatgcaggtaactcgcttgcgggtatcgccgtccttgaacaattgacgaaacagttagggcgttcggtttattaa

SEQ ID NO: 461804 - DNA, 360 bp, Shigella boydii
atgcagtctctcgatccactcttcgcgcgtttatcccgttcaaaatttcgctctcgctttcgtctgggcatgaaagagcgtcagtattgcctggagaaaggcgcgccagtcatcgaacaacatgcggcggattttgtcgctaaacgtcttgctccggcattaccggctaatgacggtaagcaaacacccatgcgcgggcatccggtgtttatcgctcagcacgccaccgcgacctgctgtcgcggttgtctggctaagtggcataacattccgcagggtgtttcgttaagcgaagaacaacaacgttatatcgtggcggtaatctatcactggctggttgtacagatgaatcagccatga

SEQ ID NO: 461805 - DNA, 1419 bp, Shigella boydii
atgcatgtacaccccatttcaactttccgtttgttccaggaaggtcatctgctacgtaatagcatcgctatttttgcgctaaccacgctgttctattttattgttgcagagttacggctggttcacgaactttctcttttctggccgctgaatggcgtaatggcgggggtgtttgcccgctatgtctggcttaatcgactgcattactatgcgatcagttatgtggcgatgctggtttatgatgccataaccaccgaatggggactggtttcactggttatcaatttctccaatatgatgtttattgttaccgtcgccttactggtcgtgcgggataagcgtctggggaaaaataagtatgagccagtaagtgccttacggctatttaattactgtctgattgccgcattattatgcgctattgtcggggcgattggttcggtcagtattgatagtctggatttctggcctttgcttgcggactggttcagtgagcaattctcaacgggcgtgttgatcgtgccttgtatgctgacgttggctattcctggagtgctgccgcgctttaaagcagaacagatgatgcccgccatcgcgcttattgtgtcggttattgcctcggtagtcattggcggagcggggagtctggcgttcccgctgcctgcattaatctggtgtgcagtgcgctatacgccgcaggtaacatgtctgttgacctttgtcaccggtgcggtggaaatcgtactggtggcaaattcggtgattgatatctcggtcggttcgccgttctccattccggaaatgttctccgcacgtctcggtattgccacgatggcgatatgcccaattatggtttcttttagcgtggcagcgatcaattcgctaatgaagcaagttgcgctgcgagccgactttgattttctgactcaggtttactcacggtccggtctttatgaggcgctgaaaagtccatcgctgaaacagacacaacatctgacggtcatgctgcttgatatcgactatttcaaaagcattaacgataactatggacatgaatgtggcgataaagtgttaagcgtgtttgcccggcatattcagaagattgtcggtgataaggggctggtggcgcgcatgggcggcgaagaatttgctgttgcagtgccgtcggtgaatcctgtcgatggtctgctaatggcggaaaaaatccgtaaaggcgttgaactgcaaccattcacctggcaacaaaaaacgctttatctcacggtaagtattggcgtcggtagtggtcgcgcatcgtaccgaacgctgaccgatgattttaataaattgatggtcgaagccgatacgtgtctgtatcgctcgaagaaagatgggcgcaaccgtaccagcactatgcgttacggtgaggaagttgtctga

SEQ ID NO: 461806 - DNA, 243 bp, Shigella boydii
gtgaaaacactaaatcgtcgcgatattcccggtgcacagtatccagaacgtatcattcagtttggtgaaggtaacttcctgcgcgcctttgttgactggcaaatcgatctcctgaatgagcacaccgatctgaattctggcgtggtcgttgttcgtccgattgaaacttcattcccgccgtcactgagcacgcaggatggtctgtacaccaccattatccgtggcctgaatgagaaggggtga

SEQ ID NO: 461807 - DNA, 207 bp, Shigella boydii; identical to SEQ ID NO: 24440

SEQ ID NO: 461808 - DNA, 216 bp, Shigella boydii
gtgagccacattgcttctgataacgtactgggtggcaaaatcgccggtgattacatcgcgaagaaagcgggtgaaggagccaaagttatcgagctgcaaggcattgctggtacatccgcagcccgtgaacgtggcgaaggcttccagcaggccgttgctgctcacaagtttaatgttcttgccagccagcagattttgatcgcactaaaggtttga

SEQ ID NO: 461809 - DNA, 327 bp, Shigella boydii
atgaaaagaaatcttccgttaattattttgttgtcttctctggttatgggctgtacgcaacataaaacagatatgccccgacagttggttaaggcattaccacaatatccggcctatgcagcggcaaattatataaagggacgggttgatgtgaggtttgatattggtgctgatggtactgtcacccgaattgagtttattcgttcagagccgcaccatctgtttgatgagcaggttgtaaaggcgatggcaaaatggcgatttgagaaggacaggccgtgtaaaggcgtgaagaaaacgtttatctttagtccttccgcaccctga

SEQ ID NO: 461810 - DNA, 522 bp, Shigella boydii
atgaccgctgaaattgtctgttcggtgttccgtgtcccggcctacaagattggcgtgggacaaccgccttccagtgacaacgtggaggcgctggagcagcagtattattcccagtgcctgcagacgctgattgagtccattgaactgttactggatgaggcgctggaaacgggggaaaacgagagtacagaatttgatgtcaccacgctgctgagaatggacagtgagcggcgcatgaaaacgctgggggatgcggtgaaaaatacgcttctcacgcccaatgaggcccgtaaacgggagaacctgccgcccctggccggcggtgatgcactgtatcttcagcagcagaactacagtctggaggcactgtcccgtcgtgatgcccgtgaggatccgttcgcgtcgaccgggaaaacggccttagcgcaaccgcctgacggcgcatctgacggtaataaggcaatcagtgaaacagagcatgatgcggtgaaagcgatgttcagggggattctgaaaaaatga

SEQ ID NO: 461811 - DNA, 459 bp, Shigella boydii; identical to SEQ ID NO: 461361

SEQ ID NO: 461812 - DNA, 255 bp, Shigella boydii; identical to SEQ ID NO: 460515

SEQ ID NO: 461813 - DNA, 1260 bp, Shigella boydii
atgtttacatcagtggcgcaagccaatgctgcggttatcgaacaaattcgtcgtgctcgtccacactggctggatgtgcaaccggctttttcacttatcagcgaactaaacgagggcaaaacactgcttcacgccgggccgccaatgcgctggcaggagatgaccggacccatgaaaggggcgtgcgtgggcgcatgtctgttcgaaggctgggcgaaagatgaagcgcaggcactggcgatgctggaccagggggaagtgaacttcattccttgtcaccatgtgaatgccgtcgggccaatgggcggcattacttctgccagtatgccgatgctggtggtcgagaacgtgaccgacggcaaccgggcgtactgcaacctcaacgaaggtatcggcaaagtgatgcgttttggcgcttacggcgaagatgtcctgactcgccatcgctggatgcgcgatgtgttaatgccagtattaagcgcggcgctggggcgcatggagcgcggtatcgatctcacggcgatgatggcgcagggcattacgatgggcgatgagttccatcaacgcaatattgcttcctcagcactgttaatgcgtacgctggccccacaaattgctcgcctcgatcatgataaacagcacattgcggaagtgatcgatttcctcagcgtgaccgatcagttcttcctcaacctcgcgatggcctactgcaaggcggcgatggatgctggcgcgatgatccgcgcaggcagcatcgttacggctatgacccgcaacggcaatatgttcgggattcgggtaagcgggctgggtgaacgctggtttactgcgcctgtaaacactccgcaaggtctgtttttcaccggcttctcgcaggagcaggcgaacccggatatgggcgatagcgcgattaccgaaacctttggtatcggaggtgcggcaatgatcgcagcgcctggcgtaacgcgctttgtcggtgcgggtggcatggaagcggccagggcggtatctgaagagatggcggaaatttaccttgaacgcaatatgcagttgcagatcccaggctgggattttcagggcgcgtgcctggggctggatattcgtcgcgtggtagaaaccggcattacgccactcatcaataccggtatcgcccataaagaggcggggatcgggcagattggcgcaggcaccgtgcgggcaccgctggcgtgctttgaacaggcgctggaagcactggctgaaagcatggggattggttga

SEQ ID NO: 461814 - DNA, 1476 bp, Shigella boydii
atgattcagtcaacacgtatttccatggggttattctttaaatattttttatcgttgacgaaaattgatcctggtcaaaactatatatctctgccatcaataaaatccagcactcacattgctctcctttttatggtttctatgggtacacaaaaattaaaagctcaaagcttttttattttcagtttattgctgacattaattttattttgcattactaccttatataacgaaaacacaaatgtaaaactcatcccacagatgaattacctgatggttgttgtggctttgtttttccttaacgccgtcatttttcttttcatgttaatgaaatatttcactaacaaacaaattttaccaacactcattttaagccttgcattcttaagtggccttatctatttagttgaaaccattgtaattatccataaaccaattaacggcagtacactgatccagacaaagtcgaatgatgtttctattttctatattttccgccaactcagttttatttgtttaacctcgctggcactcttttgttatggaaaagacaacatccttgacaacaataagaaaaaaacgggaatcctgttgctggcgttgattccttttttagtttttccccttctggcacacaatctgagcagttataacgctgactattctttgtatgtcgtcgactactgtccggacaaccatactgcgaccaagggaatcaactatacaaaaatattggtttgtctgtgggcatttttactgttctttattatcatgcgtacacgattagccagcgaactatggccgttaatagcattattatgtctggcatcgctatgctgcaacttacttctactgactctggatgagtataattacaccatctggtatatcagtcgcgggattgaagtttccagtaaactgtttgttgtgtcttttctgatttataacatttttcaggagctgcaactctccagcaaactggcagttcatgatgtgctgaccaatatttataatcggcgctactttttcaacagcgtagagtcattattgtcgcgacctgttgttaaggacttctgtgtcatgctggttgatattaatcagttcaaacgcatcaatgcccaatggggacatcgtgtgggtgataaagtgctggtttcaattgtcgatattatccagcaaagcatccgccctgatgatattttagcgcgactggagggtgaggtgtttggcttgctatttaccgaactcaatagtgcccaggcaaaaatcattgcggatcgtatacgtaaaaatgtcgaactcctgaccggctttagtaacagatatgatgttcctgaacaaatgaccatcagtattggcacggttttttcaacgggtgacacgcgtaatatctcgcttgtcatgacggaagcagataaagccttacgcgaagcgaaaagcgaggggggcaacaaagtgattattcatcatatttaa

SEQ ID NO: 461815 - DNA, 492 bp, Shigella boydii
atggccgaagagaaatttcactattatctcgatctcaatgaccgctatgtctatttttatgagccggttaatgttgaatactttgcgatgaataactggtccttcctgcagtcaggaagtattggtatcgatcgcaaagatattgaaaaggtatttaccgggcgtaccgtattgtcgagcatttaccaggatcagcgtactaaacagaacgtgatgagtttgctgacgccggtgtatgttgcagggcagctaaaagggattgtgctgctggatattaacaaaaacaatttgcggaatatcttttacactcatgaccgccctctcctctggcgttttctcaatgtcacgctaaccgataccgattcggggcgcgacattatcatcaaccagagcgaagataatctgttccagtatgtcagttacgtccatgacttaccgggcggcatgaggtgtactggcaatagcggacactaccatttgttctttttttaa

SEQ ID NO: 461816 - DNA, 231 bp, Shigella boydii
atgaaaattggcgtattcgtacctattggcaacaacggctggctcatttcgacccacgcgccgcagtacatgccgacctttgaactgaataaagccattgtgcaaaaagcggagcattaccatttcgatttcgccctgttgaagtggcacactgaatttggccacctgaacagaggtgatatgctcacctcagaacaacactggtgctccaatgaaaaaaagaaattttag

SEQ ID NO: 461817 - DNA, 5703 bp, Shigella boydii
atggtagccgttcaggcacctacgttaagccagaaagattcctcggtatcgttaagtacccagacgttgagcgcggattcccattcaaccgccacactgacttttattgcgcatgatgcagcaggtaatcctgttatcgggctggtgctctcgacgcgtcacgaaggtgttcaggacatcaccctttctgactggaaagataatggtgacggaagctatacccagatcctgaccacaggtgcgatgtctggcacgctgacgcttatgccacagctgaacggtgtggatgcggctaaagcccccgccgtggtgaatatcatttctgtttcgtcatctcggactcactcgtcaattaagattgataaggaccgttatctctccggcaatcctatcgaggtaacggtagaactgagagatgaaaatgacaaacctgttaaggagcaaaaacagcaactgaataccgcagtcagcatcgacaatgtgaaacctggtgtcactacagactggaaagaaaccgcagatggcgtctataaggcaacctataccgcctataccaaaggcagtgggcttactgcgaagctattaatgcaaaactggaatgaagatttacataccgctggatttatcatcgacgccaacccgcagtcagcgaaaattgcgacattatctgccagcaataatggtgtgctcgccaatgagaatgcagcaaacaccgtctcggtcaatgtcgctgatgaaggaagcaacccaatcaatgatcataccgtcacgtttgcggtattaagcggatcggcaacttcctttaacaatcaaaacaccgcaaaaacggatgttaatggcctggcgactattgatctgaaaagtagtaagcaggaagacaacacggttgaagtcacccttgaaaatggcgtgaaacaaacgttaatcgtcagttttgtcggcgactcgagtaccgcacaggttgatctgcagaagtcgaaaaatgaagtggtcgctgacggcaatgacagcgccacaatgaccgcgacagttcgggatgcaaaaggcaacctgctcaatgacgtcaaggtcaccttcaatgttaattcagcagcagcgaaactgagccaaaccgaagtgaatagccacgacgggatcgccacagctacgctgaccagtttgaaaaatggtgattatacggttacggcctctgtgagctctggttctcaggctaatcaacaggtgaattttatcggtgatcaaagtactgcagccctgaccctcagtgtgccttcaggtgatatcaccgtcaccaacacagctccgcaacatatgactgcaaccttgcaggataaaaatggcaacccactaaaagataaagaaatcaccttctctatgccaaacgacgtcgcaagtcggttctcgattagcaacggcggaaaaggcatgacggatagtaacggggttgcaatcgcctccctgaccggcacgttagcgggcacgcatatgatcacggctcgtctggctaacagcaatgtcagcgatgcacagccaatgacgtttgtggcggataaagacagagcggttgtcgttctacaaacatcgaaagcggaaatcattgggaatggcgtggatgagacgaccctgacagcaacagtgaaagatccttttgataacgtggttaaaaatctgtcagtagtcttccgcacctcccccgcagacacgcaactgagtctgaacgcgcgtaatactaatgagaacggtattgctgaagttacccttaagggcacggttttgggtgttcatacagccgaagccatactgcttaacggcaacagagatacgaagatagtcaatattgcgcccgatgccagcaacgcgcaggtcaccctgaacatccctgcacaacaggtggtgacgaataacagcgacagcgtgcagctgacggcgacggtgaaagatccgtcgaatcatccggtggcgggaataacggtgaacttcaccataccacaggacgtggcggcaaactttacccttgaaaataacggtattgccatcactcaggctaatggcgaagcgcatgtcaccctcaaaggcaaaaaagcgggcacgcatacggttaccgcaacgctgggtaacaataatgccagcgatgcgcaaccagtcaccttcgtggcggataaggacagcgcggttgtcgttctgcaaacatcgaaagcggaaatcattgggaatggcgtggatgagacgactctgacggcaacagtgaaagatccttttgataacgcagtaaaagatctacaggtcaccttcagtaccaaccccgcagatactcaacttagtcagagcaaaagcaatactaacgacagtggtgtggccgaagttacctttaagggcacggttttgggtgttcatacagccgaagccacactgcctaacggcaacaacgatacgaagatagtcaatattgcgcccgatgccagcaacgcgcaggttacgctgaacatccctgctcaacaggtggtgacgaataacagcgacagcgtgcagctgacggcgacggtgaaagatccgtcgaatcatccggtggcgggaataacggtgaatttcaccatgccacaggacgtggcggcaaactttaccctcgaaaataacggtattgccatcacccaggccaatggggaagcgcatgtcacgctcaaaggtaaaaaagcgggtacgcatacggttaccgcaacgctgagtaataacaataccagtgattcacagccggtaacgtttgtggcggacaaaacctcggctctggttgttcttcagatatcaaaaaatgagatcacaggtaatggcgtagatagcgcaacgctaactgcaacagtcaaagatcagttcgacaatgaggtgaacaatcttccggtaacattcagcacagcttcttcaggcctcaccctgaccccaggggaaagtaataccaatgagtctggcatcgcgcaggccactctcgcaggcgttgcctttggtgagcagacggttactgcatcactggctaatactggtgccagcgacaacaaaactgtgcactttattggcgacacaacggcggcaaaaattatcgagttgacgcctgacccaggcagcataatcgccggtaccccacagaacagcaccggtagcgtaatcaccgctacagtcattgataataatggctttccggtgaaaggtgtgactgtgaacttcaccagcaacgcagcgacagccgaaatgacgaatggcggccaagccgtaacgaacgaacagggtaaggctaccgtcacttataccaatacccgctcctcgatagaatcaggagcgagaccggataccgttgaggccagtctggaaaatggtagctccacgcttagcacatcaattaatgtcaacgctgatgcgtctacggcacatctcaccttgttacagtcacttcttgatacagtctccgcaggcgacactaccaatctgtatattgaggtgaaggataattacggcaacggtgtaccccagcaggaggtaaccctcagcgtttcaccaagtgaaggcgtgactcccagtaataacgctatatatacgaccaatcacgacggcaatttttacgcaagctttaccgctacaaaagccggggtttatcaagtgacggcaaccctcgaaaatggcgattcgatacaacaaacagtgacctatgtgccgaacgtcgcgaatgccgaaatcacgctggcagcctcgaaggatccggtgattgccgacaataacgatctcacgacactaacagcaacagtcgctgatacagagggcaatgcgatagccaacactgaagtaacatttactctgccggaagatgtgaaggcgaacttcacgctgagcgatggcggtaaagcgattactgatgctgaaggcaaagcgaaagtcacgctgaaaggtacaaaagcaggcgctcatactgttacagcatcgatgactggcggtaagagtgagcagttggtggtgaactttattgcggatacgctcagtgcgcaggttaatcttaacgttaccgaggacaactttatcgccaataacgttgggatgaccacacttcaggcaacagtgactgatggaaacggcaacccgttagccaatgaggcggtgacattcacgctaccggcagacgtgagcgcaagcttcactctcggacaaggcggttccgccattactgatatcaacggcaaggctgaagttacactgagcggtacaaaatccggtacctaccccgtgacagttagcgtgaacaattatggtgtcagtgatacgaaacaggtgactttgattgccgatgctggtaccgcaacactagcctccttaacctctgtatactcattcgtcgtcagcacgaccgagggcgcgaccatgactgcaagcgtcactgacgctaacggcaacccggtagaaggcataaaagttaatttccgcggaacctccgtcacgctaagcagcaccagcgttgaaacggatgatcagggtttcgctgaaattcttgtgacaagcaccgaagtcggactgaaaacagtttcagcctctctgacagataaacctactgaagtcatatcgcgattactgaatgcaaaagcagatattaattctgcaacgattaccagtctggagatacctgaaggtcagctaatggtcgcacaagacgtagcagttaaagctcacgtcaacgaccagtttggcaacccgattcttaatgaatctgtaacattcagtgcagagccaccagagcacatgaccatcagccaaaatattgtctctactgatacgcatggtatagccgaggtctccatgacgcccgaaagaaacggttcgtatatggtgaaagcatccctggcgaatggagcctcacttgagaaacaactggaggctattgatgaaaaactgacactcacggcgtccagtccgcttatcggtgtctatgcccctacaggcactactctgacggcaacgctaacctctgcaaatggcactccagtggagggtcaggtcatcaactttagcgtaacgccagaaggggcgacgttaagtggcggaaaagtgagaactaactcttcaggtcaggctccggtcgttctgaccagcaataaagtcggtacatatacggtgactgcatcgttccataacggcgtaacaatacagacacagacaaccgtgaaagtcactggcaactcaagcaccgcacatgttgctagctttatcgctgatccatcgactatcgccgccaccaacagtgatttaagtaccttaaaggcaacggttgaggatggcagtggtaacctgatcgaaggtctcactgtgtacttcgccttaaaaagcggctctgccacattaacgtcattaacagcggtgaccgatcaaaacggaatcgcgacaacaagcgtgaaaggagcgatgacaggtagcgtcacggtaagcgcagtcacgaccgctggtggaatgcaaacagtagatataacgctggtggcaggcccggcagacgcctcgcagtccgtccttaagaaaaatcggtcctcactgaaaggggactttaccgatagtgctgagctacatcttgttttgcacgatatatcaggcaatccgatcaaagtttctgaagggatggaatttgtgcaatctgaaccgccccgggaatcctggagactaaactccctgagaaagaggtaa

SEQ ID NO: 461818 - DNA, 1584 bp, Shigella boydii; identical to SEQ ID NO: 460573

SEQ ID NO: 461819 - DNA, 612 bp, Shigella boydii; identical to SEQ ID NO: 459951

SEQ ID NO: 461820 - DNA, 2784 bp, Shigella boydii
atgagaaacctctgtttcttactgacgttagtggcaactctgttgctccccgggcggctgattgccgccgccttaccgcaggatgaaaagttaattaccgggcaactggacaatggcttgcgatatatgatttatccgcatgctcaaccaaaggatcaggtaaatttatggctgcaaattcataccggttcattgcaggaagaagacaatgagcgcggcgtggctcattttgtagaacatatgatgtttaacggcacaaaaacatggccgggtaataaagtcatcgaaacatttgagtcaatgggcctgcgttttggtcgcgatgttaatgcctataccagctatgacgaaacggtgtatcaggtgagtttgccgactacgcagaaacaaaatctgcaacaagtgatggcaatcttcagtgaatggagtaatgccgcaacctttgaaaaactcgaagtagacgctgaacgtggcgtaattactgaggaatggcgtgcccatcaggatgcgaaatggcgcacctctcaggcgcgccgccctttcctgctggctaatacccgtaatttagaccgtgaacctatcggcctgatggatactgtcgccacggtcacaccggcacaattgcgccaattttatcaacgctggtatcaaccaaataatatgacctttatcgtggtcggcgatatcgacagtaaagaagcgctggcgctgataaaggataatttaagtaagcttccggctaacaaagcagctgaaaatcgcgtctggccgacaaaagccgaaaaccacctgcgctttaatatcattaatgataaagaaaaccgggtgaacggcatcgcactctattatcgcctgccaatggtacaagtgaacgatgagcaaagctttatcgaacaagctgaatggagcatgttagttcagctgttcagtcaacgtctgcaggaacgcatacagtcgggcgagttgaagactatttctggcggcactgcgcgcagcgttaaaattgcacccgattatcagtcgctgtttttccgtgtaaatgcacgagacgataatatgcaggatgctgcgaatgcattaatgtcagagttggcaaccattgatcagcatggtttttctgctgaagaactcgatgatgtcaaatctacccgcctcacctggctgaaaaatgcggttgatcagcaagctgaacgtgatttacgtatgctgaccagtcgcctggcatccagctcattaaataatacgccgttcttgtcgccggaagagacatatcaactttcgaaacgtctgtggcagcaaattaccgtgcaaagtctggcggaaaaatggcagcagttaagaaagaaccaggacgcattttgggagcaaatggtaaacaatgagcttgccgccaaaaaagcattgtctcctgcggctatcctggcgctggaaaaagagtacgccaacaaaaagctggcggcttacatcttcccaggcagaaatttatcgttaacagtagacgctgacccacaggcggaaattagcagcaaagaaacgctggctgagaatctgacatcattaacactttccaatggtgccagggttattctggcaaaatccgcgggtgaagagcaaaagctacaaattactgccgtatcgaataaaggcgatttaagtttccctgcgcagcaaaaatcacttatcgcgctggcaaataaagcagtaagcggaagcggcgttggtgagctctcctcttccagcctgaaacgctggagtgcggaaaattcggtaaccatgagcagtaaagtcagtggcatgaatacgttgctctccgttagcgcgcggactaataaccctgaacctggttttcagttgattaaccagcgaatcacccacagcacgattaacgacaatatttgggcatcgctacaaaatgctcaaattcaggcgttgaaaacgctcgaccagcgtccagcggagaaattcgcccagcagatgtatgagacgcgctatgctgatgaccgcacgaaattactgcaagaaaatcagattgtacagtttactgccgcagatgcgctggctgccgatcgccagttgttttcatctccagcggatatcacgtttgtcattgtcggtaatgtctcagaagacaaactcgtggcgttaattacgcgttacttaggatcaatcaaacactctgattcgccattagccgcaggtaaaccattaactcgcgcgacggacaacgcatcggttactgtaaaagaacaaaatgaacctgtggcacaggtttcacagtggaagcgttatgattcccggacacctgttaatctggcgacgcgtatggcgctcgatgcttttaacgtcgcactggcaaaagatctacgtgttaatattcgtgaacaggcatctggagcatacagcgtttcttctcgcctctcggttgatcctcaggccaaagatatcagtcatttgctggcttttacttgtcaaccagaacgacatgatgaactgttaacgttagcgaatgaagtgatggttaagcgtctggctaaagggatcagtgagcaagaactgaatgaataccagcaaaacgttcagcgcagcctcgatatccaacagcgtagcgttcaacaattagcgaacactattgtaaatagtcttattcaatatgacgatcctgcagcatggactgagcaggagcaattgttgaaacaaatgacggtagagaatgttaacactgccgttaaacaatatctttctcatccggtaaatacttataccggagtattattgccaaaataa

SEQ ID NO: 461821 - DNA, 708 bp, Shigella boydii
atgtgggtcaataagtatattgacgattgcactgatgaggatttaaacgatcgtgactttattgcatcagttgttgaccgggctatttttcatttcgcgattaatagtatatgtaatcctggggataataaagatgcgactcccattgaacaatgtacttttgatgtagaaactaagaatggccttccctccacggttcagctattttatgaggaatctaaggataatgaacctttagcgaatatacattttcaagcaataggttctggttttttaacgtttgttaatgcctgccaggaacatgatgacaacagcttaaaattatttgcttcgctgttaatttcactttcatattctagtgcctacgcagatttatcagaaacagtgtatattaatgaaaataatgagagctacctgaaagctcagtttgaaaaattatctcaacgtgatatgaagaagtacctgggagagatgaagcgtctggctgatgggggagaaatgaattttgatggctatctggataagatgtcacatctggtgaatgaagggacgctcgatcctgatattttaagcaaaatgcgagatgctgcaccacaattaattagcttcgcgaagtcgtttgacccaacctcaaaggaagagattaaaatacttacagacacttctaaattaatttatgatttgttcggggttaaatcggagaaataa

SEQ ID NO: 461822 - DNA, 366 bp, Shigella boydii
atgaaaaagttcgaaaacataactgttctccatgttgatgactttgattatacaaacccggaacttctcccggaggttgtaaaggcaatagatgttgccgatatagtgattagagaaaagagaattgtcaaaaacaggctcgcatgcacttcaggagcaatgacagaaacaacctcacagcaagataattacgaaggcatttgtctggagcctgattcatttgcggtaaatgtttatcatttattgcatgcaacacaggtattacatatgtccagtaatcacgaaacgaaaacactcggcagcgaaattctgagttttgcatgtgagtatacaaaagctgctgccgaaaaagaattagcgcaataa

SEQ ID NO: 461823 - DNA, 711 bp, Shigella boydii
atggaattaattaatacattatttgcaagccttgccggtactgatcccttcacaggcgtggatattacgattgccaactgcaaatcggcatactgggatgaaggcattgttcagcaacttattaaccaggccctggatgaaggggaaaagttcgtcggtgctgacggtcttgagggattgcttcgatatgatgtcacattaaatattggcttaacctccagcaaagtatggccgggattttcccttgataccgccaccattagccgtctttgtgcctgtggtgctgattttggatttgacccctatatcagtgatgtaccagatgttcaatgtgacctgaacacgacaaatgacgtcaccgtacaatttacggcgatgctaaatccggatgagcgggtgataatagcaaagcgcccgcttaaaaaatgtgactcctggattgaggatgtctatatctttcaggtctttaaagatgcctggaaatttcataacaataacagtttacgcggatttcgcgataagcaggccgcactgaaactctacacgcgtcattactcagtggaaaattgcgcagaggaaagctgtcgagactgcaatagttgcattcgccccagcttttccctttcgcgtagcgcccttattcgcctgaacgcggcgaatgctcgttttgtctatcaaccgtttacacgcgatcagcgggcgagggggtaa

SEQ ID NO: 461824 - DNA, 270 bp, Shigella boydii
atgctggctatctcaagtaatctatcaaagatgataatatttatttttgctattataatcattgttgttttatgcgtaattacttatctttatttatacaaagatgaatctcttgtaagtaaacattacataaactatatggcaataccagaaaatgatggagtttttacatggctcccagatttttttttgcacgtagcggtggatatatcaatatacacaaatgtagaagatgattatttttttttcttatttttccctaacaaatga

SEQ ID NO: 461825 - DNA, 1005 bp, Shigella boydii
atgaaatttctggttacgggagctgctggctttatcggtttctatgtaagtaaacggcttcttgcagctggtcatcaggttgtaggcattgacaacttaaatgattattacgatgtcaacctcaaacaagcacgacttgatttactcaagcacgacaacttcagtttttataaaattgacctggccgatcgtgagaaaatggcggcactgtttgcagacgagcggttcgaacgcgtaataaacctcgctgcgcaagccggtgtacgttactcccttgaaaatcccaatgcatatgcagatgcaaacctgattggattcctgaacatactggaaggatgtcgccataataatgttcggcatctactttacgcttcctccagttctgtttatggcatgaaccgcaagatgcctttctctacagatgactctgtagatcatcctgtttcgctgtatgcagcaactaaaaaggcgaatgaactcatggcccatacgtattctcatttgtatggcttaccgaccacagggctgcgtttctttacggtttatggtccatggggacgtccggatatggcattatttaaattcactaaagccatgctggaaggtaaaagcattgatgtttacaacttcggcaaaatgaagcgtgactttacttatattgatgatattgccgaagctattattcgcttacaggatgttattccagaaaaagatccacagtgggctgtagaaacaggctcgccagcaacaagttcagcaccatatcgtgtctataacattggtaatagttcgcctgtggagttaatggactatatcaatgccttagaagaggctctgggtattgaagccaacaagaatatgatgcctctccaacccggtgatgtactggaaaccagtgctgatacaaaagcactgtatgacgtaataggattcaaacctgaaacgtcagttaaagagggggtaaagaactttgtagaatggtatcgtaacttctataaagtttga

SEQ ID NO: 461826 - DNA, 1167 bp, Shigella boydii
atgaaaataacaatttcaggaacaggttatgttggtctttcaaatggtattctgattgcgcaaaaccacgaagtggttgcactggatatcgttcaggccaaagtggacatgcttaacaagaagcagtcaccgattgttgataaggagattgaagagtatctggcgactaaagatctcaatttccgcgctacgacagataagtacgacgcgtataaaaatgccgattacgttattattgccacacctaccgattatgatccgaaaacgaattattttaatacctcaagcgtggaagcggtcattcgcgatgtgacagaaattaatcctaatgcggtaatgattataaaatcaactatccctgttggttttacagagtccattaaagaacgttttggtattgaaaatgtgatcttttcgcctgagtttttgcgtgaaggtaaagcactttatgataacttacacccatcacgcattgtgattggcgagcagtctgaacgcgctgaacgttttgctgcgttattacaggaaggcgccattaagcaagacataccaacattgtttactgactcaaccgaagctgaggcgattaaactttttgccaacacttatctggctatgcgtgtagcgtatttcaatgaacttgatagttatgctgaaagcctggggcttaattcacgccagattattgagggcgtatgccttgacccgcgtatcggtaatcactacaacaacccgtcattcggttatggtggttattgtctgccgaaagataccaagcagttactggcaaattaccagtctgtgccgaataacctgatctcggcaattgttgacgccaaccgcacgcgcaaagattttattgccgattctatccttgcacgtaaaccgaaagttgttggcgtctatcgtctgattatgaagagtggttcggacaatttccgtgcttcctcgattcagggtattatgaagcgaatcaaggcgaaaggtgtgccagtaatcgtttatgagccagcgatgaaagaggacgattttttccgttcgcgcgtggtacgtgatctggatgcgttcaaacaagaagctgatgttattatttctaaccgtatgtctgccgatctggctgatgtagcagataaggtttatacgcgcgacttgtttggcaatgattaa

SEQ ID NO: 461827 - DNA, 1407 bp, Shigella boydii
atgtcaaagcaacagatcggcgtcgtcggtatggcagtgatggggcgcaaccttgcgctcaacatcgaaagccgtggttataccgtctctattttcaaccgttcccgtgaaaagacggaagaagtgattgccgaaaatccaggcaagaaactggttccttactatacggtgaaagagtttgttgaatctctggaaacgccccgtcgcatcctgttaatggtgaaagcaggtgcaggcacggatgctgctattgattccctcaagccatacctcgataaaggtgacatcatcattgatggtggtaataccttcttccaggacaccattcgtcgtaaccgtgagctttctgcagaaggctttaacttcatcggtaccggtgtttccggtggtgaagagggcgcgctgaaaggtccttccattatgcctggtggccagaaagaagcctatgaactggttgctccggtcctgaccaaaatcgccgcagtagctgaagacggtgagccatgcgttacctatattggtgccgatggcgcaggtcactatgtgaagatggttcataacggtattgaatacggtgatatgcagctgattgctgaagcctattctctgcttaaaggtggcctgaacctcaccaacgaagaattggcgcagacctttaccgagtggaataacggtgaactgagcagctacctgatcgacatcaccaaagatatcttcaccaaaaaagatgaagacggtaactacctggttgatgtgatcctggatgaagctgctaacaaaggtaccggtaaatggaccagccagagcgcgctggatctcggcgaaccgctgtcgctgattaccgagtctgtgtttgcacgttatatctcttctctgaaagatcagcgtgttgccgcatctaaagttctctctggcccgcaagcgcagccagctggcgacaaaggtgagttcatcgaaaaagttcgtcgtgctctgtatctgggcaaaatcgtttcttacgcgcagggcttctctcagctgcgtgctgcgtctgaagagtacaactggaatctgaactacggcgaaatcgcgaagattttccgtgctggctgcatcatccgtgcgcagttcctgcagaaaatcaccgatgcatatacagaaaatccgcagatcgctaacctgctgctggctccgtacttcaagcaaatcgccgatgactaccagcaggcgctgcgtgatgtcgttgcttatgcggtacagaacggtatcccggttccgaccttcgccgctgcggttgcctattatgacagctaccgtgccgctgttctgcctgcgaacctgatccaggcacagcgtgactatttcggtgcgcatacttataagcgcattgataaagaaggtgtgttccatactgaatggctggattaa

SEQ ID NO: 461828 - DNA, 903 bp, Shigella boydii
atgactgttattgctatagttgtaacatttaatcgctgtgcgcttttgaaaaaagttttgcattcgttgctttctcaatcaattgcattaaataaaataataatcattgataatgatagtaatgatgatacagctaaagtcgtgcatgatttttctgaagtggatgatattttttattattataacacaggagataatctgggaggggctggagggttttatcaggggtttaaaatcgcagagcagttttattatgactatctttggttaatggatgatgaccttctacctgagcctgattgcctagagaaattaatccaagataggccagaaggaattgttcagccggtaagatacgatcttgatggtgcttgtgctgaaatatcacctgttgagtataatcttcaaaaaatattttgcaggaatcctaaaaccaaaacagtaaaagaagtgatttcaacagttatttctgataattgtcgggaaatcgatattgcaggtgttccttttgaaggtcctttaatttcaaagtcggtagttaataaagtggggtatccaaatcctgatttttttatttttaatgatgatcttgattattcgttaaggacgagaagtaaaggtttctctataaagtgtatagtcgacgccagggctacaaggcttttaaaaaataatcaaaaaaatgatttgaaaagctggaaaggatatttcatgttgagaaatcattattatatcctacgaaactatggtgaaaataagctcgttaagaatcgagtctatctcatcatgttttattattttttgaagtcagttttttcttttgattataagttcgcaaaagtggttattttttcttttaaagattcattttcgcttaaaaatagcaaaagatttcgaccatag

SEQ ID NO: 461829 - DNA, 354 bp, Shigella boydii
atgcaaaacatattttttccgggtaaagatgtcaatccttttaaatggattaaacattcgcagttcttggtgcactcctcaacatcagagggcttttctcttgttctgttggaggccatgttattaggtaaagttgtgattgcatctgattgtaattgtggtccttctgatatactggataatgggaatgcaggattcctattcaatgttggtgatgttgatagcttaacctgtattatgcaaaatttattagttaatcaagacatcatcaatatatataccaatcgctctcttgttagaggcgttgaattacagttgaaagcaaataggcaggttaaggagtattttttgtga

SEQ ID NO: 461830 - DNA, 597 bp, Shigella boydii
gtgcaggaatctatctacgaacgctttatggaacgcgccatccgccgtgtcgaaagcattcgtagcggtaacccgctcgacagcgtgacgcaaatgggcgcgcaggtttctcacgggcaactggaaaccatcctcaactacattgatatcggtaaaaaagagggcgctgacgtgctcacaggcgggcggcgcaagctgctggaaggtgaactgaaagacggctactacctcgaaccgacgattctgtttggtcagaacaatatgcgggtgttccaggaggagatttttggcccggtgctggcggtgaccaccttcaaaacgatggaagaagcgctggagctggcgaacgatacgcaatatggcctaggcgcgggcgtctggagccgcaacggtaatctggcctataagatggggcgcggcatacaggctgggcgcgtgtggaccaactgttatcacgcttacccggcacatgcggcgtttggtggctacaaacaatcaggtatcggtcgcgaaacccacaagatgatgctggagcattaccagcaaaccaagtgcctgctggtgagctactcggataaaccgttggggctgttctga

SEQ ID NO: 461831 - DNA, 1461 bp, Shigella boydii
atgggaaataatttgttatcagcaaaagcgacactccctgtttatgatcgtaataacctggccccaagaattgttcatttaggctttggtgcatttcaccgtgcgcatcagggcgtgtatgccgatattcttgctacagaacatttcagtgactggggatattatgaggtcaacttaatcggcggcgaacagcaaattgccgatttacaacagcaagataatctttataccgttgcggaaatgtcggccgatgcgtggacggctcgcgtcgttggcgtcgttaaaaaagccttgcacgtacagatggatggcttagaaaccgtgttggctgcgatgtgtgaaccgcaaatcgcgattgtctctctgacaatcaccgaaaaagggtatttccactctccggcgaccggacagttaatgctcgatcacccgatggtcgctgccgacgtgcaaaatccccaccagccgaaaacagcaacaggggtgattgttgaggcgctggcccgccgtaaagcggcaggacttcccgcatttaccgtcatgtcatgtgacaacatgccagaaaacggtcatgttatgcgtgacgttgtcacttcatacgcgaaagctgttgatgtaaaactggcacaatggatcgaagataacgtgactttcccatcaacaatggtggaccgtattgtgcccgcagtgacagaggatacgctggcgaaaatcgaacaacttaccggtgtgcgcgatcctgcgggcgttgcctgtgaacctttccgccagtgggtaatagaagataactttgttgccggacgtccagaatgggaaaaagcgggagccgaactggttagtgatgtgctgccttatgaagagatgaagttgcgcatgctcaacggcagtcattcattcctggcgtatttgggttatcttgccggatatcagcacattaatgactgcatggaagatgaacattatcgttatgcggcgtatggcttgatgttgcaggaacaagcgccgacgctgaaagtgcagggcgttgatttgcaagattacgctaaccgattaattgaacgctatagcaatccggcgttacgtcatcgaacctggcagattgcgatggatggtagccagaaattgccacagcggatgttggattctgttcgctggcatctggcgcatgacagcaagttcgatctgctggcgctgggcgtcgcgggttggatgcgttatgtcggtggtgttgatgaacagggaaatccgatagaaatcagtgacccactgttacctgttattcagaaggctgtacaaagtagtgccgaagggaaagcgcgcgtccagtcattgctggcgattaaggcaatctttggtgatgatttgccagacaatagcttgtttactgcaaaagtgacggaagcgtacttgtctttattagcgcatggcgcgaaagcgaccgtggcgaaatattccgtgaagtaa

SEQ ID NO: 461832 - DNA, 204 bp, Shigella boydii; identical to SEQ ID NO: 260735

SEQ ID NO: 461833 - DNA, 687 bp, Shigella boydii
atgaccgtcgaaacgcaacttaatcccacacagcctgtcaatcagcaaatttatcgtatccttcgtcgcgacattgtccattgcctgattgctccaggcacaccgttgtcggaaaaagaagtttctgttcgtttcaatgtgtcacgccagccggttcgtgaagcctttattaaactggcggaaaacggcctgattcaaattcgtccacagcgtggcagctacgtcaacaaaatttccatggcccaggtgcgcaacggcagttttatccgtcaggccattgagtgcgcggtggcgcgtcgggcggcgagcatgattaccgaaagccagtgctaccaactggaacaaaatcttcaccagcaacgcattgccattgagcgcaagcaactggatgatttttttgaacttgatgacaacttccatcaactcctgacgcagattgccgactgtcaactggcgtgggataccattgagaacctgaaagcgaccgttgatcgcgtgcactatatgagtttcgaccatgtttctccaccagaaatgctgttacgccagcatcttgatattttctctgccctgcaaaaacgtgatggcgatgcggtagaacgtgcaatgacgcaacatttgcaggaaatcagcgaatccgtgcgccagatccgccaggaaaacagcgactggtttagcgaagagtaa

SEQ ID NO: 461834 - DNA, 747 bp, Shigella boydii
atgatcgttttagtaactggagcaacggcaggttttggtgaatgcattactcgtcgttttattcaacaagggcataaagttatcgccactggccgtcgccaggaacggttgcaggagttaaaagacgaactgggagataatctgtacatcgcccaactggacgttcgcaaccgcgccgctattgaagagatgctggcatcgcttcctgccgagtggtgcaatattgatatcctggtaaataatgccggcctggcgttgggcatggagcctgcgcataaagccagcgttgaagactgggaaacgatgattgataccaacaacaaaggcctggtatatatgacgcgcgccgtcttaccgggtatggttgaacgtaatcatggtcatattattaacattggctcaacggcaggtagctggccttatgccggtggtaacgtttacggtgcgacgaaagcgtttgttcgtcagtttagcctgaatctgcgtacggacctgcatggtacggcggtgcgcgtcaccgacatcgaaccgggtctggtgggtggcaccgagttttccaatgtccgctttaaaggcgatgacggtaaagcggaaaaaacctatcaaaataccgttgcattgacgccagaagatgtcagcgaagccgtttggtgggtgtcaacgctgcctgctcacgtcaatatcaataccctggaaatgatgccggttacccaaagctatgccggactgaatgtccaccgtcagtaa

SEQ ID NO: 461835 - DNA, 2046 bp, Shigella boydii
atgacaacaatgaatcctttccttgtgcaaagcacactaccgtatctggctccccattttgatcaaattgccaatcatcactatcgcccggcattcgatgagggaatgcagcaaaagcgggcagaaattgctgccatcgcgcttaacccgcaaacgcctaatttcaacaatactattctggcactggaacaaagcggagaattacttacccgcgttaccagcgtcttttttgcgatgactgcggcgcataccaatgatgaattacagcgtcttgatgaacagttttccgctgaactggcggaactggctaatgatatctatctgaacggtgaattattcgcgcgggtagatgctgtctggcagcgccgtgaatccctggggcttgatagtgaatccatccgcctggtggaggtgattcatcaacgttttgtccttgccggagccaaacttgcgcaagctgataaagcaaaattaaaagtactgaatacagaagctgcgaccctgaccagccagtttaaccagcgattactggcagcaaataaatccggcggtctggttgtgaacgatatcgcgcagctggcaggaatgagtgagcaagagattgcgctggcggcagaggcggctcgcgagaaaggtctggataacaaatggctgattccgctgctgaataccacccaacaaccggcgcttgccgagatgcgcgatcgtgcgacgcgtgaaaaactgtttattgcgggctggacgcgagcggaaaaaaatgatgccaatgatacccgcgctatcattcaacgtctggtagagattcgcgcacagcaggcgaaactgcttgattttcctcattatgccgcatggaaaatcgccgatcagatggcaaaaacgccagaagcagcactcaactttatgcgggaaattgttccagcggcgcgtcaacgtgctagcgatgaattagcctccatacaggcggttatcgataagcagcaaggcgggtttagcgcgcagccgtgggactgggcattttatgccgaacaggtacggcgggagaaatttgatcttgatgaggcgcagctcaagccatattttgaattaaacacggtgttgaatgaaggtgtattctggaccgcgaatcagctcttcggtattaagtttgtcgaacgttttgatattcctgtctaccatcctgacgttcgtgtgtgggaaatttttgatcataatggcgtgggactggcgttattttacggtgatttcttcgcccgtgattcaaaaagcggcggtgcatggatgggcaattttgttgagcaatcaacgcttaatgaaacgcatccggtaatttataacgtttgcaattatcagaaacccgctgccggtgagcctgcgttgttactctgggatgatgtcataaccttattccatgaatttggtcatacgctgcacggcctttttgcccgccagcgttatgccacgctttccggcaccaacacgccgcgtgattttgtcgaatttccgtcgcaaatcaacgaacactgggcaacgcatccgcaggtattcgctcgctacgcccggcattatcagagcggggcagcaatgcctgacgaactgcaacagaaaatgcgtaatgccagcctgttcaacaaagggtatgagatgagcgaactgcttagcgccgcacttctcgatatgcgctggcattgcctggaagaaaacgaagcaatgcaggatgtcgatgattttgaattgcgggcgctggtggcggaaaatatggatcttcctgctataccgccacgctatcgcagcagttatttcgcccatatttttggtggcggatatgctgcaggttattacgcttatctgtggacgcaaatgttggccgatgatggttaccagtggtttgttgagcagggcggattaacgcgtgaaaatgggcagcgttttcgcgaggcgatcctttccagaggtaacagcgaagatctggaacgcctgtatcgacaatggcgcggtaaggctcctcagattatgccgatgctgcaacatcgtggcttgaatatataa

SEQ ID NO: 461836 - DNA, 519 bp, Shigella boydii
gtgaacattaataaagataaaattgtacaactcgcagataccgacactattgaaaacctgacatccgcgttgagtcaaagacttatcgcggatcaattacgcttaactaccgccgaatcatgcaccggcggtaagttggctagcgccctgtgtgcagctgaagatacacccaaattttacggtgcaggctttgttactttcaccgatcaggcaaagatgaaaatcctcagcgtaagccagcaatctcttgaacgatattctgcggtgagtgagaaagtggcagcagaaatggcaacaggtgccatagagcgtgcggatgctgatgtcagtattgccattaccggctacggcggactggagggcggtgaagatggtacgccagcgggtaccgtctggttcgcgtggcatattaaaggccagacctacactgcggttatgcattttgctggcgactgcgaaacggtattagctttagcggtgaggtttgccctcgtccagctgctgcaattactgctataa

SEQ ID NO: 461837 - DNA, 393 bp, Shigella boydii
atgaaatttcaggccattgtattagcaagttttcttgtcatgccttatgcgttggcagatgaccagggcggtttaaaacaggatgcagcgccaccgccgcctcatgcaatagaagatggctatcgcggaaccgatgatgcaaaaaaaatgaccgttgatttcgcaaaaaacatgcacgatggcgcttcggtttcactacgcggtaatttgatttctcacaaaggagaggaccgttacgtttttcgcgataagagcggtgaaattaatgtcgttattcctgcggccgtctttgatggacgagaagttcagccggaccagatgatcaacattagcggtagtctggataagaaaagcgcgccggccgtcgttcgggtcactcatttgcagaaataa

SEQ ID NO: 461838 - DNA, 1503 bp, Shigella boydii
gtggcgttaattcgtcagcaggcggcagagcagaataaggtgtaccagtccatgctggttatgaacggtcagcatacggaattcaaccgtctgctggggctgggtaatgaactgcttcagcagcggcagggactggtgaatgtgccgttacggctgccacaggccactctggatgataaacagcagagtgccctgacaaaaacagagcgtgtccgactggggtatgcggcggatgacctcggttttgtgggtgatccgtatcaggaggcgagacaacgttatatcagtaatgccctggaagcctggcgcaataacgaggcgaataaacccaaatcccggggtggaaaatcagagacggaaaaagcggaagacagtttttcccggctgctgaagcagcagaaagagcaactggcactggcggggcagaatacagagctggcgaagctgaaataccagactgcgcagggcgaactgaaaaccctgacggagatgcagaagcaggaactgctgcgcaatgcggccctgattgaccagcaaaaaatccgggagcagttgcggtcccgggaagagaccctgaagaatgataatgtggctgcgcgtgcatcaaatgaagcggaactgctggggtacgggcagggagagcggctccgtgaacgcatgcgggagttgcagcagatccgcgacagtttccgccagaaggatgcggaccttcagtctcagtatcagaccggggatatcagtgaggatttttacagacaggctctggcacagaacgcgcagtatctgagtgaacgtctgaaagagcaggaagccttttatgccgaatcggatgtgcagcgtgcggactggcagaaagggctgcaggagggattcagtaactgggtggataatgcgtccgattacgcctcacaggcagtacagcttgcgacggagggtatctcagggatggtgaataacatcacggagatgctgaacggaaataaagtggaatggcgcagctgggcctcatcagtgctgcaggaaatatcaaaagttcttatgaatgccgcgattgtcaacgggatcaagacggcggcaaacagtatgtccggagcgggaggatttatcggcagtattggtagctggctgggcggtgcggtggccaatgcaaaaggcggtgtgtatacctcggcaaacctgagtgcgtacagcaacagtattgtggatacgcccacgtactttgcctttgcaaaaggggcgggactgatgggggaggccggtcctgaagccattatgcccctgacccgggcggcggatggctcgctgggtgtgcgagcggtgggcagtatgaacggcagtgcaggtctggtgtattccccggtctaccatatcgccattcagaatgacgggactaatggccagatagggccggaagctgcgggcagccttgtgcaactgattgaccagcgggtgcaggcggtgatgctgtccatgcgacgtgacggaggaatgctgagtggctga

SEQ ID NO: 461839 - DNA, 888 bp, Shigella boydii
atggctgacatggttggcgcggcgggtgccgcattatctcccctggcggcgttactccatcgcgagttgataaaccgtccggtggtgcatgcagatgagactaccctgaagatcctgaacacgaagaaaggcggtaaatcctgctccggttatctgtgggcatacgtcagtggagaaaggacgggaccgtcagttgtgtgcttcgactgccggaccggacgtagccatgagtatcctgaaaactggcttcagggctggggcgggacgctggttgtcgacggacataaagcttaccggactctggcaaacaaagtgccggagatcacgctggccggatgctgggcccatgcccgcaggggcttcgccgacctgtataaaatcagtaaagatccacgggctgccatagccgtgaagaaaatcgcggggttgtaccgtcttgagaagaagatcagtagccgccccgtggaaaaaatccgccagtggcgacagcgttatgcccgtccgatactggaagaactgtggtcatggcttgaagagcaggaaccgcaatgttctccgggaaaggcattacacaaagccattgcctatgcgctgtctcatcgcgtggaactgagccgcttcctggaagatggtgcggtgccgctggataataatgtgtgtgaacgggccatcaaaaacatggttctgggcagaaaatcgtggctgttcgccggttcgcagatggcgggagaacgcgccgcgcaaataatgagcttgctggaaaccgcgaaacgcaacggtctggagccgcatgcctggttgacagacgtcctgatgcgtctgccggagtggccggaggagcgactggcagagttgctgcctcttgagggatttaccttctccgggtga

SEQ ID NO: 461840 - DNA, 366 bp, Shigella boydii; identical to SEQ ID NO: 460915

SEQ ID NO: 461841 - DNA, 1992 bp, Shigella boydii
gtgcactcattgacgggctttcagaatggcactttaaatatcgatgctggtggcaatgttactgttaatcaaggtagttttgctggcaccatcgaaggtgctggtcagctcaccattgcgcaaaacggcagctacgtgctgtcgggggcgcagtcgatggcgctaaccggcgatatagtcgttgatgatggtgcggtgctttcgctggaaggcgacgcggcagatctcgccgctctccaggacgatccgcagtcgatcgtgttaaacggcggtgtgctcgatctctctgatttctccacctggcagagcggcacatcatacaatgatggccttgaagtcagtggcagcagcggaacggttatcggcagtcaggatgtggtagatcttgcaggtggcgacaatttgcatatcggcggcgacgggaaagatggcgtctacgtggtggtcgatgcgagcgacgggcaggtaagtctggcaaacaataatagttatttgggcacaacacaaatcgcctccggtacgctgatggtgagcgacaactcgcagcttggagatacccactataaccgccaggttatctttaccgataagcaacaagaaagcgtgatggagattactgccaatgtcgatactcgcactacgacgactgagcatgggcgtgatattgaaatgcgcgccgacggtgaagtggcagttgatgcgggggtagacacgcagtggggcgcactgatggctgacagcagcgggcagcatcaggatgagggtagcacatttactaaaacgggggcgggtacgctggagctgaccgccagcggtacaacgcagtcggcagtacgtgtcgaagaaggcaccctgaaaggcgatgttgcggatatctttccttatgcttcgtcactgtgggtcggtgatggggcgacgttcgttactggcgcggatcaggatattcagtctatcgatgctacttccagcggcactatcgatatcagcgatggtacggttttgcgtctgaccgggcaggatacttccgtcgcccttaatgcctcattgtttaacggcgatgggacgctggtgaatgctaccgatggcgtgacgttgacaggtgagcttaataccaaccttgaaactgacagcctgacctatcttgccgacgtgacggttaatggtgatctgaccaatacgtccggtgcggttagcctgcaaaatggcgtcgctggcgatacgctaacggtaaacggtgattataccggcggcggtacgctactgttcgacagcgaattaaacggcgatgactcggtaagcgatcaattggtgatgaacggtaatactgctggcaacacaactgtggtggttaactctattacagggattggtgagccgatatcgacaggcattaaagtggttgatttcgcagctgatcccacgcagtttcaaaacaatgcacagttcagtctggctggcagtggctacgtcaacatgggagcgtatgactacacgctagtggaagataacaacgactggtatctgcgatcgcaagaagtaacgccgccatcgccacctgatccagacccggacccaacacccgatcctgacccaacacccgatccaatccccgcttaccagccggtgctgaatgccaaagttggcggttatctcaataacctgcgggcggcaaatcaggcgtttatgatggagcgacgcgatcacgctggtggcgatggtcagacgctgaatttacgtgttatcggcggacgttatcattacacggtggcagggcaactggctcagcaggaagacacttctacggtgcagcttagcggcggcttgtttagcgggcgctggggcacggatggcgagtggatgcttggggcggttggtggctacagtgataatcagggcgacagccgctcgaatatgaccggaactcgcgccgataaccagaaccacggttatgccgttgggctgacctcaagctggtatcagcacggtaattag

SEQ ID NO: 461842 - DNA, 234 bp, Shigella boydii
atgacagagctggaaacacatttgctgaacgccttagagcagctgcaacaggactatatgcagctgctgaacgaatgggagagcgccttcgtggaattgcagaagatgttttcgcttacgcaacgggacaacgcgatgctgaacgagcgggtcatgcagttgagtcagcaggtgcagcacttgagcgagcggacagaacgcttgagtcagttatacagcgagaactggagataa

SEQ ID NO: 461843 - DNA, 420 bp, Shigella boydii
atgagacgtaccggaaacaaactgtgtcttatcgccatgataacagcaacagtagctctcacagcctgtgccccaaagggcagcgtggaacaacatacccggcattacgtatatgcttcagatgacggttttgatcccaacttttccacccagaaagccgacacaacacgaatgatggtaccttttttccggcagttctgggatatgggagcaaaggataaagcgacaggaaaatcacggagtgatgtgcagcaacgcattcagcagtttcacaaccaagaatttttaaagtcactccggggcaaaacacaatttgcgggtactgattaccgcagcaaagaccttaccccgaaaaaatccaggctgctggctgagacgatttctgcggtttatctcgatggctatgagggaagacagtaa

SEQ ID NO: 461844 - DNA, 438 bp, Shigella boydii
atgggacactgtcactttatggcatggcacacactccgggatgcactgaaaatgacgggcagatcgcgttcgcagttttaccgtgatatgcgcgcaggccttgtcagttaccgtaccagcaaggacgggcgacgggagtttgaaaccagtgaactgatccgggcatacggagaattaaagcagaatgagacaccagaaaggcacaatacgggacaggaagaaaatccacataatcagcagacagaacgcattctccaggagctgaatgagctgaaacaatgcctgacgctgatgcttgaggataaacaagcccgggatactgagcgccagcgccaggaagcagaacgggaacagctacagaatgagatagcccagctcaggcaggagctggagcaggaaaagaaacggggattctggtccagattgttcggtcactga

SEQ ID NO: 461845 - DNA, 1860 bp, Shigella boydii
atgcctggatttaattatggtggacatggtgacggtactggctggagttctgaacgtggtgatggtccggctccgggcggtggtatgcagggaaacggtggcggtcatagcggaaataatgacagtggtagcaattctgtgagtcagcagatttctgccattcagaatgatcagaaacttaaacagaaagtggtgaatatgctgattgctgcgagaaaaatgaatcctgatgcgaaaatgattctgggaagtattgctccttctggtgttatgcaggtcaccattgagggggtaacctccacgcaggccaggcagcttggtctgggagggctggtcatgggatataacgcttcaggtgttattggggctgtgggcgaaatagacaccggtcaccgccttaatgcatcaggagcaagtactcccggaagcgaaacctctgtggacagttttgtgaacggacagaaacccgccgaagaatggcatgctgtggcgaaggacagctggaccggggctggtccggtgaatacagggctggttaataacgccatcaaaagtatccggattatcaaaaaaggctatgtgacgggcgttctcacgccagaagaggtgatgaataaagcagagtacaaagcaatgcgacaggcttttgattcccttccactggcaaaacagggagaggctgtcagacagattgtcgcagcctggagtctggcatatcaggattttccggtaaatctgaaaaaagagatggggcgtgtcactgaacggattgttgatgctattaacctggcgctcattcttaatcagacagagtcccgtttgtcggaatcacaaaagaatgttgatgtagcgaaccagattatcagtgatacagtaaaagctattaatgatgtaaataagaaaatagcagaaaaacgaaatcagcaggtatcactgactgatttgatgaataaaaaacaaaaagaggtcgaagatcttaaaaagatattcaaaaatcactcttatcaccgtattcgtgatgcccagagggaatatgatgatgcccgaaataaatatgctttactggccagtgatattaatgcgctgcaggcacaggtttccggactgacggcaaggaaacagcaggcagaacagaacaaggcagcagcagaaaaagcaaaggcagatgcagcggcgaaagctgcagcagaaaaagcggctgctgaagcgaaagcaaaggctgaagctgaaaaagccagaaaggaagcagaggaaaaagcaaatgatgagaaggctgttctgacaaaagccagtgaaattatcatcagtgttggtgataaggctggggagtatctgggtgataaatataaagttctttctcgtgagatagcagataatatcaaaaactttcagggcaaaacgattcgtagttacgatgaggcgatggcttctgtcaataaactgatggctaatcctgatcttaaaattaatgccgccgacagggatgcaattgtgaatgcctggaaagcatttgatgcagaggatatggggaataagtttgccgcgctgggtaagacgtttaaagccgcagattatgtgatgaaggcaaacaacgtccgggagaagagtatcgaggggtatcagaccggaaactgggggccgctgatgctggagattgagtcctgggtattgagtggtattgcttctgctgtggcgctatcatttttctcagctatctttggtacttttgctatgctgggtgttttttcgactagtttagctgggatcttggctgttattttggctggtttagttggggcgttgattgatgataattttgttgataagttaaataatgaaattattcgtcctgcgtattaa

SEQ ID NO: 461846 - DNA, 525 bp, Shigella boydii
atgcaaaaagagcataatgacaacaaacagttaaacaacatgctttcttggattgcttttgcaggaacaattcctttctttattattcttataatttacaagttaaatccaaacctatatttaaccaacatcattcccgatagcataataaacataccttcggtaatttcctcatacaatcctataatgacaaagttgatggatatctacggcaaaagcgcccctttactggcaattatcacttttatccttcagttccgacacagaaaactagaaaaaggaatcaacagagaaaaactaattaccgcctgcatattaaccccttttatttatgttttttatgcgtatttcttcctgtggaataacttcgaattaaccacatcaggaaggacagttagatggatgtctgagaatgattttacattattattttttttcatctgcatgtattattgttctttcttcatgacctacatcctgtgttatgttccagttgcagtatataaaatctggaaagaaaggtag

SEQ ID NO: 461847 - DNA, 138 bp, Shigella boydii
atgaaaaaaatattatcaggagggatggttgtcttgatggtttttctatcaggctgccaggctaattacattcgtgatgttcagggtgggacggtcgcgccatcttcttctgaactaacagggatctcggttcagtag

SEQ ID NO: 461848 - DNA, 192 bp, Shigella boydii
gtgaccaaacaggaaaaaaccgcccttaacatggcccgctttatcagaagccagacattaacgctgctggagaagctcaacgaactggacgcggacgaacaggcagatatctgtgaatcgcttcacgaccacgccgatgagctttaccgcagctgcctcgcgcgcttcggggatgacggtgaaaacctctga

SEQ ID NO: 461849 - DNA, 357 bp, Shigella boydii
atgggggtaatgataccgatgaaacgcgagaggatgctcacgatacgggttactgatgatgaacatgcccggttactggaacgctgtgagggtaaacagctggcggtatggatgcggcgggtctgcctgggtgagccggttgcccgttccgggaggctgccgacactggcaccgccgttactgcgtcagctggccgccatcgggaataacctgaatcaggcagcgaggaaggtgaacagcgggcagtggtcttccggtaaccgggttcaggtggtggccgcactgatggccatcggggatgagctgcgccggctgcgtctggccgtcagggaacaggggacgcgggatgatagttaa

SEQ ID NO: 461850 - DNA, 519 bp, Shigella boydii
atgagcaatcttttacagacgggcgcggagttcgagaaaaagctgaaagagagagccgaatctacagagaaaatgctgaacgacgaattcaggaagctcggcgaatctgtaagcgaggctgtgacctcaaacgagacgaaaatcaaaggcgctatagcccagtttacggcctcgacggaggaatcgctgaaaaaacaccgggaaggggtgaaagaggcgatgatgcagcaccggaaggacatgttaaagctggcagggagttcgggtatgaggttgctggggatagtctttctcctgtttaccgcgagtggtgggacgctctggtatctcggcgggaggatacagacgaacctggaagaaatcagggtacaggaagagacattgcggaaactgaacgcgaagacatgggacgtggagtttgttcaggacgggagaaggaaatttctggtccttccgtacgggaaatcagcagaggtgatgcactatcaggggaaggactggatacaactgacggagtga

SEQ ID NO: 461851 - DNA, 1107 bp, Shigella boydii; identical to SEQ ID NO: 461508

SEQ ID NO: 461852 - DNA, 342 bp, Shigella boydii; identical to SEQ ID NO: 460954

SEQ ID NO: 461853 - DNA, 258 bp, Shigella boydii
atgaaagggttattatctttactcatctcttctatgatattccccgtgcatgccggaatggttattttcgggacccgtatcatttacccggcagagcagaaagaggtcatggtacaactgatgaatcagggaaaccgctcttcgctgatgcaggcgtggattgatgatggcgacacgtctctgccgccagaaaagattcaggttcctttcatgttaacgccaccagtagtgaaagtagcggccaattctgggcaataa

SEQ ID NO: 461854 - DNA, 432 bp, Shigella boydii
atgcctaataaattacccagtaataaggaaagtattttttatcttaatgttctggatattccaccgaatagtccagaacaagaaggtaagaatgcactgaagtttgcgatgcaaaacagaatcaaattgttttaccggccggcgggtattgctccggtgaataaagcgacctttaaaaagttactgataaatcgcagtggcaatggattggtgataaaaaatgactcagctaattgggtgacgatttcggatgtcaaagctaataatgtcaaagtcaattatgaaactattatgattgcccccttagaaagtcagagtgttaatgtcaaaagtaataatgcaaacaactggggtaatgactccaacttattgatagtgttttatgttcagataatgcccgatgactttgtcatgcagctccaccgattttga

SEQ ID NO: 461855 - DNA, 1266 bp, Shigella boydii
atgattttcccggtggtgctggtggtaatggtgatataccagcgttacagcacgccgattgtccgtcgtgtgcgcgcctatctggcggatatcaacgacggctttaacgaaatcatcaatggcatgagcgttatccagcagttccgtcagcaggcgcgatttagcgaacgtatgggggaggccagtcgttcacactatatggccaggatgcaaaccctgcgcctcgacggttttctgctgcgtccgctgctgagtctgttttcatcgctcattctttgtggcttgttgatgctgtttggcttctccgctagcggcaccattgaagtaggcgtgctgtatgcgtttatcagctatcttgggcgacttaatgaacccttaatcgaactgaccacgcaacaggcgatgctgcaacaggctgttgttgctggtgagcgcgtgtttgaactgatggacggaccgcgccagcaatatggcaatgatgatcgcccgttacagagtggcaccatcgaagtcgataacgtgtcatttgcttatcgcgatgacaatctggtgctaaagaacattaatctctctgtgccttcgcgtaactttgtggcactggtcgggcataccggcagtggcaaaagcaccctcgccagtttattgatgggctattacccgctaacggaaggtgagattcgccttgatggtcgtccattaagttcgctaagtcacagcgcgctgcgccagggcgtggcaatggtgcagcaagatccggtggtgctggcggataccttcctcgccaacgtgacgctggggcgtgatatctccgaagaacgcgtctggcaggcgctggaaaccgtgcaactggcggagctggcgcgcagcatgagtgatggtatttatacgccgctgggcgagcaggggaataatctctccgtcgggcaaaagcaactgctggcactggcacgcgtgttggtggagacgccgcaaatcctgatccttgatgaggcaaccgccagcattgactccggtactgaacaggcgattcaacatgctctggcggctgtgcgtgaacataccacgctggtggtgattgctcaccgcttatcgaccattgttgatgccgacaccattctggtgcttcatcgtgggcaagccgtggagcagggcactcaccagcaactgctggcggcccagggacgctactggcagatgtatcaactgcaacttgcgggcgaagagctggcagccagcgtgcgtgaagaagaatcattgagcgcctga

SEQ ID NO: 461856 - DNA, 330 bp, Shigella boydii; identical to SEQ ID NO: 461591

SEQ ID NO: 461857 - DNA, 861 bp, Shigella boydii
atgaatatctcaattgtgacaataaatcaggagaatgccgcaatagcaagctggctggcggcgcaggatttcagtggttgtaccctggcgcactggcagattgaacctcagcctgtagtggcggaacaggtgctggatgcgttggtggaacagtggcagcgaacgcctgcggacgttgttctctttccgccgggaacgtttggcgatgaactgtcgacccggctggcctggcgtttacatggtgcaagcatctgccaggtgacttcgttagatattccaaccgtaagcgtgcgcaaatcccactggggaaatgcgctaacggcgacgctgcaaacagaaaaacgcccgctatgcctttccctggcgcgtcaggcgggagcagcgaaaaacgccacgttgccctctggaatacaacaactgaacattgtcccgggtgcgcttcccgactggctggttagcacagaggatctgaaaaatgttactcgcgacccattagctgaggccagacgggtgctggtggtggggcagggcggagaggcagataaccaggaaatcgctatgctggcagaaaagctgggagccgaagtgggctacagtcgggcgcgagtgatgaacggtggcgttgatgctgaaaaagtgattggtatttccggacatttgctggcacctgaggtgtgtattgttgttggcgcttccggcgcagcagcgttaatggcgggcgtacgcaatagcaagtttgtggtggcgattaatcatgacgccagcgctgcggtattttcacaggcagatgttggcgtggttgatgactggaaagtggtgctggaggcactggtgacaaacattcacgcagattgccaataa

SEQ ID NO: 461858 - DNA, 276 bp, Shigella boydii; identical to SEQ ID NO: 458859

SEQ ID NO: 461859 - DNA, 297 bp, Shigella boydii
atgcagcgcttatttcttttggttgccgtcatgttactgagcggatgcttaaccgccccgcctaaagaagccgccagaccgacattaatgcctcgtgctcagagctacaaagatttgacccatctgccagcgccgacgggtaaaatctttgtttcggtatacaacattcaggacgaaaccgggcaatttaaaccctacccggcaagtaacttctccactgctgttccgcaaagcgccacggcaatgctggtcacggcattgaaagattctcgctggtttataccgctggagcgctag

SEQ ID NO: 461860 - DNA, 249 bp, Shigella boydii
gtgttaaaacatcatgtcttgattggcggaaatgccgtggtacgtggtgaaccgattctgctcgacgagcacgttgtaatacaaggtgagagccgtatttcaggtgcggtgataattgaaaaccatgtggagttaaccgaccacgccgtcgttgaagcctttgatggcgacacggttcatgtccgtggtccaaaagtcattaacggcgaggagcgcattacgcgaacgccgctggcagggttattatga

SEQ ID NO: 461861 - DNA, 537 bp, Shigella boydii
atgactgaaacgataaaagtaagcgaatcacttgaattacatgctgttgcggaaagtcacgtcacacctctttatcagttaatctgtaaaaataaaacctggttacagcagtcgctaaactggccgcagttcgttcagagtgaagaggacacgcgaaaaacggtgcagggtaatgtgatgttgcatcaacgcggctatgccaaaatgttcatgattttcaaagaagatgaacttatcggcgttatctcgtttaatcgtattgaaccactgaataaaactgctgaaatcggctactggctggacgaatctcatcaggggcaggggatcatttctcaggcgctgcaggcattgattcatcattacgctcagtctggtgaacttagacgcttcgtgatcaaatgtcgggtggacaatccgcaaagcaaccaggtcgctttgcgcaatggttttatccttgaaggttgcctgaaacaggctgagttcctgaatgatgcctatgatgatgtgaacttatacgcgcgtattatcgattcataa

SEQ ID NO: 461862 - DNA, 225 bp, Shigella boydii
atgtttccagaataccgagatttaatatcccgtctgaaaaacgaaaatcctcgctttatgtccttgttcgataaacacaataaacttgatcatgaaattgccagaaaggaaggtttcgacggtcgagggtacaatgcggaagtggtccgcatgaaaaaacaaaagctacagttaaaagatgagatgctcaaaatcctgcagcaggagagcgtcaaaggggtgtaa

SEQ ID NO: 461863 - DNA, 1620 bp, Shigella boydii
atggccgccgtgtgcggtaccagcggcattgcttctcttttttctcaggcggcattcgcggcagattctgatattgccgacgggcaaacccagcgttttgacttctccattctacagtcaatggcgcacgacttagcgcaaacagcgtggcgtggtgcgcctcgtccgttacctgacacgctggcgacaatgacgccgcaggcttataacagtattcaatacgacgccgaaaaatcgctctggcataacgttgagaaccgtcaactggacgctcagttcttccatatgggaatgggattccgtcgccgcgttcgtatgttttctgtagatccagcaacacatctggcgcgtgaaattcactttcgcccggagttgttcaaatacaacgatgcgggtgttgatacaaaacaattagaagggcaaagcgatctcggctttgccggttttcgcgtgtttaaagcccccgaactggcgcgccgtgatgtagtatcatttctcggcgcgagttatttccgcgccgttgatgatacatatcaatacggtttgtcggcccgcggcctggcgatcgacacttacaccgacagtaaagaagagttccccgactttaccgccttctggtttgatacggtaaaaccgggggcaactacctttaccgtttatgcgttgctcgatagcgccagcattactggtgcctataagttcactatccattgtgagaaaagtcaggtgattatggatgtggaaaatcacctgtatgcgcgcaaagacattaaacagctgggcattgcgccgatgaccagtatgttcagctgcggtactaatgaacgtcggatgtgcgatacaattcatccgcaaattcatgactctgatcgtctgtccatgtggcggggcaacggcgagtggatttgccgtccgctgaataatccgcaaaaattgcagttcaatgcttacaccgacaacaacccgaaagggtttggtttattgcaactggatcgtgacttctcccattatcaggacattatgggctggtataacaaacgcccaagtctgtggctggaaccgcgtaacaagtggggtaagggcaccatcggcctgatggaaatcccaacaacgggcgaaacgctggataacattgtctgtttctggcagccagaaaaagctgtaaaagcaggtgatgagtttgcattccagtatcgtctgtactggagtgcgcaaccgcctgttcattgcccattagcgcgcgttatggcgacgcgtaccggcatgggcggtttcccggaaggttgggcgccaggtgaacactatcccgaaaaatgggcgcgtcgttttgccgtcgatttcgttggtggtgatctgaaagctgccgcgccaaaaggcattgagccggtgattacgctttccagtggggaagcgaagcaaatcgaaattctctatattgaacccatcgatggttatcgtattcagtttgactggtatccgacttcggactccactgatccggtcgatatgcggatgtatctacgttgtcagggggacgctatcagtgaaacatggctgtatcagtatttcccgccagcgtcggataaacgtcagtatgttgacgaccgcgtgatgagttaa

SEQ ID NO: 461864 - DNA, 1344 bp, Shigella boydii
atggcgaacagcatcacggcggatgagattcgggaacagttttcgcaggcaatgtcagccatgtaccagcaagaagttccgcagtacggcacgctgctggaactggtagctgatgtgaatctggctgtgctggaaaacaatcctcaactgcacgaaaaaatggtaaatgcagacgagctggcgcgactgaatgttgaacgtcatggggcgattcgcgttgggactgcacaagagcttgctactcttcggcggatgtttgccattatggggatgtacccggtgagctattacgatctctcgcaggcaggggtgccggtacattcgacagcatttcggcccattgatgatgcttctctggcgcgtaatcccttccgcgtttttacctccttactccgccttgagcttatcgagaacgaaattttgcgccagaaagcggcggagattctgcgtcagcgcgatatcttcaccccacgttgtcgacaactgttagaggaatatgagcagcagggcggttttaacgaaacacaggcacaggaatttgtgcaagaggccctggaaacgtttcgctggcaccagtcagcaacggtagatgaagaaacctatcgcgccttgcacaacgaacatcggttgattgctgatgtggtctgttttcctggatgccatatcaaccacctgacgccacgtacgctggatattgaccgggtgcagtcgatgatgcctgaatgcggaattgaacccaaaattctcatcgaggggccgccgcgccgcgaggtaccgattttactacgccagaccagctttaaagcactggaagagacggtgttgtttgcggggcagaaacagggcacgcataccgcgcgctttggtgaaattgagcagcgtggcgtggcattaacgccgaaagggcgacaactgtatgatgatcttctgcgtaacgctggaaccgggcaggataatctcactcaccaaatgcatttacaggaaaccttccgcacttttcctgacagtgagtttttaatgcgtcagcaagggttggcatggttccggtaccgtctgacgccttcgggtgaggcgcatcgtcaggcgattcatcttggagacgatccacagcctttaattgaacgtggttgggtagtggcgcaacccatcacctatgaagatttcttgcccgttagcgcggcggggatcttccagtcaaatctgggtaatgaaacgcagacacgcagtcacggtaatgccagtcgcgaagcatttgagcaggcgttgggttgtccggttttggatgagttccagctttaccaggaagcggaagaacgcagtaaacgtcgctgtggtttgctttaa

SEQ ID NO: 461865 - DNA, 924 bp, Shigella boydii
atggaaaaaaatagtctgtttagtcagcgcatccgtttgcgccaccttcatacattcgtagctgtcgcacaacaaggaactttggggcgcgcggctgaaacccttaatttgagtcaacctgcgctctctaagacattgaatgaactggagcagctgacgggcactcgcttgtttgagcgtggtcgtcagggggcgcaacttaccttacccggcgaacaatttttaacgcatgcagtcagagttcttgacgccatcaacactgccggacagtcgcttcatcgtaaagaaggtcttaataatgatgtcgtcaggattggtgcactacctactgcggcactggggatattaccttcggttataggtcagtttcatcagcaacaaaaagagacgaccttgcaagttgcgacaatgagtaaccctatgattctggcgggtttgaaaaccggggaaatcgatatcggcattggtcggatgtcagatcctgaactgatgaccgggcttaattacgaactgctgtttcttgaatcgctgaagctggttgtccgccctaatcacccgctacttcaggagaacgtaacgctaagccgagtgctggaatggccggtcgttgtatcaccagaaggcactgcgccacgccagcattcagatgcattagtacagagccagggatgtaaaattccttcgggttgtatcgaaacgctgtctgcttcgctatctcgtcaacttacggttgaatacgactacgtgtggtttgtcccttctggcgcggtaaaagacgacctgcgtcatgccacgctggtggccctgcctgttccgggacatggtgcaggcgaaccgattggaatactgacccgcgtagatgcgatgttctcttctggttgccagttgatgattaacgctattcgaaaatcaatgccgttctga

SEQ ID NO: 461866 - DNA, 834 bp, Shigella boydii
ttgattccaacgaccattacgttgactccgggtaacggcgatgacagcggtgatgccagttatcataaatggctacctgccggttcgttaaaatatgcaatgaccgatgcctggaatatctatctggcagccgggcgaggttttgaaacgccgacgattaatgagctgtcttatcgtgctgatgggcaaagcggtatgaactttggtttaaaaccatccaccaacgatacaattgagatcggcagtaaaacgcgtattggtgatgggctgcttagtctcgcattgtttcagaccgacactgatgatgaaattgttgtcgatagcagtagcggtgggcgtacgacttacaaaaatgccggaaagacccgtcgtcaaggcgctgaactggcatgggatcaacgtttcgcaggagattttcgcgtaaacgcgtcctgggcctggcttgatgcgacctatcgcagcaatgtttgcaatgaacaggattgtaacggtaatcggatgccagggatcgcccgtaatatgggctttgcgtcgataggttatgtaccggaagatggttggtatgcaggcacggaagcgcgttatatgggcgatattatggcagatgatgaaaatacggcaaaagcgccgtcttatactctcgtcggcttattcaccgggtataaatacaattaccacaatttaactgtggatttatttggtcgtgtcgataatttattcgataaagaatacgttggttctgtcattgtcaatgagtcaaacgggcgatattacgaaccttcgcccggacgaaattatggtgtcggcatgaatattgcgtggagatttgagtaa

SEQ ID NO: 461867 - DNA, 342 bp, Shigella boydii; identical to SEQ ID NO: 460954

SEQ ID NO: 461868 - DNA, 312 bp, Shigella boydii
atgaataagaaatcgttatggaagctaattctgatattagcgatcccatgtattattggttttatgccagctccggcaggattaagcgaactggcgtgggtgctttttggtatttacctggcggccattgtgggtctggttatcaagcctttcccggaacctgtcgtactgttaattgccgttgctgcctcaatggtggtggtcggtaacttatccgacggtgcgtttaagaccaccgccgtattaagcggttactcttcaggtactacctggctggtgttctcggcgttggtaatgactccaacttattga

SEQ ID NO: 461869 - DNA, 249 bp, Shigella boydii; identical to SEQ ID NO: 461310

SEQ ID NO: 461870 - DNA, 282 bp, Shigella boydii
gtgaatgaatggttcagcgcgtatgcgatggcgggtgtggcttacagccgtgtgtcgactttctccggggattatctccgcgtaactgacaacaaggggaaaacgcacgacgtgctgaccggaagtgatgacggtcgccacagcaacacgtctctggcgtggggggctggcgtgcagtttaacccgaccgaatccgtggccattgatattgcttatgaaggttccggtagtggcgactggcgcactgacggtttcatcgtgggtgtcggctataaattctga

SEQ ID NO: 461871 - DNA, 1272 bp, Shigella boydii
gtgtatgacccgacggtacagtttgagctctggttttcggaggcaaaaatcgcagacacatctcaggtggaaacctctgcccgttatctggggaccggcagtcagtggagtgtatctggcccgcacattaagcccgggaaggatttctggttttacgtgtgcagcgtcaacctggtggggaaatctgcttttgtggaggccagtggacgggccagcaatgatgcagaagggtatctggggctgtttcgggaaaaaataggaaaactgcatctggctcaggggctgtgggagctgatagacaacagccagcttgcggatgagatggcggagatgaagaccaccatcaccgaaacccgcaatgaaatcacacagacggtcagtaaaacgctggaggagcagagcgccaccatacagcagatacagcgcgtgcagaaggacacaaatgatgaccttgctgcactttacatgctgaaggtacagaaaacaaaaaatggcataccctatgttgccggtattggagcggggattgaggatactgatggccagcccctgagcaacatactgctgctggctgaccgtattgcgatgattaacccggaggacggcaacaccacgccgttatttgtggcgcaggggaatcagttgttcatgaacgatgtgttcctgaagcggctgtttgcggtgagtatcacctcgtccggcaatcccccgacgttttccctgacgccggagggcaggctgaccgcaagaaatgctgatatcagcggtaacgtgaatgcgaactccgggacgctcaacaacgtcacgattaacgagaactgccgggttctgggaaaactgtccgcgaaccagattgaaggcgatctcgttaaaacagtgggtaaggcttttccgcgggactcccgggcaccggagcggtggccatcagggaccgttaccgtcaggatttatgacgatcagccttttgaccggcaaattgttattccggcggtggcattcagcggcgctaagcatgagagagagcatactgatatttactcctcatgccgtctgatagtgcggaaaaacggtgctgaaatttataaccgtaccgcgctggataatatgctgatttacagtggcgttattgatatgcctgccggtcacggtcacatgacgctggagttttcggtatcagcatggctggtgaataactggtatcccacagcaagtatcagcgatttgctggttgtggtgatgaagaaagccaccgcaggcatcagtatcagctga

SEQ ID NO: 461872 - DNA, 768 bp, Shigella boydii
gtgtttaattctgacaacctgagactcgacggaaaatgcgccatcatcacaggtgcgggtgcaggtattggtaaagaaatcgccattacattcgcgacagctggcgcatctgtggtggtcagtgatattaacgccgacgcagctaaccatgttgtagacgaaattcaacaactgggggggcaggcatttgcctgccgttgtgatattacttccgaacaggaactctctgcactggcagactttgctatcagtaagctgggtaaagttgatattctggttaacaacgccggtggcggtggacctaaaccgtttgatatgccaatggcggattttcgccgtgcttatgaactgaatgtgttttcttttttccatctgtcacaacttgttgcgccagaaatggaaaaaaatggcggtggcgttattctgaccatcacttctatggcggcagaaaataaaaatataaacatgacttcctatgcatcatctaaagctgcggccagtcatctggtcagaaatatggcatttgacctgggtgaaaaaaatattcgggtgaatggcattgcgccgggggcaatattaaccgatgccctgaaatccgttattacaccagaaattgaacaaaaaatgttacagcacacgccgatcagacgtctgggtcaaccgcaagatattgctaacgcggcgctgttcctttgctcgcctgcagccagctgggtaagcggacaaattctcaccgtctccggtggtggggtacaggagctcaattaa

SEQ ID NO: 461873 - DNA, 1212 bp, Shigella boydii
atgcttaccacccttatttatcgtagccatatacgtgacgacgaacctgtcaaaaaaatcgaagaaatggtttcgatagcaaatcgcaggaacatgcagtctgacgtaacagggatcttactgtttaatggttctcattttttccagcttctggaaggtccggaagaacaggttaaaatgatatatcgggctatatgccaggatccacggcactataatattgttgagctgctgtgcgattacgcgcctgctcgccgttttggcaaagcgggaatggaattatttgatttgcgcctgcacgagcgagatgacgttttacaggccgtattcgacaaaggcacatcaaaatttcagctaacttatgatgacagagcgctacaattttttcgtacttttgtccttgcaaccgaacaatcaacctatttcgagatccctgccgaagactcctggctttttatcgctgacggatctgataaagaacttgattcctgtgccctttcaccaactataaacgaccactttgcctttcatcctattgtcgatcccttatcgcggcggataatcgcttttgaagccattgtgcaaaaaaatgaagatagcccatcagccatagcggttgggcagcgtaaagacggggaaatctacacagcggatctcaaaagtaaggcgcttgcattcacgatggcacacgcacttgagctcggtgataaaatgatttcaatcaatctattacctatgaccctggttaacgaacctgacgcagtctcttttttacttaatgaaataaaggccaatgctctggtgcctgaacaaatcatcgttgaatttactgaaagtgaagtcatatctcggtttgatgagtttgccgaagcgattaaatcgctaaaggctgctggtatcagtgtagcaattgatcattttggcgcaggttttgctggtttgttactcctgtcacgcttccagcctgacagaattaaaatcagtcaggaattgattaccaatgttcataaaagtgggccacggcaggcaattattcaggcgatcataaaatgctgtacatcacttgaaattcaagtcagtgctatgggcgtggcaacaccagaagagtggatgtggcttgaatccgcaggaattgagatgtttcagggagatctgtttgctaaagctaaattgaatggtatcccttccatagcgtggccagagaaaaaataa

SEQ ID NO: 461874 - DNA, 3162 bp, Shigella boydii; identical to SEQ ID NO: 461095

SEQ ID NO: 461875 - DNA, 1023 bp, Shigella boydii
atggtcactttacttaacgcgttacaaccaggtggaaaatgcattatcactggtgattttcaaaaagaattagcgtacttacaaaatgtaattctttataatgactcgtttcttcgtctggattttttaggttataacgcccaaattattcaacgatcggacaatacctgcgaacttaccattaatgaaccgttaaaaaaccaggaaatatctacaggcaatatcaatgttaattgtccattaaaagatatttacaatgaaatcaggaggttgaacgtaatctttagttgtgggactggagatatagttgatctatcctctctggacttacgtaatgtcgatttagattattatgatttcacagataaacatatggctaatactattctaaatccttttaaattggattcaacaaattttactaatgccaacatgtttcaggttaattttgttagttcaacacaaaacgccacaatctcctgggattatttactaaaaataacgcctgttttaataagtattagcgatatgtattctgaagaaaaaatcaagtttgtcgaaagttgtttaaatgagcttggggacattaccgaagaacaattaaaaattatgagatttgcaattataaaatctataccaagggcaactcttacagataaattagaaaatgaattaacaaaagaaatatataaaagctcatcgaaaatcaacaattgcttgaacagaattaaattaccaaagatgaaagaattctcatcaaaaaaaatatatgattacatcgatataatcattgaagattatgaaaatatcaaagaaaatgcttatctggtcgtcccccaaattaattatactatggatttaaacatagaagactccagctcagaagagttaataccctcgagaaagacgaaaattcttcggacaatggctttgaagtcgaagaatataacgcatatgaagcatataactcagggaatctatattttaccagagaggaatatacgtatgattacgaccttttaa

SEQ ID NO: 461876 - DNA, 699 bp, Shigella boydii
atgcaggatattcacgaagaaagtctgagcgagtcggttaaatcagagcagtcaccgcgggtggtactctgggaaattgacctgacggtgcagggtggtgagcggtattttttctgtaatgagctgaatgaaaaaggggagccggtcacctggcaggggcgtaagtatgaggcatacccgattgacggcagcggctttgagatgaacggccggggcagcagtgccagaccgtcgctgacggtgtccaatctgttcggtctggtcaccgggatggcggaagacctgcagagtctggtgggggccacggtggtccgccgccgggtgtatgcccgttttctggatgcggtgaatttcgttgcgggcaatccggaggcggacccggagcaggagctgagtgaccgctgggtggtggagcagatgtcgcagctgacagccatgacggcctcgtttgtgctggctacaccgaccgagacggacggggcgctgtttcccggtcgtatcatgctggcgaacacctgtatgtggacctaccgctctgatgagtgtggttacacgggcggggctgtggcggatgagttcgataaacccaccacggatatccgtaaggacagatgcagcaagtgcatgcgcgggtgtgaactgcgcaggaatgtcggcaattttggcggtttcctttccattaataaactttcgcagtaa

SEQ ID NO: 461877 - DNA, 876 bp, Shigella boydii; identical to SEQ ID NO: 460983

SEQ ID NO: 461878 - DNA, 1107 bp, Shigella boydii
gtgaatactgttggcaaatcggcattcgtggaggctgtcggtcgggcgagcgatgatgtggaaggttacctggattttttcaaaggagaaatcgggaaaacacatctggcccaggagctgtggacgcagattgataacggtcagcttgcgccggacctggctgaaatcaggacgtccattacgaatgtcagcaatgaaatcacgcagaccgtcaataaaaaactggaaaatcagagtgcggcaatccagcagatacagaaagttcaggttgatacaaataataacctgaacagcatgtgggccgtgaaactgcagcagatgcaggacggacgcctttatattgcgggtatcggtgccggtattgagaatacgccagcaggaatgcagagtcaggtgctgctggcggcagacaggattgcgatgattaatcctgcgaatggcaacacaaagccgatgtttgttggtcagggcgatcagatatttatgaatgaagtgttcctgaaatatctgacggctcccaccattaccagcggcggtaatcctccggcattttccctgacaccggacgggcggctgacggcgaaaaatgccgatatcagcggtaacgtgaatgcgaactccgggacgctcaacaacgtcactattaacgagaactgtcgggttctgggaaaattgtccgcgaaccagattgaaggcgatctcgttaaaacagtgggcaaagctttcccccgggactcccgtgcaccagagcggtggccatcaggaaccattaccgtcagggtttatgacgatcagccgtttgaccggcagattgttattccggcggtggcattcagcggcgctaaacatgagaaagagcatactgatatttactcctcatgccgtctgatagtgcggaaaaacggtgctgaaatttataaccgtaccgcgctggataatacgctgatttacagtggtgttattgatatgcctgccggtcacggtcacatgacactggagttttcggtgtcagcatggctggtaaataactggtatcccacagcaagtatcagcgatttgctggttgtggtgatgaagaaagccactgcaggcatcacgattagctga

SEQ ID NO: 461879 - DNA, 600 bp, Shigella boydii
atgcgtaaattatgtgctgttattttgtccgcagtagtctggcaggtcgccgctgctacgccagcgagtgcagcagaacatcagtccacgctgagcgcggggtatctccatgcctcgacgaacgttcccggtagtgatgatctgaacgggattaacgtgaaataccgttatgagtttacggacgcgctggggctgattacgtccttcagttatgccaatgctgaggatgagcaaaaaacgcgctacagcgatacccgctggcatgaagattccgtgcgtaaccgctggttcagcgtgatggcggggccgtctgtacgcgtgaatgaatggttcagcgcgtatgcgatggcgggtgtggcttacagccgtgtgtcgactttctccggggattatctccgcgtaactgacaacaaggggaaaacgcacgacgtgctgaccggaagtgatgacggtcgccacagcaatacctctctggcgtggggggctggcgtgcagtttaacccgaccgaatccgtggccgttgaccttgcttatgaaggttccggtagtggcgactggcgaacggatgcatttattgttggtatcggataccgtttctga

SEQ ID NO: 461880 - DNA, 738 bp, Shigella boydii; identical to SEQ ID NO: 461467

SEQ ID NO: 461881 - DNA, 1602 bp, Shigella boydii; identical to SEQ ID NO: 461273

SEQ ID NO: 461882 - DNA, 894 bp, Shigella boydii
atgactagtctaaaaactagtattaaggctatcacttatttaagtgatactggttgtctggagattcagggggccagtctagcaagtcgttttggttatgctgcaaaccagatacgccgtgaccgtccgctgacacatgaagaactgatacgccatgtacccagtatttttggggaagaccggcacacctcccgcagtgaacggtatgcgtacattcccaccattaccgtcctggaaaatctgcagcgggaaggctttcagccgttcttcgcctgccagacccgtgtgcgcgacccgggccgccggggatacacaaaacacatgctgcgtctgcggcgggccggagagataaacggagaacatgtccctgaaattattctgctcaactctcatgacggtacctccagctaccagatgctgccgggttacttcaggttcgtctgccagaacgggtgcgtctgtggccagtctctgggggaagtgcgtgttccacaccggggaaatgtagtggagaaagttatcgaaggggcttacgaggtggtgggcgtgtttgaccggatagaggagaagcgtgatgccatgcagtcgctggtcctgccgccaccggcacgccaggcgctggcacaggcggcactgacttaccgttatggtgacgaacatcagcccgtcaccaccgccgacattctgacgccgcgacgccgggaggattacggtaaggacctgtggagcgcatatcagaccatccaggagaatatgctgaaaggcgggatttccggtcgcagtgcaaaaggaaaacgtatccatacccgggccattcacagcattgataccgacattaagctcaatcgcgcattgtgggtgatggcagaaacgatgctggagagcctgcgctga

SEQ ID NO: 461883 - DNA, 480 bp, Shigella boydii
atgaaaaccgtttctcagaatacccccacaatttattcagctacaacaccagagaataatccgcctcagttggttgccagcctcgtccctgatgaacagcgcatcaacttctggccgcagcattttggcctcattccacagtgggtgaccctggagccccgtgtcttcggctggatggaccgtctgtgcgaagactactgcggtggtatctggaatctgtacaccctgaacaacggcggggcatttatggcacccgaaccggatgacgatgatgacgaaacatgggtactgttcaatgccatgaacggtaaccgcgcagaaatgagcccggaagccgccggtattgccgcctgtctgatgacgtacagtcatcatgcctgtcgtacggagaattatgccatgacggtccattattaccggttgcgggattacgccctgcagcatccggaatgcagcgccattatgcgcatcatcgactga

SEQ ID NO: 461884 - DNA, 477 bp, Shigella boydii
atgcaacaactttcctttctgcccggagagatgactcccggcgagcgcagcctcattcaacgggccctgaaaaccctggaccgccatcttcatgaacccggcgtgaccttcacctccacccgtgcagcacgggaatggctgattctgaacatggcgggactggagcgtgaagaattccgggtgctgtatctgaacaaccagaatcagctgattgccggtgaaaccctcttcaccggcaccatcaaccgcacggaagtccatccccgggaagtgattaaacgcgccctgtaccacaatgccgctgccgtggtactggcacacaatcacccgtccggtgaagtcacacccagtaaggcagaccggcttatcaccgaacgtctggtacaggcactgggcctggtggatatccgggtgccggaccatctgatagtcggtggcaaccaggttttctcctttgccgaacatggtctgctttaa

SEQ ID NO: 461885 - DNA, 222 bp, Shigella boydii; identical to SEQ ID NO: 28341

SEQ ID NO: 461886 - DNA, 369 bp, Shigella boydii; identical to SEQ ID NO: 38783

SEQ ID NO: 461887 - DNA, 375 bp, Shigella boydii
atgaaaacattacctgtattacccgggcaggcggccagttctcgcccgtctcctgttgaaatctggcagatactgctgtcccgactgctggaccagcactatggcctcacactgaatgacacaccttttgccgatgaacgtgtgattgagcagcatattgaggcaggcatttcactgtgtgatgcggtgaactttctcgtggaaaaatacgcgctggtgcgtaccgaccagccgggattcagcgcctgtacccgctctcagttaataaacagcatcgatatcctccgggctcgcagggcgaccggcctgatgacccgcgacaattacagaacggtaaataacattaccctgggtaagtatccggaggcgaaatga

SEQ ID NO: 461888 - DNA, 195 bp, Shigella boydii
atgatgacactggaagccgacagcgttaacgtacaggcgctggatatgggacacattgtcgttgacattgatggtgttaatatcactgaactgattaataaggccgctgaaaacggttattcactccgcgtggtggatgaccgtgactctaccgaaacaccggcaacttatgccagccctcaccagttgctgtaa

SEQ ID NO: 461889 - DNA, 753 bp, Shigella boydii
atgtccggcagtgcttttgccgttacgcaccacgccttcagtagcggagcaggaaggacatctgatggaaatggaagccacgcaagcaccttaaaatcaccatcatacactaaatcagtaagttggcagcattacctcgtgccactaatcattctttttttctttgtggtttcgctggcttatggcatcgctacccgcacaattcgacatcaggcggatttaccgcatttaatgattgaaccgatgaaagagatggcgggatttatcgtgatggtttttcccctcgcccagtttgtcgccatgtttaactggagcaacatggggaaattcatcgccgtggggctgaccgatatactggaaagttcagggcttagcggcatcccggcgtttgtcggtctggcgttgctttcctctttcttatgcatgtttattgccagtggttccgcaatctggtcgattctggcccccattttcgtaccaatgtttatgctacttggctttcacccggcatttgcgcaaatcctctttcgtattgccgactcatccgtattgcctttagcgccggtatctccttttgttccactgtttcttggattcctgcaacgctacaaaccagacgcgaaactgggtacttactattcgttagtcttgccctatccgcttatctttttggtggtatggctgctgatgttgctggcgtggtatcttgttggtctgccgataggtccggggatttacccacgtttgtcttaa

SEQ ID NO: 461890 - DNA, 420 bp, Shigella boydii; identical to SEQ ID NO: 461652

SEQ ID NO: 461891 - DNA, 840 bp, Shigella boydii
atgttgaatgtagctattgaaaaccagaacgggtggaattatagtgtacctgcacctcataaaacgggtgccgggattagcaccccgaaagttactcgagcgcataaccgcgctgaagcggtttttttatgcgtaatgcacagccacattcaaattatggtgaggcgtgcggggcagccgcaaggctggccgggttctcgagtgaccggtagtgctaaccctgtgcgtctcaccacccatgagattagcacctctgctggtgagttaattaacttatcacttgaggatgtcattatggctactaccctttctcaccctgacgtaaccatcgaaaatggtcgcgccgtcactacttctatttcgattgctgagttttttggcaagcagcatcaccatgttgttcaaaaaatagaatccctcgaatgttctgaactatttttaaccagcaacttttcgcgggttaaattcgaacaccgcggcaattcttataacgcctaccaaatcaccaaaaacggcttcgttttcctggtgatgggcttcacgggcaaaaaagccgccacattcaaggatgcctacattgctgagttcgaccgcatggaggccgaactgcgccagaataacaccccacctgctgacaagatgattccgggtgatggtcgcactctggttgttcacttcgacaaattcggcaatgtcgaattcaccgaaaccgttcctgatggcgcactggtctgtaccctggagactttccggttttatctggaaaaacagggctggactcttgtaaaccggggcgcaattaaaaacatgaccgtagagcagttgctttccttaaaataa

SEQ ID NO: 461892 - DNA, 690 bp, Shigella boydii
gtgcaggtttccaacttgattgtcgattgcccggaaattcagcgtctggatattcatcctttgctggcttctggcagtgaatttaccgcgctggatgtcacgctggatatctcgccgtttgaaggcgataacgagagtcggctggcagtgcgcccttatccgcatcagctggaagaatgggtagaattgaaaaacggtgaacgctgcttgttccgcccgattttgccagaagatgagccacaacttcagcaattcatttcgcgagtcaccaaagaagatctttattaccgctactttagcgagatcaacgaatttacccatgaagatttagccaacatgacacagatcgactacgatcgggaaatggcgtttgtagcggtacgacgtattgatcaaacggaagagatcctcggcgtcacgcgtgcgatttccgatcctgataacatcgatgccgaatttgctgtgctggttcgctcggatctcaaagggttaggcttaggtcgacgcttaatggaaaagttgattacctatacgcgagatcacggactacaacgtctgaatggtattacgatgccaaacaatcgtggcatggtggcgctagcccgcaagctcgggtttaacgttgatatccagctcgaagaggggatcgttgggcttacgctaaatcttgcccaacgcgaggaatcatga

SEQ ID NO: 461893 - DNA, 501 bp, Shigella boydii
gtgatttctggtaatacgcgtatcaccggcaccagcgtgctgtggggagaggtttacgcaacggataacgtctggatcgataatagtgaaatcagtcagggtgcatatataagtgacagcgtcaccattcatgactcattagtttacgggcaatgtagaatatttggtcacgccttaattgatcaacattctatgatcgtcgccgcacaaggcttaacgcccgaccatcaactcctgctccaaatttatgatcgcgcaagggttagcgcctcgcgtattgtccaccaggcacaaatttatggcgatgccgtcgtccggtatgcttttattgaacatcgcgccgaagtttttgattttgccagtgttgaaggtaatgaagagaacaacgtctggctatgcgattgcgctaaagtctacggtcacgcgcaggtgaaagctggcatagaagaagatgccattccgacgattcattacagttcgcaggtggcggaatatgcgtaa

SEQ ID NO: 461894 - DNA, 993 bp, Shigella boydii
atgcagagcgataaagtgctcaatttgccggcaggctactttggtattgtgttggggacgatagggatgggatttgcctggcgctatgccagccaggtttggcaggtcagccactggttaggggatgggctggtgattctggcgatgatcatctggggattattaactagcgcatttattacccgactcatacgctttccgcatagcgtgctggcggaagttcgccatccagtgctgagcagttttgtgagtttgtttccggcaacgacgatgctggtggcgattggttttgttccgtggtttcgcccactggcggtgtgcctgttcagttttggtgtcgtggttcagttggcttatgccgcctggcaaactgcgggattatggcgcggatctcaccctgaagaagctaccatgcctggactgtatctgccgacagttgccaacaactttatcagcgcaatggcctgtggtgcgttgggctacaccgacgccggtctggtgtttttaggcgcaggcgttttctcatggctaagccttgaaccggtgatcttgcagcgtctgcgcagttcgggagaattacccacggcactgcggacatcactcggcattcagctcgctcctgcgctggtggcctgtagtgcctggttgagcgtcaacggcggcgagggtgatacgctggcgaaaatgctttttggttatggactgctgcaactgctgtttatgctacgtctgatgccatggtatctctcccagccatttaatgcttcattctggagtttctcgttcggcgtatctgcactggcaaccaccggtttgcatctggggagtggcagcgaaaatggatttttccatacgctggcggtaccgctgtttatctttaccaattttattattgcaatactgctcatccgtacttttgcgcttctgatgcaggggaaattgttagtcagaaccgagcgcgctgttttaatgaaagcagaggacaaagaatga

SEQ ID NO: 461895 - DNA, 594 bp, Shigella boydii
atgatcattcgtgacgaaaactattttactgataaatatgaattaacccgcacacactctgaagtactggaagcggtgaaagtggttaaaccgggtaaaacgctggatctgggctgtggcaatggtcgtaacagtctttacctggcagccaatggttatgatgttgacgcatgggataaaaatgccatgagtatcgccaatgtagagcgcattaaatccattgaaaatctggataatttacacacccgagtcgttgatctgaataacctcacatttgatagacagtacgattttattctttcgactgtggtactgatgttccttgaggctaaaaccatcccagggctgattgccaatatgcaacgttgcactaaacttggtggttacaacctgattgtggcggcgatggataccgctgattatccatgtaccgtcggcttcccgtttgccttcaaagagggagaattacgtcgatattacgaaggctgggagagggtgaaatacaatgaagacgtcggcgagctgcaccgcaccgacgccaacggtaatcgtattagactgcgtttcgccacgatgctggcacgtaaaaaatga

SEQ ID NO: 461896 - DNA, 132 bp, Shigella boydii
atgcgtaccacatcatttgcgaaagttgcagctttatgcggcttgttggctctgtctggttgtgcctctaaaatcacccagccagataaatattctggttttttaggtaatgctgccaacttactgatttag

SEQ ID NO: 461897 - DNA, 300 bp, Shigella boydii
atgaaaccaacgacactactgcttattttcacttttttcgctatgccaggcatcgtatacgccgagtcgccttttagctcactgcagtccgcaaaagagaaaaccacggtattacaagatttacgtaaaatttgcacgccacaggcgtcattatcagatgaagcgtgggaaaagttaatgttgtcagatgaaaacaataaacaacatatacgcgaggccggtaatgactccaacttattgatagtgttttatgttcagataatgcccgatgactttgtcatgcagctccaccgattttga

SEQ ID NO: 461898 - DNA, 249 bp, Shigella boydii
atgcgtgttgagatctgtatcgctaaagaaaaaatcactaaaatgccaaacggtgctgtggatgcgttaaaggaagaattaacccgacgcatcagtaaacgttatgacgatgtagaggtgatcgtaaaagccaccagcaacgatggcctttctgttacgcgcaccgccgataaagattcagctaaaacttttgttcaggagactctgaaagatacctggaagtctgctgacgagtggttttttcactaa

SEQ ID NO: 461899 - DNA, 546 bp, Shigella boydii
atgaatattagtgaacttaaaaagtgcatacactatgaagtaataggttgtaaacgccctttctcctggcgaaaagcaattgttcgcgcaataaaacacagaagatcacgttatttattttggtggcgcatagcaaaatatctttttgataaaggcggataccggcgaaagattgcaggaaaaatagaacgcttcattcttgataaatacaatgtaaccgttcccttaactgtaaatattggtaaagggttcgacatatcttatctcaatggtgttgttatcggtcacaaagttacaataggtgaaaattgttcaattaagcctggggtaactattggacttcgcggtgaatttaatgatatggatattgtcataggaaataatgtaaccattggctgtaacgccaccatccttggtggcaaagtgcatatagggaataatgtaaaaataggagctcatgcattggtactgcatgacattcctgatgactccacattcattaccaaatttcactctgaaattatttataattcatctcacacataa

SEQ ID NO: 461900 - DNA, 1188 bp, Shigella boydii; identical to SEQ ID NO: 461322

SEQ ID NO: 461901 - DNA, 1761 bp, Shigella boydii
ttgcttctgggagaaagcgccaccagcggcagtattttttccagctacacctttactggcgtgcaactcgcttccgacgataatatgttgccaaacagccagcgcggatttgccccaacggtacgcggtatcgcaaacagtagtgcaatcgtgactatcaggcaaaatggttatgtgatctatcaaagcaacgtgccagcgggtgcctttgaaattaacgatctctacccctcttccaacagcggcgatttagaagtcacgattgaagaaagtgacggtacacaacgtcgctttatccagccttattcttcattacccatgatgcagcgacctgggcatctaaaatatagcgcgaccgctggacgctatcgcgctgatgcaaacagtgatagcaaggaacccgaatttgctgaagccacggcaatatatggtttgaataatacttttacgctgtatggcggcctgctcggttctgaagattattatgcgctggggatcggtatcggcggcacacttggcgcactgggcgcgttgtcgatggatatcaacagagctgacacccaattcgataaccagcactcttttcatggctatcaatggcgtacgcagtacatcaaagatatcccggaaaccaacaccaatatcgctgttagctactatcgctataccaacgatggctattttagttttgatgaagccaatacccgcaattgggactataacagtcgccaaaaaagtgaaattcaattcaacatcagccagacaatatttgatggggtaagtctgtatgcctccggttcgcagcaagactattggggcaataacgagaaaaacaggaatatctctgttggggtttccggccagcaatggggaattggttacagcctgaattatcaatacagccgctacactgatgaaaataatgaccgtgcactctctttgaatctcagtattccgttagaacgctggttaccgcgtagccgggtttcctatcagatgaccagccagaaagatcgcccaacccaacatgaaatgcgtcttgatggctcactgctggatgatggtcgcctgagctatagcctggaacaaagtctggatgacgataacaaccataacagtagcctgaacgccagttaccgttcaccttatggaaccttcagtgccggatacagttacggtaatgacagcagccaatacaattacggcgttaccggcggcgtggttatccatcctcatggcgtgacgctctcgcaatatctgggcaacgcttttgcgcttatcgatgctaacggggcttctggcgtgaggatacaaaactatccggggattgctactgatccctttggctatgcagtgattccttatctcacgacttatcaggaaaaccgtctctcggtagatactacgcagctgcccgataacgtcgatcttgaacaaacaacacagtttgtggtgcccaacagaggtgcaatggtagcggcgcgtttcaacgccaatatcggttatcgcgtacttgttacagtcagcgatcgcaacggtaaaccgttgccctttggcgctcttgccagcaacgatgatacggggcaacaaagtatcgtcgatgagggcggcatactatatctctctgggatatcgagtaaatcacaaagctggactgtacgctggggaaatcaggcagatcaacaatgtcagtttgcttttagtacaccggattcagaaccaacaacctctgtattacaaggcacagcgcagtgccattaa

SEQ ID NO: 461902 - DNA, 381 bp, Shigella boydii; identical to SEQ ID NO: 458903

SEQ ID NO: 461903 - DNA, 186 bp, Shigella boydii
atgggccagttggttggctctggtgctacgtatcttaacggctttgttcaaaatatcggtataagcattatccagcggtcggatctgctcactttcatgattgataatcgcttcaaacatgccatttttggcatatttcaacataggttgcatacccgtgatataagcctgaaagcgttgatttaa

SEQ ID NO: 461904 - DNA, 168 bp, Shigella boydii; identical to SEQ ID NO: 5742

SEQ ID NO: 461905 - DNA, 174 bp, Shigella boydii
atgaaaaaactggcacttattttgtttatgggaacgcttgtttccttttatgccgatgccgggcgcaaaccctgttctggttcgaaaggggggatctcacactgtacggcaggcggcaaatttgtctgtaatgatggttctattagtgcctcgaaaaaaacatgcactaactga

SEQ ID NO: 461906 - DNA, 531 bp, Shigella boydii
atggaaaataaatactcaaggttacaaatcagcattcactggctggtctttttgctggttatcgcagcgtattgcgcaatggagtttcggggtttcttcccacgtagcgatcggccactcatcaacatgattcatgtttcctgcggcatctcaattctcgtgctgatggtcgttcgtcttttgttaaggctgaaatacccaaccccgccgattatacctaagccaaaaccgatgatgacgggactggcgcatttgggacatttggtgatttatctcctgtttattgcgctgccagtgattggtttggtgatgatgtataaccggggcaacccgtggtttgcgtttggtttgacgatgccttacgcttcagaggccaatttcgaacgggttgatagcttaaagtcgtggcatgaaacgctggcgaatctgggatattttgtcatcgggttgcacgctgcggctgcactggcacaccactatttctggaaggacaacacacttctacgcatgatgccgcgtaaacgttcctga

SEQ ID NO: 461907 - DNA, 303 bp, Shigella boydii
atgagcagaaaaacccaacgttactctacggagtttaaagccgaagccgtcaaaacggttcctgaaaatcaactttcgatcagtgaaggcgcttcccgattatccgttcctgaaggcactttaggacaatgggttaccgctgcaagaaaagggctcaatacaccaggctcccgcacagtggctgagctggaatctgaagttatgcaactgcgtaaggctttaaatgaagcacgacttgagcgagatatattaaaaaaagcaacagcgtattttgccctggagtcgctgaaaaatacgcgttag

SEQ ID NO: 461908 - DNA, 156 bp, Shigella boydii
atgacggatatcgaagtccgtacccagcagcggctgcagatgctcctgttcctgcgtgaagcgctgttccggtgtctgcctgaactggcgaagttcccgcctgtcggcaacgtcagccatccactgcgcagcatgagagtttcctttgtggtgtag

SEQ ID NO: 461909 - DNA, 429 bp, Shigella boydii
gtgcgtgctgcacagaatcgccggctggaagaggcacccggcaagctcttcgaactgccggaagtcctggcaaccgcaggaagccacacgctgaatgtgatgcaaaaaggcgggcgggcagcccgtcaggcccggatgttcatcagttacagcgaagtcagcataaaaaatcccgacaacagcggccaggcgctcccgctcacgtatgtctgttgccgggagcaggcagaggacggtgcctgctggcatctgctgacgtcaggaaaagcggcgagtgccgccgatgcacgacgtattgtcagccattacgagcgacgctggctgacagaggaataccacaaggcgtggaaaagtggtggtacatggaatcgctgcgaatgcagacccgggataaccttgagcgcatggtggttatccaggcgtttatag

SEQ ID NO: 461910 - DNA, 186 bp, Shigella boydii
gtgttcttcggtagcgatcacggcggcgagcgtggagcactgctgtacgggctgatcggcacctgccgactgaacggtatcgatccggaagcgtatctgcgccatattctgagcgtactgccggaatggccctccaaccgtgttgacgaactcctgccatggaacgtagtactcaccaataaataa

SEQ ID NO: 461911 - DNA, 819 bp, Shigella boydii
gtggaccgtatcgttaccggttatccgcgcgatgaagtggctaaactggaagaagaactgggttatcacgatggttttctcgacaccgctgaacacttttacctgtttgtgattcaggggccgaaatccttagcgactgagctgcgcctggacaaatatccgctcaatgtgctgattgttgacgatattaaaccgtataaagaacgcaaagcggcaatcctcaacggtgcgcacaccgcgctggtgccggtggcgttccaggcagggctggataccgtaggtgaagcgatgaacgatgctgaaatttgcgcattcgttgaaaaagccatctacgaagaaattattcaggtactggatttgcctcgtgatgaactggaatctttcgccagtgcagtcaccgggcgtttccgtaacccgtacattaagcatcagctgctgtctatcgcgctcaacggtatgaccaagttccgcacccgcatcctgccgcagctgctggcagggcagaaggcaaacggcacacttccggcgcgccttactttcgcattagcggcattgattgccttctatcgcggtgagcgtaacggagaaacatatccggtacaggacgatgcacactggctggaacgttatcagcaactctggagccagcatcgtgaccgtgttatcggcaccccggaactggtagcgattgttttggcagaaaaagaccactgggagcaggacctgacgcaagtgcctggtctggtcgagcaggttgctaatgacctggatgcgattcttgaaaaagggatgcgcgaagctgtacgcccgttgtgctaa

SEQ ID NO: 461912 - DNA, 915 bp, Shigella boydii
atgattgttcgtccacaacaacactggctgcgccgtatttttgtctggcacggctcagtattatccaagatatcctcgcgcttactactcaattttctcttttctatcgctgttattttcatgctgccctggtacacgcatctgggcatcaaattcaccctcgcaccgttcagcattctcggtgtcgccatcgccatttttcttggttttcgtaataatgccgggtacgcccgttacgttgaagcgcgaaaactttggggacagttgatgattgcctcacggtcgttactacgtgaggtaaaaacgacattgccggattcggcaagtgtaagggagtttgccaggctgcaaatcgccttcgcccactgtttacgcatgacattacgcaaacagccacaggcggaagtgctggctcattatctcaagactgaagatcttcagcctgtactggcttcgaactctccagctaaccgtatcttgttaataatgggggagtggttggcggttcagcgccgcaatgggcagctttcagatatcctgtttattagcctcaacgatcggcttaatgatatttcagcggtcctggcaggatgcgagcgcattgcctatacgccaattccctttgcctacaccctgattttgcatcgtactgtttatctgttttgtatcatgctgccgttcgcgctggtcgtggacctgcattacatgacgccttttatctctgtgctgatttcctacacttttatttcgctggattgtctggcggaagaactggaagaaccgttcggtactgaaaacaatgatttaccgctggatgccatctgcaacgctattgaaattgacctcttacagatgaacgatgaagccgaaattccagcaaaaattcttcccgatcgtcattaccagctgacgtga

SEQ ID NO: 461913 - DNA, 681 bp, Shigella boydii
gtgccgctggaaaatgtcgaatatgtcgccgatcttggctgtggcccaggtaacagcaccgcccttctacaacaacgttggcctgcggccaggataacaggcatcgactcgtctccggcgatgattgctgaagcgcgcagtgctttgccagactgccagttcgtggaagcagacatccgcaactggcaaccggtacaggcactcgatctgatttttgctaatgcctcactgcaatggctgcctgaccactacgaattgtttcctcacttggtttctttacttaatccgcagggcgtgctggcagtacagatgccagataactggctggagccgacccatgtgctcatgcgcgaagttgcctgggaacaaaactacccggatcgcgggcgtgagccgttggctggcgttcatgcttactacgatattttgagcgaagccggatgtgaggtcgatatctggcgaaccacctactatcaccagatgccgtcgcaccaggcgattatcgattgggtgaccgccactggattacgtccgtggttacaggatctgaccgagagcgaacagcagctttttcttaagcgctaccatcagatgctggaagagcagtatccactgcaagagaacggacagatactgctggcatttccgcgtctttttattgttgcccggcgtatggagtaa

SEQ ID NO: 461914 - DNA, 279 bp, Shigella boydii
atgatatgggatgaaaacaaacaagatcttgaattacggcaatttatacgttggttaatacgtctacgtaaaaaacatccacaatggtgtgaggcatcaatacaatggaaagatgttgaacatcctacggtgatcgcttatcaacgcgataacatcactttcttcttaaataatagtgaagatactgccaactttatttatgacggaagaagtatggagatctccggtttcagttatgaaattgaaggtttacctgctgctgatctttatgatttttaa

SEQ ID NO: 461915 - DNA, 324 bp, Shigella boydii
atgaagcaacctgattttgcgaagtggtacttctatcaattacttaagaagtatgagggcgaacagctgtatcttaatgagttaggatatgtttatggtaatgaagaaaaaacaaatgaaattgtaaataacaatccgggttatgtcgttgatatttttgaagaaaagatgggtaatgaattaaaaattagaacaagaatgatggaaatcctccgggatgggaaaataaatatatatgaatatattaataaagaacagttagaaaaattaaatcctccggaagatttacgtatagcaataaaaaaattgggatggaataattga

SEQ ID NO: 461916 - DNA, 1497 bp, Shigella boydii; identical to SEQ ID NO: 461377

SEQ ID NO: 461917 - DNA, 366 bp, Shigella boydii
atgctggaagcggccagagaggccagacgtcaggaaattgaagcatggcgcgcagaacaggaggcgaagccgttcacgtttgaatggaacggtcgtatctggaatgctggtcccgactcactgggccgcctgtccccggtagtcatgctggcaaaatctgtcacagcacaaacacatatggcgtggagcgatgccgataatcagcaggtgaaactgtcgatgccggaactggaagaactggcggcagcaatggtgcaggcgcaggtcgatcgcaacgatgagatttatcgccgtcagcgtgaaatgaaagaggagctgagcggtctggatgatttggcttcaattcgggcgtttgacgttgagtaa

SEQ ID NO: 461918 - DNA, 180 bp, Shigella boydii; identical to SEQ ID NO: 461173

SEQ ID NO: 461919 - DNA, 150 bp, Shigella boydii
atgctcaccgttaagcagattgaagcagcaaagccgaaagaaaaaccataccgccttctcgatggtaatggcctgtacctttatgttcctgtatccgggaaaaggtatggcaacttcgctacaagattgacggtaaggaaaaaatactga

SEQ ID NO: 461920 - DNA, 243 bp, Shigella boydii; identical to SEQ ID NO: 461407

SEQ ID NO: 461921 - DNA, 381 bp, Shigella boydii; identical to SEQ ID NO: 458903

SEQ ID NO: 461922 - DNA, 342 bp, Shigella boydii; identical to SEQ ID NO: 460954

SEQ ID NO: 461923 - DNA, 1086 bp, Shigella boydii; identical to SEQ ID NO: 461388

SEQ ID NO: 461924 - DNA, 2220 bp, Shigella boydii
atgagctctatctccctgatccaaccggatcgcgacctgttctcctggccgcagtactgggccgcctgttttggaccggcaccgtttttgccgatgtctcgtgaagagatggatcaacttggctgggatagctgcgacatcattttggttactggcgacgcgtatgtcgatcacccaagcttcgggatggcgatttgcggtcgtatgctggaagcgcagggctttcgcgtcgggatcatcgcccagccggactggagcagcaaagacgactttatgcgtctgggtaaaccgaatctgtttttcggtgttactgctggcaacatggattcgatgatcaaccgttataccgccgatcgccgtttacgtcatgacgatgcctacacgccggataacgtcgcgggtaagcgcccggatcgcgccacactggtttatacccagcgttgtaaagaggcgtggaaagatgtaccggtgatcctcggcggtattgaggctagtctgcgtcgtaccgcacattatgattactggtccgataccgtgcgccgttccgtgctggtggattcgaaagccgacatgctgatgtttggtaacggtgagcgtccgctggtggaggtggcgcaccgtctggcgatgggcgagccgattagtgaaatccgcgatgtgcgtaataccgcgattatcgtgaaagaggtcttgcctggctggagcggcgtggattccacccgtcttgatacccctggaaaaatcgacccaatcccgcatccgtatggtgaagatttgccgtgcgcggataacaaaccggtggcaccgaaaaagcaggaagccaaagccgtaaccgtgcagccaccgcgcccgaaaccgtgggaaaaaacctacgtgttgctgccttctttcgagaaagtgaagggcgataaagtgctgtacgcccatgcttcgcgtattctgcaccacgaaaccaacccaggctgtgcccgcgcattgatgcaaaaacacggcgaccgctatgtgtggatcaacccgcctgctattccgctttctaccgaagagatggacagcgtttttgcgctgccatacaagcgcgtgccacatccggcctatggcaatgcccgtattccggcttacgaaatgatccgtttttcggtcaacattatgcgtggctgctttggcggctgctctttctgttctatcaccgagcacgaagggcgcattattcagagccgttccgaagattcgatcattaatgagatcgaagcgatccgcgacaccgttccaggttttacgggcgtaatttccgatctcggtgggccaactgccaacatgtatatgttgcgctgcaaatcgccacgcgctgagcaaacctgccgccgtttgtcgtgcgtttatccggatatttgtccgcacatggacacgaaccacgaaccaacgatcaacctctatcgccgtgcgcgtgatctgaaaggcattaaaaagatcctgattgcctctggtgtgcgttatgacatcgccgtggaagatccgcgctatatcaaagaactggcgacccatcacgtcggcggttatctgaagattgccccggaacataccgaagaagggccgttatcgaagatgatgaagccgggcatgggcagctatgaccgctttaaagagctgttcgatacttactcaaaacaggcaggtaaagagcagtatctgatcccctatttcatctccgcgcaccccggtacgcgtgatgaatatatggtgaatctggcgctgtggctgaaaaagcatcgtttccgtctcgaccaggtacagaacttctacccatcgccgctggcgaactcaaccaccatgtattacaccgggaaaaacccgctggcgaagattggttataagagtgaagacgtcttcgtaccgaagggcgacaagcagcgtcgtttgcataaagcgttgttgcgttaccacgatccggcaaactggccgttaatccgccaggcgctggaagcgatgggtaaaaagcatctgattggtagccgtcgcgattgcttagtgcctgcgccaaccattgaagagatgcgtgaagctcgtcgccagaaccgcaatacccgtccggcgttgacgaaacatacgccgatggcgacccagcgtcagacgcctgctacggcaaaaaaagcgtcgtctacgcaatctcgtccggtgaatgctggtgcgaagaaacggcctaaagcggcggttggacgttaa

SEQ ID NO: 461925 - DNA, 261 bp, Shigella boydii; identical to SEQ ID NO: 461397

SEQ ID NO: 461926 - DNA, 135 bp, Shigella boydii; identical to SEQ ID NO: 461398

SEQ ID NO: 461927 - DNA, 1455 bp, Shigella boydii
atgaaaatacctgaagcagtaaatcatattaatgttcagaacaatattgatcttgttgatggaaaaataaatccgaacaaagatacaaaagcattacaaaaaaacatatcatgcgtaacaaactcatcctcttctggcataagtgaaaaacatttagatcactgtgctgatactgtgaaaagctttttaaggaagtctatagcagcgcaaagttatagtaaaatgttctctcaagggaccagtttcaaatcattaaatctttctattgaagcgccatctggagcacggtcatcatttcggtcacttgagcacctcgataaggtgtccagacactatctttctgaaataatacaaaaaactcatcctctttcttcggatgaacgtcacttgctctctattattattaattctgattttaacttcagacatcaaagtaacgctaacctgtcaaataatactcttaatattaagtcctttgataaaattaagtctgagaatatacaaacatataaaaacacattctctgaggatattgaagaaatagctaaccacgattttgttttttttggggttgaaatttccaatcatcaagaaacactcccactaaataaaacacatcatactgtggattttggtgctaatgcgtatatcattgatcatgactctccatatggatatatgacattaaccgaccactttgataatgctattccacctgttttttaccatgagcaccaatcatttttcttagataactttaaagaggttgtggatgaagttagcaggtatgtgcatggtaatcagggaaaaactgatgtgccaatatttaatactaaagatatgaggcttggaattgggttgcatcttattgattttataagaaagagtaaagatcaaagattccgagagttttgttataataaaaacattgatcctgttagtctggatagaattataaactttgtgtttcagcttgagtatcatataccaagaatgctaagcacagataacttcaaaaagataagactcagagatatatctttggaggatgccattaaagcatccaattatgaagaaattaacaataaggtgactgataaaaaaatggctcatcaagctcttgcttattctctaggcaatgcaaaatctgatatggcactttatttactatctaaatttaattttacaaaacaagatgtcgcagagatggagaaaatgaacaacaatatgtattgtgagctgtatgatgttgagtatttacttagtgaagatagtgccaactataaagtgctagaatattttattaataatggattggttgatgtaaacaaaagatttcaaaaagcaaatagtggggacactatgcttgacaatgcaatgaaaagcaaagattcaaaaacaattgattttttattaaaaaatggagcggtatcaggcaaacgatttgggaggtga

SEQ ID NO: 461928 - DNA, 267 bp, Shigella boydii
atggtgaggtacttcgggttccttgccaaccgggtgtgtggagagaagctgccgcaggtgtaccgtgctctggggatggataaacaggaaccagtggcgaaagtgtgctatgcacaaatggtgaaacagttcctgagtcgtgacccgttcgaatgcgtgctgtgtggcggccggatggtataccgccgggccatcgcgggactgaatgtggaggagctgaagaaaaacgggcgggatatcagtctgctgaggtatatgccggcctga

SEQ ID NO: 461929 - DNA, 303 bp, Shigella boydii
atgagcagaaaaacccaacgttactctacggagtttaaagccgaagccgtcaaaacggttcctgaaaatcagctttcgatcagtgaaggcgcttcccgattatctgttcctgaaggcactttaggacaatgggttaccgctgcaagaaaagggctcaatacaccaggctcccgcacagtggctgagctggaatctgaagttatgcaactgcgtaaggctttaaatgaagcacgacttgagcgagatatattaaaaaaagcaacagcgtattttgccctggagtcgctgaaaaatacgcgttag

SEQ ID NO: 461930 - DNA, 1455 bp, Shigella boydii
atgaaaatacctgaagcagtaaatcatattaatgttcagaataatattgatcttgttgatggaaaaacgaatccgaataaagcaacaaaagcattacaaaaaaatatattacgcgtaacaaactcatcttcttctggcataagtgaaaaacatttagatcactgtgctaatactgtgaaaaactttttaaggaagtctatagcagcgcaaagttatagcaaaatgttttctcaagggaccagtttcaaatcactaaatctttctattgaagcgccatctggagcacggtcatcatttcggtcacttgagcatctcgataaggtgtccaggcactatatctctgagataatacaaaaagttcatcctctttcttcagacgaacgtcacttactttctattattattaattctaattttaacttcagacatcaaagtaactctaatctgtcaaataatattcttaatattaaatcctttgataaaattcagtctgaaaatatacaaacacataagaatacatactctgaggatattaaagaaatctctaaccacgattttgttttttttggggttgaaatttccaatcatcaagaaaaactcccactaaataaaacacatcatactgtagattttggcgccaatgcgtatatcattgatcatgactctccatatggatatatgacattaaccgatcactttgataatgctattccacctgttttttaccatgagcaccaatcatttttcttagataactttaaagaggttgtggatgaagttagcaggtatgtgcatggtaatcaggggaaaactgatgttccaatatttaacactaaagatatgaggcttggaattgggttgcatcttattgattttataagaaagagtaaagatcaaggattcagagagttttgttataacaaaaatattgatcctgttagtctggatagaattataaactttgtgtttcagcttgagtatcatataccaagaatgctaagtacagataacttcaaaaaaataaaactcagagacatatctttggaggatgcgattaaagcatctaattatgaagagattaacaataaagtgactgataaaaaaatggctcatcaggcccttgcttattctttaggcaataaaaaagctgatatagcactttatttactatctaaatttaattttacaaaacaagatgtcgcagagatggagaaaatgaacaacaatagatattgtaatctgtatgatgttgaatacttacttagtaaagatggtgccaactataaagtgctagaatattttatcaataatggattggttgatgtaaacaaaaaatttcaaaaagcaaatagtggggacactatgcttgacaatgcaatgaaaagcaaaaatccaaaaatgattgattttttattaaaaaatggagcaatattaggcaaacgatttgagatatga

SEQ ID NO: 461931 - DNA, 282 bp, Shigella boydii
atggaacagaaagcattatctgcagaaccccgcagatcattttcaaatgagtttaaacttcaaatggttaaactggcttcacaaccaggagcctctgttgcccgtattgcccgggaacacgatatcaatgataacctgctgttcaaatggctcaggctctggcagaacggagggcgcatatcgcggcgtcttccgtggatttgcccctatatttccagacatctgttatcacttaacccattacaagcccgctgccgcagatattcccgtggcgagcgataa

SEQ ID NO: 461932 - DNA, 327 bp, Shigella boydii
atgtttaagtatgcagagatgttgatggcggaagaagatgataaagtatgtgaacttatttttaaacaacaagataatttgattttaaaaataaatgatagatttcccagaataattataaagaaataccgaacattacaaggtaaagtcgtatggctatggatattgccatttgttattgaatggttaatcttgtgtgctttaggcgtaaacagctggcgaggcaaaagtaaataccctgattattatttgttaagagatgagatgcctgtgcgtctggtgtctattatattcccaacattattggcgctattcttgctggcgtag

SEQ ID NO: 461933 - DNA, 276 bp, Shigella boydii; identical to SEQ ID NO: 461438

SEQ ID NO: 461934 - DNA, 276 bp, Shigella boydii; identical to SEQ ID NO: 458859

SEQ ID NO: 461935 - DNA, 657 bp, Shigella boydii; identical to SEQ ID NO: 461455

SEQ ID NO: 461936 - DNA, 270 bp, Shigella boydii; identical to SEQ ID NO: 461456

SEQ ID NO: 461937 - DNA, 258 bp, Shigella boydii
atggcaatttattctcttgttgatgaaaacgatttgcgcacaatgaaggacattgatcggttcattcgtgaaaaagagtgcatagcacttaccacgctggcaaactcaacacgctggaaaatggagcaggcaggtaaattcccgcgacgtatcaagatcggtgaacgtgctgcagggtatcgactttcagaggttcaggcatggatccgtggtgagtggcatcctggatggaaacctggaaaaacaaaacagcaataa

SEQ ID NO: 461938 - DNA, 324 bp, Shigella boydii
atggcagaagagttcacccaattaatatccaaatcagcaggagttgatgatattcaaatggaaatagacgagaagtttatgaatcgcaaaatttcatttcgtggttcctctttgctgacaataattaatagcattgcagttacagatttactgggaatagtcccctatgaactttataactcccaccgtgactttcttaatttaaaagagataaaactagaacatccgttaccttcaataaagctttacatttcctataataaatcttctttaaataatttggtgttctcccgatttattgaccgtctaaatgagagtttttga

SEQ ID NO: 461939 - DNA, 1179 bp, Shigella boydii
atgtgcgtcgcaacaagggagccccccggatgcgacgggcagactttgaaaatgttcgaccagcaacgtgatggcaatctatacaagatctggaaccggctatgttcgggaacatggtttccgccaccagtgctggaaaaacggatcccgaagtcgaatggcaaggaacgcattctggggatcccaacagtatccgatcgaattgctcagggagcgataaaacttttcatggaagaaaagcttgactcgattttccatgctgattcatatggttaccgaccaggcaaatcagctcatgacgctctgaaacaatgtgccatccggtgctggcgttatagctggatactggaagtggacatcagtgcgtttttcgaccatgtgaaacatgatctggtgctcaaagctctggaacaccacgggatgcctaaatgggtcatcctgtactgtcgacgctggatggaagcgccaatgcagagttgtgaaaatggagaattaataacccgaacacgaggcactccgcagggcggggtcattagtccgctacttgctaacttgttccttcactatgcatttgatttgtggatggaaagagaatatcggggggtaccgtttgagaggtacgctgacgatattgtagtacattgttcacgaatgagtgatgcaacaaggctaaagaacaggttatcggagcgcttctcggaagtcgggctggtcctgaatgcagggaaaacgaatatcgcctacattgacacgtttaaaaggagaaacgtcgcaacgagtttcacctttctcggatatgacttcaaagtgcgtacgctgaagaatttcaaaggcgaacggtaccgaaaatgcatgccgggtgcgtcaaatgcagcaatgcgcaaaataacagaaacaatcaagaagtggcgtatacatcgctcaacagctgagagtttgctggattttgcgaggcgcgacaatgcgatagtgagaggctggatcgagtactacggaaagttctggtccagaaatttcaactatcgactgtggagtgcaatgcagtcacgtctgctcaagtggatgcagtctaaatacagactttcgaaccggaaggctcagcgaaagctgacgctggtaaggaaggagtatccgaagctatttgttcactggtatttactacgtgcatcaaatgagtga

SEQ ID NO: 461940 - DNA, 870 bp, Shigella boydii; identical to SEQ ID NO: 461458

SEQ ID NO: 461941 - DNA, 303 bp, Shigella boydii
atgggacgctggcttgctggcaggctcatgaaagagctggggctggtcagctgtcagcagccgactcaccggtataaacgtggtggtcatgaacatgttgctatccctaactaccttgaaaggcagttcgccgtgaccgagccaaatcaggtgtggtgcggtgatgtgacctgtatctggacgggtaagcgctgggcgtacctcgccgttgttctcgacctgttcgcaagaaaaccagtgggctgggccatgtcgttctcgccggacagcaggctcaccatgaaagcgctggaaatggcatag

SEQ ID NO: 461942 - DNA, 276 bp, Shigella boydii; identical to SEQ ID NO: 458859

SEQ ID NO: 461943 - DNA, 276 bp, Shigella boydii; identical to SEQ ID NO: 458859

SEQ ID NO: 461944 - DNA, 447 bp, Shigella boydii
gtggcgacattaattaagaccaccccgatattattcaacattgtacgttatcttggtgcgttttatttgctatatctggagagtaaaattctctacgcgaccctgaagggtaaaaataacgaggccaaatccgatgagccccaatacggggccatttttaaacgcgcgttaattttgagcctgactaatccgaaagccattttgttctatgtgtcgtttttcgtacagtttatcgatgttaatgccccacatacgggaatttcattctttattctggcgacgacgctggaactggtgagtttctgctatttgagcttcctgattatttctggtgcttttgtcacgcagtacatacgtaccaaaaagaaactggctaaagttggcaactcactgattggtttgatgttcgtgggtttcgccgcccgactggcgacgctgcaatcctga

SEQ ID NO: 461945 - DNA, 135 bp, Shigella boydii; identical to SEQ ID NO: 21389

SEQ ID NO: 461946 - DNA, 1335 bp, Shigella boydii
atgactgctggcgctcacggggtgccgcgtgaagtgacagaaggcgttatcgacgggcttaattatcccaatcatgaagcaattgatttttatcatcgctataaaacagatattcagttatttgccgagatgggattcaaatgctttcgaacttccattgcctggacacgaatctttccgcaaggtgacgaacaggagccgaatgaagagggtttacaattttatgatgatctgttcgatgaatgccttaagcagggaatggaacctgtggtgacgctttcacattttgagatgccttatcatctggtgacaaaatatggtggctggcgaaaccgtaaactgatcgacttttttatccgcttcgcatcaacggtcttcacgcgctataaagaaaaagtaaagtactggatgacgtttaacgaaatcaataatcaggtgaatttcagcgaaagcctgtgtccatttactaattccggtatcttgtattcgccagaggaagatatcaatgagcgcgaacaaataatgtaccaggcggtacattacgagttagttgccagtgccctggcggtacagactggaaaatcgatcaatcctgaatttaacattggctgtatgatcgccatgtatcccatctatcctctgacgtgtgtacccaacgatatgatgatggccacgaaagcaatgcatcgtcgttactggtttactgatgttcatgctcgtggatattatccgcaacatatgctgaattactttgccaggaaaggattcaacctcgatatcacaccagaagataacgcgattcttgccagtggttgtgtcgactttatcggctttagctactacatgtcttttacgacacaattttcgcccgataacccgcaactggattatgttgaaccacgagatttggtcagcaacccttatatcgatacatccgaatggggatggcaaattgatccggcagggctacgttattcactcaactggttctgggatcatttccagttgccgctgtttattgtcgaaaatggatttggtgcggttgaccagagacaagctgacggcacggtgaacgatcactatcgcattgattactttgcttcccatattcgggaaatgaaaaaagccgtagttgaagatggtgttgacttaattggctacaccccgtggggctgcattgacctggtttctgccggaacaggggaaatgaaaaagcgctacggaatgatttatgtcgataaagacaacgaagggaagggaacgctggaacggatacgtaaagcgtcgttttactggtatcgggatctcatcgccaacaatggcgaaaatatttga

SEQ ID NO: 461947 - DNA, 705 bp, Shigella boydii
atgtctatgccattaagcaatgcccttcagagtcaaattataacagataatcacttccttcatcatccaaaagtcgacaataagttaacacgtgaatatgaatatgcacgcatggatacggaaaatatctatcttctgcctcttactcgtggaaataaccataattacgatggaaaaagcgttgtcgaaattagaaaacttaatattggcaaacagtcctggccatttaattatgcgacagatacatgcagagaattcaatggtattacaacaacaggacgtatgctctatcgaaacttgaaaatcacctcagctttagacgaaatatatggtggtatatgtaaaaaggcgcatgctgctacagagttagcagaaggtttacggctaaatttatttatgaagagccctttcgatcctgttgaggactatacagttcatgaaataacattaggccctggttgcaatgttcctggttatgccggaaccacgataggatatatttcaacccttccagcttctcaggcaaaaagatggaccaatgagcagccaagaattgatatctatattgatcagataataactgtctcaggggtggcaaattcttccggattcgcccttgccgcattacttaatgctaatattggaatgggaaatgacccaataattggtatagaagctggtgatgctgccaacttactgatttag

SEQ ID NO: 461948 - DNA, 555 bp, Shigella boydii
atgatttacccaacaaatacaggcaaaagcggggaacaccttcgtctcaccacgctggaaagtgtctggattcagggaaaactgcgcatgtgggggcgctggtcgtatattggcggcggtaagacggggaatatgttcaaccagttgttggcctctaaaaagctgacaaaaacggcaattaacgaggcgctccggaggatgaaaaaagcaggtctgaacaagtctgaacttgaggcttttttgcgggatatgattaacggtaagcaaaagagctggctggcgcattgtactgatgcagaggcgttatgtattgatcgggtcataagtgaggtgctggcagagcatccaggattgattagcgtccttcggcaacggtatgaggggcgggggatgaccaaacgcaaaatggctgaactgctgaatgatgcacacccgaaatggagtttaagaacctgtgaaagacgcattgagcattggctaaaggtggcagaatttattttgtacaaaccaatggttatggcttttggtatagagaaaaaagttattgctttttga

SEQ ID NO: 461949 - DNA, 342 bp, Shigella boydii; identical to SEQ ID NO: 460954

SEQ ID NO: 461950 - DNA, 276 bp, Shigella boydii
gtggcttctgtttctatcagctgtccctcctgttcagctactgacggggtggtgcgtaacggcaaaagcactgccggacatcagcgctatctctgctctcactgccgtaaaacatggcaactgcagttcacttacaccgcctctcagcccggtacgcaccagaaaatcattgatatggccatgaatggcgtcggatgtcgcgccagtgcacgcattatgggcgttggcctcaacacggttttacgtcacttaaaaaactcaggccgcagtcggtaa

SEQ ID NO: 461951 - DNA, 1143 bp, Shigella boydii
atgagcggttggtttgacctgaccttaaatcagcgtgtttataatcaggacggtaaaacggcaaatgcggtcgttacctatgatggcaacgtgggtgagcagtataacgatgcctggtttggtgacagtgccaatgaaaatatcatgcagttcagcgatatttacctgacaacgcgaggttttttacccttcgcaccagaggcagacttctgggtcggcaaacataaactcccgcaatatgagatccagatgctggactggaaaaccttaaccacggatgtcgccgcgggtgtggggattgaaaactgggcacttggtgtagggctgtttgatatgtccttaagccgtgatgatgtcgatgtttactctcgtgatttttcgcgtaccagccagatgaataccaattctgtggatgttcgttatcgcaatatcccgttatgggatgatgcgacattatcattaatggctaaatattccgcacctaataaaacggatcaacaacaagataacgaaaatgacaacagttattttgaaatgaaagatagctggatgctgacttctgttttacggcaaaacctgcaacgcgatacgtttaatgaatttacgttacaggttgacaataattcctatgccagcagttttgccagtttctcagatgccagtaatacgatggcgcatggtcgctattactatggtgatcataccaatgggatcgcctggcgtttaatctctcagggcgagatgtatcttactgacaatattattatggctaacgcgcttgtctattctcacggcgaagatgtttatagttatgaaagtggtgctcatagtgattttgacagtattcgcactgtaataagaccggcctggatctggaatacatggaatcagacggggcttgaattaggctggtttaagcaacagaacaaaactcagcagggtgtaacactaaatgaatcggcttataaaacgacactctggcatgcattgaaagtgggtgaaagcattttaggttcacgaccagaaattcgcttctatggaacgtatatcaatattctggataacgaattatcgaattttaagtttaatgagaacagcaaagacgagtttatggccggcatccaggcggaagtctggtggtaa

SEQ ID NO: 461952 - DNA, 546 bp, Shigella boydii; identical to SEQ ID NO: 461170

SEQ ID NO: 461953 - DNA, 381 bp, Shigella boydii; identical to SEQ ID NO: 458903

SEQ ID NO: 461954 - DNA, 342 bp, Shigella boydii; identical to SEQ ID NO: 460954

SEQ ID NO: 461955 - DNA, 273 bp, Shigella boydii; identical to SEQ ID NO: 7046

SEQ ID NO: 461956 - DNA, 345 bp, Shigella boydii; identical to SEQ ID NO: 17687

SEQ ID NO: 461957 - DNA, 252 bp, Shigella boydii; identical to SEQ ID NO: 461451

SEQ ID NO: 461958 - DNA, 381 bp, Shigella boydii; identical to SEQ ID NO: 458903

SEQ ID NO: 461959 - DNA, 471 bp, Shigella boydii
atggctaataaccaagttattactttggggaaagagtggtgttatcagaatattgaatttaagataactgtggagcagctattagaatcagaaggagaggatggcattgatgactataaatttctttgttttaatggtcgcgttcattatatatgggttgataaaaatcgatttacaagccacaccagaactttttttgatcgagactggaatgtgataaatgtagaatcagatcatccagctgctagtttttctatagataagccttgggggtttgaaaaaatgctacatatcgctgaagatataggtaaagatttcccatttgctagagttgatttttatagtgtaaacaaaaaggtttattttggtgagataactttttatccatggagtggcatggtgcagtttcaaccagatagttttgattttgatatgggtgataaatttattctgccaaaagagatgttataa

SEQ ID NO: 461960 - DNA, 291 bp, Shigella boydii
atgatttatagatatatattaaatctatttcctgacactctatttattagattgcgatattttaaacgatttaagcgtattttacacttgagaaaaccgaagcgatttactgagaaaattatgtggtataaacttttttatcatgataatttgatgactatctgcgcagataagtatcgtgtaagagaatatataaaggaaaaggggttcggtgatatattggttccattgtttaaagtatataatactccagatgaaataaaaattgatgaattgcctagactaatttag

SEQ ID NO: 461961 - DNA, 513 bp, Shigella boydii
atggataaaggtgggtacttccaaaaagggtttgatgatacgattaaagcattaaattatattaattcagatgtttttttatcccatcggatacgtcttgttactattggtagtggtgagaaaaaaaaatattttaaagataaaatgagggatctaaaaaacatagcatttgaacattatgaaaatataaataatgaagctgttaatgacttaataatgcaggctgatgttatactcttaccatcaagatgtgaaggtatgtcaatgtttgcagtcgaagctatttcgctaggaaaaccaataattacgacaagaaatactggagttgatgatatatgtattgaaggagttaatagtctgaaatttgatatgtttaattatgttgagtatgcacaagctatcgaaaaaataatcaaagaaccgcatttgattagacaaatgggatataatgcttttgctgtttcaaaagaaaatgaaaagaaattaaaagcaaatatagaggcctttttgtga

SEQ ID NO: 461962 - DNA, 495 bp, Shigella boydii; identical to SEQ ID NO: 461605

SEQ ID NO: 461963 - DNA, 303 bp, Shigella boydii; identical to SEQ ID NO: 461664

SEQ ID NO: 461964 - DNA, 1290 bp, Shigella boydii
gtgcatacccgctatttaatattactgattatttttattgttaccgccgttaactacgccgatcgtgcaacgctgtctattgctggtaccgaagtggcaaaagagttgcagttaagtgcggtttcgatgggttacatcttctccgcttttggctgggcctacctgctgatgcaaattcccggcggctggctgcttgataagtttggctcgaaaaaagtttacacctacagcctctttttctggtcgctattcaccttcctgcaaggctttgttgatatgttcccgctggcctgggcagggatctctatgttctttatgctcggcttctcggaagcgccatcattcccggcgaacgcccgtattgtcgccgcctggttcccgacgaaagaacgtggtactgcctccgccatctttaactcggcgcaatatttctcgctggcgctcttttcgcctctgcttggctggctgactttcgcctggggctgggagcacgtcttcaccgttatgggggtgattggttttgtgctgacggcgctgtggatcaagttgattcataacccgacagatcacccacgtatgtctgcggaagagctgaagtttatctctgaaaatggcgcggtggtcgatatggaccacaaaaagccgggcagcgcggcagcaagcggtcccaaactgcattacatcaagcaattgctctctaaccgcatgatgttgggcgtatttttcggacaatattttatcaacaccatcacctggttcttcctcacctggttcccgatttatctggtgcaggaaaaaggcatgtcgattctgaaagtgggtctggtcgcctcgattccggcactgtgtggttttgcgggcggcgtgctgggaggtgtcttctcggattatctgatcaaacgcggtttatccctgaccctggcacgtaagctaccgattgtgctgggaatgttgctggcttccaccatcatcttatgtaactacaccaacaacaccacgctggtggtcatgctgatggcgctggctttttttggcaaaggatttggtgctctgggctggccggtgatttctgacaccgcgccgaaagagattgttggcctctgtggcggcgtctttaacgtctttggcaatgttgcctccattgtcactccactggtgattggctacctggtaagtgaactgcactccttcaatgcagcactggttttcgtgggatgttcagcgctgatggcgatggtctgctacctcttcgtagttggcgacattaaacgtatggaattgcagaaataa

SEQ ID NO: 461965 - DNA, 378 bp, Shigella boydii; identical to SEQ ID NO: 461419

SEQ ID NO: 461966 - DNA, 564 bp, Shigella boydii; identical to SEQ ID NO: 459104

SEQ ID NO: 461967 - DNA, 699 bp, Shigella boydii
atgacagagaaaactcttgccagtccgaaaccttcggaaattcccattgcaaataattttaaaaaagtcttcaggcaatatggcggtatcctcagtggaatggtggtgttaatcattctgttcagttttattaatgacagtttttttaccgccaacaacattactaatattattcttcaggtttcgataattgcaattaccgcctatggaatgacttatgtacttttgcttggcgatattgatttatcggtcggttcaaccattgcattgattggcacatttgctgcgcttggggcttcatggggaattccatttatgttattggtcccattatccattattgcagcactggctctggggatgataaatggtggcttgacggctatagcggggatcccgtcgtttattgtcaccgttgctactatggggatcttccgtggtatcgcttatatagtgaccgatggtatgcccatcatgattaaagatgatgcctttctggcactggggaatggagaatttctctatatacctattccaatctggatattaatcatcttattgctgattaaccacttcattcttactaaaacaacctttggacgaaaaatttatatcactggtggtaataaagaagcggcaatttattcaggggtaaatgtcacccgcttgaaaattaaggtgatgctgccaacttactga

SEQ ID NO: 461968 - DNA, 948 bp, Shigella boydii; identical to SEQ ID NO: 461553

SEQ ID NO: 461969 - DNA, 438 bp, Shigella boydii
gtgccaaaaccttctacccaggtagggcagaaagttctggataaaattttgaactataccaacaccgaaatgaaagaagcgatagcgcagcgtaaaccactggttaccaccgctgggccgcgtagtctgattttccgtggggccattaccggtgtagataccagcaaagaagggctgcaattctatgaagtggttcctgttgcattagtggttgcggggacgcaaatggctacaggtcaccgtaccatggatactcgcctctattttgaaggtgagctgattgatgcagcgactaataaaccggttatcaaagtcgttcgtcagggcgaaggtaaagacctgaataacgaaagtacgccaatggctttcgaaaatattaaacaagttattgatgacatggcgaccgatgccaccatgtttgacgttaacaaaaagtag

SEQ ID NO: 461970 - DNA, 420 bp, Shigella boydii
gtggctacgcagactgaagttgccaggcatttaagtctgaccgatcgccagcttcgcagattgcagaaattgccgggtgccccgatatcgaataagcgagggcaactggatctggatgcctggcgcgatttttacatatcgtatctgagaagaagtaaaaacgatgtgcctgatggcgatagcgaagacgactatgaggaaaaattgcttattgccagatgggaactgacagcagaacaggctgttacacagcagttaaaaaatgaggtgtcaaaaggaaaacttattgacaccgggttctgtatttttgccctcagcaagctggcaatggcgttatccagtactcttgattccatccctttatccatgcaacgacagtttcctggtaagcgtaaactgaccgccgtatgtagccattaa

SEQ ID NO: 461971 - DNA, 420 bp, Shigella boydii; identical to SEQ ID NO: 459063

SEQ ID NO: 461972 - DNA, 156 bp, Shigella boydii
atgattgatgtcttagggccggagaaacgcagacggcgtaccacacaggaaaagatcgcaattgttcagcagagctttgaaccggggatgacggtctccctcgttgcccggcaacatggtgtagcagccagccagttatttcgtaaggcagtatga

SEQ ID NO: 461973 - DNA, 546 bp, Shigella boydii
atgttgcatttaaaaaatattactgcgggcaatccgaaaaccgtggaacaatatcagctgacaaaacaatatgatgtcacctggcttttttcggaagacggaaaaaactggtatgaagagctgaagaatttcgccagcgacacaattaaaataacttacaccggagacggtcgcgtggtgtgggtcggtaaggatgtgacaggcattgaaccccgtaacgccagtgttattgaagttcctgatattaccgccaaccgccgcattaccgcgccgggttactggttttaccgcaatgatgaatttgtctttgactacagactcaaagcggaagatgagcgtgatgcccttctggctcaggtcagtgcccggacaggggaatgggaagaagacctgctgctggggctaatcagcgacgaagaccgggaaaaactgaaagcgtaccgcatttacgcgaaatcgctgcaggcgatggatttcagtgtcatcactgataaaacctcatacaacgccattgaatggcccgcctctccggaaatttcttcctga

SEQ ID NO: 461974 - DNA, 1194 bp, Shigella boydii
gtgcttttgccgttacgcaccacgccttcagtagcggagcaagaggcgggcaagagtttttgctgcctgcgcattgataatcttgagtttatgagtcgtcattacggcttaatgatgcgcgttcactgtatccgctcaatttgccgtacgctgctgccgttgatgcaggaaaacgaaaagttgtatcaattgccgggtagtgaactgctgttagtgctgagcgggccggaaacggaagggcgactccagcatatggttaacatcctgaatagtcggcaaattcactggaacaataccgggctggatatgggctatggtgctgcctgggggcgttttgatggaaatcaggaaaccctgcaacccttgttggggcagttaagctggctggcggagcaatcctgcgcacatcatcatgtgctggcgctggatagcagagaggagatggtttccgggcagaccactaaacaggtgctattgctgaataccattcgcacggcgttagatcagggtgatttgctgctctacgcccagccaattcgcaacaaagagggtgaaagttatgatgagatcctcgcgcgactgaaatatgacggcggcattatgaccccggataagtttctgccccttattgctcagtttaaccttagcgcgcgttttgatttgcaagtgctggaatccttgttgaagtggctggcaacacacccttgcgacaaaaaaggaccgcgcttttcagtcaatttaatgccgctcacgctgctgcaaaagaatattgccgggcggattattcgtctgtttaagcgttatcacatctccccgcaggcggtcattcttgagatcaccgaggagcaggcgttttctaacgcagaaagcagcatgtacaacatcgagcagctgcataagtttggtttccggattgcgattgatgactttggcaccggctatgccaactacgaacggttaaagcgtttgcaggctgatatcatcaaaattgatggcgtctttgtgaaagatattgtcacgaacacgctggatgcgatgattgtgagatcaattaccgatctggcgaaagcgaagtcattgagtgtggtcgcggagtttgtcgagacgcaacagcagcaggcgctattgcataagctcggggtgcaatatctgcaagggtatttgattggtcgcccgcagccattagctgattaa

SEQ ID NO: 461975 - DNA, 276 bp, Shigella boydii; identical to SEQ ID NO: 458859

SEQ ID NO: 461976 - DNA, 837 bp, Shigella boydii
gtgggctacatcgcctggctggcgaccgcttaccggatgagcttttcccgcgaaatcaatctgggcctggcgcaacatgagttcgaattgttctgtcagcctttgcttaatgcgcgcagccagcaatgtattggtgtagagattttgctgcgctggaacaatccgcgtcagggccggatttcaccggatgtgtttattcctatcgcggaagaacatcatttaattgtgccactgacccgctatgtgatggcagaaaccattcgtcagcgccatgttttcccgatgagtagtcagtttcatgttggcattaacgtcgcacccagccattttcgccgtggtgtgctgataaaagatctcaatcagtactggtttagcgctcacccgattcagcaactgatcctcgaaatcaccgaacgcgatgccttactggatgttgattatcggattgcccgcgagctacatcgtaaaaacgtcaaactggcgattgatgacttcggcaccggcaacagttcattttcctggcttgaaacattacgtcctgacgtgctgaaaattgataagtcatttaccgcagctataggttctgacgcggttaactcgacggtgaccgatatcatcatcgcgctggggcaaagactgaatattgaactggtggcggagggcgtggaaacgcaagaacaggcgaagtatttgcgccgtcatggcgtgcatattttgcaagggtatttgtacgcacagccgatgccgctacgtgattttcccaaatggctggcgggcagccaaccgccgcccgcccggcataatggacatatcacgcccattatgccgttacgttaa

SEQ ID NO: 461977 - DNA, 342 bp, Shigella boydii; identical to SEQ ID NO: 460954

SEQ ID NO: 461978 - DNA, 381 bp, Shigella boydii; identical to SEQ ID NO: 458903

SEQ ID NO: 461979 - DNA, 342 bp, Shigella boydii
atgtgtctcactaaaccagcattctcatattatattgcagcctatttaaaactttttattgaaaattattacgaagctgatgctttagtggatactattttaaatatgctcactcctcctgttaggaatggtatccccagcactacatggatagcaaaaaatcttgattgctttagtcgtaataaaagggtggctatttcttttacattccaatatttatgtaatgaatataatgatccaaatactgaaaaggcgttaaatatatattggggacagtatctgaatgaatcattgcttattaaaaatgtacagaactctaaaaataaatgtaaatcacagtaa

SEQ ID NO: 461980 - DNA, 420 bp, Shigella boydii; identical to SEQ ID NO: 461581

SEQ ID NO: 461981 - DNA, 243 bp, Shigella boydii
atgaagaaagtttttctttgcgccatcttggcctccttaagctatccggctatcgcctcatcattgcaggatcaactctctgctgtagcagaagcggaacagcaaggtaaaaatgaagagcaaaggcagcatgacgaatgggtcgcggagcgcaacagggaaatccagcaagagaagcaacgtcgcgcaaatgcccaggtcgccgctaacaaaagagcggcaacggcagcagcaaataagtaa

SEQ ID NO: 461982 - DNA, 762 bp, Shigella boydii; identical to SEQ ID NO: 461572

SEQ ID NO: 461983 - DNA, 156 bp, Shigella boydii
atgttgtcaggcctaattcagacaagtctaggttcgtctcttggttttgtagacatgatactagtcgctgaaaagcgatgtctcgttgttcttcttgtatgcggttatttttccattcagtccaatgggttagataactttcatatgcgcggctag

SEQ ID NO: 461984 - DNA, 165 bp, Shigella boydii
atgccgatcatagcaccaatttcccgtgacgaacgatgcctgatggagaaagccatccataaaacacatgataaatctatgttctgcgctttgataattttgacgatgccgttgagtggtaagcgcccagagaagtacgtagcggaaggattattttacagctga

SEQ ID NO: 461985 - DNA, 249 bp, Shigella boydii
atgcactcggttcgacggccagtcattgagcttcacgatcacttcgcgcaaccagtcctccggctccactccgttcagtttgcaggtgaccagcagactgtagataatcgccgcgctttctccaccgttgtcagaaccgaagaagagataattttttcttccaaccgccaccgatcgcagcgcgttttcaccgatgttgttgtcgatttccacctggccattacgacagtacacgttcaggctatctga

SEQ ID NO: 461986 - DNA, 348 bp, Shigella boydii
atgactaaaaatactcgtttttcccccgaagtccgtcaacgggcagtccgtatggttctggaaagtcagggcgaatatgactcacaatgggcgacaatttgttccattgctccaaagattggctgtacgccggagactctgcgtgtctgggttcgccagcatgagcgggataccgggggcggtgatggagggctcaccaccgctgaacgtcagcgtctgaaagagctggagcgtgaaaatcgtgaaccacggcagcctgacggctgcaaattgaaaaccgcccctgttcgtcctgttgttgccgcacgctccgcagaatatgtatgctctgaggacctgttttattaa

SEQ ID NO: 461987 - DNA, 189 bp, Shigella boydii
atgttgacccgcaaaagtatagttcccgttctgctctctgttggtgctgagaagctctcacaacgtgaatgggactggatgaagatgctcaaacccatggacccaccacctgcgatggtcgcggcctccatcctggagcgccgtggcgacacagcagcccttacccggctacaggataccgggggttaa

SEQ ID NO: 461988 - DNA, 342 bp, Shigella boydii; identical to SEQ ID NO: 460954

SEQ ID NO: 461989 - DNA, 300 bp, Shigella boydii
atgctggaaaaatctctggcaacacttttcgcgttgttaattttagcaacgctgataaaccgttttctgctatggcggttaccggagagaaaagggggtgaggttacattacgtattcgtacctggtggggcatcgtcatttgtttttcactggtgatttcaggtccacgctggatgacgttggcgttttttgcgctgataagttttctggcattgaaagaatattgtatgcttatatccgtacattttccgcggtggttatattgggttattcctcttaactatttgcttatcgggtaa

SEQ ID NO: 461990 - DNA, 606 bp, Shigella boydii
atgacgctctaccagataaaaccgctctttcagtcgctgttaaggccgacgatgttttggctttataagcaccacgttacagcgaatcacatcactcttacggcactggcgctttctctttttaccggattgctgttggtgttggtggcacaacccatcctctttttgctattgcccatcgtgctttttatccgtatggcgctcaatgcgctggatggcatgttggcgcgtgagtgcaatcagcaaacacgtctgggggcgattttgaatgaaactggcgatgttatttccgatattgcgctctatttaccgtttttatttttaccggaaagtaacgcatcactcgtaatactcatgttattttgcaccatattgactgagttttgcggtttactcgcgcagacgattaacggtattcgtagttatgccggtccattcggcaaaagcgatcgcgcgttaatatttggtctgtgggggctagccgttgccatttatccacagtggatgcaatggaataatcttttatggagcattgcttcaattctgcttctctggactgcgattaatcgttgtcggagtgtgctttttatgagtgctgaaagataa

SEQ ID NO: 461991 - DNA, 561 bp, Shigella boydii
atgctcggtagccagacgtttgtcgtgttgtgtgcctgcgcaatattacgctggcagctggggacgcgttggcgttatggattgaccagccgatatgtctggcaacgtctgttctggcttggtttggtgacgccgatcggcatcaaatgcagcatgtatcttgtggggagcttctttgatttcccgctaaagatatccacctttttcggcgatgcggatgccattttcacggtcgttgatttgctaagccttttcaccgctgtgctgatttacaacatgcttttctactatctcactcgcatgattgtaagtccccactttgcgcagatattgtggcgcagggatatcgcgccgtcgttgggcaaagagaaacgcgcatttaccttaagctggctggcagcgttaagcgtgcttctacttctgttgtgcacaccttatgaaaacgactttattgccggttacctggtacccgttttcttcatcatctttaccctcggggtcggtaagcttcgctatccgtttttaaatctcacctgggctgtttcaacgctttgccggtaa

SEQ ID NO: 461992 - DNA, 177 bp, Shigella boydii; identical to SEQ ID NO: 461613

SEQ ID NO: 461993 - DNA, 450 bp, Shigella boydii; identical to SEQ ID NO: 461614

SEQ ID NO: 461994 - DNA, 198 bp, Shigella boydii
atgctaaaacagcaggatatgacagaaaccgccagagtggtgtttaatgaattaagcgtcaccgaaccggcgacagtcggggagattgcgcagaatacttacctttcacgcgaacgctgtcagttaatactgacccaacttgttatggcgggtctggcagactatcagttcggttgttacagacgccttcagtcctga

SEQ ID NO: 461995 - DNA, 345 bp, Shigella boydii
gtgctggaaaataccggcgaactgacggtagtggctaaaacctcggcgaaaaatactaccgttgatgctggcggtaagctgattgtccagaaggaggctaaaacagataccaccagacttaataatggtggcgttctggaggttcaggacggtggtgaggctaagcatgttgagcaacaatccggcggcgcattaattgcttccacaacttccggaacccttatcaaaggaaccaacagttatggtgatgctttctacatcaggaattcagaagctaaaaatgtagtgctggaaaacgctggctcattaacagtcgtcactggttcccgggcagttgatacgtag

SEQ ID NO: 461996 - DNA, 369 bp, Shigella boydii
atgtctggaaatataggggcaaatccagcgcgcccgtgggtagattctggcaaagtgcaattaagaacattgttggttggggttatcaagccagaaagcccggcgacagcagcggcaattcttgcctccaaagatcccgcaaaaacctggcaacaatataaagcctctggtggcaagcttaagctaaacgtgcctgcaaacgtaagtacagagcaaatgaaagtgttaagtgacaatgagaaactgatggacgatctgggggcaaatgtcacgccggctatctattacatgagtaaggaaaatacgctacaacaggccgtggggttgcccgatcagaaaacgcttaatatcattatggggaataaataa

SEQ ID NO: 461997 - DNA, 381 bp, Shigella boydii; identical to SEQ ID NO: 458903

SEQ ID NO: 461998 - DNA, 342 bp, Shigella boydii
atggcgctcaggagccagcgcccacctgccgggctaatccaccactctgatcgaggttcacagtactgcgcatacgattaccgggtcatacaggagcagtctggtctgaaaacatcaatgtcgcgtaaaggtcactgttacgacaacgctccgatggaaagcttctggggaacgctgaaaaatgagagcctgagccactatcgttttaataaccggaatgaagccatctcagtaatacgggaatacattgagattttctacaatcgtcagcgtcgtcactctcgtctggggaatatctccccggcagccttcagggaaaaatatcatcagatggctgcttaa

SEQ ID NO: 461999 - DNA, 702 bp, Shigella boydii
atgttggatgcagtattcaatcatttaggcgctgactctccaatatggcttgacgttgtacgcaatggtgccaattcacgttacgccgattggttctggattcataaattgcctgtttatcccgatactccaaaaagtgaatgggattttaaaaactttaactatgaaacctttggcaatgttattgaaatgcctaagctaaatactgagaatgaagagtgccgtgaatacttacttagtatagttcgctattggacgcaaaattttgatattgatggttggcgtctggatgttgcgaatgaagtggatcatcatttctggcgagatttcagaaaggtgattaaagatatcaaacctgaatgttatattttgagtgagatatggcatgagggcaccccctggttgcgtggtgatcagtttgattcattaatgaattatcccttaacatatgggattattgattattttgcgttacaggatacaacaaaacaagaatttatgacatccgttacacgttcttatctttgttatcctaaaaatataactgaagttatgtttaatcttctggatagtcatgacaccgcgcgtattttaagcgtttgtttgaatgataaacgaaaagttaaactcgcctatttatttatgttaactcaagcgggctctccttgtatctactacggggtaatgctgccaacttactga

SEQ ID NO: 462000 - DNA, 420 bp, Shigella boydii
atggaacagaaagcattatctgcagaaccccgcagatcattttcaaatgagtttaaacttcaaatggttaaactggcttcacaaccaggagcctctgttgcccgtattgcccgggaacacgatatcaatgataacctgctgttcaaatggctcaggctctggcagaacgaagggcgcatatcgcggcgtcttccggtaacaacctcttctgacactggcgttgaattattacctgtggagataacgccggatgagccgaaagaaccggtggctgctcttactccgtctttatctactcagactacagttagtgccagctcctgcaaagtggagttccgtcacggtaacatgacgctggaaaatccttcaccagagctgctcacagtgttgatccgtgaactgaccgggaggggacgatga

SEQ ID NO: 462001 - DNA, 525 bp, Shigella boydii
atgtcgctcgtttgttctgttatatttattcatcatgccttcaacgctaacattttagataaagattacgccttctctgacggcgagatcctgatggtagataacgctgttcgtacgcattttgaaccttatgagcggcattttaaagagatcggatttactgaaaataccattaaaaaatatctacaatgcactaacatccagacagtgacggtgcctgttcctgcgaagtttttacgtgcttcaaatgtaccgactggattgcttaatgaaatgattgcttatctcaactcggaagaacgcaatcatcataatttttcagaacttttgcttttttcttgcctgtctatttttgccgcatgcaaaggtttcattacactattaactaacggtgtgctatccgtttccggaaaagtgagaaatattgtcaacatgaagctggcgcacccatggaagctgaaagatatttgtgactacatgaggtgtactggcaatagcggacactaccatttgttctttttttaa

SEQ ID NO: 462002 - DNA, 501 bp, Shigella boydii
gtgctggcgtgggcacaggagatgaatctgccgtgcaaaacgttgttgaaagggttggatgaagctatcgcccggcgcggaactaaagatgaagatttctctgaggaagacatccgcgatatcaatgacagcctgatcctcgatacaccggaatctccactggcagatgcggtggcaaacgtcttaaccatgacgttgctgaaaaaagcgcagttgaagtccacggtgatgccacaggttcagcaatatgcgtgggataaagcggcaaacagcaatcagccgctggcgcacacggttgtgctgctcaatagcggtggtgacgctacccagacggccgctattttaagtggtttgaccgctgagcaatccactattgagcgagcgctggccatgaactggctggcgaaatatatggcgacaatgcctccagttgttttgcctgcgcctgcgggcgcatgggctaaacataagttaactggagggggcgaatactggcgttga

SEQ ID NO: 462003 - DNA, 156 bp, Shigella boydii
atgaaagaaaaaattattgccgaaaatgatataaatgactctcccttcaactcaaaaacaatcaaagccaaagccaaaaacaatgttaatatatttcttcgttcaagcccagaattcttaataattaatataagtggcaatattaacatcatatag

SEQ ID NO: 462004 - DNA, 141 bp, Shigella boydii; identical to SEQ ID NO: 5443

SEQ ID NO: 462005 - DNA, 240 bp, Shigella boydii; identical to SEQ ID NO: 461624

SEQ ID NO: 462006 - DNA, 342 bp, Shigella boydii
atggcgctcaggagccagcgcccacctgccgggctaatccaccactctgatcgaggttcacagtactgcgcatacgattaccgggtcatacaggagcagtctggtctgaaaacatcaatgtcgcgtaaaggtcagtgttacgacaacgctccgatggaaagcttctggggaacgctgaaaaatgagagcctgagccactatcgttttaataaccgggatgaagccatctcagtaatacgggaatacattgagattttctacaatcgtcagcgtcgtcactctcgtctggggaatatctccccggcagccttcagggaaaaatatcatcagatggctgcttaa

SEQ ID NO: 462007 - DNA, 285 bp, Shigella boydii; identical to SEQ ID NO: 461629

SEQ ID NO: 462008 - DNA, 303 bp, Shigella boydii; identical to SEQ ID NO: 461206

SEQ ID NO: 462009 - DNA, 297 bp, Shigella boydii
ttggggctgaaaaaagactttaactttggggaaattacggcggcggatattggtcgtatgaatgtgactaaagaagagcgtgataaattgcgccagaaagtacccggtttacgtaacgttgctttaacggcaccgtacttccatcgcggtgacgtgccgacgctggacggggcggtgaaactgatgctgcgctatcaggtaggcaaagagctgccgcaggaggatgtggatgatatcgtagctttcctgcacagtctgaacggggtgtacacgccgtatatgcaggataaacaataa

SEQ ID NO: 462010 - DNA, 426 bp, Shigella boydii
ttggagtcattaccgcgtaatgattacgcaggtgtcgaaaaactcggatataaccgtgcgattaaccgtaaaaaatatcacagtaaagagataacccgagaactgaacgatgaagctacattaaggcatgcggtatatcatgagttgtcgcgtttaattacacctcgtcgcagccataacgagtttcatccggataataattttaccatcgatacgattaattcatccgtaatgcgtattcaaagaagtaacgctgatggtaattgtctgactggattgtttaatgtcagtaaaaatattcagcatgtaaatattactaatctgcatggtcgggatctgattagtgaagttgatatattgggtaatgaaataacgctgcgcccctggcaggttatgtggattaaggtaatgactccaacttactga

SEQ ID NO: 462011 - DNA, 162 bp, Shigella boydii
atgggaacaaaagcgcatgacctttttgtgttgcctttgtgcagaaaacaccatgacgaactgcatgcggataccgtggcatttgaagagaagtatggctcccaactggagctgatatttcgttttatcgatcgcgcgctggcgattggtgtgctgtcctga

SEQ ID NO: 462012 - DNA, 261 bp, Shigella boydii
ttgcgagcgggtaatggatatcttaccgtcacgcaccgcaggccagataaactgaccttcctcaaggcgtttggtgaacaggcacagaccatcagcatcagcccacaggattttaatcgtgtctccccgtcggccacggaagataaacaggtgaccggagaaggggttatcattcagcacatgctgtacctgttcacccagcccgttgaaagacttacgcatatcggttatcccagcaacgagccagatgcgggtgcctga

SEQ ID NO: 462013 - DNA, 225 bp, Shigella boydii
gtgcagttctatcccgggaaacatccgtgcgaaaaaccggcagaaatgctgcagcagataatcagcgcaagcagtcgtccgggtgatctggttgcagattttttcatggggtcgggttcaacggtaaaagcggcactggcgctcgggcgtcgtgcgattggcgttgaactggagacaggacgttttgagcagacagtcagggaagttcaggatttaatcgtttga

SEQ ID NO: 462014 - DNA, 237 bp, Shigella boydii; identical to SEQ ID NO: 461667

SEQ ID NO: 462015 - DNA, 342 bp, Shigella boydii
atggcgctcaggagccagcgcccacctgccgggctaatccaccactctgatcgaggttcacagtactgcgcatacgattaccgggtcatacaggagcagtctggtctgaaaacatcaatgtcgcgtaaaggtcactgttacgacaacgctccgatggaaagcttctggggaacgctgaaaaatgagagcctgagccactatcgttttaataaccgggatgaagccatctcagtaatacgggaatacattgagattttctacaatcgtcagcgtcgtcactctcgtctggggaatatctccccggcagccttcagggaaaaatatcatcagatgactgcttaa

SEQ ID NO: 462016 - DNA, 381 bp, Shigella boydii; identical to SEQ ID NO: 458903

SEQ ID NO: 462017 - DNA, 435 bp, Shigella boydii
atggataaacctacagactggcgctccggaacccgccggatattttctaatgaatttaaacttcatatggttgaactggcttcgaaaccaaatgccaatgttgcacaactggcccgggaacatggcgttgataacaacctgatttttaaatggctacgcctctggcaaagagaaggccgtatttctcgtagaatgcctccaactattgtaggccctacagtatcacaatcttttccggcctctccgactctggttccagtggaacttatcgaccccccgcgctgtgctacagatgctcctgctccggaggcattatcagttgcttgtgcagcttcctgccatgtggaattccattacggtaaaatgatgctggaaaatccttcaccagagctgctcacggtgttgatccgtgagctgaccgggaggggacgatga

SEQ ID NO: 462018 - DNA, 432 bp, Shigella boydii
atgtttcggcgttcgtttttcattgaggtcggcggatatagtgaggattttaaaaaagctcaagactatgaactttggattaaggctttaataaatgataaagggatatataatattcagactcccttattatactatcgtatgcattctgaaaatatttcgacaaaaaatattgatgaacaacattattattcaataaaggcaaaagtactactgtattcattttttatggatcagcagcaatcattgaaaatcatagattatatagagggacagcaaggcaatgttcatattatacgtgtgttaaaattcttttttgttttagctgggcgattaaataaaaaaattaatggtttttcatatatatatttcttctttttattggtgaaaaggttgatttacataaaaattataagacgtgctattttttag

SEQ ID NO: 462019 - DNA, 186 bp, Shigella boydii; identical to SEQ ID NO: 461729

SEQ ID NO: 462020 - DNA, 555 bp, Shigella boydii
atggagcgggcgttccccgaagcactggaacggatgaaagagagactgccaccgtatctcattatggttctggaaaaccagtacaaccgactgaatgagctggactcactgatagaggatattgaaaaacagcttaccagcgtggcgaggcagaatgaaacctgtaagcggttgctggatattcctggcgttggaccacttattgcgacggcagcggtggccaccatgggggaagcatcagcgtttaaatcggggcgagagttcgccgcatatgttggtctggttccaaaacaaacaggctccggagggaaagtacgtctgctggggataagcaaacgtggtgacacttatctcaggacattatttatccacggtgcaagagcggtggcattagtagctaaagagcctggcccgtggataaccgaactgaaaaaacgtcgtccagccagtgtggcaatcgtcgccatggcaaacaagctggcacgaacagtatgggcgataaccgcccatgaccgtaagtatgacaggaaccacgtcagtatcataccatattaa

SEQ ID NO: 462021 - DNA, 360 bp, Shigella boydii; identical to SEQ ID NO: 461764

SEQ ID NO: 462022 - DNA, 597 bp, Shigella boydii
atgccattctatttcaggaaggagtgtccgttaaactcaggctacctcagcattcgtgtctcgttatccattgatattctttactttatcacgtcttcgtggaaaagcgttctgttctggattttgacggcgttaattttgctgaatatggtccggatgcacttccgtttataccaaaatgtgtcgcgagaaaatattagtgatgcgatgactggactgtataatcacaaaattttaacccctgaactggagcagcggttgcagaaactggtgcaatccggttcttcggtgatgtttattgcaattgacatggacaagttaaagcaaataaatgacaccctcggtcatcaggagggggatttagcgattacgttattagctcaggcgattaaacaatcgattcgtaaaagtgattatgccatccgactcggtggcgatgaattctgcatcattcttgtcgattcgacgccgcaaattgcagcacaactgcctgaacgtatcgaaaaacgtctgcaacatatcgcgccgcagaaagaaatcggcttctcttccggtatttacgcgatgaaagaaaacgatacgtttgaggtagcctga

SEQ ID NO: 462023 - DNA, 381 bp, Shigella boydii; identical to SEQ ID NO: 458903

SEQ ID NO: 462024 - DNA, 420 bp, Shigella boydii; identical to SEQ ID NO: 461652

SEQ ID NO: 462025 - DNA, 432 bp, Shigella boydii
atggattctgcccatcaacatatgcataactgtggtcgggaattaatgctggctattgttgaaaatcactggcaggacgcgcatttcgacgcctttcaggaggggttgctttcttttactgcggcattaaccgattacaaaatttatttgctgacgatccgtagcaatatggatgttttgacgggattgccggggcgtcgggttcttgatgaatcctttgatcatcagttacgcaacactgagcctctgaatctttatttaatgttgttggatattgaccgatttaaattggttaatgatacctacgggcatttaatcggcgatgtagtattacgcaccctggcaacttacttagccagttggacgcgtgattacgaaacggtttatcgctacgggggcgaagaatttatcattattgtcaaagtgaggtag

SEQ ID NO: 462026 - DNA, 327 bp, Shigella boydii
atgactaaaaatactcgtttttcccccgaagtccgtcagagggcgattcgtatggttctggaaagtcagggcgaatatgactcacagtgggcggcaatttgttccattgccccaaagattggctgtacaccggagactctgcgtgtctgggtacgccagcatgagcgggataccgggggcggtgatggagggctcaccaccgctgaacgtcagcgtctgaaagagctggagcgtgaaaatcgtgaactgcgccgcagtaacgatatccttcgccaggcttccgcttattttgcgaaggcggagttcgaccgcctctggaaaaagtga

SEQ ID NO: 462027 - DNA, 420 bp, Shigella boydii; identical to SEQ ID NO: 461652

SEQ ID NO: 462028 - DNA, 327 bp, Shigella boydii
atgactaaaaatactcgtttttcccccgaagtccgtcagagggcgattcgtatggttctggaaagtcagggcgaatatgactcacagtgggcggcaatttgttccattgccccaaagattggctgtacaccggagactctgcgtgtctgggtacgccagcatgagcgggataccggaggcggtgatggcgggctcaccaccgctgaacgtcagcgtctgaaagagctggaacgtgaaaatcgtgaactgcgccgcagtaacgatatccttcgccaggcttccgcttattttgcgaaggcgaagttcgaccgcctctggaaaaagtga

SEQ ID NO: 462029 - DNA, 267 bp, Shigella boydii
atgttgggacttgaaccgaagaacacggcggtgcggagtccggagagtaacggaatagcagagagcttcgtgaaaacgataaagcgtgactacatcagtatcatgcccaaaccagacgggttaacggcagcaaagaaccttgcagaggcgttcgagcattataacgaatggcatccgcatagtgcgctgggttatcgctcgccacgggaatatctgcggcagcgggcttgtaatgggttaagtgataacagatgtctggaaatatag

SEQ ID NO: 462030 - DNA, 273 bp, Shigella boydii; identical to SEQ ID NO: 7046

SEQ ID NO: 462031 - DNA, 270 bp, Shigella boydii
atgaataaagggctgattgataaaaataacaatttttttatccaacttatcgatcaggccttacgatcaacggatgatatgatcaaagcaaatgcctggtatctttataaagagtggattcgtagtgatgatgtttcacctatatttatagaaactgaagaaaagttaagaacctttaacactaataaattaacacgaaacgataatatatttatcctgttctcctctgtcgatgatgggcctgttatggtggtaagctcccagcgctaa

SEQ ID NO: 462032 - DNA, 186 bp, Shigella boydii; identical to SEQ ID NO: 459562

SEQ ID NO: 462033 - DNA, 255 bp, Shigella boydii
ttgacggaagcaggatgctgggctcatgcgcggcgcaaagtccacgatgtatatatcagtaccaaaagcgcgacagcggaagaagccctgaaactaatcggtgagctgtacgccatcgagcacgaaatacgcgggttgccggtgtctgaacgcctggcggtcaggcaaatgcagagtaaaccgctactgacttccctgtataagctgatgcaggagaaagaacacacgttatcggtgatgctgccaacttactga

SEQ ID NO: 462034 - DNA, 267 bp, Shigella boydii; identical to SEQ ID NO: 462029

SEQ ID NO: 462035 - DNA, 426 bp, Shigella boydii; identical to SEQ ID NO: 462010

SEQ ID NO: 462036 - DNA, 360 bp, Shigella boydii; identical to SEQ ID NO: 461764

SEQ ID NO: 462037 - DNA, 276 bp, Shigella boydii; identical to SEQ ID NO: 458859

SEQ ID NO: 462038 - DNA, 342 bp, Shigella boydii; identical to SEQ ID NO: 460954

SEQ ID NO: 462039 - DNA, 372 bp, Shigella boydii; identical to SEQ ID NO: 461665

SEQ ID NO: 462040 - DNA, 360 bp, Shigella boydii
atgcaggagaaagaacacacgttatcgaaaaaatgccgtctgagagatgcgttccggtatatcaggaagcactgggttgcgttgtgcaacttcagtgatgatggtctggctgaggcggataataatgccgcggaaagagcgcttcgtgcagtctgtctcggaaagaaaaattacgtgttcttcggtagcgatcacggcggcgagcgtggagcactgctgtacgggctgatcggcacctgccgactgaacggtatcgatccggaagcgtatctgcgccatgttctgagcgtactgccggaatggccctccaaccgtgttgacgaactcctgccatggaacgtagtactcaccaataaataa

SEQ ID NO: 462041 - DNA, 210 bp, Shigella boydii
gtgggtgacccctccggttttctgcataccgtgagcgccattttttggggctggataatgaccgttttcgccttgagtcatgccgcctggttattaatgttgccatccatgaatatccagggcggggccttactggtgttatttcttttggcattaaccgcgtcaaacgatattgcacagtatttatgggtaatgctgccaacttactga

SEQ ID NO: 462042 - DNA, 123 bp, Shigella boydii; identical to SEQ ID NO: 461677

SEQ ID NO: 462043 - DNA, 261 bp, Shigella boydii
ttgcgagcgggtaatggataccttgccgtcacgcacagcaggccagataaactggccttcctccaggcgtctggtgaacaggcacagaccatctgcatcagcccacaggattttaatcatgtcaccccgtcggccacggaagatgaacaggtgaccggagaagggattatcattcagcacatgctgtacctgttcacccagcccgttgaaagacttacgcatattggttatcccagcaacgagccagatgcgggtgcctga

SEQ ID NO: 462044 - DNA, 276 bp, Shigella boydii; identical to SEQ ID NO: 111883

SEQ ID NO: 462045 - DNA, 1626 bp, Shigella boydii
atgacagtattcaacaaatttgctagaagttttaaatctcattggttgttgtatctttgtgttattgtttttggtattacgaacttagtcgcctcttccggcgcgcatatggttcagcgattgctgttcttcgtcctgaccatcctggttgtaaaacgtatatcatcccttccgcttcgcctgcttgttgccgcaccatttgtgttactgactgcggcagacatgagtattagcctctattcatggtgtacctttggtacaactttcaatgatggatttgcgattagtgtgctccagagtgatccggatgaagttgtcaaaatgctggggatgtatatcccttatctatgtgcctttgcttttttatcccttcttttttgggcagtaataataaaatatgatgtttccttgccgacaaaaaaagtgacaggaatattattgctgattgtcatttcgggcagtttattttccgcttgtcaatttgcttataaagatgcaaaaaataaaaaaacgttcagtccatatatactagcgtcgcgatttgctacctatacgccgtttttcaatctcaactattttgctttagcagcgaaagagcatcaaagattactctcaattgcaaacacggtgccgtattttcaattatcagtcagggatacaggtattgatacctacgtgttgattgtgggggagtctgtacgtgtcgacaatatgtctttgtatggatatacacgctctacgacaccgcaagttgaagcacaaagaaaacagatcaaactgtttaatcaagcaataagcggcgcaccttacactgcgctgtcggttcccctttctttaactgctgattctgttttgagtcatgacattcataattaccccgacaacattattaatatggctaatcaagcaggatttcagactttctggctaagctcgcaatccgcttttcggcagaatggtactgcagttaccagtatcgccatgcgcgccatggaaacagtttatgtcagaggatttgatgaattgttgttgccgcatttatcgcaagcattacagcaaaatacgcagcaaaagaaactgattgttcttcatttaaatggaagccatgaaccggcttgtagcgcctatccgcaatccagcgccgtgtttcaaccgcaggacgatcaggatgcctgctatgacaactccattcattacacagatagtttgctaggtcaggtttttgaattattaaaagatcgccgcgcctcggtcatgtattttgccgaccacggcctggaacgtgaccctacgaagaagaacgtctattttcatggaggcagggaggctagccagcaggcatatcatgtcccgatgtttatctggtatagccccgttcttggggatggcgtggatcgcacaacggaaaacaacatcttttcgacagcttacaataattaccttattaatgcgtggatgggggtaacaaagccggaacagccgcaaacgcttgaggaagtgattgcacactataaaggagactcacgggttgtggatgcaaaccatgatgttttcgattatgtgatgttcagaaaggagtttacagaggataagcaaggtaaccccccccctgaagggcagggttga

SEQ ID NO: 462046 - DNA, 150 bp, Shigella boydii
atgagcaatgtagaccgtttatatcaaacggttccgcagttgattaaacaatttgtcttcggcggcgaatgtgaaacgccggtgcgtaaggcgaagcacggtgattccagcggcgtacgcggcgctgcgtggttatggccacaagagtaa

SEQ ID NO: 462047 - DNA, 189 bp, Shigella boydii
atgttgacccgcaaaagtatagatcccgttctgctctctgttggtgctgagaagctctcacaacgtgaatgggactggatgaagatgctcaaacccatggacccaccacctgcgatggtcgcggcctccatcctggagcgccgtggcgacacagcagcccttacccggctacaggataccgggggttaa

SEQ ID NO: 462048 - DNA, 150 bp, Shigella boydii
atgaaaggactgaccgtcttcgcccgaccgcaaaaaattcccgcaattaccggtatgcatgcgggtgatttacagcccgatgtgatctttccccatgatccactatcacagaatgctctatcattggcgcttaaactgaaacgtggataa

SEQ ID NO: 462049 - DNA, 1026 bp, Shigella boydii
atgagtaacggcattgtgatcatcggttcgggcttcgccgcccgccaactggtgaaaaatattcgcaaacaggacgccactattccattaaccctgattgccgccgacagcatggatgagtacaacaaacctgacctcagccatgttatcagtcaggggcaacgtgccgatgaccttacccgccagacggcgggtgaatttgccgagcagtttaatctgcacctgtttccacaaacctgggtgacggatatcgatgccgaagcccgtgtggtgaaaagccagaataatcagtggcaatacgacaagctagtactggcaaccggtgccagtgcctttgtcccgcctgtgcctgggcgtgagttaatgctgacgttaaatagtcagcaagagtatcgcgcctgtgaaacgcaactgcgggatgcccgacgcgtgttgattgttggcggtggtttgattggtagcgaactggcgatggatttttgtcgtgcaggcaaagcggtcacgctaatcgacaacgctgccagtattctggcgtcgttaatgccaccggaagtaagcagccgcttgcagcatcggttgacggagatgggcgttcatctgctgttgaaatctcagttacaggggctggaaaaaacggattctggcattctggcaacgctggaccaccagcgtagtatcgaagtggatgcggtaattgccgccaccggactgcgcccggaaacagccctggcacgacgcgccgggctgacgattaatcgcggcgtttgcgtcgatagttatctgcaaaccagtaatgacgatatttatgcgctgggcgattacgcggaaatcaacggtcaggtactgccattcctgcagccgattcaacttagcgcgatggtgctggcaaaaaatcttctcggcaataacacgccgctgaaactaccgacgatgctggtgaaaatcaaaacgccggaattaccgctgcatctggcaggcgaaacccagcgtcaggatttacgctggcaaattaataccgaacgctag

SEQ ID NO: 462050 - DNA, 1458 bp, Shigella boydii
atggccaaaaattatgcggcgctggcacgctcggagatagcggcactgggcggcgttgataacatctcggcggtcacgcactgtatgacgcgtttgcgctttgttatcaaagatgaccagcttatcgacagcccgacgttaaaaaccatccccggcgtgctcggcgtggtacgtagtgacaaccagtgtcaggtgattatcggcaataccgtttcacaagcctttcaggaagtcgtcagcctgctgccgggagatatgcagcccgcacagcccgtgggtaaacccaaactcacgccgcgtcgcattggtgcggggatcctcgatgcgctgatcggcaccatgtcaccgctgatcccggcgattatcggcggatcgatggtcaaactgctggcgatgatcctcgagatgagcggcgtgctgacaaaaggatcgccgaccttaaccattctgaatgtgattggtgacggtgctttcttcttcctgccgctgatggtcgcggcatctgccgccatcaaatttaaaaccaatatgtcgctggcgattgccatcgcgggtgtgctggtacatccgagttttattgaactgatggcgaaagcggcccagggtgaacatgtcgaatttgccctgattccggtcaccgcggtgaaatacacctacacagtgatcccggcgctggtgatgacctggtgcctgtcatatatcgaacgctgggtggatcgcattacaccggcggtgaccaaaaacttcctcaagccaatgctgattgtgttgattgccgcaccgctggcaatcctgctgattggcccgattggtatctggatcggtagcgccatttcggcgctggtttacagcattcatggttatctgggctggctttcagtcgccattatgggcgcgctgtggcctctgctggtaatgaccgggatgcaccgcgtctttacgccaaccatcattcagaccattgccgaaaccggcaaagaagggatggtcatgccgtcagagatcggcgctaacctgtcgctgggcggttcatcactggcggtggcgtggaaaacgaaaaacccggaactgcgccagacggcgctggctgcggcggcatcagccattatggcggggatttccgaaccggcgttatacggcgtggcgatccgcctgaaacgtccgcttatcgccagtcttatcagcggttttatttgcggcgcggttgccggtatggcggggcttgccagccactcaatggcagcgccggggctatttaccagcgtgcaattcttcgatccggcgaatccaatgagcatcgtctgggtgttcgcggtcatggcgctggcggtggtgctgtcgtttatcctcacactgttgctcggctttgaggatattcctgttgaggaagcggctgcccaggcgcgaaagcatcagagcgtacaaccgaccgtcgccaaagaagtaagtcttaattga

SEQ ID NO: 462051 - DNA, 777 bp, Shigella boydii
atgcctcgttttgcagctaatttatccatgatgttcaccgaagtgccttttattgaacgcttcgccgcagcgcgaaaagccgggttcgatgctgtggaatttctgtttccctatgactactccaccctgcaaatccaaaagcaactggagcaaaaccatctgacactggcgctgttcaataccgctcccggagatattaatgcgggggaatggggattatccgcccttcccggacgtgagcacgaagcacacgcagacatcgacctggcactggaatatgcattggcgctcaattgtgaacaagtccatgtgatggcaggcgtcgtgcccgctggcgaagatgctgaacggtaccgggcagtatttatcgataatctccgctacgctgccgaccgctttgcgccacacggcaagcgaatattagttgaagcactcagccccgacgttaagcctcattatctcttctccagccagtatcaggcactggctattgttgaagaggttgcgcgagataacgtgtttattcaactagatacttttcatgcgcaaaaagtagatggcaacctgacgcatttaatccgcgactacgctgggaaatatgcgcacgtacaaattgccggactacctgatcgacatgaaccggacgatggagaaatcaactatccgtggctgttccgcctgttcgatgaggtgggatatcagggctggatcggttgtgaatataaacctcgtggcctcaccgaagaagggcttggctggtttgacgcctggcgctaa

SEQ ID NO: 462052 - DNA, 519 bp, Shigella boydii
atgaaccaaacccgtactattcgtttgccgattcacatcgtaaaggagctgaacgtttacctgcgaaccgcacgtgagttgtcccataagctggaccatgaaccaagtgcggaagagatcgcagagcaactggataagccagttgatgacgtcagccgtatgcttcgtcttaacgagcgcattacctcggtagacaccccgctgggtggtgattccgaaaaagcgttgctggacatcctggccgatgaaaaagagaacggtccggaagataccacgcaagatgacgatatgaagcagagcatcgtcaaatggctgttcgagctgaacgccaaacagcgtgaagtgctggcacgtcgattcggtttgctggggtacgaagcggcaacactggaagatgtaggtcgtgaaattggcctcacccgtgaacgtgttcgccagattcaggttgaaggcctgcgccgtttgcgtgaaatcctgcaaacgcaggggctgaatatcgaagcgctgttccgcgagtaa

SEQ ID NO: 462053 - DNA, 738 bp, Shigella boydii
atgacaacatttattcagcttcatttgttaaccgcttaccctgctgccaatcttaaccgtgatgattccggctctccgaaaactgtgattctgggtggagcaacgcgtctgcgcgtttcctcgcaaagtctgaagcgtgcttggcgcacttctgaactttttgaacaggcgctggcgggccatattggtgttcgtagcgggcgtattgcgcgtgaggcggcaactatcctgattgagaaaggaatcgaagataaaaaagccatcgaatgggcagtagagatagccgattatcttgggaaagccaaaaaagacaaaaaacaaaaaaacgacaaaaaaccaaaagatccgctcactagcgccgaaactgaacagctcgtccatatcagcccggcagaatttgacgccgtaaaagcgctggcccatcaactggcagaagaaaagcgcgcgccaaaagagaaagatctcgctttgttacgtaaagaccgtatggcggtagatatcgctatgtttggtcgtatgctggcgaaaaaacccgggtttaatgtagaagccgcctgccaggtcgcgcatgcgtttggtgtcagtgaaacgattgtcgaaaatgattttttcaccgccgtagatgatttacgccaggcttctgaagatgccggtgccggtcatgtagatgaaaccggattcggttctgcgctgttctacacctatatcttatctgcattgataaagatctgctggtag

SEQ ID NO: 462054 - DNA, 639 bp, Shigella boydii
atgagtattgtaaaagatgagcataaagttgcgctgcgtaaatggcatgaagagttgcaggataaacgcggcgagcgtgccagtctgcggcgtagtacgacggttaatgatgtttgtctgacggatggatttcgcctgtttcttaagaacagacaaataaagtggcaggatgaacccgagtggcgtatcaccgcactagcgctgatagcagcagttagcgccaatgttaaagctattgacgaacggcagccttttgccgcgcaactggcggcggtaatgaaaaaggggcggtttactcgtttgttggcagtaaaaacgccggatgatttattgcggcagttacgccgtgcggtcaaattattaaacggttccgtcaatcttgactctctggaagagggggtcttccgctggtgccaggagagcgatgacctgctcaatcatcaccgccgccagcagcgaccaacagaatttatccgtatccgctgggcgctgggcgctgggcgctgggcgctgggcgctgggcgctggaatattaccaggctggcgacgccgataacgaacaaaattaataaaggactatctcatgacaacatttattcagcttcatttgttaaccgcttaccctgctgccaatcttaa

SEQ ID NO: 462055 - DNA, 1563 bp, Shigella boydii
atgaactcgttttcacttctgacaaccccgtggttgcccgttcgttttaaagacggaacgacaggcaaactggcaccagtcgatctggctgatgaaaatgttgtcgatatcgctgcgccgcgggcagatctccagggggcggcctggcagtttttgctggggctactacaaaccagcttcgcgccaaaagatcaacgtagttgggatgatatctgggaagacggactggaagctgaaaagctaagggaagcattgctgtctttagaacatgcttttcagtttgggccagattccccttcatttatgcaggattttgatgaattaaaagttaaggcaacttttattgcttcgcttcttcctgacgcaccaggaaaacaaacaaaagaacgaaatacagaccattttattaagcgagacacaactcagcatctgtgcctgcattgtgtgcctttagcgcttttttcaatccagttgaatgcacctataggtggacgcggttactatcctgggctacgtggcggagggcctctgacgacacttatagaattgctggagtatcagggcaatcaacaaacccctttgtggcgaaagctgtggctaaacgtaatgccgcaagatgaagccgatttacctttaccaaaaacctttgatgacctggtctttccttggcttgcaccgacgcgtaccagcgaactggacggtgctgtggtaacggatgaacaagtcaataaacttcaggcctactggggaatgccacgacgtatacgtattgattttaagacaacctcaataggtaactgcgacatttgcggtaggcagagcgatgctcttttgggcttgatgtcactcaaaaactatggtgttcaatacgtcatgtggcgccatcctctaacaccttaccgtctgccgcttaaagagggtggagatttttactcagttaaaccacaacctggtggtttaatctggcgcgactggttaggcctcatagaggtaggtaactcaaaaaacaatactgaactccccgcacaggtcgtgaaacttttgaatgccagcaatctaaagcagacaagggtgggcttatggggatttggttttgattttgaagatatgaaggttcgttgttggtatgaacaccatttcccgctgttgttaaacaaaaaagaagacctaatacctaagttgcgtctggcagcgcaagcggcatcacacattctaagcttgttacaccgagcgttgaaagaagcatggttctctgagaagaaaaccacaaagcttgatttcggttttgtggatattgacttctggaacaaaactcagcatcgattcctgagattagtgcgcaaaattgaagaaggtcaggatccggacgaattactcagtaaatggcaaaaggaaatgtggttattcgcgcgtcaggattttgacgatcgtgtctttaccaatccatatgagcccgttgatttggaacgcgtcatgaccgcacgcaagaaatattttacaacatcagcggagaagcaaaatgctaacgccgccagggagaaaaagcaggaggctgctgaatga

SEQ ID NO: 462056 - DNA, 1410 bp, Shigella boydii
atgatggcagtgatgccgtttaaacataataatctgcggcttctggggctgagtaacaaaatcctgctggctgatgagatccacgcctgtgacgcttatatgtcgtgcattcttgaagggctgatcgagcggcaggcgcgtggcggaaacagcgttattttgctttctgctacgttatctcaacagcagcgcgacaaactcgtcgccgcctttgcgcgtggtgcagagggccagcaagaagccccactcctgggaaaagatgattacccctggctgacgcatgtcacgaaaaccgatgtacattcgcaccgggtagcgacgcgcaaagaagttgaacgtagcgtgagcgtgggttggctccatagtgaacaagagtgtattgcgcgtatcgaatcggcggtaagtcaggggaaatgcatcgcctggattcggaattctgttgatgacgctattcaggtgtatcgtcagctgcttgcccgcggcgtcattcctgcttccagcctttcactttttcatagccgctttgcttttagcgatcgccagcgaattgaaacggaaacgctggcacgctttggtaaatattgtagtttacagagagcgtctcaagtcattgtttgtacacaagtaattgaacaaagcgtggatattgacctggacgaaatgatctccgacctggcccccattgatttgctaatccagcgagcggggcgattacagcggcatatccgcgatattaatggtcagttaaagcgtgacggaaaagacgagcgttccccccctgaattgctgattctggcccccgtctgggatgacgctcctggtgacgaatggttcggcagtgccatgcgtaacagtgcatatgtctatcccgatcatgggcgaatctggctgacgcagcgtgtgctgcgtgagcaaggcgctattcagatgccgcacgcagcccggcttcttattgaatcagtttacggtgaggacgtggtaatgccggaaggatttgcccgcagcgagcaggagcaagtgggcaaatattactgtgatcgcgcaagggctaaaaagtatgtgctgaacttcaggctcggctatgccgccaatatcaacgattaccttccggaaaaactgtcgacacgtctggctgaagagtctgtttccctgtggctggctacctgtattgacggtgtggtgaagccttatgccaccggtgctcacgcatgggaaatgagcgttgtcagagtgcgccgaagctggtggaaaaaacatcgggatgagttttctttactggaaggggatgcgttcaggcagtggtgcgttgaacagcggcaagatccggaaatggcaaacgtgattttagtcaccgatgacgaaagttgcgggtattcggccagggagggattgattggcaaggttggttga

SEQ ID NO: 462057 - DNA, 1110 bp, Shigella boydii
atgaacatcattgccattatgggaccgcatggcgtcttttataaagatgagcccatcaaagaactggagtcggcgctggtggcgcaaggctttcagattatctggccacaaaacagtgttgatttgctgaaatttatcgaacataaccctcgaatttgcggcgtgatttttgactgggatgagtacagtctcgatttatgcagcgatatcaatcaacttaatgaatatctcccgctttatgccttcatcaacacccactcgacgatggatgtcagcgtgcaggatatgcggatggcgctctggttttttgaatatgcgctggggcaggcggaagatatcgccattcgtatgcgtcagtacaccaacgaatatcttgataacattacgccgccgttcacgaaagccttgtttacctacgttaaagagcggaagtacaccttttgtacgccggggcatatgggcggcaccgcatatcaaaaaagcccggttggctgcctgttttatgattttttcggcgggaataccctcaaggctgatgtctctatttcggtcaccgagcttggttcgttgctcgaccacaccgggccacacctggaagcggaagagtacatcgcgcggacttttggcgcggaacagagttatatcgttaccaacggaacatcgacgtcgaacaaaattgtgggtatgtacgccgcgccatccggcagtacgctgttgatcgaccgcaattgtcataaatcgctggcgcatctgttgatgatgaacgatgtagtgccagtctggctgaaaccgacgcgtaatgcgttggggattcttggtgggatcccgcaccgtgaatttactcgcgacagcatcgaagagaaagtcgctgccaccacgcaggcacaatggccggttcatgcggtgattaccaactccacctatgatggcttgctctacaacaccgactggatcaaacagacgctggatgtcccgtcgatccacttcgattccgcctgggtgccgtacacccattttcatccgatctaccaggggaaaagtgatcttcgaaacgcaatcgacccacaaaatgctggcggcgttatcgcaggcttcgctgatccacattaa

SEQ ID NO: 462058 - DNA, 2118 bp, Shigella boydii
atgcgtcgccgtgtctacaatccggatcgcctgaaatatccgatgaaacgagtcggggcgcgcggtgaaggcaaattcgagcgcattagctgggaagaagcctacgacatcatcgcgaccaatatgcagcgcctgatcaaagagtacggcaacgagtctatctatctgaactatggcaccggtacgctgggcggcaccatgacccgctcctggccgccgggaaataccctggtcgcgcggctgatgaactgctgcggcggctatctgaaccattacggcgactactcctccgcgcaaattgcggaaggtttgaactatacctacggcggctgggcagatggcaacagcccgtcggatatcgaaaacagtaagctggtagtgctgtttggtaataaccctggcgaaacgcgaatgagtggcagtggggtgacttactatcttgaacaggcacgccagaaatctaatgcccgcatgatcatcatcgatccgcgctataccgacaccggtgccgggcgcgaagatgagtggatccctattcgtccgggaacagatgccgcactggttaacggtctggcgtacgtcatgatcactgaaaacctggtggatcaggcattcctcgataaatattgcgttggctacgatgagaaaaccctgccagccagtgcgccgaaaaatggccactataaagcttatattctgggtgaagggccagatggcgtggctaaaacaccggaatgggcctcacaaatcaccggtgttccggcagacaaaatcatcaaactggctcgtgaaatcggcagtaccaaaccggcgtttatcagccagggatggggcccgcagcgtcacgctaacggtgaaatcgcaacccgtgctatctcgatgctggcgattctgaccggtaacgttggtattaacggaggcaacagcggcgcgcgtgaaggttcatacagcttaccgtttgtccgtatgccgaccttggaaaacccgatccagaccagcatttcgatgtttatgtggaccgatgccattgaacgtggcccggaaatgacggcgctgcgtgatggtgtacgcgggaaagataagctggatgtgccgatcaaaatgatctggaactatgccggtaactgcctgattaaccagcattctgaaatcaaccgtacccatgaaatccttcaggatgataagaagtgcgagctgattgtggttatcgactgccacatgacctcatcggcgaaatatgctgacatcctgctgcctgactgcaccgcttccgaacagatggactttgcgctggatgcatcctgcgggaatatgtcttacgtgattttcaacgatcaggtgattaaaccgcgctttgaatgtaagaccatctatgaaatgaccagcgaactggcaaaacgtcttggcgttgagcaacagtttactgaaggccgtacacaggaagagtggatgcggcatctgtatgcccagtcgcgggaagcgattcctgaactaccaacgtttgaagagttccgcaagcaggggatctttaaaaagcgcgacccacaagggcaccacgttgcttataaagctttccgtgaagatcctcaggcaaattcactgaccacgccatcgggcaaaattgagatttattcgcaggcgctggctgacattgccgctacctgggaattgccagaaggagatgtgatcgatccactgccgatctacacgccgggctttgaaagttatcaggatccgttgaacaaacagtatccgctgcagcttacgggtttccactataaatctcgcgttcactcaacttacggcgacgttgatgtgctgaaagcagcttgccgtcaggaaatgtggatcaacccgcttgatgcgcaaaaacgcggtatcaacaacggcgataaagtcaggatctttaacgatcttggtgaggttcatattgaggcgaaagtgacgccacgaatgatgccgggtgtggtcgcactgggtgaaggtgcctggtatgacccggatacaaaacgtgtcgataagggcggttgtatcaacgtactgaccactcaacgtccgtctcctctcgctaaggggaatccgtcacatacaaaccttgttcaggttgaaaaggtgtaa

SEQ ID NO: 462059 - DNA, 567 bp, Shigella boydii
atgcttattggctatgtacgcgtgtcaacaaatgaccagaacaccgatttgcaacgtaatgcactgaactgcgcgggatgtgagcggatttttgaggataaaatcagtggcactaagcccgacagaccggggcttaaaaaactgctcaggacactatcggcaggagacacgctggttgtctggaagctggacagactgggacgcagtatgcggcatcttgttacgctgatagaagagttgcgccagcgtggtgtgaatttccgaagcctgactgacagtattgataccagtaccccaatgggccgtttcttttttcacgtcatgggggctctggctgaaatggaacgtgaactgatagttgaacgtaccagagcagggctggctgcagctcgtgccaaaggcagagtaggtggacgccgtcctaagttgaccaccgaacagtgggcacagattggacgtttactcgaggccggagaatcaagacagcgtattgcactgatttttgatgtgggcgtttctaccatttatagaaaatttccggcgaatgagagcaatgaatcgccctga

SEQ ID NO: 462060 - DNA, 438 bp, Shigella boydii
atgttttatagtccatctttaaacatttttgtgaatcctgcgcttaaggatgattacattaatgcaaattcatggccagatgatgctctggctgtcagtgatgatgtttataatgaatttgcaatcaatacgcccccagatgacaaaattcgtgttgcaggaaaaaatggattacccacatgggcactaatacctccaccatcatatgaagaacttattcaacaggcagaatcagaaaggcaattattgcttaatcaggccaacgaatacatgaacagtaaacaatggcccggtaaagccgctattggtcgtctgaaaggtgaggaactggcgcaatataatttgtggctggattatctggacgcactggaactgattgatacctccagtgctccagatattgaatggcctacgcctccggcagttcaggccagatga

SEQ ID NO: 462061 - DNA, 618 bp, Shigella boydii
atgtcaacttctatcagaatctgtagctacctgctgctgccgctgatctacctgctggttaacgtcaaaatcgcccagcttggtgaaagtttccccatcactatcgtcacttttttacctgtcttgttactgctgtttttagaacgcatcagcgttaaaaaattgatgattgccttagggattggtgcgggactcacggcgtttaactacctgtttggtcagtcgctggatgccagtaaatacgtcacttcaaccatgctgtttgtctatattgtgatcattattggcatggtgtggagtattcgttttaaaacaatttcgccacacaaccatcgcaagatattacgtttcttttatctggtggtagggctggtggtggcgctggcggcagtggagatggcgcaaattatcctcaccggtggcagcagtattatggagtcgatttcgaaatatctgatttacagcaacagctatgtgctgaatttcattaaattcggcggcaagcgcacgacagcactttatttcgaaccggcatttttcgctctggcattaatctcaatttggctcagcatcaaacagtttggtatcaaaacgccggtaatgactccaacttactga

SEQ ID NO: 462062 - DNA, 255 bp, Shigella boydii
gtgatcaataaaaacgtggtagcgggggatgatttcaccattcgccacggcgtcactatcggcaatcgtggtgccgataacatggcatgtccacacattggcaacggcgtcgaactcggtgccaacgtcattattcttggtgatatcacgcttggtaacaacgtcaccgtgggtgcgggcagcgtggtgctcgactctgtcccggacaacgcgctggtggtaggagaaaaagcgcgagtgaaggtaattaaatga

SEQ ID NO: 462063 - DNA, 450 bp, Shigella boydii
atgacagaaaaagtaaaacaacatgccgctccggtaacgggcagtgatgaaatcgatattggtcgcctggtcggcaccgtcattgaagcgcgctggtgggtgattggcatcaccgctgtatttgtcctctgtgccgtggtttacaccttcttcgccacgccgatttatagtgccgacgcactggtacaaatcgagcaaaacagcggcaattcgttagtgcaggacattggttcggcattagccaacaaaccgcctgcatcggacgccgagatccagttgattcgttcgcgtctggtgcttggtaaaacggtggacgatctcgacctcgatattgcagtgagcaaaaacacgttcccgattttcggggcgggctgggatcgactgatgggacgccagaacgagacggtgaaagtgactacctttaaccgcccgaaagagatggcggactag

SEQ ID NO: 462064 - DNA, 1368 bp, Shigella boydii
atgagcaaacaatcacagcatgtattaattgccctgccccacccactgcttcacctggtcagtttaggtttagtctcgtttatctttacccttttctcgcttgagctttcgcagtttggcacccaactcgccccactgtggttcccgacgtccatcatgatggtggcgttttatcgccatgccgggcgcatgtggccgggaattgcgctgagctgctcgctgggaaatatcgccgcatccatcctgcttttttccaccagctcgctgaacatgacctggacgaccatcaatattgttgaagccgtggtcggggcagtgctgctacgtaaattgctgccgtggtataaccccttgcaaaatctggctgactggctgcgtctggcattcggcagcgccattgttccgcctctgttagggggtgttctggttgtcctgctgacgcccggagacgatcctctcagggcatttttgatatgggtactgtcagaatccatcggcgctctggtactggtgccgctgggattgttatttaagccacactatctgctgcgccatcgcaacccacggttactttttgagtcactgctcacattagccatcacgctgacgttaagctggctttctatgttgtacctgccgtggccttttactttcattattgtgctgttgatgtggagcgccgtgcgcctgccacgaatggaagcctttttgatcttccttaccacggtgatgatggtgtcgctgatgatggccgcggatccctccctgcttgctacgccgcgtacgtacctgatgagccatatgccgtggctactgtttttgctgatcctgctgcccgccaacatcatgaccatggtgatgtatgcctttcgtgcggaacgcaaacacatttccgaaagcgaaacccgctttcggaacgcgatggaatattccgctatcggtatggcgttagtgggcaccgagggacaatggctgcaaaccaacaaagcgctctgccagtttctcgggtacagtcaggaagagctgcgcggactcacctttcagcaactgacctggccggaggatctcaataaagatctccaacaggttgaaaagctgataagcggtgaaataaacacctattcaatggaaaaacgctactacaaccgtaatggcgatgttgtctgggcgttgcttgccgtctcactggtgcgccacacggatggcacgccgctctattttatcgctcagattgaagacattaacgagctaaaacgcaccgaacaggtgaatcagcaactgatggagcgcatcacgctggctaacgaagcgggcgggattggcatctgggagtgggagctgaagccgaatatttttcgagctgtatga

SEQ ID NO: 462065 - DNA, 681 bp, Shigella boydii
atgcaggttgtctggttaaacgaccagcaaccattactggtgatgttccttgctgatggcgcaggtagcgtttcgcagggaggagaaggcgcgacgctcgccgtcaatgaagcgatggcgtttatggtgcaaaaagtacaggacggtgaattggggcttaatgatgtcctcgccacaaatatggtactgactattcgtcaacgactttttgccgaggcagaagccaaagcattagcagttcgcgattttgcctgcacgtttctgggattgatttcatcgcctgacggcaccttgattatgcagattggcgatggcggcgtggtggtagatttgggtcacggtctgcaattgcctctcacgccgatggtgggtgaatatgccaacatgacgcacttcattaccgacgaagatgccgtttccagactggaaactttcaccagcactgggcgtgcgcataaagttgcagcatttacggatggtattcagcggctggcgttaaatatgctggataattctcctcatgtgcctttctttaccccgtttttcaatggactggcgtcagtaacgcaggaacaactcgatttattacctgaattgttaaagcagtttttgtccagcccggcggtaaacgagcgtacggatgatgataaaacgttggcactggcgctgtggttaccatga

SEQ ID NO: 462066 - DNA, 1368 bp, Shigella boydii
atgtgcccgtcattcagacaattcccgacagtgtttcataattcctccatttttctcccttattggctggctacactagtatcattccgcgaaacgtttcaggaagagaaactcttaacgatgaaaggcagttataaatcccgttgggtaatcgtaatcgtggtggttatcgccgccatcgccgcattctggttctggcaaggccgcaatgactcccggagtgcagccccaggggcgacgaaacaagcgcagcaatcgccagcgggtggtcgccgtggtatgcgttccggcccattagccccggttcaggcggcgaccgccgtagaacaggcagttccgcgttacctcaccgggcttggcaccattatcgccgctaatactgttacggtgcgcagccgcgtggacggtcaactgatggcgttacatttccaggaaggccagcaggtcaaagcaggcgatttactggcagaaattgaccccagccagttcaaagttgcattagcacaaacccagggccaactggcaaaagataaagccacgcttgctaacgcccgccgtgatctggcgcgttatcagcaactggcaaaaaccaatctcgtctcccgtcaggagctggatgcccaacaggcgctggtcagtgaaaccgaaggcaccattaaggctgatgaagcaagcgtcgccagcgcgcagttgcaactcgactggagccgcatcaccgcaccagtcgatggtcgcgttggtctcaagcaggttgatgttggtaaccaaatctccagtggtgataccaccggaattgtggtgatcacccagacgcatcctatcgatttagtctttaccctgccggaaagcgatatcgctactgtagtgcaggcgcaaaaagccggaaaaccgctggtggtagaagcctgggatcgcaccaattcgaagaaattaagtgaaggcacgctgttaagcctcgataaccaaatcgatgccacaaccggtatgattaaagtgaaagcacgctttaataatcagaatgatgtgctgtttcccaatcagtttgttaacgcgcgcatgttagtcgacaccgaacaaaacgccgtagtgatcccaacagccgccctgcaaatgggcaatgaaggccattttgtctgggtgctgaatagcgaaaacaaggtcagcaaacatctggtgacgccgggcattcaggacagtcagaaagtggtgatccgtgcaggtatttctgcgggcaatcgcgtggtgacagacggcattgatcgcctgaccgaaggggcgaaagtggaagtggtggaagcccagagcgccaccactccggaagagaaagccaccagccgcgaatacgcgaaaaaaggagcacgctcctga

SEQ ID NO: 462067 - DNA, 702 bp, Shigella boydii
gtgctttatctgctgcacgccagaaataacaaccgtgccctgttcagtctgaaactgttccgtactcgtaccttttcgctgggcctggcggggagctttgccggacgtattggcagtggcatgttgccctttatgacaccggttttcctgcaaattggcctcggtttctcgccgtttcatgccggactgatgatgatcccgatggtgcttggcagcatgggaatgaagcgaattgtggtacaggtggtgaatcgctttggttatcgtcgggtactggtagcgaccacgctgggtctgtcgctggtcaccctgttgtttatgactaccgccctgctgggctggtactacgttttgccgttcgtcctgtttttacaagggatggtcaactcgacgcgtttctcctccatgaacaccctgacgctgaaagatctcccggacaatctggcgagcagcggcaacagcctgctgtcgatgattatgcaattgtcgatgagtatcggcgtcactatcgccgggctgttgctgggactttttggttcacagcatgtcagcgtcgacagcggcaccacacaaaccgtctttatgtacacctggcttagcatggcgttgatcatcgcccttccggcgttcatctttgccagagtgccgaacgatacgcatcaaaatgtagctatttcgcggcgaaaaaggagcgcgcaatga

SEQ ID NO: 462068 - DNA, 1401 bp, Shigella boydii
atgctcaaaggattgcgtacattattttcacgcagggttttgtttaacgtcgaaatgaataattctgttgactgtgaattacttctcatccagcaacaactccaggcattgatagccgaaccaggcaattatttagcacatgattgtgatctcaacgatactctggttctttgccagcttacccatcatcacaatggatatatacgagaaaaggccgtgcagtatctggggcacaaagaggatgttgcggctatagaagaattattacttgcagctaatgactgggtaaaagaggttcgccttgctgcaaccatagcattacgtcatttaatgaaggataagaatgcagcggcatttgccgttaatctacccatgatacgtaaccttctccaatgccagcgttacgatcaccgtgcatttgtagacgagatacttagatatttattgacagaaaataaccgcccacaattaacgtattggcttacttgccctgataaaaagctctcccgcgcggtattacaaacgctgattgaatacggttactttaatgatgaatcttcactgctttcaatactcgataaacccgatgagggtttgcgaatgctggcgaccacccactggctgcgtcaacaattaccattaagcgaagcggtattaactcgtctgttaaaagaccgctggccgcgtattcgacaagcaacgttatttagcctcactgaccgagcaatagaaatgcctccggcgttgcacagcacattactgctggataacaatatgttgatccgcctacgcgctaaaaatatgcttcacgaagtcatggatgttccgcaattctggcgtcatgttgtcacttctgcggaatatactccctcacagcgacgggccgctttatacgggctggattccattcatgatcccaatattttaaaactggcagaatggggattatcacagaatgtattcccactgcgtttagccgctatgcacattcttgcaaaagctaatcctcgttgtggcgtcaaagagactattctgaccacgctggctaacccggacgccgccgggttgcgatttatggttaacatctgtgtatggtgtcgcgttccgctcacgttcgaggaaatacgtcagttgcaggaaaacgcgccgtcagttaaacatgcttgcgcatattgtcggctgtatcataacttgaacaaatgggacggtttaattcttcttcttcaatcgcaacacaagctaactgaagaatttgcaggtaaacagctcgcgatatggcaacgcaatttcaatctttcgggcattcaaccgaatgctcttcagcgtcagcaacttcaggcgctttttacccgcaatccggaacttcacaacagattatggggttacattccttttaaataa

SEQ ID NO: 462069 - DNA, 966 bp, Shigella boydii
atgagcggcgctcgattacacacgctgctgcctgaattaaccacgcgtcagtcggtgatggtcgtcggcgcggcggtcattgacgtgatcgccgacgcttatgccctcccctggcgtgggtgcgatatcgaactgaaacagcagagcgttaacgttggcggctgcgcactgaatattgccgtggcgttaaagcgcctcggcatcgaagcgggtaatgccttgccgctcggtcagggggtatgggcggtgattattcgcaaccggatggcgaaagaggggttaatcagcctgatcgataacgccgaaggcgataacggctggtgtctggcgctggttgagccggatggcgaacgtacttttatgtcattcagcggtgtggaaaatcagtggaatcgccagtggctggcgcgattaaccgttgcgcctggcagcctgctctatttttccggttatcaactggcctcgccctgcggcgaattgttagtggaatggctggaagagctgcaagacgtgacgccgtttatcgattttggcccacgtattggcgatatcccggacgcattactggcgcggatcatggcctgtcgacctttagtgtcactcaatcgtcaagaggctgagattgccgccgaacgttttgctttatccgcagagataacaacacttggcaagcaatggcaggagaaatttgccgcgccgttgatcgttcgtctcgataaagaaggcgcatggtatttcagcaacgacgcttctggctgcattccggcatttccaacgcaagttgtcgacaccattggggcgggcgacagtcatgccggtggcgtacttgccgggctggcctctggtctgccactggcggatgccgtattactgggcaatgcagtggcgtcatgggttgtcgggcatcggggcggtgattgtgcgccaacgcgcgaggaactactcctcgcacacaaaaacgtatag

SEQ ID NO: 462070 - DNA, 183 bp, Shigella boydii; identical to SEQ ID NO: 102274

SEQ ID NO: 462071 - DNA, 294 bp, Shigella boydii
atgtatggacaggacaccaccgccgggggcaatctgaaaaaagatagcccgctgggtaaactgtgggatttcctccatagtccagaccttccgactaatccagactttgccaaaccagcagataaaacagggtgggtaagctcttactccaatccaacttatgtacctcctacgccgacgattacagcgccacagcttaaagttgatatggcaggtaatccactgatgacgccgccagcgtggctaaaccagccgctaaacgtgaacgttaatgtgaaagtgcaggatggatag

SEQ ID NO: 462072 - DNA, 1257 bp, Shigella boydii
atgatcgagggtgcaggcggggcgatcaccattgccgcaactgtggcgctgagcggcaagatcatgaccaccggacaggattttgaatccgcgctttctggtctgacagcgatcaccggttccacagataaggccgctaaagagtttgattatctccgtgatcaatccaaccgtttggggctggatctcctcaagacttcccgtgattacactcagtttgccgccgctgttggtgacaagctccctaaagaccagatgcgatccatctttgagggtgccagtgaatggggccttgttacaggtgcttcagccgatgaagccagccgcgctttgaaaagtttgaatcagatgatgtctaaaggaacggtaatgagtgaagaactcaaaggccagttgtccgaagctctcccgggggctgtgggtctgttcgttaaggctctcaaccagatgaaagggacaaccaaccttacagaaaaggatctgtttgacctgatgcaacaagggaagctgttctctaaggacatcctcccggaagtggctaaacagatgaaagccgcagctcgtaacggcggcgctctggataaggctatgaagtccaaccgggcaagctggcagcgcctgcaaaccagtatgcagaacgcgatgaacatcttctttgcttctggcttcggcaacgaattaaccagcgctttcgacgctatcagcgccgctgttaacggctctggtggggcctttgagatgttcgggcatattgccgggaaaatcgttgagggtgccacagatgcgtttacagagttgcatgacactgtgatcctgaccttccgcattattgagtattacgccagcaagatggggatcactggtgagcagcttaaagcctggggcgaaatggcagcatacgccgccggggtggctatgttcgccgggtctatctggaagttgggcgtagcctttaaatggttgttgaccatgcttaacccactaaccaaattactgggggtcatgaaagggatcgccgctattggtggcattgaagccgctactactggcggatctggtggggaaggtaaagacaagccaaacaaaccgggtcggggtccgaaagttggcaaggtaggcggcgcggcggctctctctggcggtcctgttggctggagcattgcggtcggttcggtaggtggggattatgcctgggataaggtcatgacgctaacgacgccatgtatggacaggacaccaccgccgggggcaatctga

SEQ ID NO: 462073 - DNA, 168 bp, Shigella boydii; identical to SEQ ID NO: 907

SEQ ID NO: 462074 - DNA, 3162 bp, Shigella boydii
atgctactttccacgccggatggtcgtcaggcactgcaacaggcacgattgcaggcgacgaccggtcatgcagaagaagctgtggcgagttacaacaaactgttcaacggtgcgccgccggaaggtgacattgctgtcgagtactggagtacggtggcgaaaattccggctcgccgtggcgaagcgattaatcagttaaaacgcatcaatgcggatgcaccgggcaatacgggcctgcaaaacaatctggcgctattgctgtttagtagcgatcgccgtgacgaaggttttgccgtcctggaacagatggcaaaatcgaacgccgggcgcgaaggggcctctaaaatctggtacgggcagattaaagacatgcccgtcagtgatgccagtgtgtcggcgctgaaaaaatatctctcgatctttagtgatggcgatagcgtggcggctgcgcaatcgcaactggcagaacagcaaaaacagctggccgatcctgctttccgcgctcgtgcgcaaggtttagcggcggtggactctggtatggcgggtaaagccattcccgaactacaacaggcggtgcgggcgaacccgaaagacagtgaagctctgggggcgctgggccaggcgtattctcagaaaggcgatcgcgccaatgcagtggcgaatctggaaaaagccctcgcactggacccgcacagcagcaacaacgacaaatggaacagtctgctgaaagtaaaccgctactggctggcgatccagcagggcgatgctgcgctgaaagccaataatcctgaccgggcagaacgcctgttccagcaggcgcgtaatgtcgataacaccgacagttatgcagtgctggggctgggcgatgtggcgatggcgcgaaaagattatcccgccgccgaacgttattatcagcagaccttgcgtatggacagcggcaacactaacgccgtgcgcgggctggcaaatatttaccgccagcaatcgccagaaaaagctgaagcgtttatcgcctcgctctctgccagtcagcggcgtagcattgatgatatcgaacgcagcctgcaaaacgaccgtctggcacagcaggcagaggcactggaaaaccagggcaaatgggcgccggcggcagcacttcagcggcaacgactggcgctggaccccggcagcgtatggattacttaccgactttcgcaggatctctggcaggccggacaacgcagccaggccgatacgttaatgcgcaatctggcgcagcagaagtcgaacgacccggagcaggtttacgcttacgggctgtacctctctggtcatgaccaggacagagcggcgctggcgcatatcaacagcctgccgcgcgcgcagtggaacagcaatattcaggagctggttaatcgactgcaaagcgatcaggtgctggaaaccgctaatcgcctgcgagaaagcggcaaagaagctgaagcggaagcgatgctgcgtcagcaaccaccttccacgcgtattgacctcacgctggctgactgggcgcagcagcgacgtgattacaccgccgcccgcgctgcatatcagaatgtcctgacgctggagccaactaacgccgatgccattctggggctgacggaagtggatattgctgccggtgacacagcggcggcacgtagccagctggcgaaactgcccgctaccgataacgcctcgctgaacacacagcggcgcgtggcgctggcgcaggcgcagcttggagataccgcagcggcgcagcagacgtttaataagttgatcccgcaggcaaaatctcagccaccgtcgatggaaagcgcgatggtgctgcgcgacggtgcgaagtttgaagcgcaggcgggcgatccaaagcaggcgctggaaacctacaaagacgccatggtcgcatccggtgtgactacgacgcgtccgcaggataacgacacattcacccgactgacccgtaacgacgagaaagatgactggctgaaacgcggcgtgcgcagcgatgcggcgggcctctatcgccagcaggatcttaacgtcaccctcgagcacgattactggggttcgagcggcaccggtggttactccgatctgaaagcgcacactaccatgttgcaggtggatgcgccgtattctgacgggcggatgttctttcgcagtgatttcgtcaatatgaacgtcggcagtttctccactaatgccgatggcaaatgggatgacaactggggcacctgtacattacaggactgtagtggcaaccgcagccagtcggactccggtgccagcgtggaggtcggctggcgaaatgacgtctggagctgggatatcggtaccacgccgatgggcttcaacgtggtggatgtggtcggcggcatcagttacagcgatgatatcgggccgctgggttacaccgttaacgcccaccgtcggcccatctccagttctttgctggcctttggtgggcaaaaagactccccgagcaataccgggaaaaaatggggtggcgtacgtgccgacggtgtggggctaagtctgagctacgataaaggtgaagcaaacggcgtctgggcatcgcttagtggcgaccagttaaccggtaaaaatgtcgaagataactggcgcgtgcgctggatgacgggctattactataaggtcattaaccagaacaatcgccgcgtcacaatcggcctgaacaacatgatctggcattacgacaaagatctgagtggctactcactcggtcagggcggttactacagtccgcaggaatacctgtcgtttgctataccggtgatgtggcgggagcgcacggaaaactggtcgtgggagctgggggcgtctggctcgtggtcgcattcacgcaccaaaaccatgccgcgttatccgctgatgaatctgatcccgaccgactggcaggaagaagctgcgcggcaatccaacgatggcggcagcagtcagggcttcggctacacggcgcgggcattacttgaacgacgtgttacttccaactggtttgttggcacggcaattgatatccagcaggcgaaagattacgcacccagccatttcctgctctacgtacgttattccgccgccggatggcagggtgacatggatttaccgccgcagccgctgataccttacgccgactggtaa

SEQ ID NO: 462075 - DNA, 2619 bp, Shigella boydii
atgagtatcctgacccggtggttgcttatcccgccggtcaacgcgcggcttatcgggggttatcgcgattatcgtcgtcacggtgcgtcggctttcagcgcgacgctcggctgtttctggatgatcctggcctggatttttattccgctggagcacccgcgctggcagcgtattcgcgcagaacataaaaacctgtatccgcatatcaacgcctcgcgtccgcgtccgctggacccggtccgttatctcattcaaacatgctggttactgatcggtacatcgcgcaaagaaacgccgaaaccgcgcaggcgggcattttcaggtctgcagaatattcgtggacgttaccatcaatggatgaacgagctgcctgagcgcgttagccataaaacacagcatcttgatgagaaaaaagagctcggtcatttgagtgccggggcgcggcggttgatcctcggtatcatcgtcaccttctcgctgattctggcgttaatctgcgttactcaaccgtttaacccgctggcgcagtttatcttcctgatgctgctgtggggtgtagcgctgatcgtacggcggatgccggggcgcttctcggcgctaatgttgattgtgctgtcgctgaccgtttcttgccgttatatctggtggcgttacacctctacgctgaactgggacgatccggtcagcctggtgtgcgggcttattctgctcttcgctgaaacgtacgcgtggattgtgctggtgctcggctacttccaggtcgtatggccgctgaatcgtcagccggtgccattgccgaaagatatgtcgctgtggccgtcggtggatatctttgtcccgacttacaacgaagatctcaacgtggtgaaaaataccatttacgcctcgctgggtatcgactggccgaaagacaaactgaacatctggatcctcgatgacggcggcagggaagagtttcgccagtttgcgcaaaacgtgggggtgaaatatatcgcccgcaccactcatgaacatgcgaaagcgggcaacatcaacaatgcgctgaaatatgccaaaggcgagttcgtatcgattttcgactgcgaccacgtaccaacgcgatcgttcctgcaaatgaccatgggctggttcctgaaagagaaacagctggcgatgatgcagacgccgcaccacttcttctcgccggacccgtttgaacgcaacctggggcgttttcgtaaaacgccgaacgaaggcacgctgttctatggtctggtgcaggatggcaacgatatgtgggacgccactttcttctgcggttcctgtgcagtaattcgtcgcaaaccattggatgaaattggcggtattgctgtcgaaacggtaaccgaagatgcgcacacgtctctgcgcctgcaccgtcgtggctacacctctgcatatatgcgtattccgcaggcggcggggctggcgaccgaaagtctgtcggcgcatatcggtcagcgtattcgctgggcacgcgggatggtgcaaatcttccgtctcgataacccgcttaccggtaaagggctgaaattcgcccagcggctgtgctacgtcaacgccatgttccacttcttgtcgggcattccacgactgatcttcctgactgcgccgctggcgttcctgctgcttcatgcctacatcatctatgcgccagcgttgatgatcgccctgttcgtgctgccgcatatgatccatgccagcctgaccaactcgaagatccagggcaaatatcgccactctttctggagtgaaatctacgaaacggtgctggcgtggtatatcgcaccaccgacgctggtggcgctgattaacccgcacaaaggcaaatttaacgtcaccgccaaaggtggactggtggaagaagagtacgtcgactgggtgatctcgcggccctacatcttccttgttctgctcaacctggtgggtgttgcggtcggcatctggcgctacttctatggcccgccaaccgagatgctcaccgtggtcgtcagtatggtgtgggtgttctacaacctgattgttcttggcggcgcagttgcggtatcggtagaaagcaaacaggtacgccgatcgcaccgcgtggagatgacgatgcccgcggcaattgcccgcgaagatggtcacctcttttcgtgtaccgttcaggatttctccgacggtggtttggggatcaagatcaacggtcaggcgcagattctggaagggcagaaagtgaatctgttgcttaaacgcggtcagcaggaatacgtcttcccgacccaggtggcgcgcgtgatgggtaatgaagttgggctgaaattaatgccgctcaccacccagcaacatatcgattttgtgcagtgtacgtttgcccgtgcggatacatgggcgctctggcaggacagctacccggaagataagccgctggaaagtctgctggatattctgaagctcggcttccgtggctaccgccatctggcggagtttgcgccttcttcggtgaagggcatattccgtgtgctgacttctctggtttcctgggttgtatcgtttattctgcgccgcccggagcggagcgaaacggcacaaccatcggatcaggctttggctcaacaatga

SEQ ID NO: 462076 - DNA, 867 bp, Shigella boydii
atgttcggcaatgatattttcacccgcgtaaaacgttcagaaaataaaaaaatggcggaaatcgcccaattcctgcatgaaaatgatttgagcgttgacaccacagtcgaagtatttattaccgtaacccgcgatgaaaagcttatcgcgtgcggtggaattgccggaaatattattaaatgcgttgctatcagtgaatccgttcgcggtgaaggactggcgctgacattagccactgaactgataaacctcgcctatgagcggcacagcacgcatctgtttatttataccaaaaccgaatacgaggcgctgttccgccagtgcggtttttccacgctgaccagcgtacccggcgtgatggtgctgatggaaaacagcgccacgcgactgaaacgctatgccgaatcgctgaaaaaatttcgtcatccagggaacaagattggctgcattgtgatgaacgccaatccctttacgaatggtcaccgttatctgattcaacaagctgcggcacagtgcgactggttgcatctgtttttagtcaaagaagattcttcacgcttcccctatgaagaccggctggatctggtgttaaaaggcaccgccgatattccacgcctgactgtgcatcgcggctccgaatacatcatctcccgcgctacgttcccttgctacttcattaaagaacagagcgtcattaaccattgttacaccgaaattgatctgaagattttccgtcagtacctcgctcccgcactgggtgtaactcaccgctttgtcggtactgaaccctttcgcccagtacaaccaggatatgcgctactggctgaaaacgccgactatctccgcaccgcccatcgaactggttga

SEQ ID NO: 462077 - DNA, 825 bp, Shigella boydii
atgcagttcaccaaacagggcgcgctggagaaaggggagagctacttcattaccgggaaagggtcaatggggatggcgatgcgcgccaaaacgccaatctttgatgacgatggaaaagtcatcggcgtggtgtcgattggctacctggtgagtaaaatcgatagctggcgggctgagtttttattaccgatggcaggtgtgtttgtcgtgctgttagggattctgatgttgctgtcgtggttcctggccgcgcatatccgtcggcagatgatgggcatggagccaaagcaaatcgcacgcgtggtccgtcagcaagaggcgctgtttagttcggtttatgaagggctgattgcggtggatccgcacggttacattaccgccatcaatcgtaacgcaagaaagatgctggggctgagttcccccggacggcaatggttgggtaaacccattgctgaagtggtcaggcccgccgatttctttaccgaacagattgatgaaaaacgtcaggatatggtggctaactttaacggtctgagcgttattgccaatcgggaagctattcgttcaggtgatgatttgctgggggccattatcagctttcgcagtaaagacgaaatttccaccctcaatgcgcaactgacgcaaataaaacaatacgttgagagccttcgtacattgcgacacgagcatctcaattggatgtcgacgctcaatggtctgttgcagatgaaagagtatgatcgcgtgctggcgatggtgcagggggagtctcaggcccagcaacagcttattgacagcctgcgcgaggcgtttgccgatcgctag

SEQ ID NO: 462078 - DNA, 477 bp, Shigella boydii
gtggcggggctgctttttggtaaagtgcagcgcgcccgggaactggggctaaaaatgatcattgtccccggtagccagctttcgcaactgccgccaggactggatagcaccgagtttgcagccattgtgggcaatttacttgataacgccttcgaagccagcctgcgtagcgatgaaggaaacaagatcgttgaattattcctcagcgatgaaggcgatgatgtggtgattgaagtcgccgatcagggctgcggcgttccagagtctctacgagacaaaatatttgagcagggggtcagtacgcgtgctgacgagcccggtgaacatggcattgggttgtacttgattgccagctacgtaacgcgctgcggtggtgttatcactctcgaagataatgatccctgcggtaccttattttcaatctatattccgaaagtgaaacctaatgacagctccattaaccctattgatcgttga

SEQ ID NO: 462079 - DNA, 1086 bp, Shigella boydii
atgaagacgtttcctctgcaaagcctgacgcttattgaggcgcagcaaaagcagtttgcgctggtggacacgatttgccgtcactttcccggcgcggagtttctaaccagcggtgatttgggcttaacgccggggctgaatcaaccgcgtattacccaacgggtggagcaggtgctggctgatgcatttcacgcacaggctgcggcgctggtgcagggcgcggggactggcgcgattcgcgccgggctggcagctttgctcaaaccggggcagcgtcttctggtgcatgacgcgcctgtttacccgacgacacgggttattattgagcagatggggctgacgcttattactgttgatttcaatgacctgtcggcactgaagcaggtcgtcgacgagcaacaaccggatgcggcgctggtgcagcatacgcgccagcagccgcaggacagctacgtgctggcagatgtgctggcaacgttgcgcgcggcaggtgttccagcgttaaccgatgacaactatgcggtgatgaaggtggcgcgaatcggctgtgaatgcggcgcgaatgtctcgacattttcctgcttcaagctatttgggccagagggtgttggtgcagtggtcggcgatgctgatgttatcaaccgtattcgcgccacgctttactccggcggtagccagatccagggcgcacaggcgctggaagtattgcgttgtctggtgtttgcgccagtgatgcacgcggtgcaggcaggggtatctgaacggttgctggctttgcttaacggtggtgaggtgccggaagtgaaaagcgcggtgattgctaatgcgcagtcgaaggtgttgattgtcgagtttcatcagccgattgccgccagagtgctggaagaggcgcaaaagcgcggtgccttgccttacccggtgggtgcagagtcgaaatatgaaatcccgccgctcttttatcgcctttccggaacgtttcgccaggcgaatccacaatcagaacattgtgcgattcgcattaacccgaatcgcagcggtgaagagacggtgctgcggattttgcgtgagagtattgccagtatttaa

SEQ ID NO: 462080 - DNA, 1023 bp, Shigella boydii
atgttggatattgataaaagcaccgtggactttctggtcaccgaaaatatggttcaggaagtggaaaaagttctcagccatgacgttccgctggtgcacgccatcgtggaagagatggtgaagcgcgacattgatcgtatttatttcgttgcctgcggctcgccactcaacgcggcgcaagcggcgaaacatctggcggatcgcttttccgatcttcaggtctacgccatttccggctgggagttctgcgataacaccccgtatcgcctcgacgatcgttgcgcggtgattggcgtttctgactacggtaaaacggaagaggtaatcaaagcgctggagctgggccgggcctgcggcgcactcactgcggcgttcaccaaacgcgcggacagcccgattacctcggcggcggaatttagcattgattatcaggccgactgtatctgggaaattcacctgctgctctgctacagcgtggtgctggagatgatcacccgcctcgcgccgaacgcggaaatcggcaagatcaaaaacgatctcaagcagttgccgaatgcgctcggtcatctggtacgcacctgggaagaaaaaggccgccagcttggtgaactggccagccagtggccgatgatttataccgttgctgcgggtccgctgcgtccgctgggttacaaagaaggcattgtaacgctgatggaatttacctggacgcacggctgcgtgattgagagcggagagttccgccatggcccgctggagattgtcgaaccgggcgttccgttcctgttcctgctcggcaatgatgaaagtcgccacaccaccgaacgcgccattaactttgttaaacagcgtactgacaacgtgatcgtcatcgattacgccgaaatttcgcaagggctgcacccgtggctggcaccgttcctgatgttcgtgccaatggagtggctctgctactacctgtctatttacaaagatcacaacccggatgaacgccgctattacggtggtctggtggaatattaa

SEQ ID NO: 462081 - DNA, 1182 bp, Shigella boydii
atgcataactcccccgcagtctccagcgcgaaatcgtttgacctgacctcgacggcgtttttaatcgttgcctttctcaccggtattgcgggtgctctgcaaaccccgacactcagtattttccttaccgatgaagtacatgcccgtccggcgatggtgggattcttctttaccggcagcgctgtcattgggattctggtaagtcagtttctcgctgggcgctctgataagcgcggcgatcgcaaatcgctgattgtcttttgctgcctgttaggcgtgctggcctgcaccctttttgcctggaatcgcaactactttgttttgctattcgttggcgtctttcttagcagctttggctcgaccgctaacccgcaaatgtttgcccttgcccgtgaacatgccgacaaaaccggacgtgaggcggtgatgttcagctcttttttacgcgctcaggtttcactggcatgggtcattggcccaccgctggcttatgcgttagcgatgggtttcagctttacggtaatgtatctgagcgcagcggtagcgtttattgtttgcggcgtgatggtgtggctgtttttaccgtcgatgcaaaaagagcttccgctggcgaccggcacggttgaagcgccgcgccgtaaccgtcgcgatacgctactgctgtttgtcatttgtacattgatgtggggctcgaacagcctgtacatcatcaacatgccgctatttattatcaacgaactgcatcttcccgagaaactggccggtgtgatgatggggaccgccgccgggctggaaatcccgacgatgttgattgccggatatttcgccaaacgtctgggtaagcgtttcttaatgcgcgttgctgccgtgggtggcgtctgtttttacgcaggaatgctgatggcgcattcacctgccattctgttgggcttgcagctgctaaatgctatttttattggcattctgggcggcatcgggatgctctattttcaggatttgatgcccggtcaggcaggttcagccaccacgctctataccaacacgtcgcgcgtgggctggatcatcgcaggatcagtggcgggcatcgtcgccgagatctggaattatcacgctgtgttctggtttgcgatggtgatgattatcgccactctgttttgcttactgcggactaaagatgtttaa

SEQ ID NO: 462082 - DNA, 255 bp, Shigella boydii
atggaatgccgtccgggttgcggggcgtgttgcactgccccttcaattttcagccctattcccggtatgccagatggcaagcccgccaatacgccctgcattcagcttgatgaacagcaacgctgtaaaattttcacctcgccactgcgaccgaaagtctgtgcaggcttacaagccagcgctgaaatgtgcggtaactcgcgtcagcaggccatgacctggcttatcgatctggaaatgctgaccgcgtcttaa

SEQ ID NO: 462083 - DNA, 1242 bp, Shigella boydii
atggcgagaaaaacacccccattaaccacggtgcagatcaaagcagccagaccagcggaaaaggaatacaccctacaggacggcggagggctttttctcctggtcaaaccgtccggatcaaaactctggcgattttcctactaccggccatcggacaaaaaaagaatattgctgagttttggatcgcttgatgatgtttccctggctgatgccagaaaacgccgtagcgagtacagagcgttaatcagtgccggaactgacccgcagggccatgagaagaaaaaacgagaggcagaggcccgaagacaagggaacacgttcgaaaatgtggcggcggcatggtaccaggtgaaaatcagccagaatctggcccccaacacgattaaagacatctggcgttcgctggataaatatgtattcccgttcatcggcaacacgccaatagataccctcaccgcccgaaggttcgttgaagtgcttacacccatcaaggagcgcggcaacctggaaacactcaagcgggttttacagcgcgttaatgaggtaatggattacgccgccaacagtgggctgattgatgccaatccggctatgaatgtgcgtaaggcgtttccctcacctgtaaaaaaacatatgccaacaatccgccccgaacagctgccggagcttatgcaggctttatcagtatcggcaacagaacggcagaccagattactgattgaatggcagttactgaccgtaacccgtcccgccgaagcgtcatcaacgcggtgggatgaaatcaacctggacgcgaagcaatggacgatacctgccggacgcatgaagatgcgcagggatcacgttatcccgctttccggtcaggctatggcggtgctggaggccatgaaaccaatcagccaccaccgcaattacgttttcccaagtctgaaagacccacagcagccgatgaacagccagacagctaacgcagcattgcggcgtatgggattcgctggcgtgctggtgtctcatggattacgcgccatattcagcacagcagcgaacgaggaaggattcgagccggacgtaatagaggcggcacttgcccacgtcgacaccaacgaagttagacgggcatacaaccggagcaactacatagaaaaacgcatcgtgctgatgcgctggtggggcgaatttgtcgaggctgcggcgacgggcgtaaccctcgccagtggtaaaaggggtatccgagccgtgtag

SEQ ID NO: 462084 - DNA, 207 bp, Shigella boydii; identical to SEQ ID NO: 6279

SEQ ID NO: 462085 - DNA, 666 bp, Shigella boydii
atgacaaacacgaaaaaagcggccccgatatggagccgcctttctgaacaattaacccgctgcgccttatgtgtatatgatcccaaacataagcacggggatgatagccgctatcaggctggtgggcaatgcaatcagtctggttcagttcgttgccatacctgcaatgagcgcttttccctatactctttaaggaattgctcaagggcaaaagcacatggtgcgaatctttctgattcatgctctatctttctgcgccgtcttttccgtgccggtgataatgttttggtcaattctttatcggtcattgtgttgtcctgcatagcaatgcgccgtaatacctcacaccacggcgctgatagtttttatcctttgggttctatgccgcgccgctttagttcagtgcgccccaactctttaagccagttggctaggcttatgccgtcgctctgtgcttctttgtcgaattgctcttttagctctggagaaattcgcattctgaattgtggggattgcccgtcccctttagggcttttatcgcgtttgattattgacaagtggtcacctattgaattagcctttccattgttaggtggccaccttaacacaagagcacttaaaaaagcaaagccccgcaagtgtcattaccactcgcagggcttctaa

SEQ ID NO: 462086 - DNA, 222 bp, Shigella boydii
atgcacaataaaaccacaccgaacgcagcagccgccgcactcactacgctgatgcacgcgcttattgatattgaatgcactgcagagcttgcgcagggagaagaacagaaagaccggacacagttcgccctggaatgtatccgatacatcgcaacgcggtcgctgaatgacgctaaaaatattcttgttgctgattgtgaaaatggggggggttatgcgtga

SEQ ID NO: 462087 - DNA, 234 bp, Shigella boydii
atgcgtgatgatcgttttaattccctgaaacaggaatttcccggcgttcctgatgatgcggctgatgcgctttcgtcaatgccagaacttattagagcggcttttttcttactttccacgagagaatataaatcaacggggcttgatgtactgaatatcgccgccgattatgcggaatatgtggcagaggcgcgttacagaagaaaatttcctgaggatgtaagccatgcgtga

SEQ ID NO: 462088 - DNA, 234 bp, Shigella boydii
atgcgtgatatttaccacgaaacaatagaccgcgcatttcttgcactttctcacagtgaaaacatgctggaaatattgcgcatatggcttgaaacacttggcgacaatgaacgcgacaaacaaaaatcaagaattgccacggcattaataacgcttcttgagcctgtaataatggaactgcaagaaatagatctattgcacgacagatataaagaacagcacaccggagaataa

SEQ ID NO: 462089 - DNA, 300 bp, Shigella boydii
atgaaacttaaatattctggcttaactgccagtggcaacactcaccctaaatttacgcgcggtgatatttaccgcgaccagtacggcggcacggtaatgattaagggcgtggaagaacggcgtgtaacctaccgccgtgaaggttacgaatatgattgcgtgatgcctgtttatcagttccggcgtgatttttctctggtacagaccgcgccgcataacgtgcccaccagcaacgccagggcacgggcaaacatccagaagctgaaaaccatgattaacggattcaggggcaagaaatga

SEQ ID NO: 462090 - DNA, 1401 bp, Shigella boydii
atgaaaagcgcaccgaacttaaaaaaacagccttacgacaagatgaccgaagtcattatttttgcgggtagtgatgcctgggcacatgcgaaacagtggcaggaacaggacgggcgactggctggcgataatgtgcctcccgttgtgctggctgatgatcaactggatgaactggcagacctgagaatcatcgacgaggggcgctattgtgtccggctgtacaaggcaggccacatcaggccatcaaatattaatgccattgcgcacaagctggcggcggcgggtgtaactgatgcgaattattaccccgaagggatgcacagccatatgcgggagaactggcgcgaatacctggaacgggtgcgcgggaaagagccggtggaagaaaaaaaccaccagcgaaaaaccacgctaccgatgagcgttggatctaccggatacgacacgcaactggattacgtggttaaggggattattccggcggtatcgctatgcagcatatacggggctagcgggtcctataaatcattccttgccggatcgtgggcgtgccatgttgccactggtcgccagtggggaggccgcagggttgcacatggtgcggttctctatgtggttggtgaaggcggtatcggcgttccgcgtcgtgtaaaagcctgggaggttgtgcacgatgagcaggtgaaaaatctgtatctggtaaaccgccccatctttccggctgccccgcttgatgttgatgaaatggttatcgctgcccgtcaggtggagcgggaaacgggtaaacctgtacgcatgattattctggatacgctggcgcgttgctttggtgggaatgatgaaaatgattcccgtgatatgggggcgtttatccgtggttgtgacgaactgaaacgacgcacaggggccacggtgctggtggttcaccattccggcaaggatgagacgaaaggcgcgcgcggttccagtgcatttcgtgcttcgctggatgctgaataccggatacgcagggaggacgcaggaagcgaagcgctggttatctcatgcaccaaaatgaaggacgcggaggaactcaaagaagccgcatatgacttacgcgtggtggagctttttaccgacgctgacggtgaattaatcacgtcgctggtggtggtggatgatccgcgccctcctgttgaactggagcgcatcgaggaggcagggaacaagacggaaaaccataccgcgctatgggggtgcatccgttcacgcacacagaacggcgacaagtgcacgatcccgctgttacgtgatgacatgaaaaagctggggtatgaaatgaaaaacttccggcgctggctgtacaagctggaaaaagatggggttattagtatcgatggggatgatgtagcgccgctataa

SEQ ID NO: 462091 - DNA, 252 bp, Shigella boydii
atgacccaaaaacgcagagacagaacagagccaaaatataaagcgttagacatgactgagcacaccttaaaggtggcaatcagaacgatagaccgccacacgcgggaaggatacgcgaaggaacatcccgacctgataagcgcattcatgaccacggcggcggcaaactttgccacgctgacagaacgggagattgccgaagcggaacaggtaacaaccatcaacgttaaaaccggagaggtggaattatga

SEQ ID NO: 462092 - DNA, 411 bp, Shigella boydii
atgacggcacagatagccgcttacgggcggctggtggacgacccgcaggtaaaacagaccagcaagggcacaccgatgacgctggcgcgtatggcggtatctttgccatgcagccaggcacaggacggacaggcgacgttatggttatcggtcatcgcatttggcaaacaggccgacttcctggctaaacatcaaaaaggcgatgttgccagcgtatccggcacgatgcaggtaagccagtggaccggacagaacggagaaacgcggcagggctggcaggttatcgcagacagcgtaatcagtgcccgcgcggcacgtccaggcgggaacagacgcaaaaccacaggcacacagggtaatcagccaccagcgggaggcgatgacccttacggtgatgatatttcgttctga

SEQ ID NO: 462093 - DNA, 273 bp, Shigella boydii
atggtacatgaccgcatagcggaggaactggaggcgaaaggcttttaccggagggcggcggcgcgatggggtgaagtcatgcagctggtggagacagacaaggaacggcatcacatcacgatgcgacggctggaatgttcaaggaaggcacagagggcaccggagccgccggataatttcggagacctgaaaaaggcagtcgatcgcacttatgccgaaatgggtatagatggtgctggtgatgaaatatggcgcaattaccaggacagctaa

SEQ ID NO: 462094 - DNA, 207 bp, Shigella boydii
atggctgaagagaaaaaaggcggtgtttcggtgtacataagccccgaaatcgtggaggtgctcaagcagcgccacaaaaaaaactatgaggctggcgtggcggctggactggatccgctgatgacgccggagccgtcgataggttcacttgtacgctcttatttacttgcggcgcttgggatgcataaaaattatgggggtgaataa

SEQ ID NO: 462095 - DNA, 1056 bp, Shigella boydii
atggcaggcaaagcaacggcacttaacactaaccagctttttatgtacctgaatcgcggggatattgcggattttaaattcagccctctgtttaccacgctgtttttcccgaacgtggcgacattcagcacgcaaaacatcatgctggataccctggacattgaagaagtcaccatgtcggcgttttgttcgcctatggtgggtagccaggttcagcgcgataaagggtacgaaaccagcacaatcaaacctggctacatgaagccaaagcacgaaatcgatccaacgaaaaccatcatgcgcatggctggagaagatccggcacagcttaacgaccctacctatcgccgtatgcgcctgattactggcaacatgcgccgccagataaacgccattaaggcacgcgtggaatggctggcggtgaatgcggtaacgaccggaaaaaacatcattgagggcgaaggcatagaacgctatgaaatcgactggaagataccggaaaaaaacatcatagagcagtccgacggcaaaaaatggtccgagcatgataaagatatttacgatccaatctatgacatcgaactatacgcagatcaggcaggttgccccgccaacgtcatgattatgggcgctgaggtatggcgcacgttacgcagctttaaaaaattccgtgaactgtacgatctttcccgtggttcagaatccgccgcagaaatggcctgtaaaaacctgggcgaagtggtgagctttaaaggctatctgggcgatattgctcttattgtctattccggcaaatacactgacagcgacggcaccgaaaaatatttccttgagcctgatttgctggtcctgggcaacaccaacaataaagggctggtggcctatggtgcgattatggatcaggaagcggtaagaacgggcgcaacgcaaaacatgtactacccgaaaaactggattgaggacggcgatccggcgattgagtacgtgcagacacacagcgcaccgcagccggttccggcagatattcgcaaatttgttaccgtcaaaattggttaa

SEQ ID NO: 462096 - DNA, 336 bp, Shigella boydii
atggacactccatatattgagttatttgcaggcagtcagcaggtatcaacgacactggtacattttgccgctgatgctggcgttattcaggaatttaccccgctgatgctggtggacaatggcgagtttaagccgtgggatggtcaggaatctggcaaggctgtttatctgacttcgtacctcgtggacacgtcaaagcagaaatcagcacagtgttacaagacggggatattcaatattgccgccgttaactggcctgagagcgtcgacaccgatgcgaaaaaatgcgccgcctttgcgggttctggcgtatccgttcagccgctggcccgataa

SEQ ID NO: 462097 - DNA, 414 bp, Shigella boydii
atggcaacgaatgaaagcatcatggcgctaccgctggcgagtaaatttaaagccgaagcgcgggcaatggctgacagaggtttatcaacctacgaggccgtatatcaactcaacaaactggaagagcaggacaagccgcgcgctgatgcgattatggcgcttcatgagcataaagactatcagccgctgttgcgtgcaatggcaaacgtgccttgtatcgatgttgatacggctaaaaacatcctgaacatgaccatagagcaggaacgcccgaaggttgcaccagagcttaccgcagcctttgaaaactttatggacatgcacagcccacaaaccgtatcagctggcatggcatacgatggcagaaacccaggcgatgacggcgacatcgatcgcatactgaaaaccatctga

SEQ ID NO: 462098 - DNA, 435 bp, Shigella boydii; identical to SEQ ID NO: 8942

SEQ ID NO: 462099 - DNA, 282 bp, Shigella boydii
atgacagaagccgaaatactgggattaatccgccgtgctggtggaatcagccagcagactgacgaacaggccacgcagccggacagcgtgacagccgaaaattatgcgcgtgttgttgctgaggtgatgcgccgtgatggtatccagcttaatgatgtggatatgcgcaacatacggatccgcgttcttgaaatgctggcctacaatcgccgcgtggcactgtatcgggaaacggagaaaattacataccactggaagaagccggagcggttgcggcggtaa

SEQ ID NO: 462100 - DNA, 315 bp, Shigella boydii
atgttgaccactgacgaatggggtagttacaccagagagttaccgaaggaaaagcatctgactggtaagatttttactcagcgcattgagcgcaacaatctgaccctgagaacccgaatcaaacgtctggcccgcagaaccatctgtttctcgcgctctgtagaacttcatgaaaaagtcatcggtgcttttatcgaaaatatatgttctactaattggagtcatcacccttctgatgagctttccttggatgattaccagactgaatacacagccaaagatttttacctcattctgctcttttttctcaaatga

SEQ ID NO: 462101 - DNA, 2502 bp, Shigella boydii
atggccctgattgtggaatttatttgtgagctacctaacggcgtacatgcgcgtccggcaagccacgttgaaacgctgtgtaatactttttcatcacaaattgagtggcataacctgcgcactgaccgcaagggcaacgccaaaagcgcccttgcgctgattggcaccgatacgctggcgggcgataactgccagttactgatttccggggccgacgaacaggaagcgcaccagcgtttaagccaatggctgcgcgatgaattcccccactgcgatgcgccgctggcggaagttaaatctgacgaactggaaccactgccggtttcactgaccaatctgaatccgcaaattatccgcgcccgcaccgtgtgcagcggtagtgcaggcggcattctgacgccgatctcttctttagatctcaatgcgctgagtaatcttcccgcagccaaagacgttgacgccgagcaatccgcactggaaaatggcctgacgctggtactgaaaaacattgagtttcgtctgctggatagcgacggtgctaccagctcgatactggaagctcaccgatccctggctggcgatacatctttacgtcagcacttactgacaggcgtcagcgagggattaagctgtgccgaagcgattgtcgccagtgcgaatcacttttgcgaagagttcgcccgttccagcagcagctacctgcaagaacgtgccctggacgtacgcgacgtctgcttccagttactccagcaaatctacggtgagcaacgcttcccggcaccgggcaaactgacgcagcccgccatttgtatggctgatgaactgactcccagccagttcctcgaactggataaaaatcacctcaaaggtctgttactgaaaagtggcggcaccacctcacataccgtaattcttgcccgttcgttcaacattccgacactggttggtgtagatattgatgcccttactccgtggcagcatcaaacgatttatatcgacggcaacgccggggcgattgtggttgagccaggggaagccgtggcccgttattatcagcaagaagcccgcgtacaggacgcccttcgtgagcaacagcgtgtctggctgacccaacaagcccgtaccgctgacggtatccgcattgaaattgccgctaacatcgctcactccgtggaagcgcaggccgcattcggcaatggtgcggaaggcgttggtttgttccgcactgaaatgctctatatggatcgcaccagtgcaccgggcgaaagcgagctgtacaacattttttgtcaggcgctggagtctgccaacggacgcagcattattgtgcgcactatggacattggcggcgacaaacccgttgattatctgaacattccggcagaagctaacccgttcctcggttatcgcgctgtgcgtatttatgaagaatacgcctcgctgttcaccacacaactacggtcgatcctgcgcgcctccgctcacggcagcctgaaaatcatgatcccgatgatctcctcaatggaagagatcttatgggtgaaagaaaaactggcggaagccaaacagcaactgcgtaacgaacacattccgtttgatgagaagatccagcttggcattatgctggaagtaccgtcggtgatgttcatcatcgatcaatgctgcgaagagattgatttctttagtattggtagtaatgacctgacgcaatatctgctggcagtggatcgcgataacgctaaggttactcgtcactacaacagcctgaatccggcattcttgcgggcgctcgattacgccgtgcaggcggtgcatcgccagggcaaatggattggtctgtgcggtgagctgggagcgaaaggttccgtgctgccgttgctggtcggcttagggctggatgaactcagcatgagcgcaccatcaattccggcggcgaaagcgcggatgacgcaacttgatagccgtgagtgccgcaagttgctcaaccaggcaatggcctgccgtacttcgctggaagtggaacacctgctggcgcaattccgcatgacccaacaggacgcaccgctggtcaccgccgagtgcatcacgctggaaagtgactggcgcagcaaagaagaagtgctcaaaggcatgaccgataacctgctgctggcgggccgctgccgctatccgcgtaaactggaagccgacttatgggcgcgcgaggccgttttctctaccggtctgggctttagttttgccattccacacagcaaatcagaacacattgagcaatccaccatcagcgtggcgcgtctgcaagcgccggtgcgctggggcgatgatgaagcgcaattcatcattatgttaaccctgaacaaacacgctgcgggcgatcagcacatgcgcattttctctcgcctcgctcgccgcatcatgcacgaagaattccgtaacgcgctggttaacgccgcctctgccgacgctatcgccagcctgctgcaacatgaactggaactgtaa

SEQ ID NO: 462102 - DNA, 432 bp, Shigella boydii
gtggcgttaaatctcgcttcaggtgaagggaatttctttatccgtcctggcggcgtgttttatgttgcgggagataaagtcggcatcattcgtctggatgcctttaaaaccagtaaagagattcagtttgcggtgcagtcagggccaatgttattagaaaacggcgtaattaatccacgcattcacccgaatgttgcctcgcgtaaaattcgtaacggtgtagggattaataaacaagggaacgccgtgtttttgttgagccagcaggcgacaaatttttatgattttgcctgttatgccaaagcgaaactgaacgttgagcagttgctttatcttgatggcacaatttcacatatgtatatgaaaggcggggcaatcccgtggcaacgctatccttttgtcaccatgatttccgtcgagcggaaaggttaa

SEQ ID NO: 462103 - DNA, 1248 bp, Shigella boydii
atggccattaaaaaacgcagtgcaaccgttgtgcctggcgcatccggtgcggcagcggcagttaagaatccgcaggcctctaaaagcagcttctggggtgaactcccgcagcatgtgatgtcagggatttcacgcatggtgccgaccttaattatgggcggtgtgatcctcgctttcagccagctgattgcttatagctggcttaaaattcctgctgagatcggcatcatggatgctcttaatagcgggaaattctccggtttcgacctctccttactgaaatttgcctggctgtcgcagtccttcggcggcgtgttgtttggttttgccattccgatgtttgctgcttttgtggcgaactctatcggtggcaaactggcgttcccggctggttttatcggcggcttgatgtctacccagccgacgcaactgctgaacttcgatcccagcactatgcaatgggcgacctcttcgccggtgccgtccaccttcattggtgcgctgattatttctatcgtcgcgggttaccttgtgaagtggatgaaccagaaaatccagttaccggatttcctgttagcgttcaaaaccacatttttgctaccgattctttccgccatttttgtcatgctggcgatgtactacgtcattaccccctttggcggctggatcaacggcgttatccgtaccgtgctgactgccgcaggtgagaagggcgcgctgatgtacgcaatggggatcgccgcggcgacagcaatcgaccttggtggcccgatcaacaaagccgcaggtttcgttgccttcagctttaccactgaccacgtattaccggtcaccgctcgttctatcgctatcgttattcctccgattggtctggggctggcgaccattattgaccgtcgtttaaccggcaaacgcctgttcaacgctcaactttatccgcagggtaagaccgcgatgttccttgcctttatggggattagtgagggtgcgattccgtttgcgctggaaagccccatcaccgccattccgtcgtatatggtcggcgcgattgtcggctcaaccgccgctgtctggctgggcgcagtgcaatggttcccggaatccgctatctgggcatggccgctggtcactaaccttggcgtctatatggcggggatcgcgctgggggcagtcataactgcgctgatggtggtgttcctgcgtctgatgatgttccgtaaaggcaaattgttaatcgatagcctgtaa

SEQ ID NO: 462104 - DNA, 189 bp, Shigella boydii
gtgattgagcgggtcgaagcgaatgaaatgccgggcaataaaattggcctgctgaatgtccatcatcgcgtgaagttattgtatggcgaggggctgcatatccgccgcctggagccggggacggaaattgcgttttacattcctaaccaacgcaccccagtcgcctcacaggctacgttattgctttga

SEQ ID NO: 462105 - DNA, 522 bp, Shigella boydii
gtgaccgagccaaatcaggtgtggtgcggtgatgtgacctgtatctggacgggtaagcgctgggcgtacctcgccgttgttctcgacctgttcgcaataaaaccagtgggctgggccatgtcgttctcgccggacagcaggctcaccatgaaagcgctggaaatggcatgggaaacccgtggtaagcccggcggggtgatgttccacagcgatcagggcagtcattatacgagcaggcagttccggcagttattgtggcgataccagatcagacagagtatgagccggcgcggaaactgctgggataacagcccaatggaacgcttcttcaggagtctgaagaacgaatggatgccggtggtgggttacgtaagcttcagcgaggcagctcacgccataacggactatatcgttggatattacagcgcactaagaccgcacgaatataacggtgggttacccccaaacgaatcggaaaatcgatactggaaaaactctaactcggtggccagtttttgttga

SEQ ID NO: 462106 - DNA, 336 bp, Shigella boydii
atggcagaatcatttgcaacaggttccgatcatcaggttgtaaacgagctcaacggggaaagactgagagaacctaacgaagtttttaaacgtttaggtcgagcaataagatataattttcaagtggacgatgcaaaatttagacgcgataatgtaaaagaaataatttctactttattcgctaacaaagttgacgttgaccatcctgaaaataaatacaaagactttaaggatctcgaagataaagttgaaaaaaggcttcaaaatcgccagacggaatatcaaaatgaaattaatcaactatctgcgccaggtgttaattttgatgatatttaa

SEQ ID NO: 462107 - DNA, 444 bp, Shigella boydii; identical to SEQ ID NO: 461714

SEQ ID NO: 462108 - DNA, 663 bp, Shigella boydii; identical to SEQ ID NO: 461715

SEQ ID NO: 462109 - DNA, 714 bp, Shigella boydii
atggaatcatactcacaaaacagcaataaattagattttcagcacgagaccaggatattaaacggtatatggctcattaccgctttaggtttggtggcaaccgcaggactggcctggggagctaagtatctcgaaattacggcaaccaaatatgattcaccaacaatgtatgtcgccatagggttattattagtttgtatgtatggcttaagtaaggatatcaacaagataaatgccgtcatcgcaggcgtaatatatctgtttttactctctttggtggcgattgtcgttgcaagtttagttcctgtatatgccattatcattgtgttcagcactgcgggcgcgatgtttttaatcagtatgctggccggtttattatttaatgttgatcctggttctcaccgttttatcattatgatgacgttgacagggttggccctggtaatcatcgtgaatgcggcattaatgagtgaacggcccatttgggtaataagttgcttagtgattgtgttatggccaggcattatctcgcatggacgaaataagctccttgaactggcaggaaaatgccatagtgaagagttgtggagtccggttcgttgcgcttttacaggtgcattgacactctattactattttatcggcttctttgggatacttgccgcgatagctataacgcttgtctggcaaaggcatacgcgtttttttcattag

SEQ ID NO: 462110 - DNA, 1083 bp, Shigella boydii; identical to SEQ ID NO: 457667

SEQ ID NO: 462111 - DNA, 150 bp, Shigella boydii
atgaacgctaagataattgcctcgctggccttcaccagcatgttcagcctcagcaccctgttaagcccggcacacgccgaagagcaggaaaaggcgctgaatttcggcattatttcaacggaatcacagcaaaacctgaaaccgcaatag

SEQ ID NO: 462112 - DNA, 585 bp, Shigella boydii
atgaccctggaaaccgcttttatgcttcctgtgcaggatgcccagcacagttttcgtcgcctgttaaaggccatgagcgagccgggcgtgattgtcgccctgcatcagctcaaacgcggctggcagccgctgaatatcgccaccaccagcgtgctgctgacgctggctgataacgacacgccggtgtggctttccgcgccattaagtaacgatatcgtcagccagagcctgcgttttcataccaacgcgccgctggtcaatcagtcggaactggcgaccttcgcggtaacggatgaggcgatttccagcgaacagctcaacgctctttccagcggcaccgctgttgcgccggaagcgggcgcgacgctgattttacaggtcgtcagcctgagcggcgggcgcatgctgcgccttactggcgcgggtattgccgaagaacgaatgatcgctccgcagctgccggagtgcattctgcacgaactcaccgagcgcccgcacccgttcccgctcggcatcgacctgatcctgacctgcggcgagcggctgctggctatcccgcgaaccactcatgtggaggtgtgctga

SEQ ID NO: 462113 - DNA, 1059 bp, Shigella boydii
atgtacgttgccgtgaaagggggcgagaaggagatcgacgccgcccacgccctgcaagagagccgacgccggggcaataccgatttgcctgaactgagcgtcgcccagattgaacagcagcttaatcttgcagtagatcgcgtgatgaccgaaggcggcattgccgaccgcgaactggcggcgctggcgctgaaacaggccagcggcgataacgtcgaagcgattttcctgctacgcgcctaccgcaccacgctggcgaagctggcggtaagcgagccactcgacaccacggagatgcgtctcgaacggcgtatttcagcggtttataaagatattcccggcggtcagttgcttggcccaacctacgactacacccatcgcctgctcgatttcaccctgctggcaaacggcgaagcgccgacgctgaccaccgcagacagcgaacaatccccgtcgccgcacgttttcagcctgctggcgcgtcaggggctggcgaagtttgaagaggatagcggcgcacagccggatgacatcacccgcactccgccagtttacccctgttcacgttcttcccgtttgcagcagttgatgcgcggcgacgaaggctatttgctggcgctggcctactctacccagcgcggttacggacgcaatcacccgttcgcgggcgaaatccgcagtggttacatcgacgtgtcgattatgccggaagagctgggatttgcggtgaacgtcggcgaactgctgatgaccgagtgtgaaatggtcaacggttttattgacccgccggatgagccgccgcacttcacgcgcggctacgggctggtgttcggcatgagcgagcgcaaagcgatggcgctggttgaccgtgcgttgcaggctccggagtacggcgagcacgcgacaggcccggcgcaggatgaagagttcgtgctggcacatgccgacaacgtcgaagccgcaggctttgtctcgcacctcaaactcccccactacgtcgatttccaggccgaactggagctactcaaacgtctgcaacaggagcagaaccatggctaa

SEQ ID NO: 462114 - DNA, 846 bp, Shigella boydii
atggctaatctgagcggctacaactttgcctacctcgacgagcagaccaaacgcatgatccgccgcgccatcttaaaagcggtggcgatccccggttatcaggtgccgtttggcgggcgcgagatgccgatgccctacggctggggaaccggcggcattcagctcaccgccagcgtgattggcgaaagcgacgtgctgaaggtgattgaccagggcgcagacgacaccaccaacgccgtgtcgattcgcaacttctttaagcgcgtgaccggggtaaacaccactgaacgtacggacgatgcgacgcttatccagacgcgccatcgcatccccgaaacgccgctgaccgaagatcagatcattatcttccaggtgccgatccccgaaccgctgcgctttatcgagccgcgcgaaacggaaacccgcaccatgcacgcgctggaagagtacggcgtgatgcaggtgaaactgtatgaagatatcgcccgcttcggtcatatcgccactacctacgcctatccggtgaaggtgaacgggcgctacgtgatggacccgtcgccgatcccgaaattcgataacccaaaaatggacatgatgcccgccctgcaactgttcggcgcggggcgcgagaagcgcatctatgcggtgccgccgtttacccgcgtggaaagtctcgatttcgacgatcacccgttcaccgttcagcagtgggatgagccatgcgccatctgcggatcgacccacagctatcttgatgaagtggtgctggatgacgccggaaaccgcatgtttgtctgctccgataccgattattgccgccaacagagcgaggcaaaaaaccaatga

SEQ ID NO: 462115 - DNA, 759 bp, Shigella boydii
atgaatcaaccgttactttcggtcaataacctgacccacctttacgcgccgggcaaaggctttagcgatgtctcttttgatttatggccgggggaagtgctgggcattgtcggggagtccggctccggaaagaccacgctgctgaaatcaatctccgcgcgcctgacgccgcagcagggggagattcactatgagagccgttcgctgtacgcaatgagcgaggccgaccgccgtcgcctgctgcgcaccgaatggggcgtagtgcatcagcatccgctcgacggcctgcgccgccaggtgtcggcaggcggcaatatcggcgagcggctgatggcgaccggggcacgtcattacggcgatattcgtgccaccgcgcagaagtggctggaagaggtggaaattcccgccaaccggatcgacgacctgccgaccaccttttccggcggcatgcagcaacgtttgcagatcgcccgcaacctggtgacgcatccgaagctggtgtttatggacgagccgaccggcggactggatgtgtcggtacaggcacgcctgctcgacctgctgcgcggcctggtggtggagctgaacctcgcggtagtgattgtcacccacgatttaggcgtcgcccgcctgctggcggaccgtttgctggtgatgaagcaggggcaagtggtggagagtgggttaaccgaccgcgtgctcgacgacccgcaccatccgtatacacaactgctggtgtcatcggttttgcagaattga

SEQ ID NO: 462116 - DNA, 681 bp, Shigella boydii
atgattaacgtacaaaacgtcagtaaaaccttcatcctgcatcagcaaaacggcgtacgcctgcccgtcttacaacgtgcctcgctcaccgtcaacgcaggcgaatgcgtggtgctccacggtcactccggcagcggcaaatcaaccctgctgcgctcgctgtacgccaactatctacccgacgaaggtcaaatccagatcaaacacggtgacgagtgggtagacctggtcaccgcgccagcgcgcaaagtggtggaaatccgcaaaaccacagtcggctgggtgagccagtttctgcgcgtcatcccgcgtatctcagcactggaagtggtgatgcagccgctgctcgataccggcgttccgcgtgaagcctgcgccgctaaagccgcgcgtcttctcacccgcctgaacgtgccggaacgcctgtggcacctggcaccatcgaccttctccggcggcgaacagcagcgcgtcaacatcgcccgcggctttatcgtcgactaccccattctgctgctcgacgaacctaccgcctcgctggacgccaaaaacagcgccgcggtggtggaactgattcacgaagccaaagcccgtggcgcagccatcgtcggcatcttccatgacgaagctgtacgtaatgacgtcgccgaccgcctgcacccaatgggagcctcttcatga

SEQ ID NO: 462117 - DNA, 1137 bp, Shigella boydii
atgattatcaataacgttaagctggtgctggaaaacgaggtggtgcacggttcgctggaggtgcaggatggcgaaatccgcgcctttgccgaaagccagagccgcctgccagaagcgatggacggcgaaggtggctggctactacccggcctgattgagctgcataccgacaacctcgataaattcttcaccccgcgcccgaaagtcgactggcccgcccattcggcgatgagcagccacgacgcgctgatggtggcaagcggcatcaccaccgtgctgaacgcggtggcgattggcgacgtgcgcgacggcggcgatcagctggagaatctggagaagatgatcaacaccatcgaagagacgcagaaacgcggcgtcaaccgcgccgagcaccgtctgcacctgcgctgcgagctgccgcatcacaccacactgccgctgtttgaaaaactggttcagcgcgaaccggtgacgctggtgtcgctaatggaccactcaccgggccagcgccagttcgctaaccgcgagaagtatcgcgaatattatcagggcaaatactccctcaccgatgcgcagatgcagcagtacgaagaagagcaattggcgctcgccgcacgctggtcgcagccgaatcgcgaatccatcgccgccctgtgccgcgcgcgacaaattgcgctcgccagccacgatgacgccacgcacgcccacgttgccgaatcccaccaacttggcagcgtgatcgccgaatttaccaccacgttcgaagcggcggaagcctcgcgtaagcatggcatgaacgtgctgatgggtgcgccaaatatcgtgcgtggcggctcgcactccggcaatgtggcggccagtgaactggcgcagcttggtctgctggatatcctctcttccgactactaccccgccagcctgctggatgcggcgttccgcgtcgccgatgacgagagcaaccgctttacgctaccgcaggcggtgaggctggtgaccaaaaatccggcgcaggcgctgaatcttcaggatcgcggggtgattggcgagggtaaacgcgctgacctggtgctggcgcatcgccagggcaatcacattcatatcgaccacgtctggcgtcagggtaaaagggtgttctga

SEQ ID NO: 462118 - DNA, 558 bp, Shigella boydii
atgatgggaaaactgatttggttaatggggccgtccggctccgggaaagacagcctgctggcggaactccgcctgcgggaacaaacgcagttactggtggcgcatcgctacatcacgcgcgacgccagcgccggaagtgaaaaccatatcgccctgagtgagcgggagttttttacccgcgcggggcaaaacctgctggccttaagctggcacgctaacggtctgtattatggcgtcggcatcgagattgacctctggctgcacgctggattcgacgtagtcgtcaacggttcacgcgcgcatttgccgcaggcacgggcgcgctatcaatcggcgctgctgcccgtctgtttacaggtttcgccggagatcctgcgccagcgcctgaaaaaccgtggccgtgaaaacaccagtgaaattaacgcccggctggcgcgcgccgcccgctatactccacaggattgccatacgctcaacaatgacggcagcctgcgccagtcggtcgacacactgctgacgctgattcatcagaaggagaaacaccatgcctgcttgtga

SEQ ID NO: 462119 - DNA, 450 bp, Shigella boydii
atgcctgcttgtgagcttcgcccggccacgcagtacgataccgacgcggtttacgcgctgatttgtgagctaaaacaggcggagtttgaccaccacgcgtttcgcgtgggctttaacgccaacctgcgcgacccgagcatgcgctacccgagcatgcgctaccatctggcgctgctggatggcgaagttgtcggcatgatcggcctgcatttgcagtttcatctgcatcatgtcaactggatcggcgaaattcaggaactggtggtgatgccgcaggcgtgcggtctgaacgtcagcagtaagttactggcgtgggcagaagaagaagcccgccaggccggggccgaaatgaccgaactttccaccaacgtgaagcgccacgacgcgcaccgtttttacctgcgtgaaggctacgagcagagccacttccgcttcaccaaggcgctgtaa

SEQ ID NO: 462120 - DNA, 759 bp, Shigella boydii
atgagcctgaccctcacgctcaccggcaccggcggcgcacagggcgttccggcatggggctgcgagtgcgtagcctgcgccagagcgcggcgctcaccgcagtatcgccgccagccatgcagcggcgtagtgaagtttaacgacgcaatcaccctgatcgacgccgggctgcacgatctcgccgatcgctggccgcccggatcgttccagcagtttttgctgacgcactaccatatggatcacgtgcaggggctattcccgctgcgctggggcgtgggcgatccgatcccggtttacggcccgccggatgaacagggctgcgacgatctgtttaaacatccgggcctgcttgatttcagccacacggtggaaccgtttgtggtgtttgatttgcaggggttacaggtcacgcccctgccgctcaaccactcaaaactgaccttcggttatctgctggaaacggcacacagccgggtggcgtggctgtctgacaccgcaggcttgccggaaaaaacgctgaaatttttacgcaataatcagccgcaggtaatggtgattgattgcagccacccgccgcgcgaggatgcgccacgtagtcactgtgatttaaacaccgtgctggcgctgaatcaggttatccgctcgccacgggtgattctgacccatatcagccaccagtttgatgcgtggctgatggaaaacgcactgccgtcggggtttgaggcgggatttgatgggatggagattggggtggcgtga

SEQ ID NO: 462121 - DNA, 330 bp, Shigella boydii
atgaaacgctttccgctatttcttttattcaccctgctcacgctgtccaccgttccggcccaggccgatattatcgacgacaccattggcaatattcagcaggcgattaacgacgcttataaccctgaccgtgggcgagactatgaagattcgcgcgacgacggctggcagcgtgaagtgagcgacgatcggcgcagacaatatgacgaccgccgccgccagtttgaagatcgccgcaggcagctggacgatcgccagcgccagcttgatcaggagcgtcggcagctagaagatgaagagcggagaatggaagatgagtatgggcgatga

SEQ ID NO: 462122 - DNA, 318 bp, Shigella boydii
atgcaaccggtgtttctttttaaaaaacgtaccggagcaatgggcggtcatgtcgctggcaccgcaggattctgcgttgctgtgccagccttttattcatggtcaatgagtgaggtgattgataaagacaccaggtcgtcagagcgcactgattatccgcattataccagtgaagttgcactggcttttggttcacgagtggttggcctcgaactggcaaaaatgattgtggatgcgtggctgggcgcacagtacgaaggcggtcgtcatcaacaacgcgtggaggcgattacggcaatagagcagcggagaaattga

SEQ ID NO: 462123 - DNA, 1986 bp, Shigella boydii
atgaataactctcggttattccgtttgagcagaattgttattgcgttaactgccgccagcggcatgatggtaaataccgctaacgcgaaagaggaagcgaaagccgccactcaatatacccaacaggttaatcagaattacgccaaatcattaccgtttagcgatcgtcaggattttgacgacgctcagcgtggatttatcgctccgctgctggatgaaggtattctgcgcgatgctaatggcaaaccatattatcgcggggaagattataaatttgatatcaatgcgcccgcgcccgaaaccgttaaccctagcctgtggcgtcagtcgcagttaaacggtatttccggcctgtttaaagtcaccgacagaatgtaccaggttcgcggtcaggatatctccaacatcacctttatcgaaggtgataccgggattattgtcatcgacccgctggtgacgccaccgagcgcaaaagccgcccttgacctttacttccaaaatcgcccgcaaaaaccgattgttgcggttatttatacccacagccataccgaccactatggcggcgtgaaaggcattatctctgaagctgatgtgaaatccggtaaagtgcaggttatcgcccctgctggctttatggacgaagccatcagcgaaaacgtactggcgggtaatattatgagccaccgtgcactttactcctacggcctgctgctggcgcataaccctcagggtaacatcggcaatggtcttggcgtaacgctggcatcgggctacccgagcatcatcgcaccgaacaaaaccatcaccaaaaccggtgagaagatgattatcgacggcctggagtttgacttcctgatgaccccaggtagcgaagcaccagccgaaatgcacttctatattccggccctgaaagcgctgtgtaccgccgagaacgccacgcataccctgcacaacttctacactctgcgcggcgcgaaaacccgcgacaccagcaagtggaccgagtatctgaacgaaacgctggatatgtggggtaacgacgcggaagtcctgtttatgccgcacacctggccggtccggggcaataagcatatcaatgattatattggtaaatatcgcgatactatcaagtacattcacgaccagaccctgcacctggcgaaccagggctacaccatgaatgaaatcggcgacatgattaaactgccgcctgcacttgccaataactgggccagccgtggctattacggttctgtcagccacaacgcccgcgcggtgtataacttctatcttggctattacgacggtaacccggctaacctgcatccgtatggtcaggtggagatgggtaaacgttacgtgcaggcgctgggcggttctgcccgtgtcatcagcctggcgcaagaagcgaacaagcaaggtgattaccgctggtcggcagaactgctgaaacaggtgattgccgccaacccgggtgaccaggtcgcgaagaatctgcaagcgaataactttgaacagctgggctatcaggccgagtccgccacctggcgcggtttctacctgaccggcgcgaaagagctgcgcgaaggggtgcataagttcagccacggcaccaccggttccccggacaccattcgcgggatgtcggtcgaaatgctgttcgactttatgtccgttcgcctcgatagcgcgaaagctgcgggtaaaaatatcagcctgaacttcaatatgagcaacggcgataacctcaacctgacgctgaacgatagcgtgcttaactaccgtaaaacactgcaaccgcaagccgacgcctctttctacatcagccgtgaagatctgcacgccgtgctgacaggacaagccaaaatggcggatctggtaaaagcgaagaaagccaaaattattggcaatggcgcgaaactggaagaaattattgcctgtctggataatttcgatttgtgggtgaatatcgtaaccccaaattaa

SEQ ID NO: 462124 - DNA, 276 bp, Shigella boydii
atgccaacagttctctctcgcatggcgatgcaactcaaaaaaacagcctggataattcccgtcttcatggtttcgggatgctcattatctccggcaatcccggtgatcggcgcttattatcccagctggtttttctgcgccattgccagccttattttgacgctaatcacgaggcgaattattcagcgggcaaatatcaatctggcatttgtcggaattatttataccgccctttttgctgtctacgccatgctgttctggctggcatttttctaa

SEQ ID NO: 462125 - DNA, 1032 bp, Shigella boydii
atggaaagtacgccgaaaaaagctcctcgcagtaaattccctgctctgttagtggttgcgttggcgctggttgcccttgttttcgttatctggcgcgtagacagtgcgccatcaactaatgacgcttacgcgtcagcagataccattgatgtggtgccggaagtcagcggccgcattgtagaactggcggtcaccgacaaccaggcagtcaaacagggcgatttgctgttccgcattgacccgcgcccgtacgaagccaatctggcgaaagctgaagcctccctcgcggcgctggataagcaaattatgctcacccagcgtagcgttgacgcccaacagtttggtgccgactcggttaatgccacggtagaaaaagcacgtgccgccgcgaaacaggccacagatacattacgccgcaccgagccattactgaaagaaggttttgtctcagcggaagatgttgaccgtgcaagaacggcgcagcgcgccgcagaagcggatcttaatgccgtattgttacaggcgcagtcagccgccagcgccgtcagcggcgtggatgtattagttgcccagcgtgcggcggtcgaagcggatattgccctgaccaaactgcatctggaaatggcgaccgttcgcgcgccgtttgatggccgggtcatttccctcaaaacctccgtcgggcaatttgcttctgccatgcgccctatttttaccctaatcgacactcgtcactggtacgtgatcgccaacttccgcgaaaccgatctgaaaaatattcgctcaggtacacccgcaacgattcgcctgatgagtgacagcggcaaaaccttcgagggtaaagtggattcgattggctacggtgtgctaccgaatgacggcggcctggtgctgggcggcctgccgaaagtttctcgctctattaactgggtccgcgttgcccagcgttttccggtcaaaatcatggtcgataaacctgacccggaaatgttccgcatcggcgcttcggcagtcgctaatcttgagccgcaataa

SEQ ID NO: 462126 - DNA, 2052 bp, Shigella boydii
atgagcgcgctcaactccctgccattaccggtggtcaggctgctggcgttctttcatgaagagttaagcgagcggcgacccggccgcgtgccgcagatcgtgcaactctgggtaggctgcctgctggtgattctgatctcgatgacttttgagatcccttttgtggcgttatcgctggcagtgctgttttacggtattcagtcgaacgcgttttacaccaaatttgtggcgatcttgtttgtggttgccacggtgctggagatcggcagcctgtttttgatctacaaatggtcatacggcgaaccgttgatccgattgatcatcgccgggccgatcctgatgggctgcatgtttttgatgcgcacccatcggctgggactggtctttttcgctgtcgccattgtcgccatttacgggcaaaccttccccgccatgctcgactatccggaagtggtcgtgcgcttaacgctgtggtgtatcgttgttggcctctatccaaccttgctgatgacgttaatcggcgtgctgtggtttcccagtcgtgccatttcgcaaatgcatcaggcgcttaatgatcggcttgatgatgccattagtcacctgacagacagcctcgcaccgctacccgaaacgcggattgaaagagaggcgctggcgctgcaaaaactgaatgtcttttgtctcgcggacgatgccaactggcgaactcaaagcgcatggtggcaaagctgcgtggcaacggtaacctacatttactcgacgctgaatcgctacgatcccacctcttttgctgattctcaggcaattattgaatttcggcaaaaattagcctcagaaatcaacaagctgcagcatgccgttgctgaaggtcagtgctggcaaagcgactggcggatcagtgaaagtgaagcggtggcggcacgggaatgtaacctggagaatatctgccagacgttgttacaactgggccagatgaacccgaatacgccgccaacgcccgccgccaaaccgccatcaatggtcgccgatgcttttaccaatccagactatatacgctacgcggtaaaaacattgctcgcctgtttgatctgttacaccttttacagcggcgtggactgggaaggcattcacacctgtatgctgacctgcgtgatcgtcgctaatccaaatgtcggttcgtcgtaccagaagatggtgctgcgttttggcggggccttttgcggcgcgattctggcgctgttattcacgctactggtcatgccctggctggacaatattgtcgaattgctgtttgtgctggcaccgattttcctgttgggcgcatggattgccaccagctctgaacgctcttcttatatcggcacacagatggtcgtcaccttcgcgctcgccacgctcgaaaacgtttttggcccagtgtacgacctggtggaaattcgcgatcgcgccctgggtatcatcattggtaccgtggtgtccgcggtgatttacacctttgtctggcctgaaagtgaagcgcgcactctgccgcaaaaactagccggtgcgctgggtatgctaagtaaagtaatgcggatcccacgccagcaggaagtcacggctctgcgcacttatctgcaaattcgtataggtctgcatgcggcgtttaatgcctgtgaagagatgtgccaacgcgtggcgctggagcgtcaactggacagcgaagaacgcgccttactgattgaacgttcgcaaacggttattcgtcagggccgcgatcttcttcacgcctgggatgccacctggaactcggcgcaggcgctggataacgcactacagccggacagagcaggtcagtttgccgacgcccaggaaaaatacgctgccggtctggcaaccgcactcagctgttctcctcaaataacgcttgaagagacacccgcctcgcaggccatcctgcccaccttattaaaacaggagcaacacgtctgccagcttttcgcccgcttgccagactggacagccccggcattaacgcccgccacggaacaggcacaaggagccacgcaatga

SEQ ID NO: 462127 - DNA, 1467 bp, Shigella boydii
atgatcaatcgtcaactttcacgtctgctgttgtgcagcattctcggcagcacgacgctgatttccggctgtgccctggtacgtaaggattctgcacctcatcaacagctcaaaccggaacaaatcaaactggccgacgatattcatcttgccagctccggctggccgcaggcgcagtggtggaaacaactcaatgacccgcagctggatgcgctgatccaacggacgctaagtggttcacacaccctcgccgaagcgaaactgcgggaagaaaaagcgcagtcccaggccgatttgttagatgccggttcacaattacaggtcgcagcgttagggatgctcaaccgccaacgcgtctcggcgaacggctttttaagcccttatgcgatggatgcgccctcactgggtatggacgggccgtactatacggaagccacagtaggtttgtttgccggactggatcttgatttgtggggtgtgcatcgctcagcggttgccgccgccattggcgcgcataatgccgcgctggcagaaaccgcagcagtagagctatcgctgaccacgggcatagcgcagctttattacagtatgcaggccagctatcagatgctcgatctgttagaacaaactcgcgatgtgattgattacgcggtgaaagcgcaccagagtaaagtggcgcacggtctggaagcacaagtgcctttccacggcgcgcgggcacagattctggcggtcgataaacaaattgctgccgtcaaagggcaaatcaccgaaacgcgagaatctctgcgtgcattgattggcgcgggggccagcgatatgccggagatcaaaccggtggcattaccacgagtccagaccggcattccggcgacactctcttatgagttgctcgccagacgcccggatctgcaagccatgcgctggtatgttcaggcgtcattagatcaggtggattccgcgcgggcactgttctacccgagctttgatatcaaagcgtttttcggtctggactccatccacctggataccttattcaaaaaaaccagtcgccagttcaacttcatcccgggtctgaaattgccgctgtttgacggtggacggttgaatgccaatctcgaaggcactcgcgccgccagcaacatgatgattgaacgttacaaccagtcagtactgaacgcggtgcgtgacgttgccgtcaacggcacgcgtctgcaaacgctcaacgacgaacgagaaatgcaggctgaacgcgtggaagcaacgcgcttcacccagcgcgctgccgaggccgcctatcagcgcggcttaaccagccgcttacaggccaccgaagcccggttgccagtgcttgccgaagagatgtcattactgatgctggacagccgccgggtgatccacagcattcagttgatgaaatcgctgggcggcgggtatcaggcggctcccgtcgtcgagaaaaaataa

SEQ ID NO: 462128 - DNA, 420 bp, Shigella boydii
atgaaaaaagtcgtcacggtttgcccctattgcgcatcaggttgcaaaatcaacctggtcgtcgataacggcaaaatcgtccgggcggaggcagcgcaggggaaaaccaaccagggtaccctgtgtctgaagggttattatggctgggacttcattaacgatacccagatcctgaccccgcgcctgaaaacccccatgatccgtcgccagcgtggcggcaaactcgaacctgtttcctgggatgaggcactgaattacgttgccgagcgcctgagcgccatcaaagagaagtacggtccggatgccatccagacgaccggctcctcgcgtggtacgggtaacgaaaccaactatgtaatgcaaaaatttgcgcgcgccgttattggtaccaataacgttgactgctgcgctcgtgtctga

SEQ ID NO: 462129 - DNA, 1680 bp, Shigella boydii
atgagcaatgctattaacgaaattgataataccgatttagtgttcgttttcgggtacaacccggcggattcccacccaatcatggcgaatcacgtaattaacgctaaacgtaacggggcgaaaattatcgtctgcgatccgcgcaaaattgaaaccgcgcgcattgctgacatgcacattgcactgaaaaacggctcgaacatcgcgctgttgaatgcgatgggccatgtcattattgaagaaaatctgtacgacaaagcgttcgtcgcttcccgtacagaaggctttgaagagtatcgtaaaatcgttgaaggctacacgccggagtcggttgaagatatcaccggcgtcagcgccagtgagattcgtcaggcggcacggatgtatgcccaggcgaaaagcgccgccatcctgtggggcatgggtgtaacccagttctaccagggcgtggaaaccgtgcgttctctgaccagcctcgcgatgctgaccggtaacctcggtaagccgcatgcgggtgtaaacccggttcgtggtcagaacaacgtgcagggtgcctgcgatatgggcgcgctgccggatacgtatccgggataccagtacgtgaaagatccggctaaccgcgagaaattcgccaaagcctggggcgtggaaagcctgcctgctcataccggctatcgcatcagcgagctgccgcaccgcgcagcgcatggcgaagtgcgtgccgcgtacattatgggcgaagatccgctgcaaactgatgcggagctgtcggcagtacgtaaagcctttgaagatctggaactggtcatcgttcaggacatctttatgaccaaaaccgcgtcggcggcggatgtcattttgccgtcaacgtcgtggggcgagcatgaaggcgtgtttactgcggctgaccgtggcttccagcgtttcttcaaagcagttgaaccgaaatgggatctgaaaacggactggcaaatcatcagtgaaatcgccacccgtatgggttatccgatgcactacaacaacacccaggagatctgggatgagttgcgtcatctgtgcccggatttctacggtgcgacttacgagaaaatgggcgaacagggcttcattcagtggccttgccgcgatacttcagatgccgatcaggggacttcttatctgtttaaagagaagtttgataccccgaacggtctggcgcagttcttcacctgcgactgggtagcgccaatcgacaaactcaccgacgagtacccgatggtactgtcaacggtgcgtgaagttggtcactactcttgccgttcgatgaccggtaactgtgcggcactggcggcgctggctgatgaacctggctacgcacaaatcaataccgaagacgccaaacgtctgggtattgaagatgaggcattggtttgggtgcactcgcgtaaaggcaaaattatcacccgtgcgcaggtcagcgatcgtccgaacaaaggggcgatttacatgacctaccagtggtggattggtgcctgtaacgagctggttaccgaaaacttaagcccgattacgaaaacgccggaatacaaatactgcgccgtgcgcgtcgagccgatcgccgatcagcgcgccgccgagcagtacgtgattgacgagtacaacaagttgaaaactcgcctgcgcgaagcggcactggcgtaa

SEQ ID NO: 462130 - DNA, 450 bp, Shigella boydii
atgaaaaaaattatcgcattgatgttgtttttgacattctttgcccacgccaacgactccgagcctggcagccagtatttaaaggcagcagaggccggggaccgacgcgcacaatattttcttgccgacagctggtttagctccggcgatttgagcaaagccgaatattgggcacagaaagccgccgacagcggtgatgctgatgcctgcgcgctgttggcgcagatcaaaatcaccaatccgggcagtctggactatccacaagcaaaagttcttgcagagaaagcggcgcaagcgggcagtaaagaaggtgaagtaacgctggcgcatattctggtaaatactcaagcgggtaaaccggattatccaaaggcgatttcgctgttagaaaagcctcggaagatctggagaacgactctgccgtcgatgcccaaatgctgcttggtttga

SEQ ID NO: 462131 - DNA, 129 bp, Shigella boydii
atgttcttaaacggtgaagaaggttttatcgagaagaacaaacaaaaggcgctgcactggttgaacctgagctgtatggaagggtttgataccgggtgtgaagagtttgaaaaattaaccaacggttaa

SEQ ID NO: 462132 - DNA, 243 bp, Shigella boydii
atgaccgaatccagcgattacgaatccgtccaggtctttatcggcgttgatgtcggtaaagatacgcatcacgctgttgccattaatcgttcaggtaaacgcctgttcgataaagcattacccaacgacgaaaacaaactcaggtcgctaatatctgacctgaaacaacatggtcagatactgctggttgttgatcagccagctaccatcggtgcgttacctgtcgccgttgcccgctcataa

SEQ ID NO: 462133 - DNA, 897 bp, Shigella boydii; identical to SEQ ID NO: 461462

SEQ ID NO: 462134 - DNA, 996 bp, Shigella boydii; identical to SEQ ID NO: 458405

SEQ ID NO: 462135 - DNA, 1311 bp, Shigella boydii
atgtctaacgtgcaggagtggcaacagcttgccaacaaggaattgagccgtcgggagaaaactgtcgactcgctggttcagcaaaccgcggaagggatcaccatcaagccgctgtataccgaagccgatctcgataatctggaggtgacaggtacccttcctggtttgccgccctacgttcgtggcccgcgtgccactatgtataccgcccaaccgtggaccatccgtcagtatgctggtttttcaacagcaaaagagtccaacgctttttatcgccgtaacctggccgccgggcaaaaaggtctttccgttgcgtttgaccttgccacccaccgaggctacgactccgataacccgcgcgtggcgggcgacgtcggcaaagcgggcgtcgctatcgacaccgtggaagatatgaaagtcctgttcgaccagatcccgctggataaaatgtcggtttcgatgaccatgaatggcgcagtgctaccagtactggcgttttatatcgtcgccgcggaagagcaaggtgttacacctgataaactgaccggcaccattcagaacgatatcctcaaagagtacctctgccgcaacacctatatttacccgccaaaaccgtcaatgcgcattatcgccgacatcatcgcctggtgttccggcaacatgccgcgatttaataccatcagtatcagcggttaccacatgggtgaagcgggtgccaactgcgtgcagcaggtagcatttacgctcgctgatgggattgagtacatcaaagcagcaatctctgccggactgaaaattgatgacttcgctcctcgcctgtcgttcttcttcggcatcggcatggatctgtttatgaacgtcgccatgttgcgtgcggcacgttatttatggagcgaagcggtcagtggatttggcgcacaggacccgaaatcactggcgctgcgtacccactgccagacctcaggctggagcctgactgaacaggatccgtataacaacgttatccgcaccaccattgaagcactggctgcgacgctgggcggtactcagtcactgcataccaacgcctttgacgaagcgcttggtttgcctaccgatttctcagcacgcattgcccgcaacacccagatcatcatccaggaagaatcagaactctgccgcaccgtcgatccactggccggatcctattacattgagtcgctgaccgatcaaatcgtcaaacaagccagagctattatccaacagatcgacgaagccggtggtatggcgaaagcgatcgaagcaggtctgccaaaacgaatgatcgaatag

SEQ ID NO: 462136 - DNA, 1449 bp, Shigella boydii
atgagcgccatagattcccaacttctctcatcttctgggcaagaccgcccaactgatgaggttgaccgcatattatcaccaggaaagctgatcatactcggtctgcaacacgtccttgtcatgtacgcaggtgcagtcgctgttcctcttatgattggtgaccgactgggcctctcaaaagaagctattgcgatgctcattagctcggatctcttttgctgcgggatcgtcacattattgcaatgtatcggtatcggccgctttatggggatccgcctgccggtgattatgtcggtgacctttgctgctgtaacaccaatgatagccattgggatgaacccggatattggcctgctggggatatttggtgccactatcgccgcgggttttatcaccacattattagcgccacttatcggtcgcttgatgcctttattcccgccactggttaccggtgtggttattacttctgtcggacttagcatcattcaggtgggtattgactgggccgccggaggtaaagggaatccgcaatatggtaatcccgtttattcaggtatctcctttgccgtcttaatttttatcttgctcattactcgctatgcgaaaggatttatgtccaacgtcgccgtattactggggattgtatttggctttttactttcgtggatgatgaatgaagtcaatttatccgggctacatgatgccttgtggtttgcgattgtcaccccgatgtcgtttggtatgccgattttcgatcccgtttccattctgaccatgactgccgtgttaatcatcgtgtttatcgagtcgatggggatgttcctggcactgggtgaaatagtcggtcgtaaactctcttcacacgatattattcgcgggctgcgtgtcgatggcgtagggacaatgataggcggcacgtttaacagcttcccccacacgtcattttctcaaaacgttggcctggttagcgtgacgcgcgttcatagccgctgggtgtgtatttcttcgggaattatattaatcctgtttggcatggtgccaaaaatggcggtgctggtagcctccattccgcaatttgtgctgggcggcgctggtctagtgatgttcggcatggtactggcgacagggattcgaattctgtcgcgctgtaactacaccaccaaccgttacaacctctatattgtggcgatcagtctcggcgttggcatgactccgacgctctctcacgatttcttttctaagttaccggccgtactgcaaccgctgctacatagcggcattatgctcgcaacccttagcgccgttgtgctgaacgtcttctttaatggctatcagcatcatgctgacctggtgaaggaatccgtctctgataaagatttaaaagtcaggacagtacgtatgtggcttctgatgcgcaagctgaagaaaaatgagcatggagaataa

SEQ ID NO: 462137 - DNA, 4305 bp, Shigella boydii
atggcagataatccagacccttcatcgctcctgccggacgtgttttcaccggcgacccgcgactggtttcttcgcgcctttaaacagccgaccgctgtccagtcgcaaacctggcatgtggcggcgcgaagcgaacatgcgctggtgattgcaccgaccggctccgggaaaacgctggcagcatttctctacgccctcgatcggctcttccgcgaaggcggcgaagatacccgcgaggcgcataagcgtaaaacctcacgcatcctctatatttcaccgataaaagctctgggcaccgacgttcagcgcaacttgcagctcccgttgaagggtattgccgatgaacggcggcggcgcggcgaaacggtaattattgatgaagtccacgcggtagcgggcagtaaacgtggtgcgcatctggcgttaagtctggagcggctcgatgcgctgctccacacctcagcacagcgaattggcctttctgccactgtgcgctcagccagcgatgtggcagcctttcttggtggcgatcgcccggttacggtagtcaacccgcccgcaatgcgccatccgcagatacgaattgtcgtaccggtcgccaatatggatgatgtctcatcggtcgccagcagcaccggcgaagacagccatgccggccgggaaggctccatctggccatatattgaaacgggtatccttgatgaagtgttgcgccatcgctcgaccattgtctttactaattcacgtgggctggcggaaaaactgacggcacgattaaatgagctttacgccgcacgcttacagcgttccccgtctatcgccgttgatgcggcccatttcgagtcgacctccggcgcaacctctaaccgtgtacaaagtagcgacgtttttattgcccgctcacaccacggctccgtctctaaagaacaacgagcaatcaccgagcaggcgctgaaatcgggtgagttacgctgcgtggtcgcaacctccagtctcgaactggggattgatatgggcgcagtggatctggtgattcaggtggcaacgccgctttctgttgccagtgggttacaacgcattggtcgcgccggacatcaggttggcggtgtatctaaagggctgtttttccctcgtacccggcgtgacttagtcgattccgcagtcattgtagagtgtatgttcgcaggcaggctggaaaacctgacaccgccgcataatccactcgacgtccttgcgcagcaaaccgttgccgccgcggcgatggaggcattacaggtagacgaatggtactcccgcgtacgccgtgccgcaccgtggaaagatctgccaagacgtgtttttgacgccacgctggatatgctttccgggcgctatccctctggcgatttttctgcttttcgccccaaactggtctggaacagggagaccgggatattgaccgtccgacctggcgctcaattgttggcggttaccagcggcggcaccattccggatcgtggcatgtatagcgtgttattacccgaaggtgaagaaaaggccggttcgcggcgggtgggtaaactggatgaggagatggtatatgagtcgcgggtgaacgacattatcactctcggcgctacctcatggcggatccagcaaatcacccgcgatcaggtgattgtgactcctgctccgggtcgttctgcccggctccccttctggcgtggtgaaggtaacggacgtccggctgaattaggcgagatgatcggcgattttcttcatttactggcggatggcgcgttcttttccgggactattcccccgtggctggcagaagaaaatacgaacgccaatattcaggggttgattgacgagcaacgcaacgcgacgggcatcgttccggggagtcgccatctggtcctcgaacggtgccgtgatgaaattggcgactggcgtattattttgcactctccctatggaagacgggtgcatgaaccctgggcgctggcgattgccgggcgaatacatgccctatggggcgctgacgcgtctgtggtcgccagtgatgacggcattgttgcgcgcattcctgacactgatggtaaattgcccgacgccgcgatttttttgtttgaaccagaaaagttgctgcaaattgtccgcgaggcggtaggcagctcggcacttttcgccgcccgttttcgcgaatgcgccgcgcgggcattattaatgccggggcgcactccgggccatcgcaccccgctttggcaacaacggctgcgcgccagtcagttgctggaaatcgctcagggatatccagattttccggtcattctcgaaatcctacgcgaatgtctgcaagatgtttatgatcttcccgcactggaacgtttgatgcgtcgcctgaacggtggcgaaattcaaatatccgatgtaacgaccactacgccctcgcctttcgccacaagtttattgttcggctatgtcgcggaatttatgtaccagagcgacgccccgctggcagagcgccgggcatccgtactgtcgctggacagcgagttactgcgcaatctactcggacaggtcgatccgggggaattactcgacccgcaggtcattcgccaggtggaagaagagttgcaacgactggctcctggcagaagagcgaaaggtgaagaaggattgttcgacctgctgcgcgaactggggccaatgaccgttgaagacctggcgcaacggcatacaggcagcagtgaagaggttgcgtcgtatctggaaaatcttcttgcagtaaaacgaatcttcccagcgatgattagcggacaggagcgtcttgcctgtatggatgatgccgccaggctgcgtgatgccctcggcgtacgactaccagagtcattgccagagatttatttacatagagtcagttacccgcttcgcgacctctttctgcgctatctccgggctcatgctctggtcacggctgaacaactggctcatgagtttagtctcggtattgccattgtcgaagagcagcttcagcaactgcgtgaacagggtctggtgatgaatctgcaacaagacatctgggtgagcgatgaagtatttcgtcgtctgcgtttgcgctcgctgcaagccgccagagaagcgacgcgtcccgttgcagccacgacctatgcgcgattgctgctggaacgtcagggcgtattacccgccaccgatggtagcccggcgctctttgcctcaacatcgccaggcgtttatgagggcgtagatggcgtgatgcgggtgatcgaacagcttgccggagtcggtttacccgcctcactctgggaaagccagatcctgcctgcccgcgtacgcgactattcgtcagaaatgctcgatgaattactggcaaccggtgcggttatctggtcggggcaaaaaaaactgggtgaagatgacggcctggtggcactgcatctacaggaatatgctgcagaatcgttcactcctgccgaagcggatcaggcgaatcgttcggcgctgcaacaagcgatagtcgctgttctggctgacggaggagcctggtttgcacaacaaatcagccaacggatacgcgacaaaatcggcgaatcggttgatctctctgccctgcaagaggcgttatgggcgctggtctggcaaggcgtcatcaccagcgacatttgggcaccgttacgcgccctcacccgcagcagttccaacgcacgcacctcaactcgccgcagtcaccgggctcgtcgtggacgtcctgtctatgcgcaacccgtctcgccgctggtatcttacaacacaccaaatctggctggacgctggtcgttattgcaggtggagccactaaacgataccgaaaggatgctggcgctggcggaaaatatgctcgaccgctacggcatcatcagtcgtcaggcggtgatagccgaaaatatccctggcgggtttccatcgatgcaaacgctttgtcgaagtatggaagactccgggcgaattatgcgaggtcgttttgtagaaggtctgggtggcgcgcaattcgctgaacgtctgactattgaccgatggcgcgatctggcgacacaagccacgcaaacgcgccactatacaccagtggcgctctctgccaacgatccggctaatgtgtggggaaatcttctgccctggcctgcacatccggcaacgctggttccaacgcgtcgggcgggtgcgctggtggtcgtttctagcggcaaattgttactctatctggcgcaaggtggcaaaaaaatgctggtctggcaggaaaagccccagaggttttccacgcgctga

SEQ ID NO: 462138 - DNA, 657 bp, Shigella boydii
atgccgcgtgcgcttgaactagaagagattccaggtatcgtcaatgatttccgtcaggccattgctaacgcgcgtgaagccggttttgatctggtagagctcctctctgctcacggttatttgctgcatcagttcctttctccttcttcaaaccatcgtaccgatcagtacggcggcagcgtggaaaatcgcgcacgtctggtactggaagtggtcgatgccgggattgaagaatggggtgccgatcgcattggcattcgcatttcgccaatcggtactttccagaacacggataacggcccgaatgaagaagccgatgcactgtatctgattgaacaactgggtaaacgcggcattgcttatctgcatatgtcagaaccagattgggcggggggtgaaccgtatactgatgcgttccgcgaaaaagtacgcgcccgtttccacggtccgattatcggcgcaggtgcatacacagtagaaaaagctgaaacgctgatcggcaaagggttaattgatgcggtggcatttggtcgtgactggattgcgaacccggatctggtcgcccgcttgcagcgcaaagctgagcttaacccacagcgtgccgaaagtttctacggtggcggcgcggaaggctataccgattacccgacgttgtaa

SEQ ID NO: 462139 - DNA, 777 bp, Shigella boydii
atgcgcacgctggtgttactttcgctattcagctttgtggtcaaatttggcctgatggtccagattagcgatctgtggcaatttttactgtttctctttccactgctggcgacaatgcagcttcttaaattgcagatgcccaaatttgccgcactgtgggggcaactgattgtttttatgggttcgtttatcgctgtcactaatcccccggtgtatgattttgctgactttcttaacgataatctggcaaaaatcgttggcgttgcgctggcttggctagcgttcgccattctgcgtccaggatcggatgctcgtaaaagccgccgccatattcgcgcgctgcgccgggattttgtcgatcagctaagccgccatccaacactgagtgaaagcgaatttgaatcgctcacttatcatcacgtcagtcagttgagtaacagccaggatgcgctggctcgccgttggttattacgctggggtgtagtgctgctgaactgttctcatgttgtctggcaattgcgcgactgggaatcgcgttccgatccgttatcgcgagtacgggataactgtatttcactgttgcggggagtgatgagtgagcgtggcgttcagcaaaaatcactggcggccacacttgaagaattacagcggatttgcgacagccttgcccgtcatcatcaacctgccgcccgtgagctggcggcaattgtctggcggctgtactgctcgctttcgcaacttgagcaagcaccaccgcaaggtacgcaggcctcttaa

SEQ ID NO: 462140 - DNA, 468 bp, Shigella boydii
atgaacgcatcgtcatggtccttgcgcaatttgccctggttcaaggccacgctggcgcaatggcgttatgcgttacgcaataccattgccatgtgtctggcgctgacggttgcctattatttgaatctggatgaaccctattgggcgatgacctcggctgcagtggttagctttcccaccgttggcggtgtcatcagcaaaagcctcggacgcatcgctggcagtttactgggagccattgcggcactgcttcttgccgggcatacgctcaatgagccgtggttttttctattgagcatgtcggcgtggcttggcttttgtacctgggcctgtgcgcacttcacgaataacgtcgcgtatgcatttcaactggcggctacacggctgccatcatcgcctttccgatggttaatattactgaggccagccagctgtaggatatcgctcaggcgcgcgtttgcgaggtga

SEQ ID NO: 462141 - DNA, 336 bp, Shigella boydii
ttgcagaaattgactcagaaaagattaaccaatctgcttgagtctactgaaaaacctttgatggataatatacatgacacgctttcaggattacgccgactggatattgataaacgctgggattttttacactttgggctgacaggcacccctgcttttgatcccgcgaagaatgatccgctgagtcgtgccgtgcttggtgaacacagcctcgaagatggcatagatggcttcctgggattgacctggaatcaggaattagccgcgacaatcgaccgactggaatcactggatcgaagtaagctgcgtaaacagttttccattaagcgactatga

SEQ ID NO: 462142 - DNA, 351 bp, Shigella boydii
gtgtttaattctgacaacctgagactcgacggaaaatgcgccatcatcacaggtgcgggtgcaggtattggtaaagaaatcgccattacattcgcgacagctggcgcatctgtggtggtcagtgatattaacgccgacgcagctaaccatgttgtagacgaaattcaacaactgggggggcaggcatttgcctgccgttgtgatattacttccgaacaggaactctctgcactggcagatttgctatcagtaagctgggtaaagttgatattctggttaacaacgccggtggcggtggacctaaaccgtttgatatgccaatggcggattttcgccgtgcttatgaactga

SEQ ID NO: 462143 - DNA, 1266 bp, Shigella boydii
atgagaaaaatagtggccatggccgttatttgcctgacggctgcctctggccttacctctgcttatgcggcgcaactggctgacgatgaagcgggactacgcatcagactgaaaaacgaattgcgcagggcggataagcccagtgctggcgcgggaagagatatttacgcatgggtacagagaggattgttcgatttcaatagtggttattattccaatattattggcgttgaaggcggggcatattatgtttataaattaggtgctcgtgctgatatgagtacccggtggtatcttgatggtgataaaagttttggctttgccctgggggcagtaaaaataaaaccctgtgaaaatagcctgcttaaattaggtcgcttcgggacggattatagttatggtagcttaccttatcgtattccgttaatggctggcagttcgcaacgtacattaccgacagtttctgaaggagcattaggttattgggctttaacaccaaatattgatctgtggggaatgtggcgttcacgagtatttttatggactgattcaacaaccggtattcgtgatgaaggggtgtataacagccagacgggaaaatacgataaacatcgcgcacgttcttttttagccgccagttggcatgatgataccagtcgctattctctgggggcatcggtacagaaagatgtttccaatcagatacaaagtattctcgagaaaagcataccgctcgacccgaattatacgttgaaaggggaattgctcggcttttacgcgcagctcgaaggtttaagtcgtaataccagccagcccaatgaaacggcgttggttagtggacaattgacctggaatgcgccgtggggaagcgtatttggcagtggtggttatttgcggcatgcaatgaatggtgccgtggtggataccgacattggctatcccttttcattaagtcttgatcgtaaccgtgaaggaatgcagtcctggcaattgggcgtcaactatcgtttaacgccgcaatttacactgacatttgcaccgattgtgactcgcggctatgaatccagtaaacgagatgtgcggattgaaggcacgggtatcttaggtggtatgaactatcgggtcagcgaagggccgttacaagggatgaatttctttcttgctgccgataaagggcgggaaaagcgcgatggcagtacgctgggcgatcgcctgaattactgggatgtgaaaatgagtattcagtatgactttatgctgaagtaa

SEQ ID NO: 462144 - DNA, 825 bp, Shigella boydii
atgcaaaacattacccagtcctggtttgtccagggaatgatcaaagccaccaccgatgcctggctgaaaggctgggacgaacgcaacggcggcaacctgacgctgcgcctggatgacgccgatatcgcgccttataaagacaacgtccatgcacaaccgcgctatatcccgctcagccagcccatgcctttactggcaaatacaccgtttattgtcaccggctccggcaaattcttccgtaacgtccagctcgatcctgcagctaacttaggcgtcgtaaaagtcgacagcgatggcgcgggctaccatattctctgggggttaaccaacgaagccgtcccgacatccgaactcccggcgcactttctctcccactgcgagcgcattaaagccaccaacggtaaagatcgggtgatcatgcactgccacgccaccaacctgatcgccctcacctatgtactggaaaacgacaccgcggtctttactcgccaactgtgggaaggcagcaccgagtgtctggtggtattcccggatggcgttggcattctgccgtggatggtgcccggcacggacgaaatcggccaggcgaccgcacaagagatgcaaaaacattcgctggtgttgtggcccttccacggcgtcttcggcagcgggtcgacgttggatgaaacattcggtttaatcgacaccgcagaaaaatcagcacaagtattagtgaaggtttattcgatgggcggcatgaaacagaccatcagccgtgaagagttgatagcgctcggcaagcgcttcggcgttacaccactagccagtgcgctggcgctgtaa

SEQ ID NO: 462145 - DNA, 1260 bp, Shigella boydii
atgaccactcaactggaacaggcctgggagctggcgaaacagcgtttcgcggcggtggggattgatgtcgaggaggcgctgcgccaacttgatcgtttacccgtttcaatgcactgctggcagggcgatgatgtttccggttttgaaaacccggaaggttcgctgaccggggggattcaggccacaggcaattatccgggcaaagcgcgtaatgccagtgagctacgtgccgatctggaacaggctatgcggctgattccggggccgaaacggcttaatttacatgccatctatctggaatcagatacgccagtctcgcgcgaccagatcaaaccagagcacttcaaaaactggggtgaatgggcgaaagccaatcagctcggtctggattttaacccctcctgcttttcgcatccgctaagcgccgatggctttacgctctcgcatcccgacgacagcattcgccagttctggattgatcactgcaaagccagccgtcgcgtttcggcctattttggcgagcaactcggcacaccatcggtgatgaacatctggatcccggatggtatgaaagatatcaccgttgaccgtctcgccccgcgtcagcgtctgctggcagcactggatgaggtgatcagcaagaagctaaaccctgcgcaccatatcgacgccgttgagagcaaattgtttggcattggcgcagagagctacacggttggctccaatgagttttacatggggtatgccaccagccgccagactgcgctgtgcctagacgccgggcacttccacccgactgaagtgatttccgacaagatttccgccgccatgctgtatgtgccgcagttgctgctgcacgtcagccgtccggttcgctgggactgcgatcacgtagtgctgctggatgatgaaacccaggcaattgccagtgagattgtgcgtcacgatctgtttgaccgggtgcatatcggccttgacttcttcgatgcctctatcaaccgcattgccgcgtgggtcattggtacacgcaatatgaaaaaagccctgctgcgtgcgttgctggaacctaccgctgagctgcgcaagctggaagcggcgggcgattacactgcgcgtctggcactgctggaagagcagaaatcgttgccgtggcaggcggtctgggaaatgtattgccaacgtcacgatacgccagcaggtagcgaatggctggagagcgtgcgggcttatgaaaaagaaattttgagccagcgtgggtaa

SEQ ID NO: 462146 - DNA, 945 bp, Shigella boydii
atgccagaggtacaaacagatcattcagagacggcggagttaagcaagccacagctacgcatggtcgatctcaacttattaaccgttttcgatgccgtgatgcaggagcaaaacattacccgtgccgctcatgttctgggtatgtcgcaacctgcggtcagtaacgctgttgcacgcctgaaggtgatgtttaatgacgagctttttgttcgttatggccgtggtattcaaccgactgctcgcgcatttcaactttttggttcagttcgccaggcattgcaactagtacaaaatgaattgcctggttcaggttttgaacccgcgagtagtgaacgtgtatttcatctttgtgtttgcagcccgttagacagcattctgacctcgcagatttataatcacattgagcagattgcgccaaatatacatgttatgttcaagtcttcattaaatcagaacactgaacatcagctgcgttatcaggaaacggagtttgtgattagttatgaagacttccatcgtcctgaatttaccagcgtgccattatttaaagatgaaatggtgctggtagccagcaaaaatcatccaacaattaaaggcccgttactgaaacatgatgtttataacgaacaacatgcggcggtttcgctcgatcgtttcgcgtcatttagtcaaccttggtatgacacggtagataagcaagccagtatcgcgtatcagggcatggcaatgatgagcgtacttagcgtggtgtcgcaaacgcatttggtcgctattgcgccgcgttggctggctgaagagttcgctgaatccttagaattacaggtattaccgctgccgttaaaacaaaacagcagaacctgttatctctcatggcatgaagctgccgggcgcgataaaggccatcagtggatggaagaacaattagtctcaatttgcaaacgctaa

SEQ ID NO: 462147 - DNA, 870 bp, Shigella boydii
gtgcgccattatggggtactggcggacaatttgcgctacccgattttgcataaactgaaagacaggttaaatcaaacctggtatcagatccgtattggcgatcgactggcctatatcagcgcgctggatgcccaacccgataatggcctgccggtgctaacctatcaccatattctgcgcgatgaagaaaacacccgttttcgccatacttcgacgaccacctcagtacgcgctttcaataaccagatggcctggctgcgcgacaggggatacgcgacactgagcatggtgcagctggaaggttacgtgaagaataagatcaatctccctgcgcgagcggtggtgattacctttgatgatggcctcaaatcggtgagccgctatgcgtatcccgtgttgaaacaatatggcatgaaggcgacggcgtttattgttacctcgcgcatcaaacgtcacccgcagaagtgggacccaaaatcgctgcaatttatgagcgtttctgaacttaacgaaattcgcgatgtttttgatttccagtcacatacccattttttgcatcgggtggatggttatcgccgccccatattaccgagccgtagtgaacacaatattctgtttgattttgcacgttcacgccgcgctctggcgcaatttaatccgcatgtctggtatctttcgtatccgtttggcggatttaatgacaaagccgtgaaggcagcaaacgatgccggatttcacctggcggtgacaaccatgaaaggcaaagtaaaaccgggggataatccgttgttactaaaacgactttatatcttaagaacggattcgctggagacgatgtcgcggctggtgagtaaccagccgcagggataa

SEQ ID NO: 462148 - DNA, 3282 bp, Shigella boydii
atgactccagtaaaagtgtggcaagagcgcgttgagatcccgacctatgaaaccgggccgcaggatatacatcccatgttcctggaaaatcgcgtttatcagggatcgtccggcgcggtttatccctacggcgtgaccgatacgctgagcgagcagaaaaccctgaaatcctggcaggcggtgtggctggaaaacgactacatcaaagtgatgatcctgccggaactgggcggtcgggtgcatcgcgcgtgggataaagtgaaacagcgcgattttgtttatcacaatgaagtcattaaacctgcgctggtggggctgctggggccgtggatttccggtgggattgagtttaactggccgcaacatcatcgcccgaccacctttatgcccgttgatttcaccctcgaagcccatgaagacggtgcacagacggtgtgggtaggcgaaacggagccgatgcatggtttacaggtgatgacaggtttcaccctgcgccctgaccgggcggcgctggaaatcgccagccgcgtctataacggtaacgccacgccgcgtcatttcttgtggtgggccaacccggcagtgaaagggggggaagggcatcagagcgttttcccaccggatgtgactgcggtgtttgatcacggcaaacgggccgtctccgctttccccatcgccaccggcacttactacaaagtggactactccgccggagtggacatttcttgctataaaaatgtgcctgttacaacctcatatatggccgaaaaatcgcagtacgattttgtcggcgcgtggtgtcacgatgaagatggcggtttgctgcacgttgccaaccaccatattgcgccaggtaaaaaacagtggagttggggacacagtgaatttggccaggcgtgggataagagtctgaccgacaataacggcccgtatatcgaactgatgaccggtatttttgccgataaccagcccgattttacctggcttgatgcttacgaagagaagcgttttgagcagtatttcctgccttatcattctttgggcatggtgcaaaatgcctcccgcgatgcggtgataaaactccagcgtagtaagcgggggattgagtgggggctgtatgccatctctccgttgaacggataccgcctggtgatccgcgaaatcggcaaatgcaacgcgttacttgatgatgccgtggcactgatgcctgcgaccgccatccagggcgtgttgcacggtatcaatcctgaaaggctgaccattgagctctccgatgccgacggcaatattgtactgagttatcaggaacatcagccgcaagagttgccgttgctggacgtcgccaaagcgccactggcagcacaagacattaccagtacagatgaagcctggtttatcggtcagcatctggagcaatatcatcacgccagccgttcaccgttcgattactacctgcgcggcgtggcgctggatccgctggattaccgctgtaacctggcgctggcgatgctggaatataaccgcgccgatttcccgcaagcggtggcgtatgccactcaggctctgaaacgcgcacatgcgctgaacaaaaatccgcagtgcggacaggcgagtttgattcgcgccagtgcttacgaacgtcagggacaatatcaacaagccgaagaggatttctggcgtgcggtctggagcggcaacagcaaagccggtggctattatggcctggcacgactggcggcgcgtaatggtaacttcgacgctggtctggatttttgccaacaaagtcttcgcgcctgcccaaccaatcaggaagtgctttgcctgcataatctgctgctggtgttaagtggtcgtcaggacaacgcgcgtgtgcagcgcgagaaactgctgcgcgattatccgctgaacgccactctgtggtggctgaactggttcgatggtcgtagcgaatcagctctcgcgcagtggcgcggtctgtgtcagggacgcgacgttaacgccctgatgaccgccgggcaactgattaactggggaatgcccaccctggcggcagagatgctgaacgcactggactgccagcgcacgctgccgctttacctgcaagccagcttgctgccgaaagccgaacgtggcgaactggtcgcaaaagccattgatgtcttcccgcagtttgtccgtttcccgaatacgctggaagaagtggcggcgctggagagtattgaagagtgctggtttgctcgccatttactggcctgcttctactacaacaaacgtagctacaacaaagccattgccttttggcaacgttgcgtagagatgtcgccggagtttgccgacggctggcgcgggttagcgatccatgcgtggaataagcaacacgattatgagctggccgcgcgttatcttgataatgcttatcagcttgcgccgcaggatgcacgtctgcttttcgaacgggatttgcttgataagttaagtggagccacaccggagaaacgactggcgcgtctggaaaataatctggaaattgcgctgaaacgcgacgacatgaccgcagaactgctcaatttgtggcatctcacgggtcaggcagacaaagcggcggacattctcgccacgcgtaaattccacccgtgggaaggcggggaagggaaggtcaccagtcagtttatcctcaaccagttattacgcgcctggcagcatcttgatgccagagagccgcagcaggccagcgaactgcttcatgccgcgctgcattatccggagaatttaagcgaaggccgtttaccggggcaaactgataacgacatctggttctggcaggcgatatgcgccaacgcgcagggcgatgaaactgaagcgatgcgttgtttacgtctggcggcgaccggcgatcgcaccattaacatccacagttattacaacgatcagccggttgattatctcttctggcaaggaatggcgctgcgactgctgggtgaacagcaaaccgcacagcaactgtttagtgaaatgaaacagtgggcgcaagagatggcgaaaaccagtattgaggcggatttctttgctgtttcacaacctgacctgttatcgctgtatggcgatttacaacagcagcataaagaaaaatgcctgatggtggcgatgctggcgtccgcgggactcggggaggttgcgcaatatgagtctgctcgcgctgaattgacggcgattaatccggcctggccgaaagcggcattattcaccactgtgatgccttttatttttaactacgttcactaa

SEQ ID NO: 462149 - DNA, 225 bp, Shigella boydii
atgtcacgtaaaggtcactgttacgacaacgctccgatggaaagcttctggggaacgctgaaaaatgagagcctgagccactatcgttttaataaccgggatgaagccatctcagtaatacgggaatacattgagattttctacaatcgtcagcgtcgtcactctcgtctggggaatatctccccggcagccttcagggaaaaatatcatcagatggctgcttaa

SEQ ID NO: 462150 - DNA, 477 bp, Shigella boydii; identical to SEQ ID NO: 459487

SEQ ID NO: 462151 - DNA, 612 bp, Shigella boydii
atgcaatttcagcgtcctgcctgggacggctatctacgcgtaaatgcgttgctggcagataaattactgccgctgttgcaagacgatgacattatctggatccacgattatcacctgttgccctttgcgcatgaattacgcaaacgtggggtgaataatcgcattggtttctttctgcatattcctttcccgacaccggaaatcttcaacgcgctgccgacatatgacaccttgcttgaacagctttgtgattatgatttgctgggtttccagacagaaaacgatcgtctggcgttcctggattgtctttctaacctgacccgcgtcacgacacgtagcgcaaaaagccatacagcctggggcaaagcatttcgaacagaagtctacccgatcggcattgaaccgaaagaaatagccaaacaggctgccgggccactgccgccaaaactggcgcaacttaaagcggaactgaaaaacgtacaaaatatcttttctgtcgaacggctggattattccaaaggtttgccagagcgttttctcgcctatgaagcgttgctggaaaaatatccgcagcatcatggtaaaattcgttatactgaagtggcacactga

SEQ ID NO: 462152 - DNA, 333 bp, Shigella boydii
atggcgttacagcagggaaagtgtgttgtcgagatcaaaccgagaggtaccagtaaaggtgaggcaattgcagcttttatgcaggaagctccctttatcgggcgaacgcccgtatttctgggcgatgatttaaccgatgaatctggcttcgcagtcgttaaccgactgggcggaatgtcagtaaaaattggcacaggtgcaactcaggcatcatggcgactggcgggtgtgccggatgtctggagcaggcttgaaatgataaccaccgcattacaacaaaaaagagaaaataacaggagtgatgactatgagtcgtttagtcgtagtatctaa

SEQ ID NO: 462153 - DNA, 1515 bp, Shigella boydii
atgcaacagtctaccccgtatctctcatttcgcggcatcggtaaaacgtttcccggcgttaaggcgctgacggatattagttttgactgctatgccggtcaggttcatgcgttgatgggtgaaaatggcgcaggaaaatcaactctcttaaaaatcctcagcggcaactatgcgccaaccacgggttctgtagtgattaatgggcaggaaatgtccttttccgacacgaccgcagcacttaacgcgggtgtggcgattatttaccaggaactgcatctcgtgccggaaatgaccgtcgcggaaaacatctatctcggccagctgccgcataaaggcggcattgtgaatcgctcattgctgaattatgaggcgggtttacaacttaaacatcttggtatggatattgacccggacacgccgctgaaatatctctccattggtcagtggcagatggttgaaatcgccaaggcgctggcgcgtaacgctaaaattatcgcctttgatgagccaaccagctccctttctgcccgcgaaatcgacaatcttttccgcgttattcgtgaactgcgaaaagaggggcgggtgatcttatacgtttctcaccgtatggaagaaatatttgccctcagcgatgccatcactgtctttaaagatggacgttatgtcaaaacctttaccgatatgcagcaggttgaccacgacgcgctggtgcaggcgatggtcgggcgcgacattggcgatatctacggctggcaacctcgtagttatggcgaggagcgcctgcgtcttgatgctgtgaaagcaccaggcgtgcgtacgccaataagtctggcggttcgcagtggtgaaattgttgggctgtttggtctggtaggggcggggcgtagcgaattaatgaaaggcttgtttggcgggacgcaaatcaccgccggtcaggtttatatcgaccaacagccgatcgatattcgtaaaccgagccacgccattgccgcaggcatgatgctctgcccggaagatcgcaaagcggaaggcattattcccgtgcactccgttcgcgacaatatcaacatcagtgccagacgcaaacatgtgctcggcggttgtgtaatcaacaacggttgggaagaaaacaatgccgatcagcacattcgttcgctcaacatcaaaacgccgggcgctgagcaactgatcatgaatctctcaggcggaaatcagcaaaaagccattctgggccgctggttatcggaagagatgaaggtcattttgctggatgaacctacgcgcggcattgatgttggtgctaagcacgaaatatataacgtaatttatgcgctggcggcgcagggtgtggcggtgctgtttgcctccagcgacttacctgaagtcctcggcgttgccgaccggattgtggtgatgcgggaaggtgaaatcgccggtgaattgttacacgagcaggcagatgagcgtcaggcactgagccttgcgatgcctaaagtcagccaggcagttgcctga

SEQ ID NO: 462154 - DNA, 480 bp, Shigella boydii
atgcacaaatttactaaagccctggcagccattggtctggcagccgttatgtcacaatccgctatggcggagaacctgaagctcggttttctggtgaagcaaccggaagagccgtggttccagaccgaatggaagtttgccgataaagccgggaaggatttagggtttgaggttattaagattgccgtgccggatggcgaaaaaacattgaacgcgatcgacagcctggctgccagtggcgcaaaaggtttcgttatttgtactccggaccccaaactcggctctgccatcgtcgcgaaagcgcgtggctacgatatgaaagtcattgccgtggatgatcagtttgttaacgccaaaggtaagccaatggataccgttccgctggtgatgatggcgcgactaaaattggcgaacgtcagggtcaggaactgtataaagagatgcagaaacgtggctgggatgtcaaagaaagcgcggtga

SEQ ID NO: 462155 - DNA, 465 bp, Shigella boydii
gtgagtgatcagtttgacgcaaaagcgtttttaaaaaccgtaaccagccagccaggcgtttatcgcatgtacgatgctggtggtacggttatctatgtcggcaaagcgaaagacctgaaaaaacggctttccagctatttccgtagcaacctcgcttcgcgcaaaaccgaagcgctggtcgcccagattcagcaaattgatgtaacggttactcatacagaaaccgaagcgctgttgctggaacacaactacatcaaactctatcagccgcgttacaacgttttgctacgcgatgataaatcttatccttttatcttcctgagtggcgatacccacccgcgtctggcgatgcatcgtggtgcgaagcatgccaaaggtgaatatttcggcccgttcccgaatggctatgccgtacgtgaaactctggcgctactgcaaaagattttccccattcgccagtgctaa

SEQ ID NO: 462156 - DNA, 723 bp, Shigella boydii
atgcaggatacggattttttcagttggcgtcgcacgatgctgttgcgttttcagaggatggaggccgcagaagaggtctaccatgaaatagagcttcaggctcagcagctggagtacgattactattcgttatgtgttcgccacccggtaccattcacgcgacctaaagtggctttctacaccaattaccctgagtcgtgggttagttattatcaggcaaaaaattttctcgcaattgatcctgtgctgaaccctgaaaactttagtcagggccatttaatgtggaatgatgacttattcagcgaagcacagccattatgggaagccgcgcacgcacatggtttacgccgcggtgtcactcagtatttaatgctgccaaatcgggcgctgggctttttgtccttttcccgttgcagcacgcgcgaaatacccattcttagtgatgaactgcaattaaaaatgcagttactggtgcgcgaaagtctgatggctctgatgcgtttaaatgatgaaatagtgatgacgccagagatgaatttcagcaagcgcgaaaaagaaattctgaaatggacggcggaagggaagacatcagcagagatagcgatgattttgtcaatctctgagaatacggtcaatttccatcagaaaaacatgcagaaaaaaatcaatgcaccaaataagacccaggtggcctgttacgcggccgctactggcttaatttga

SEQ ID NO: 462157 - DNA, 162 bp, Shigella boydii
atgtctatcttttctgattacagtttcagtattgaaatgcacaataatttaacaattgattattatttagcactttcctctaccaaaggcagtggaattacttatatcatttcaattattcttcagcaagcccaggattatgatgtggcgaaaataacatga

SEQ ID NO: 462158 - DNA, 765 bp, Shigella boydii
atgagcgtaattgaaactgcaactgtgccgctcgcacaacaacaggctgacgcactgctgaacgtgaaagatttgcgtgtcacctttagtaccccggacggcgacgtcacgacggtcaatgatttgaatttttccctacgtgccggagaaacgctgggtattgtaggtgagtctggttcgggtaaatcgcaaactgcatttgcgttgatgggcctgttggctgccaacggacgtattggcggatcggcaaccttcaatgggcgtgaaatcctcaatttgccagagcatgaactcaataaactgcgcgctgaacaaatctcaatgatttttcaggacccaatgacttcgttgaatccctatatgcgcgtcggtgagcagttgatggaagtgctgatgctgcataagaacatgagcaaagctgaggcgtttgaagagtcggtgcggatgctcgatgcggtaaaaatgccggaagcacgtaaacgcatgaaaatgtacccgcacgagttttctggcggcatgcgtcagcgagttatgattgcgatggcattgctatgtcgacctaagctgctgattgcggatgaacccactacagcgctggacgtcaccgtacaggcgcagatcatgacgctattaaatgaactgaaacgggaatttaataccgccatcattatgattacccacgatcttggcgtggtggcggggatctgtgataatgtacgccgggcgcacgatggaatatggcaacgcgcgcgatgtcttttataa

SEQ ID NO: 462159 - DNA, 1131 bp, Shigella boydii
atggcgcgcccgcgaaaatataaaaccaatgttccgggattatctccgtattttgacaaaagaaataacaaagtttactggcgttacaggcatcccataacaggcaaaaatcacggtctcggcagtattgaccagaaactggcagaaactattgcagcagaagcgaacagccgtcttgcccggcagcaaatggaacaaatgctcagtctgcaggagaaaattattagtgataccggcggttcatcaaccgttaccatttttctgaataattacagaaaaattcaacaggaaagatatgaaaacggcgagatcaaactcaacacgctgaaacagaaagcggcccctctcagggtatttgatgaacgttttggcaccagaccgttagatgccataaccgtaaaagatgtggtatcagtactggaagagtacaaggccagaggacataacagaatgggacaaattttcaggaaggtactgatcgatgttttccgggaagctcagcaaacgggcgatgtcccgccaggctttaaccctgcagaatcggcaaaaaaaccgcaggtgcggatatcaagacagcgactgacttttgatgagtggatgatgatttataacgcagcggaaaaggatggttactttttacagcgcggtatgctgctggcactgatgacaggccagcgcctttcagatatttgcaaaatgcaattttcggatatccgggatggttatcttcatgtcgaacagcaaaaaacaggaacccggattgccatccctctggctctgcgttgcgataaattaaatctcaccctagatgatgtggtgtcatcctgccgcgattgcgttcttagtccgtggctattgcaccaccatcacgcgaaagggacagctaagcgcggcgggatggttaagccagcaacattaaccgttgcatttaaaaaagcccgggattctgtggattacaactggcgtgctaatggcaccccaccctctttccatgagcagagatctttatcagagcgattgttcagagagcagggggttgataccaaaattttgctgggccattcgaatcaaaaaatgaccgatatttacaacgacgcacgcggtaaggaatggaaaaaactggtcatttga

SEQ ID NO: 462160 - DNA, 2472 bp, Shigella boydii
atgagtaaagtctttatttgcgccgccattccggacgaacaggcaataaaggaagaaggtgccgtcgctgtagccactgccattgaagccggtgatgaacgtcgcgcccgcgcaaaatttcactggcaattcctggagcattatccggctgctcaggactgcgcttataaatttcttgtctgcgaggataaacccggtataccccgccctgccctcgattcctgggatgctgaatatatgcaggaaaaccgctgggatgaggagtctgcttcctttgtcccggttgagactgaatccgatccgatgaacgtcacttttgacaagctggcccctgaagtacagaacgctgtcatggttaagttcgacacatgtgaaaacatcaccgttgatatggttattagcgcacaggaattgttgcaggaagacatggcaacattcgacggacatatcgttgaagcgttgatgaaaatgccagaagttaacgccatgtatccggagcttaagctgcatgccatcgggtgggttaagcataaatgtaagcctggtgccaaatggcccgaaattcaggcagagatgcgcatctggaaaaaacgtcgcgaaggtgaacgcaaggaaaccggaaaatacacgtctgttgttgatctcgcccgcgccagaaccaatcaacagcacagtgaaaattcaacaggaaaaatcagcccggtcattgctgccattcatcgcgaatacaagcagacatggaaaacactggatgacgaactggcctacgctctctggcctggtgatgtggatgccggaaacattgacggcagcatccatcgctgggcaaaaaatgaagttatcgacaacgaccgcgaagactggaagcgtatctcggcatcaatgcgcaaacagcctgatgcccttcgctacgaccgccagactatttttggccttgtccgtgaacgtccgatcgacattcacaaagaccctgtggcactgaacaaatacattactgaatacctgactacaaagggcgtgtttgaagatgaaggaagaaatcagagcgcaactgatactctctcgtcgccagtaccagaaactgatgcagtggaaacggcaattccgggcaacgaaaaaaccgaatgcaaagtggaagtcgaaccatctgtagagcgtgaggggccgttctacttcctcttcaccgacaaggatggcgaaaaatacggtcgcgcaaacaaactttctggtctggaaaaagcactagccttgggagctacggaaatcacaaaagaggaatacttcgcacgtaaaaacggcacgtactcaggttcacaacaaaatactggtgcatctgacacgaccgcacaaccagagccggtaaaagttaccgctgacgaagtaaacaaaattatgcaggcagccaatatcagccagcctgacgccgataagttgcttgctgcctctcgcggagaatttgttgcagggattagcgacccgaatgatccgaaatgggtaaaggggattgaaacccgcgattctgtaaaccagaaccagcaagaatcggaacagaacgaccagaaagcggaacaaaacagcccaaatacgcaacaaaacgagccagaaacgaaacaacctgagccagtagcgcaacaggaaccggaaaaagtctgcaccgcctgcggtcaaagcggtggcggcaactgccctgattgtggcgcggtgatgggtgacgcaacataccaggaaacattcgatgaagagaatcaggttgaagttcaggaaaatgatccgaaggaaatggaaggcgttgaacatccacacaaggagaatgctggtagcgctcaggatcacgccagcgatagtgaaactggcgagacggcagatcccttaattacgatgaacggtcatcacgttatcacatccaccagcaggacgtgtgaccatctaatgatcgaccttgaaaccatgggaaaaaatcctgatgccccgattatctcaataggtgcaatatttttcgatccgcaaaccggagatatgggaccggaatttagtaagactatcgatctggaaactgctggcggagtcattgatcgtgacgtcattaaaaggtggctgaagcaatcacgtgaagcgcagtctgccattatgaccgatgaaatcccgttagatgatgcactgttacaattgcgggaatttatcgacgaaaactccggtgaattttttgttcaggtctggggaaatggagccaacttcgacaacacgattttgcgccgttcatacgaacggcaggggatcccctgcccatggcgttactacaacgatcgcgatgtacgcacaatcgttgagctggggaaagccatagacttcgatgccagaacggctattccattcgaaggtgagcgccataatgcacttgatgacgcccgttaccaggcaaaatacgtttcagttatctggcaaaaactgatcccgaatcaggctgatttttaa

SEQ ID NO: 462161 - DNA, 192 bp, Shigella boydii; identical to SEQ ID NO: 8188

SEQ ID NO: 462162 - DNA, 189 bp, Shigella boydii
atggaaacgttattaccaaacgttaatacgtctgaaggttgttttgaaattggtgtcaatatcagtaaccctgtatttactgaagatgccattaacaagagaaaacacgaacgggagctattaaataaaatatgcattctttcaatgctggcccgtttacgtccgatacaaaaaggatgctggcaatga

SEQ ID NO: 462163 - DNA, 165 bp, Shigella boydii; identical to SEQ ID NO: 4946

SEQ ID NO: 462164 - DNA, 219 bp, Shigella boydii
atgcagaaacgagaacccgtcatcatcgcgccagactataccgatgatgaactttatgagtggatgcaccagaaaattaatgcagcgcaggatcagaaatgggccaatgaagccagggctaagcaggctgaaaatctgtccgctctggagcaggatatcactaatctggaaaaagcagcggcattaagcattgccagaatgattacatacccgcgttaa

SEQ ID NO: 462165 - DNA, 129 bp, Shigella boydii; identical to SEQ ID NO: 7749

SEQ ID NO: 462166 - DNA, 156 bp, Shigella boydii; identical to SEQ ID NO: 7155

SEQ ID NO: 462167 - DNA, 459 bp, Shigella boydii
atgctaatcactcaaggaatctcaagtcaaggattattaagatatctaaatatgaacgagaaaactttaggtcaacgcattagagaaagacgtaagcaggtaggcttaagtcaaaacggtttaagcaaagctgctggcgtatctggctcatcaatttcattatgggaaagtgaccatacagccccgcgcgggcaaaatttgcatcgcctcgccgaggtattgcaatgttcaccaacctggatactgtttggcgacgaggacaaaacaccagctccccctgtttcactcgatagtaccctagacttatcggaagatgagttagagatgctgcgtttgtatcgcgcacttcctaaatcagagcaacaagcacaactcagcgaactccgcgcccgcgttgagaattttaatcgcctgttcaccgagctattagaggctcgcaaacgcaacaagcatcaataa

SEQ ID NO: 462168 - DNA, 228 bp, Shigella boydii
atgtttaaatcagacgtaattaatttttacggtacgaaagccaaagtagcgaaagctgctggcgttgacccatctgctgtttctcaatggcaagagctagttcctgaaggtcgcgcgatgcgtctacaggaggcatctggcggcgagcttctgtatgatcccaaggtttatgacgaatatcgtaagacgaagcgggcggggcggttgaacaatgaaaatcactcctga

SEQ ID NO: 462169 - DNA, 522 bp, Shigella boydii
atgaaaatcactcctgaacaggctcgtgaggctctggatgcctggatatgtcgaccaggaatgacacaggagcaggcgacgatattaatcactgaagcattctgggctttgaaagagcgcccgaacatcgatgttcagcgtgtcacagatgaaggtggcgcggttgatcagcgagcgcttggcgttaatcgagtgaagatattcgaacgctggaaggctatcgacaccagggataagcgtgaaaagttcacggcgctagtgcctgcaattatggaggctatccggattaatgatttcaggttgtatcgtgaaattagtgacggaaaaagcatcacgtacatgatcgccgggttaaacaaagaatatggcgatgtggtggagtccggactgctttttgctgatcctgccgtagtggatcgtgaaactgacgaacttatagaaaaagcaattgctttcaaacttgcgtatcgacagcaataccaacaaaaagctggatggaattatgagccttctttttgctga

SEQ ID NO: 462170 - DNA, 423 bp, Shigella boydii
gtggcaaaagtttttacacaagaagagcgggaaaaaattaaagggcaggtggtggaactcgtgcgccagagcggtcgtgagacgttacggcaactggaagtcaagacaggtgcgacaagatatctgatgagcgttctcgcaagagagctggttgccagcggcgatgtatacaactctggttacgggttattcccgtctgaacaggcgcgtaaggactggcaaaatgcccgtaaaaagctctcaagggcaaagctgaaggaaccatctgcggttgatccggaccttatctggtcattacctgacggagaaatacgtcgctacgacaggcgtcagaacataatctgtcgcgagtgccggaagagtgaagttatgcagcgcatactagcattctatcagggaaatgctcgatatttattgaagtga

SEQ ID NO: 462171 - DNA, 900 bp, Shigella boydii; identical to SEQ ID NO: 31523

SEQ ID NO: 462172 - DNA, 654 bp, Shigella boydii; identical to SEQ ID NO: 31524

SEQ ID NO: 462173 - DNA, 696 bp, Shigella boydii
atgttagaaccaccaaagagttataatgaaatgttgcctatgctccataaggcgacttttattactacatttatattttacctatcattagtcatttatggctacatgccattggttggcattaatgccaagtatatcccccccgttaaagactacgaggaatttattaaatggatattaacctttggcatattaccaattgcatcttcagttttttggtcagtaattagtggagctttagatctacataataatgtagcaaaaattattggaataaggaagatgtgggatagtcatttaattattaaaccattagcaaaaattgcaggcgttacgagaaaattaactactgatgaatctcacaaggtaatgagtaaactgcattacccagaagttaaagagttaaaagacaaacattatgttgaacttttctggaacaaagtttattacttttgggttttctttgaacatacagtaatcgcatttgttactattttaataataagtatcgccaaattaacaaatatattctctgttactggctctttaattaatctttggttgtggattatttctcttgtcgcatttgacttccttattttcatagcatcagttaaaccaagaacagaaagccaagtaagacaaatacctgatagcaaaataaaagaattctttaacaataacaatattttttaa

SEQ ID NO: 462174 - DNA, 213 bp, Shigella boydii
atgctctacacacgtaggttagcctcttacgtgccgaaaggcaaggagaagcaggctatgaagcagcaaaaggcgatgctaatcgccctgatcgtcatctgtttaaccgtcatagtgacggcactggtaacgaggaaagacctctgcgaggtacgaatccgaaccggccagacggaggtcgctgtcttcacagcttacgaacctgaggagtaa

SEQ ID NO: 462175 - DNA, 252 bp, Shigella boydii
atgatgaacatcgaagaactgcgtaaaattttttgtgaagatggcctctatgctgtgtgcgttgaaaatggaaatattgttagtcattaccgcattgtgtgtttgcaaaaaaatggggctgcgttaattaattttgtggatgcccgagtgacggacggatttatcttgcgcgacggtgagtttgtcacttcattacaggcattgaaagagatcggaataaaagctggcttttctgctttttcagaagaataa

SEQ ID NO: 462176 - DNA, 279 bp, Shigella boydii
atggcacgcaacgcaaaatattacaatcatgataattcgaccgttcttgcccacacgcacgagcggtattctcatgcatttaagtcagactggtaccagcatcccccatgcactgaagaacaggccgaatggctcattcagtgttaccgcaggcgcggatgcgaggttaaaaaagcccttagcctcgactaccgtcactggataatctccgtcaggctcccttactccgaacggccaccgcgtccgtcccgcacattccagcaacgtatctggaggtaa

SEQ ID NO: 462177 - DNA, 1047 bp, Shigella boydii
gtgcgggtattacttcgacctgttctggtaccggaactcgggctggtgatcgttaagccgggccgtgaatccatgccggtattccacaatacccgggtactggtggagccggaaccgaaaagcatgcgtaatctgtcgtccggggtcgttcctgccgttcgccagccgctggcggaggataaatcattactgccatttttcagcgacgaacgagtgattcgtgctgctggtggcgctggcgcattgtctgactggttactgcgccatgttaaatcctgccagtggccacacggcgattatcaccacagtgaaaccgtcattcaccgttatggtaccggcgcaatggtgttgtgctggcactgcgacaaccagctgcgcgaccagacctccgaatcactcgggcaacttgctcaccaaaacctgtctgcatggatgattgacgtcatactccatgcaatgaatggctcgcaggaacgggaattatcgctggctgaattatcctggtgggcggtccgcaatcaggtggcggacgcgctaccggaagcggtattacgtcgttcgctggggttgcgtgcggaaaaaatccgctcaatgtaccgtgaaagcgacatcgtaccgggagagcagaccgccaccagcatactgaagcagcgcacaaaaaatcttgcgccgctgtctcacgcccaccagcaaaacccgccacaggaagagacggtggtcagcattgccgttgatcctgagtctccggaatctttcatgaaacgacctaaacgtcgccgctgggttaacgagaaatacacacgctgggtgaagacacagccgtgtgcgtgttgtggtaagccagccgacgatccccatcacctgattggtcatggtcagggcggaatggggacaaaatctcacgatattttcacgctaccgctgtgtcgggagcatcacaacgagcttcatgcggatcctctggcgttcgaagaaaagcatggttctcaggttgatttaatttttcgttttcttgatcacgcctttgcaactggcgtgcttgggtaa

SEQ ID NO: 462178 - DNA, 198 bp, Shigella boydii
atgctaaaacagcaggatatgacagaaaccgccagagtggtgtttaatgaattaagcgttaccgaaccggcgacagtcggggagatagcgcagaatacttacctttcacgcgaacgctgccagttaatactgacccagctggttatggcggatctggcagactatcagttcggttgttacagacgccttccgcagtga

SEQ ID NO: 462179 - DNA, 495 bp, Shigella boydii
atgaagaccaacaggagtctggtcgtcatagtgtcactaattaccgccacattactgctgactgcatgcgcccaacctgaacaatcatcattagctggcgactggttactgacccctaaagataaaaccagaagattaacgggtagcattgcggtaaatattgcaccttcccggtgtaagacaaattgccgtggtgataacttacctgataatacccgccgctggcagttgtcaggcgggaacgaaaaagaacttacttatcttcataatatgtcagcacaagaaaaggtcggtttaaatcccggttggcaatgctacacctcattttttatgcgggtttgccagggcaagcccggcactcgaccgatagtcaatgaggattatgtcagcgaaagcggattttttggctcgatgatgcatgtcgggattattgagttacgacgctgccagtcagaaaattgccagcaagaattgaaagcgataaatacacattaa

SEQ ID NO: 462180 - DNA, 651 bp, Shigella boydii
atgcgtgaaatgaatcagttagtaaatactgaagattcagcctggccaataatccagaactggttaaaagacgccacaaaccataccgaactcttaccggttaataaaaatttagccgaaaccgcactttatcaattacaggtgacaacaaaatcaccgatgggtgcgcttgtctatggctccggaggtctgctgattgataatggttggttacgcatagcaggatctggtcacccccggttgccacgagatccagtaagttggacacaacgccctgaattcgcaggcgtgcgggctttacccatcgctgacgatgtcgcagggggaatttttgctcttaatggtggcgatcttggggaagatactggctgcgtttattattttgcgccagatacgctgaattgggaaagtctggaagttggatattctgagtttcttcagtgggcattatccggtgatttagataccttctatgaaaatgtacgatggcagcaatggcgagaagacgtaataaaattatcggcaacggaagccttcacgttctaccctttcttatgggtacaaagtgaagaagcaagaacaagaaaagttatttcgcttactgaactctgggaaatgcagtatcaaatgaaagaaacattcacgcaataa

SEQ ID NO: 462181 - DNA, 1320 bp, Shigella boydii
atgagtcaggctaaatcgaacaaaatgggcgtcgttcagttaaccatactgacgatggtcaacatgatgggctccggtatcatcatgctgccgacaaagcttgccgaagttgggacaatctcaattatctcctggctggtgacagccgtaggctcaatggcactggcatgggcattcgcaaaatgcggtatgttcagccgtaaatcaggcggtatgggcggttatgcggagtatgctttcggtaagtccggcaattttatggcgaactacacctacggtgtctcgctgctgattgctaacgtcgcgattgctatttcggcggttggttacggcaccgaactgctcggcgcgagtttgtcgccagtgcagattggtcttgcgaccatcggagtgctgtggatttgtaccgtggctaactttggtggtgcgcgcattaccgggcaaatcagtagcattactgtgtggggagtcattattccggtcgtcggtctgtgcattattggctggttctggtttagtccgacgctgtacgctaactcatggaacccgcaccatgtgccgttctttagcgctgtaggttcttccatcgccatgacgttgtgggctttcctcggtctggagtcagcctgtgccaacgccgaagtagtggaaaacccggaacgtaacgtgccgattgcagttcttggcggtactttaggtgcggcggtgatttatatcgtctccaccaacgtgattgccgggattgtgcctaatatggagctggcaaattcaacggcaccatttggcctggctttcgcacagatgttcacaccagaagtgggtaaagtcattatggcgctgatggtgatgtcctgctgcggttcactgcttggctggcagttcaccattgcccaggtgtttaaatcttcatctgatgaaggctacttccctaaaattttctcccgtgtaaccaaagtggatgcaccggtgcagggaatgttgaccattgtgattattcagagtggattggcactgatgaccattagcccgtcactgaacagccagttcaacgtgctggttaacctggccgtggtgaccaatatcattccgtatattctgtcaatggcggcattagtcattattcagaaggtcgctaatgtgcccccctcaaaagcgaaagtagcaaactttgttgcctttgttggtgcgatgtacagtttctatgcgctgtactcatccggggaagaagccatgctgtacggttctatcgtgaccttccttggttggacactgtatggtctggtatcaccatgctttgaactgaaaaataaacacggttaa

SEQ ID NO: 462182 - DNA, 213 bp, Shigella boydii
gtgtatgatggtgattttaaggtgcttgcgtggcttccatttccatcagatgtccttcctgctccgctactgaaggcgtggtgcgtaacggcaaaagcactgccggacatcagcgctatctctgctctcattaccgtaaaacatggcaactacagttcacttacaccgcctctcagcccggtacgcaccagaaaatcattgatatggccatga

SEQ ID NO: 462183 - DNA, 258 bp, Shigella boydii
atgaccgaatccagcgattacgaatccgtccaggtctttatcggcgttgatgtcggtaaagatacgcatcacgctgttgccattaatcgttcaggtaaacgcctgttcgataaagcattacccaacgacgaaaacaaactcaggtcgctaatatctgacctgaaacaacatggtcagatactgctggttgttgatcagccagctaccattgaaccgccccgggaatcctggagactaaactccctgagaaagaggtaa

SEQ ID NO: 462184 - DNA, 2028 bp, Shigella boydii
gtgccgcaacgaaacgacaggagccgcagcacaccgacgaccagtccgaagattaattcctggttcaggatgcaggctggtcaccagagtgacgcggatatttatatttatgacgagattggtttctggggtgttacagcgaagcagtttatcagtgatctgaatgcactgggcgatatcacccacattaatctccatattaattcaccgggtggcgatgtctttgaaggcatcgccatttttaatgcactgaaaacacatggtgcgtccattaccgtttatgtcgacggtgtggcggcgtcaatggcgtcggtcattgcgatggtgggaaacccggtcattatgccggaaaactccttcatgatgattcataaaccatttggatttacgggcggtgatgcggaggacatgcgcacctatgccgacctgctcgataaagttgaggcggttctgttacccgcttatgcacagaaaaccgggaaaaccaccgatgaaattgctgccatgctggcggatgagacctggatgtccggtgccgaatgtctggcacagggatttgctgatcaggtgacaccagccgttaaggcaatggcatgtattcagtcaaaacgtacagaggaatttaaaaagatgccggaatccattcgaaacatgattactccgccacgcaacagtgctccacgcgtacaggatgatgaacctgcagcctcccggacgccagtgcaggcagcagcacccgtggtggatgaaaacagtatccgtgcgcaggtactggcagagcaaaaagcgcgtgtaaacggtattaatgatctgtttgccatgtttggcgggcgttatcagacgctgcaggcccagtgtcttgccgatcctgaatgttcgctggagcaggcccgtgaaaagctgttgaacgagatggggcgcgagtccacgccatccaataaaaataccccggctcatatttatgccggtaacggtaattttgtgggggacgggattcgccaggcgctgatggcgcgtgccggatttgaaaaaaccgaacgtgataatgtctacaacgggatgaccctgcgtgaatatgcccgtatgtcactaactgaacggggtattggggtttccggttataacccgatgcagatggtcggtgcggcgttcacacacagtacgtctgacttcggtaatattctgctggatgttgcgaacaaagccattctgcagggctgggaagatgcccctgaaacctatgaacagtggacgcggaaaggtcagttgtctgattttaaaattgcccatcgtgtgggtatggggggcttcagtgctctgcgtcaggtgcgtgaaggggcggaatataaatacgtcaccaccggagataaacaggccactattgcactggcgacctatggcgagctgttcagtatcacccgtcaggccattatcaatgatgatctgaatatgctgaccgatgtcccgatgaaactgggccgtgcggcgaaatccactattgccgatctggtttatgccattctgacgtctaacccgaaaatctccacagataatgtaagtctgttcgataaagcgaaacatgcaaacgtactggagagcgctgcaatggacgtggcatcgctggataaagcccgccagttgatgcgcgttcagaaagagggggagcgtcatctgaatattcgtcctgcgttcgtactggtaccgacggcgatggagtctgttgctaaccaggtcattcgctcctcaagtgtcaagggggctgacattaacgccggtattattaacccggtgaaagattttgcgaccgttattgcagagcctcgtcttgatgataacagccagaccaccttctacctggctgcgtcaaaaggctccgatacgattgaagtggcttatctcaacggtgtggatacgccatatattgatcagatggagggcttcagtgtggatggcgtgacaacgaaagtgcgtattgacgccggtgtcgcgccagttgatcaccgcggtctggtgaaatgtacggcgtaa

SEQ ID NO: 462185 - DNA, 1509 bp, Shigella boydii
atggcaattcttgatgatgtgattggcgttttttcacctggatggaaagcggcaaggctgcgttcccgtgcggtgatccaggcttatgaagccgtaaaaacgacgcggacacacaaagcccgacgggagaaccgaactgccgaccagctaagccagtacggggccgtgtcgttacgtgagcaggcccgttaccttgataacaaccacgatctggttattggtgtatttgacaagctggaagaacgggtggtggggaaaaacgggattattgtcgagccacatccggtattacgcaatggggccattgcccgtgatctggcagcggagattcgcacccgatggagtgaatggtctgtcagcccggaagtcaccgggcagtttacccgtccgatgctggaacgtctgatgctgcgtacctggctgcgcgatggtgaggtgtttgcccagatggtttccgggcgcataaacagcctgacgccttctgccggtgttcatttctggctggaggcgctcgagccagactttattcccatgaccagtgatgagagcaacaggctgaatcagggcgtgtttgttgatgactgggggcgtcccgaaaaatatctggtgtataaaagccgtcccgtatccggacggcagatggaaaccaaagaagtggatgcagagcgaatgctgcatcttaaatttgttcgccgtctgcaccagatgcgcgggacgtctttgttgtccggtgtgctgatccgcctcagtgccctgaaagattatgaagattatgagctgactgcagcaaggatcgccgctgctctggggatgtacatccgcaaaggcgacgggcagagctatgaaccggatggtaatggcagcaaggataaggaacgcgagcttaccattcagccaggcattatttacgacgatctgaaacccggcgaagaaatcggaatggtgaagtcggatcgccccaatcctaaccttgaaacttttcgtaatggtcagttgcgtgccgtggcggcgggcagtcgtctgagtttttccagtacagcgcgcaactataacggcacttacagcgcccagcgtcaggagctggttgaatctactgatggctacctgatcctgcaggactggtttattggtgccgtcacccgcccgatgtatcgtgcctggctgaaacaggctgtggcatccggtgttatcaggctaccccgcgatcttgaccgttcttcactgtataccgcggtgtattccggaccagtgatgccgtggattgaccctgttaaggaggctgaggcctggaaaatccagattcgtggtggagcggcgacagaatcagactgggtacgtgctggtggtcgtaatccggatgatgtcaaacgtcggcgcaaggccgaaattgatgaaaaccgcaagctggatctggtatttgataccgatccggccagtgataaaggaggcagcagtgccgcaacgaaacgacaggagccgcagcacaccgacgaccagtccgaagattaa

SEQ ID NO: 462186 - DNA, 213 bp, Shigella boydii
atgaaccagaatgatatcgaagccatgattcagcgttatatggaagctgaaatggcggtgctggacggaaaatccgtcacctttaatggtcagcagatgaccatggaaaacttatctgagatccggcagggacggcaggagtgggagcgccgccttgcggctctgattacacgacgacgggggcatcccgggtaccggctggcgaggttctga

SEQ ID NO: 462187 - DNA, 2103 bp, Shigella boydii
atgctgaatcaggaaaccgcaaaggcagcacgaaccgattcaggttatatccttcgcgcaccgagacgaatgcgggttgctgatgccgttgctcagtatatgcgggtgcccatgggggcagggaactcagtcccgtgggatccgctggtggcaccgtatgttattgagccgatgaactgcctggcctcgcgtgaatacgacgcagtgatatttgttggcccggcacgaaccggcaagactatcggcctgattgacggctgggtgatttacaacgtgatttgcgatcctgctgatatgctgatcattcagatgacggaggaaaaagcccgcgaacactccaaaaaacgactcgccagaacgtttcgcgtcagcccggaagtggtcagtcgcctgagtccaaacaaaaatgacaacaacgtttatgacagaacattccttgctggtaactacctgaaaatcggctggccgtcagtcaatatcatgtcctcatcagattataaatgcgtcgcgctgacggattatgaccgttttccggaagatattgatggcgagggggatgctttctctcttgcctcaaaacgtaccaccacatttatgtctagcggtatgacgctggtggagagttcccccggcagggatgtgaaggatgtgaaatggcgacggacttcaccgcatgaggctccaccaaccacggggatcctgtcgctctataaccgtggtgatcgccgtcgctggtactggccctgtccacactgtggtgagtattttcagccctgcggcgatgtggttgctggtttccgtgatattgccgatcccgtgctggcaagtgaggcggcttatattcagtgtccttcctgttcaggacggattatgcctgaacaaaaacgtgagctgaacggacgtggggtctggttgcgggatggtgaatccatcaatgcggatggcagtcgttatggtgatccccgacgctcacgtattgcgtcattctggatggagggtccggcagctgcttaccagacactctcgcaactcgtttacaaactgcttactgcagaacaggaatacgagacaaccggaagtgaagaaacactcaagacggttatcaataccgactggggattaccttatcttccccgcgccagcatggagcaacgaaaaagtgaactgcttgagcagcgggcagagccagttccttcccgcagtgtgccggatggcgttaatttccttgtggcgacagtggatgtgcaggcgggacgtcatcgccgttttgtggttcaggtaacgggctatggcagccgtggcgaacgctggattattgatcgttacaacatcacgcagtcattgcgcggtgacagcgacggggagagccagcgaattgatccggccagctatccggaagactgggatgtcctgctgacggatgtttttcataaaagctggccgctggcctccgatccttctcaacaaatgcgactgatggcaatggcggtggactccggcggtgaagacggggtcactgataatgcctataaattctggcgtcgttgccgtcgtgatggccttggtaaacgtatttacctgtttaagggcgacagcatccggcgcgcaaaactgatcacccgtacattccctgataacaccggacgaacgggccgacgggcgcaggccgcaggtgatgtgccgctctggcttcttcagacggatgcactgaaagaccgggtgaataacgcgttatggcgtgactcgccaggtcccggctatgtgcatttccctgactggctggggagctggttttacgacgaactgacgtatgaagagcggagcagtgacgggaaatggagtaagccgggtcgcggtgccaacgaagcttttgacctgatggtgtatgccgaggctctggtcattctgcatggatacgaaaagatccgctggccggatgcaccggagtgggcgagccgggaaacctggctggagtgtgtccaggacagtaccgaaccgtcatcctcaccggaaccggtatccacgcctgttaaaaaacaaaaacggaagaaaacagtaactgacgatgttaacccctggctgacttccggaggatggttatga

SEQ ID NO: 462188 - DNA, 495 bp, Shigella boydii
atggatcgagagttaaaaaatctgacgctgaatatcagtcaactggcggcactgtcaggtgtacatcgccagactgctgcggcaaggctgcaaaatctacccgttgcaggggggcatgaaagcaacctcaagctttatcgggtggttgatattgtgtcggcatttctggcattgccaccgccggttgcagaaggcgaaatggacgcgcatgagcgcaaagcctggtatcagtctgaacgtgagcgtcttaagttcgaacaggaaacggcacaactcattccggccagtgatgtcagacgggagtttgccatctgggcaaaagcggtcgtgcaggtgctggagacattaccggatattctggaacgtgactgcggtctgcagcctgccgctgtgagccgtgttcagtccattattgatgatctgcgcgatcagatagccctgcgggtgactgaagcaggtgcggatgatgaggaggaattacagcaggaggagtaa

SEQ ID NO: 462189 - DNA, 240 bp, Shigella boydii
atgaatatattagatgattttgaaaaacatgctgaaatctatgggtatctcaaggtattgaaaatgggagcgatgcacttaggtgcagacttcaaaatttcagaggcattctcacatgataatgtgctacctcaattgcaagcattctataaaaaaaaatatatagagaaagaagcacttgaagcgataaactggtggtcgtcactgtcgccggagttacgaaacaaattcgacagttag

SEQ ID NO: 462190 - DNA, 462 bp, Shigella boydii
atgagcagattaaccgcgattatctccgctctggttatctgcatcatcgtctgcctgtcatgggctgctaatcattaccgtgataacgccatgacttacaaagagcagcgcgacaaaaacaccagagaactgaaactggcgaacgccaccatcaaagacatgcagatccgccagcgtgatgtagcggctctggatgccaaatacacgaaggacttagctgatgctaaaaagcagcttgatgatttgcagcgttgtgttcgcactggcaagtgtgggctgcacttcaacgccagatgtcccgcgaatggagcgaccagcaccggcagcttgggcgatgttaccagcccccgacttaatgactccgctgaacgggattatttcacccttagagagcgaatcgtcacagtgactaaacagattagttatctgcagaactatatcgtcacccagtgcattatgtag

SEQ ID NO: 462191 - DNA, 498 bp, Shigella boydii
atgtcgccatcattacgcaaggctgttgctgctgctattggtggtggggcaattgctatagcatctgtgttaatcactggcccaagtggtgacgatggtctggaaggtgtcagccacataccatacaaagatattgttggtgtatggactgtatgttacggacacaccggaaaagacatcatgctaggtaaaacgtataccgaagcagaatgcaaagccctcctgaataaagaccttgccacggtcgccagacaaattaacccgtacatcaaagtcgatataccggaaacaacgcgcggcgctctttactcgttcgtttacaacgtgggtactggcaatttcagaacatcgacgcttcttcgcaaaataaaccagggcgatatcaaaggcgcatgtgatcagctacgtcgctggacatatgctggcggtaagcaatggaaaggactgatgactcgtcgggagattgagcgtgaagtctgtttgtgggggcagaaatga

SEQ ID NO: 462192 - DNA, 216 bp, Shigella boydii
atgaaatccatggataagttaacaacgggtgtcgcctatggcacctcagcaggtagtgccgggtactggtttttacagttgctcgataaagtcacgccctcacagtgggcggcaattggagtgctgggtagtctggtatttggcttgctgacgtatctgacaaacctttatttcaagattaaagaagataagcgtaaggctgcgagaggtgaataa

SEQ ID NO: 462193 - DNA, 1053 bp, Shigella boydii
atgaaaaatactgtaaaaataaacagtgttgatttaatcaacgctgattgcctgcattttattcagtccctgcctgatgattccattgacctgattgttaccgatccgccgtacttcaaggtgaaacccaacggctgggacaatcagtggaaaggggacgaagattaccttaagtggctggaccactgtctggcccagttctggcgggtgttaaaacctgccggaagcctttacctgttctgtgggcatcgcctggcatctgatattgagatcatgatgcgtgaacgtttcaacgtgcttaaccatatcatctgggcgaagccgtccggacgttggaatgggtgtaataaagaaagtctgcgcgcatattttcctgccacagagcgcgttctgtttgctgaacattaccagggaccatatcgcggcaaaagtgacggctatgcggcaaaagaaagggaactcaaacagcacataatggcaccgctgatatcgtatttcagggatgctcgtgccgaactgggtataacggcaaaacaaattgccgaagccacaggtaagaaaaatatggtttcccactggtttggtgccagtcagtggcagttgccgaatgaggctgactatcggaagttacaggcactgttttcccgtatagcggcagagaagtttcaggaacaacaactggaacaaccacaccaccagctggtggcatcttatgattcactgaatcgcaaatattctgaattgctggatgagtttaaatctctccggcgctatttctccgtatcagtctccgtgccttataccgatgtctggatgcataaacccgttcagttctacccgggtaaacatccgtgtgagaaaccggcggatatgctcaggcaaataatcaatgccagtagtcgacctggtgatctggttgctgatttttttatgggatccggttccacaataaaagcagcaatggcgctggggcgtcgggccttaggtgttgagcttgagtcagagcggtttaaccagacagtgaaagagataaacgagctggtggggaaataa

SEQ ID NO: 462194 - DNA, 204 bp, Shigella boydii; identical to SEQ ID NO: 30879

SEQ ID NO: 462195 - DNA, 447 bp, Shigella boydii
atgaataaaataactgtactattacttagcgcaactatcatttcaggttgtacttcttccgtaccattgataaagaaaactcaatcaggaaaacctgagggggtttatcaaaatacgacaaaagataaagtcaaagatgcccttgtgaattactgcaatagtagagggttgataatttacaacacggataacagcagtgttatatgtggtaaagaactggaaggcggctctgccgtttttggacaaatgttaatcggcaatgcctattcaacaaccccggtatcaaaagtcagatttactatcgctcaagttaataacgatacaaaagtgtgggccgatatgtggatggaaactcaaatggcaatggggcaagtacaacaaatggctataacagacaacgcaagcaaaaacactatccaacaacgtcttgatgaattaaaaccttaa

SEQ ID NO: 462196 - DNA, 366 bp, Shigella boydii
atgcgtgatattcaaatggttcttgaacattggggggcatgggtggcaaataatcacgaggatgtcacctggtcgtctattgctgcaggatttaaaggactaatcccttcaaaagtaaaatcccgcccgcaatgttgtgacgatgatgcgatgatcatttgtgggtgcatggctcgcttgaaaaagaacaacagcgatttgcacgatttattagtggattattatgtaggtggtatgacgtttatggcgcttgcccgtaaacatgggcgttctgattgctgggttgggcgtttattgcaaaaggctgaaggtgtagttgatggcatgttaatgatgttagaaattgagctagagatggatcgttag

SEQ ID NO: 462197 - DNA, 990 bp, Shigella boydii
gtgagagcgctactgacccctgaaattgccccgcttatggggatcgtattgttcaggccaggttcagaactgatgcccctgtttatgcaggggcgtgtcctgctggagcctgagccggaacgttattcatctttcgccagtggtgccgttccggctgcatcacaaccgctggcggatgatcctgccgttcgggccgtgttccgcaatgaggcagtgattcgtcgtgctggtggagtggaatgtcttgaacgctggttacttcgtgaaaaaggttgccagtggcctcattccgactggcacagcgagaacatgaccacaatgcgacacgcgccgggagcaattcgtctgtgctggcactgcgataaccagctgcgcgatcagttcacggaacggctggaatcaatggcaacggataactgtgcccgctgggtgttgtctgttgtgcgtcgggatctcggttttgatgacagtcacgttgtgacaatgccggaactgtgctggtggctgattcgtaatgacctggcggatgccttaccggaaagtgcagcccgtaaggcactgagattaccgaagcctgttgtgccgtctgtcacccgggaaagtgaccttgtgccttcggttcctgccaccagcatcatccaggataaggcgaaaaaggtgctggcgctgaaagtggatccggagtcgccggagtcttttatgttacgcccaaaacgtcgccgctgggttaatgaaaagtacacgcgctgggttaagacacagccgtgtgcatgttgtggaaagcccgctgatgatccccaccacctgataggtcacggtcagggtggaatgggaacaaaagcgcatgacctttttgtgttgcctttgtgcagaaagcatcacgacgagctgcatgcggataccgtggcatttgaagagaagtatggctcccagctggagctgatatttcgttttatcgatcgtgcgctggcaattggcgtgctggcctga

SEQ ID NO: 462198 - DNA, 327 bp, Shigella boydii
atgacgacgttaactcaatgccagcagcaggtgctggatatgctgatttcttatcagaaagaacgtggcttcccgccaaccaatcaggaggtggcaaccatgctgggataccgttcggtgaatgcagcggtggagcatcttcgcgcactggagaaaaaaggcgtcatcacgataaagcgtggtgtggcccgggggatcacgcttcataccgcggtgaaggacgacgacagcgaggcggtcgggattatccgctcactgcttgccgatgaggaaaacgcaaggctgcgtgcaactcactggttacatgagagaggcctgaaagtatga

SEQ ID NO: 462199 - DNA, 942 bp, Shigella boydii
atgagcactaaattaaccggctatgtatgggatggttgcgctgcgtcaggcatgaaattatccagcgtggcaattatggcccgcctggctgatttcagtaatgacgaaggtgtgtgctggccatcaattgaaactattgcccgtcagattggcgcggggatgagtaccgtcagaacggctatcgcacggctggaagcagaaggctggttaacgcgtaaggcgcgtcgccagggtaaccgcaatgcgtcgaatgtttatcagcttaacgttgcgaagcttcaggcagcggcattttctcaactgtcagattctgacccgtcaaaatctgacgcatcaaaatctgacccgtcaaaatttgatgcgtcgaaatctggcaaaaaagcgggttttcacccgtcagaatctggcggggatccgtcagtaaaatcaaaacatgatccgtcagataaaaaaccttctcgtccggacgcttcgcaaccggacacgcagacggctgaacaggattttttaactcgccatcctgatgcggttgtattcagccctaaaaagcgccagtggggaacgcaggatgatttgacctgcgcacagtggctctggaaaaaaatcattgccctgtacgagcaggccgccgaatgtgacggcgaggtggttcgtcccaaagaaccgaactggacagcatgggcaaacgaaattcgcctgatgtgtgtgcaggatggtcgtactcacaaacaaatctgcgagatgtacagccgcgtcagccgcgatccgttctggtgccgtaacgtgctcagcccgtcgaagttgcgggaaaaatgggatgagctttccctgcgcttatcgccgtccgtcagcacgcacacagaaaaacgtgaagacccgtacttcaaagccagttacgacaacgtggactacagccagatcccggcaggattcagggggtga

SEQ ID NO: 462200 - DNA, 261 bp, Shigella boydii; identical to SEQ ID NO: 18149

SEQ ID NO: 462201 - DNA, 648 bp, Shigella boydii
atgaaaatcgccgatctcgctgaagcaataggagtggatgcggcgaatatctcacgcctggaaacaggtaagcagaaacaattcactgaacaagccctgagtaatattgccaggagcttaggtgttgatattgctgatctctttacctcagacttcaaaagtaatactgtatgtaaaaacagtattagtgaggatgttgcgcaggtgaaggatgtattccgtattgaaatgctggatgtcagtgccagtgcgggaaatggccttatccagggcggtgatgtcattgatgtgattcatgccattgaatacagaactgataatgctgtatcgatgtttggcggacggccagccaatcacattaaagttatcaacgttcgtggggacagtatgtgtccaaccattgagccaggagatctcatcttcgttgatgtcagtatcaatcagtttgatggagatggtatctatgtatttggttttgatgataaaatttatgtcaaacgactgcaaatgatacctgacaaactactggtgatttctgataaccagatttaccgtgaatggggaattaccagcgaaaatgaacaccggtttatggtctttggaaaggtcttaatcagccagtcacaaacccttaagcgacacaattaa

SEQ ID NO: 462202 - DNA, 363 bp, Shigella boydii
atggctagcgaacgcagtactgatgtgcaggcatttatcggggagctggacggcggcgtatttgaaaccaaaatcggcgcagttctcagtgaagtcgcttccggtgtgatgaacacgaaaaccaaaggtaaggtctcgctcaacctggaaatcgaaccatttgatgagaaccgtgtgaaaatcaaacacaaactctcatatgttcgcccgactaaccgcgggaaaatttccgaagaagacaccaccgaaacaccgatgtatgtcaatcgcggtggtcgcctgactattcttcaggaagaccagggacaattactgactcttgccggtgaacctgacggaaaactacgcgcagcaggtcattaa

SEQ ID NO: 462203 - DNA, 537 bp, Shigella boydii
atgtcatttattaaaactttttctgggaagcatttttattatgacaagataaataaagacgacatcgtgattaacgatatcgcggtttccctttcaaatatctgtcgctttgcaggacatctttcacacttctacagcgtcgcccaacatgcggtgctttgcagccagctggtaccgcaggaatttgcttttgaagcgttaatgcatgatgcaacagaagcgtattgtcaggacatccccgctccactgaaacgccttcttcctgactataaacagatggaagaaaaaatagacgccgtaatccgtgagaaatacgggttacccccggttatgagtacgcccgtgaaatatgccgatctcatcatgctggcaaccgaacgccgcgatctcgggcttgatgatggctctttctggcctgtactggaaggcatcccggcaacagagatgttcagcgtgattccactggcaccgggccatgcctacgggatgtttatggaacgctttaacgaattatcggagttacgcaaatgcgcatga

SEQ ID NO: 462204 - DNA, 3828 bp, Shigella boydii
atgcaatttatcaccaacggccctgatattccggatgaacttttgcaggcgcacgaggaaggccgcgtggtgttcttctgcggggcaggcatttcctaccctgctgatttgccaggttttgagggattggtagagcggatttaccagttgaacggaacaacactttcagaaattgagcgtgaggccttcaatcgcggtcagttcgacgccacattggatttgttggaacggcgcttaccgggacagcgtatagccgtccgtcgcgcgctggaacaagcccttaagccaaaacttcacaataggggcgcaactgatactcagacggcgctgttgcgtttggcgcgtagccgcgatggtgcccttcggttagttactaccaactttgaccgcttatttcatgtggcagctaaacgcacgactcaagcgtttcaggcttatgtagcgccgatgttgccaattccaaaaaacagtcgctgggacggaatagtctacctgcatgggttgttaccggaaaagacagacgatactgctctgaatcgtctggttgtcactagtggcgactttggcttagcctatctcacggaacgctgggctgcccgttttgtaagtgacttgttccgtaactacgtggtctgcttcgtgggctacagcatcaacgacccggtgctacgctatatgatggacgcactggcagcagatcggaggctcggtgaagtcacgccgcaagtatgggcactaggagaatgtaagccggggcaggagcaccggaaatctattgagtgggaggccaagggggtcacacccatcctttacaccgtaccggcggacaccaatgatcattcagcgatgcaccatacattgtgcgcttgggcagatatttatcgcgatggtatacagggcaaagaagccattgtcgtcaaacatgctctggcccgcccgcaggatagcacacgacaggacgatttcgttggtcggatgatgtgggcattatcagataagtcaggtttaccagcaaaatgttttgcggaactcaatcctgcaccgccgctggattggttattgaaagctttctcggacgaacgatttcaatacagcgatctgccacgcttttgtgtatctccgcatgccgaaattgacccgaaactccgattcagtctggttcagcgtcctgcgccctatgagctagccccgcagatgtcgctggcttctggatgtgtcagtgttagcaaatgggatgacgtaatgtcccatatagcccgttggctagttcgttatctgggcgaccctaggttgatcatatggattgctgaacgcggcggacagatacacgaccgttggatgcttctgattgagagcgaactagatcgcttagcagcactggtgcgggagcgcaagacttctgagttggatgaaattctcttgcattcccccaaggctattcctagtccaccaatgtttactttatggcggcttctgcttagtggtcgtgtgaaatcgccattgcagaacccagatctgtatcgttggcaaaaccgcttaaagaatgaaggcttgacgactacattgcgcttggagttacgtgagttactttctcccaaggtgatgttgaggcggccgtttcgctatcgtgaagacgattcgagcagcactgatgagcccttgcgaatcaagcaattggtggactgggagctggtgctgactgctgattacgtacattcaaccctgttcgaccttgctgacgattcatggaaatcgtccttgccatacctgttggaagattttcagcagttgttgcgtgatgcactggacttgttgcgggagttgggagaggccgacgatcgtcacgaccgctcgcattgggatttgccgtccatcactccgcacaggcagaaccgggggttccgcgattgggtgagcctgattgaattacttcgagattcatggttagccgttcgagccaaagacagcgatcgggctatgcgcattgctcagaattggtttgagttgccatatcccaccttcaaacgtctggccctgtttgccgcaagccaagacaactgtataccacctgagcggtgggttaattggttgttggaggacggttcatggtggttgtgggccacggatactgggcgagaggtattcagactgtttgttttgcaggggcgacatctgacaggaattgcacaagagcgtctggaaactgctatcttggcggggcctccgcgcgagatgtaccaagataatttggaagcagacaggtggcattatttggtggctcattccgtctggttgtgtctagcgaagctcaggggagcgggcctcgttttgggagagtctgcggctacacgtttgacggaaatatccacagcatacccaaaatggcaactggctaccaacgagcgtgatgaattctctcactggatgagcggaaccggtgatccagacttcgaggagagtctagatgtcgacattgcgccccgtaagtggcaggaactagtacaatggctcgcagagcctatgccagaaagactgcctttctatgaagacacttggagtgatgtttgccgtacgcgcttttttcacagtctgtatgcgttacgtaaactatcacaagatgatgtgtggcctattggtcggtggcgtgaagctctgcagacttgggctgcaccagggatgattttgcgttcgtggcggtacgccgcaccgttggtgcttgacatgcctgacgcagtacttcaggagatttcacacgctgtcacttggtggatggaggaggcttcgaagtccatcctctgccacgagaagattctactggccctttgtagtcggcttctgatgatagaaacaagcccagagtctagcactattcgaaacggaattgagacctataatcctgtttctacagcgatcaatcatccaattgggcatgtcacgcaatcactaatcaccctatggttcaaacagaacccgaatgacaatgatttgcttactgctgaattgaaaccacttttcaccaaattgtgtaatgtacagatagagcaattccgccatggtcgggtgttgctggggtcgcggctgatcgcattttttcgtgtagatcgaccttggaccgaacagtacctattgcccttgtttgcttggagtaatcccatcgaagcaaaagctgtgtgggaaggcttcctctggtcgccacgcctgtatgaaccgttgctgatagctttcaagtcagattttttggagagcgccaatcactattctgatcttggcgagcaccggcagcaattcgctactttcctgacttatgcagcattgggccctactgatggatataccgtggaggagttcagaacggcaattagtgctcttccacaagaaggtctggagggggccgcgcaggcgttataccaggcacttgaaggtgcgggcgatcagcgcgaggactattggaaaaatcgtgtccagccattctggcaacaggtctggccaaagtcccgtaacttggccaccccgcgcatatccgaatcgttgactcgtatggtgattgctgcccgaggtgaatttccggctgctttggctgtggtgcgggactggctgcaaccgctcgaacacccgagctacgacgttcgccttttgctcaaatcggatatttgcagtcgatatcctgcggacgctctatccttgctgagttctgtgattgccgaccaacagtgggggcctcgagagttggggcaatgcttgcttcaaattgttcaagctgctccacaactggagcaagatgttcgttatcagcgattaaatgaatattctcgaaggcgctgcgtgtga

SEQ ID NO: 462205 - DNA, 1218 bp, Shigella boydii
atggcgctgtctgatgcgtggttgcgttcagtcgttggaaaggaacgtgataaggttttggttaaatccgatcgtgatggtctgtctgtcagagtatcaccgaaaggtcgcgtagtgttccaatatcgttatcaatgggcagggaaaggtgagcgtcttgatatcgggacttacccggcaactggattaaaagaggccagagaagaagttatccgtcttcgtggtgaactcgagtcaaaccgtaatccacgattggtcaagcaggctgaaaaacgaaaagctactgaagccatgacggtagagtctgtgatccgtgcctggtatgaagcatattgtgtaaaaaataaaaaaggttctgaacagatactccgctcgtttgagctgcacctgttttctaaaatcgggaatatccctcacgatgcagctacattgcatgattggttagaagtcctggagcctcttagcactaagactccagcaatagcagaccgattgctaattaacgcaaagcaggcccatgtctgggcgtataagagaaagctcattgaaactcgcccgctgtcggatatcacgggtaaagatatggatatccgtaaaggtcagaagaaacggtttctgacacatgatgaaattaaaatcctttatgctgcgatcgatggttctcgaatggttcctaaataccgggccttcattaaactattgctgcattttggttgccgtagttcagagctaattaccgcccgggtggacgattttgatttcattaataaagtatggactgtaccaccagaacgacataagactggggagataacaggcgaaccgctaaagcggcccattattgaaccggttgaagagcttataaagtacgctatctctatgaacaatggttccgatatgctttttactaaggaaggaagcagggaacccgttggtcggacatcattgcagtcgctgccttacaatttaatgcagtacgcatggcggcgtttggggtatcaattccctcattggtctcttcatgatttgaggcgcacagcacgaacaaacttttctgatcttactgcgcctcatattgcagaaataatgctcggtcataaactgccgggggtatggcaagtttatgataagagcgattatctagaagaacagcgtaaagcttacctggcatggtgggagaggattgaatcgataattacttgctcagactctaactga

SEQ ID NO: 462206 - DNA, 678 bp, Shigella boydii
atgaagtgggactggattttctttgatgccgatgaaacgctgtttacctttgactcattcaccggcctgcagcggatgtttcttgattacagcgtcacctttaccgctgaagattttcaggactatcaggccgttaacaagccactgtgggtggattatcaaaacggcgcgatcacttcattacagcttcagcacgggcgtttcgagagctgggccgaacggctgaaagttgaagcaggcttgcttaacgatgcctttattaatgcgatggcggaaatctgcacgccgctgccgggcgcggtttctctgcttaacgccattcgtggcaacgctaaaatcggcatcatcaccaacggttttagcgccttgcagcaagtgcgtctggaacggacgggcctgcgtgattactttgatttgctggtgatttccgaagaagttggcattgccaaaccgaataagaaaattttcgattatgcgctggaactggcgggcaatcctgaccgttcacgcgtgctgatggttggcgacactgccgagtccgatattctcggtggcatcaacgccgggcttgcgacttgctggctgaatgcgcaccatctcgagcaaccagaaggcatcgcgcccacctggaccgtttcatcgttgcacgaactggagcagctcctgtgtaaacactga

SEQ ID NO: 462207 - DNA, 912 bp, Shigella boydii
atgtactgtgctgataacgggcggtggtatgaaaccccggtggactggtacggtctggcaagagctgcccggcaaacgtcctggcatcagtctgcgctttattttaagcgcaatgtattgctcggttgctacatcccgcacccgctgctttcccggcaggatttctcggcgctggcgctggactggtttgtgttcggtaacgcattccttgagcttcgaagcaatatgctcggcgaaccgcttaaattacggcacgccctggcgaaatacatgcgacgcggaagcgatcttgaatcatggaggtatgtgcaggatggcaaggatgcgtttcagtttcgcccaggcaaagtgtgtcacctgatgaatcctgacattaaccaggaaatctacggcatgccggaatatctcggcgcattactctcggccagcctgtctcattcggcggacatgttcagaaaactgtattacgacaacggatcccacgccgggtgcatcatctacatcggtgccgcgcaggtaaaccgcgaaagcatggactccctgaaagaaacgctacagggtgcgcgtggtggtggtgcgtttaaaaacgtgctcattcatgcgcccaacgggggcaaagagggggtgcaaattttgccgttccagcagatcaccgcaaaggatgagttcatgaatgttaaggcggcatcccgtgatgatgtgctggctgcgcaccgcgttccgccgcaactgatgggggcgatgccgggtgaaaaaagtgcgtttggtgatgtggagaaggccgcgcgggtttacgcaattaacgagctgatgcccgtcatggaggccatgaagcacatcaatgactggcttggcgaagaggtgatccgctttaacccttacgcactgttagacatccagcccacatcctga

SEQ ID NO: 462208 - DNA, 183 bp, Shigella boydii
atgaatctggtgatgtcagatattacccgcaacaagctgggttgctatatggcgcagcaggtgtcgcttaataatatcccggtatctgcactggtgtcgcgatttaccgtggaacccgcggtgcagcagcgttttgaaaacgcctcaaaggaaagtaccgaatttacgaaaaaaataacgtga

SEQ ID NO: 462209 - DNA, 873 bp, Shigella boydii
gtgatcggcgtgaccgaccagaaaggcgaaaaaatcctcctggataccacaggaccgattgcgcgcacgaataccagttatgacggcacaaaacgccgtaacccgaataacgtggttgatctgaaaaaccgcaaatatcagtgtgaacaggtgaactacgacacgtttatttcgtatccgcagcttgatgcctggtcggcacaccctgattttcagtcccgcatcagcgcacagattgcccgacaggtggcgcttgaccgcatcatgatcggtttcaacggcacgtctcacgcggatgagtccaacttcagcaccaacaagctgcttcaggacgttaacgtgggctggctggagcacatcagaaccgacgccagcgaacgcgttatgaatgacgtgacgctgacctcccgcaacatggacaacaccgtggcgcacgcgggtaagtatgcgaacgctgatgcactggtacaggacgcgcgttcatccctgctagatgaatggcacaaggaagctgacgacctcgtggtgattatggggcgcaacctgtttaactcgctgcgtctgcccgtgctgaacagcatcagcggccagaatcccaatgcggaattactcgccgggcagctcatcctgtcatcgcgcaccattggcgggctgggcgtgttccttgcgccgttcttcccggatgcaacgatgctgatcacctcgttcaacaacctgtcgatttactggcagaaaggttcaatgcgtcgcctgatgaaagacgagccggaatacaaccgcatcgccacctaccagtccatcaatgacgcttatgtcgttgaagactatggcaagtgcgcgatggttactggcctgaagttcgccgacagctaa

SEQ ID NO: 462210 - DNA, 747 bp, Shigella boydii
atgattactcctgcacaacaacactggcagaacgtgatggcacagcgcgcaggccgggcgaatgaaggcgtggaccacgccgcgcgtaccgcgcatgaagaggtgctgtatcgtctgcgtctggcacaggcccggcttaagggcgtacaggccagaagcgcgaaagccgccatcaaaaaagagttgttgccggatttttccggctggattgagggaacgctggaggctgacggcgggcagcaggatgaagtgattgccacgctgatggtgtgggcgattgactgtggcgatcttccgcttgcgctgcgtatcggcgcgtatgtagtccgtcacaacctcatcatgccggataactttggccgtactgctgccacggtactgaccgaagaaatctgtaatccggtactgacgcaggccgggacggatgccgacgcggatttgtccgcctttatcgaaccactggacaccctccgggagattgtcaccgaccaggacatgccggacgaagtgcgcgccaaattatgcaaagcgtgcgcctttgcccgccgtggcctgagtgatgcggacagcatggccctgtcactgaagctgctgcgcgaagcaatgcacctgaacccgaacgcaggtgtgaaacgcgagattgcaaccctttcccgcgccctgaaaaaagccgattccgcagccgaaccagaagacgccagcgcacagcaggcgcaggacgaaagcagcaaaaagcagcaaaagtaa

SEQ ID NO: 462211 - DNA, 495 bp, Shigella boydii
atgactatagttgccagaactgaacccggacccgcagaggacgacatcaccgataccgatgatggcgatacccgcatttcagcgggtgcattctggccggatattgtgctgcgcgagctgcgtctggcggtacgactgccggggcgcgtgaccacctcccgcctgctgcatactgccaccggggctgtggcacacgttacccgcgagctggaagcatggcagcaggaacagcaggcagctggccatcagacgctggccgatgttccggcacccgtaattaacggagaaagcgtcaatctctggcactggcgcaatgctgtttataccgccacgcgcgccctgattctggagcgttatcgtgatgcagacactacggacaagggcgaccgccgggcagacgctctggatatacagacatcggatttgtggcgtgatgtgagctgggccatctctgacattctgtgccgcccgcgaatctttgcggagttgtgctga

SEQ ID NO: 462212 - DNA, 201 bp, Shigella boydii; identical to SEQ ID NO: 35696

SEQ ID NO: 462213 - DNA, 324 bp, Shigella boydii
gtgagcaccattcaaacagggatcacagagcaggttattgcgtggctctttgaccacctgccaacggtgtatgcagtaggcgcggcggtcagcatttccgcgctgatgagcctttatgacggacgaacactggttcagaccgtaacgggatcgctggcgtgcggcgttcttgccatggccgtggccgggtcgttgcgcttcttcgggtttcctgaagatgccgtgacgtttatcggcgcatcaatcggttttatgggtgcagagaaagcacgcgacaaggttattgcggcctttaatcgcagggtgaaggagaaggacgaatga

SEQ ID NO: 462214 - DNA, 393 bp, Shigella boydii
atgagcaacacatttaaattcagcagccggagcgaaaagaatttgcagggtgtaaatcctgatctggtgaaagtgacccgacgggcactggaaatctcggaagtggattttggtatcaccgaagggttgcgcagccgttaccgccagaagcaactggtggccacgggtaagagccagaccatgaacagccgccaccttacggggcatgccgtggatgttgtggcttatatcggcagccagatgtcatgggaatggccgctgtacgaaaaaatcgcagcagcattcagacaggccagccgggaactgaatattccggtggaatggggcggcgactggaagaccctgaaagacggaccgcattttcagttaccacacggagcctatccggcatga

SEQ ID NO: 462215 - DNA, 2808 bp, Shigella boydii
atgaagactcttgatatccgggtcgctttcagcgccgttgacaggctgacccggcctgccgaaaacgcccgccgcctgatggggcagtttggtgactccatccagcgaacgcagggggcgatcaaaaatctcgagcgtcaggcgcgatcatttgagcgcgcccgtgacgctgtcagtaaagcggatgctggcatcgtgaaagcacgacgccagcttaacgcccttaatcagttacaacgcacgggtacagtgctcagcgaaaaacaacaaaagctgatgcagcagttaagcacccggcttgaacgcctgaatgaatcgcgcacacgggaaattcagaaaatgcgggagcttggcggagagctgaaacgccacggcatttccctgacaggcagcgataacaccatccagcaggccatcagacgcaccgaacagtacaacaaccagcttgaacgcgaacggcaggcgcttgcgcgtgtaacacgggcgcgtgagcggtattcgcgcgcgcaggaaacagcgggaaaactgaaaacaggtggtgcgctggcaattggtgcggcagcggcgggcggctatgctgccgggcgttttttgcagcctgcgatcgggttcggcaaagagatgtcccgcgttcaggcactgacgcgaatcgaccagaacagcccgcagtttaaggcgctgcgtgagcaggcgttaaaacttggctctgaaacgcagttcaccgcaggcgatgccgccagtggacaggcatttcttgcaatggctggctttacaccacaggccattcaggctgcgctccctggcgtactgagcatggcaacggctggcggtatggacctcggtgagacggcggatattggctcaaatattctgacgcagttcggtctttctgctgaccagatggaccgggtcggcgacacactcaccgcagcgtttacccgtaccaacactgaccttcgcgcactgggtgaaaccatgaaatatgcaggtccggtggcgggtaagctgggaatatctctggagcaggccgcagcgatggcgggcgtgctggcgaatatgggtatcagggggagtgatgctggtacggcaatgcgtgccagcctggctcgtctggcatcaccgccaaaggcggcagcagaggcgctgaaagagcttggcgtgtctgtctcggatgccgggggcaaaatgcgcccgatggaggatgtgctggctgacctttataaagctacccgcaaatacggggaagttgaccgggtatcgttctttaaggacattgccggagaagaggctttcacatcatttatggccctcgttgatgcggcaggtgacggctccttacccaaactgagaaaagaacttgaaggcgcgcgcggtgaggctgaacgcacggcaaaggttatggccaacaaccttgacggcgatctgaaatcactcagcagtgcatgggaagggttgcgcatccgcattgcagatctgattgacggtccgctgcgttctgtcacgcagtggctcacgcgtgtggtatcaaaggtgacggcgctggcgcaggcccatcccgcactgacgcgccagctactgattgcaggcggtgcattgctggcaatgactgcaacggttggctcgttgtcgctggctattggtgtgcttgctggcccgctggcaaaactgcgtcttggtttttccctcctgaccggatcaatgaatgctgtcagggttctgccagcactatggggaatggtgacgggttccgtttctttactgggaggcgctatcggggcgttgttcagtccggttggtcttatcgtggctgcgcttgccggagctgccgttcttatctggaaatactgggatcccatcagggcattttttgccggggtgttcagcgggattatggaaaggctgaccccgttgcgcgaaacctttgaacggtttggtcctgtttttgacgcaatcgggagtgggatcagccaggtgtttaactggtttaaatcgctgctgtcaccgatggagtccagcaaggaaactctggataaatgtaccagtgctggcgagatattcggtaacgttcttggcggtgcgttacaacttgttctgacacctgcaaaaatgttgctggatacgctggcgtggatacttgaaaagcttggtgtgcttccggatgaagcggaaagggcgcgcaagaaaatcgaagacgcacagcgtgcggccattcttcaggacaaggttgccttgcttcagggggatctggcgaaaatcaatccgccgaagcctgtggaaaatggcaatggcaccggaggtgataaccccaaagacaataaaccgctcacagacagcaataccggtacgctgcgcagactcagcaaaattgctgataacacaggtaagctggttgaggagacgaaaaaacgcattggccccggcgatattgtctttaaaaacctgccccgagcacttgctgttcgtggggagtggcaggagcggaagattgcgcaggtcagtaagcctgcccccgcaattaatatcacacccgtggttccggctccgctgcctccggcgctggtccctgttgttgcggccagctcccgcccggtggcggaggctatacgatctccagtggcatcagttcctgtaacttcccgtaaccgggagcctgttgccttcggatttggtggtgaaattcatgttcatctgcataacgttgttacgcagaatccccgcgaactggcgaaactggtcggtgaaatggtcagggcagaaatggaacggcgcgcccgtgccgggcgtggctgtttttacgataaagattga

SEQ ID NO: 462216 - DNA, 513 bp, Shigella boydii
atggcaaatcatcatgggataatttttgatgagcagcgaaaacgttacattataggatcgataacagtctctattgatgaaatgaccaatgctctcgatccggtcgaattagcggaaattattaataaaaagcaccatgctgtaattaatggcaaaaagtttaaaaatagccgggctatctcttgtcgatcctttaatcgttatttttctgtttcgacagattacagacctaaacttgaagcactattagcatgctcacaaatgttaggtataaatcaagttgttgcacataacggtaatggtggaagagaatgtataggtgaaacggggacagttttaggtcttaacgcccgtgacagtaaacatgctggaagaatgttcagcatgcataattgccaaattaaccctggtgcagggcctgagataaccactccctggaagtcttaccagcatgaaaaaaacagaaatggacttatgcctttgattagaaggcgcacaatgttacagctctga

SEQ ID NO: 462217 - DNA, 276 bp, Shigella boydii
atgagaaccaaggtacaggctttacggaagaaacaaaaaaatacattggatcaaatatttaaaactcctgttcctcaagggatcaagtggtctgatatagagtcactggttaaagcattaggcggagaaattaaggaaggaagaggttcgcgttgtaagttcatactaaatatgagcgttgcgtgtttccatcggcctcatccgtcgccagataccgataaaggcgctgtagaaagcgtgcgtgactggttactaagtataggggtaaaaccatga

SEQ ID NO: 462218 - DNA, 360 bp, Shigella boydii
atgatcaaactgaagacgccaaactctatggagattgccgggcaaccagctgttattacctacgtgccagaactgaatgcatttcgtggcaaattcctgggcttgtcaggttattgtgattttgtctctgacagcattcaggggctgcaaaaagaaggggaactttccctgctagagtatcttgaggattgtaaagctgcgggtattgagccgtatgcgcgtacagaaaagattaagacctttacgttacgctatccagaatcgctgagtgaacgccttaataatgcggctgcgcagcaacaagtctctgttaatacctatattattgaaacactgaatgagcgtttgaatcatttataa

SEQ ID NO: 462219 - DNA, 276 bp, Shigella boydii
atgaaaataataacctgctttaagctggtgcctgaagaacaggacattgttgtcactccagaatacaccctgaatttcgacaatgccgacgccaaaatcagccagttcgatctcaatgccattgaagctgcaagccagctcgcaacagatgacgatgagatagccgcgctgaccgttggcggctcattgttgcagaactcgaaagtgcgcagtgcgcaaagatgtgctatcccgcgggccgcacagcctgtatttggtgcaggatgcgcaacttga

SEQ ID NO: 462220 - DNA, 228 bp, Shigella boydii
atggatgttaccgcaaaatacgaattgattgggctgatggcctatcctatccgccacagtttatcgcctgaaatgcagaataaagccttagaaaaagcgggattgccatttacctatatggcctttgaagtggataacgatagttttcccggagcaattgaaggattaaaagctctaaaaatgcgcggaactggtgtatcaatgccgaacaaacaactggcttgttaa

SEQ ID NO: 462221 - DNA, 783 bp, Shigella boydii
atgatcagttcattatggatcgccaaaacgggccttgacgcccagcaaaccaatatggacgtcattgccaacaacctggcaaacgtcagtactaacggttttaagcgtcagcgcgcggtgtttgaagatctgctttatcaaaccattcgccagccgggggcacagtcttccgaacaaaccaccttaccctccggattacaaatcggcacgggggtacgcccggtcgccactgaacgcttacacagccagggaaatctgtcgcagaccaacaacagcaaagatgtcgcgattaaagggcagggctttttccaggtgatgttgccagatggttcatcagcctatacccgtgacggctctttccaggtggatcagaacgggcagctggtgacggctggtggttttcaggtgcagccagcgatcaccattccggcgaatgcgttaagtatcaccatcggtcgtgatggcgtggtcagcgtaacccaacaaggccaggcagctccggttcaggttgggcagctcaatctcaccacctttatgaatgacaccgggctggagagcattggcgaaaacctctacaccgaaacgcaatcctctggtgcaccgaacgaaagcacgccgggcctgaacggcgcgggattgctgtatcaagggtatgttgaaacgtctaacgtcaacgtggcggaagaactggtcaatatgattcaggtgcaacgcgcttacgaaatcaacagtaaagcggtgtccaccaccgatcagatgcagcaaaaactgacgcaactctaa

SEQ ID NO: 462222 - DNA, 330 bp, Shigella boydii
atgctcgataagctcgacgccgccttacgttttcaacaagaggcgctcaatctgcgcgcccagcgtcaggaagtgctggcagcaaacatcgccaatgccgatacccttggttatcaggcgcgcgatatcgattttgccagtgaacttaaaaaagtcatgcaacgtggacgggatgcaaccagtgtggttgctctgacgatgacctcaacgcaacacattccggcgcaggcgctgacgcctcctaccgcagaactgcaataccagatgagccttagtgcgttgagcgggcaaatcaaaggcatgatgaacgttttacagagcggaaattaa

SEQ ID NO: 462223 - DNA, 537 bp, Shigella boydii
atgacgaccgaccaacaccaggaaatcctccgcaccgaaggattaagtaaatttttccccggcgtcaaagcgttagacaacgttgatttcagcctgcgccgtggcgaaatcatggcgctgctcggtgaaaacggggcgggaaaatcaacgctaatcaaagcattaactggtgtataccacgccgatcgcggcaccatctggctggaaggccaggttatctcaccgaaaaataccgcccacgcgcaacaactcggcattggcaccgtctatcaggaagtcaacctgctacccaatatgtcggtcgctgataatctatttataggccgcgaacccaaacgcttcggccttctacgccgcaaagagatggaaaagcgcgccaccgaactgatggcatcttacggtttctccctcgacgtgcgcgaaccgctcaaccgcttttcagtcgcgatgcagcaaatcgtcgccatttgccgggctatcgatctctccgccaaagtgctgatcctcgatgaacccaccgccagcctcgacacctag

SEQ ID NO: 462224 - DNA, 408 bp, Shigella boydii
atgactgctgtaagccaaaccgaaacacgatcttctgccaatttttcgctcttccgcatcgcttttgcggtttttctcacctacatgaccgtagggctgccgttgccggttatcccgctgtttgttcatcatgatctgggctatggcaataccatggtcgggattgccgtcgggattcagtttctggctacggtgctgacgcgtggctatgccgggcgactggccgatcaatatggtgcaaaacgttcggcgcttcaggggatgttagcttgtggtctggctggcggcgcgttgctgctggcggcgattttgcctgtctccgcaccgttgaaatttgccctgttggtcgtcgggcgtttgattcttggctttggtgaaagccagttactgacaggcgctctgacctag

SEQ ID NO: 462225 - DNA, 762 bp, Shigella boydii
atgtcagtacctctcattctgaccatactggcgggggcagccacgtttattggcgcgtttctcggcgttctcggacaaaaaccctcgaaccgcttactggcgttttcgctaggttttgcggcggggatcatgttgctcatctcattaatggaaatgcttcctgccgcactagcagctgaaggaatatcgcctgtgttgggttatggaatgtttatcttcggtctgcttggctactttggcctggaccgcatgttgccgcatgcgcatccgcaggatttaatgcaaaaatcggtgcagccgttgccaaaatcgatcaagcgcacagccattctgctcactctcggcatcagtctgcataacttcccggaagggattgccacctttgtcacggcgagcagcaacctggagctgggatttggcatcgcactggccgtcgcgttgcacaatatccctgaaggtctggcagtggcaggcccggtttatgcggcaacggggtctaaacgcaccgcgattctgtgggcggggatttctggactagcagaaattcttggtggtgtgctggcgtggttaatcctcggtagcatgatttccccggtggtcatggcggcggttgcaggaattatggtggcgctctcggttgatgaattaatgccgctcgccaaagagattgaccctaataataaccccagctatggcgtactatgtggaatgtcagtgatgggattcagtttagtgctgctacaaacggcgggaattggttaa

SEQ ID NO: 462226 - DNA, 948 bp, Shigella boydii
atgagacaaactctttgcgacggatatctggtcatttttgcgttagcacaggccgtgattctgctgctgctaaccccgctttttacgggtatttcccggcagatacgcgcgcgtatgcactcccgccgcgggccggggatctggcaggattatcgcgagatccacaaactgtttaaacgccaggaagttgcgcctatatcttcaggtctgatgttccgcctgatgccgtgggtattaatcagcagcatgctggtgctggcgatggccctaccactttttattaccgtttccccttttgcgggcggcggcgatctgatcacccttatctatcttcttgccctgtttcgttttttctttgctctttccggactggataccggaagcccgtttgcgggagtcggtgccagtcgcgagttgacgctcggcattctggtcgaacccatgctcattctctcactgctggtattggcgctgatagcaggttccacgcatatcgagatgatcagcaatgcgctggcaacgggctggaactcgccactaaccaccgtactggcgttactggcctgtggttttgcctgcttcattgagatgggaaaaattccctttgatgttgctgaagcagaacaggaattacaggaaggcccgctgaccgaatattccggtgccgggctggcgctagcgaaatgggggctggggctgaaacaggtcgtgatggcagcactgtttgtggccctgtttctgccctttgggcgcgcgcaagaactttctctcgcctgcctgctgacttcacttgtcgttacgctgctcaaggttttgctgatttttgtactggcctcaatcgcagaaaacacgctggcacgcgggcgttttttactcattcaccatgtgacctggcttggcttcagccttgctgcgcttgcatgggtcttctggttaaccggtctgtaa

SEQ ID NO: 462227 - DNA, 672 bp, Shigella boydii
atggatgccctgcaattattaacctggtcgctgatcctctttctgtttgccagtctggcttcgctgtttttactcggtctggacagactggctattaagctttccggcatcacatcgctggtgggcggcgtgattggcatcatcagcggaattacgcaattacatgctggtgtaactttagtcgcccgttttgccaccccttttgactttgccgatttaaccctgcgaatggatagcctctcggtatttatggtgctggttatctccttgctggtggtggtttgttcgctctattcattgacttatatgcgcgaatacgagggcaaaggcgcggcggcgatgggcttctttatgaatcttttcatcgcatcgatggttgccctgctggtgatggacaacgctttttggttcatcgtgctgtttgaaatgatgtcgctgtcttcctggtttctggtcattgccaggcaggataaaacgtcgatcaacgctggcatgctctacttttttatcgcccacgccggatcggtgctgattatgatcgccttcttgctgatggggcgcgaaagcggcagcctcgattttgccagtttcgcacgctttcactttctccggggctggcgtcggcgatgtttctgctggcctttttcggttttggcgcgaaagccgggatga

SEQ ID NO: 462228 - DNA, 225 bp, Shigella boydii
atgtcgcgtaaaggtcactgttacgacaacgctccgatggaaagcttctggggaacgctgaaaaatgagagcctgagccactatcgttttaataaccgggatgaagccatctcagtaatacgggaatacattgagattttctacaatcgtcagcgtcgtcactctcgtctggggaatatctccccggcagccttcagggaaaaatatcatcagatggctgcttaa

SEQ ID NO: 462229 - DNA, 378 bp, Shigella boydii
atgcaacgaatcattttaatcatcattggctggctggcggtagtgctgggtacgctgggcgtggtattaccggtattaccgacgacgccgtttatcctgctggcggcctggtgctttgcccgttcttccccgcgctttcacgcctggttgctgtaccgctcatggtttggcagctatctacgtttctggcagaaacatcatgcgatgccgcgcggcgtcaaaccgcgggcgattttgcttattttgctcacgtttgccatttctctgtggttcgtccagatgccatgggtgcgcatcatgttgctggtaattctcgcctgtttgcttttctatatgtggcgaattccggtgattgatgaaaagcaagaaaagcactga

SEQ ID NO: 462230 - DNA, 795 bp, Shigella boydii
atgtcacgcggcaagcaagaacaggcggaaagtatcctgcgcaaaattatgggcaacacgcttgcaactcaggcagtacaggaaattaaacactccctggatcatggccgcaaaaccggtggtcgtctgctgatgtttggcgtgggcgtgattgtcatcggcgttatgctctccatcttccagcaatttgtcggcatcaatgtggtgctgtactacgcgccggaagtgttcaaaacgctgggggccagcacggatatcgcgctgttgcagaccattattgtcggagttatcaacctcaccttcaccgttctggcaattatgacggtggataaatttggtcgtaagccactgcaaattatcggcgcactcggaatggcaatcggtatgtttagcctcggtaccgcgttttacactcaggcaccgggtattgtggcgctactgtcgatgctgttctatgttgctgcctttgccatgtcctggggtccggtatgctgggtactgctgtcggaaatcttcccgaatgctattcgtggtaaggcgctggcaatcgcggtggcggcccagtggctggcgaactacttcgtctcctggaccttcccgatgatggacaaaaactcctggctggtggcccatttccacaacggtttctcctactggatttacgggtgtatgggcgttctggcagcactatttatgtggaaatttgccccggaaaccaaaggtaaaacccttgaggagctggaagccctctgggaaccggaaacgaagaaaacacaacaaactgctacgctgtaa

SEQ ID NO: 462231 - DNA, 2097 bp, Shigella boydii
atgaaaaaaagacatctgcttagcttactggcgctgggcattagcatggcttgctacggcgaaacatatcctgcgcccattggcccgtcgcagtcggatttcggtggcgtaggattattacaaacgcccaccgcacgcatggcgcgggaaggggagttgagcctgaactatcgcgataacgatcagtaccgttattactcagcttcagtgcaactcttcccgtggctggaaacaacgctgcgctacaccgacgtgcgcacccggcagtacagcagcgtcgaagcgttctctggcgatcaaacgtataaagataaagccttcgatctcaaactgcgtttgtgggaagagagttactggctgccgcaagtggcggttggtgcgagggatatcggcggtacggggctgtttgatgcggaatatcttgttgccagcaaagcctgggggccgttcgattttacgctcggcctgggctggggttatctgggcaccagcggtaatgtgaaaaatccgctctgttcagccagtgataaatattgctatcgcgataacagctacaaacaggcgggatctatcggcggtagccagatgttccacggtcctgcctcactgtttggcggcgtggaataccagacgccctggcaaccgctgcgcctgaaactggagtatgaaggcaataattatcagcaggattttgccgggaagctggagcaaaaaagtaagtttaacgtcggtgcgatttatcgcgttaccgattgggccgacgttaaccttagctatgaacgtggcaacacctttatgtttggcgtcacgctgcgcaccaactttaacgatctgcgcccgtcttacaacgataacgcccgcccgcaatatcaaccgcagccgcaggatgccattttgcagcattcggtggtggcgaatcagttaacgctgttgaaatacaatgtcggacttgccgatccgcagatccaggcgaaaggcgatacgctgtatgtcaccggcgagcaggtgaaatatcgtgattcgcgcgaagggatcatccgtgctaatcggatcgtgatgaacgatctgccggatgggatcaaaacgatccgcattacggaaaatcgtcttaacatgccgcaggtgacgacggaaaccgatgtcgccagcctgaaaaatcatctcgccggagagccgttgggccacgaaacgaagctggcgcaaaaacgcgtcgagccagtggttccgcagtccaccgagcagggctggtatatcgacaaatcacgctttgatttccatatcgatccggtgctgaaccagtcggtcggtggcccggaaaacttttacatgtatcagctgggcgtgatgggaatggcagatttgtggctgacggaccatctgctgaccaccggcagcctgtttgcaaatcttgccaacaactacgacaagtttaactacaccaatccgccgcaggactcgcacttaccgcgcgttcgtacccatgtgcgcgagtatgtgcagaacgatgtctatgtgaataacctgcaagccaactacttccagcatctgggcaacggcttctacggtcaggtctatggaggttatctcgaaaccatgtttggcggtgcgggggccgaagtgttgtatcgtccgctggacagtaactgggcgtttggtctggatgccaactacgttaaacagcgcgactggcgtagtgcaaaagatatgatgaaattcaccgactacagcgtgaaaaccggacatctgaccgcctactggacgccatctttcgcccaggacgtgttggtgaaagccagcgtcgggcagtatctggcaggggataaaggcggcacgctggagatcgccaaacgctttgacagcggcgtggtggtgggtggctatgccacgatcaccaacgttttgaaagaggagtacggcgaaggggacttcaccaaaggcgtgtatgtctcggtaccgttggatctcttctcgtctggcccgacacgcagccgtgcggcgattggctggacgccgctgacgcgtgacggtggtcagcaacttgggcgtaagttccagttgtatgacatgaccagcgaccgtagcgtcaatttccgctaa

SEQ ID NO: 462232 - DNA, 147 bp, Shigella boydii
atgattaaacaaacttttgtcgcgttgcttttgagtgtgggagcgtcatcggtcttcgcggcaggaaccgtcaaggtgttcagcaatggcagcagtgaggccaaaacactaacaggcgcagagcatttaatcgatctggtaggctaa

SEQ ID NO: 462233 - DNA, 1230 bp, Shigella boydii
atgaaaacaacagctctgcgtctttatggtaaacgtgatttacgcctggaaacctttgaccttcctgaaatgcaggaggatgaaatcctcgcgacggtggtcactgacagcctgtgcctctcttcctggaaagaggccaatctgggtgaaaaccataaaaaagtacccgacgatgtggcgaccaaccccatcatcatcggccacgagttttgcggcgatattctggccgtgggtaaaaagtggcagcacaaattccagccgggtcagcgttatgtgattcaggccaacctgcaactccccgaccgcccggactgccccggctactccttcccgtgggtgggcggcgaagccacgcatgtggttattcccaacgaggtcatggaacaagattgcctgctggcatacgacggcgaaacctattttgaaggctcactggttgaaccgctttcctgcgtgattggcgcgttcaacgccaactatcatcttcaggaaggtagttataaccacacgatggggattcgcccgcaagggcgcatgctgatcctcggcggcaccggaccaatgggactgttggcgattgattatgcgctacatggacccgttaacccgtcgcagctcgtcattaccgataccgacaacgataaattgagttatgcgcgcaagcactatccatcagaaccgcaaacactgattcattatctcaatgccgccgatgcagcatttgatacgctaatggcgctgagtggcggtcacggcttcgatgatattttcgtctttgtgcctaatgaaggactggtgactctcgcctcttccttgctggcgacagatggttgcctgaatttcttcgccggaccgcaggataaacatttcagcgcgccaattaatttctacgatgtgcattatgcatttacccactacgtgggcacgtcaggcggcaataccgacgacatgcgcgcggcggtcaaactgattgaagagaaaaaagtgcaggccgcaaaagtggtaacacatattcttgggctgaatgccgcgggcgaaaccacgcttgaattgcctgccgtcggcggcggcaaaaagctggtgtataccgggaaatacctgccgctgacgtcactcacgcagattcaggatcaagcactggcggcgattctggcgcgtcatcaggggatctggtccggtgaggcggagcaatatctgctcactcatgcagaggcaatttcccatgattaa

SEQ ID NO: 462234 - DNA, 3039 bp, Shigella boydii
gtgagcagcaaagtggaacaactgcgtgcgcagttaaatgaacgtattctggtgctggacggcggtatgggcaccatgatccagagttatcgactgaacgaagccgattttcgtggtgaacgctttgccgactggccatgcgatctcaaaggcaacaacgacctgctggtgctcagcaaaccggaagtgatcgccgctatccacaacgcctactttgaagcgggcgcggatatcatcgaaaccaacaccttcaactccacgaccattgcgatggcggattaccagatggaatccctgtcggcggaaatcaactttgcggcggcgaaactggcgcgcgcctgtgctgacgagtggaccgcgcgcacgccggagaaaccgcgctacgttgccggtgttctcggcccaaccaaccgcacggcgtctatttctccggacgtcaacgatccggcattccgcaacatcacttttgaccagctggtggcggcctatcgcgaatccaccaaagcgctggtggaaggtggtgcggatctgatcctgattgaaaccgttttcgacacccttaacgccaaagcggcggtttttgcggtgaaaacggagtttgaagcgctgggcgttgagctgccgattatgatctccggcaccatcaccgacgcctccgggcgcacgctctccgggcagaccaccgaagcattttacaactcattgcgccacgccgaagcgctaacctttggcctgaactgtgcgctggggcccgatgaactgcgccagtacgtgcaggaactatcacggattgcggaatgctacgtcaccgcccacccgaacgccgggctgcctaacgcctttggtgaatacgatctcgacgccgacacgatggcaaaacagatacgtgaatgggcgcaagcgggctttctcaatatcgtcggtggttgctgcgggaccacgccgcaacatattgcagcgatgagtcgtgcagtagaaggattagcgccgcgcaaactgccggaaattcccgtagcctgccgtttgtctggcctggagccgctgaacattggcgacgatagcctgtttgtgaacgtgggtgaacgcaccaacgtcaccggctctgctaagttcaagcgcctgatcaaagaagagaaatacagcgaggcgcaggatgtggcgcgtcagcaggtggaaaacggcgcgcagattatcgatatcaacatggatgaagggatgctcgatgccgaagcggcgatggtgcgttttctcaatctgattgccggtgaaccggatatcgctcgcgtgccgattatgatcgactcctcaaaatgggacgttatcgaaaaagggctgaagtgtattcagggcaaaggcattgttaactcaatctcgatgaaagagggcgtcgacgcctttatccatcacgcgaaattgttgcgtcgctacggtgcggcagtggtggtgatggcctttgatgaacagggacaggccgatactcgcgcacggaaaatcgagatttgccgtcgggcgtacaaaatcctcaccgaagaggttggcttcccgccagaagatatcatcttcgacccgaacatcttcgcggtcgccaccggtattgaagagcacaacaactacgcgcaggactttatcggcgcgtgtgaagacatcaaacgcgaactgccgcacgcgctgatttccggcggcgtatctaacgtttctttctcattccgtggcaacgatccggtgcgcgaagccattcacgcagtgttcctctactacgctattcgcaatggcatggatatggggatcgtcaacgcggggcaactggcgatttacgacgacctacccgctgaactgcgcgacgcggtggaagatgtgattcttaatcgtcgtgacgatggcactgagcgtttactggagcttgccgagaaatatcgcggcagcaaaaccgacgacaccgataacgcccagcaggcggagtggcgctcgtgggaagtgaataaacgtctggaatactcgctggtcaaaggcattaccgagtttatcgagcaggataccgaagaagcccgccagcaggctacgcgcccgattgaagtgattgaaggcccgttgatggacggcatgaacgtggtcggcgatctgtttggcgaaggcaaaatgttcctgccacaggtggtcaaatcggcgcgcgtcatgaaacaggcggtggcgtatctcgaaccgtttattgaagccagcaaagagcagggcaaaaccaacggcaagatggtgatcgccaccgtgaagggcgacgtccacgatatcggtaaaaatatcgttggcgtggtgctgcaatgtaacaactacgaaattgtcgatctcggcgtgatggtgcctgcggaaaaaattctccgtactgctaaagaagtgaatgctgatttgattggcctttcggggcttatcacgccgtcgctggacgagatggttaacgtggcgaaagagatggagcgtcagggcttcaccattccgttactgatcggtggcgcgaccacctcaaaagcgcacacggcggtgaaaattgagcagaactacagcggcccgacggtgtatgtgcagaatgcctcgcgcaccgttggtgtggtggcggcgctgctttccgatactcagcgcgatgattttgtcgctcgtacccgcaaggagtacgaaaccgtacgtattcagcacgggcgcaagaaaccgcgcacaccaccggtcacgctggaagcggcgcgcgataacgacttcgcttttgactggcaggcttacacgccgccggtggcgcaccgtctcggcgtgcaggaagttgaagccagcatcgaaactctgcgtaattgcatcgactggacaccgttctttatgacctggtcgctggccgggaagtatccgcgcattctggaagatgaagtggtgggcgttgaggcgcagcggctgtttaaagacgccaacgacatgctggataaattaagcgccgagaaaacgctgaatccgcgtggcgtggcgtggcgtggtgggcctgttcccggcaaaccgtgtgggcgatga

SEQ ID NO: 462235 - DNA, 825 bp, Shigella boydii
atggtcgcacccattcccgcgaaacgcggcagaaaacccgccgttgccaccgcaccagcgactggacaggttcagtctttaacgcgtggcctgaaattactggagtggattgccgaatccaatggcagtgtggcactcacggaactggcgcaacaagccgggttacccaattccacgacccaccgcctgctaaccacaatgcaacagcagggtttcgtgcgtcaggttggcgaactgggacactgggcaatcggcgcacatgcctttatggtcggcagcagctttctccagagtcgtaatttgttagcaattgttcaccctatcctgcgcaatctaatggaagagtctggcgaaacggtcaatatggcggtgcttgatcaaagcgatcacgaagcgattattatcgaccaggtacagtgtacgcatctgatgcgaatgtccgcgcctatcggcggtaaattgccgatgcacgcttccggtgcaggtaaagcctttttagcccaactaagcgaagaacaggtgacgaagctgctgcaccgcaaagggttacatgcctatacccacgcaacgctggtgtctcctgtgcatttaaaagaagatctcgcccaaacgcgcaaacggggttattcatttgacgatgaggaacatgcgctggggctacgttgccttgcagcgtgtattttcgatgagcaccgtgaaccgtttgccgcaatttctatttccggaccgatttcacgtattaccgatgaccgcgtgaccgagtttggcgcaatggtgattaaagcggcgaaggaagtgacactggcgtacggtggaatgcgctga

SEQ ID NO: 462236 - DNA, 1599 bp, Shigella boydii
atgcgtaaaacagtagcttttggctttgtcggaacggtgctggattatgccgggcgcggcagtcagcgctggtcaaaatggcatccgacactctgtttatgccagcaagaatcgttggtcatcgatcgactggaattattgcatgacgcccgctcgtgctcgctatttgaaacgcttaaacgcgatatcgccagcgtttcgccagaaacagaagtggtgagcattgagattgaactgcataacccgtgggatttcgaagaggtttacgcctgcctgcatgatttcgcccgtggttacaagtttcagccagaaaaagaagactatttaattcacatcaccaccggcacccacgtcgcgcagatttgctggtttctgctggcggaagcgcgttatctacccgcccggttgatacaaacttcaccaccgcgcaaaaaagaacaaccgcgcggtgccggtgaagtgacgattatcgatctcgatctaagccgttataacgccatcgccagccgctttgccgaggaacgccagcaaacgcttgattttcttaagtccggcattgccacgcgtaacccccacttcaaccgcatgattgagcagattgaaaaagtggcgattaaatcccgcgcaccgatcctgcttaacggcccaaccggtgcgggaaagtcatttctggcgcgacgtatatttgaattaaaacaggcgcggcatcagtttagcggcgcgtttgtggaagtgaactgcgccaccctgcgcggcgataccgccatgtcgacgctgtttggtcatgtgaaaggcgcgtttaccggggcgcgggaatctcgtgaaggtttattacgcagcgccaacggcggaatgttgttttttgatgagattggcgaactgggcgcagacgaacaggcaatgctgctaaaagccattgaagagaaaaccttttacccgtttggcagcgatcgccaggtgagcagtgattttcagcttatcgccggaacggtgcgcgatttgcgccagctggttgccgaaggcaaatttcgcgaagatctgtacgcgcggatcaatctctggaccttcaccctgccgggtctacgccagcgccaggaagatattgaaccgaaccttgattatgaagtggagcgccacgccacactcactggcgacagcgtgcgttttaacaccgaagcgcggcgcgcctggttggcttttgcgacctctccccaggcaacatggcgcggtaactttcgcgaactttctgccagcgtcacgcggatggccacctttgccactagcggacgcatcactctggacgtggttgaagatgagataaaccgtctgcgctataactggcaggagagccgcccctccgcgcttacggcgttgctgggcgcagaggcagaaaacatcgatctcttcgaccgtatgcaactggaacacgttatcgctatctgccgccaggcaaagtcgctttctgcagccggacgacagctttttgatgtttcgcgccagggaaaagccagcgtcaatgacgcggatcggctacgcaaatacctggcgcgttttggtctgacgtgggaagccgtgcaggatcagcacagctccagttga

SEQ ID NO: 462237 - DNA, 1017 bp, Shigella boydii
atgaaaaggatgattgcgctggatggcgcacagggcgaaggtggcgggcagattctgcgctcggcgctgagcctgtcgatgataaccggccagccatttaccatcaccagcattcgtgccgggcgggcgaaaccggggctgttgcgccagcatctgaccgcggtaaaagcggctgcggaaatttgtagggcaacggtggaaggcgcggagctggggtcgcagcgtctggtcttccggcctggcgccgtgcgcggcggcgagtaccgctttgctatcggtagtgccggaagctgtacgctggtgctgcaaacggtgctgcccgcgctgtggtttgccgatggaccttcgcgtgttgaagtgagcggaggcaccgataacccgtcggcgccgcctgcggattttatccgccgggtgctggagccgctgctggcgaaaataggaattcatcagcaaaccacgctgttacgtcacggtttttatcctgccggaggcggcgtggtggcaacggaagtctcgcccgtggcatcgtttaacaccttgcaacttggcgagcgcgggaacattgtgcagatgcgtggagaagttctattagctggtgtgccgcgccatgttgctgagcgtgaaatcgctacactggcggggagtttttccctgcatgaacagaatattcataacctgccgcgcgatcaggggccgggtaataccgtctcgctggaagtcgaaagtgaaaatatcactgaacgctttttcgtcgtcggtgaaaagcgcgtcagtgccgaggtggtagccgcgcagttagtgaaagaggtgaaacgctacctggcaagcccggcggcagtgggggaatatctcgccgaccagctggtgctaccgatggcgctggcgggcgcgggagaatttacggtcgcccatccttcatgccatctgctgaccaatatcgccgtggtggagcgtttcttgccggtgcggtttggtttgatagaaacagatggcgtaacgcgggtgagtattgaatga

SEQ ID NO: 462238 - DNA, 645 bp, Shigella boydii
gtggatgccattattatctctccggtcgattcgaaaggcgtccaggcggcgataattaaagccgataaggccggtattcccgttatcaccgtcgacgtcgctgcggaaggcgttccggtcgtatcgcatgttgcgaccgataactatgcgggaggcgttgaagcaggcaagttaatgggcaaacttttgaatggtaaaggtactgtagccattatttcttatccggcactacaatcggtggttgcgcgcgttgatggttttaagaaagggttaagcgatacaccggatattaaaattgttgctgaacagcctagtattacgcgggctgaagcgttaacgactgcgcaaaacattatgcaggcaaatgccaacctgaatggtctgtttggctttggtgatgatgcggcgctggcagcggttatcgcagcaaaatctgcgcataacgacaacatcaaaatcattggttttgatggcatgaaagaagcgcgtgatgccgttgacagtgaaaaaacgtttgcggccgtgattcggcaatatcccgatcaaatgggtgctaaagccattgatgccgctgttgatcacctcaatggtaaaccggtagaaaaaatgatcccggtacaacccggcgtttatacaggtaaatag

SEQ ID NO: 462239 - DNA, 180 bp, Shigella boydii
atgaagctaaccgatgcggaaaatgccgccgatggcatttttttccccgcccttgaacaaaatatgatgggcgcggtgttaattaacgaaaatgatgaagtgatgtttttcaaccccgccgcaggaagctctgggggtacaaacgtgaagaagtcattggcaataacattgatatgctga

SEQ ID NO: 462240 - DNA, 1023 bp, Shigella boydii
gtgaccttctggagtattttacgccaacgctgctgggggctggtgctcgtgatggcgggcgtctgcgtgattacgtttattatctcgcatctgatccctggcgatccggcgcggttactggcgggtgaccgcgccagcgatgctatcgtggaaaatattcgccagcaactgggactggaccagccactgtatgtacagttttaccgctacgtcagcgacctgtttcatggtgacctgggaacatccattcgtaccgggcgtccggtgttggaagagttgcgtatatttttcccggcgacgctggaactggctttttgtgccctgctgctggcactcctgattggcatcccgctgggcatactctctgcagtctggcgaaatcgctggctggatcatctggtgcgaataatggccattaccggaatctccacacctgcgttttggcttggactgggcgtcattgtgctgttttatggtcatctgcaaattcttcccggcggcggaaggcttgatgactggctggatccaccaacgcacgttaccggcttttatctgctcgatgcgctgcttgaaggcaacggtgaagtcttcttcaatgcgttgcaacatctcatcttaccggcattaacgctggcgttcgttcacctgggaattgtcgctcgccagatccgctcagcgatgctggaacaattgagtgaagactacattcgtaccgcccgggccagcggcttgcccggctggtatatcgttttatgttatgcgctacccaatgcgttgatcccatcgattaccgtattgggtctggcgctgggcgatttgttgtatggcgcagtgctcaccgaaaccgtttttgcctggcccggaatgggtgcatgggtagtaacatcaatacaggcgctcgacttcccggcagtgatgggctttgccgtcgtggtttcatttgcttatgtgctggtcaacctggtggtggatttgctctatttgtggattgatccgcgtatcggacgtggaggtggtgaatga

SEQ ID NO: 462241 - DNA, 156 bp, Shigella boydii
atgaaattaaaaatagttgcggtggttgtaactggtttgttagctgcgaacgtagcacacgctgccgaagtctataacaaggatggtaataaactcgacctttatggcaaggttaccgctctacgttattttactaatgataagcgtgacgggtaa

SEQ ID NO: 462242 - DNA, 213 bp, Shigella boydii
gtgtatgatggtgattttaaggtgcttgcgtggcttccatttccatcagatgtccttcctgctccgctactgaaggcgtggtgcgtaacggcaaaagcactgccggacatcagcgctatctctgctctcattgccgtaaaacatggcaactacagttcacttacaccgcctctcagcccggtacgcaccagaaaatcattgatatggccatga

SEQ ID NO: 462243 - DNA, 372 bp, Shigella boydii
atgtccggcagtgcttttgccgttacgcaccacgccttcagtagcggagcaggaaggacatctgatggaaatggaagccacgcaagcaccttaaaatcaccatcatacactaaatcagtaagttggcagcattacccgctcgacgagtggaaaccaaaacggttcagtctcactaccctggtgaaatacggaaaactaggatacatcgttccaagaccacaaaaaattcgtgggcgttggctgatagatcgccgagcagtatttgttgggccaggtgaaacgggaattgcgccggaaattcatactggcgatgatgatgcactgaaggagattttaactcatgtcaccgaggccacgaaaaaacagcactga

SEQ ID NO: 462244 - DNA, 837 bp, Shigella boydii
gtggacgtaagacagagcatccacagtgcgcacgcaaaaacgctggatacccaagggctgcacaatgaatttttggttgaaaaggtatttgtcgccgatgagtacaccatggtttacagccacattgaccgaattattgttggcggcattatgccgataactaaaacggtttccgttggcggggaagttggtaaacaactcggcgtaagctatttccttgaacgtcgcgagttaggtgttatcaatattggcggtgccggtacgattactgtcgatggccaatgctatgaaatcggtcaccgcgacgccctgtatgttggtaaaggtgcaaaagaagttgtctttgccagtattgataccgccactccggcaaagttttattacaattgcgcacccgcgcatacgacgtatcccaccaaaaaagtcaccccggacgaagtatctccagtcacgttaggcgataacctcaccagtaaccgtcgcactattaacaaatattttgtcccggatgtgctggaaacctgccaattgagtatggggctgacggagctggctccaggtaacttgtggaacaccatgccgtgtcacacccacgagcgccggatggaagtttatttctatttcaatatggatgatgacgcctgcgttttccacatgatggggcaaccgcaagaaacgcgtcacattgtgatgcataacgagcaggcggtgatctccccgagctggtcgatccattccggcgtcggaaccaaagcttatacctttatctggggcatggttggtgaaaaccaggtctttgatgatatggaccatgtggccgttaaagatttgcgctag

SEQ ID NO: 462245 - DNA, 303 bp, Shigella boydii
atgcctgtaaaagagcaaggtttttctctgctggaagtgttgattgctatggcgatcagtagcgtattgttgctgggggctgcacgctttctgcctgcgttacagcgtgaaagtttaacgagcacccgtaagctggcgctggaagatgaaatctggctgcgggtatttaccgtcgcgaagcatctccagagggcgggttattgtcatggcatctgtaccggcgaagggctggaaattgtcggacagggtgactgtatcagtaagcgtcaacggagcaccgtattgacgcttatttattggtga

SEQ ID NO: 462246 - DNA, 1389 bp, Shigella boydii
atggaaaacaagtctgctcgtgcaaaggtccaggcttttgggggctttttgactgcaatggtcatccccaatattggtgcttttattgcctggggttttattactgcgttatttattcccaccggttggctgcctaacgaacatttcgccaaaattgtcggcccgatgattacctatttattgcccgtgatgattggttctacaggtggtcatctggtcggcggtaaacgcggggcggtcatgggcggaataggtactattggtgtgatcgttggcgcagagatcccgatgttccttggctcaatgatcatggggccgctcggtgggttggtcataaaatatgtcgataaggcactggaaaaacgcatacctgccggttttgagatggttatcaataacttctcattaggtatcgcggggatgctcctttgtctgctgggttttgaagtgatcggcccggcggtgttaattgccaatactttcgtcaaagagtgtatcgaggcgctggtacatgcgggttatctgcctctgctgtcagtcatcaatgaaccggcgaaagtgcttttccttaataatgcgatcgatcagggcgtctattatccgctgggaatgcaacaggcttcggttaacggtaaatccatcttctttatggtggcctctaacccaggtccgggcctggggctgctgctggcgtttaccttgtttggtaaagggatgagtaaacgttctgcgcccggggcgatgattattcacttcctcggtgggatccacgaactgtatttcccatatgtgctgatgaagccgctgactattattgccatgattgcgggcggtatgtctggtacctggatgtttaacttactggacggtggtctggtggctggcccaagtctggggtctatctttgcttacctggcactgacgccgaaaggctcgttcctggcgacaattgccggtgttacggtaggtaccctggtgtcctttgctattacttcgctgatactgaagatggaaaaaacggtggaaacggagagcgaagatgagtttgctcagtcagccaatgcggttaaggcgatgaaacaagagggtgcattctcgttaagcagggttaagcgtatcgcctttgtttgcgatacggggatgggctccagtgcgatgggcgcgaccaccttccgtaaacgcctggaaaaagcggggctggcaatagaagtaaaacattacgcgatagaaaacgtgcctgcggatgccgatatcgtcgtcactcacgccagtctggaagggcgcgtgaaacgtgtgacggataaaccgctgatattgattaataactatattggcgatccaaaactcgacactttatttaatcaattaaccgccgaacataaacactga

SEQ ID NO: 462247 - DNA, 567 bp, Shigella boydii
atggctgcgctgaaggtacagaacttaagcggcaactttcgttatagcgtcaccgcgactcctgccggacatcatgatgaaagcaaagcctggctacattttggcaaatacgatcgctatgacgacaaatacacctatccggcaatgatgaacggttacatccagtatgaccttgccgaaggcatcacctggatgaacggtctggaaatcaccgacggcacaggacagctctatctcacgggcctgctaactcctaactttgccgctcgcgcctggcaccataccggacgcgccgacgggctggacgtaccgggaagtgaaagtgggatgatggtgagcgccatgtatgaagcgttaaagggcgtttatctctccaccgcttacacctacgccaaacatcgccctgaccacgctgacgatgaaaccacctctttcatgcagtttggtatctggtacgaatacggcggcggacgtttcgccacggcttttgatagccgcttctacatgaaaaatgcctctcacgatcccagcgaccaaatcttcctgatgcaatatttctactggtaa

SEQ ID NO: 462248 - DNA, 609 bp, Shigella boydii
atgcaatacatcaagatccatgcgctggataacgtcgcggtcgctttagcggatttggctgaaggcacagaagtcagtgtcgataaccagactgttacgctgcgccaggatgttgctcgtggacataaatttgcgttaacggatatcgcaaaaggggccaatgtcatcaaatatggcctgccgattggttatgcattggcggatattgcggcgggggaacacgtccacgcccacaatacgcgcacgaatctgagcgatctggatcagtatcgctatcaacctgattttcaggatctgcctgcgcaagcggcagatcgtgaagtgcagatctatcgtcgcgctaacggcgatgtcggggtgcgtaacgagctgtggatcctgccaaccgtgggctgtgtcaacggcatcgcgcggcagatccagaaccgttttctgaaagagaccaacaacgctgaaggtaccgacggcgtgttcctcttcagccacacctacggctgctcacagctgggcgacgatcacattaatacccgcaccatgctgcaaaacatggtgcgccacccgaacgcaggcgcagtgctggtgattggtctgggctgtgaaaacaactag

SEQ ID NO: 462249 - DNA, 918 bp, Shigella boydii
gtgataacagatgtctggaaatataggggcaaatccaatggcgatcaaacgtcatggcagttatcgcataccttttataatgattcattcagccataaagaacttggcgtaaccgtcggaggcctgaacaccgataccataaacagcgcggttaacgggcgttgggatgggcaatacggaaatgtctacgctaccgtatctgatagttatgaccgtaagaatcatgatcatctttcggcctttacgggcacttatagctctacgctggctgtcagtcgctatggcgttaatttgggagccagtggtacagacgatttgctgggtgcggtattggtggatgtgaaaggcttctctgaacaggatgaagagagtcaggatctgcaactcgaagcgcgggtggcaggcagccgaactttgcagcttggtcaaagcgacagtgtgttgttcccttatcctggatttcagtctggttttgttgaggttaacgacagtagccagggcaatcagcaggggacaacaaacatcattaacggtgcagggaatcgtgaattaatgttgttgcctggcaagctgcgctatcgcgaagtgtctgccagctttaactacaactatatcggtcgtttattactgccggcagcggtgaaaaaattcccgattgtggggctgaacagcgccatgttactggtagctgaagatggcggatttacacttgaaattaacggcagcgaaaaagagctctatctgctttccgggcagcaattccttaagtgtccactgagtgttgaaaagaaacgcgccagcattcgttacagcggagatgttacttgtagtgtggtgacttattcacaattaccggagttgaaacagcctaaattacgtggaaacgttcagacggcgcaaagggaggttgcaccatga

SEQ ID NO: 462250 - DNA, 273 bp, Shigella boydii
atgaaccgctttgtggtggccgaaccactgtggtgtacaggatgtaatacctgtctcgctgcctgttcggacgtgcataaaacgcaaggtttacagcaacacccgcgcctggccctggcgaagacgtcaacaatcactgcccctgtcgtgtgtcatcactgtgaggaagccccttgcctgcaggtctgcccggtcaatgccatctcccagagggatgatgcgatcctgaggtgtactggcaatagcggacactaccatttgttctttttttga

SEQ ID NO: 462251 - DNA, 2142 bp, Shigella boydii
gtggcgtatgaaacaacctcgtttgttaaagcctccattgaagacgtggtgaaaacgctgctggaagctatcgccctggttttcctcgttatgtatctgttcctgcaaaacttccgcgccacgctgatacccactatcgccgtgccggtggtgttgatgggaaccttctccgtactttacgccttcggttacagcgtcaacaccttaaccatgttcgcgatggtactggcgatcggtctgctggtggatgacgcaatcgtggtggtggaaaacgtcgaacgtattatgagtgaggaaggactcgctcctcgcgaagccacacgtaaatcgatggggcagatccagggggcactggtcgggattgcgatggtgctttcggcggtatttgtaccaatggccttcttcggcggcaccaccggtgccatctatcgccagttctctattaccattgttgcggcgatggtgctgtcagtactggtagcgatgatcctcactccggctctgtgtgccacactacttaagccactgaaaaaaggtgagcatcacgggcaaaaaggcttttttgcctggtttaaccagatgtttaaccgcaacgccgaacgctacgaaaaaggggtggcgaaaattctccaccgcagcctgcgctggattgtgatttatgtcctgctgcttggcggcatggtgttcctgttcctgcgtttgccgacgtcgttcttaccgctggaagaccgtggcatgtttactacctcggtacaattgcccagcggttcaacccaacaacagaccctgaaagtcgttgagcaaatcgagaaatattacttcacccatgaaaaagacaacatcatgtcggtgtttgccaccgttggttctggccctgggggtaacgggcaaaacgtggcgcgaatgtttatccgcctgaaagactggagcgaacgcgacagtaagaccggcacctcgtttgccattatcgagcgtgcaacaaaggcgtttaacaagattaaagaagctcgcgttatcgccagcagcccgccagcaattagcggtcttggtagttctgcgggttttgatatggagttgcaggaccacgctggagcaggtcacgatgcgctgatggcagcacgtaaccagttgctggcgctggcggcggaaaacccggagctaacccgtgtgcgccataacggcctcgatgacagtccgcagttgcagattgatatcgaccagcgtaaagctcaggcgctgggcgttgctatcgacgatattaacgacacactgcaaaccgcctggggttcgagctatgtgaatgactttatggatcgcggtcgtgtgaagaaagtctatgtgcaggcagctgcgccgtatcgcatgctgccagatgacattaatctctggtatgtccgaaataaagatggcggcatggtgcccttctctgctttcgcgacctcacgctgggagactggctcgccgcgtctggaacgctataacggttattctgcggttgagattgttggggaagccgcaccgggggtcagtaccggtacggcgatggatataatggaatcgttagtgaagcagttgccaaacggctttggtctggagtggacggcgatgtcgtatcaggagcggctttccggcgcgcaggctccggcgctgtacgccatttccttgctggtggtattcctgtgtctggcggcgttgtatgaaagctggtcggtgccgttctcggtaatgctggtcgtgccgctgggggttatcggcgcgctgctggcaacctggatgcgcgggctggaaaacgacgtttacttccaggtgggcctgttaacggtcattggtttatcggcgaaaaacgccatcctgatcgtcgagtttgctaacgagatgaaccaaaaaggccacgacctgtttgaagcgacgctccacgcctgccgtcagcgtttacgcccgattctgatgacctcgctggcatttatcttcggcgtattgccaatggcaaccagcacgggtgccggttccggtggtcagcatgcggtgggtactggcgtaatgggcgggatgatttcggccactattctggctatttacttcgtgccgctgttctttgtactggtgcgccgccgcttcccgctgaagccgcgcccggaataa

SEQ ID NO: 462252 - DNA, 270 bp, Shigella boydii
atgccagccgacgcggtgattatggcgtttggcttcaatccgcacgggatgccgtggctggagtcgcacggtgtaacggtagacaaatggggccgcatcatcgcggatgtggaaagccagtaccgttaccagaccaccaatccgaaaatcttcgccggtggcgacgccgtgcgtggtgcggatctggtggttaccgcaatggcagaaggacgtcatgcggcacaggggattattgactggctgggggtaaaatcagtcaaatctcactga

SEQ ID NO: 462253 - DNA, 1290 bp, Shigella boydii
atgagcaccgctttgcttgacgccgtggtgaagaaaaaccgtgtgcgtttaattccgtttatgttggcgctgtatgtgctggcgtttctcgaccgttcgaatatcggttttgccaaacagacctaccagattgataccgggttgagtaatgaagcttatgcgctgggagcaggcattttctttgtggtatatgcgtttctgggtgttccggcgaatcttttgatgcgcaaactgggggccagaacctggattggtacgacaacactgctgtggggatttctttcggcagccatggcatgggccgatactgaagcgaaatttctgatagttcgcactctgcttggtgctgcggaggccggatttttccctggtatgatttatctcacctcgcaatggtttccgcagcgtaatcgcgccagcattatggggctgttctatatgggcgcaccgctggcgttaacactgggatcaccgctttccggcgcgctgttggagatgcatggatttatggggcatcccggctggttctggatgtttgtgattgaaggattgttggcagtcggtgctggggtattcacattcttttggcttgatgacacaccggagcaggcacgttttctgagtaaacaagaaaaaacgttgcttatcaatcaactggcaagtgaagaacaacagaaagtgacttctcggctgagcgatgcgctgcgtaatggccgagtctggcaactagcgattatctacctgaccattcaggtggcggtttacggattaattttcttcctgccgacccaggttgcggcattgctgggaacaaaagtgggctttacagcgtcggtggtcaccgccattccgtgggttgcggccttgtttgggacctggcttattccgcgctattccgataaaaccggcgaacggcgtaatgtcgcagcgctgacattactggcggcgggcattggtattggtctgtccgggctgctttctccagtaatggcgatcgtagcgctgtgtgttgcagctatcgggtttattgccgtgcagccggtgttctggacgatgccgacacaactgctttccggtacggcgctggctgcggggattggttttgtaaacctgtttggtgcagtgggcgggtttattgccccgatcctgcgcgtgaaagcagaaacgttatttgccagcgatgcggcaggattactgacactggcagcggtggcggtcatcggttcgctgattattttcactctgcgtgtaaatcgtactgttgcgcagaccgacgtggcacatcattaa

SEQ ID NO: 462254 - DNA, 1206 bp, Shigella boydii
atgaccctaccaaaaattaaacaggttcgcgcctggtttactggcggtgcgacagcagaaaaaggcgctggcggcggtgattatcacgaccagggggcgaatcactggatagacgatcatattgccaccccgatgagtaaataccgcgattacgagcagtcacgccagtcatttggcattaacgttcttggcacgttggttgttgaagtcgaagcagaaaacggccagaccggattcgctgtttcgacagccggtgaaatgggctgttttatcgtcgaaaaacaccttaaccgtttcattgagggtaaatgtgtcagtgatatcaaactgatccacgatcaaatgctcaatgccaccctgtattactccggctctggtggcttggtgatgaatacgatttcctgtgtcgatctggctctgtgggatctgttcggcaaagtggtcgggcttccggtttataaacttttaggcggcgctgttcgtgatgagattcagttctacgccacaggtgcgcgtccggatctggcaaaagagatgggctttatcggtggcaaaatgccgacgcactgggggccacatgatggcgatgcggggatccgcaaagatgccgctatggtcgcggatatgcgtgaaaaatgcggtgaagatttctggttaatgctcgactgctggatgagtcaggacgtgaactatgcgaccaaactagcccacgcttgcgcgccctataacctgaaatggatcgaagagtgcctgccgccacagcagtatgaaggttatcgcgaactgaaacgcaacgcgccagtcggaatgatggtcaccagcggtgagcaccacggcacactgcaatcttttcgtacgctttcagaaaccggtatcgacattatgcagccggatgttggctggtgcggtggtttaaccacgctggtggaaattgccgcaatcgccaaatccagggggcaactggtggtgccgcacggttcgtctgtttactctcaccatgcggtgatcaccttcaccaatacgccattcagcgaattcctgatgaccagcccggattgttcaacgatgcgtccgcagtttgacccgattctgctcaatgagccggttccggtgaatggtcgtattcataaatcagtgcttgataaacccggttttggcgtcgaactcaatcgtgactgcaatttgaaacgcccctacagccactaa

SEQ ID NO: 462255 - DNA, 783 bp, Shigella boydii
atgttggaatcaagcaaagttcccgccctgacacgggctattgatattctcaatttgattgcccgcattggcccctgtagtgctgcgacgatcattgacacattgggaatccctaaaagcacggcctatttgctgcttaatgaactcaggcgtcagcgttttcttagccttgatcaccaggaaaatttttgtttgtggaccaggctggtggagctttctggtcatgcgttaagcaagatggatctccgggaactggctcgaccgcgtttgacgcaactgatggataccaccgggctgttatgtcatctggggattattgataacggcagcgcttattacattttaaaagtggagtcatcagccactatcagcgtgcgttcccatgaaggaaaaagcctttcgctttatcgctccggaataggtaaatgcctgctttcctggcaacctgcagcggtacagcaaagtattatcgaagggctggtctgggagcaggcgacacccacaacgattactcatccacagcaacttcacgaagaactggcgcgtattcgccgtcagggctggagctatgacaacggcgaagattaccccgatgtccgttgtgtcgctgcgccggtgtttaacgccaataacgagcttaccgctgcgatctcggtggtcggtacccgcttacaaatcaatgaagaataccgtgattatctggcgggcaagtccattgcctgcgccagggatatttcacgtctgttgggatggaaaagtccctttgacttacaagcctcataa

SEQ ID NO: 462256 - DNA, 330 bp, Shigella boydii
ttgctggcgtgtgaagtggttccttcacaggaagaaaacctggcgcaaactgcgcactggattacagaacggcgggccaaccattttgccgggctggcactggctgtttcgggtttcgagaacgaacatctcaactttgcgctagccacaccagacggcactttcgctctgcgtgtgcgtttcagcactacgcgctacagcctggctatccgtcaggaagtgtgcgcaatgatggcactgaatatgctgcgccgttggttaaacggccaggatatcgccagtgagcatggctggattgaggttattgagtccatgaccttatctgtctga

SEQ ID NO: 462257 - DNA, 543 bp, Shigella boydii
atgaaaaaaattgcgctagcaggtctggccggaatgctgttggtttctgcatcggtcaatgcaatgagcatcagcggtcaggcgggtaaagaatacaccaatattggtgtcggttttgggactgaatcgacgggcctggcgttaagcggtaactggacacataacgacgacgacggtgacgtcgctggcgtggggctggggttgaatctgcctctagggccgttaatggcgaccgttggcggaaaaggcgtttacaccaacccgaattacggcgatgaaggttatgccgcagcggtaggaggtggtttgcagtggaaaattggcaacagcttccgtttgtttggcgagtattactactctccggattcactctccagcggtattcaaagttatgaggaagcgaatgctggcgcgcgttacaccattatgcgtccagtcagtattgaggcgggttatcgctacctgaatttgtcgggtaaagatggtaaccgcgacaacgccgtggctgacggcccgtatgttggggttaacgccagtttctga

SEQ ID NO: 462258 - DNA, 426 bp, Shigella boydii
gtgcgacaacggactattgtatgccctttaattcaaaatgatggtgcttatctgctgtgcaaaatggccgacgatcgcggcgttttccccggtcaatgggcgctttcgggtggcggcgtggagtatggcgaacgaattgaagaggcactacgccgcgaaattcgcgaagaactgggagaacagctgcttttgacagaaatcacgccgtggaccttcagcgatgatattcgcaccaagacgtatgcagatggtcgcaaggaagagatttatatgatttacctgatttttgactgcgtttctgccaaccgagaagtgaaaataaacgaagagtttcaggactacacgtgggtaaaacctgaagatctggtgcattatgatttgaatgttgccacccgaaaaacgttacgtttgaaaggtcttctttaa

SEQ ID NO: 462259 - DNA, 429 bp, Shigella boydii
atggcgtttgacttctatcggatcaatagatttggtcgatgggagaaatattacaacattcaactccgcggcgcgctcttatcagcaatcaatcacctgtttactgagaacaatctggatacagaagccatcactgtcagttatgaatatatactctccaggcatctgattgctaatactgaatttagttatttggcatttcccgataactacaaccgtctgtttataccacggccaaaaactaaagctggtaatggttcaaaacacttaatagtaaagcggttggcagactgcttgctgctggcggcatatacaatgggaatatcgaaggattcagggaaacagcagacaagttggggggagatgcacctgctggttacgatcaatttatggataacaaagggttactcatcgctggtgcttcaatag

SEQ ID NO: 462260 - DNA, 1209 bp, Shigella boydii
atggatatttttaatacctcaatttctcgtaaaggaacatattgcacacaatgggacttttgtgaagacagatttggtgtaaaagatgtattaccattctctatttcagatatggatcttccgatacaggaagctatcatcagaacattaaaaaaacgtctggaacacccgattttagggtacagtcgttggcagcatgatgactatctgaattcgatagtcaattggtatcatcaacaatataaaacagagattcaaccagaatggatcacctatagcccaagcgtgatgtattcaatatctaaggcaatagaaatattgacattgaatggagataatattctcattttcacgcctgtttataacgcattttttgatgtgattaagcataatggtcgaaacatgctaacaacctctttgatgaaagaaaatgggagaggctacgttatcaactggcaagactttgagcttaaaattaaaagcgcgaagatggtgttattatgtaatcctcataacccgacaggaacggtctggtcggaagacgatcttcacagaatcgcagcatgctgtgcaaggcataatatttggttatgttcagatgaaatacatagtgattttgtttttaatcatagtttcacgtcagcgctaacaataaaagatgacaaagtggtggtgtttaattcgatttcgaaaacatttaatgttcctgcgctaaccggatcatatatgatttcaactgacgataattttaatcataagttcagaacgatatcgaggtatcgcgatttcgtaaactccccatcagtactgaatgtaattgcgaccattgttgcctataatgaatgtgaagaatggttaaagtcattaaaggtacatattgcctctaacattcaatttaccttgcagtatttaaatgaaaatattccggaattgatcgtatggccagctgagggctgctatttttcgtgggttgattgctcggcccttggttatccctttgataaattttaccgtcgattaattaacgaagggagagtaggtattatggcggggcatgtttatggtactgaaggagagggctatctgcgtcttaatctggcctgcagtcgagaaaaattatatatggggcttgcgcgccttgcgagtgtaattaaaaatattaatcaggaaaaagaaaatgaacaatacggatcttatccatcttattaa

SEQ ID NO: 462261 - DNA, 477 bp, Shigella boydii
atgaacaatacggatcttatccatcttattaaacgttttatgcgtaacgaacataaagcagtagaagaggttattgattcccccctttcggaagtcgcgaatttaattaaaatattacaatcttgccagggaaaagttgtttttattggtgttgggaaatctggcattattgccagaaaacttgctgcaacatttgccagcaccggaactccctcgttttttgttcacggtacggaagcggtacacggcgaccttgggatggtggcgaaagacgatgttgttattcttatttcaaacagtggtgagacggcggaaatcctggcgacactgcctagtttgaaaaaaatgggtaattatttgatctcttttatccgcagtcatcactcatcgcttgcgataagttgtgatttatctgttgaaatccccgtcaaaagtgaggcggataatttaggtttggtaatgctgccaacttactga

SEQ ID NO: 462262 - DNA, 504 bp, Shigella boydii
gtgacagtgattgaactggcggcaaccgtcatgggccgtaatgcaccaccgcccgtgcaacgctatcttttacagcgccaccagcaggctggtgtgcgcattctgctcaataatgccattgaacatgtggtcgatggtgaaaaagtagaactgacgctgcaaagtggggaaacgcttcaggctgatgtggtgatttacggtattggtatcagcgccaacgagcaactggctcgcgaggccaaccttgatactgccaatggcattgtcattgatgaggcttgccgcacctgcgatcccgcgatctttgccggtggcgatgtggcaatcactcgtcttgataatggtgcactacaccgctgtgaaagctgggaaaacgccaataaccaggcgcaaattgccgctgccgcaatgttagggctaccgctaccgctactgccgtggttctggagcgatcagtacagtgataacttacagtttattggcgatatgcgtggcgatgactga

SEQ ID NO: 462263 - DNA, 531 bp, Shigella boydii
atgaaagaaaaaacgatcattattgtcggtggcgtgcaagcggcggcaatggctgcggcctcgctacgccagcaagggttcaccggtgagctgcatctgttttccgatgagcgacatcttccttatgaacgacctccactctcgaaatccatgttgctggaagattccccgcagttacagcaggtgttacccgctaactggtggcaggaaaacaatgttcatctgcattccggtgtaaccatcaaaacgctgggtcgcgacacacgagagttagtgttaaccaacggcgaaagctggcactgggatcagctttttatagcaaccggcgcggcagctcgaccgctgccgttgcttgatgcactgggagaacgctgctttaccctacgccatgccggtgatgccgccagactgcgagaagttctgcagcccgaacggtcagtcgtgattgtcggtgccggaactattggtctggaactggctgccagcgccacgcagcgcagcgcagcgcagcgcagcgcagatgtaaggtga

SEQ ID NO: 462264 - DNA, 813 bp, Shigella boydii
atgagcgatctgcataacgagtccatttttattaccggcggcggatcgggattagggctggcgctggtcgagcgatttatcgaagaaggcgcgcaggttgccacgctggaactgtcggcggcaaaagtcgccagtctgcgtcagcgatttggcgaacatattctggcggtggaaggtaacgtgacctgttatgccgattatcaacgcgcggtcgatcagatcctgactcgttccggcaagctggattgttttatcggcaatgcaggcatctgggatcacaatgcctcactggttaatactcccgcagagacgctcgaaaccggcttccacgagctgtttaacgtcaacgtactcggttacctgctgggcgcaaaagcctgcgctccggcgttaatcgccagtgaaggcagcatgattttcacactgtcaaatgccgcctggtatcctggcggcggtggcccgctgtacaccgccagtaaacatgccgcaaccggacttattcgccaactggcttatgaactggcaccgaaagtgcgggtgaatggcgtcggcccgtgtggtatggccagcgacctgcgcggcccacaggcgctcgggcaaagtgaaacctcgataatgcagtctctgacgccggagaaaattgccgccattttaccgctgcaatttttcccgcaaccggcggattttacggggccgtatgtgatgttggcatcgcggcgcaataatcgcgcattaagcggtgtgatgatcaacgctgatgcgggtttagcgattcgcggcattcgccacgtagcggctgggctggatctttaa

SEQ ID NO: 462265 - DNA, 321 bp, Shigella boydii
atgaatcgaatttatgcgtgtcccgttgcggatgtgccggagggtgaggctctccggatcgatacctcgcccgtcatcgccctgttcaacgttggcggcgagttttatgccattaacgatcgttgcagccatggtaatgcgtcgatgtcagaagggtatctggaagatgacgccacggtggagtgcccgctacacgccgccagtttttgcctgaaaacggggaaagcgttatgcctgcccgccaccgatccgctcaccacttatccagtacacgttgaaggtagtgacattttcatcgacttaccggaggcgcagccatga

SEQ ID NO: 462266 - DNA, 519 bp, Shigella boydii
atgagtgcgcaagtttcactagagttacatctccgcattagccagtttctctttcacgaagccagcttactggacgactggaaatttcgtgactggctggcgcagctcgacgaagagattcgttacaccatgcgcaccacagttaacgcgcaaacacgcgaccgccgcaaaggcgtccagccaccgacaacctggatttttaatgacaccaaagaccagctggagcggcgaatcgcccgtctggaaacgggcatggcctgggcagaagagccgccgtcacgcccccgtcacttaatcagcaactgccagataagcgaaaccgacatcccaaacgtatttgctgtgcgggtaaattatctgctttatcaggcacaaaaagagcgcgatgaaacattctatgttggaacgcgtttcgacaaagttcgccgtctggaagatgacaactggcgcttgctggaacgggatatcgtcctggatcaagcggtaatcacttcccataacctgagtgtactgttctga

SEQ ID NO: 462267 - DNA, 1362 bp, Shigella boydii
atgaccacaccctcagatttgaacatttaccaactgattgacacccaaaatggtcgggtcactccgcgtatttataccgacccggatatttaccaactggagcttgagcgtattttcggtcgttgctggctatttctcgcccacgaaagccagatcccaaaacccggtgatttctttaacacctacatgggagaaaatgcggttgtcgtagtgcgtcagaaagacggcagcatcaaggcgtttctcaaccaatgccgccaccgggccatgcgtgtgagttatgcagattgcggcaacactcgcgcctttacctgcccgtatcacggctggtcttatggcattaacggcgagttgatcgatgtaccgctggaacctcgcgcctacccacaagggttgtgtaaatcccactgggggctaaacgaagttccttgtgtggagagttataaagggctgatttttggcaactgggataccagcgcaccgggcctgcgtgattaccttggtgacattgcctggtatctggatggcatgctggatcgtcgcgaaggcggcaccgaaattgtcggcggcgtacaaaagtgggtgatcaactgtaactggaaatccccggcagagcagttcgccagtgaccaatatcatgctctgttcagccatgcttctgccgttcaggtattaggggcgaaagatgatggcagcgataagcgtctcggtgatggacaaaccgcccgcccggtgtgggaaaccgccaaagatgcgctgcaatttggtcaggacggtcacggtagcggtttcttctttactgaaaaaccggatgctaatgtctgggtcgatggcgcggtttccagctattaccgcgaaacctatgccgaagcagaacaacgtttaggtgaagttcgcgccctgcgcctggcgggtcataacaatatattccccacgctttcatggctaaacggcactgccacactccgcgtctggcatccgcgcggccctgatcaagttgaagtgtgggcgttctgtattactgacaaagccgcctccgatgaagttaaagccgcttttgaaaacagcgccactcgtgcttttggtcctgctggttttctcgagcaggatgactcggagaactggtgtgaaatccagaaattgcttaaaggccaccgcgcccgcaacagcaaactgtgtctggaaatggggcttggtcaggaaaagcgccgcgacgacggcattcctggcattactaactatatcttttcagaaactgccgctcgtggaatgtaccaacgctgggccgatcttctgagtagcgaaagctggcaggaagtgctcgataaaaccgccgcttaccagcaggaggtgatgaaatga

SEQ ID NO: 462268 - DNA, 327 bp, Shigella boydii
atgactaaaaatactcgtttttcccccgaagtccgtcagagggcgattcgtatggttctggaaagtcagggcgaatatgactcacaatgggcgacaatttgttccattgctccaaagattggctgtacgccggagactctgcgtgtctgggttcgccagcatgagcgggataccgggggcggtgatgaagggctcaccaccgttgaacgtcagcgtctgaaagagctggaacgtgaaaatcgtgaactgcgccgcagtaacgatatccttcgccaggcttccgcttattttgcgaaggcggagttcgaccgcctctggaaaaagtga

SEQ ID NO: 462269 - DNA, 1461 bp, Shigella boydii
atgactactattgttgacagcaatctgccggttgcccgtccgtcatgggatcattctcgtctggaatcacgcattgtgcatctcggttgcggggcgtttcaccgcgcacatcaggcgctgtatacccatcatctgctggaaagcaccgacagcgactggggcatctgcgaagttaacctgatgccaggcaacgaccgcgtgctgatcgaaaacctgaaaaaacagcaactgctgtacaccgtagcggaaaaaggcgcagaaagcaccgagctgaaaattatcggttcgatgaaagaagcgctgcatccggaaatcgacggctgcgaaggtattctcaacgcgatggcgcgtccgcaaacggcgattgtctctctaacggtcacggaaaaaggctactgcgctgatgcggcaagcggtcaactggatctcaataacccgctgatcaagcacgatctagaaaacccgactgcgccgaagtccgcgattggttacatcgtcgaagccttgcgtctgcgtcgtgaaaaagggctgaaagcatttacggtgatgtcctgcgataacgtgcgtgaaaacggtcatgtggcgaaggtcgcggtactggggctggctcaggcacgtgacccgcagctggcggcatggattgaagagaacgtcaccttcccgtgcaccatggttgaccgcatcgttccggcggcgacgccagaaaccttacaggaaattgctgaccagctgggtgtttacgacccgtgcgccattgcctgcgaaccgttccgtcagtgggtgattgaagataacttcgttaatggtcgcccggactgggataaagtgggcgcacagttcgttgcagacgttgtgccgtttgaaatgatgaagctgcgtatgctgaacggcagccactctttcctggcatacctcggttacctcggcggctatgaaactattgccgacaccatgactaacccggattatcgcaaagcggcctttgccctgatgatgcaggaacaagcgccaacgctgtctatgccggagggtacggacctgaaggcctatgcgacgctgctgatcgagcgtttcagcaacccgtctctgcgtcaccgtacctggcagattgcgatggacggcagccagaagttaccgcagcgtctgctggacccggtgcgtctgcacctgcaaaacggcggcagctggcgtcacctggcgctgggcgtggctggctggatgcgttacacccagggcgtggatgagcagggtaatgccattgacgtggtcgacccgatgctggccgagttccagaagattaacgcgcagtatcagggcgcagaccgcgtgaaagcgctgctgggcctgagcggtatttttgccgatgatctgccgcagaatgccgactttgttggcgcggtgacggcggcatatcagcagctgtgcgaacgcggtgcgcgcgagtgtgtggctgcgctgtaa

SEQ ID NO: 462270 - DNA, 831 bp, Shigella boydii
atgtctataccattaagcaatgcccttcagagtcaaattattacagataatcacttccttcatcatccaaaagtcgacaataagttaacacgtgaatatgaatatacacgcatggatacggaaaatatctatcttctgcctcttactcgtggaaataaccataattacgatggaaaaagcgttgtcgaaattagaaaacttaatattggcaaacagtcctggccatttaattatgcgacagatacatgcagagaattcaatggtattacaacaacaggacgtatgctctatcgaaacttgaaaatcacctcagctttagacgaaatatatggtggcatatgtaaaaaggcgcatgctgctacagagttagcagaaggtttacggctaaatttatttatgaagagccctttcgatcctgttgaggactatacagttcatgaaataacattaggccctggttacaatgttcctggttatgccggaaccacgataggatatatttcaacccttccagcttctcaggcaaaaagatggaccaatgagcagccaagaattgatatctatattgatcagataataactgtctcaggggtggcaaattcttccggattcgcccttgccgcattacttaatgctaatattggaatgggaaatgacccaataattggtatagaagcctatcctggtaccgcggagatccatgcaaaaatgggatataacgttatccccggtgatgaagatgcgccactcaaacgcatgactctgcaaccgtcatctcttccagaactgtttgaattaaaaaatggtgaatggaattatattggcaaataa

SEQ ID NO: 462271 - DNA, 684 bp, Shigella boydii; identical to SEQ ID NO: 459943

SEQ ID NO: 462272 - DNA, 324 bp, Shigella boydii
gtgacatattcgattggcattgattctggttctaccgccaccaaagggatcttactggcagacggcgtgattacgcgccgtttcctcgttccaacaccctttcgtccggcaacagcaattactgaagcctgggaaactctgcgcgaagggttagagacaacgccgtttctgacgctcaccggctatggacggcaactggtggattttgccgataaacaagtgacggaaatctcctgtcacgggctgggcgcacggtttcttgcgccagcaacgctgcgcggtaatcgacatcggtggtcaggacagcaaagtgattcagcttga

SEQ ID NO: 462273 - DNA, 888 bp, Shigella boydii
atgtcacttatcaccgatctacccgccattttcgatcagttctctgaagctcgccagaaaggctttctcaccgtcatggatctcaaggagcgcggcattccgctggttggcacttactgcacctttatgccgcaagagatcccgatggcagccggtgcggttgtggtttcgctctgttctacctctgatgaaaccattgaagaagcggagaaagatctgccgcgcaacctctgcccgctgattaaaagcagctacggcttcggcaaaaccgataaatgcccctacttctacttttcggatctggtggtcggtgaaaccacctgcgacggcaaaaagaaaatgtatgaatacatggcggagtttaagcccgttcatgtgatgcagttgccgaacagcgttaaggacgatgcctcgcgtgcgttatggaaagccgagatgctgcgcttgcaaaaaacggtagaagaacgttttgggcacgagattagcgaagatgctctgcgcgatgccattgcgctgaaaaaccgcgaacgtcgcgcactggccaatttttatcatcttgggcagttaaatcctccggcgcttagcggcagcgacattctgaaagtggtctacggcgcaaccttccggttcgataaagaggcgttgatcaatgaactggatgcaatgaccgcccgcgttcgtcagcagtgggaagaaggccagcgactggacccgcgtccacgcattttaatcaccggctgcccgattggcggcgcagcagaaaaagtggtgcgggcgattgaagagaatggcggctgggttgtcggttatgaaaactgcactggggcgaaagcgaccgagctaatgcgtggcggaaacgggcgatgtctacgacgcgctggcggataa

SEQ ID NO: 462274 - DNA, 213 bp, Shigella boydii; identical to SEQ ID NO: 462242

SEQ ID NO: 462275 - DNA, 1179 bp, Shigella boydii
atgtttactaaacgtcaccgcatcacattactgttcaatgccaataaagcctatgaccggcaggtagtagaaggcgtaggggaatatttacaggcgtcacaatcagaatgggatattttcattgaagaagatttccgcgcccgcattgataaaatcaaggactggttaggagatggcgtcattgccgacttcgacgacaaacaaatcgagcaagcgctggctgatgtcgacgtccccattgttggggttggcggctcgtatcaccttgcagaaagttacccacccgttcattacattgccaccgataactatgcgctggttgaaagcgcatttttgcatttaaaagagaaaggcgttaaccgctttgctttttatggtcttccggaatcaagcggcaaacgttgggccactgaacgcgaatatgcatttcgtcagcttgtcgccgaagaaaagtatcgcggagtggtttatcaggggttagaaaccgcgccagagaactggcaacacgcgcaaaatcggctggcagactggctacaaacgctgccaccgcaaaccgggattattgccgttactgacgcccgggcgcggcatattctgcaagtatgtgaacatctacacattcccgtaccggaaaaattatgcgtgattggcatcgacaacgaagaactgacccgctatctgtcgcgtgtcgccctttcttcggtcgctcagggcgcgcggcaaatgggctatcaggcggcaaaactgttgcatcgattattagataaagaagaaatgccgctacagcgaattttggtcccaccagttcgcgtcattgaacggcgctcaacagattatcgctcgctgaccgatcccgccgttattcaggccatgcattacattcgtaatcacgcctgtaaagggattaaagtggatcaggtactggatgcggtcgggatctcgcgctccaatcttgagaagcgttttaaagaagaggtgggtgaaaccatccatgccatgattcatgccgagaagctggagaaagcgcgcagtctgctgatttcaaccaccttgtcgatcaatgagatatcgcaaatgtgcggttatccatcgctgcaatatttctactctgtttttaaaaaagcatatgacacaacgccaaaagagtatcgcgatgtaaatcgtgaggtcatgttgtag

SEQ ID NO: 462276 - DNA, 1329 bp, Shigella boydii
atgtatatcgggatagatcttggcacctcgggcgtaaaagttattttgctcaacgagcagggtgaggtggttgcttcgcaaacggaaaagctgaccgtttcgcgcccgcatccactctggtcggaacaagacccggaacagtggtggcaggcaactgatcgcgcaatgaaagctctgggcgatcagcattctctgcaggacgttaaagcattgggtattgccggccagatgcatggagcaaccttactggatgctcaacaacgggtattgcgccctgccattttgtggaacgacgggcgctgtgcgcaagagtgcactttgctggaagcgagagttccgcaatcacgagtgattaccggcaacctgatgatgcccggatttactgcgcctaaattgctatgggttcagcggcatgagccggagatattccgtcaaatcgacaaagtattattaccgaaagattacttgcgtctgcgtatgacgggggagtttgccagcgatatgtctgacgcagctggcaccatgtggctggatgtcgcaaagcgtgactggagtgacgtcatgctgcaggcttgcgacttatctcgtgaccagatgcccgcattatacgaaggcagcgaaattactggtgctttgttacctgaagttgcgaaagcgtggggtatggcgacggtgccagttgtcgcaggcggtggcgacaatgcagctggtgcagttggtgtgggaatggttgatgctaatcaggcaatgttatcgctggggacgtcgggggtctattttgctgtcagcgaagggttcttaagcaagccagaaagcgctgtacacagcttttgccatgcgctaccgcagcgttggcatttaatgtctgtaatgctgagtgcagcatcgtgtctggattgggtcgcgaaattaaccggcctgtgcaatgtcccagctttaatcgctgcagctcaacaggctgatgaaagtgccgagccagtttggtttctgccttatctttccggcgagcgtacaccacacaataatccccaggcgaagggggttttctttggtttgactcatcaacatggccccaatgaactggcgcgagcagtgctggaaggcgtgggttatgcgctggcagatggcatggatgtcgtgcatgcctgcggcattaaaccgcaaagtgttacgttgattggtggcggggcgcgtagtgagtactggcgtcagatgctggcggatatcagcggtcagcagctcgattaccgtacggggggatgtggggccagcactgggcgcagcaaggctggcgcagattgcggcgaatccagagaaatcgctcattga

SEQ ID NO: 462277 - DNA, 438 bp, Shigella boydii
atggacaacaaaatatcaacctattcaccggcctttagtattgtgtcatggatagctctcgttggtggtatcgttacctatctgttagggctatggaatgcagagatgcagttaaatgaaaaagggtattattttgccgtactggtgttaggactgttttctgctgcgtcttatcaaaagaccgttcgggacaagtatgaaggcataccgaccacttccatttattatatgacctgcctgactgtctttattatctctgttgcattactgatggtaggtctgtggaatgcgacattattactcagtgaaaaaggtttttatggactggctttcttcttaagcttgtttggtgcagtagcggtgcagaagaatattcgtgatgccggaataaacccgccaaaagaaacacaggttacccaggaagaatacagcgaataa

SEQ ID NO: 462278 - DNA, 996 bp, Shigella boydii
atgcagcccaaaatttactggattgataacctgcgagggatagcgtgtttaatggtggtgatgattcacaccactacctggtatgtgaccaatgctcatagtgttagccccgtcacatgggatatcgccaatgttctgaattctgcctctcgtgtcagcgtgccgctatttttcatgatttccggctatctcttttttggcgaacgcagcgcccagccgcgccatttcttgcgtatcggcttatgtctgattttttatagcgcaatcgcactgctctacattgcgctgtttacctccatcaatatggagttagcgctgaaaaacctgctgcaaaagccagtgttttaccacttgtggtttttcttcgcgattgcggtgatttatctggtttcaccgctgattcaggtgaagaacgtcggcggaaaaatgttgctggtgctaatggcggtgattggcattatcgctaacccaaacacagtgccgcagaaaattgacggttttgaatggctgccaattaacttatatatcaatggcgatactttttactacattctgtatggcatgttgggccgcgctatagggatgatggacacacagcataaagcactgtcgtgggtgagcgccgcgctgtttgcgacgggggtttttattatctctcgcgggacattatatgaattgcagtggcgcggaaattttgccgatacctggtatctttactgtgggccgatggtttttatctgcgcaatcgcgctattgactctggttaaaaacacgctggatacgcgtaccattcgcggacttggcttaatctcccgccattcattgggtatatacggattccacgccttgattatccatgcgctgcgcacccggggaattgagcttaaaaattggccaatactggatattatttggatcttttgcgcgacgttggcagcgagtttgttactttctatgctggtacaacgaatcgacagaaacagattagtgagttaa

SEQ ID NO: 462279 - DNA, 699 bp, Shigella boydii
atgcaggatatccggcaggaaacactgaatgaatgcacccgtgcggagcagtcggccagcgtggtgctctgggaaatcgatctgacagaggtcggtggagaacgttattttttctgtaatgagcagaacgaaaaaggtgagccggtcacctggcaggggcggcagtatcaggcgtatcccattcaggggagcggttttgaactgaatggcaaaggcaccagtacgcggccaacgctggcagtctctaacctgtacggcatggtcaccggtatggtggaagatatgcagagtctggtcggcggaacggtggtccggcgtaaggtttacgcccgttttctggatgcggtgaacttcgtcaacggaaacagagacgccgatccggagcaggaggtgatcagccgctggcgcatcgagcagtgcagcgaactgagcgcggtgagtgcctcctttgtactgtccacgccgacggaaacggatggcgctgtttttccggggcgtatcatgctggccaacacctgcacctggacctatcgcggtgatgagtgcggttatcacggtccggcagtcgcggatgaatatgaccagccgacgtccgatatcacgaaggataaatgcagcaaatgcctgagcggctgtaagtttcgcaataacgtcggcaactttggcggcttcctttccattaacaaactttcgcagtaa

SEQ ID NO: 462280 - DNA, 330 bp, Shigella boydii; identical to SEQ ID NO: 5350

SEQ ID NO: 462281 - DNA, 2574 bp, Shigella boydii
atgtcccagccggttggtgatcttgttattgacctgagtctggatgctgtccgtttcgatgagcagatgagccgggtaaggcgtcatttttcaggtctggataccgacgccagaaaaaccgccagtgctgttgaacagggcctgagccgccaggcgctggctgcacaaaaagccgggatttccgtcgggcagtataaagcggccatgcgaaccctgcccgcacagtttacggatatcgccacgcagcttgccggtggtcagaatccctggttgatcctgctgcaacagggcggtcaggtgaaggactccttcgacgggatgatccccatgttcagggggcttgccggtgcgatcaccctgccgatggtcggggtcacctcgctggcggtggcgacaggtgcgctggcgtacgcctggtaccagggcgacgccacgctttcagaatttaataaaacgctggtcctttccggcaatcaggccggactgactgccgatcgtatgctgacgctctcaagagccgggcaggcagcagggctgacgtttaaccaggcgagagagtcactggcagccctggtgaatgccggtgtgcgtggtggtgaacagtttgatgccatcaaccagagtgtcgcgcgttttgcgtctgcatccggtgtggaggtggataaagtcgctgaagccttcgggaagctgaccattgacccgacgtcgggactgatggcgatggcgcgccagttccgtaacgtgacggcagagcagattgcgtatgttgcacagctgcagcgttccggagacgaggccggggcattgcaggcggcgaacgatatcgccacgaaaggctttgatgagcagacccgtcgcctgaaagaaaacatgggaacactggagacctgggcggataaaacagggaaggcattcaaatcgatgtgggatgccattctggatatcggtcgtccggaatcctcagcggatatgctcgccagtgcgcagaaggcatttgatgaggcggataaaaaatggcagtggtaccagagccggagccagcgccggggaaagacctcctcttttcgtgcgaaccttcagggggcatgggatgaccgggaaaatgcccgtctgggtctggcagcggccacgctgcagtcggatatggaaaaagccggtgaactggcggcaagggacagggctgagcgtgagtcgtcacagctgaagtataccggagaggcgcagaaggcgtatgagcgcctgcagacgccgctggataaatataccgcccgtcagaaagagctgaataaggccctgaaagacggaaaaatcctgcaggcggattacaacacgctgatggcgtcggcaaaaaaggattatgaatcgacgctgaaaaagccgtcaggtgtgaaggtgtctgccggtgagcgccaggaagaccgggcgcatgcagccctgctggcgcttgaaaccgagctcaggacgctggaaaaacacagcggtgtgaatgagaaaatcagccagcagcgccgggatttatgggaagcggaaagtcagtatgtggtcctgaaagaggccgccacgaaacggcagttatctgagcaggaaaaatccctgctggctcatgagaaagagacgctggagtacaaacgccagctggctgagctgggagacaagattgaacaccagaagcggctgaatgagctggcacagcaggcggcgcggtttgaacagcagcaaagcgcgaagcaggcggcaatcagcgcaaaagcccgcggcctcaccgaccgtcaggcgcagcgggagtcggaagagcagcgccttcgtgaggtgtacggtgataatccggctgcgctggcgaaggccacatcggcactgaagaacacctggtctgcggaggagcagcttcgtggaagctggatggccgggatgaagtccggctggggagagtgggcggaaagtgcgacggacagtttttcgcaggttaaaagtgtggccacgcagacctttgacggtattgcacagaatatggcggcgatgctgaccggcagcgaacaaaactggcggggattcacccgttccgtgctgtccatgatgacagaaattctgcttaagcaggcaatggtggggattgtcgggagtatcggcagcgccattggcggggctgttggtggcggcgcatccgcgtcaggcggtacagccattcaggccgctgcggcgaaattccattttgcaaccggaggatttacgggaaccggcggcaaatatgagccagcggggattgttcaccgtggtgaatttgtcttcacaaaggaggcaaccagccggattggcgtggggaatctctaccggctgatgcgcggctatgccaccggtggttatgtcggtacaccgggcagtctggctgacagccggtcgcaggcgtccgggacgtttgagcagaataaccatgtggtgattaacaacgacggcacgaacgggcagataggtccggctgctctgaaggcggtgtatgacatggcccgcaagggtgcccgtgatgaaattcagacacagatgcgtgatggtggactgttctccggaggtggacgatga

SEQ ID NO: 462282 - DNA, 396 bp, Shigella boydii; identical to SEQ ID NO: 5305

SEQ ID NO: 462283 - DNA, 534 bp, Shigella boydii
atggcgataaaagggcttgatcaggcgattgacaatctgagccgggttcgtaaaaacgccattccggcggcttcagcaatggccattaaccgcgtggccacaacggcgattaatcagtcttcatcacaggttgcccgggagacaaaggttcgccggaaactggttaaggaacggtccagactgaaacgggcgacggtcagaaatccgaatgccagaattatcgttaaccgcggtgatctccctgtgattaagctggggatcaggatgctggggcgtcgcccgaacagcatacttaaagccggtcagcatcggtatcagcgggcatttattcagcgattaaaaaatggtcgctggcatgtcatgcagcgtgtggccgggaaaaaccgttaccccattgatgtggtgaaaatcccgatggcggccccactgaaacaggcatttgatgagaatgttgaccgtatccggcgtgaacgcctgcctaaagaactggcatacgcgctgaaacaacaactgaggattgcaataaaacgatga

SEQ ID NO: 462284 - DNA, 354 bp, Shigella boydii; identical to SEQ ID NO: 5338

SEQ ID NO: 462285 - DNA, 384 bp, Shigella boydii; identical to SEQ ID NO: 5337

SEQ ID NO: 462286 - DNA, 1029 bp, Shigella boydii
atgggattgtttacgacccgccagttactcggttataccgaacaaaaagtgaaattccgtgcgctgtttctggagctgtttttccgccgtacggtgaatttccacaccgaagaggtgatgctggacaaaattaccggaaaaacgccggtggcggcctatgtctccccgatcgttgaaggaaaagtgcttcgccatcgcggtggtgaaacccgcgtgttacgtccgggctacgtcaagccgaaacacgaatttaattaccagcaggcggttgagcgccttcctggtgaagatccggctcagctgaacgacccggcctaccgtcgtctgcgtatcattaccgataacctcaaacaggaagagcacgccattgtccaggtggaagaaatgcaggcggtgaatgccgtgctgtatggcaaatacaccatggaaggggatcagtttgatactgtcgaggtggatttcgggcgctctgaaggaaataacattgagcaggctgacggtaaaaaatggtctgagcaggaccgtgatacgtttgatccgacgcatgatattgacctctactgcgatcaggccagcggccttgtgaatatcgccattatggacggtacggtctggcgtctgctgaatggctttaagctgttccgcgaaaaactggatacccgtcgcggctcaaattcacaactcgaaacggcagtgaaagatctgggcgcagtggtgtccttcaaggggtattacggcgatctggccattgtggtggcgaaaacgtcttatgtggcagaggacggtaccgaaaaacgttatctgccggagggcatgctggtgttggggaatacggcggcagaggggattcgttgctatggtgccattaaggatgcacaggcgttgtctgaaggagtggtggcttcttcccgttacccgaaacactggctgaccgtgggcgatccgtcctgtgaattcaccatgacgcagtccgctccgctgatggtgctgccggatccggatgagtttgtggtggtacaggtgaaataa

SEQ ID NO: 462287 - DNA, 549 bp, Shigella boydii
atgaaggttaataaaaagaggcttgccgaaatttttaacgtggacccgcggacgattgaacgctggcagtctcaggggctcccttgcgtctccaaaggcagtaagggcattgaatctgtatttgatactgccatggcaattcagtggtatgcgcagagggaaactgatatcgaaaacgaaaagctccgcaaagaactggccgatttgcgtgcggcagcggagtcagatttacaacccggcaccattgactatgaacgctaccggctcacaaaagcgcaggcagatgcgcaggaactgaaaaatgcccgtgaagacggagtggtgctggaaactgaactgtttaccttcattctgcaacgtgtggcacaggagatttcggggatacttgtgcgtgtgccgttgacattacagcgtaaatatccggacatttcaccatcacaccttgatgtggtgaaaactgaaatcgcgaaagcctccaatgttgcagctaaggccggtgaaaacgtgggcgggtggatcgatgatttcagacgcacagaaggcagctaa

SEQ ID NO: 462288 - DNA, 1068 bp, Shigella boydii
atgagtcaacatcaatattatccacagctgaaatggaagcctgctgaatatgaatctctgatgcttttagatcaaactacgctctctggttttactccgatcattaccattccagacatagactgggattatgaaaacgaatgctacaagaagagtttgagttcttacttatctgacttcggtattaaccttgcggcatcctggaaagccaatcgtcctgttttgctggatgttaaatatttagataaacatggttcgagccgccatcatcctctagatatgtgtatccaagatgctagagtaaatggtaaggaaattatccctgttgtttctcccgcatattcaacaaactatatacatgctgttcaacgcaacttaatcaatgggctcgctatatctatcaccccccagacatggcaccaattcacaagtctggttaaccacttaaatattcatcctagtttaattgatgtaatcattgattttggagatattcaaaacgcaactgatagtttaaaacaacaagcattaagcatggtcaacacattatcaggccaagctccgtggagaaacttgattttatcttcaaccgcatacccggcatcacaggcagggataccgcaacatcaagttcatcatattccgcgccatgaatacgatctttggatgtacgtagtacagaattttagcaatggaagaacgccaagttttagtgattatcccaccgctagctctaccattacgagcgtagacccacgcttcatgtctcagtatgtctcagtgagatattcgaacgatacctcatggatctttgtaaaaggtaccgcagttaaaggaaatggatggggccaaactaaaaacttatgtactacccttgttagttcgccagagtatcaagtctttggctccaaatttagttggggggatgattacatttaccaaagatcattaggcgctaacaaatctggcggctctaaagaatggcgtaaagttgcacatacgcaccatattacgttagtcgtgagacagctttattggttggcgcagactcagcctgccaagccttaa

SEQ ID NO: 462289 - DNA, 621 bp, Shigella boydii
atgaaagatcaagatgttaggttcgcggtgcatcataagcttttgaaagaatcgcatttagatccagactgccttgtggtcgatgaattttccatatcccttggcgccagtagagcagacattgctgtaataaatggtgttatacacgggtacgagctcaaaagtgaatatgactctttggagcgtttgcctcttcaaatcaagcattattcttctgtaatggacaaggttactcttgtcgtagctgagaaacaccttgagggagcattaaagttaatcccaggttggtggggcgttaaaacggtttctgttgggccaaaaggcgccattcttataaagcacatgcgtggagaaaagcttaatcgaaaccatgacacattgatgctcgctcaattgctttggaaagatgaatgtatcgacgtacttgaacgatggggctattccaaaggaatcaaaagcaagccccgatttgagttatggaatattattgcggaaaatattccaatagcgaatctcaggcctgaagtcagaacagccttaaagaaacgcgtaggctggaaagttaaggcttggcaggctgagtctgcgccaaccaataaagctgtctcacgactaacgtaa

SEQ ID NO: 462290 - DNA, 459 bp, Shigella boydii
gtgagcagagtcgcagcgattatttatactctggttatctgcaccatcgtctgcctgtcatgggctgttaatcattaccgcgataacgccattacctacaaagcccagcgcgacaaaaatgccagagaactgaagctggcgaacgtggtaattactgacatgcagatgcgtcagcgtgatgtagcagaactcgacgccagatacacaaaggagcttgctgatgctaacgcgactatcgaaagtcttcgtgctgatgtttctgctgggcgtaagcgcctgcaagtcgccgccacctgtgcaaagtcaacgaccggagccagcagcatgggcgatggagaaagcccaagacttacagcagatgctgaactcaattattaccgtctccgaagtggaatcgacaagataaccgctcaggtcaactacctgcaggagtacatcaggacgcagtgcttaaaataa

SEQ ID NO: 462291 - DNA, 534 bp, Shigella boydii
atgagcgcaaaaatcaaatacggcctgtcagctgctgttctggcgctgattgctgcaggcgcgtctgctcctcaaatacttgaccagtttctggatgaaaaagagggtaaccacactacggcataccgcgatggttccggtatatggaccatctgtcgtggtgccacaatggtggatggtaagcccgtcataccgggaatgaagctgtcgaaggaaaaatgcgaccaggttaacgctattgaacgtgataaggcgctggcatgggtggagcgcaatattaaagtaccactgaccgaaccacagaaagcgggtatagcgtcattctgtccctataacattggccccggtaagtgtttcccgtcgacgttttataagcggctgaatgccggtgatcgtaagggcgcatgcgaggcgattcgctggtggataaaagatggtgggcgcgattgccgcatacgttcaaataactgctatggacaggttattcgtcgtgaccaggaaagcgcattagcctgttgggggatagatcagtga

SEQ ID NO: 462292 - DNA, 315 bp, Shigella boydii
atgactcaaaactatgaactgattgtgaaagggatccgcaattttgagaataaagttacggtaactttagcgttacgggacaaaaaacgctttgacggtgaaatttttgacctggacatctcgctggaccgtgttgaaggtgccgcgctggagttttatgaggcagcagccagaaggagcatcagacaggtcttcatggatgttgctgccgggttatgtgaaggggacgagctgttgccagaaacgcgcccctgttcagaggcgcggtataccataaaaattaacagttctgataactcgattacgggttgttag

SEQ ID NO: 462293 - DNA, 216 bp, Shigella boydii; identical to SEQ ID NO: 21150

SEQ ID NO: 462294 - DNA, 1728 bp, Shigella boydii
atgcaggcgattgcagcagaaggtgatgtggtcgtcagtggtgcaactgagccggagtggtactacgtcatcgtactggccgggcaatccaatgccatggcttacggtgaagggcttccgcttccggattcatacgatgcgccccatccgcgcattaagcaactggcccgtcgtaacacagtgactcccggtggtgaagtatgcgtatttaacgacatcattcctgctgaccattgtctgcatgatgttcaggatatgagtacgattaatcatccccgggctgacctgagcaaagggcagtacggctgtgtcggacagggcttacatattgccaaaaaactgcttccgtatatccctaataacgcggggatcctgctggtaccatgctgtcgtggtggttcggcattcacccagggcacggaggggacattcagcgagtccacgggggccagtcaggattcggctcgctggggagtgggtaagccgttatatcaggatctgcttttccgcacgaaggcagcattgcagaaaaatccgaaaaacgttttgctggcgatatgctggatgcagggggaattcgatatgacgaatgccagttacgcccagcagccagcagcatttcttgcaatggtacagcagttccgtgctgaccttgccgggctggcggcgcagtgtcacggtggaagtccggcatcagtcccctggatttgtggcgacacgacatacgcgtggaaacaagaacacggtacgcaatatgaagtggtatatggtgcatataaaggtaaagaatcccagcagatttattttgttccctttatgaccgatggtagcggagttaatacaccgacaaacaacccgtcagaagatcctgatattgccgggtctggttattacggttcggcatcccgaacgaacaaaaactgggtatcatcaaatcgcccgacgcatttcagctcatgggcgcgtcgtggcattattcccgatcgtatggcaactgctattctgaacgtagccggtcgcaccttagccttcattagtggtaaggcaccggaaatcaaaccctcgcccggcggcgacactccatcggggccgtctgatggtgacacatccgttcgtacagtctccctgctgccgacagccggagaggctgctgcgcagggctggaccatcaccggcggcagtgttgcgctggaagatggtgtgtttaaggttaccaagcagagcaataaaacctggtccctgatgcatccggtggatgacgcagtctccctgctgacacggggtggcagactgagctgtaagtttcgactgtcaggcgcactgaccaacaaccagttcggtctgggaatttatctgtataccgatgtagcgttacctgacgtcgtggcgatgaccgggactggtaacccgttcctgatgtcgttcttcacccagaccacagacggcaaactgaatctgatgcatcacaggaaagcaggaaacacaaagttgggcgagttcgggaattacagtaacgactggcagacgctggagctggtgttcaccgccggcagtgccacggttactccgaaactgaatggagtggctggcccggcattccaggtcataaaagacagtctgacactggggctgaatgcgctgacgctgacggatattaccaaaaatgcagcgtatggcgttgagatagaaagtctggtgctggagataaatgcaccagcatcatcataa

SEQ ID NO: 462295 - DNA, 213 bp, Shigella boydii; identical to SEQ ID NO: 462242

SEQ ID NO: 462296 - DNA, 1104 bp, Shigella boydii
atgacaaaagtattgctgtctcagccctcgcgcccagcgagccataactcaagccgcgcgatggtgtgggtgcgaaaaaatctgttctccagctggagcaatagcctgctgactattggctgcatatggttgatgtgggaactgatcccaccgttgctgaactgggcatttttgcaggctaactgggttggctcaacgcgtgccgactgcacaaaagccggtgcctgttgggtcttcatccacgaacgatttggtcagtttatgtatggactttacccacacgaccaacgctggcgaattaacctagtattactgattggccttgtgtcaatcgcaccaatgttctggaaaatactcccgcatcgcggtcgctatattgcggtctgggcggtgatttacccactgattgtctggtggctgatgtatggcggtttttttggtcttgagcgggttgaaacccggcaatggggcgggctgacgctaactttaattattgcatccgttgggattgcgggggcgctaccgtgggggatcttactggcgttaggtcgccgctcccatatgccgattgtgcgtatcttatcggtcatttttatcgagttctggcgcggcgtaccgctgattaccgtattgtttatgtcttcggtcatgctgccgttgtttatggcagaaggcaccagtatcgacaaactgatccgcgcgctggttggcgtgatcctgtttcagtcagcatatgttgcggaagtcgtgcgaggcggattacaggccctacctaaagggcaatatgaagcggcagagtcgctggcgttggggtactggaaaactcaggggctggttattctgccacaggcgttgaagctggtaattcctgggctggtaaataccatcatcgcactcttcaaagataccagcctggtgatcatcatcggcttgttcgatcttttcagtagcgttcagcaggcaaccgttgatcccgcctggttgggtatgtcgacggaagggtatgttttcgccgcgctgatctactggatcttttgtttcagcatgtcacgttatagccaacatctggaaaaacgttttaacaccgggcgtacaccgcattga

SEQ ID NO: 462297 - DNA, 204 bp, Shigella boydii
gtgctggatacgatgattgggctggcgcagtcgggtatgacaatgttgtgtgtaacacatgagatggggtttgcacgtaccgtcgctgaccgggtaatttttatggatcgtggggagatagtggaacaagctgcacctgatgaattttttacgcatcctaaatcagagcgtacgagggcatttttatcgcaggtaatccattaa

SEQ ID NO: 462298 - DNA, 249 bp, Shigella boydii
atgcgttctccacatgccagtggtttaaatcaaaccttgcagcactacagtactgaacataactctattgctgagacttttaatttgtctgtgtggccgttggttgccgttttgctggtgataacgctctgggtggtgatgaaagagttgaagaagccaaaactcaaagtcgcgaccttaccgccgcgccgaaccgggatcgctcatattctgtttgaaaaacgctggcatccctttgtcactgcttag

SEQ ID NO: 462299 - DNA, 1005 bp, Shigella boydii
atgaaatttctggttacgggagctgctggctttatcggtttctatctaagtaaacggcttcttgcagctggtcatcaggttgtaggcattgacaacttaaatgattattacgatgtcaacctcaaacaagcacgacttgatttactcaagcacgacaacttcagtttttataaaattgacctggccgatcgtgagaaaatggcggcactgtttgcagacgagcggttcgaacgcgtaataaacctcgctgcgcaagccggtgtacgttactctcttgaaaatcccaatgcatatgcagatgcaaacctgattggattcctgaacatactagaaggatgtcgccataataatgttcagcatctactttacgcttcctccagttctgtttatggcatgaaccgcaagatgcctttctctacagatgactctgtagatcatcctgtttcgctttatgcagcaactaaaaaagcgaatgaactcatggcccatacatattctcatttgtatggcttaccgaccacagggctgcgtttctttacggtttatggtccatggggacgtccggatatggcattatttaaattcactaaagccatgctggaaggtaaaagcattgatgtttacaacttcggcaaaatgaagcgtgactttacttacattgatgatattgccgaagctattattcgcttacaggatgttattccagaaaaaaacccacagtgggctgtagaaacaggctcgcctgcaacaagttcagcaccatatcgtgtctataacattggtaatagttcgcctgtggagttgatggactatatcaatgcgttagaagaggctctgggtattgaagccaacaaaaatatgatgcctctccaacccggtgatgtactggaaaccagtgctgatacaaaagcactgtatgacgtaataggattcaaacctgaaacgtcagttaaagaaggggtaaagaactttgtagaatggtatcgtaacttctataaagtttga

SEQ ID NO: 462300 - DNA, 834 bp, Shigella boydii
atgaatcatagattagaaaaattctcagttttaattagcatttataaaaatgatctaccgcaattttttgaggtggctctacgctctatttttcacgatcaaacacttaagccagatcaaatagtaattgttgcagatggagaactccatcaaacacacatcgatattataaattcattcattgatgatgttggcaataaaatagtaacatttgtacctttacctagaaatgttggattggctaatgccttaaatgaaggattaaaggcttgtaggaatgagttagtggcaagaatggatgctgatgatatttctttgcctcatcggtttgagaaacaaatttcttttatgattaataattcagaaatagatgtatgtggcagttttattgatgaaattgaaactgttactgaggagtttatttcaacacgcaaagtgcctctcgaacatagagaaatagttaaattcgcgaggaaacgaagcgcagttagccatccttctgtaatttttagaaagaatacagtattagctgttggtggttatcctccattcagaaaatctcaagattttgcattgtggagcctattaattgtacataatgcaagatttgcaaatcttccagatattttattaaaaatgcgaactggtcgtaatcttatggctcgacgtggattgtcatatttattgtacgagtataaagtattgtattatcaatataaaattggttttattcgaaaaaatgaattaataagtaatgctatgttgagaacattttttcgtataatgccatctaaattaaaggagctgatgtattcaatcgttaggaatcgataa

SEQ ID NO: 462301 - DNA, 870 bp, Shigella boydii
atggacactgtatatgccgttttggttgcttacaacccagaacataatgatttaaaaaatgcggttgaattattgttgagacaagttactaaagttgtcgtttgcaataactctacaaatggttataaatatgctgaaaattcttcaggcgatgtaaaaatattcaatttcaatgataatttaggcatagcagaagcccaaagtataggaatgaaatgggcttttgaaaatggcgctgattttatattgcaaatggatcaggatagtattcctgatcctaagatggtagagcagttacttacttgttacaaaaaattgcttaaacaaaatgtcaatgttggtttagttggttcacaagattttgataaagtaactggtgaattaaataaagcaagggtaaaaaaagggaaaccacttacagaagtttattatgaggtagatagtacattaagttctggcagtctaataccaaaaaatagttggttgattgttggaggaatgaaagatgagctttttatcgatgcggtagaccatgaatattgttggagattaagagctgctgggtttaaagtaattaggaataaaaatgcgttacttgcacatagacttggagatgggcgatttaagatcttaaatattctttctgtcggtttgccaagcccatttcgtcattattatgctactcgaaatatctttcttttattaaataaaaattatgtacccatctactggaaaatttctagtctggttaaattaattggaaaggtttttttatatcctattttccttccaaatggtaataaaaggttatatttttttttaaaaggcattaatgacggtttaatgggtcgaagtggtaaaatgaaatga

SEQ ID NO: 462302 - DNA, 1395 bp, Shigella boydii
atgcctgacgctaaaaaacaggggcggtcaaacaaggcaatgacgtttttcgtctgcttccttgccgctctggcgggattactctttggcctggatatcggtgtaattgctggcgcactgccgtttattgcagatgaattccagattacttcgcacacgcaagaatgggtcgtaagctccatgatgttcggtgcggcagtcggtgcggtgggcagcggctggctctcctttaaactcgggcgcaaaaagagcctgatgatcggcgcaattttgtttgttgccggttcgctgttctctgcggctgcgccaaacgttgaagtactgattctttcccgcgttctactggggctggcggtgggtgtggcctcttataccgcaccgctgtacctctctgaaattgcgccggaaaaaattcgtggcagtatgatctcgatgtatcagttgatgatcactatcgggatcctcggtgcttatctttctgataccgccttcagctacaccggtgcatggcgctggatgctgggtgtgattatcatcccggcaattttgctgctgattggtgtcttcttcctgccagacagcccacgttggtttgccgccaaacgccgttttgttgatgccgaacgcgtgctgctacgcctgcgtgacaccagcgcggaagcgaaacgcgaactggatgaaatccgtgaaagtttgcaggttaaacagagtggctgggcgctgtttaaagagaatagcaacttccgccgcgcggtgttccttggcgtactgttacaggtaatgcagcaattcaccgggatgaacgtcatcatgtattacgcgccgaaaatcttcgaactggcgggttataccaacactaccgagcaaatgtgggggacagtgattgtcggcctgaccaacgtacttgccacctttatcgcaatcggccttgttgaccgctggggacgtaaaccaacgctaacgctgggcttcctggtgatggctgctggcatgggcgtactcggtacaatgatgcatatcggtattcactctccgtcagcgcagtatttcgccatcgccatgctgctgatgtttattgtcggttttgccatgagtgccggtccgctgatttgggtactgtgctccgaaattcagccgctgaaaggccgcgattttggcatcacctgctctaccgccaccaactggattgccaacatgatcgttggcgcaacgttcctgaccatgctcaacacactgggtaacgccaacaccttctgggtgtatgcggctctgaacgtactgtttatcctgctgacattgtggctggtaccggaaaccaaacacgtttcgctggaacatattgaacgtaatctgatgaaaggtcgtaaactgcgcgaaataggcgctcacgattaa

SEQ ID NO: 462303 - DNA, 1038 bp, Shigella boydii
atggtcatcaactgcgcctttattggcttcggcaaaagcaccacccgttaccatctgccgtatgtacttaaccgcaaggatagctggcatgtcgcgcatatttttcgtcgccatgcgaagccggaagaacaggctcccatttattcccatatccatttcatcagcgatctcgacgaagtactaaacgatcccgatgttaagctggttgttgtctgcacccacgcggacagccatttcgagtacgcgaaacgcgcgctggaagccgggaaaaatgtgctggtcgaaaaaccgttcaccccgacgcttgcccaggcgaaggagctgtttgcgttggcgaaaagcaaagggctgagcgtcacgccgtatcagaatcgtcgctttgactcctgcttcctgacagcgaaaaaagcgattgaaagtggcaagttgggagagattgttgaagtggaaagccattttgactattaccgcccggtggcagaaaccaaacctgggctgccgcaggatggcgcgttttatggccttggtgtgcatacgatggaccagattatttctctgttcggtcgcccggatcacgtcgcttatgacatccgcagcctgcgtaataaagccaatcctgacgacacctttgaagcgcaactgttttatggcgacctgaaagccatcgtcaaaaccagccatctggtgaaaatcgattatccgaaatttatcgttcacggtaagaaaggttcgtttattaaatacggtatcgaccagcaggaaaccagcctgaaggctaatattatgccgggcgaaccgggattcgcagcggatgattcggtcggtgtgccggagtatgtcaatgacgagggcgtgacggtcagagaagagatgaagccggagatgggcgattacgggcgcgtttatgatgcgttgtatcaaaccatcacccacggtgcgccaaattacgtcaaggaatctgaagttcttaccaatctggaaatccttgaacgcggatttgagcaagcctctccctccacagtgactctcgcgaattaa

SEQ ID NO: 462304 - DNA, 153 bp, Shigella boydii
atgaaaagaaaagttctggcaatgctggtcccggcgttattagttgctggcgcagcaaatgcggctgaaatttacaataaagatggcaataaagttgatttctacggcaagatggttggcgaacgcctctgcaaggttctttgctgccgttaa

SEQ ID NO: 462305 - DNA, 642 bp, Shigella boydii
gtgcagcacgagacaaaaatggaaaaccagagctggttgaaaaaaatcgcacgccgcctggggcctggtcatgtcgttaatctctgctttatcgtggtattgcttttttccaccttgctgacctggcgtgaagtggtagtgctggaagatgcctatatctccagtcagcgtaatcatctggaaaacgtagccaacgcgctcgataagcatttgcagtataacgtcgacaaactgatctttttgcgtaatggcatgcgcgaagctctcgtagcgccactggatttcacttcactgcgtaatgctgtaaccgagttcgaacagcatcgcgacgagcacgcctggcaaattgaactcaaccgacgacgcaccctgtcagtcaatggcgtatcggatgcattagtcagcgaggggaatctcctgtctcgcgaaaatgaaagcctcgacaatgaaattaccgctgcactggaagttggttacttgctgcgactggcgcacaacacctcgtcgatggttgaacaggcgatgtatgtctcgcgtgccggattttacgtttcgacgcagccgaccttgtttacgcgcaatgtaccaacgcgttattacggctatgtcacccaaccctggtttatcggccattcgcaatga

SEQ ID NO: 462306 - DNA, 465 bp, Shigella boydii
atgactgattacgcgataagcaagaaaagcaagcgatcgctttggatcccgattctggtattcattaccctcgcggcctgtgccagcgcaggttacagctactggcattcgcatcaggttgccgctgacgacaaagcgcagcaacgcgtcgtaccctccccggtcttctacgcgctgaataccttcacggtcaatttgggcgatgcggatcgcgtgctttatatcggcataaccctgcgcctgaaagatgaagctacccgctcgcggctgagtgagtatttgccggaagtccgtagccgtttgctgttactgttttcgcgtcaggatgctgccgtactggcgacagaagaaggcaagaaaaacctgattgccgagattaaaaccacgctttccaccccgcttgttgccgggcaaccgaaacaggatgtcaccgacgtgctgtataccgcttttattctgcgataa

SEQ ID NO: 462307 - DNA, 1128 bp, Shigella boydii
atgattcgcttagcgcccttaattaccgccgacgttgacaccaccacattgcctggcggcaaagccagcgatgctgcacaagattttctcgcgttgttgagcgaagcattagcaggcgagacaactaccgacaaagcggccccccagttgctggtggcaacagataagcccacgacaaaaggcgagccgctgatcagcgatattcttgccgacgcgcaacaagcggatttactgatccccgtggatgaaacactgcctgtcatcaacgacgaacaatccacatcaacaccgttaaccaccgctcagacgatgacgttggctgcggtggctgaccaaaatacgacaaaagacgaaaaagcggatgatctgaatgaagacgtcaccgcaagcctgagcgccctttttgcgatgttgccgggttttgacaatacgcccaaagtgactgatgtgccgtcaaccgtgttaccggcagagaaaccaacgctcttcacaaaactgacttctgcgcaactcacaacagcacagcctgatgatgcccccggcacgccagctcagccattaacaccgctggtagcagaagcccagagtaaagcggaagtcatcagcacaccgtcaccggtgaccgctgccgccagcccgctaattactccacaccagacacagccactgcccaccgtcgccgcgcctgttttgagtgcaccgctgggttctcacgaatggcaacaatcattaagccagcatatttcgctgttcacccgccaggggcaacaaagtgcagagttgcgtctgcacccgcaggatttaggtgaagtgcaaatctccctcaaagtggatgataaccaggcgcaaatccagatggtttcaccgcatcagcatgtacgcgccgcgctggaagcagcgcttccggtactgcgtacgcagctggccgaaagtggcattcagttagggcaaagcaacatcagtggcgaaagctttagtggtcagcagcaggccgcttcccaacaacagcaaagccaacgcacagtaaaccatgaacctctggcgggggaagacgacgatacgcttccggttcccgtctctttacaagggcgtgtaacaggcaacagcggcgttgatattttcgcctaa

SEQ ID NO: 462308 - DNA, 444 bp, Shigella boydii
atggcagaacatggcgcgctggcgaccctgaaagatctggcagaaaaagaggtagaggatgccgcgcgcctgctgggtgaaatgcgtcgcgggtgtcagcaggcggaagaacagctcaaaatgctgatcgattatcagaatgaatatcgcaataacctcaacagcgatatgagtgccgggatgaccagcaaccgctggatcaactatcagcagtttatccagacgctggaaaaagccattactcagcatcgccagcaacttaatcagtggacgcagaaagttgacattgccctgaacagctggcgagaaaagaaacaacgtttgcaggcctggcagacactgcaggaacggctatccacggcggcactgcttgcagaaaaccgcctcgatcagaaaaagatggatgagttcgcccagcgcgccgccatgaggaaacctgaatga

SEQ ID NO: 462309 - DNA, 984 bp, Shigella boydii
atggcctcccccgatacgacggaaaccggtgcgctgattaccccgccatttaacccgttgcaacgtacaccgattgaacatgtgctggacaccggcgtgcgcccaatcaatgccctgcttaccgttgggcgtgggcagcgtatggggctgtttgccgggtccggcgttggtaaaagtgtgctgctggggatgatggcacgttacacccgcgccgatgtcattgtcgtgggtttgattggtgaacgcggacgcgaagtaaaagattttattgagaatatcctcggtgccgaagggcgtgcacgctccgtggtgattgccgctccggcggatgtttctcctctcctgcgaatgcagggtgccgcctatgccacgcgcattgccgaagattttcgcgatcgtggtcagcatgtgttgctgattatggactccctcacccgctacgcgatggcccagcgtgaaattgcgctggcgattggcgaaccacccgccactaaaggttatcccccgtcggtgtttgccaaattaccggcactggtcgagcgtgccggaaatggcattagcggcggcggatcgattaccgcgttttataccgtgctcactgaaggcgatgaccagcaggaccccattgccgactctgcgcgggcaatcctcgacggtcacattgtgctgtctcgccgactggcggaagccgggcactatccggctatcgatattgaagcgtcgatcagccgcgcaatgacggcgttgatcagtgagcaacattacgcgcgagtgcgcaccttcaaacagctgttgtcgagttttcagcgtaaccgcgatctggttagcgtcggcgcgtatgccaaaggcagcgatccgatgctcgacaaagccatcgccctgtggccgcagctggagggctatttgcaacaaggcatttttgaacgcgcggactgggaagcgtctctccaggggctggagcgtattttcccgacagtgtcataa

SEQ ID NO: 462310 - DNA, 438 bp, Shigella boydii
atgaccacgcgcctgactcgctggctaaccacgctggataactttgaagccaaaatggcgcagttgcctgcggtacgtcgctacgggcgattaacccgcgctaccgggctggtgctggaagccaccggattacaattgccgctcggcgcaacctgtgtgattgagcgccagaacggcactgaaacgcacgaagtagaaagtgaagtcgttggctttaacggtcaacggctgtttttaatgccgctggaggaagtcgaaggtgtcctgcccggcgcgcgtgtttatgccaaaaacatttcggcagaagggctgcaaagcggcaaacagttaccgctcggtccggcgttattaggtcgtgttctggacggcagcggtaaaccgctcgatggcctcccccgatacgacggaaaccggtgcgctgattaccccgccatttaa

SEQ ID NO: 462311 - DNA, 327 bp, Shigella boydii
atgcagatggcgctggaggcagcacgtcaggtcatcggtcagacgccaacagtggataactcggcactcatcaaacagatccaacagttgttgcagcaagaaccgttattcagcggtaaaccacagctgcgcgtgcacccggatgatctgcaacgtgtggatgatatgctcggcgctaccttaagtttgcatggctggcgcttgcggggcgatcccaccctccatcctggcggctgtaaagtctccgccgatgaaggcgatctcgacgccagtgtcgccactcgctggcaagaactctgccgtctggcagcaccaggagtggtgtaa

SEQ ID NO: 462312 - DNA, 318 bp, Shigella boydii
atgtttgttccgtttctcattatgttgcgcgaaggacttgaagccgcgctgattgtcagtttgattgccagctatcttaagcgtacccagcgaggccgatggattggtgtgatgtggattggcgtgttgcttgccgctgcgttgtgcctgggcctggggatcttcattaacgaaaccaccggcgaatttccgcaaaaagaacaggaactgtttgaaggtatcgtggcggtgatcgccgtggtgatccttacctggatggttttctggatgcgcaaagtgtcgcgcaacgtaagtgcaactggaacaggcagtcgatag

SEQ ID NO: 462313 - DNA, 471 bp, Shigella boydii
atgatggtcttttttgccgttgcaagggaagggctggagtcggtctttttcctgctggcggcatttcaacaagatgtcgggatctggccgccgctgggtgcaatgctcggtcttgctacagccgtggtgctcggctttctgctctactggggcggtattcgcctcaatcttggtgcattttttaaatggaccagcctgtttattctcttcgtcgccgcagggctggcagctggtgccattcgcgcatttcatgaagccggattgtggaaccactttcaggaaatcgccttcgatatgagtgcggtgctctcaactcactcgctgtttggcacgctgatggaagggatttttggctatcaggaagcgccgagcgtcagcgaagtcgccgtctggtttatttatctcatcccggcgctggtggcatttgctctgccaccacgcgcaggggcgacagcgtctcgctccgcgtaa

SEQ ID NO: 462314 - DNA, 1128 bp, Shigella boydii
atgaccattaacttctgccgtaacgcattgcagttgagcgtggctgcgctgttttcttctgcttttatggctaacgccgctgatgtgccgcaggtcaaagtgaccgtgacggataagcagtgcgaaccgatgaccattacggttaacgccgggaaaacacagttcattattcagaaccatagccagaaggcgctggagtgggagatcctcaaaggcgtgatggtggtggaagagcgggaaaatatcgcccctggttttagccagaaaatgacggcgaatttacagcctggcgaatacgatatgacctgcggtctgctgactaacccgaaagggaagttgatcgtcaaaggtgaggcaacggcggatgcggcgcaaagtgatgcgctgttaagtcttggtggtgcaattactgcatataaagcgtatgtcatggcggaaaccacgcagctggtgaccgacaccaaagcctttaccgacgcgattaaagctggcgatatcgaaaaagcgaaagcactgtatgcgccgacgcgccagcactatgagcgcattgaaccgattgctgaactgttctccgatctggatggcagcattgacgcccgtgaagatgattacgagcaaaaagccgccgacccaaaattcactggtttccaccgtctggaaaaagcattgtttggcgacaacaccaccaaagggatggatcagtacgctgagcagctttatacagatgtggtcgatttgcaaaaacgcatcagtgaactggctttcccaccttcaaaagtggtcggcggcgcagccggactgattgaggaagtggcagccagcaaaattagcggtgaagaagatcgctacagccacaccgatctgtgggatttccaggctaacgttgaaggctcgcagaaaattgtcgatttgctgcgtccacaactgcaaaaagccaacccggaactgctggcaaaagtcgatgccaactttaaaaaggtcgataccattctggcgaaataccgtactaaagacggttttgaaacctacgacaaattgaccgatgccgaccggaatgcactgaaaggaccgattactgcgcaggcggaagatctggcgcaacttcgcggtgtgctgggactggattaa

SEQ ID NO: 462315 - DNA, 1272 bp, Shigella boydii
atgcagtataaagatgaaaacggcgtgaatgaaccgtcacgccgacgtttactgaaagtgataggtgcgctggcgctggcgggaagttgtccggtcgctcatgcacaaaaaacgcaaagtgcgccgggtacgctttcaccggatgcacgcaatgagaaacagccgttttatggtgagcatcaggcagggatcctgacgccacaacaggccgcaatgatgctggtggcgtttgatgtgcttgccagcgataaagccgatcttgaacggttgtttcgcttgttgactcagcgttttgcttttctgactcagggcggagcggcaccagaaacgccaaatccgcgcctgccaccactcgattccggcattcttggcggctacattgcgcccgataatctcaccatcacgttatcggtgggtcactcattgtttgatgagcggtttggccttgcgccacagatgccgaaaaagttgcagaagatgacgcgtttccccaacgactcgctggatgcggcgttatgccatggtgatgtgttgctacaaatttgcgccaacacccaggacacggtgatccatgcgctgcgcgatatcatcaaacacacgccggatttgctcagcgtgcgctggaagcgggaagggtttatttccgatcacgcagcgcgtagtaaaggcaaagagacgccgattaatttgctgggctttaaagacggcactgccaatcccgatagccagaatgataagttgatgcaaaaagtggtgtgggtaacggcagatcagcaggagcctgcgtggacaatcggtggcagctatcaggcagtacgcttgattcagtttcgagtggaattttgggacagaacgccgctgaaagaacagcagacgatttttggccgtgataagcaaaccggtgcgccgctgggaatgcagcatgagcatgatgtgcctgattacgccagcgacccggaagggaaggtgatcgcgctggacagccatatccggctggcgaatccccgcacggcggagagtgagtccagcctgatgctgcgtcgcggctacagttattcgttgggggtcaccaactccggacaactggatatggggttgctgtttgtctgctaccaacacgatctggaaaaaggcttcctgacagtacaaaaaaggctcaatggcgaagcgctggaggaatacgttaaacctatcggcggcggttattttttttcgctgccgggagtgaaggacgcgaacgattatctcggaagcgcgttattgcgggtttaa

SEQ ID NO: 462316 - DNA, 738 bp, Shigella boydii; identical to SEQ ID NO: 460989

SEQ ID NO: 462317 - DNA, 855 bp, Shigella boydii
atgttgtccaaacaaatcccgcttggcatctatgaaaaagcgctccccgccggggagtgctggctggaacgcctgcgactggcaaaaacgttgggcttcgattttgtcgagatgtcggtagatgaaactgacgagcgcctgtcgcgcctcgactggagccgcgagcagcgtctggcgctggtgaatgcgattgttgaaaccggcgtgcgtgtgccgtccatgtgcctttctgcccatcgtcgtttcccgttgggcagcgaagatgacgcggtgcgggcgcaggggctggagattatgcgtaaagccatccagttcgcccaggacgttggcattcgcgtgatccagctggcgggctatgacgtttactatcaggaagccaataacgaaacgcgtcgtcgtttccgtgacggcctgaaagagagcgttgagatggcgagccgcgcgcaggtgacgctggcgatggagatcatggattatccgttgatgaactccatcagcaaggcgctgggttacgcgcactatctcaacaacccgtggttccagctctacccagatatcggcaacctgtcggcgtgggacaacgatgtgcagatggagttgcaggccggaatcgggcatatcgtcgcggtgcatgtgaaagacaccaaaccgggcgtcttcaaaaacgtgccatttggcgaaggtgtggtggatttcgaacgttgcttcgaaacgctcaaacagagtggctattgcgggccgtacctgattgagatgtggagcgaaacggcggaagacccggcggcagaagtggtgaaagcgcgtgattgggtgaaagcgcgcatggccaaagcaggcatggtggaggcggcataa

SEQ ID NO: 462318 - DNA, 465 bp, Shigella boydii
atgaaattacgtgattcgctggcggagaataaatccatccgcctgcaggctgaagctgagacatggcaggacgcagtaaaaatcggcgttgacctgctggtggcggcggatgttgtcgagccgcgttactaccaggcgattctggatgcggttgaacagcacggtccgtactttgtgctcgcaccaggcctggcaatgccgcacggtcgcccggaagagggcgttaagaaaaccggttttgcgctggtgacgctgaaaaagccgctggagttcaaccacgaagataacgacccggtggatatcctcatcaccatggcggcggtcgatgccaacacgcaccaggaagtgggcatcatgcagatcgtcaacctgtttgaagatgaagaaaatttcgaccgtttacgtgcctgccgtaccgagcaggaagtactggatctcattgaccgcaccaacgcggcagcttaa

SEQ ID NO: 462319 - DNA, 660 bp, Shigella boydii
atgtctggttttttccagcgtctgtttggcaaggataataagcctgctatcgctcgcggtccgctgggacttcatctcaatagtggctttacgctcgacacgttagcgtttcgtttgctggaagatgaattgctgattgcgctaccgggtgaggaatttacggtagccgctgtcagccgcatcgatctgggaggcggtagccagattttccgttactacacttcaggcgatgaatttctgcaaatcaataccaccggcggcgaagatattgatgacattgatgatatcaagctctttgtctatgaagagagctacggtatcagtaaagagagtcactggcgcgaggcgatcaacgccaaaacgatgggggcaatgaccttaaactggcaggaaaaacgctggcagcgattttttaacagcgaagaaccgggaaatatcgaacccgtctacatgctggaaaaagtagaaaatcaaaaccatgccaaatgggaggtccataattttaccatgggctaccagcggcaagtaaccgaagatacttacgaatatttactgttaaatggtgaggaatcttttaacgatctcggcgagccagagtggttattttcgcgcgcgttgggtgtcgatatcccgctgacatcacttcatattattggttaa

SEQ ID NO: 462320 - DNA, 699 bp, Shigella boydii
atgggaattttaaaaagtttatttacgctggggaaatcgtttatctcccaggcggaagaatccattgaagaaacccagggcgtgcgcatgctggaacagcatattcgtgacgctaaagctgaactcgataaagccggaaaatctcgcgttgatctgctggcgcgggtgaaattaagtcacgataagctgaaagatttacgtgagcgcaaagccagtctggaagcccgtgcgctggaagcgttaagcaagaacgttaatccgtcgttgattaacgaagttgctgaagaaatcgcgcgccttgagaatctcattaccgctgaagagcaagtgttgtcgaatctggaagtctcccgtgatggcgtggaaaaagcagttacagcgacagcgcagcgtatcgctcagtttgagcagcaaatggaagtcgttaaagccactgaagccatgcagcgtgcacaacaggctgtaacaacctctaccgttggcgcatcttccagcgtttcgacagcggcagaatccttaaaacgcctgcaaacgcgtcaggccgaacgtcaggctcgcctggatgctgccgcacagttggagaaagtcgcagacggtcgcgaccttgacgaaaagctggcggaagccggaattggcggtagcaataaaagtagagcccaggatgtattagcaagactgcaacgccaacagggcgagtaa

SEQ ID NO: 462321 - DNA, 267 bp, Shigella boydii
atggaatggctggtcaaaaaatcgtgctgcaataaacaagataacagacatgtacttatgctctgcgatgctggcggcgcgataaaaatgatcgccgaagtgaagagtgacttcgccgtgaaagtgggggatttactctcgcctttgcagaatgcgctttattgtattaatcgtgaaaagctgcatacggtgaaagtcctctcggcaagcagttatagccccgatgagtgggaacggcagtgtacagcggcagggaaaactcagtaa

SEQ ID NO: 462322 - DNA, 387 bp, Shigella boydii
atgggcctgatatggggattattcagcgtcattattgcctcagttgcgcaattaagcctgggttttgcggcaagtcatctgccgccgatgacgcacttatgggattttatcgcggctctgttagcttttggcctggatgcccggatactgttactcgggctgctgggttatctgctttccgttttttgttggtataaaacgctacataaacttgcgctaagcaaagcctatgccttgctcagtatgagttatgtgctggtatggattgcttcaatggtacttcccggctgggaagggactttttcgctgaaagcactactgggagtagcctgtattatgagcgggttgatgctgattttcctgcccacgacaaaacaacgttactga

SEQ ID NO: 462323 - DNA, 891 bp, Shigella boydii; identical to SEQ ID NO: 461154

SEQ ID NO: 462324 - DNA, 969 bp, Shigella boydii
atgtttgaaatccaccctgttaagaaagtctcggtggttattcccgtttataacgagcaggaaagcttaccggaattaatcaggcgcaccaccacagcctgtgaatcgttggggaaagagtatgagatcctgctgattgatgacggcagtagcgataattccgcgcatatgctggtcgaagcctcacaagcggagaacagccatattgtgtctattttgcttaaccgcaattacgggcaacattcagcgattatggcgggattcagtcacgttactggcgacttaattattacccttgatgccgatctccagaatccgccagaagaaatcccccgcctagtggcaaaagccgatgaaggttacgacgtggtagggactgtacgccagaaccgccaggacagctggtttcgtaaaacagcttcgaagatgattaaccggcttattcagcgcaccaccggcaaagcgatgggtgactacggttgtatgctgcgcgcctatcgccgtcatattgtcgatgcgatgttgcactgccatgaacgtagcacctttatcccgattctggcgaatatcttcgcccgccgtgccattgaaattccagtacatcatgccgagcgtgagtttggtgaatccaaatacagttttatgcgcctgattaatttgatgtacgacctggtgacctgccttaccacaacgccgctacgtatgctgagtctgctcggcagcattattgcgattggaggttttagcattgcggtgctgctggtgattttacgcctgaccttcggaccacaatgggcggcagaaggcgtctttatgctatttgccgtgctgtttacttttattggcgctcagtttatcggcatgggattactcggtgaatatatcggcaggatctacaccgatgtccgcgcccgcccccgctattttgttcagcaagttatccgtccatccagcaaggaaaatgaataa

SEQ ID NO: 462325 - DNA, 1158 bp, Shigella boydii
atggcggaaggaaaagcaatgtcagaatttttgcctttttcgcgaccagcaatgggcgtggaggaactcgctgcagttaaagaagttctcgaatccggttggatcacaaccggtccgaagaatcaggcgcttgagcaagccttttgccagttgacgggaaatcagcatgccatcgcggtcagttcagccaccgccggaatgcatatcacgctaatggcgttggaaattggcaagggcgatgaagtgattacgccttccctgacctgggtttcaaccctcaatatgatttccttgttgggtgcaacgccggtaatggtggatgtcgaccgcgatacgctgatggtcacgcctgaagcgatcgagtcagccattacgccacgcactaaagccatcattccggtgcattatgccggtgcgccagcagatattgacgccattcgcgccattggcgaacgttacggcatcgcagttatcgaagatgctgcccatgccgtcggtacgtattacaaagggcgacatattggcgcaaaaggtaccgctattttttcatttcatgccattaaaaatattacctgtgcggaaggtggcctgattgtaactgataatgaaaaccttgcccgccagctacggatgctgaaatttcacggcctgggtgtcgatgcctatgacagacaaacctggggccgagcaccgcaggctgaagtcttaacaccgggctataagtacaatctgaccgatattaacgccgcaattgccctgacacagttagcaaaattagagcacctcaacacccgtcggcgcgaaattgcccagcaatatcagcaagcactggcagctctcccctttcagccattaagccttcccgcctggccgcacgttcacgcctggcatctgtttattattcgtgtcgatgaacaacgttgtggtatcagtcgcgatgcgttgatggaagcgttaaaagaaagaggcattggtaccgggttacatttccgcgccgctcacacacaaaaatattatcgcgagcgttttcccacgctgtcgttaccgaataccgaatggaatagcgaacgcatctgttctttgccgctgttcccggatatgactaccgccgatgccgaccgtgtcatcacagcccttcagcaactcgcaggacaataa

SEQ ID NO: 462326 - DNA, 675 bp, Shigella boydii
atgtcgctcaatttcacggtaattgtctggttgcgcttgtctataggtggagtttacgagttagctttttgccgctcatcattgaagtcaaaaaaatatttcatcattttactggcgctcgctgcaattgccggactgggtactcatgccgcctggagtagcaatggtttgccacgtatcgacaataaaacattggccagactggcacagcagcacccggttgtcgttttgtttcgccatgctgaacgttgcgatcgttcaaccaatcaatgcttgtcagataaaacaggtattacggttaaaggtacccaggatgcccgtgaactgggcaacgcttttagcgctgacatccctgatttcgatctttattccagtaataccgtccggaccattcagtcggcgacctggttttccgcgggtaaaaagctgacggtagataaacgacttcttcagtgcggtaatgagatttatagtgcaattaaggacttacaaagcaaagcgcctgataaaaatatcgttattttcacccataatcattgcctgacatatattgctaaaaataagcgtgatgcgacatttaaacctgattatctggatggtttagtcatgcatgtggaaaaaggcaaagtttatctggatggggaattcggtaatgctgccaacttactgatttag

SEQ ID NO: 462327 - DNA, 1044 bp, Shigella boydii
atgagcgtaatgtttgatccagacacggcgatttatcctttccccccgaagccgacgccgttaagcattgatgaaaaagcgtattaccgcgagaagataaaacgtctgctaaaagaacgtaatgcggtgatggttgcccactactataccgatcccgaaattcaacaactggcagaagaaaccggtggctgtatttctgattctctggaaatggcgcgcttcggtgcaaagcatcccgcttctactttgttagtcgctggggtgagatttatgggagaaaccgccaaaattctcagtccggaaaaaacaattctgatgccgacacttcaggctgaatgttcactggatctcggctgccctgttgaagaatttaacgcattttgcgatgcccatcccgatcgtactgtcgtcgtctacgccaacacttctgctgcggtaaaagcgcgcgcagattgggtggtaacttcaagcattgccgtcgaacttattgatcatcttgatagtttgggtgaaaaaatcatctgggcacccgacaaacatctggggcgttacgtgcaaaaacagacgggtggagacattctatgctggcagggtgcctgtattgtgcatgatgaatttaagactcaggcgttaacccgcttgcaagaagaatacccggatgctgccatactggtgcatccagaatcaccacaagctattgtcgatatggcggatgcggtcggttccaccagtcaactgatcgctgctgcgaaaacattgccacatcagaggcttattgtggcaaccgatcggggtattttctacaaaatgcagcaggcggtgccagataaagagttactggaagcaccaaccgcaggtgagggtgcaacctgccgcagctgcgcgcattgtccgtggatggccatgaatggccttcaggccatcgcagaggcattagaacaggaaggaagcaatcacgaggttcatgttgatgaaaggctgcgagagagggcgctggtgccgctcaatcgtatgctggattttgcggctacactacgtggataa

SEQ ID NO: 462328 - DNA, 765 bp, Shigella boydii
atgaattatcagaacgacgatttacgcatcaaagaaatcaaagagttacttcctcctgtcgcattgctggaaaaattccccgctactgaaaatgccgcgaatacggttgcccatgcccgaaaagcgatccataagatcctgaaaggtaatgatgatcgcctgttggtggtgattggcccgtgctcaattcatgatcctgtcgcggctaaagagtatgccactcgcttgctggcgctgcgtgaagagctgaaagatgagctggaaatcgtaatgcgcgtctattttgaaaagccgcgtaccacggtgggctggaaagggctgattaacgatccgcatatggataacagcttccagatcaacgacggtcttcgtatagcccgtaaattgctgcttgatattaacgacagcggtctgccagcggcgggtgagtttctcgatatgatcaccccacaatatctcgctgacctgatgagctggggcgcaattggcgcacgtaccaccgaatcgcaggtgcaccgcgaactggcatcagggctttcttgtccagtcggcttcaaaaatggcaccgacggtacgattaaagtggctatcgatgccattaatgccgccggtgcgccgcactgcttcctgtccgtaacgaaatgggggcattcggcgattgtgaataccagcggtaacggcgattgccatatcattctgcgcggcggtaaagagcctaactacagcgcgaagcacgttgctgaagtgaaagaagggctgaactaa

SEQ ID NO: 462329 - DNA, 381 bp, Shigella boydii
atgaaaaaaagtgtattgacggcgtttataactgtggtatgtgcaacgtccagcgttatggcagctgatgataatgctatcacggatggcaaagtaacatttaatggtaaagttattgctccagcttgtaccctggtagctgcgacgaaagattcagtagtcacattgccaaatgtcagcgccaccaagttgcaaactaatggagcagtctctggcgttaaaactgatgtaccaattgccttagaaggctgtgatgttactgtaactaaaaatgcgacgtttacctttagtggtacggctgacggcgtgcaacctacagcatttgccaaccaggctaccaccgatgcagcgacgggtaatgctgccaacttactgatttag

SEQ ID NO: 462330 - DNA, 960 bp, Shigella boydii
atgcgtaacatcattaaactggcgctggtgggattgcttagcgtctctacgattgcggttgctgcagaatcctcgcctgaagcgttatgtataggctatcagaaaggcagtattggtatggtactggcaaaaagccaccagttactggaaaaacgctatccgcaatcaaaaatctcctgggtggagttccccgcgggtccgcaaatgttggaagccttaaacgttggcagtattgatctcggcagtaccggggatattccgccaatctttgcccaggctgccggggctgatttggtatatgtgggcgtcgagccaccgaagcccaaagccgaagtgattctggtggcagaaaacagcccgatcaaaaccgtagccgatcttaaaggtcacaaagttgcctttcagaaaggttccagttcacacaaccttttactgcgtgcactgcgtcaggccggacttaagtttaccgatatccaacccacttacctgacgcccgctgatgcccgcgccgcgttccagcaaggtaacgttgacgcctgggctatctgggatccctactactctgctgcattattacagggcggcgtgcgggtgctgaaagacggcaccgatctcaatcaaactggatcgttttatctggcagctcgtccctatgcagaaaaaaacggcgcttttattcagggcgtactggcaacctttagtgaggccgatgcgttaacccgcagccagcgcgagcaaagcatcgctttactggcaaaaacgatgggcttaccggcaccggtgattgcctcttacttagatcatcgccctcctaccaccatcaaaccggttaacgccgaggttgccgccttacagcagcaaacggcagatctgttttatgaaaatcgtctggtgccgaaaaaagtcgatattcgccagcgcatctggcagcccactcaactggaaggaaaacaattatga

SEQ ID NO: 462331 - DNA, 330 bp, Shigella boydii
atgactgaaatcgttgcagataaaatggtagaagtagttaaaaacgcaatcgaaaccgcagatggagcattagatctttataataaatatctcgatcaggtcatcccctggcagacctttgatgaaaccataaaagagttaagtcgctttaaacaggagtattcacaggcagcctccgttttagtcggcgatattaaaaccttacttatggatagccaggataagtattttgaagcaacccaaacagtgtatgaatggtgtggtgttgcgacgcaattgctcgcagcgtatattttgctatttgatgaggtaatgactccaacttactga

SEQ ID NO: 462332 - DNA, 525 bp, Shigella boydii
atgtttgctctctgtgatgtaaacgcgttttatgccagctgtgagacggtgtttcgccctgatttatggggtaaaccggtggttgtactatcgaataatgacggttgcgttatcgcccgaaacgctgaggcaaaggcgctgggtgttaaaatgggcgatccctggttcaaacaaaaagatctgtttcgtcgctgtggtgtggtttgctttagcagcaattatgagctttacgcagacatgagcaatcgggtgatgtcgacgctggaagaactatcgccccgcgtcgagatttacagtattgatgaggcattctgcgatctgacaggtgtgcgtaattgtcgcgatctgactgattttggcagagaaattcgcgcaacggtgctacaacgtacccatcttactgttggtgtggggatcgcccagaccaaaacgctggctaagcttgccaatcatgcggcaaaaaaatggcagcggcagacgggggggtggtggatttatcaaatctggaacgccagcgtaaattaa

SEQ ID NO: 462333 - DNA, 1980 bp, Shigella boydii
atgcagatgactcaacgtgatattcctcagtcggtcactattgttagccagcagcggatggaagatcagcagttacaaacgctgggcgaagtgatggaaaacacgctggagatcagcaaaagtcaggcggattccgatcgtgctctttattattcccgcggattccagatcgataactatatggttgatggtatccccacctattttgaatcgcgctggaatctgggcgatgcactttctgatatggcactgtttgaacgcgtagaagtagtgcgtggcgcgacaggactcatgaccgggacgggtaatccatctgcggcaattgatatggttcgaaaacacgcgaccagtcgtgaatttaaaggcgatgtctcggcggaatacggtagctggaacaaagaacggtatgtggcggatttacaaagcccactcaccgaagacggtaaaatccgcgcgcgaattgtcggcggctaccagaataacgactcatggctggaccgctacaacagtgaaaagaccttcttctccggcattgtcgatgctgatttaggcgatcttacgacgctttcagccggttacgaatatcagcgcattgatgttaatagccctacctggggcggtttaccgcgctggaatactgatggcagcagcaacagttacgatcgtgcacgcagtaccgcacctgactgggcgtacaacgataaagagatcaacaaggtctttatgaccctgaagcagcggtttgctgatacctggcaagcgacactgaatgccacccactctgaagtcgaatttgacagcaaaatgatgtatgtcgatgcctatgtaaacaaagcggatggtatgctggttgggccatacagtaattatggacctggctttgattatgtcggcggcaccggttggaacagtggcaaacgtaaagttgatgcgctggatttgttcgctgacggtagttatgaattgtttggtcgtcagcacaatctaatgtttggtggcagttacagcaaacaaaacaatcgttacttcagttcatgggccaacatcttcccggatgaaattggcagtttctacaactttaatggcaatttcccacaaaccgactggtcaccacagagcctggcacaggacgataccacacatatgaaatcgttatatgctgccactcgagtcacccttgccgatccgctgcatctgatcctcggcgcacgttataccaactggcgggttgatacgctgacttacagcatggagaaaaaccacaccacgccttacgctggtctggtgtttgacatcaatgacaactggtcgacctacgccagctatacctctattttccagccgcaaaatgatcgtgacagttcaggcaaatatctggctccaatcaccggtaacaactacgagctgggtctgaaatcgggctggatgaatagccgtctgaccaccacgttagccatcttccgtattgagcaggataatgtcgctcagtccaccggtacacctatccccggcagcaacggcgaaaccgcctataaagcggtggatgggacagtcagtaaaggggtggaatttgaactcaacggcgcaattaccgacaactggcagctgacatttggcgcaacgcgctatattgcagaggataacgaaggaaacgccgttaatcctaatctgccacgcaccacggttaaaatgttcaccagctatcggttgcctgtcatgccagagttgacagtcggcggtggtgtgaactggcaaaatcgcgtgtataccgacaccgtgacaccgtatggcaccttccgcgccgagcaaggtagctacgcgctggtggatctcttcacccgctaccaggtgacgaaaaacttctcgttacaggggaacgtcaataacctgttcgacaaaacctacgataccaacatggaaggttctatcgtctacggcgcaccgcgtaatttcagcattaccggcacgtatcaattctga

SEQ ID NO: 462334 - DNA, 1572 bp, Shigella boydii
atgaaagcggtatctcgcgttcacatcaccccgcatatgcactgggatcgagagtggtatttcaccaccgaagagtcacgtattctgctggtcaataatatggaagagatcctgtgccgactggaacaggacaacgaatacaaatattacgtactcgacgggcaaacggcgatcctcgaagattatttcgcggtgaaaccggaaaacaaagaccgtgtgaagaaacaggtagaagccggcaagttgattatcggcccctggtatacccagaccgataccacgattgtttctgcggaatccatcgtccgtaatctgatgtacggaatgcgtgactgcctcgcgtttggcgagccgatgaaaataggttatttaccagattcctttggcatgtccgggcaactgccgcatatctacaatggatttggcattacccgcaccatgttctggcgcggatgttcggagcgccacggtactgataaaaccgagtttttgtggcaaagcagtgacggtagcgaagtgacggcgcaggtgctgccgctgggctacgccataggtaagtacttacctaccgacgaaaacggattacgtaaacgcctcgacagttattttgacgtgctggaaaaagcgtctgtaaccaaagagattttgctgccgaatggtcatgaccagatgccattgcagcaaaatatcttcgaagtgatggataagctacgtgagatctaccctcaacgtaagtttgtgatgagccgctttgaagaggtatttgagaagatcgaagcgcagcgtgaaagtctggccaccctgaaaggtgaatttatcgatggcaaatatatgcgcgtacatcgcaccatcggttccacgcgcatggatatcaaaattgcccacgcacgtattgaaaataagattgttaatctgctggaaccgctggcaacgctggcctggacgttgggttttgaataccaccacggcttgctggagaaaatgtggaaagagatcttaaaaaatcatgcccacgacagtatcggttgttgttgcagtgacaaagttcatcgcgaaattgtcgcccgcttcgaactggctgaagacatggcggataatctgctgcgtttctacatgcgcaaaattgccgataacatgccacagagtgatgccgacaaactcgtgctgtttaacctgatgccctggccgcgggaagaagttattaacaccactgtgcggctgcgcgccagccagtttaatctacgagacgatcgcggtcagcctgtaccgtattttattcgccatgcccgtgagatcgatccaggcctaatcgatcggcaaatagttcattacggtaattacgatccctttatggagtttgatatacagatcaaccagattgtcccttctatgggctatcgcacgctttatatcgaagcgaatcagcctggcaacgtgattgcggcaaaaagtgacgctgaagggatactggaaaatgctttctggcaaattgcgctcaatgaggatggttctctgcaactggtagataaagacagcggtgtgcgctatgaccgagtattgcaaattgggtaa

SEQ ID NO: 462335 - DNA, 1053 bp, Shigella boydii
gtgaacatatatatcgggtggcttttcaaattaatccctttgattatgggcttaatttgtatcgcgttaggtggctttgtgctggaaagttcagggcaaagcgagtatttcgtcgcgggtcatgtgctgatttctctggcagccatatgcctggcattattcactaccgcatttattatcatttcgcagctcacgcgcggcgttaatacgttttacaatatattgttccccattattggctatgcagggtcaattatcaccatgatatggggttgggcactgttagcaggcaatgatgtgatggcagacgagtttgtcgccggctatgttattttcggcattggtatgattgccgcatgtgtatcgacggtggcagcgtcgtccggtcactttctgctcattcccaaaaatgcagcggggagcaagagcgacggaacaccggtacaggcttattcttcattaatcggtaactgcctcattgccgttcccgttttactcaccctgctcggtttcatttggtctattacgctgttacgtagtgctgacataactccgcattatgtcgcgggtcacgtattgcttgggttaaccgcaatctgtgcctgtctaattggccttgttgccacaattgtccatcaaacacgtaatacgttttcaactaaagaacactggctgtggtgttattgggttatttttctcggctcaatcacggtactgcaggggatatacgtcttagtcagttccgatgcaagcgcccgactggctcccggcattattcttatttacctcggaatgatctgttacagcatattctcaaaagtctggctactggcactggtatggagacgtacctgttcgttagccaacagaataccgatgattcccgtcttcacctgcctgttttgccttttcctggcatcgtttcttgcggaaatggcgcagaccgacatgggatattttattccttcgcgggttttggtcggtttgggagcggtatgctttacgttgttctcaatcgtttcaatattagaagcaggttctgctaaaaaataa

SEQ ID NO: 462336 - DNA, 297 bp, Shigella boydii
atgcagttggaagaagtcgctaaagcgctgaaagagctaggtcacccgacccgtttgttcatatttaaacatcttgtcaaagccggggaacaagggttgccggtcggtgagttgcaaaagcagcttgggatacctggctccacactcagccaccatatatcagcactggtatcggtaggactggtcaaacaaaaccgtgagagtcggacgctgatgtgtgtttcgcaatacgcaatgctggaagcgataattgaattcttacgcgaggagtgctgcgtaaatagcaaaattgcctga

SEQ ID NO: 462337 - DNA, 249 bp, Shigella boydii
atgagtagttggcttgcgatgctgcaagatgccgcagagatgtttgtgtttctcgccgtcgagctttcgttgctgtttatagtgattagtgccggtgtcagcctgataagacaaaaggtgccagaccataaaatccagcagatgatgggggccagaaaagggagaggctatctcctggctgctctgttgggagccgttaccccgttctgtagttgctcgacaatacccatgttacgtggattgttgtga

SEQ ID NO: 462338 - DNA, 1644 bp, Shigella boydii
atgttgaagcgcctactaaaaagaccctctttgaatttactcgcctggctattgttggccgctttttatatctctatctgcctgaatattgccttttttaaacaggtgttgcaggcgctgccgctggattcgctgcataacgtactggttttcttgtcgatgccggtcgtcgctttcagcgtgattaatattgtcctgacactaagctctttcttatggcttaatcgaccactggcctgcctgtttattctggttggcgcggctgcacaatatttcataatgacttacggcatcgtcatcgaccgctcgatgattgccaatattattgataccactccggcagaaagttatgcgctgatgacaccgcaaatgttattaacgctgggattcagcggcgtgcttgctgcgctgattgcctgctggataaaaatcaaacctgccacctcgcgtctgcgcagtgttcttttccgtggagccaatattctggtttctgtactactgattttgctggtcgccgcactgttttataaagactacgcctcgttgttccgcaataacaaagagctggtgaaatccttaagcccctctaacagcattgttgccagctggtcatggtactcccatcagcgactggcaaatctaccgctggtgcgaattggtgaagacgcccaccgcaacccgttaatgcagaacgaaaaacgtaaaaatttgaccatcctgattgtcggcgaaacctcgcgggcggagaacttctccctcaacggctacccgcgtgaaactaacccgcggctggcgaaagataacgtggtctatttccctaataccgtatcttgcggcacggcaacggcagtttcagtaccgtgcatgttctcggatatgccgcgtgagcattacaaagaagagctggcacagcaccaggaaggcgtgctggatatcattcagcgagcgggcatcaacgtgctgtggaatgacaacgatggcggctgtaaaggtgcctgcgaccgcgtgcctcaccagaacgtcaccgcgctgaatctgcctggtcagtgcatcaacggcgaatgctatgacgaagtgctgttccacgggctggaagagtacatcaataacctgcagggtgatggcgtgattgtcttacacaccatcggcagccacggtccgacctattacaaccgctatccgccgcagttcaggaaatttaccccaacctgcgacaccaatgagatccagacctgtaccaaagagcaactggtgaacacttacgacaacacgctggtttacgtcgactatattgttgataaagcgattaatctgctgaaagaacatcaggataaatttaccaccagcctggtttatctttctgaccacggtgaatcgttaggtgaaaatggcatctatctgcacggtctgccttatgccatcgccccggatagccaaaaacaggtgccgatgctgctgtggctgtcggaggattatcaaaaacggtatcaggttgaccagaactgcctgcaaaaacaggcgcaaacgcaacactattcacaagacaatttattctccacgctattgggattaactggcgttgagacgaagtattaccaggctgcggatgatattctgcaaacttgcaggagagtgagtaaatga

SEQ ID NO: 462339 - DNA, 669 bp, Shigella boydii
atgaaaattctgattgttgaagacgatacgctgttattgcagggactgattctggcggcgcaaaccgaaggctacgcgtgcgatggcgtgacaaccgcgcggatggcggaacaaagccttgaagccggtcattacagcctggtggtactggatttagggttacccgacgaagatggactgcattttctcgcccgtatccggcagaaaaaatataccctgccggtactgatcctcaccgctcgcgatacgctgaccgacaaaatcgccgggctggatgtcggtgccgatgactatctggtgaagccttttgcgctggaagagttacacgcccgtatccgcgccctgctacgacgccataataatcagggcgaaagtgagctgattgttggcaatctgacgctgaatatgggtcgccgtcaggtatggatgggcggtgaagagttgattctgacgcccaaagaatatgctctgctgtcacggttaatgctcaaagcaggcagtccggtacatcgggaaattctctacaacgacatctataactgggacaatgaaccctcgaccaacaccctggaagtgcatatccacaatctgcgcgacaaagtgggcaaatcccgtatccgcaccgtgcgcggctttggctatatgctggtcgcgaatgaggaaaactaa

SEQ ID NO: 462340 - DNA, 1101 bp, Shigella boydii
ttgaatctgatgcgttttctgcgccgaccaatatcgctgcgccaacggctgatattgactatcggggccattttgttggtgtttgagctgatcagcgtcttctggctatggcatgaaagtaccgagcagattcagctgtttgagcaggcgctacgcgacaatcgcaacaacgatcgccacatcatgcgtgagatccgcgaggcggtcgccagcctgattgtccccggcgtctttatggtcagcctgacgctatttatctgctatcaggcggtacgccgcatcacccgcccgctggcggagctgcaaaaagagctggaagcgcgcactgccgacaacttaacgcccattgccattcacagcgccaccctcgaaatcgaagcggtggtttcggcgttgaacgatctggtcagtcgcctgaccagcacgctggataacgaaaggttgtttaccgctgacgtcgcgcacgaactgcgaacgccactggcgggggtgcgtttgcatctggaactgctggcgaaaacgcatcacattgatgtagcaccgttagtggcacggcttgatcagatgatggagagcgtctcccagctgctgcaactggcgcgtgccggacagtcattttcttccggtaattatcaacatgtaaaactgctggaagatgtcattctcccctcgtatgacgaactcagtaccatgctcgaccagcgacagcaaaccctgctattgccagagagcgccgccgacatcaccgttcagggtgatgcaaccctgctgcggatgttattgcgaaacctggtagaaaacgcccatcgttacagcccgcaaggcagcaacattatgattaagctgcaagaagatggcggagcggtcatggcagttgaagatgaaggaccaggtattgatgagagtaaatgcggggagttgagtaaagcgtttgtacgtatggacagccgttatggcgggattggtctggggttaagtattgtcagccgcattacacagttgcatcacgggcagtttttcctgcaaaaccggcaagagacttccggcacgcgggcctgggtacggctgaagaaagatcagaacgtggcaaaccagatataa

SEQ ID NO: 462341 - DNA, 1503 bp, Shigella boydii
atgctgaaaaggaaaaaagtaaaaccgattacccttcgtgatgtcaccattattaatgacagtaaactgcgtaaagccattaccgcagcatcactgggtaatgcaatggaatggttcgattttggtgtttatggttttgttgcttacgcattaggtaaagtttttttcccgggggctgaccccagcgtgcagatggttgctgcacttgccactttctccgttccctttctgattcgaccgcttggcggactcttctttggtatgttgggcgataaatatggtcgccagaagatcctcgctatcactattgtgattatgtcgatcagtacgttctgtattggcttaataccgtcctacgacacgattggtatttgggcaccgattctgctgttgatctgtaagatggcacaaggtttctcggtcggcggtgaatataccggggcgtcgatatttgttgcggaatactcccctgaccgtaaacgtggctttatgggcagctggctggacttcggttctattgccgggtttgtgctgggtgcgggcgtggtggtgttaatttcgaccattgtcggcgaagcgaacttcctcgactggggctggcgtattccgttctttattgctctgccgttagggattatcgggctttacctgcgccatgcgctggaagaaactccggcgttccagcagcatgttgataaactggaacagggcgaccgcgaaggtttgcaggatggcccgaaagtctcgtttaaagagattgccactaaatactggcgcagcctgttgacatgtattggtctggtaattgccaccaacgtgacttactacatgttgctgacctatatgccgagttatttgtcgcataacctgcattactccgaagaccacggggtgctgattattatcgccattatgatcggtatgctgtttgtccagccggtgatgggcttgctgagtgaccgttttggccgtcgtccgtttgtgctacttggtagtgttgccctgtttgtgttggcgatcccggcgtttattctgattaacagtaacgtcatcggcctgatttttgccgggttactgatgctggcggtgatccttaactgctttacgggcgttatggcttctaccttgccagcgatgttcccgacgcatatccgttacagcgcgctggcggcggcatttaatatttcggtgctggttgccggtctgacgccaacactggcggcctggctggtcgaaagctcgcagaatctgatgatgcctgcctattacctgatggtagtggcggtgattggtttaatcaccggcgtaaccatgaaagagacggcaaatcgtccgttgaaaggtgcgacaccggcggcgtcagatatacaggaagcgaaggaaattctcgtcgagcattacgataatatcgagcagaaaatcgataatattgaccacgagattgccgatttgcaggcgaaacgtacccgcctggtgcagcaacatccgcgaattgatgaataa

SEQ ID NO: 462342 - DNA, 609 bp, Shigella boydii
ttgaccaagacgttactggacggccccggtcgcgtgctggagtcggtttatccccgctttttagtggatctggcgcagggcgatgatgcccgccttccacaagcccatcagcagcagtttcgtgaacgactgatgcaggaacttctttcgcgtgtgcagcttcagacatggacgaacggcggcatgttaaatgcgccgcttagcctgcgactgacaatggtggaaaaactggcgtcgatgctggatcccggtcatctggcgctgacgcagatcgcgcagcatctggcgctgctgcaaaaaatggatcaccgccagcactctgctttcccggagctcccccagcaaattgccgccttgtatgagtggttttcagcccgttgtcgctggaaggaaaaggcgttaacgcaacgaggccaggcctactggtgcaggcaggtgatcagagcgagcaaatttttacccgctggcgtgctggggcgtataacgcctggtcgttgcctgggcgctgttttatcgttctcgaagagttgcgttggggggcatttggcgatgcctgtcgtctgggaagcccgcaagcggtggcgttgctgctgggtgatttgcgcgtga

SEQ ID NO: 462343 - DNA, 2229 bp, Shigella boydii
atgtacacacagaccctgtatgagttaagtcaggaggctgaacgcctgttacagctttctcgccaacagttgcagttactggaaaaaatgcctctctctgtacccggagacgatgcggcacaactggctttaccctggagtcagcctaatatcgccgaacgttacgcgatgctgaataatgagttgcgtaaaatttcccgactggaaatggtgctggcgattgtcggtactatgaaagcagggaaatcaaccaccattaatgccattgttggtacggaggttctgcctaatcgtaatcgcccaatgactgcgctgccgacgcttattcgccatacgcccgggcaaaaggaaccggtactgcatttttcacatgtcgcgccaatcgattgtttaattcaacaattacaacagcgcctgcgtgattgcgatattaagcatctgaccgatgtgctggaaatagataaagatatgcgtgcgcttatgcagcggatcgaaaatggcgtcgctttcgaaaaatattatctgggtgcccagcctatttttcattgtctgaaaagtttgaatgatttagtgcgactggcgaaggcgctggacgtcgattttcctttttctgcttacgccgccattgagcatattcccgtgattgaagtggagtttgtccatctggcggggctggaaagttatcccggtcagttgacgttactggatacccccgggccaaatgaagccgggcaaccgcatctgcaaaaaatgcttaaccagcagctggcacgcgcctcggcggtactggcggtgctggattatacgcaactgaaatcgatctccgatgaagaggtccgtgaggcgattttggcggtggggcaatcggtgccgctgtatgtgctggtcaataagttcgatcaacaggatcgtaacagtgacgacgccgaccaggtgcgggcactgatttccgggacgctgatgaaaggctgtattacgccacagcagatatttccggtgtcgtcgatgtggggctacctggcgaatcgggcgcgctatgagttagccaacaacggtaagttaccagcgccagagcaacaacgctgggtggaagattttgcccatgccgcgctcggcaggcgctggcgtcatgccgatctggcggacctcgaacatattcgtcatgctgccgatcagttgtgggaagattcgctgttcgcccagccaattcaggcgttgcttcatgccgcttacgctaacgcctcattgtatgctctgcgatctgctgcgcataaactgttgaattacgcgcagcaggcgcgggaatacctggattttcgtgcgcacgggttaaacgtcgcttgtgaacaattgcggcaaaatatccatcaggtcgaagaaagtttgcagctattgcaactcaatcaggcgcaggtgagcggcgagattaaacatgaaatcgagctggccctgacctccgccaaccactttctgcgtcaacagcaagatgcgctgaatgcgcagttagccgccttgtttcaggatgattcggagccgttaagcgagattcgtacctgctgtgagacactgttacagacggcgcagaacaccatcagtcgcgactttacgctgcgttttgccgagcttgaatccaccctttgccgggtgttaaccgatgttattcggcccattgagcaacaagtcaaaatggaattgagcgagtcagggtttcgtcctgggtttcattttcctgtttttcacggagtagttccccacgtcaacactcgccagctgttcagtgaagtcatttcgcgccaggaggcaacggacgagcagagcacgcgtttaggcgttgtgcgtgagactttttcgcgctggttgaatcagcccgactggggacggggaaatgagaaatccccgacagaaacggttgattacagtgtgttgcaacgagcattaagcgcagaagtcgatctttattgccaacaaatggctaaagttctggcagagcaggtcgatgaatctgttacggcaggcatgaatacttttttcgctgagttcgcttcatgtttgacggaattacagacgcgtttacgcgaaagcctggctctgcgtcaacaaaatgaatcggtggtcaggctgatgcagcagcaattgcagcagactgtgatgactcacggctggatttacaccgacgcccagctgttacgcgatgatattcaaacacttttcacggcagaacgatattga

SEQ ID NO: 462344 - DNA, 1149 bp, Shigella boydii
atgtttgaaattgatagcctattattaataacatccgtgataatcttgtcattattggctgtaaaattatttgatgaaatttctcctatacaacttgtcgatcatggaagaaataatcagatagatggaatgagaggattcttagccatcttcgtacttattcatcatgccgctatttggcatggctacttattaaccggggtatggaaaactccgtcatcaaacttattaacaaatttaggccaagttggtgtctcattctttttcatgatcaccggatatctatttttttcgaagattcgctcaagtgaccaggattgggtaagactatatatatcgagatttctgcgattaactcctatgtttattgtaagtttatgtttagttcttcttgttataggttttaaatcaagatggagcgtacatgtctcccctgcctctcttactgtgtcactcatgagatgggcaccattcaccgcattagggatgccaaatattaacggtgttaaggactcattcactatcaatgcagctgtaacatggaccctcgtttacgaatggtttttttatttttcattaccggttatagctgcactcttcaaaagaagagtcagcatccacatgattataataagtgttttagttctagtgattttcttatgttacccatcaaaaaaaatacatgttatttcatttttatttggactgttagcctcttattcaaataattatgtacatagagttgctaaagctaaaataacgcctattatgataattgcattactaagttacgaaatgatatattttcctacaacctacgctccactccctctcataatttgcggtgtttgctttatacttatcgcatcaggctgtgatttttatggtatattgagattaaatttaacaagaaaacttggtgaaacaacatatagtatttatcttttacatggagtattcctttattgtgtaatgacatgggtcatccctagtaattattctaattatttttttattatgttaataagcattactgctttttgcgtcacacttttatcatgcataacatttaaattaattgaactacctttcattaatataacaaaacaaaccgctatgaaaatcaggggcataataaaaaacacttag

SEQ ID NO: 462345 - DNA, 612 bp, Shigella boydii
atgaataacgcagaattaaacagtgaattaattgccactatggcaggagaaattactgtttataactttgatgtcatgagtcgggagtatatttcagcttcaactgaatatcttgctattggtgtcggcattccggcatattcctgtttagatgctccaggcgcatacaaagctggttatgcaatctgccgttctgcagattttaactcatgggaatatgtgccagaccatcgcggtgaaatcgtctttagcaccgaaacaggagaatcaaaagaaatcacagctccgggtgattaccctgataatacaaccactatcgtcccgttaacaccatacgataaatgggatggtgagaaatgggtgacggataccgaggcacaacatagcgccgcagtcgatgcagcagaagcacaacgccagtcgctgattgatactgcaatggcttccatcaatctgattcaactaaaattacaggccggacggaatctgacgcaggcagaaaccagccgacttaacacggtgctggattacattgacgcggtgacggcaacagataccagcaccgcgccggatgtcatctggcctgagttgttggatgcacataatatgtga

SEQ ID NO: 462346 - DNA, 783 bp, Shigella boydii
atgcatcgtatagacacgaaaaccgcgcagaaggataagttcggcgcgggtaagaacggttttacccgtggtaacccccagaccggcacgcctgccaccgatctggatgatgactactttgacatgttgcaggaggagctttgcagcgttgtggaggcatccggtgccagcctggagaaggggcggcatgaccagctgcttaccgcgcttcgtgcgctgctgttaagccgcaagaatccgtttggcgatatcaaatcggatggcacggtgaaaacagctctcgaaaaccttggtttgggagaaggctcagcattacccgttggtgtgcctgttccgtggccttcagccactccgccaacaggctggctgaaatgcaacggagcagctttttctgctgaagaatacccggaactggcaaaggcttatccgacaaataaattacctgatttacgcggtgagtttattcggggctgggatgacgggcgtggagtggataacggaaggggattattaacgcttcaggacggtgctattgtcagtcataaccactattggggaatctggacttcacgaactaacgaccagactctggaaagttttacaggcaccacgattttaaaacaaatcacgcccctgtctccgtccattgacttcgataattacccaattcccaacccggctattacagagggtggtgttgttgcggcaacgactaaacctgcaggtgcgaatgaaacacgcccacgaaatgtcgcttttaactatattgtgagggctgcataa

SEQ ID NO: 462347 - DNA, 585 bp, Shigella boydii
atggacgtgacaaacgatgattacatccgtctgttgtcagcactgttgccgcccggtccggcgtggtcagccagcgatccggcgattgccggtgcggcaccgtcattaacccgtgttcatcagcgtgcggatgccctgatgcaggagctggatccgcgcaccaccaccgaactgataaaccgctgggagcgtctgtgcggcctgccggatgaatgtattccggcagggacgcagacccttcgccagcgtcagcaacggctggatgcgaaggttaacctggcgggcggcatcaatgaggatttttaccttgcacagcttgctgccttgggcagaccagacgccaccatcacgcgatacgacaaaagcacgttcacctgctcatctgcctgtactgacgcggtgaatgcgccggaatggcggtattactggcaggtcaacatgccagccgccaccaacaccacctggatgacatgtggcgatccctgtgattccgcgctgcgcttctggggggacaccgttgtcgagtgtgttcttaacaaactctgcccgtcgcatacctatgtgatttttaaatatccggagtaa

SEQ ID NO: 462348 - DNA, 1059 bp, Shigella boydii
atggcggacagtgaatttcagcgcccgacgctggcagaaaatatcagtatgctccgtaacgatttattcgccaggctggacgtcagcgacacgctccggcgcatggatgaagacgtgcgggcaaaggtgtatgcggcggcgctgcatacggtctacggttacatcgattatctggcaatgaatatgctgcctgacctgtgcgatgagtcctggctggcgcgacatgctgcgatgaaacggtgtccgcgcaagggggccacggttgccagcgggtatatgcgctgggaaggtgtcagcgatggcctgaaggtgactgccgggagtgttattcagcgcgatgacctggtgcagtacacgacaactgacgatgcaatcagctccggtggtgtcctgcgcgtgccgatcgcctgctcaagtgcaggtgcggtcggtaacgctgacgacggtacggcattaatcctggtcacgccggtgaatggtctgccgtcttccggtgtggctgacaccctgacaggcggatttgatactgaagagctggaaacgtggcgcgcccgcgtcattgagcggtattactggacgccgcagggcggggctgacggggactatgtcgtctgggctaaagaagtgcctggcattacccgcgcatggacataccgacactggatgggaacggggactgtcggtgtgatgattgccagcagtgacctgattaatcccattccggaagaatcaacggaaacggcggcaagacaacatatcgggccactggccccggtggcaggctctgatttgtatgtgttcaggccggtggcacatacggtggattttcatatccgtgtgacgccggacacaccggaaatacgggctgccatcaccgcggagttgcgttcgttcctgctgcgtgatggttatccgcagggagaactgaaggtgtcacgtatcagtgaagcgatttccggtgcgaacggggaatacagccatcagttgcttgcaccggcggacaatatcaccattgcgaaaaatgaactggcggttctgggggcgatttcatggacgtga

SEQ ID NO: 462349 - DNA, 426 bp, Shigella boydii
atggaactgtggctgacggtgaacggtaaacgcacctgcgccagcgcaccgctggatccgctgacccgcgccgtggtgatttccctgttcacctggcggcgggcggagcctgatgacaatgccgacgtcccgatgggatggtggggggatacctggcctgcggtacagaatgaccgttacggctcccgactgtggttgcttcagcgcagcaaactgaccaatcagctggtgcagacggtaaggggatatatccgcgaatgcctgcaatggatgactgatgacggcgtggtgtcccgtattgatctggatatccgccgcaccgggattaatgagctgggtaacagtatcaccctcaggcgtcgtgatggaccagtaatgatttcttttgatgatctgtggagtgcgataacgcatggcggacagtga

SEQ ID NO: 462350 - DNA, 549 bp, Shigella boydii; identical to SEQ ID NO: 112082

SEQ ID NO: 462351 - DNA, 1080 bp, Shigella boydii
atgaacgacaatgtcacgctacgggtaaatggccgggagtggaatggctggacatcggtgcgcatcggtgccggtattgaacggctggcgcgggatttcagtgtggagatcactcgccaatggccgggagatgagggtatcaccacgcttcagccgcgcattaaaaacggttcaaaagtggaagtgctgattggtgatgagctggtgatcaccggctgggtggaggcgactcccgttcgttacgatgcccgttcggtcagcaccggtattgccggacgtagtctgacggctgacctgattgactgtgcagccgaaccgacacagtttaacggacgctcgctggtgcagattgcgcaggcgcttgctgcgcctttcggcattgaggtggtgaacagcggtgcgccgtcgggtgttattcctgatgttcagcctgatcacggtgaaacggtgattgaggtaatcaacaaaatactcggtcagcagcaggcgctggcttacgacgacccgcacggcaggctggtgattggcggtattggctcaacgcgggcacataccgcgctggtacttggggaaaacatcctttcctgtgatacggagaagagtatccgggagcggttttctgtttaccaggtggcggggcagcgtgccggaaacgacgatgatttcggtgaggccaccaccaccgcgctgcgggcccgcacagaggacgcatttattgcccgttaccgtccgatgtatatcaggcagacagggcaggccacgggggcaggctgtattgcgcgtgctgactttgaagcccgaaaacgggcggcgcggacggatgaaaccacctatgtggtgcagggctggcgacagggtaacggtacgctgtggcagcccaaccagcgggtgattgtcttcgatccggtctgtggtttcgacaataccgaactgcttgtctcggaagtcacgtttactcaggaccagaacggcaccctgacggaaatccgtgtcggcccgcctgacgcttatctgcctgaacccgaagcccccggcgcgcggaaaaagaaaaaagccagagtacaggaggacccgttctga

SEQ ID NO: 462352 - DNA, 1329 bp, Shigella boydii
atgacgtggaaagacagacttcaggacgcgtcatttcgcggtgtgccgtttaaggttgaagaagaaagtgcgggaaccggtcgtcgtgtggaaacgcacgaatacccgaaccgcgacaaaccctataccgaagacctggggaaaatcactttccgcccgtccatcacagcttatgtggtgggagatgactgctttgaccagcgcgatcgcctgattgacgcgctgaataaacccggtcccggcacgcttgtccatccgacttacggtgagctgaaagtctgtgttgacggggaagttcgggtcagcacatcgaagagtgaagggcgtattgtccgctttgacctgaagtttgtcgaagcgggagaactctcttaccccacttcaggtgcggcgacggcgcagacgctgatgtcatcctgttctgcactggatgactgcatcagtgacagcttcagtggtttcagtatcgatggcgtggcagattttgtgcagaacgacgtcgtcggtaatgccagcacaatgcttgggtatgtttctgatgcgatgaaagtggtggattctgccgtatcggatgccgccaggctgttgcagggggatatctcggtacttctgccgccaccatcgtcaggcaaaaatttcgttgagcaggtgcagaaaatgtggcgtaccgggaaacgcctttatggtaacgccagcgacctggtcaccatgatcaaaacgctttccggtgtcagcctcggcagcgatctgcaaccgcgcggcgtctggaaaacggacagtaaaactaccgccacggcgacgcagcagcgtaacgtggttgccagcacccttcgtacgaccgcaatcagcgaagcggcgtatgccgtcacacgattgcctgcgcccacaacttccgcggtgatgcagaatgccacagtagggcagtcaacaacacccgcgcagagcaccggctggccttctgtcacgcatccggcactgaacaatgcaccggcggtgaaaaacacggttgacctgccaacgtgggaagaactgaccgacattcgcgacacactgaatacggcaattgataaggagttgtcccgtacaaccagtgatgcgctgtttctggcgctgcgccgggtgaaagcagatctgaatgcggatatcaacacgcgccttgaacagtctgcacggatcattcagcgcacgccggatgaggttttacccgcgctggtgctggcggcgacctggtttgataacgcggcgcgtgacgcggacattattcggcgtaatgccattacgcatcccggctttgtgccggtgatccctctgaaggtgccagtgcaatga

SEQ ID NO: 462353 - DNA, 1836 bp, Shigella boydii
atggcggaatttgagcttaaggcgttgatcaccggtgtcgacaggctttctcccgcgctgtcgaaaatgcaaaagaaaatccggggatttaaacgccaggcggaagaagcgtcacagggtgggctggcgcttggtggcggactggcagcgggtctgacgctttccctgaaatcttatgccgatcaggaaaacgccgccaccgggctgaaagtcgccatgatggatgcgaacggcgaggtcggaaagagctttcaggacatcaataaactggctattggcctgggtaaccagctacccggtacaacggctgatttccagaacatgatgcagatgctggtgcgtcaggggatcccggcagaaaacattcttggcggtgtgggtaaagcgacagcttatcttgcggtacaactgaaaaaaacaccggaagcggctgctgagtttgctgcaaagatgcaggatgctaccggaacggcgtcagaagacatgatggggctgttcgacactatccagaaggcgttttatctgggtgttgacgataccaacatgttgtccttcttcactaaaaccagctctgttctgaagatggtgaacaaggacggtcttcaggctgcacagagccttgcccccatcagcgtcatgatggatcagatggggatgaacggggagtcggcaggtaacgccctgcgaaaagttatccagtccggattaagcgttaagaaaatcagggacgtcaataaaatcatggcccgccagaaactcggggtacagctcgattttactgacggcaaaggaagttttggcggtcttgataacatgttcaggcaactggcaaagctgcgaaaactgaccgacgttaagcgaacaggtgtacttaaggcaatatttggtgatgatgccgaaacccttcaggtggtcaatgcactaatcgataaaggaaaggatggctacgatcagatccagcagaagatgaataaacaggccagcctgaataaacgtgttcaggcccagcttggtacgctgtccaacctgtgggaggcaatgacggggaccgcaactaacggccttgcggctattggcggcgcattttctggtgacgccaaaaatatcacgcaatggctgggggagttaggggaaaaattcacgaagtttgcggatgaaaatccccgggttattcgcggcgtcgtcgggcttgctgccggtcttgcgattctgaaactgggattgatgggcgttggcggtgccatcagtattgtcagcaggatcatgtcgatgacgccgattggaatgattgcgacggcgatagccctggctgcgggattaattatcactaactgggatgttgtcggaccttatttcaagaagctctgggaaaccattggtccttattttgaggctggctgggaacttctgaagaaggtttttgcctggtcgccgctggggatggtaatcaataactggggaccggttgttaagtggtttcaggatatgtgggacaaactgaagccaattattgagtggtttaccgacagttccggtgacacggtcgatgccattaactctgcgcagtggggcgcgggtgcttatgatgcttatgggacgggaataccggcacggggatacacaccttatcaggcggtagatccggctcagtcaaacaacgcctccggtgccacaggcccgaatcccttcatgattaacaaagcttctgcgccaaaagttgatggtgagatcaaggtctcttttgtgaattcgcctccgggtatgcgggttatggaaacgcgatccagcggttttgatgtcagccatgatgttggctatacgcgctttggcaggtaa

SEQ ID NO: 462354 - DNA, 270 bp, Shigella boydii; identical to SEQ ID NO: 4087

SEQ ID NO: 462355 - DNA, 357 bp, Shigella boydii; identical to SEQ ID NO: 4088

SEQ ID NO: 462356 - DNA, 1014 bp, Shigella boydii
gtggtcacactgaccgcgcgtcataaggggctttgtgggaatgaaattcctgtcagcctcaattactacggctttggtgggggcgaagtgctgccagcgggcgtacagattgccgtggcgacgggtaccgccggaacgggtgctccggttctcaccggcgcggtggctgcaatggcggatgagccgtttgattatatcggcctgccgttcaacgacacggcctccgttaacacgctggtgaccgagatgaacgataccagcggtcgctggagctatgcgcgtcagctgtatggtcatgtgtatacggcaaagatcggcacgctgtcagaactggtgaccgcaggtgaccagtttaaccagcagcacattaccctggcggggtacgaaaaagagacccagacgcctgccgacgagctggcggcaagccgtaccgcccgcgcagcggtgtttatccgcaacgatccggcacgtcccacgcagaccggtgagctggtgggtatgctgcctgcgccgaaggggaaacggttcacgatgaccgaacaacagaccctgctgtctcatggcgtggcaacggcgtatgtcgaaagcggggtactacgcattcagcgtgatgtcaccacgtacaggaaaaacgcttacggggttgcggataacagttacctcgacagtgagacgctgcataccagcgcgtatgtactgcgcaaactgaaatccgtcattaccagtaagtacgggcgtcacaagcttgccagtgacggtacccgctttggtcccggtcaggcgattgtcaccccggcggtgatcaaaggggaactgctggcaacctaccgtcagcttgagcgtgcggggatcgtggaaaactacgaactgtttaagcagtacctggttgtggagcgtgatgccagcgatccgaaccgcctgaacacgctgttcccgcctgactatgttaaccagctgcgtgtctttgccgtggttaatcagttccgtcttcagtattcagaggagtctgcataa

SEQ ID NO: 462357 - DNA, 429 bp, Shigella boydii
atgacgataagctttaacaccattccgtcgaatacgctggttccgttgttttatgcggaaatggataaccaggcggcgaatactgcacaggacagcggagcatcgctgctgattggtcatgccaataacggtgcagagattgttgccaacagtctggtactgatgtcgtcggcagactatgcacgccagatttgtggtgcgggaagtcagctggcgcgtatggtcgaggcttatcgccagactgacccgtttggcgagctgtatgtgattgccgttcctgaatccacaggtgcggcggcaacagttacgctgacggtgaccggggcggcaaccgaaaccggcacggtgaatgtgtatgtaggacgtacccgcgtgcaggcaccggtgactaacggcgataacgtcacgatgattgccagcagtatctag

SEQ ID NO: 462358 - DNA, 171 bp, Shigella boydii; identical to SEQ ID NO: 4090

SEQ ID NO: 462359 - DNA, 543 bp, Shigella boydii
atgaaactgactcctgttattgctgcactgcgtgcccgttgtccgtattttgaaaaccgggttgcaggcgcggcccagttcaaaaatctgccggaggtcggaaagctgaaactcccggcggcatatgttgtaccgggtgatgattctccgggagaaaacaaaagccagaccgactactggcaggagctgaaagagggtttctccgtggttgtcatactgagtaatgggcgtgatgagcgtggtcagtttgcctcgtatgatgtggtggacgatgtccggcagatgctctttaaggctctgctgggctggaacccggaggcgtgcggtaacccgattacctatgacggcggcacgctgctggatctgaatcgtcatgagctgatttatcagttcgatttttcggtcatcagcgagctgactgaagacgatacccgccagcaggatgatctgaacagtctggatgaactgcaaacgctggcgattgatgttgattatctcgagcccggtaacgggcctgacggcgatatcgaacatcacacctaa

SEQ ID NO: 462360 - DNA, 507 bp, Shigella boydii
atggcgactcccttttttcacgttgatgttcagcagcccgccgagatgcgctttaaccgcgctcgtgtccggcgggcgtttgtcacgattgggcagcgtcatatgcgtgatgcccgtcggctggtgatgcgccgtgcgcggtcggcaccgggtgaaaaccccggttatcagaccggacgcctggctcgttcgattggttatatggtgccgagagccagtaaaaagcgagccggttttatgacacgcattgcccctaaccagcgcaacgggaaggggaaccggatgatctctggtgacttctatccggcgtttctgttttttggtgtccggggaggagcaaaacgtcgtcgtagtcatcatcgtggtgcatccggtggcagcggctggcgactggctccacgtaataacttcatggtggaaacgcttgaaaagaaccgcagctggacacgctattttctggcgcgggaattgcgtaaatcactgaagccggagcgacgacacagatga

SEQ ID NO: 462361 - DNA, 411 bp, Shigella boydii; identical to SEQ ID NO: 234581

SEQ ID NO: 462362 - DNA, 324 bp, Shigella boydii
atgcttctgacaatggaagagattaaagcccaactccggctagatgaggatttcgatgctgatgaccgccatctgcaactgctggcctgtgcggcacaaaagcggacggaaacgtatctgaaccggaagctctatgcaccggatgaaaccattccggacagcgatccggacgggctgcacctgccggatgatattcgtctggggatgctgatgcttatcagccatttttacgaaaaccgctcgtcggttacggaagtggagaaactcgacatgccgcagagttttggctggcttgtcggcccgtacaggtactttccgcaatga

SEQ ID NO: 462363 - DNA, 201 bp, Shigella boydii; identical to SEQ ID NO: 4095

SEQ ID NO: 462364 - DNA, 612 bp, Shigella boydii
atgctggatgatgcctttttcaacgtggaagcatggatcaacagcgagctggcaaccgaatttgccgaacaggaagaaattgcctttaccaccggcgatggtaccaagaagccgaaagggttcctggcgaatgaatccacggatgaaaccgataaggtccgggcgttcggcaaacttcagcatattgtatccggcgacgcgacggcggtgaccgcagacgccattatcaaactgatttacacgctgcgtaaggcacaccgcaccggcgcgaagttcatgatgaacaacaatagcctgtttgccatccgtctgctgaaagacagcgagggtaactatctgtggcgtccggggctggagctggggcagccgtcctctctggcgggttacggtatcgctgaaaacgaacagatgccggatatcgccgctgatgcgaaagccattgcatttggtaacttcaaacggggttacaccatcgttgaccgtatcggcacccgcattctgcgtgacccgtacaccaataaaccgtttgtcggtttttataccaccaaacgcaccggcggcatgctggtcgattcgcaggccatcaaactgctgaagattgcagtggcgtaa

SEQ ID NO: 462365 - DNA, 558 bp, Shigella boydii
atgtctggaaatataggggcaaatccaggttccccccaaacgaatcggaaaatcgatactggaaaaactctaactcggtggccagtttttgttgaccacttcactctgcaagaagtgaatgctgcattgttcaaagagtatttaccgttattacaacaaagtgagccgaccattaaacaaccggtaagatggaagaacgcactcggcgaactaaatgccaatctggatatcagtattgccgacccagccaaatcttcatcatccacaaacaaagatatcaaatcgctcaattttgatgtgaagttaccgcttaatgtcgtcacagaaaccgcaaaacagcttaatttatctgaaggaatggatgcggaaaaagcgcaaaagcgggctgataaacaaatcagcgggatgatgaccttaggtcagatgtttcagttaatcacgattgacaacaataccgcctcgctgcaactgcgttatacaccgggtaaagttgtttttaacggacaggagatgagcgaagaagaatttatgtctcgtgccggacgttttgttcattaa

SEQ ID NO: 462366 - DNA, 966 bp, Shigella boydii
atgagtaaacaacgcatttttatcgctggccatcgtgggatggtcggttctgccatcaagcggcagctcgaacagcgcggtgatgtggagctggtattacgtacccgcgacgagctgaacctgctggacagccgcgccgtgcatgatttctttgccagcgaacgcattgaccaggtctatctggcggcggcgaaagtgggcggcattgttgccaacaacacctatccggcggatttcatctaccagaacatgatgattgagagcaacatcattcacgccgcgcatcagaacgacgtgaacaaactgctgtttctcggatcgtcctgcatctacccgaaactggcaaaacagccgatggcagaaagcgagttattgcagagcacgctggagccgaccaacgagccttacgccattgccaaaatcgccgggatcaaactgtgcgaatcttacaatcgccagtacggacgagattaccgctcggtcatgccgaccaacctgtatggcccgcatgacaacttccacccgagtaattcgcatgtgatcccagcattgctgcgtcgcttccacgaggcgacggcacagaatgcgccggacgtggtggtgtggggcagcggtacaccgatgcgtgaattcctgcacgtcgatgatatggcggcggcgagcattcatgtgatggagctggcgcacgaagtctggctggaaaacacccagccgatgctgtcgcacattaacgtcggcacgggcgttgactgcactatccgcgagctggcgcaaaccatcgccaaagtggtgggttacaaaggtcgggtggtttttgatgccagtaaaccggatggtacgccgcgcaaactgcttgatgtgacgcgcctgcatcagcttggctggtatcacgaaatctcactggaagcggggcttgccagcacttaccagtggttccttgagaatcaagaccgctttcgggggtaa

SEQ ID NO: 462367 - DNA, 753 bp, Shigella boydii
atgaacaataacgttttgctcataggagcttccggattcgtaggaacccgactacttgaaacggcaattgctgactttaatatcaagaacctggacaaacggcagagccacttttatccagaaatcacacagattggtgatgttcgtgatcaacaggcactcgaccaggcgttagccggttttgacactgttgtactactggcagcggaacaccgcgatgacgtcagccctacttctctctattatgatgtcaacgttcagggtacccgcaatgtgctggcggccatggaaaaaaatggcgttaaaaatatcatctttaccagttccgttgctgtttatggtttgaacaaacacaaccctgacgaaaaccatccacacgaccctttcaaccactacggcaaaagtaagtggcaggcagaggaagtgctgcgtgaatggtataacaaagcaccaacagaacgttcattaaccatcatccgtcctaccgttatcttcggtgaacgcaaccgcggtaacgtctataacttgctgaaacagatcgctggcggcaagtttatgatggtgggcgcagggactaactataagtccatggcttatgttggaaacattgttgagtttatcaagtacaaactgaagaatgttgccgcaggttatgaggtttataactatgttgataagccagacctgaacatgaaccagttggttgctgaagttgaaccgccccgggtttcctggagagtgttttatctgtga

SEQ ID NO: 462368 - DNA, 630 bp, Shigella boydii
atgcgagggaaaaaacgcattgggttattgtttttgctgatagcggttgtggttggtggcggcgggttattgctggcgcaaaaagccttacataaaacgtcggatacagcattttgcctttcctgccactcgatgagtaaaccttttgaggaatatcagggaactgtccacttttcgaaccagaaagggatacgtgcggaatgtgcagattgccatattccaaagtcagggatggattatttatttgctaaattaaaagcatctaaagatatttatcatgaatttgttagcggcaaaatagacagtgacgataagttcgaaactcatcgccaggaaatggccgaaacagtatggaaagaattaaaagcaactgactctgcaacgtgccgtagttgccattcttttgatgccatggatattgcctcgcaaagtgaatctgcgcagaaaatgcataacaaagcacaaaagggcggcgaaacctgtatcgattgtcataaaggcattgcccattttccgccagaaataaaaatggatgacaacgcggcgcatgagctggaaagtcaggccgctacttcagtgactaatggcgcacatatttatcctttcaaaacttctcgcataggcgggtaa

SEQ ID NO: 462369 - DNA, 489 bp, Shigella boydii
gtgtttaaatttcttgtattaacattaggcattatctcttgccaggcttacgcagaagatacggttatagtaaacgaccatgacatttcagccatcaaagattgttggcaaaaaaattcagatgatgatactgacattaacgtgatcaaatcatgcctgcgacaagaatacaatctcgtcgatgcgcaattaaataaagcctatggtgaagcttatcgttatatagaacaagtgccacgcacaggtgtaaaaaaacctgatatcgaacaacttaacttgcttaaaaaatcacagcgagcctggctggattttagggacaaagaatgtgaattaatcctttcaaatgaggtcgttcaggatttaagtgacccttattctgaatcagaatggctctcatgtatgatcatacagaccaatacgcgaactcgccagttgcagctataccgtaactctgaagatttttatccaagccctttgacaagaggataa

SEQ ID NO: 462370 - DNA, 765 bp, Shigella boydii
ttgatctatcaacgagccgggatcgtcctggccgatcataaacgcgacatggtttacaaccgactggttcgtcgtttgcgttcgctgggactgacggatttcggtcattatctgaacttgctggaatctaatcagcacagcggtgagtggcaggcgtttatcaattcgctgaccacgaatctgacggcatttttccgtgaggcacatcatttccctctgctcgcggatcacgcacgtcgccgttctggcgagtatcgcgtatggagcgcggcggcttcaaccggcgaagagccgtacagcattgcgatgacgctggctgacacattgggcaccgcgcccggacgctggaaagtgtttgccagtgatatcgacaccgaagtgctggaaaaagccagaagcggtatttatcgccatgaagagttgaaaaacctgacgccgcagcaactgcaacggtatttcatgcgagggacgggaccgcatgaagggctggtacgcgtgcgtcaggagctggcgaactatgttgattttgccccgctgaatctactggcgaaacagtacaccgtgccggggccgtttgatgcgatcttctgtcgtaacgtcatgatctacttcgatcaaaatacccagcaggagattttgcgccgctttgttccgctccttaaacccgacggattgctgtttgcgggtcactctgaaaactttagccaccttgagcgccgcttcacgctgcgtggtcagacggtgtatgcgctaagtaaggattaa

SEQ ID NO: 462371 - DNA, 567 bp, Shigella boydii
atgagtgaaaaaagcattgttcaggaagcgcgggatattgaattgatcaccctgggcgctcgtttgcagatgctggaaagcgaaacacagttaagtcgcggacgcctgataaaactttataaagaactgcgcggaagcccaccgccgaaaggcatgctgccattctcaaccgactggtttatgacctgggaacaaaacgttcatgcttcgatgttctgtaatgcatggcagtttttactgaaaacaggtttgtgtaatggcgtcgatgcggtgatcaaagcctaccgtttataccttgaacagtgcccacaagcagaagaaggaccactgctggcattaacccgtgcctggacattggtgcggtttgttgaaagtggattactgcaactttccagctgcaactgctgcggcggcaattttattacccacgctcaccagcctgttggcagctttgcctgcagcttatgtcaaccgccatcccgggcagtaaaaagacgtaaactttcccagaatcctgccgatattatcccacaactgctggatgaacagagagtacaggctgtttaa

SEQ ID NO: 462372 - DNA, 429 bp, Shigella boydii
atgagctatagcaatattcttgtcgctgttgcggttacaccggaaagtcagcaactgctggcaaaagcggtatctatcgccaggccagtaaagggacacatcagtttaattactctcgcttccgacccggaaatgtacaatcaattagccgcgccgatgcttgaagatttacgcagcgtgatgcaagaagaaacgcaaagctttcttgataagttaattcaggatgcggggtatcccgttgacaagacgtttattgcctacggtgagttaagcgaacatattctggaagtatgtcacaaacatcatttcgatttggtgatttgcggtaatcacaatcacagtttcttttcgcgagcatcctgctcggcgaaaagagtgattgcctcaagtgaggtcgatgtgctgttagttccacttacgggtgattaa

SEQ ID NO: 462373 - DNA, 516 bp, Shigella boydii
gtgcaagcctatcaggatattcgtcatcagctcgaaaatgaagctggacgaattaatggtaaatacgggcaattaggctggacgccgctttattatttgaatcagcattttgaccgtaaattactgatgaaaatattccgctactctgacgtgggcttagtgacgccactgcgtgacgggatgaacctggtagcaaaagagtatgttgctgctcaggacccagccaacccgggcgttcttgttctttcgcaatttgcgggagcggcaaacgagttaacgtcggcgttaattgttaacccctacgatcgtgacgaagttgcagctgcgctggatcgtgcattgactatgtcgctggcggaacgtatttcccgtcatgcagaaatgctggacgttatcgtgaaaaacgatattaaccactggcaggagtgcttcattagcgacctaaagcagatagttccgcgaagcgcggaaagccagcagcgcgataaagttgctacctttccaaagcttgcgtag

SEQ ID NO: 462374 - DNA, 360 bp, Shigella boydii
atggcatgggaaacccgtggtaagcccggcggggtgatgttccacagcgatcagggcagtcattatacgagcaggcagttccggcagttattgtggcgataccagatcagacagagtatgagccggcgcggaaactgctgggataacagcccaatggaacgcttcttcaggagtctgaagaacgaatggatgccggtggtgggttacgtaagcttcagcgaggcagctcacgccataacggactatatcgttggatattacagcgcactaagaccgcacgaatataacggtgggttacccccaaacgaatcggaaaatcgatactggaaaaactctaactcggtggccagtttttgttga

SEQ ID NO: 462375 - DNA, 873 bp, Shigella boydii
atggcttccagtaaatcgctacagcaggcaattgccaatataaaaatctggcataagggtgaacagcgcgcaccgcataaaccattgttattgctatacgtattagcgggatacctgaatggacatccacgccttttcgattatggatcggaaatctacgaacctctgcacagtttactggaacgttttgggccacagcgttcacagtaccgacctgatatgccgttctggcgattacaaggcgacggattctggcaattacacaatgccgagctttgctcaacagcagggagcagccgacaaccgccagtgaaggaactgaacgaataccacgttgcaggcggtttcgatgaacagcactacgccctggtaaccggcaataaaaaactcatcaatactctagcgcaacagatactcgaagcgcacttcaccgagagtattcaggaagaaattgctgacgagctgggttttgatctccagcaaatccgtaaacagcgcgacccgttatttcgcaaaaatgtattacgcgcttataactaccagtgcgcgatatgtggctttaatatgcgccacgacgacaccaccgtcgcgctggaagcggcgcatataaaatggaaacagcacggcggtccttgtgaaattcctaatggcctggcgctttgcgcaattcaccataaagcctttgataaaggatcgattggcctggacgaaaatatgcgggtactggtatcagatgcagtaaacggcggagggagcgttgagagattattctgggattttgacgggaaaattattgcgttgccgcaggtgcgtaaaaattacccttatgaggggtttgtggagtggcatcggaatgaggtttttagggggtga

SEQ ID NO: 462376 - DNA, 981 bp, Shigella boydii
atggacgcaataatatcgcccgattattactatgttcttaccattgctggtcagtctaatgctatggcgtatggcgaaggactgccattaccggccagggaagatgcgcctcatcccagaattaaacaattagcgagatttgcgcatacgcatcccggaggcccgtcatgtcactttaacgacattattccactaactcactgcccacacgatgttcaggatatgcagggttatcaccatcctctggcaacgaatcatcaaacacagtacggcaccgttggccaggcactgcatattgcacggaaattactgtcctttattcctgataacgcaggggttctcatcgttccgtgttgccgtggcggatcggcttttaccgcgggcagcgaagggacatattcagaacggcacggagccagccatgatgcttgtcgttggggaacggatactccgctataccaggatttagtcagcagaacgcgagccgcactggcaaaaaatccgcagaacaaattcctcggcgtatgctggatgcaaggcgaatttgacttaatgaccagtgactacgcgtcacaccctcaacactttaatcatatggttgaagcctttcgtagggatctaaaacaataccattctcagcttaataatattactgacgcgccgtggttttgcggcgataccacctggtactggaaagaaaatttccctcatgcgtatgaagctatttatggcaattatcaaaataatgttttagctaatattattttcgtcgacttccagcaacaaggtgaaagaggactgacgaacgcgcctgatgaagacccggacgatttaatcatgggatattacggttcagcgtaccgctcaccggagaactggacgacggcactgcgaagcagtcatttcagcgcggcagcccgtcgggggattatttctgacaggtttgtagaagcaattttgcagttttggcgcgaaaagtga

SEQ ID NO: 462377 - DNA, 1107 bp, Shigella boydii
atgaataaaacaataacggcgcttgctatcatgatggcttcatttgccgcaaacgcgtctgtattaccggaaactcctgtgccatttaaaagtggtaccggagcaattgataacgacactgtctacattggtttaggtagcgcaggtacggcatggtacaagctggatacacaggccaaagataaaaaatggacagcgttagctgcattccctggtggaccaagagatcaagcaacctctgcatttattgatggcaatctgtatgtgtttggcggcattggcaaaaacagagagggcttgactcaggtatttaatgacgtacacaaatacaaccccaaaaccaatagctgggttaaattgatgtcgcacgcaccgatgggcatggcgggtcatgtgacttttgtacacaacggcaaggcttatgttactggcggtgttaaccagaatatcttcaatggctattttgaagatctcaacgaggctggaaaagattcaaccgctgtagataaaatcaatgcctactattttgacaaaaaagcagaagattatttcttcaataagtttctgttgtcttttgatccctcaacacagcaatggagttacgctggcgaatcgccctggtacggaacggctggtgcggcggttgtgaataaaggtgataaaacctggcttattaatggcgaagccaaacccggattgcgaacggatgccgtatttgaacttgatttcaccggtaataatttaaaatggaataagcttgctcccgtctcatcaccagatggcgtcgctggcggttttgcggggataagcaatgattctcttatatttgccggaggggccggattcaaaggttcacgagaaaattaccagcacggaaagaactatgcgcatgaaggcctgaaaaaatcatatagcactgatattcatctttggcataacgggaaatgggataaatcgggtgaattatcgcaaggtcgggcctacggagtatcattgccctggaataatagtctattgattattggcggtgaaactgcaggcggcaaagcggtgacggattcagttttgatctctgtgaaggataataaagtcacagtacaaaactaa

SEQ ID NO: 462378 - DNA, 717 bp, Shigella boydii
atgaaaaaggctaaaatactttctggcgtattattactgtgcttttcgtccccattaatttctcaggctgcgacactggacgtacgtggtggatatcgtagtggaagccacgcctatgagactcgactcaaagtcagtgagggatggcaaaatggatggtgggcaagcatggaaagtaatacctggaataccattcatgataataaaaaggaaaatgccgcactcaatgatgttcaggttgaagttaattacgcgattaaacttgatgatcaatggacggtgcgcccgggaatgttaacgcattttagcagcaacggcacacgctacggaccctacgtaaaactgtcctgggacgcgacaaaagatcttaattttggcattcgctatcgttacgactggaaagcttaccgacaacaagacttatccagtgatatgtctcgtgataacgttcatcgttgggatggatatgtcacttaccatattaatagtgatttcaccttcgcatggcaaacgacgctatacagcaaacagaacgattatcgctatgcaaaccataagaaatgggcgacggaaaatgcatttgttctacaataccatatgacgcccgatattacgccatacatagaatatgactaccttgaccgtcagggtgtttacaacggcagagataatttatcggaaaacagttatcgcattggtgtgtcatttaaactgtag

SEQ ID NO: 462379 - DNA, 603 bp, Shigella boydii
atgaagaataaggctgataacaaaaaaaggaacttcctgacccatagtgaaatcgaatcactccttaaagcagcaaataccgggcctcatgcagcacgtaattattgtctgactttgctttgttttattcatggtttccgggcgagtgaaatttgtcgattgaggatttcggatattgatcttaaggcaaagtgtatatatatccatcgattaaaaaaaggcttttcaacaacgcccccgctattgaataaagaagttcaggctttaaaaaactggttgagtatccgtacttcgtacccgcatgctgagagcgagtgggtatttttatcgcgtaaggggaatccgctttctcggcaacagttttaccatattatctcgacttccggtggtaatgccgggttgtcactggagattcatccgcacatgttacgccattcgtgtggttttgctttggcgaatatgggaatagatacgcgacttatccaggattatcttgggcatcgcaatattcgtcatactgtctggtataccgccagcaatgcagggcgtttttacggcatctgggatagagccagaggacgacagcgtcacgctgttttatag

SEQ ID NO: 462380 - DNA, 597 bp, Shigella boydii
gtgagtaaacgtcgttatcttaccggtaaagaagttcaggccatgatgcaggcggtttgttacggggcaacgggagccagagattattgtcttattctgttggcatatcggcatgggatgcgtattagtgaactgcttgatctgcattatcaggatcttgaccttaatgaaggtcgaataaatattcgccgactgaagaacggattttctaccgttcacccgttacgttttgatgagcgtgaagctgtggaacgctggaccctggaacgtgctaactggaaaggcgctgaccggaccgacgccatatttatttctcgccgcgggagtcggctttctcgccagcaggcctatcgcattattcgtgatgccggtattgaagctggaaccgtaacgcagactcatcctcatatgttaaggcatgcttgcggttatgaactggcggagcgtggtgcagatactcgtttaattcaggattatctcgggcatcgaaatattcgccatactgtacgttataccgccagtaatgctgctcgttttgccggattatgggaaagaaataatctcataaacgaaaaattaaaaagagaagaggtttga

SEQ ID NO: 462381 - DNA, 549 bp, Shigella boydii
atgaaaattaaaactctggcaatcgttgttctgtcggctctgtccctcagttctacagcggctctggccgctgccacgacggttaatggtgggaccgttcactttaaaggggaagttgttaacgccgcttgcgcagttgatgcaggctctgttgatcaaatcgttcagttaggacaggttcgtaccgcatcgctggcacaggaaggagcaaccagttctgctgtcggttttaacattcagctgaatgattgcgataccaatgttgcatctaaagccgcagttgcctttttaggtacggcgattgatgcgggtcataccaacgttctggctctgcagagttcagctgcgggtagcgcaacaaacgttggtgtacagatcctggacagaacgggtgctgcgctgacgctggatggtgcgacattcagtgagcaaacaaccctgaataacggtactaacaccattccgttccaggcgcgttattatgcaaccggtgtcgcaacccctggcgcagctaatgcggatgcgaccttcaaggttcagtatcaataa

SEQ ID NO: 462382 - DNA, 543 bp, Shigella boydii
gtgaaagaaagcaatcagcgatggtgctctgacgggttcgagttctgctgtgataacggagagagactgcgtgtcacgttcgcgctggactgctgtgatcgtgaggcactgcactgggcggtgactaccggcggcttcaacagtgaaacagtactggacgtcatgctgggtgcggtggaacaccgcttcggcaacgatcttccgtcgtctccagtggagtggctgacggataatggttcatgctaccgggctaatgaaacacgccagttcgcccggatgttgggacttgaaccgaagaacacggcggtgcggagtccggagagtaacggaatagcagagagcttcgtgaaaacgataaagcgtggctacatcagtatcatgcccaaaccagacgggttaacggcagcaaagaaccttgcagaggcgttcgagcattataacgaatggcatccgcatagtgcgctgggttatcgctcgccacgggaatatctgcggcagcgggcttgtaatgggttaagtgataacagatgtctggaaatatag

SEQ ID NO: 462383 - DNA, 1224 bp, Shigella boydii
atggcactgttttactatcaggcgctggagcgtaatggtcgcaaaaccaaaggcatgattgaggcggattccgcgcgtcatgcccgccagttgttgcgcggtaaagagcttatccccgtgcacattgaagccaggatgaatgcatcggcagggggaatgttgcagcgtcggcggcacgcacatcgtcgcgtggcggcggcagatctggcgctgttcacgcgccaactggcaacgctggtgcaggcagcaatgccgttggaaacctgcttgcaggcggtcagtgagcaaagtgaaaaactgcatgtgaagagcctcggaatggcgctgcgcagccggattcaggaaggttataccctgtcggacagcctgcgcgaacatccccgcgtctttgattccctgttttgttcgatggtcgctgccggagaaaaatccgggcatctcgacgtggtgctcaatcgcctggcagattacaccgaacagcgacagcgcctgaaatcacgtctattgcaggccatgctctatccgctggttatgctggtggtggcaacgggcgtggtcactattttgctgacggcagtggtgccgaaaatcatcgaacagtttgatcatctcggacacgcgctaccctcctccacccgtgcgcttatcgctatgagtgatgcgttacaggccagcggcgtttactggctggcgggattgctggcgcttctggtgctggggcaatggctacttaaaaatcctactatgcgcctgcgctgggataaaaccttgctgcgtctgcccgtgacgggccgtgttgcgcgcgggctgaatacggcgcgtttttcccgcacattaagcatcctcaccgccagcagtgttccgctactggaaggcattcagaccgctgccgccgtgtcggcaaatcgctatgtcgaacaacaactgctgctggcggcagatcgcgtccgcgaaggaagcagtctgcgcgccgcgctggcggagttgcgcctgttcccgccgatgatgctgtacattatcgcttccggcgaacagagaggcgaactggaaaccatgcttgagcaggccgctgttaaccaggaacgggaatttgatacccaggtggggctggcgttggggctgtttgagcctgcgctggtggtgatgatggcgggcgtggtgctgtttattgtcatcgccatcctcgagccgatgctgcaactgaataatatggttggaatgtaa

SEQ ID NO: 462384 - DNA, 1284 bp, Shigella boydii
atgacctggtttattgaccggcgtctgaacggcaaaaacaaaagcatggtgaatcgccagcgttttttacgccgttataaagcgcaaattaaacagtcgatctccgaggccatgaataagcgttcggtgactgacgtcgacagcggcgaatccatatccattcccacggaagatattagcgaaccgatgtttcatcaggggcgtggcggcctgcgccaccgcgtacatccgggcaatgaccatttcgtccagaacgaccgaattgaacgtccccagggtggcggcggaggttccggcagtggtcagggccaggccagccaggatggtgaaggtcaggatgaatttgtctttcagatttcgaaagatgagtatcttgatctgctctttgaagatttggccttaccgaatctgaaacaaaaccaacaacgccagctgaccgaatataaaacgcatcgggcgggttataccgctaacggcgttccagccaatatcagcgttgtgcgttccttgcagaactcactggcgcgacgcacagccatgacggcgggcaagcgacgggaacttcatgcgctggaagagaatttggccatcatcagcaacagtgaacctgcgcaactgctggaagaggaacgtctgcgcaaagaaattgcagaattacgtgccaaaattgaacgcgtcccttttattgacaccttcgatttacgttacaagaactacgagaagcggcccgatccctccagccaagcagtgatgttttgcctgatggacgtttccggttcaatggatcaatccactaaagatatggctaagcgtttttatattctgctgtatctgttcctcagcagaacgtataagaacgtggaagtcgtatacatccgccatcatacccaagcgaaagaagtcgatgaacatgagtttttctactcgcaggaaacaggcggcaccattgtttccagcgccctgaaactgatggatgaggtagtgaaagagcgttataacccggcacagtggaatatttacgctgcacaagcatcggacggcgataactgggccgatgactctccgctttgccatgaaatcctggcgaaaaaattattacctgttgttcgttattacagctatatcgaaattacccgtcgtgcacatcagacattgtggcgagaatatgagcatctgcaatctactttcgacaactttgcgatgcagcacatccgcgaccaggatgatatttatccggtgttccgtgaactgtttcataaacaaaatgcaacagctaaagactaa

SEQ ID NO: 462385 - DNA, 333 bp, Shigella boydii
atggaaaccgtggcttacgctgattttgcacgtctggaaatgcgcgtcggaaagattgtggaagtgaaacgccatgaaaacgccgacaagctgtacatcgtacaggttgatgtgggggaaaaaacactgcaaaccgtgaccagcctggtgccgtactacagcgaagaagagctgatggggaaaacggtggtggtcttatgcaatctgcaaaaagcgaaaatgcgtggtgaaacgtcggaatgcatgctgttgtgtgcggaaaccgatgacggcagtgaaagcgtgttgttaacgccggagcggatgatgcctgcgggcgtacgcgtcgtataa

SEQ ID NO: 462386 - DNA, 984 bp, Shigella boydii
atggcaacactaaaagacatcgcaatcgaagctggcgtatccctggcgacagtatccagggtcttaaatgacgatccgacattgaatgtgaaagaagagacgaaacatcgcattctcgagatcgccgaaaagctggagtacaagaccagtagtgcccgcaaactccagacaggtgcagtcaaccaacaccatattctggctatctacagctaccaacaggagctggagatcaacgatccttactatctggcgatccgccacggcattgaaactcagtgcgaaaagctgggcattgagctcaccaactgttatgaacacagcggattaccagacattaaaaacgtcaccggtattttaattgtcggcaaacccacgcccgcccttcgcgccgccgcctgtgcgttgaccgacaatatctgttttatcgactttcacgaacccggcagcggttacgatgcggtggatatcgatctggcacgcatcagtaaagaaatcatcgacttctatatcaatcagggcgttaatcgtattggttttattggcggtgaagatgagccaggcaaagcggatattcgtgaggtcgcctttgcggaatatggccgactgaaacaagtggtacgcgaagaggatatctggcgcggaggcttttccagttcgtcgggttatgaactggcaaaacagatgctggcgcaggaagactatccgaaggcactgtttgttgcttccgattccattgctatcggcgtactgcgggcaattcatgaacgaggcctgaacatcccacaggatatttcgcttatcagcgttaacgatatccccaccgcgcgatttacctttccgccgctctccaccgtgcgcatccattccgagatgatgggaagtcagggcgttaacctggtgtatgaaaaagcccgcgatggtcgcgcgctgccgctgttagtcttcgttcccagcaaattaaaactgcgcggcacgacccgttaa

SEQ ID NO: 462387 - DNA, 3093 bp, Shigella boydii
atgaatcgctgggaaaacattcagctcacccacgaaaaccgacttgcgccgcgtgcgtactttttttcatatgattctgttgcgcaagcgcgtacctttgcccgcgaaaccagcagcctgtttctgcccttaagcggtcagtggaatttccacttttttgaccatccgctgcaagtaccagaagccttcacctctgagttaatggctgactgggggcatattaccgtccccgccatgtggcaaatggaaggtcacggcaaactgcaatataccgacgaaggttttccgttccccatcgatgtgccgtttgtccccagcgataacccaaccggtgcctatcaacgtattttcaccctcagcgacggctggcagggtaaacagacgctgattaaatttgacggcgtcgaaacctattttgaagtctatgttaacggtcagtatgtgggtttcagcaagggcagtcgcctgaccgcagagtttgacatcagcgcgatggttaaaaccggcgacaacctgttgtgtgtgcgcgtgatgcagtgggcggactctacctacgtggaagaccaggatatgtggtggtcagcggggatcttccgcgatgtttatctggtcggaaaacacctaacgcatattaacgatttcactgtgcgtaccgactttgacgaagcctattgcgatgccacgctttcctgcgaagtggtgctgggaaatctcgccgcctcccctgtcgtcacgacgctggaatataccctgtttgatggcgaacgcgtggtgcacagcagcgccattgatcatttggcaattgaaaaactgaccagcgccagctttgcttttactgtcgaacagccgcagcaatggtcagcagaatccccttatctttaccatctggtcatgacgctgaaagacgccaacggcaacgttctggaagtggtgccacaacgcgttggcttccgtgatatcaaagtgcgcgacggtctgttctggatcaataaccgttatgtgatgctgcacggcgtcaaccgtcacgacaacgatcatcgcaaaggccgcgccgttggaatggatcgcgtcgagaaagatctccagttgatgaagcagcacaatatcaactccgtgcgtaccgctcactacccgaacgatccgcgtttttacgaactgtgtgatatctacggcctgtttgtgatggcggaaaccgacgtcgaatcgcacggctttgctaatgtcggcgatatcagccgtattaccgacgatccgcagtgggaaaaagtctacgtcgagcgcattgttcgccatatccacgcgcagaaaaaccatccgtcgatcatcatctggtcgctgggcaatgaatccggctatggctgtaacatccgcgcgatgtaccatgcggcgaaagcgctggatgacacgcgactggtgcattacgaagaagatcgcgatgctgaagtggtcgatattatttccaccatgtacacccgcgtgccgctgatgaatgagtttggtgaatacccgcatccgaagccgcgcatcatctgtgaatatgctcatgcgatggggaacggaccgggcgggctgacggagtaccagaacgtcttctataagcacgattgcattcagggtcattatgtctgggagtggtgcgaccacgggatccaggcacaggacgaccacggcaatgtctggtataaattcggcggcgactacggcgactatcccaacaactataacttctgtcttgatggtttgatctattccgatcagacgccgggaccgggcctgaaagagtacaaacaggttatcgcgccggtaaaaatccacgcgcgggatctgactcgcggcgagttgaaagtcgaaaataaactgtggtttaccacgcttgatgactacaccctgcacgcagaggtgcgcgccgaaggtgaaacgctcgcgacgcagcagattaaactgcgcgacgttgcgccgaacagcgaagcccccttgcagatcacgctgccgcagctggacgcccgcgaagcgttcctcaacattacggtgaccaaagattcccgcacccgctacagcgaagccgggcattctatcgccacttatcagttcccgctgaaggaaaacaccgcgcagccagtgcctttcgcaccaaataatgcgcgtccgctgacgctggaagacgatcgtttgagctgcaccgttcgcggctacaacttcgcgatcaccttctcaaaaatgagtggcaaaccgacatcctggcaggtaaatggcgagtcgctgctgacccgcgagccaaagatcaacttcttcaagccgatgatcgacaaccacaagcaggagtacgaagggttgtggcagccgaatcatttgcagatcatgcaggaacatctgcgcgactttgccgtagaacagagcgatggtgaagtgttgatcatcagccgcacagttattgcaccgccggtgtttgacttcgggatgcgctgtacctacatctggcgcatcgctgccgatggccaggttaacgtggcgctttccggcgagcgttacggcgactatccgcacatcattccgtgcatcggtttcaccatggggattaacggcgaatacgatcaggtggcgtattacggtcgtggaccgggcgaaaactacgccgacagccagcaggctaacatcatcgatatctggcgcagcaccgtcgatgccatgttcgagaactatcccttcccgcagaacaacggcaaccgtcagcatgtccgctggacggcactgactaaccgccacggcaacggtctgctggtggttccgcagcgcccaattaacttcagcgcctggcactatacccaggaaaacatccacgctgcccagcactgtaacgagctgcagcgcagtgatgacatcaccctgaacctcgaccaccagctacttggcctcggctccaactcctggggcagcgaggtgctggactcctggcgcgtctggttccgtgacttcagctacggctttacgttgctgccggtttctggcggagaagctaccgcgcaaagtctggcgtcgtatgagttcggcgcagggttcttttccacgaatttgcacagcgagaataagcaatga

SEQ ID NO: 462388 - DNA, 591 bp, Shigella boydii
atgaagttgattatttttattctcattgttctgattattgcagcgctacttatccggattatcctcagaagtgtaaatcagcattctcctttgctgatgcaattgcatgcggcaggtatacggaccggtgatgcagagcgaatactgtccagcggtgaatactggcaacgtcagacgacgctgctgacagaaagggaagtcagttttatgaaaggactgttcagaattgtggatatgacgcggtggtatctgtgtccgcaggtacgggtcgcggatatcgtccagctgaacgggaatatccggccacgatcacgccagtggtggcagttattcaggatggtgtctcagtggcatgttgatgtggttatcgttgagctgcgttcgttcagtattgttgcagcagtagagctggatgatgccagccatttacgaccggaacgcagacgccgggatattcttctggaagaggttctgaggcaggctggtattccgttgctcagaagccacgatgccagaaaactgctgcagatgaccggagaatggctgaatacaacaggggctgatcagcagtcaccggaacatcgtagctga

SEQ ID NO: 462389 - DNA, 210 bp, Shigella boydii
atggcaaaaacaaaacaggaatggctgtatcagttacggcgatgttcatcagtcaatacgctggaaaaaattattcataaaaacagagacagtttatcaaacagtgaacgtgaatcatttaattcagcagcagaccaccggctagcggaattaatcaccggaaagttatatgacaggataccaaaagagatatggaaatatgtaaggtaa

SEQ ID NO: 462390 - DNA, 462 bp, Shigella boydii
atgaggaaatatattccactggtattatttatcttttcatggccggtattgtctgcagatattcatggacgggttgttcgtgtactggacggtgataccatcgaggtcatggactcactgaaggcggtgcggatcaggctggtaaatattgatgcaccggaaaagaaacaggattatggccggtggtcaacagacatgatgaaatcactggttgcaggaaaaacggttaccgtcacatattttcagcgagatcgttatggtcgtattctcgggcaggtttatgcaccagacggaatgaatattaatcagtttatggtccgggccggggctgcctgggtatatgagcagtacaacacagatcccgtgctacctgtccttcagaacgaagccagacaacaaaaacgtgggctctggtcagatgctgatccggttcccccctggatatggaggcaccgtaaataa

SEQ ID NO: 462391 - DNA, 4896 bp, Shigella boydii
atgacggacggacagtcagaaacggtgctgaccggtaatctggtgatggcactgtttaaccacgacaccagtcgcgatcaggaaccacagttacacacgcatgcggtggtgactaatgttacgcagcataacggcgaatggaagacactgagcagtgacaaagtggggaaaacggggttcattgagaatgtgtacgctaatcagattgcctttggcaggctctaccgggaaaaactgaaagagcaggttgaggcgctgggctatgaaactgaagtggtcggtaagcacggtatgtgggaaatgccgggtgtaccggtggaggccttttccggacgctcacagactatccgggaggccgtcggggaagacgcctcgctgaaatcccgggatgtggcggcgctggatacgcgtaaatccaaacagcacgtcgatcctgaagtcagaatggccgagtggatgcagacgctgaaggaaaccgggttcgacatccgggcatatcgtgacgcagcggaacaacgggcatatacccgcacgcagacacccggacccgcttcacaggacgggccggatgtgcagcaggcggtgacacaggccattgccggattaagtgaacgcaaagtgcagtttatgtatacggacctgctggccaggacggtcggcatactgccgccggaaaatggtgtgattgaacgggcacgcgccggtatcgatgaggccatcagccgtgagcagcttatccccctcgatcgtgagaaggggctgttcacgtccgggattcatatgctcgatgagctgtcagtccgggcactcagtcgtgacatcatgaaacagaaccgggtgaccgtacatccggagaaaagtgtcccccggacggccggttacagctatgccgtcagtgttctggcacaggaccgtccgtcgctggccattgtgtccgggcagggcggtgcagccgggcagcgtgagcgggtggctgaactggtcatgatggcccgggagcaggggcgggaggtgcagattatcgctgctgaccgtcgctcgcagatgaacctgaagcaggatgaacggctgtccggtgaactgataaccggacgtcgtcagttgctggaaggcatggccttcacgccgggcagtaccgttatcgtcgaccagggcgaaaaactctccctgaaagagacgttaaccctgctggatggtgccgcacgtcataacgtacaggtcctgataactgacagcgggcagcgaaccggtacaggcagtgcactgatggccatgaaggatgccggggtgaacacatatcgctggcaggggggagaacagcgaccggccaccatcatcagtgaaccggaccgttatgtccgctatgcccggctggccggagattttgcggccagcgtgaaagccggagaagagagcgtggcacaggtcagcggagtacgggaacaggccatactgacacaggccattcgcagtgagctgaaaacacagggcgtgctcggacacccggaggtaaccatgaccgccctgtcaccggtctggctggacagccggagccgttatctgcgggatatgtaccgcccgggaatggtgatggagcagtggaacccggagacacgcagtcatgaccgctatgtgacagaacgtgtgacggcgcagagtcacagcctgaccctgcggaatgcgcagggcgaaacgcaggtggtgcgtatttcttccctggacagcagctggtcgctgttccggccggaaaaaatgccggtggcagacggtgagcgtctgagggtgacagggaaaattcccggactccgcgtctccggcggtgaccgcctgcaggtggcatccgtcagtgaagatgcgatgacggttgttgtgccgggacgggctgaaccggccaccctgcctgtgagcgattcaccgttcacggcactgaagctggagaacggctgggtggaaacgcccgggcattccgtcagcgacagtgcgacggtttttgcctccgtcacacagatggcaatggacaatgccaccctgaacggtctggcccgcagtggtcgtgatgtccggctgtattcctcactggatgaaacccgtactgcggaaaaacttgcccgccatccttcctttacggtggtttctgagcagataaaggcgcgtgccggtgagacattgctggaaaccgctatcagtctgcagaaagccgggcttcacacgccggcacagcaggccattcatctggcccttcctgtgctggaaagtaaaaacctggccttcagcatggtggacctgctgacagaggcgaagtcgtttgctgcagaaggaaccggttttgctgacctgggaggggaaatcaatgcgcagataaaacggggtgatttactgtatgtggatgtggcaaaaggctatggcacaggcctgctggtttcccgtgcgtcgtatgaggcagaaaagagcattcttcgccatattctcgaaggtaaggaggcggtcacgccgctgatggagagagtacctggcgaactcatggagaaactgacatcaggacagcgcgccgccgcccgtatgatactggaaacgtccgaccgtttcacggtggtgcagggctatgccggtgtgggtaagaccacacagttccgggcggtgatgtcagccgtgaacatgctgccggagagtgaacgtccccgtgtcgtggggctggggcccacacaccgtgcggtcggggagatgcgcagcgccggcgtggatgcacagacactggcgtcctttctgcatgacacgcagctgcagcagcgcagcggagaaacgccggatttcagcaacacgctgttccttctcgatgagagctctatggtgggcaataccgacatggcacgggcatacgccctgattgcggccggtggcggtcgggctgtggccagcggtgacacggaccagctgcaggccatcgcgcccggtcagcctttccgtctccagcagacgcgcagtgctgccgatgtggtcatcatgaaggagattgtgcgtcagacgccggaactgcgggaggcggtatacagcctgattaaccgggatgtggaaagggcgctgtccgggcttgagcgtgtgaaaccgtctcaggtgccacgtctggagggcgcatgggcaccggagcactccgtgacggagttcagtcacagccaggaagcgaaactggcagaagcgcagcagaaggcgatgctgaaaggcgaggcttttccggatgtccccatgacactgtatgcagccattgtccgcgactataccggcaggacaccggaagcacgggagcagacgctgattgtcacgcacctgaatgaggaccggcgcgtactgaacagcatgattcatgatgcacgggaaaaggccggagaactggggcaggtgcaggtcatggtgcctgtcctgaacacagcgaatatacgcgacggggagctgcgtcgtctctccacctgggagaataacccggatgcccttgccctggtggataatgtgtatcaccggattgccggtatcagcaaggatgacgggctgataaccctgcaggatgcggaaggtaacacgcggctgatttcgccccgggaggcggtggctgaaggcgtcacgctgtacaccccggacaccatccgggtggggaccggtgacaggatacgcttcacgaagagtgaccgggagcgcggttatgtggccaacagcgtctggacggtgacagcggtttccggtgacagtgtcacactttctgacggtcagcagacccgtgtgattcgccccggtcaggagcgggcagagcaacatattgacctggcctatgccatcaccgcccacggtgcacagggggcgagtgaaacctttgccatcgcgcttgaaggcacggaaggtaaccggaaactgatggccggctttgagtcagcctacgtggccctgtcgcgtatgaagcagcatgtgcaggtgtacaccgataaccgtcagggctggacggatgccatcaacaatgccgtacagaaaggaactgcccacgatgtgtttgagccgaaaccggaccgggaggtcatgaatgcagagcggctgttcagtacggcgcgggagctgcgggacgtggcggcaggccgtgccgttctccgtcaggcggggctggccgggggagacagtcctgcacggtttattgctccgggacgtaaatatccgcaaccgtatgtggcactgccggcgtttgaccgtaacggcaagtccgccggtatctggctgaacccgctgaccacggatgacggaaacgggctgcggggattcagcggtgaaggtcgggtaaaaggcagcggggatgcgcagttcgtggccctgcagggcagccgtaacggagaaagcctgctggctgataatatgcaggatggcgtccggattgcccgtgataatcctgacagtggtgtggtggtaagaatcgccggtgaaggccgtccgtggaatcccggtgccatcaccggtggccgcgtgtggggggatatcccggacaacagcgtccagccgggagccggaaatggcgaaccggtcatggcagaggtactggcacagcggcaggctgaagaggccatccgccgtgaaacggaacgtcgcgcagatgaaattgtccgtaaaatggcagagaacaaacctgacctgccggacggcaaaacagagcaggctgtcagggaaattgccgggcaggagcgtgaccgggctgccataactgaacgggaagccgcgctgccggagagtgtactgcgtgaaccacaacgggtgcgggaagcggtccgggaagttgcccgggaaaatttgctgcaggagcgtctgcagcagatggagcgggatatggttcgtgacctgcagaaagagaaaaccccgggcggaaactga

SEQ ID NO: 462392 - DNA, 420 bp, Shigella boydii
atgatgagtatcgcgcaggtcagatcggccggaagtgccggtaattattataccaacaaggataattactatgtgctgggcagcatgggagaacgctgggccggccagggggctgaacaactggggctgcagggcagtgtcgataaggatgtctttacccgccttctggagggcaggctgccggacggggcggatttaagccgcatgcaggatggcagtaacaggcatcgtcccggctacgacctgaccttctccgctcccaaaagtgtctccatgatggccatgctcgggggggacaaacgtcttattgaagcacataaccaggccgtggattttgctgtccgtcatcacccgtgtggaggcactggcctccacacggatgatgacggacggacagtcagaaacggtgctgaccggtaa

SEQ ID NO: 462393 - DNA, 1344 bp, Shigella boydii
atgaacgcctgggaagttaatttcgacgggctggtagggctgacgcatcattacgctggcctgtcgtttggtaatgaagcctctacccgtcaccgttttcaggtgtctaacccgcgactggcggcgaaacagggcttactgaaaatgaaaacccttgccgatgcaggattcccccaggccgtgatcccgccgcacgagcgtccgtttattccggtgctgcgtcagttgggattcagtggtagcgatgagcaggtactggaaaaagttgcacgccaggcaccgcactggctttccagcgtcagctccgcttcgccaatgtgggtagccaatgcggcaacgatcgcgccatctgccgatacgctggatggcaaagtgcatctcaccgttgccaacctgaacaataaatttcaccgttcgctggaagcgcccgtcactgaatcgctgttaaaagctatttttaacgacgaagagaaatttagcgtccattcggcgttgccgcaggtagcgttgctcggtgatgagggggcggcaaaccacaatcgtctcggcggtcattacggtgagccgggtatgcaactttttgtctacgggcgagaagaaggcaatgatacccggccttcccgttatccggcgcgacagactcgcgaagccagcgaggcggtggcaaggcttaatcaggtgaatccccaacaggtgattttcgcccagcaaaacccggacgttatcgaccagggtgtttttcataatgacgtgattgccgtaagtaaccgccaggtgctgttttgccaccaacaggcgttcgctcgccagtcacagttactggcaaacctgcgggcgcgggtgaacggttttatggcgatagaagttccggcaactcaggtttccgtgtcggatgcggtgtctacctatctgtttaacagccaactgttgagccgcgatgatggttccatgatgttggtgctgcctcaggagtgtcgggaacacgccggagtatggggttatctcaatgaactccttgccgctgacaacccgattagcgaactaaaagtctttgacttacgtgaaagcatggcgaatggcggcggcccggcgtgcctgcggttgcgggtggtattgacagaagaagaacgccgggcggtgaatccggcggtgatgatgaacgataccttgtttaatgcgctcaatgactgggtggatcgttactaccgcgatcgtcttactgctgccgatctggccgacccgcaattgctgcgcgaagggcgggaagcactggatgtattgagccaattactgaatctcggttcggtttatccgttccagcgcgagggagggggcaatggataa

SEQ ID NO: 462394 - DNA, 1479 bp, Shigella boydii
atgactttatggattaacggtgactggataacgggccagggcgcatcgcgtgtgaagcgtaatccggtatcgggcgaggtgttatggcaaggcaatgatgccgatgccgctcaggtcgaacaggcttgtcgggcagcccgtgcggcgtttccgcgctgggcgcggctctcattggctgaacgtcaggtcgttgtcgaacgctttgccggattgctggaaagcaataaagccgaattaaccgcgattattgccagagaaacgggtaagctgcgctgggaagcggcaaccgaagtgacggcgatgatcaataaaatcgcgatatcaattaaggcgtatcacgttcgtaccggcgagcagcgtagtgaaatgccggacggtgcggcgagcctgcgacatcgcccgcacggcgtgctggcggtgtttgggccgtataatttccctggtcatttgccgaacggacatatcgttccggcattgctggcaggtaacaccattatctttaaacccagcgaactgacaccgtggagtggcgaagcggtaatgcgtttatggcagcaggctggcttgccgccgggcgtgctgaacctggtgcagggcgggcgtgaaacgggtcaggcgctgagtgcgctggaggatctcgacggtttgctgtttaccggtcgcgccaataccggctaccagctgcatcgccagctctccggtcagccggagaaaattctcgcccttgagatgggcggtaataatccgctaattatcgatgaggtggcggatatcgacgcggctgtccatctgaccattcagtcggcgtttgtcacagccgggcaacgctgcacctgcgcccgccgtttattgctcaaaagcggagcgcagggcgatgcgtttcttgctcgtctggttgccgtcagccagcgattaacgccgggcaactgggatgacgaaccgcagccgtttattggcgggctgatttctgaacaggccgcacagcaggtggttactgcctggcagcaactggaagcgatgggcggacgaaccctgcttgcgccgcgcttattacaattagagacatcgttgctgacgccggggatcattgaaatgacaggcgttgctggcgtaccagatgaagaggtgttcggaccgttattgcgcgtctggcgttatgattctttcgaggaagcgattctaatggcgaataacactcgcttcggactctcttgcggtctggtttcccccgaacgggaaaaattcgatcaactgttgctggaggcgcgggcggggattgttaactggaacaaaccgcttactggtgctgccagtaccgcgccattcggcggcattggtgcatccggtaaccatcgccccagcgcctggtatgccgcagattactgcgcatggcctatggcgagcctggagtcggactcgttaactttgcccgcaacgcttaaccccgggctggatttttccgatgaggtggtgcgatga

SEQ ID NO: 462395 - DNA, 312 bp, Shigella boydii
atgcttaatggcgttaaacagcgtcacgactggtttgttgagcgtcttaataccattaatcaccgctacggtttgttcagtgaagttcgcggcttaggtttgttgattggctgtgtactgaatgccgattacgccggacaagcgaaacagatctctcaggaggcggcgaaagcaggcgttatggtactgattgcgggtggcaacgtggtgcgttttgcgcctgcgctcaatgtcagcgaagaagaggtgacgaccggactggatcgctttgcagctgcttgcgaacattttgttagccgaggttcatcatga

SEQ ID NO: 462396 - DNA, 648 bp, Shigella boydii
atgcagttttcctattttttcccgaaacagccccagatacccttctgcatcattgctggcccgtccactggcctccacaaaagcagatttccccaccaggttgacgctgcgcacgtaaaaccagaaatccttcccgggcttaatgtgcgggccggatacactccactgactgccggtccccagataacgggcagaggtttccacctgagatgtgtctgcgatttttgcctccgaaaaccagaactcaaactgtaccgtcgggtcatacaccgcaagacgcggtaccgctgttatctgaaaataccccagcgtcagttcaatggtggcgggttttgctggcgcgttaatccggaaggtggtggtggccggttcgccctgctggccataactgttaattgccctgactgtcagggtgtattccccgagcggcagaccactgaaacgatgctctgtatccgcagtgatagcggtggtcaccagacggctgtcttctccgcttccgctggtcagtcgcagactgaagcgcacccccttcaccacccgcggcgtgtcccatttcgcctgtgccagatactggccgtcagctgcgctcacctccaccgtcaggtgctgcactgccggtgggatgacgctgttcagggagcctga

SEQ ID NO: 462397 - DNA, 288 bp, Shigella boydii
atgactatgacaagactgaagatttcgaaaactctgctggctgtaatgttgacctctgccgtcgcgaccggctctgcctacgcggaaaacaacgcacagactaccaatgaaagcgcagggcaaaaagtcgatagctctatgaataaagtcggtaatttcatggatgacagcgccatcaccgcgaaagtgaaggcggcgctggtggatcatgacaacatcaagagcaccgatatctctgtcaaaaccgagcaaaaagtcgtgaccctgagcggtttcgttgaaagctag

SEQ ID NO: 462398 - DNA, 261 bp, Shigella boydii
atgcgtattgagatctgcatagccaaagagaaaatgactaaaatgccaaacggtgctgtggatgcgttaaaggaagaattaacccgacgcatcagtaagcgttatgacgatgtagaggtgatcgtaaaagccaccagcaatgatggcctttctgttacgcgcaccactgataaagatttagctaaaacttttgttcaggaaactctgaaagatacctgggagtctgctgacgagtggtttgtatactcccaccataaatga

SEQ ID NO: 462399 - DNA, 1629 bp, Shigella boydii
ttgtcgctacatgataaattattaatgcataacttcgcattagccaataaaaaaagccctgacttcatatctgaacttcctcaaattgaacctaaaccatacagcaatggacataaaattaaatggataaaccacacacttactagcactgaagttactccccctgataacctgattaaaatatgcatattgattgagtcaggggaaattgctataacatcagtaagtgatattgccaatttacttggagttcctgctggccaattactttatatactatatcgtaaaaaagataattatcgtacttttgaaatagaaaagaagaatggtaaaaaaagagtcattaatgctccttgtggcggtctatcgatactccaaacgagactaaagcccgttcttgaatatttctacaggccaaagaaatctgctcatggttttataaaaggaaagagcatcattactaatgctgggatgcatattaaaaaaaattttgtcgtaaacattgatctagaaaactatttcgaatcaataagttttgctagggtttatggaatatttaaaagtaaaccttttaatttttctcatccagcagctactgttttagctcagttatgtactcacaatggaaaattacctcaaggtgcgtgtacatcgccaatattagcaaatattgcatcagcttctctagacaaacagctcacccaatttgcaggaagaaaaaaaatatcttattctaggtatgctgacgacataactttttctttcaatcagagaaatattgatataatcaaaaaaaacgacgacggaagttatagtcttagtgaaactatagacaatattatttcaaaaaatggctttaaaataaattatgataaatttagagttcaaaccagaaatacaagacaaagtgttactggcttagtggttaatgataaagttaacattaacagaagatatataagaattacacgttcaatgattcatagatggacagatgataagctaaagtatgcacttctctttgctacagaaaaaggatatcaggcaaaggataataaccacgcaattcaaattttccgaaatcatatttatggaaggcttagctttataaaaatggttagagggaaagactatccaggatatttaaaactgatgtcatacatgagtcataacgatccattaaaaacccaagaaggattgcgagcaatgaaagaaacagaaaactttgatgtttttatatgccatgcaagcgaagacaaaaaagacattgcaattccaatatatgacgagttaactaaacttaaaatttcagccttcatagatcatgttgagataaaatggggcgactccttaattgataaaataaatgcagcactagttaaatcaaaatatgtcatcgctattttatctgctaattcagtcaataaggaatggcctcaaaaagaattaagagcagttttagccagcgaaatatcgagtggcgacgtaaaacttttgaccttattaaaaaaagaagacgaggaggtcgtaaacctatcattacctttacttagtgataagttttatatggtctatgataataatcctgaagtagtcgccaacaatattaaatcactcttacaacgataa

SEQ ID NO: 462400 - DNA, 585 bp, Shigella boydii
atggcattcagaatgagtgaacaagcacggaccataaaaatttataatctgctggccggaactaatgaatttattggtgaaggtgacgcatatattccgcctcatacaggtctgccagcaaacagtaccgatattgcaccgccagatattccggctggcttcgtggctgttttcaacagtgatgatgcatcgtggtatcttgttgaagaccatcggggtaaaacagtttatgacgtggcatcaggggacgcgttatttatttctgaactcggtccgttaccggaaaatgtcacctggttatctccggaaggggagtttcagaagtggaacggcacagcctgggtgaaggatacggaagcagaaaaactgttccggatccgggaggcggaagaaacaaaaaacagcctgatgcaggtagccagtgagcatattgcgccgcttcaggatgctgcagatctgaaaatcgcaacggaggaagaaaactcgttgctggaagcctggaaaaagtatcgggtgttgctgaaccgtgttgacacatcaactgcaccggatattgagtggcctacagtacctgttatggaataa

SEQ ID NO: 462401 - DNA, 1614 bp, Shigella boydii
atgaataactgcgagtttaacggatttgttatgcctggtggctggactgacagggggcgttatgcttatggaatgttctggcaatatcaaaacaatgaacgagccatccactcaataatgatgagtaataagggcgatgatttgcgctctgtgttctatgttgatggcgctgctttccctgtttttgcgtttatcgaagatggcctgtcaatatccgcacctggtgctgatctcgttgttaatgatacgacctataagtttggggcaacaaatccggcgactgaatgtatcgcggcggacgttatccttgattttaagagtgggcgtggtttttatgagtctcattcgttaatcgttaacgataacttgtcgtgcaaaaaactttttgccacagacgaaattgtagcgcgtggtggtaatcagattcgaatgataggtggggagtatggtgcattatggcgtaatgatggcgctaaaacttacctgctgcttaccaatcaaggtgatgtttatggtggctggaatacattaagaccgtttgctattgataacgcaaccggcgaactggttattggaaccaaactgtccgcaagtctgaacggtaacgcattgacagcaaccaagttacaaaatgcgataaatataaatggagttaaatttgatggttccagcgatataaatattaatacgttagtatccagaaaccgtgttacggcattaagtgggagcgcaaagggtacaccaggcattcagatgtatgaggcatacaacaatggctacccaacaacctatggtaatgtgcttcatctcactggtgtaaccgcagtaggagagggtgagttacttattggctggagtggaaccagcggcgatcatgctccggcatttattcgttcacgacgggatacgaccgacgcaaactggtcgccgtgggcgcagctttacacctcggctcatcctcctgcagagttttatccagtcggcgcaccaatcccgtggccatcagataccgttccgtctggttatgccctgatgcaggggcagacttttgacaaatctgcttacccgaaacttgcagttgcttatccgtcaggcgtgatccctgatatgcgtggctggacgattaagggcaagcccgccagtgatcgagccgtattgtctcaggaacaggacggcattaaatcacacacccacagcgccagcgtatccagtacggatttggggacgaaaaccacatcgtcgtttgattacggcactaaatccacgaataacactggtgcgcatacccatagtgttagcggtacggctgcttcagccggtgcacatacccattcgatgacatttgtttcaggtggttccagtggtgctccgggaagtggatcacctgattattctaaatacagtgttaacacttcttctgcaggcgctcatacgcactctgtatcgggtactgctgcaagcgcaggtgcacacgcacatactgtaggtattggtgcgcatacgcactcggttgcgattggttcacatggacacaccatcaccgttaacgctgctggtaacgcggaaaacaccgtcaaaaacatcgcatttaactatattgtgaggcttgcataa

SEQ ID NO: 462402 - DNA, 975 bp, Shigella boydii
atgaactacaccttatttttagttggcctatttattattgcagccggattaggttgtctggaaactgccgcaaacccttttgttacggtattagggccggaaagcagtggtcacttccgcttaaatcttgcgcaaacatttaactcgtttggcgcaattatcgcggttgtctttgggcaaagtcttattttgtctaacgtgccacatcaatcgcaagacgttctcgataaaatgtctccagagcaattgagtgcgtataaacacagcctggtattatcggtacagacaccttatatgatcatcgtggctatcgtgttactggtcgccctgctgatcatgctgacgaaattcccggcattgcagagtgataatcacagtgacgccaaacaaggatcgttctccgcatcgctttctcgcctggcgcgtattcgccactggcgctgggcagtattagcgcaattctgctacgttggcgcacaaacggcctgctggagctatttgattcgctacgctgtagaagaaattccaggtatgactgcaggctttgccgctaactatttaaccggaaccatggtgtgcttctttattggtcgtttcaccggtacctggctcatcagtcgcttcgcaccacacaaagtcctggccgcctacgcattaatcgctatggcactgtgcctgatctcagccttcgctggcggtcatgtgggcttaatagccctgactttatgcagcgcctttatgtcgattcagtacccaacaatcttctcgctgggcattaagaatctcggccaggacaccaaatacggttcgtccttcatcgttatgaccattattggcggcggtattgtcactccggtcatgggttttgtcagtgacgcggcgggcaacatccccactgctgaactgatccccgcactctgcttcgcggtcatctttatctttgcccgtttccgctctcaaacggcaactaactga

SEQ ID NO: 462403 - DNA, 1110 bp, Shigella boydii; identical to SEQ ID NO: 458622

SEQ ID NO: 462404 - DNA, 132 bp, Shigella boydii
atgacgctactggttctggggattatgttcgcggtgattggttacgcaatgtatgcgggagtatggcaaagcccggtgccggaggaattgtaccgacgcttaattccacaagcgccaatgattgatcactaa

SEQ ID NO: 462405 - DNA, 1230 bp, Shigella boydii
ttgccggatcacgtacacaacgcggcgcgtattcgttatccgatggtacgcgtggactggctgcgtaagcgccatctcagcgatacctcccagcgcggtgataaccgttttgtgcgcgtgagctgggatgaagccctcgacatgttctatgaagaactggaacgcgtgcagaaaactcacgggccgagtgccttgctgaccgccagtggttggcaatcgacggggatgttccataacgcttcggggatgctggcgaaagctattgccttgcatggtaatagcgttggtacgggcggagattactctaccggtgctgcgcaggtgatcctgccgcgcgtagtcggttcgatggaagtgtatgaacagcaaacctcctggccgctggtattgcagaacagcaaaaccattatgctgtggggctccgatttgctgaaaaaccagcaagcgaactggtggtgcccggatcacgatgtttatgaatattacgagcaactaaaagcgaaagtcgccgccggtgaaattgaggtcatcagcatcgatccggttgtcacatccacccatgagtatctggggcgcgagcatgtgaagcacattgcggttaacccgcaaactgacgtgccgctgcaactggcgctggcgtatacgctgtacagtgaaaacctgtacgacaaaaacttcctcgctaactactgtgtaggttttgagcagttcctgccgtatctgctgggtgagaaagacggtcagccgaaagatgccgcatgggctgaaaaactgaccggcattgatgccgaaaccattcgtgggctggcgtggcagatggcggcgaacagaacgcaaattattgctggctggtgcgtgcagcgtatgcagcacggtgaacagtgggcgtggatgattgtggttctggcggcgatgctggggcaaattggcctgccaggtggtggttttggttttggctggcactacaacggcgcaggcacgccggggcgtaaaggcgttattctgagtggtttctccggctctacgtcgattccgcctgttcacgacaacagtgactacaaaggctacagcagcaccattccgattgcccgttttatcgatgcgatcctcgaaccggggaaagtgatcaactggaacggtaaatcggtaaaactgccgccactgaaaatgtgtatttttgccggaactaacccattccatcgccatcagcagatcaaccgcattatttaa

SEQ ID NO: 462406 - DNA, 900 bp, Shigella boydii
atgaaacaggtggtgccgccgcagttcgaggcgcgcaacgactttgatattttccgcgagctgtgccgtcgctttaatcgcgaagaagcctttaccgaagggctggacgaaatgggctggctgaaacgcatctggcaggaaggtgtacaacaaggcaaaggacgcggcgttcatctgccagcgtttgatgacttctggaataacaaagagtacgtcgagtttgaccatccgcagatgtttgttcgccaccaggcattccgcgaagatccggatctcgaaccgctgggcacgccgagtggcctgattgagatctactcgaaaaccatcgccgatatgaactacgacgattgtcaggggcatccgatgtggtttgagaaaatcgaacgctcccacggtgggcccggctcgcagaagtatccgttgcatctgcaatctgtgcatccggatttccgacttcactcgcagttatgtgagtcggaaactctgcgtcagcaatatacggtagcgggtaaagagccagtattcattaacccgcaggatgccagcgcgcgcggtattcgtaacggtgatgtggtacgcgtctttaacgctcgcggtcaggtgttggcaggggcagtagtttctgaccgctatgcacccggcgtggcacgaattcacgaaggggcatggtacgatccagataaaggcggcgagcctggtgcgctgtgcaaatacggtaaccccaacgtgctgaccatcgacatcggtacttcgcagctggcgcaggcgaccagtgcgcacactacgctggtggaaattgagaagtacaatggagcagtggagcaggtgacggcgtttaacggccctgtggagatagtggcgcagtgcgaatatgttcccgcgtcgcaggtgaaatcatga

SEQ ID NO: 462407 - DNA, 243 bp, Shigella boydii
atgtcgcgtaaaggtcactgttacgacaacgctccgatggaaagcttctggggaacgctgaaaaatgagagcctgagccactatcgttttaataaccgggatgaagccatctcagtaatacgggaatacattgagattttctacaatcgtcagcgtcgtcactctcgtctggggaatatctccccggcagccttcagggaaaaatatcatcagatgactgctcaaaaaaagaacaaatggtag

SEQ ID NO: 462408 - DNA, 1005 bp, Shigella boydii
atgctaccaaaagccgcccgcattccccacgccatgacgcttcatggcgatacgcgcatcgataattactactggctgcgggacgatacgcgttctcagccagaagtcctggactacctgcaacaagaaaatagttacggtcatcgggtgatggcctcacaacaagccttgcaggatcgcatcttaaaggaaatcatcgaccgcattccgcaacgagaagtttctgcgccctacatcaaaaatggctaccgctatcggcatatttatgaaccaggctgtgaatatgctatctaccagcgtcaatcggcattcagtgaagagtgggatgagtgggaaacattgctcgatgccaataagcgcgcagctcatagtgagttttattcgatgggcggaatggcgattacgcccgataacaccattatggcgctggcagaagattttctttcccgacgccagtacggcattcgttttcgtaatctggaaactggtaactggtacccggaactgctggataacgttgaacccagctttgtctgggcaaatgactcctggactttctactatgttcgcaagcatccggtgacgctgctgccttatcaggtctggcgtcacgccatcggtacgccagcatcgcaagataaactgatctacgaagaaaaagacgatacctattacgtcagcctgcataaaacgacctcgaagcactatgtagtcattcatttggccagcgccaccaccagtgaagttcgcctgctggacgcggaaatggccgatgccgagccgtttgtttttctgccgcgccgcaaagatcacgaatacagccttgatcactaccagcatcggttttatctgcgttccaaccgccacggcaaaaactttggcttataccgtacccgcctgcgtgatgagcaacagtgggaagagttaattccgccacgcgaaaacatcatgctggaagggtttacgctgtttaccgactggctggttgaggtgtactggcaatag

SEQ ID NO: 462409 - DNA, 261 bp, Shigella boydii
atggcggttgaagttaaatacgtagtcattcgtgagggcgaagagaaaatgtcgtttaccagcaaaaaggaagccgatgcttatgacaaaatgcttgatacggcggatctgcttgacacctggctgactaattctccagtgcaaatggaagacgagcaacgtgaagccctttcgctatggctggcagaacaaaaagatgtgctgagcaccattctgaaaaccggcaaattaccgtccccacccacaggtcgtcggtgctga

SEQ ID NO: 462410 - DNA, 915 bp, Shigella boydii
atgagtcgttcacaaaatttacgccacaatgtgattaaccaggtcattgatgatatggcgcggggtcatatcccttccccacttccatcgcaaagtgcgctggcggaaatgtacaacatcagccgcaccacagtgcgtcatattctcagccatttacgcgaatgcggcgtcttgacgcaggttggaaacgactatgttattgcgcgtaaacctgaccacgatgacggtttcgcctgtactaccgcttcaatgagtgaacaaaacaaagtgtttgagcaggcttttttcacgctgataaaccagcgccagttacgcccaggggaaactttttctgaactgcaactggctcgggccgcgggtgtcagcccggtggttgtaagagaatatcttttaaaattcggccgttataatcttattcaaagcgaaaagcgcggccagtggagcatgaagcaattcgatcaatcctacgccgagcagctgtttgagctacgcgaaatgctcgaaacacattcacttcagcactttctcaacctgcctgatcatgatccccgctggctgcaggcgaaaaccatgctcgaacgtcatcggctactgcgtgacaacatcggcaatagctttcgcatgttctcgcaacttgacagagattttcactccttactgctttcagctgccgacaatatcttttttgatcaatcgcttgagatcatctcagtcatctttcattttcactatcaatgggacgaaagcgatcttaaacagcgcaatatcattgccgtcgatgagcatatgaccattctcagcgctctgatttgccgcagtgacctcgatgccacccttgcgctccgtaaccatttgaattcagctaaacaatcaatgattcgatccattaatgagaacacgcgttatgctcattaa

SEQ ID NO: 462411 - DNA, 270 bp, Shigella boydii
atgctgctgcagcatagcgatattgaaatagcctggtatgcttcgatacagcaggagccgaatggctggaagaccgtcaccacacagttctacatccaggaattcagtgagcatattgcgccacttcaggatgctgtagatctggagatcgcaacggaggaagaaaactcgttgctggaagcctggaagaagtatcgggtgttgctgaactgtgttgatacatcaactgcacctgatattgagtggccggaagaaccagacacaatgtaa

SEQ ID NO: 462412 - DNA, 249 bp, Shigella boydii
atgcgtgttgagatctgtatcgctaaagaaaaaatcactaaaatgccaaacggtgctgtggatgcgttaaaggaagaattaacccgacgcatcagtaaacgttatgacgatgtagaggtgatcgtaaaagccaccagcaacgatggcctttctgttacacgcaccgcagataaggattctgcaaaaacatttgttcaggagactctgaaagatacctgggagtctgctgacgagtggtttgttcactaa

SEQ ID NO: 462413 - DNA, 2001 bp, Shigella boydii
atgaattcactacgtccggaattattagaactgacaccgcaggccctgacggcgttaagcaatgccggttttgttaagcgcagtcttaaggaactggaaaatggcaacgtcccggagatcagccatgagaacggcgctttaatcgccaccttcagtgacggtgtccgtacccagctggcgaacggccaggcactgaaagaggctcagtgcagctgcggggccagcggtatgtgccgtcatcgcgtgatgctggtgttaagttatcaacgactttgtgctaccgcccagcctacgggaaaagaagaggaatgggatccggcaatctggctggaagaactggctacccttcccgatgccacccgcaaacgcgcacaggcgctggtcgctaaaggcatcaccattgagttgttctgtgcgccgggtgaaattccctctgcccgcttaccgatgagcgatgtgcgtttttattcccgcagcagtattcgtttcgcccgttgtgattgtattgaaggcacactttgcgaacatgtcgtactggcagtacaggcctttgtccaggcaaaagcgcagcaagcggaattgactcatttaatctggcagatgcgcagcgaacacgtcacatcatctgacgatccgtttgccagcgaagaaggcaaaacgtgtcgtcaatatgttcaacaactaagccaggcattatggctgagcggcatcagccagccgcttattcactacgaggccgctttcagccgcgcgcagcaagcagcggaacgctgcagctggcgatgggtgagtgaatcgctacggcaactgcgcgccagcgttgatgccttccacgcccgcgccagccactatcatgccggagaatgcttacgtcagcttgcggcattaaacagtcgattaaactgcgcacaagagatggcccggcgcgacagtgttggtgaagttcctcctgtgccgtggcgcacggtcgttggctctggcattgccggagaagcaaagcttgatcatctgcggctggtgtctttaggtatgcgttgctggcaggatattgagcattatggtttacgcatctggtttaccgatcccgacaccggcagtattttgcatctttcgcgtagttggccgcgaagtgaacaggaaaactcaccggcagctacgcgtcggctgtttagttttcaggctggcgcactggcgggtgggcaaattgtttcacaagcagcaaaacgcagtgccgatggcgagctgctgttagctacccgcaaccgcttaagcagcgttgtgccgctgtcgccagacgcctggcaaatgttgagcgcgccgttacgccagccgggcattgtggctttgcgggaatatttacgccagcgtccccccgcctgcatacggcctcttaatcaggtggataacttatttattctgccggtcgctgagtgtatttcactcggttgggacagcggccgccagacgctggatgcgcaggtaatcagcggcgaaggtgaagataatctgctgacgttatcccttccggcatctgcctgttctccttttgccgttgaacgcatggcggcgcttttgcaacaaacagacgaccccgtgagtctggtttctggctttgtcagctttgtagaggggcaattgacactggaaccacgggtgatgatgacaaaaacccgtgcctgggcgctggacgcggaaactgcgcctgtggcaccgctaccttctgccagcgttttgcctgtgccgtctaccgctcatcagttgctgatgcgctgccaggcgttacttattcaactgctccataacggctggcgctatcaggaacagagcgctattagtcaggcagagttgctggcgaatgacctcaccgcggtgggtttttatcggctggcacatgtgttggtacaatttcgtaatacagaaagcgaggcacgggtagaagcaatgaataacggtgttttgctttgcgaacaattattccccatgcttcagcaacaaggatga

SEQ ID NO: 462414 - DNA, 1137 bp, Shigella boydii
atgtctgaactgaacgatcttctgaccacccgtgagctacaacgctggcgattaattcttggcgaagcggcagaaacgacgctttgtgggctggatgacaacgcccggcagatagatcacgcgctggagtggctgtatgggcgcgatcctgaacggctccagcgtggtgaacgctctggtggattaggtggctcaaatctcaccactcctgagtggttcaacagtatccacacgctgtttccgcaacaggtgattgagcggctggaaagcgatgccgtactgcgctacggcattgaagatgtggtgacaaatctcgacgtgctggaacgtatgcagccttccgaaagcctgctacgcgccgttttgcacaccaaacatctgatgaaccccgaagtactggctgccgcccgcaggattgtgcgccaggttgttgaagaaattatggcgcgactggcaaaggaagttcgtcaggctttttctggtgtccgcgatcgccgtcgccgctcatttattccactggcgcgaaactttgatttcaaaagtactctgcgcgccaacctgcaacactggcacccgcaacacggcaagttgtatatcgaatccccccgctttaacagccgcattaaacgccaaagcgaacaatggcaactggtcttactggttgatcaaagcggctcgatggtcgattcggtgatcccctctgcggtgatggcggcctgtttgtggcagttacccggcattcgtacccatctggtggcgtttgacacaagcgtcgttgatctcacggcagacgttgccgatccggtagagttattaatgaaagtacagttgggcggcgggaccaatatcgccagtgccgtggagtatggtcggcaacttattgaacaaccagcgaaaagcgtcattatcctcgtgagcgatttttacgaagggggttcatcatcattactgacgcatcaggtgaaaaagtgtgtccagagcggcatcaaagtgctgggactggcagcgctcgatagcacagcaacaccttgctatgaccgcgatacggcccaggcgctggttaatgtcggcgcacaaatagccgccatgacaccgggcgagctggcatcatggcttgcggagaatcttcagtcatga

SEQ ID NO: 462415 - DNA, 2280 bp, Shigella boydii
atgagcgagccgttaattgtcggcatccggcatcatagtccggcctgcgcccggctggtgaaatcgttaatcgaaagccagcggccacgatacgtattgattgaaggcccggctgattttaatgaccgggtagacgaactgtttttagcccaccagcttccggtagctatttacagttattgccagtatcaggacggtgcagcccccgggcgtggtgcctggacgccatttgctgaattttcgccggagtggcaggcgctacaagccgcacgtcgtattcaggcacaaacttacttcatcgatttgccttgctgggcgcagagtgaagaagtggacgattcgcctgatacgcaagaggaaagccaggccttgctgctgcgtgccacccgcatggataacagcgacaccctgtgggatcacttgttcgaagatgaaagccagcaaattgcattaccctctgcgctggcgcactattttgcccaactgcggggcgatttccccggcgatgcactcaatcgtcagcgcgaagcctttatggctcgctggattgcatgggcggtgcagcgaaataatggcgacgtgttagtcgtctgcggtggctggcacgctcctgcactggcaaaaatgtggcgcgaatgtccgcaggaaattaacaagccagaattgccctcgctggcaaatgccgttacaggttgttatctcaccccctacagtgaaaagcaccttgatgtgctggcaggatacctttccggtatgcctgccccggtctggcaaaactggtgctggcagtggggcttacagcaggccggtgaacaactgctaaaaacggttctcacccgtttgcgccagcacaacttgcctgcttcgatcgcggatatggctgccgcacatctgcatgcaatggcactggcacagttgcgcggtcatacactaccgttacgcactgactggctggatgccatagcaggctcgctgattaaagaagccctgaatgcaccgttgccgtggagctatcgcggcgttattcatcccgataccgatccgattctgctaacgttgatagacacattagcgggtgacggattcggtaaacttgccccttccacgccacaaccgcctctgccaaaagatgtcacctgcgaactggaacgtaccgcaatctctcttccggcggagcttaccttaaatcgctttacccccgatgggctggcgcaaagtcaggtgttacatcggctggcaatactggagatccctgggattgtacgccagcagggaagtacactgacacttgcaggcaacggtgaagaacactggaaattaacccgcccgcttagccagcatgcggcattgattgaggccgcatgctttggtgcaacacttcaggaagccgcacgccataaattagaagccgatatgctggacgcgggtggcatcggcagtatcaccacatgtcttagccaggcggcgttagcgggtctggcgtccttcagtcaacaattactggagcaactcacattattaatcgcccaggaaaatcaatttgccgaaatgggccaggcgctggaagtgctatatgccttatggcggctggatgaaattagcggtatgcaaggcgcgcagatattacaaacgacgttatgcgcggctatcgatcgcacgctgtggctgtgtgaatctaacggcagaccggatgaaaaggagtttcacgctcacctgcatagctggcaagcgctttgccatattctgcgcgatctacatagcggcgttaatttatccggcgtttcgctttctgcggcggtagccttactggagcgacgcagtcaggcgattcatgccccggcgctggatcgcggcgcggctcttggcgcactaatgcgtctggaacatcccaacgccagtgccgaagcggcgctgacgatgctggcgcagttatccccggcacaatccggcgaggcgctgcacggtttgctggcattagcccgtcatcaactggcctgtcaacctgcatttatcgccggtttcagcagccatttgaatcaactgagtgatgccaattttatcaatgccctgcccgatttacgcgcggtgatggcctggctaccgccacgagaacgcgggacgctggcgcatcaggtgcttgagcattatcaactggcgcaacttcccgtttcggcactgcaaatgccgttgcattgtccaccgcaagccattgcacatcatcaacaactcgaacagcaggcactggcatcgctgcaacactggggagttttccatgtctga

SEQ ID NO: 462416 - DNA, 1089 bp, Shigella boydii
atgtcaccgcagaataatcatctgcagcgtccgcctgctgctgtgttatacgccgatgaactggcaaaattaaaacaaaatgataacgcaccttgcccgcccggttggcagttaagtttgcctgcggcccgtgcttttatccttggcgatagcgcgcaaaatattagccgtaaagtggtgattagtccctccgctgtcgaacgtatgttagtcactcttgccaccggacgcggtttgatgttggtgggggaacctggcaccgcaaaatctctcctgtctgaattactggcaaccgctattagcggcgatgccgggttaaccatccagggcggcgcatctactaccgaagatcaaatcaagtacggctggaactacgccctgcttatcaatcatggtccatcaacggaagcgctggtccctgccccgctttaccagggaatgcgcgacggcaaaatcgtccgttttgaagagataacgcgtacaccgctggaagtgcaagactgtctgttaggtatgctttctgacagggtgatgacggtgccggaactcactggtgaagccagtcagctctatgcgcgagaaggctttaatattattgccactgccaatacccgcgatcgcggcgtcaatgaaatgagtgctgcgctaaagcgtcgcttcgattttgaaactgtctttccgattatggatttcgcccaggagctggaactggtcgccagtgcttcggcgcgtttgctggctcatagcggtattccgcataaagtgcctgacgcggtactggagttactggtccgcaccttccgcgatctgcgtgccaacggcgaaaagaaaacgtcaatggatacactaacagcgattatgtccaccgctgaagccgtgaacgtggcccacgccgtaggcgtccgcgcctggtttttagcgaatcgcgcaggtgagccagccgacctggtggactgcattgccggaaccatcgtcaaagataacgaagaagatcgcgctcgtctgcgccgttacttcgaacaacgagtcgccacacataaagaagctcactggcaggcttattatcaagcccgccaccgcctgccgtga

SEQ ID NO: 462417 - DNA, 1524 bp, Shigella boydii
ttgagtagagtcgaaatatctatttttaataaaaaagagtgtaaggatataatttcactgaatggttatattggttttttgaattcagaggaggaacgaaatggaaaagcagaactgataaggcgagtgaagaaaaaggaagaatctaatttaaaggatgaggggtttaatgattattttgtcatgcttcaggatatgaataattatcgaagactagtaagattttttggggtgaatgaatccaaatatatattaaatttcattaatgatgttgtttctaagaaaagtgacgctagtgcagagaatttgaggaaaaaagcaatctcttctgatatctttaataaatctttcattagagagtctgagtcgtattttactttcaaaaatgcaggaacagttctttccggtattcaatatgaggagttgggtaatttatcacagcacatcaagattagctattcgaataaagttaatgaagaagatgtatcttatgtttttaattttgatcacgagcatgatttaccaaaaagaatttccataattataggcgagaatggtgtaggaaaaagccaaacgcttagagaaatcgcattggctgcgattaaaggaaaggataatttggtggctgtagttgattctaacggtgtgagcattgaagaacgaattcaaattagtaggctcattgctttttctccaacaaatgaaagtaagtgttcatttccaaccgataaaagaataaaatcattgatatggtacaaaagattgactttaaatcgtgaatcaaaatccaaattaaacttgaatgatttaatagtgcaactagcgaggagtaacgacgctatcggctataatcaaaggtggaatatatttgttgatgcactgagtgttctaaatagtaacaacgatttagtaatcaaatgtggcggtgaaaattcaccatttgttaaattaaatgagcttaattctcgaggcgaagaatctagactatcattatattctgaaattattctctctggcgagcctttgaggcttattgaaaataaatgttaccctttgagtagtggggaaatatcgtttattaagttttgtgtacaagtctgtttgtatattgagaatgggactcttctattaatagatgagccagaaacacatctccatccttcatttattaataaatttatggcattgcttgataatttattagaaaagacaggctcttcagctatcatagcaacgcattcggtttatcttgttcgggaggtttttaaggagcaagtgacaatactcagaagacgagatgatggggtaattgttagcgaaaaaccgagattgagtacttttggggcgaatataggaaatatctcatattttgttttcggtgagagtgaaccaactcaaattttaaataaagtaaaaaacaatataattgcaaagaatatgtcttgggatgatgttgaatctaaatatagcgaggacttatcacttaatgtattaactgcgttgagaaatgaaatgggcaattga

SEQ ID NO: 462418 - DNA, 882 bp, Shigella boydii
atgaaatgggcaattgaaatgaataaattaaaaagacctgtttttaaagattattctgcatttaaaaaactatctgcaaataagagattaaaacatcattctgttctgaatggacaggatacatttatacttaatgcatatagatcgtacataaagaataaagggtatcttaatgtcaattcttgtggcgtattgagtaacaatattgctgaagctttgagatattattataacaatcccgcaaagtgtttatctataattgatgatataagagcagctaattctaactctctatgtccaatgtgtggttcaatgcatagcgggactttggatcatgttttacccaaggaaaactatccagaattttctttattcactaagaatttggttcctgcttgcaaatgtaatactttcaaaagtactactatagctaattctgcaggccatcggatgctgcatccatattttgataatatattaaaacaaagattaatatgtgctaatttttctaaattagggcgaacacctacaattgatgtaaaaatcataattgacccaatgtcaccagaatataacaatgttaagtatcatcttgataatgttgttatcaagaataatattaaggggtatttgtctgaacaatgggagtcgttttacttatatcctgagcttgttattagaggactgaataagagtctttctacttatagcgatgtatatgagttgttgactcgcgagttgttgctgttggatgaaaaacataaaggtaaaaataattggaattcggtttttgtagctgggttaattcgacctgatgtgattaggtggatactctgtgaattacatttaggtaacagaagtccagacggtcgtctcatatga

SEQ ID NO: 462419 - DNA, 402 bp, Shigella boydii
atgtacatgaccgatgccgcgcaaaaccaggaggatgtgaacaacctccgcaatgcgatgaaaagcgccaaaggaccaggtaacttccgcaatctgtttatgtactcgcctaacggcaaaaaggacgggcttcagatcatcccgttgtcagaagtcgcggcgaaggatgagtttctgaacatcaagaacgtgagccgggatgacatgatggcggcgcatcgtgtgccaccgcaaatgatggggattatgcctaataatgtcggggggtttggggatgtggagaaggcgagcctggagtttgtacgtaacgagttaataccgttacaaaaaagaatgatggaaataaataaattggtaagtgagaacattgttaaatttgatagttataaactagctacttaa

SEQ ID NO: 462420 - DNA, 597 bp, Shigella boydii
atgggaaagagtaagaagaaccgcgctgcggcgacgaaacagacccagcataaaaaccagacttcagccgaagcattcagcttcggcgatcccgttccggttctggaccgccgtgaactactggactatgtggaatgcgtacagacagatcgctggtatgagccgccagtgagttttgacggactggcgcgcaccttccgcgccgccgtgcatcacagttcaccaattgcggtgaaatgcaacattctgatcagtacctacatccctcacccgctgctcagccagcaggctttttcacgttttgtgcaggattatctggtatttggtaacgcttacctggagaaacgcacaaaccggttcggagaggtcatcgctcttgagcctgctctggcaaaatacacccgacgcggattagacctagatacctactggtttgtgcaatacggcatgaccacgcagccgtatcagttcacgaaaggaagcatctttcatctgatggaaccggacatcaaccaagagatctacggcctgccaggttacctttctgccattccgtcagccctgctcaacgagtccgccacgctgttccgccgatag

SEQ ID NO: 462421 - DNA, 1767 bp, Shigella boydii
atgaacaccacactgacacccgcagatctcgatccccgtcggcaggccatgctgctgtactttcagggataccgcgtagcccgcattgctgaaatgctgggcgagaaagttgcaaccgttcacagctggaaaaaacgcgacaagtggggtgactatgggcctctggatcagatgcagctcaccaccgccgcacgctactgccagctcatcatgaaggagcacaaagaagggaaagatttcaaagagattgacctgctggcgcgccagtctgagcgccacgcgcggatcggcaagtttaacaatggcggcaacgaagccgacttaaaccctaacgtcgccaaccgcaacaaaggcccacgccgtcagcctgaaaagaatgttttcaccgatgaccagattgagaagctggaaaaaattttccattcctccatgttcaactaccagcgccactggtgggaagccggaaaaaccaaccgcatccgcaacctgctgaagtcacgccagatcggcgcgaccttctattttgcccgtgaagccctgattgacgccctgcttaccggacgtaaccagattttcctttctgccagtaaggcacaggcccacgtcttcaaacagtacatcatcgactttgccaaagaagtggaggtggagctgaaaggcgatccgatggtgcttcccaacggggccacactgtatttcctcggcaccaatgcccgcactgcccagagttatcacggtaacctgtatctggatgaatatttctggataccgaaatttcaggagctacgcaaagtggcttccggtatggctattcacaagaaatggcggcagacctatttttccacaccatccagtctgacccacagtgcttatccgttctggtccggtgcgctgttcaaccgtgggcgcaacaaagctgacaaggtggacatcgacctgtcccacagcaatctggcccccggccggctgtgcgcagacgggcaataccgccagatagtcaccgtggaagatgcggtgcgcggcgcctgtaacctgttcgaccttgaccagttgcgcatggagtacagccctgacgaataccagaacctgctgatgtgcgagttcgtggacgatctcgcgtccgtgttcccgctcagcgaattgcaggcgtgcatggtggacagctgggaagtctggaccgactttcatgcactggccctgcgcccgtttggctggcgcgaagtgtggatcggttatgacccggcaaaaggtacgcagaacggcgacagcgccggatgcgtggtggtggcaccgccagccgtgccaggcggtaagttccgcattcttgagcgtcaccagtggcgcggaatggactttcgcgcccaggctgacgccatcaaaaaactgactgaacagtacaacgtgacctatatcggcatcgactcaaccggcgttggtcacggggtttacgagaacgtgaaagcgttttttcctgccgtccgggagtttgtctacaaccccaacgttaaaaacgccctggtactcaaggcctacgacattatcagccaccgccgtcttgagtttgacgccgggcacaccgacattgcgcagtcattcatggcaatccgtcgcgccaccaccgccagcggcaaccgcccgacctatgaagccagccgcagcgaagaagccagccatgccgatctggcctgggcaacaatgcacgcactgtttaacgaaccgctgcagggcgagtccgccaataccagcaatattgtggagattttttga

SEQ ID NO: 462422 - DNA, 834 bp, Shigella boydii
atgacagtgaaagcaaagcgttttcgcatcggggtggaaggtgccaccaccgacggacgcgaaatccagcgtgaatggctggaacagatggcagccagctataacccggcggtgtataccgcgctgattaaccttgagcacatcaagtcttatctgccggacagcacctttaaccgctacggcaaggtgacggcgctgtttgctgaagaaatcacggaaggtccgctggcaggcaagatggcgctgtatgctgacgttgagccaacggagtccctggtggaactggtgaaaaaaggccagaaattattcacctttatggaagtcagcctgaagttcgctgatacgggcaaagcctacctagtcggcctggctgccactgatgaccctgccagtctgggcactgaaatgctgacattcagcgccagtgcagcccataacccgctggcaaaccgcaagcagaatcccgccaatctctttaccgccgcagaggaaacggtgatcgaactggaagaagtccaggacgacaaaccgtccctgtttgcccgcgtcacggcgctgtttaccaaaaaagagcagtccgatgacgcccggttctctgatgtgcataaggccgtggagctggtcgccactgagcagcagaacctgagcgcacgcaccgaaaaatccctgtctgagcaggaagaacgcctgtctgagctggagactgccctgcaggcacagcaaaccgcctttaacgaactggtggacaagctgagtcatgaagacagccgccaggactaccgccagcgtgcaacaggcggtaacgcccccgctgacactctgaccaattgctga

SEQ ID NO: 462423 - DNA, 1059 bp, Shigella boydii
atgaagaagaatacccgctttgcttttaacgcttacctgcagcaactggcgcgtctgaacggtgtggcagttgaagaactgtccagcaagttcaccgtagagccgtccgtgcagcagacgctggaagaccagatccagcagtccgccgctttcctgactctgattaacgtcacgccagtgactgagcagtccggtcagctgctggggttgggagttggcagcaccattgccggaaccactgataccactgcgaaagagcgtgaacctgtcgatccgacgctgatggtcgatgtggaatataaatgcgagcagaccaactttgacacggtgctgacctacgcgaagctggacctgtgggcgaagtttcaggattttcaggtgcgtatccgtgacgccatcgtgaaacgtcaggcactggaccgcatcatgatcggctttaatggcgtgaagcgtgcgaaaacctccaaccgtagcgaaaacccgctgctgcaggatgtgaataaaggctggctgcagaaaatccgtgaggatgcaccggatcacgtcatgggcagcaccaccacgggcggtgaaaccacaccgggcgcagtgaaagtcgggaaaggtggcgaatatgccaacctggacgccgtggtgatggatgccgtcaatgagcttatcgacgtggtctaccaggacgatgacgatctggtggtgatttgcggtcgtgaactgctgtctgacaagtatttcccgctggtcaacaaagagcaggaaaacagtgaaaaactggctgccgatatgatcatcagtcagaaacgcatgggtggcctgcaggccgtgcgtgcgccgttcttcccgccgaatgcgctgctgatcacccgtctggataacctgtccatctactggcaggaagacacccgccgccgttcagttatcgacaacccgaaacgtgaccggattgaaaactttgaatccgttaacgaagcctatgtggttgaggactaccgctgcgccgcactggtggaaaacatccagattagtgatttcagcgccgccgcagccgaaaccggagcgtaa

SEQ ID NO: 462424 - DNA, 651 bp, Shigella boydii
atgagcctgagtcccgcacggcagcatcgcctgcgcgttcaggctgaacaggccgtccgtgagggtggcagtgttcgccacgcatcgggctatgacctgatgctgctgcaactggcggaagaccgccgccgtctcaagggcgttcagtccacggtcaaaaaagcggaaatcaaagtggagctgctgccgaagtacgccgcctgggcggagggtgtcctggctgccggaggcgctcaacaggatgacgtgctgatgtacgtgatgttgtggcgcattgatgccggagattatgccggggcgctggagatcgggcgtcatgccctgcgtcatggatgggtgatgccgctgggcaaccgcaacgtgcagaccgtgctgacagaggaaatggcagatgcagcgcagagcgcaatgcttgccgccaccggctttgatgccgatctgttgctgcagacgctggagctgacagacggtctggatatgccggaccagtcacgggcacgtctgcataaagcgattggcgcggtcctgagtgaaagcaatccggcttccgcccttaatcatctcaaccatgcgttacagctcgatccccgctgtggcgtgaaaaaagacaaacagcagctggagcgcagactgcgcaatgacagccgctga

SEQ ID NO: 462425 - DNA, 465 bp, Shigella boydii
atgaagtttgttgcgccagaacaggcaccggaacaggcggaaatcattagaaatacgccgttctggcctgatgtggacctgtcggagtttcgcagtgtcatgcgcactgacggcacggtgacgcagccgcgtttaaagcaggttgcactgtcggcaatttcggaggttaacgcagagctgtatgagtttcgcagacgccagcagatgctggggtatgcgtcgctggctgaggttccggcggaacagctggacgggaaaagtgagcgcattcagcactatttcaacgcggtttactgctgggctcgcgccatgctcaacgaacgtttccaggactatgacgccacggcatccggtgcgaagcggggcgaagaactggcggaagcaagcggtgatttgtggcgtgacgcccgctgggccatcagccgggtgcaggacgcgccgcactgcacagtggagcttatctga

SEQ ID NO: 462426 - DNA, 204 bp, Shigella boydii; identical to SEQ ID NO: 377264

SEQ ID NO: 462427 - DNA, 216 bp, Shigella boydii; identical to SEQ ID NO: 377144

SEQ ID NO: 462428 - DNA, 513 bp, Shigella boydii
atgaatccatcaatcgttaaacgctgccttgtcggggccgtgctggctattgctgccacgctgccgggttttcagcagcttcacacctccgtggagggactgaaactgattgccgattacgaaggttgtcgtctgcagccgtatcagtgcagcgcgggtgtctggaccgacggtattggtaatacgtcgggcgtcattcccggcaaaaccattacggagcgacaggcagcagaagggctgatctccaacgtgctgcgtgtggagcgggcgctggaaaagtgtgtgaagcaacagccgccgcagaaggtgtatgacgctgcggtgtcgtttgccttcaacgtgggtacgggcaatgcctgcagttccacgctggtgaaattgctcaatcagcggcgctgggcggatgcgtgccgacagttgccgcgctgggtttatgtgaaaggtgtttttaatcaggggctggataaccgccgtgcgcgggagatggcctggtgtttacagggagcaaactga

SEQ ID NO: 462429 - DNA, 378 bp, Shigella boydii
atgaaaaagaaattaatcagcgggctgtttctgatgttatggatggcgctgttaatcgcagcaatggtgtatccgcaggggatttttccggtactggcagcgtccggcgtttgggtagcctgtttactgacatgggcggtaattccggtagcactggcttcgttaattaagaatggcccgctctggcaggagttgagggcatctttactgaagacaattacccgaaaagaaaacgtatttatcagctgggtgatacgattgctgattgtcgtcagtctcgcctggacggggtgggccattaccctggtcttttatctgctgaccgttattgccttctggatcacccataatcagatggcgcaacaggtagccgcatga

SEQ ID NO: 462430 - DNA, 429 bp, Shigella boydii
atgaaccggttgctgctggttgtgctggcgttattattggcggcgctgggctggcagacgtggcggctggctgatgccagccagaccatcagcacgcaggcagacgagctgcagagcaaaagccaggcactggcaaagagcaacagccagcttatcagcctgtccattctgactgaaaccaataaccgggagcaggcgcggctctatgccgaagcagaacagaccagtgtactgctgagacaacgacaacgccggattgaggaactgaaacgtgagaacgaggatttacgtcgctgggctgatactcctttgcctgctgacattatccggctgcgggaacgtccggcactcaccggaggtgcagcttaccgtcagtggttgtccgcgagtgacgccgtgtcggctggagcaggcagcgccgcgcactaa

SEQ ID NO: 462431 - DNA, 432 bp, Shigella boydii
gtgaacaaaccacaatccctgcgccacgccctcaataaagcagtgccttatgtccgtaataacccggacaaactgcatctgtttgtggataacggttcgctggttgcctccggggctagctccatgtcatgggagtaccgctacaccctgaacgtggtgattgaagatttcagcggcgaccagaatctgctgatggccccggttttgctgtggctgcgggataaccagcccgatgcgatcaataacccggcgttacgggaaaagctattcacctttgaggtggatattctgcgcaacgatgtctgtgatatcagccttaacctgcaactgacggagcgtgtgctggtcagcactgacggcagtgtgtcgaacgttgaagcggtagcggaacctgatgaacctgaagaaatgtggacggtgaaacgtggctga

SEQ ID NO: 462432 - DNA, 444 bp, Shigella boydii
gtggctgaattgcagaaggtggacgactggctgagtgcattattggcgaatctggagccagccgcaagaagccgcatgatgcgccagctggcgcaggaactgcgccggacacagcagcagaacatcaggatgcagcgcaatcctgatggcagcagttatgagccgcgcagggtaacagcacgcagcaaaaaggggtgcatcaaacgtcagatgtttacaaagctgcgcaccacaaaatacctgaaaactgcagccagcgccgattctgccagcgtacagtttgaaggtagggtgcagcgcattgcccgtattcaccattacggcttgagtgatcgcgtcagtcgaaaaggtatttataccatctatgcgaaaaggcagttattaggttttaatgtccaatctattgagttaattgaaagaatgttcattaaaaacctaacttga

SEQ ID NO: 462433 - DNA, 2199 bp, Shigella boydii
atgtcaaaattaaaaattgcggttagtgattcttgcccggactgttttaccacgcagcgagaatgtatctacattaatgaaagtcgtaatatcgatgtggcggcaatcgttttatcgctcaacgatgttacatgcggaaaactcgatgaaatcgatgccacgggttatggcatcccggtatttattgctactgaaaatcaagaacgtgtacccgcagagtatttgccctgtatttcgggtgtctttgagaattgcgaatcgcgacgagaattttatggtcgtcagttagaaaccgctgccagccattatgaaactcaactgcgcccacctttcttccgcgcactggtcgattatgtcaatcaaggtaacagcgcgtttgattgccctggtcatcagggcggcgaatttttccgtcgccatccggcggggaatcagtttgtggaatactttggtgaggcgctgttccgttccgacttgtgcaacgcagacgtagcaatgggtgatctgctgattcacgaaggcgcgccatgcattgcacagcaacatgcggcaaaagtgttcaatgccgataaaacatacttcgttctaaatggcacttcatcttctaacaaagtggttttaaacgccctgctgacaccgggtgatctggtgctgtttgaccgcaataaccacaaatctaaccaccacggagcgttgctacaggctggtgcaacaccggtttatctggaaaccgcacgtaacccgtatggctttatcggtggcattgatgcgcactgttttgaagaaagttacctgcgtgagctgatcgcggaagtcgcaccgcagcggacaaaagaggctcgtcctttccgcctcgccgttattcagctaggcacctacgacggtacgatttataacgcccgccaggtggtggataaaattggtcatctgtgtgactacattctgtttgactccgcatgggtcggctatgagcaatttatcccgatgatggctgactgttcaccgctgttgctggatcttaatgagaacgatccgggcattctggttacgcaatctgtgcataaacagcaggctggtttttctcaaacttcacaaatccataaaaaagacagccacatcaaagggcaacagcgttatgtaccgcacaaacgcatgaacaacgcctttatgatgcatgcctccaccagcccgttctatccgctgtttgccgcactggatatcaacgccaaaatgcatgaaggtgtcagcggtcgtaatatgtggatggattgtgtggtaaatggcattaatgcccgcaagctgatcctcgataactgtcagcatattcgtccgttcgtacctgaactagtggatggtaaaccctggcagtcgtatgaaacagcgcaaattgcggttgatctgcgcttcttccagtttgtaccaggggaacactggcactcttttgaaggctatgcagagaatcaatactttgtcgatccatgcaaactgttgctgacaaccccaggtattgatgcacgtaacggcgaatatgaagcgttcggtgtacccgcgacgattcttgctaacttcctgcgcgaaaatggcgtagtgccggaaaaatgcgatcttaactccatcctcttcctgctgactccggcagaagatatggccaaacttcagcaacttgttgccctgctggtacgcttcgaaaaactgcttgagtccgacgcgccattagcagaagtgctgccttccatctacaaacagcatgaagagcgctacgccggttatacccttcgtcagttatgccaggaaatgcatgatttgtatgcccgtcacaacgtgaaacaaccgcaaaaagagatgttccgtaaggaacacttcccacgcgtaagcatgaatccacaagaagccaactacgcctattcacgcggtgaagtggagctggttcgtctgccggatgccgaaggccgtatcgctgccgaaggtgcgcttccttatcctccgggtgtgctgtgtgttgttccgggtgaaatctggggtggtgctgttttgcgttacttcagcgctctggaagaagggatcaacctgctgccaggttttgcaccggagctgcagggtgtctatatcgaagaacatgatggtcgtaagcaagtttggtgctatgtcatcaagcctcgtgatgcgcaaagcggtaatgctgccaacttactgatttag

SEQ ID NO: 462434 - DNA, 258 bp, Shigella boydii
atgcagaaacccttaccagtccggtggctgataatacaagggttaacagagaatgagcactgcggaatacaggcatatgcctgtaatacagagagtcaggaagacctgtacgctgaagtgcccttagtcggtagactaacgggcattgaagaagtgaaagtcgaagctattgcgatgagcaaacttcataatatgagttgtccgccttatatggggcatagtgcggctgttattttccatttaatttacctttcctga

SEQ ID NO: 462435 - DNA, 213 bp, Shigella boydii
gtgtatgatggtgattgtaaggtgcttgcgtggcttccatttccatcagatgtccttcctgctccgctactgaaggcgtggtgcgtaacagcaaaagcactgccggacatcagcgctatctctgccctcattgccgtaaaacatggcaactacagttcacttacaccgcctctcagcccggtacgcaccagaaaatcattgatatggccatga

SEQ ID NO: 462436 - DNA, 165 bp, Shigella boydii
atgcgcaaatatcgtctaagtgaagaacagcgagcctttagttatcaggaagatggcactaaaaaaagtgtgttattacggcagattatcgccattagcgattttaacgatgtgatagcaggaaccgctggcggctggatcgatcgcgaaacggtgttagcatag

SEQ ID NO: 462437 - DNA, 567 bp, Shigella boydii
atgggcgctatctccacgagttcgaagaaaatttctgagatcaccgccgtcatcaacagtattgctttccagacgaatattctggcactgaatgctgccgttgaagccgcgcgagcgggtgagcaagggcgtggatttgccgttgtcgccagcgaagtacggacactcgcaagtcgcagcgctcaggcggcgaaagagattgaaggcttgatcagtgaatcagtcaggttaattgacctggggtcggatgaggtggcaacggccgggaaaaccatgagcactattgttgatgccgtcgcgagtgtcacacatatcatgcaggaaatcgccgccgcctcggatgaacaaagtagaggcataacgcaggttagccaggcgatttctgaaatggataaggtgacgcaacagaatgcttctctggtagaagaggcctcagcggcggcggtgtcccttgaagaacaggcggcacgattaactgaggcggtggatgtattccgtctgaacaaacattctgtgtcggcagaacctcgcggagcgggtgaaccagttagtttcgctacggtgtga

SEQ ID NO: 462438 - DNA, 831 bp, Shigella boydii
atgattcaggccggggctgcgagtcgtattgcggaaatggaagcaatgaagcgaaatattgcgcaagccgaatcggagattaaacagtcgcagcaaggttatcgtgcttatcagaatcgaccggtgaaaacacctgctgatgaagccctcgacactgaattaaatcaacgctttcaggcttatatcacgggtatgcaacctatgttgaaatatgccaaaaatggcatgtttgaagcgattatcaatcatgaaagtgagcagatccgaccgctggataatgcttataccgatattttgaacaaagccgttaagatacgtagcaccagagccaaccaactggcggaactggcccatcagcgcacccgcctgggtgggatgttcatgattggcgcgtttgtgcgtgccctggtcatgacgctgataacatttatggtgctacgtcggatcgtcattcgtccactgcaacatgccgcacaacggattgaaaaaatcgccagtggcgatctgacgatgaatgatgaatcggcgggtcgtaatgaaatcggtcgcttaagtcgtcatttacagcaaatgcagcattcactggggatgacagtagggactgttcgacagggcgcggaagagatttatcgtggcaccagcgaaatttcagctggcaatgcggacctgtcatctcgcaccgaagaacaagcggcggctatcgaacaaactgccgccagcatggagcaactcactgcgacggtgaaacagaatgcggataacgcgcatcatgccagcaaactggcgcaagaggcttctattaaagccagcgatggcgggcagacggagtaa

SEQ ID NO: 462439 - DNA, 426 bp, Shigella boydii
atgcgtacccgcttttttacctttcagcgtgacatgcgcttccccattggcttgggtgatggcaatgccgttattttcgagggtaaagtttgccgcaacgtcctgtggcatggtgaagttgaccgttatccccgccaccggatgattcgacggatctttcaccatcgccgtaagctgcacgctgtcactgttattcgtcaccacctgttgagcagggatgttcagcgtaacctgcgcgttgctggtatcgggcgcaatattgactgtcgttgtatagccgttgccgttaggaagtgtggcttcgactgtatgaacgcccaaaaccgtgcccttaagggtaacttcagcaacaccactgtcgttagtattgcttgtgctctgactaagttgagtatctgccggcttggtactgaaggtaacctgtag

SEQ ID NO: 462440 - DNA, 390 bp, Shigella boydii
atgcgcttcgccattggcctgagtgatggcaataccgttattttcaagggtaaagtttgccgccacgtcctgaggcatggtgaagttcaccgttattcccgccaccggatgattcgacggatctttcaccgtcgccgtcagctgcacgctgtcgctgttattcgtcaccacctgttgagctgggatgttcagggtgacctgcgcgttgctggtatcgggcacaatattgacgattttcgtatcgcttttaccgttaagcagtatggcttcggctgtataaacacccaaaaccgtgcccttaagggtaacttcagcaataccgttctcattagtattaagcgccttcagactcagttgcgtgtctgcgggggaggtgcggaagactactga

SEQ ID NO: 462441 - DNA, 150 bp, Shigella boydii
atgaacgccatcaccattttcccctcgattataaaacttgagttattcagtagtctcccctcttgcaactcacacccaaaactgcctaacgaaaagttattaattttcaatcatattgctatcagtatttacattttttcgctgtgctag

SEQ ID NO: 462442 - DNA, 507 bp, Shigella boydii
gtgcgtctgaaaattgttaatgccatgaaagcaaccggcaaaccgatggtggcgctgtttttaggttataccccggcggtggcccgcgacgagaatgtctggtttgcctcctcgctggatgaggccgcacgcctggcttgcctgctttcacgcgtcacggcgcgatgtaacgcaatagcgcctgtcagcagcggatttatttgcggtttgtataccggcggtacgctggctgccgaagcggcgggattacttgctggacaccttggcgtggaagccgacgatacccatcatcacggcatgatgctcgacgccgatggtcaccagattattgacctcggcgatgatttctacaccgtcgggcgtccccatccgatgatcgacccagccttacgcaaccagttaattgccgatctcggcgctaaaccacaagtgcgcgtattgctacttgatgtcgtgattggcttcggtgcgactgccgatcctgccgcctcgctggtaagcgcctag

SEQ ID NO: 462443 - DNA, 309 bp, Shigella boydii
gtgacaggcactgaacgtgacccgcaatgccgctcgcagcaaatcgccacgctggaagatgcggggatcgcggtagtgagttcgctgccggaagccaccttgctggcggcagcgttaatttatccgctctcgcctgccacacagcaacatacaccgtcattactggaaaacgtcgccgtgattaacatcggattacgcagctttgcgctggagctacaaagcgccagcaaaccggttgtgcattaccaatggtcgccagtcgccggcggcaataaaaaactggctcgtttattagaacgtttgcaataa

SEQ ID NO: 462444 - DNA, 324 bp, Shigella boydii
atgaaaacactggttgtagctcttgggggcaacgccttactccagcgcggtgaggcgctgacggcggaaaatcaatatcgcaatatcgccagtgctgtacccgcgctggcacgcctggcccgttcttatcggctggcgattgttcacggcaacgggccgcaggtggggctgctggcgttacagaatctggcgtggaaagaggtagaaccgtatccgctggatgtgctggtggcggaaagccaggggatgaggctatatgctggcgcagagcttgagcgcacagccgcagataccgcctgttacgacggtgctgacgcgcattga

SEQ ID NO: 462445 - DNA, 1269 bp, Shigella boydii
atgtatgagcagtattatggcgatgaagttgggctgtttggcaaagataaacgccagaaagatccacatgcgatttccgctgaagtgaattacacgcctgtgcctcttctgaccctgagtgccgggcataagcagggcaagagtggtgagaatgacactcgctttggcctggaagttaattatcggattggcgaacctctggagaaacaactcgatacagacagcattcgcgagcgtcgaatgctagcaggcagccgctatgacctggttgagcgtaataacaacatcgttcttgagtaccgcaaatctgaagtgatccgtattgctctgcctgagcgtattgaaggcaagggctgtcagacactttccctcgggcttgtggtcagcaaagcaactcacggactgaaaaatgtgcagtgggaagcgccgtcattactggctgaaggtggcaaaattaccggtcagggtagtcagtggcaagtaacgctcccggcttatcgtccaggcaaagacaattattatgcgatttctgcggttgcctacgataacaaaggcaatacctcaaaacgcgtgcagacagaggtggtcattaccggagctggtatgagcgccgatcgcacggcgttaacgcttgacggtcagagccgtattcaaatgcttgctaacggtaatgagcaaaaaccgctggtgctgtctctgcgcgacgccgagggccagccagtcacgggcatgaaagatcagatcaagactgaactaactttcaaaccggctggaaatattgtgactcgttccctgaaggccactaaatcacaggcaaagccaacactgggtgagttcactgaaactgaagctggggtgtatcagtctgtcttcactaccggaacgcaatcaggtgaggcaacgattactgttagcgttgatggcatgagcaaaaccgtcactgcagaattgcgcgccacgatgatggatgtgtcgaagtctactctgagcgtgaatgaactctcaggagatgtggttgctgatggtcagcaatcccacacgctgacgcttactgcggtggatactgatggtaacccggtgacgggagaggccagccgcttgcgatttgttccgcaagacactaatggtgtcaccattggtacaatttcggagataaaaccaggcgtttacagcgctacggtttcttcgacccgtgccggaaacgttgttgtgcgtgtgtgcgtgctttcagcgagcagtatcagctgggcacattacaacaaacgctga

SEQ ID NO: 462446 - DNA, 213 bp, Shigella boydii
atggggggggtgaacacctttatcgaccatgatttatcccgtagtcatacccgcattggtgttggtgcggaatactggcgcgattatctgaaactgagcgccaatggttatattcgggcttctggctggaaaaaatcgccggatattgaggattatcaggaacgcccggcgaatggctgggatattcgtgctgagggctatttacccgcctga

SEQ ID NO: 462447 - DNA, 534 bp, Shigella boydii
atgtcacgttataaaacaggtcataaacaaccacgatttcgttattcagttctggcccgctgcgtggcgtgggcaaatatctctgttcaggttctttttccactcgctgtcacctttaccccagtaatggcggcacgtgcgcagcatgcggttcagccacggttgagcatgggaaatactacggtaactgctgataataacgtggagaaaaatgtcgcgtcgtttgccgcaaatgccgggacatttttaagcagtcagccagatagcgatgcgacacgtaattttattaccggaatggccaccgctaaagctaaccaggaaatacaggagtggctcgggaaatatggtacagcgcgcgtcaaactgaatgtcgataaagatttctcgctgaaggattcttcgctggaaatgctttatccgatttatgatacgccgacaaatatgttgttcactcagggggcaatacatcgtacagacgatcgtactcagtcaaatattggttttggctggcgtcatttttcaggaaatgactga

SEQ ID NO: 462448 - DNA, 267 bp, Shigella boydii
atgatgaagcccaatatccatcctgagtatcgtactgtggtgttccacgacaccagtgttgatgagtactttaaaatcggctcgactatcaaaacagaccgtgagattgagctggatggcgtaacgtatccgtacgtgacaattgatgtctcttctaaatcgcacccgttctatacagggaagctgagaacagtggcatcagaaggaaatgttgcacgattcacccaacgttttggtcgttttgttagcacgaaaaaggggtcgtga

SEQ ID NO: 462449 - DNA, 141 bp, Shigella boydii
atgaaagttcttaactctctgcgtaccgcaaaagaacgccatccagactgtcagattgtgaagcgaaaaggacggctatatgtgatttgtaaatctaatccacgttttaaggccgttcagggtcgtaagaaaaaacgttga

SEQ ID NO: 462450 - DNA, 543 bp, Shigella boydii
atggaatgtcaaaaccgttctgataaatacatctggtctccccatgacgcctacttctataaaggactatctgaactgattgtggatatcgacagattaatttatctatcgttggagaaaattagaaaagatttcgtgtttatcaatctcaatacggattctttatctgaatttataaaccgtgataatgaatggttatccgcggtaaaggggaaacaggtcgtattgattgcggccagaaagtcagaagccttagcaaattattggtactacaacagcaatattaggggcgtggtatacgctggactgagtcgtgatattagaaaagaactggcctatgtgattaatggcaggttcctgagaaaagatattaagaaagataaaatcacggaccgggaaatggaaattatccgcatgacggcccagggaatgcaacctaaatcgattgccagaattgaaaattgtagtgtgaagacagtgtatacccatcggcgtaatgctgaggccaagctgtactcaaaaatatataagttggttcagtaa

SEQ ID NO: 462451 - DNA, 636 bp, Shigella boydii
atgactcactgggacatcacgtcctcaattcaactcgggaagaaatgcaatgaaaaaaaggttctggcaatagctctggtaacggtgtttaccggcatgggtgtggcgcaggctgctgacgtaacagctcaggctgtagcgacctggtcggcaacagccaaaaaagacaccaccagtaatctggttgtgacgtcactcggtagcttggcgttccagtatgccgaaggcattaaaggttttaactcacagaaaggtctatttgacgtggctatcgagggtgactcaacggctaccgcctttaaactgacctcacgtcttatcaccaacacattaactcagttggatacctcaggttccacactgaatgtgggcgtggattataacggcgcggcagtcgaaaaaactggcgataccgtgatgatcgataccgccaacggcgtactgggcggcaaccttagcccgctggctaacggttacaatgccagcaatcgtaccaccgcacaggatggtttcaccttcaccatcatcagcggcaccaccaatggtaccaccgcagtaaccgattacagcactctaccggaaggcatctggagcggcgacgttagcgtacagttcgacgcgacctggaccagttaa

SEQ ID NO: 462452 - DNA, 669 bp, Shigella boydii
atgaaaaagcaccttctgcctctcgctctgctgttttccggaatatctccggcccaggcgctggatgtcggcgatatatcatcgtttatgaacagtgacagcagcacgctgagcaaaacgatcaaaaacagtaccgacagtggtcgccttatcaatatccgtctcgaacggctctcttcaccgcttgacgacgggcaggttatctcaatggacaagccggatgagttgctactcactcccgccagcttgctgctacccgcccaagccagcgaagtgatccgcttcttctataagggacccgcagatgaaaaagagcgctactaccgcattgtctggtttgatcaggccctcagtgatgcgcagcgcgataatgccaaccgcagcgctgtggccactgcttccgcccgcatcggcaccattctggtcgtcgcccctcgtcaggcgaactaccactttcagtacgccaacggctccctgacaaatacaggaaatgcgacgctgcggatcctcgcctacggcccctgcctgaaagccgccaacggtaaggagtgtaaagagaattactacctgatgccgggcaagtcgcgtcgttttacccgcgtggacactgcggataacaaaggacgggttgcactttggcagggtgataagttcattcccgtgaaatag

SEQ ID NO: 462453 - DNA, 378 bp, Shigella boydii
atgcctttacgacggttctccccaggactgaaagcccagtttgccttcggcatggtctttttgttcgttcagcccgatgccagcgctgctgacataagtgcgcagcaaataggtggggtgattattccgcaggccttcagtcaggcgcttcaggacggcatgagcgtcccgctctatattcatctcgccggtagtcagggtcgccaggacgatcagcgaatcggcagcgcttttatctggctggatgatggacagctacgcatccggaaaatacagctggaagagagtgaagataacgccagtgtcagcgaacaaactcgacagcagctgatggctctggcgaacgccccgttcaatgaggcccttaccatcccctga

SEQ ID NO: 462454 - DNA, 768 bp, Shigella boydii
ttgcgccaactgctgctgcagctggtggtcaagcgcgaagcgctgggcaccgtactacgctcacgtagcgaagacatcgggcagtccagtgttaacaccctcagcagtaatctgagctataacttgggcgtctataacaaccagttgcgtaacggcgggagcaacacatccagctatctgtcgctgaataacgttactgcgctgcgcgaacatcatgtggtgctcgacggctcgctgtacgggatcggtagcggtcaacaggacagtgaattatataaagcgatgtatgaacgcgattttgccggtcaccgatttgccggtggaatgctcgacacctggaacttgcagtcattagggccgatgaccgccatttcagcagggaagatttacggcctttcctggggaaaccaggccagctccaccatcttcgacagcagccagtcagccacgccagtgatcgcctttttaccggcggcgggcgaagtacatctcacccgtgatgggcggctactaagcgttcagaacttcactatgggcaatcatgaagtggatacccggggtctaccgtacggtatttacgatgtggaagttgaggtgatcgttaacggtcgcgtgatcagcaaacgcactcaacgggtcaataagctgtttagccggggcgcggcgtcggtgcaccactggcgtggcaggtatggggcggtagctttcatatggatcgctggtcggaaaacgggaaaaagacgcgaccagctaaagagagttggctag

SEQ ID NO: 462455 - DNA, 1410 bp, Shigella boydii
atggatcgctggtcggaaaacgggaaaaagacgcgaccagctaaagagagttggctagcaggtgcctcgacctccggctcattgagtacgcttagctgggcggcaacgggatatggatacgataatcaggcggtgggtgaaacccgtctgacgctgccgcttgggggggcgatcaacgttaacctgcaaaatatgctggccagtgacagctcatggagcagcatcggcagcatcagcgctactctaccgggaggctttagttcgctgtgggttaaccaggaaaaaacccgtattggcaatcaattgcgacgtagcgatgccgacaaccgtgcaatcggcggcacactcaacctgaactcactgtggtcgaagctgggcacattcagcatcagctacaatgatgaccgccgttacaacagccattattacacggcagattactatcaaaatgtctacagcggtacctttggttcgcttggcctgcgggccggtattcagcgctataacaacggcgacagcaacgccaatacagggaaatatatcgctctcgatctctcgctaccactgggcaactggtttagcgcagggatgacccatcaaaacggctacaccatggcaaacctgtcagcacgcaaacagtttgatgaagggaccattcgcactgttggtgccaatctgtcacgtgccatctccggcgataccggtgatgacaaaaccctcagcggtggggcgtatgcacagttcgacgctcgttacgccagcggaacgctgaacgtcaatagcgcggcggacggctacgtcaataccaacttgaccgccaatggcagcgtcggctggcagggtaaaaacattgctgccagcgggcggactgatggcaacgctggggtgatattcaacaccgggctggaggacgacggtcagatcagcgccaaaatcaacgggcggattttcccgcttaacggcaagcgtaactatctcccgctctctccctatggaagatatgaggtggagttacagaacagcaaaaactcactcgacagttacgatatcgtcagcggccgcaaaagtcgtctgactctctatccaggcaatgtcgctgtcattgagccagaggtgaagcagatggttaccgtctccggtcgtatccgtgcggaagacggcacactgctggctaacgcacggattaacaaccatatcggccgaacccgaaccgatgaaaacggcgagtttgtcatggacgtggataagaaataccccactatcgattttcgctacagtggcaataaaacctgcgaagtggctctggaactcaaccaggcgcgcggtgccgtctgggtcggtgatgtggtctgcagcggcctctcatcgtgggcggcggtgacgcagacaggagaagagaatgagagttaa

SEQ ID NO: 462456 - DNA, 321 bp, Shigella boydii
atgagagttaacctactaataacgatgataattttcgcgctaatctggccagtaactgcgctcagagcggcagtgagcaaaacaacctgggcggatgcaccggcacgcgagtttgtgtttgtcgaaaacaactcagacgacaactttttcgtcactcctggcggggcgctggatccgcgcctgaccggtgccaaccgctggaccggtttaaaatacactggttcaggaaccatctatcagcaaagcctcggctacattgataacggttacaacaccggcctttataccaactggaagttggtaatgactccaacttactga

SEQ ID NO: 462457 - DNA, 612 bp, Shigella boydii
gtgctagaccgccatcttcatccccggattaaaccgttgttgcatcagtgcgtgcgggttcttgataaaccgggcattacgccagatggtttaacattagtgggatttgccatcggcgtgctggctctgccgtttctggcgctgggctggtatctggcggcgctagtcgtcattttgttgaacaggctgcttgatggtctggacggtgcgctggcgcggcgcagagagcttaccgacgcgggcggctttcttgatatttctctcgattttctcttttacgcgctggtgccgtttggctttattcttgctgcaccggagcaaaatgcgctggcaggcggctggttgttgtttgcgtttatcagcacgggcagcagttttctcgcctttgctgcactggcagcaaaacatcagattgataaccccggttatgcacataagtcgttttactatctggggggattaaccgaaggcacagaaacgatcttactgtttgtgctgggatgtttattccctgcatggtttgcgtggatcttcggtgcgttgtgctggatgacgacctttacgcgggtgtggagtgggtatctgacgctgaagtcgctccagcgtcagtaa

SEQ ID NO: 462458 - DNA, 1536 bp, Shigella boydii
atggttacgccgttacggtacgcattaatctttttgctgtgggcgatggtggcggtgatttatgcaccgctgatcccggcagctctcacgctgatatcgcctgcgttgtcgttgacacactggcaggcgttatttgccgatccacagttaccgcatgcattactggcaacgctggtgtcgacaaccatcgcggcggtcggggcattgttgattgccctgctggtgattgtggcgctatggcctgggccgaaatggcagcgtatgtgcgcccgtctgccgtggctgctcgccattccccatgtggcttttgccaccagcgccctgctgctctttgctgacggagggctgctatatgactatttcccgtatttcactccgccaatggaccgatttggcatcggtctgggcctcacccttgcagtgaaagaaagcgcatttctgctgtggatcttagcggcagtattgagcgaaaaacggctgttgcagcaggtcattgtgctggattcgctgggctacagccgctggcaatgcctgaactggctgctgttgccctccgtcgcgccttcgctggcaatggcgatgctggcgattgttgcctggtcgctttcggtcgtggatgtggcgattattcttgggccaggtaatccaccgacgctggcagtaattagctggcagtggttaactcagggcgacgcggatcaacaaacgaaaggcgcactcgccagtctgctgctgatgctgttactcgccgcctacgttttgctgagctatctgctatggcgcagctggcggcgcactattccccgcgtagatggcattcgcaagcctgccacacctttattaccaggcactacgctggcgagttttttacccttaaccggtgtgctgtgtgtggttctgctggcgatcctcgcggatcagtcgacgatcaatagtgaagcactcatcaacagtctgacaatggggctggtagcaacattcatcgctttgctcctgttactgctgtggctggaatgggggccacagcgtcgccagttgtggctatggttgcccattctattgcccgctctgccactggtggcgggccagtacacgctggcgctatggctgaacctggatggaagctggacggcggtggtctgggggcatctgctgtgggtaatgccgtggatgctgtttatcctgcaacccgcctggcagcgcattgattcacggttaattttgattgcgcaaacactgggctggtcgcgggccaaaatcttcttttacgtgaaatgcacactcatgttgcgccctgtgctgattgccttcgcggtgggattttcagtcagtattgcgcagtatatgccgacgctgtggctgggcgcggggcgttttccgacgctcaccactgaggcggtggcattaagcagcggcggcagcaacggtattctcgccgcccaggctttatggcaactgttgttaccgcttattatttttgccctgaccgcgttagtcgcaaaatgggtaggttatgtcagacaaggactccgctaa

SEQ ID NO: 462459 - DNA, 1389 bp, Shigella boydii; identical to SEQ ID NO: 461802

SEQ ID NO: 462460 - DNA, 207 bp, Shigella boydii
atggaacgcttcttcaggagtctgaagaacgaatggatgccggtggtgggttacgtaagcttcagcgaggcagctcacgccataacggactatatcgttggatattacagcgcactaagaccgcacgaatataacggtgggttacccccaaacgaatcggaaaagcgatactggaaaaactctaactcggtggccagtttttgttga

SEQ ID NO: 462461 - DNA, 1455 bp, Shigella boydii
ttgaatatctcctctgctttacgccaggttgttcacggcactcgctggcacgctaaacgcaagagctacaaagtgttgttctggcgcgagataaccccgcttgctgttcctatcttcatggagaatgcctgtgtcctgttgatgggggttctgagcacttttctggtcagctggctgggaaaagatgcgatggccggcgtgggattggcggacagcttcaatatggtcattatggctttttttgctgctatcgatcttggtactactgtcgttgtggcatttagtctcggtaagcgggatcgacgacgagcgagggtggcgacgcggcagtcattggtgatcatgacgttgtttgccgtactgttggcaacgcttattcatcattttggcgaacaaattattgatttcgtcgcgggtgatgccacgacagaagttaaagtactggcgttgacttatctggagctgacggtactcagttatccagcagctgccatcactcttattggtagcggggcacttcgtggtgcagggaatacgaaaataccgctattgattaacggtagcctgaatattcttaatattattattagcggcatattgatttacggccttttctcctggccgggactgggatttgtcggggcagggctgggtttaaccatttctcgttatattggcgcagttgcaattttgtgggtgctggcgattggttttaatcctgcgctaaggatttcgttaaagagctattttaaaccgctgaattttagcattatctgggaagtcatggggattggtattcccgcgagtgtcgaatcagtgttatttaccagtggtcggttattaacccaaatgttcgttgccgggatggggaccagtgttattgccggaaattttatcgcgttttcaattgcggctcttatcaacttacccggaagtgcgctcggctctgcttctacgatcattacaggccgaaggttgggggtagggcagatagcgcaagcagagattcagttgcggcatgtgttctggctttccactcttggattaacggccatcgcctggctaacggctccctttgccggggttatggcatcgttttacacccaggatccacaggttaaacatgtcgttgtgattctgatttggctaaatgctttatttatgcctatttggtccgcctcatgggggctacccgctggatttaaaggtgctcgcgatgcccgttacgccatgtgggtttctatgttgagcatgtggggttgccgggttgtcgtcggttatgtgctgggcatcatgcttggctggggtgtggttggtgtctggatgggaatgtttgccgactgggctgtgcgggccgtgctgttttactggcgaatggttactggacgttggctgtggaaataccctcgatccgaaccgcaaaagtgtgaaaaaaagccagttgtgtcggaataa

SEQ ID NO: 462462 - DNA, 1263 bp, Shigella boydii
atgtctttaaacgattcaaaaatccgtaacttaaaaccctcttcaaaacccgtaaaactgtctgattcgcacggtctgtatctgctggtcaatcagggcggttcgcgtatctggtatctcaagtatcgcttcagtggtaaagagtcccgcgtcagtctgggcgcatatcctctggtttcacttgctgaagcaagacaacgacgtgacgatatccgtaagctactgacgcagaatattaaccccgcccaccagcgcatgtctgataaagccgcagcgtcaccggaaaagtattttaaagccgtggcgcttgcatggcacaaaaccaacaaaaaatggtcgcctgattatgccgcgcgcatcctcgccagcatggaaaatcatatctttccggcgattggtcatctgcctgtcactacgctgaaaacgcagaatttcactgcgttactgcgggttattgaggataaaggttttctggaagtcgcgtcccgaacccggcagcaactctgcaacatcatgcgttacgccgtacagcagggattcaccgaaaacaacctggcgcagcatctggaaggcgtcaccgcgccgccggttaagaatcactatcccgccctgccgctggagcggttgcccgaattgtttgagcgcattggcgactatcagcagggacggcagcttacgaggctggcggtggtgttgactctccacctgtttatccgttccagcgagctgcgctttgcccgctggggtgagatagatttcagaaacaaaatctggaccatccccgccacaagggaagcgattgagaaagtccgtttctctggccgtggcgcaaaaatgcgtactccatatatagtgccgctttctcgtcaggctatcgccattctgaagcagataaaggaaatctccggccatctggaactggtgttccccggcgaccataacccgtataagccgatgagcgaaaacactgtcaaccgggcgttgcgtcttatgggctatgataccaaaactgatgtctgtgggcatggattccggacaatggcgtgtagcgcattagtggaaactgaactctggtcacgggataccgtggagcggcagatgagtcatcaggagcgcaacagcgttcgggcagcgtatatccaccgggctgaacatctcgacgcccgtacagccatgatgcagtggtggtcggattatctggatgtaagtcgcgaggggtacgttgcgccgtatatttatgcgcggcggcataaggcggcctga

SEQ ID NO: 462463 - DNA, 885 bp, Shigella boydii
atggggattctggagcaggaaatgaagcgattggcacaacaggcgggcggcagccataagaccgttcacgaccgtattaagctggtgcagcggttttgtgagcgtctggttctggcacagaatgtgcagatccgccgggtggagcagcttaaggcgcggtatattgagggatatgttcgtgaacgactggcgcagggtatcacgaagcgttccctgcaaaatgagatggcggcggtgcgctgcattctgaaacaggccgggcgtgacaggctggcgcagagtgagcgactgaataaccgctcgctgggcctgtctggcgcatcccgtaacggtacgaagcgggccatcacgccggagcattaccgccatgtgctggaaaccgcccgcgcaaaagatccggggatggcagcggcgctggaactctcaaggctgatgggattacgttcgcaggaggtggtgcaaagtgcgcagtcattaagaacgtggaagcaatcgctggagcggggtgagccccgtttaaccgtggtgttcggcaccaaaggcgggcgtccgcgagaaaccgttattctggatgctgtcgctatcagaaaagcgctggataatgcgttggttgtggcagaagatcgccacggcaggctgatagataaacccgacctgaaaagcgcgatgaaatactggcacagccaggcgtcacgtctcgggttaactggcacatattccccgcactcgttgcgctatgcgtgggcgcaggatgccattcgtcattatctggcgcagggattcagtgagaaagaagcgctggcaatgacggcgatggatttgggacacggcgacgggcgcgggcggtatgtggcgcaggtttacggaagaaaggatactgattga

SEQ ID NO: 462464 - DNA, 318 bp, Shigella boydii
atggacagaggagaaatctggctcgtttcactggatcccaccactggccatgaacaaagtggaaaacgtccggtactcatcgtatcgaaggcatcgtttaacacgttcacccggttgcctgttgttgtccctgtcaccagcggcggaaactttgcccgcgaagccggttttaccgtttcactggacggggcgggaacaaaaacaacgggcgttattcgctgcgaccagcccagaaccattgatatgggagctcggagcggtaagcggctggaacgtatacccgatgctgtcgtgaatgaggtgctggctcgactgtaa

SEQ ID NO: 462465 - DNA, 258 bp, Shigella boydii
atgtataccactcgcctgaaaaaggttggcggatccgtcatgctggcggttccccccgcagtgctgaaaacgctagggctgtcgacggacagcgaagtgggcatgaccattgataatggctgcctgattattgaacctcaaaaacgtccccgctattcgctcgaagaactgttggcgcagtgcgatccgcacgctgaaataagcgaagagggtcgggaatggattgatgcgcctgcggtgggcaaggagatcctgtag

SEQ ID NO: 462466 - DNA, 207 bp, Shigella boydii
atgatgctgcaggactggcatcctgccgacattatcgccgggctgaaaaaacgaggcacttcgctgtcagcgctttcgcgtcaggcaggtctggcgtcctccacgctggctaatgcgcttacccgccgctggcccaaaggcgaaaggttaattgccgaagcgttaggcatcaagcctgagcaaatctggccttcgcgctaccgctga

SEQ ID NO: 462467 - DNA, 462 bp, Shigella boydii
atggctacgatccccactcagacacacccgttacttgctgttcccttcagtgctgccacagattttaccgtactggcagaccactgcgaaaacgtcgccgaaaccctgatcgaaagcgaagatccggtgctgcggctggcgctttgcgggcgacttgccgcctgtctcactttgctgcaacccacgctgaacgaccccatcccgtctcatctgactgacagcctgaccgttgatgctctacctgccgatatgccccgatttgtccccgacgcagaattactttgtgattactcactgacgctggcgcaacttcttatcgggcaggggatgcagccaaaagtggagcagacgataacaggcttattatgtgaactggtctggtattttgccgccgaaatgaaagccccgcgctggctccgcaccgccgatggcgtgaagtttatcgacgaggtggctgcatga

SEQ ID NO: 462468 - DNA, 1605 bp, Shigella boydii
ttgataacaaaagaacttgtcgatgaaagtaatttcattagccaactggttgatattggaagatttgacgaatcttatcaacagtcagttgcgttcctgaacaaactggaaagaataacaatcaggaacgataactactttatagtattggcgaacattgcgggtgctcttgttgacatcgggcagatgcaaaataataaaaatgcgtcagagcttggttgcaacctgatggaagataacaaagaagcatttatatcagtgttaggagagtgcctttactattataactatggtaatgcgctatctaatctggtgagcattactaaccccaatgaccatacattcaaatcgatagaagaattggtttccttaaaaaatatctactggcgttcttttaagctatctgctgaggagcaggaggaatttcaggctgaactatctgttaatttggctaattcattaagaagtcaatttcggctcagtgagtcattgagatattatgatcttaccaatcttaagggattagatataccacaggcttgggtcaaccgttcgatgtcacttatggtcctcaatcttatttcatcttcattttcaatcaagttactaaaagaagtgagagcaggatatattaaagcgtctgtatcaaaaaatatcccaccacaatgggaatcgttctatttagaacgcatagcgcagactaacgagaaaatcgcagaatatgctgttgatgatgaaactgacgaacacgatgaagcacttacacaacaagagttcgaagtgttaagcccatatcgacagttttgtcttagaaatcatctgactttatcagaacatggcctgtattgcccatgtgtagggagtgctacagatgatcttgtgattgcttcgcgaggcggtgtaacaggtgattttatcattcccatggagatggtattaaatcgccttaaatcggagttttcactcgcacgccatctttattttgattatcttcatccacaaaatacggattacattaagtacgaaagccattttctggaattgtataatgatgaagttttaggaatagaaattgaaaaaatcaggacggcatttcgtctttgctttggtattcttgataaaattgcggtagccatatgtgaactttataatctttacccaacaacaaaaaaaggtacacctcagaagaatatctattttcagaatttctggcagttagatgttgataacagaagacaattatttgaaaaggtaaaatcaccagggcttctggcgctgtacagtattgctaccgacctgaataaagataagggtggggagttggctttctataaagaatggcgcaatggtttagagcataagtttttagttgtacataaaagtgataaacctgaggacatttacgaatcttatcaactaatagaagatattctttttatcaaagaaagtgattttattcaccattttgagcatttacttcagataactcgttcagcaattttttcgtttgcttttatggtgaggcaagaggggatgaaagaaaagaaggagggtatccactatatgacccgagaattacatgcgataaactattcagcagattga

SEQ ID NO: 462469 - DNA, 366 bp, Shigella boydii
atggtttctgataaaagggcagatatcattgtttcactaccgcagataaaaatacctatcgagataaagcgtgattatcatcgtgatgtctggactgcacttaatgggcaattggacaagctttatactaaaaaccccgatgctgctggtcacggtatctatctggttttttggtttggttctgctcgaccgaattccctgcctcatttggcgaaaaatacatctcaacctgaaaacgccagtgcaatggaaaatatgcttaatgaaactgtgccggttgataaaagagaccgcttatcagcgatagttatagatgtctcctgtgagggcatacctcctgttgaagcaccgaaatcctctgtataa

SEQ ID NO: 462470 - DNA, 210 bp, Shigella boydii
atgaataaaacgcctgccaacataatggatctttactcattattgcttgatcatatacgggatatttctaaccgaattgccaatgaaaataccgatatttataagcaattctggaatgaagacagctatggccgtaccctaacgcctaaacctgaagagagttgccgtaatatttttctggatttactccgtgtccggcttaatccataa

SEQ ID NO: 462471 - DNA, 921 bp, Shigella boydii
atgttacccaggatcagacacaataattttattggtgcggtggagttattcgtaaaatcatcgcatacaaaaacacattcaaacaatttttttaataatattcagcatgcatttaagaaaaaagattgggtttcgaattatgatagcctgttaactttgtgggagttttttcgttgcgcaactcagattgataaagatagttatcaagtgctttcatcaaaaaatgaaactgttaaagccatggataagtttcttatcagtttcagccttaaagataacggtgccgaatatacaatgacattgcgaggcagtggatttgaatacgaagaaatccccataacaataaatgagtataactcattcatggatttcaaaaaccgtgaatttccgttagaacaaaacagaagattgtatgcttgggatattctgcagaaaaaacagtctgacataccgaaaaggattaaaggttatattcaccaggcgattggtgacgtgtctttaggttatgccttattggaggatatagtaagcaaattaaaacggggtaaatttgaactccaaatactaggaggtggaattaaagaatgcgatggatggtatatttacgaaaaaataattgatgataattttgccatagtcatagaatctttgggctttgcgcttaaaatctatggaggggatgaacgttttcgtaatggttcctctgttgttttggaggatgaagattactctcttatttataattttctggttaatgcaggttgccaacaagtcgaattagccgaacaagtggatgcgatagtaagtgcgaatctggccgtagatagtgatattaccgaagaggagatttgcgagaaatataaatcaaccattgaggcgtttaaaaaagagcaactagcgttacctagactggccccctga

SEQ ID NO: 462472 - DNA, 879 bp, Shigella boydii
gtgcgtgaaaccgccaatatgatctccttctgcgccgacgctattggtattcgcgacgatatgtatctgggcgcaggcaacgcctatatgcgtgaagttggcgctgcacttgatgacggttacaagcagggtgtactgccacagcgtccggctttagtgaacctgcaatgcgatattgaccacccgactcagtcaatggctgacctcgcgtggttacgtgaacactttggttcactggaaaacctgaaaggtaaaaaaatcgccatgacctgggcctactctccaagctatggcaaaccgctctctgtaccacaaggcatcatcggtctgatgactcgcttcggtatggatgtcaccctggcccatccggaaggctacgacctgatcccggatgtggttgaagtggcgaaaaacaatgctaaagcctccggtggtagcttccgtcaggtcaccagcatggaagaagccttcaaagacgcagacatcgtttatccgaagtcatgggcaccttacaaagtgatggaagagcgtactgaattgctgcgtgcgaacgaccacgaaggcttaaaagcactggaaaaacagtgtctggcacagaacgcgcaacacaaagactggcattgtactgaagagatgatggaactgacccgtgatggcgaagccctgtacatgcactgcctgccagctgatatcagcggcgtatcctgcaaagaaggtgaagtgactgaaggcgtattcgaaaaataccgtatcgctacctacaaagaagccagctggaagccttatatcatcgccgcgatgatcctgtcccgtaaatacgccaaacctggtgcactgctcgagcaactgctgaaagaagcgcaagaacgcgtgaaataa

SEQ ID NO: 462473 - DNA, 1197 bp, Shigella boydii
atgtccgttttctcattgaagattgatatcgccgataacaaatttttcaacggcgaaacatcaccgctcttttcgcaaagccaggccaaactggcgcgccagttccaccagaaaatagctggttatcgcccaacaccgctttgtgcgctggacgatctcgcaaacctttttggtgtgaagaaaattctcgtcaaagacgaatcaaaacgattcggtctgaacgccttcaaaatgcttggcggtgcgtacgccatcgctcaattattgtgtgaaaaatatcatcttgatatcgaaacgctgtcatttgagcacctgaaaaatgccatcggcgaaaaaatgactttcgcgaccaccaccgacggcaaccacgggcgcggtgtggcgtgggcagcacagcaactcggacagaatgcggtgatttacatgccgaaaggttctgctcaggaacgcgttgacgccattctgaacctcggtgccgagtgcatcgtcacggatatgaactatgacgataccgttcgcctgaccatgcaacacgcgcagcagcacggctgggaagtggtacaggacacggcatgggaaggttacaccaaaatcccaacctggatcatgcaaggctacgcaaccctggcagatgaagccgtcgagcaaatgcgtgaaatgggcgtaaccccgacgcacgttctgctgcaagccggtgtcggagcaatggccggtggtgtgctgggttatctggtcgacgtctacagcccgcaaaatctgcacagcattattgttgaacctgacaaagctgactgtatttatcgctccggcgtcaaaggcgacatcgtcaacgttggcggtgatatggccaccatcatggcgggcctggcctgtggcgaacctaacccgctgggctgggaaatcctacgtaactgcgccacccaattcatctcctgccaggacagcgttgccgcattaggtatgcgcgtgctgggtaatccgtacggcaacgacccgcgcatcatctccggtgaatccggcgctgtcggtttgggcgttctcgcagcggttcattatcacccgcaacgtcaaagcctgatggaaaaactggcgctgaacaaagatgccgtagtgctggttatcagtactgaaggcgacaccgacgtgaagcactaccgcgaagttgtctgggaaggcaaacacgctgtagcaccttaa

SEQ ID NO: 462474 - DNA, 1212 bp, Shigella boydii
atggctaagaatattccattcaaactgattcttgaaaaagcaaaagattaccaggcggacatgactcgcttcctgcgcgacatggttgctattcccagtgaaagctgcgacgaaaaacgcgtagtacatcgtattaaagaagagatggaaaaagtcggcttcgataaagttgaaatcgacccgatgggcaacgttctcggttatatcggccacggcccgcgtctggtggcaatggacgctcatatcgataccgtcggcattggcaacatcaaaaactgggacttcgatccgtacgaaggcatggaaactgatgagctaatcggtggtcgcggtacttccgaccaggaaggcggcatggcatctatggtttatgccggtaaaatcattaaagacctcggtctggaagatgaatataccctgctggttaccggtactgtgcaggaagaagactgcgacggtctgtgctggcagtacattattgaacaatccggcattcgcccggaatttgtggtcagtaccgaaccaaccgactgccagatataccgtggtcagcgcggtcgtatggaaattcgtattgatgttcagggtgttagctgccacggttctgcgccagaacgcggtgacaacgccattttcaaaatgggtccgattcttggcgaattacaagaactctcccaacgtctgggttatgacgaattcctcggcaaaggcaccctcaccgtttctgaaatcttcttcacatccccaagccgttgcgctgtagcagatagctgcgccgtctctattgaccgccgtctgacctggggcgaaacctgggaaggcgcgctggacgaaatccgcgccctgcctgcagtacagaaagctaacgcggttgtttctatgtacaactacgaccgtccgtcctggactggcctggtttacccaaccgaatgctacttcccgacctggaaagtggaagaagatcacttcaccgttaaagcactggtgaatgcctacgaagggctgtttggcaaagcgccggttgttgataagtggaccttctcaactaacggcgtatctatcatgggccgtcacggcattccggtgatcggctttggcccgggtaaagaacctgaagcgcatgcacctaacgaaaaaacctggaaatctcacctggtgacctgtgccgcgatgtacgctgcaatcccgttaagctggctggcaacagagtaa

SEQ ID NO: 462475 - DNA, 1386 bp, Shigella boydii
atgcgcgtattgatcaaaaacggcactgtcgttaacgcagatggacaagccaaacaggatttgctgattgaaagcgggattgttcgccagttgggcaacaatatttcgccgcagctcccgtatgaagaaattgatgccactggctgttacgttttcccaggcggcgtggatgtccatacgcatttcaatattgatgtcggcatcgcgcgcagttgtgatgatttttttaccggtacccgcgcagctgcgtgtggcggtacaacaaccattattgaccatatgggatttggcccaaacggctgtcggttacgccatcaactggaggtttatcgtggttatgccgcccataaagcggtcatcgattacagctttcacggtgtgatccagcacattaatcacgcaatcctcgacgaaatcccgatgatggtcgaggaaggactgagcagttttaaactctatttaacctatcaatacaaactcaacgatgacgaggttttgcaggcattacgccgcttgcatgaatccggcgcgctgaccaccgtgcacccggaaaatgatgcggctatcgccagcaagcgggcggaatttatcgccgcagggttaaccgcgccgcgctatcatgccttgagtcgccctctggaatgcgaagcggaagccatcgcccgcatgattaacctggcacaaattgccggtaacgccccgctctatatcgtgcacctgtctaacggcttaggtctggattatctgcgtcttgcccgtgcgaatcaccagccagtctgggttgaaacctgcccacaatatctcctgttggacgaacgcagttacgatacagaagatggcatgaagttcattcttagcccaccgctgcgtaacgtacgcgagcaggacaaactgtggtgtggcatcagcgatggtgcgattgacgtggtggcgaccgatcactgcaccttctcgatggctcaacgcctgcaaatttctaaaggcgatttcagtcgctgcccaaatggcttacccggtgtggaaaaccgcatgcagttactgttttccagtggcgtgatgacgggacgtataacaccggaacgctttgttgaattaaccagcgcaatgcccgccaggctgtttggcctgtggccgcaaaaaggattattagcgcccggttccgatggcgacgtggtgattatcgacccacgtcagagccaacaaattcagcatcgccatctccacgacaacgccgactactcgccatgggagggttttacctgtcagggcgcgattgtcagaaccttatcccgtggtgaaacgattttctgtgacggcacctttacaggcaaagccgggcgaggtcgtttcctgcgacgcaaaccgtttgtccctcccgtgctctaa

SEQ ID NO: 462476 - DNA, 933 bp, Shigella boydii
atgagtaagaaaattgttctcgccctgggcgggaatgcgctgggcgatgacctggccggacaaatgaaagcggtaaaaattacttctcaggcaattgttgatttaattgcccaaggacatgaagttatcgtcactcatggtaacgggccgcaggtgggcatgattaaccaggcctttgaagctgccgcaaaaactgaagcacactcgccaatgctgccgatgtctgtctgtgttgccttaagccagggttatattggttacgatctacaaaacgtgttaagagaagaactgctttctcggggcattaataaacctgtagcaacgctggttactcaggtcgaagtcgacgctaacgatccggcattcctcaacccgaccaagccgatcggttcgttctttaccgagcaagaagcagagcaactgacaaaacagggttacactctgaaagaagatgctggtcgcggctatcgccgtgttgttgcctcgccaaaaccggttgatatcattgaaaaagaaactgttaaagctctggtagatgcaggccaggtggtgatcaccgttggcggtggtggtatccctgttattcgtgaaggtaaccatctgcgtggtgccagcgcggttatcgataaagactgggccagcgcccgtttagcagaaatgattgatgccgatatgctgatcattctgactgcggtagaaaaagtggccattaacttcggtaaagagaatgaacagtggctcgatcgcctgtcattaagtgatgctgaacgctttatcgaagaaggtcattttgcgaaaggttctatgctgcctaaagtggaagctgccgcctcgtttgctcgctctcgcgcaggtcgtgaagcactgattaccgtattgagcaaagcgaaagaagggattgaaggcaaaaccggaacggtgatttgtcagtaa

SEQ ID NO: 462477 - DNA, 1626 bp, Shigella boydii
atgaatattttcacagaggctgcaaaactcgaagagcaaaattgtccgtttgcgatggcgcaaattgttgatagccgaggctcgactccccgccattctgcacaaatgttagtgcgcgccgatggttctatcgtcggtacaattggtggcggaatggttgagcggaaggtgattgaagagtcacttcaggcattgcaggaacgtaagccgcgattattccatggacgtatggctcgtaacggtgcggatgctgtcgggtcagattgtggaggtgcaatgtcagtatttatcagcgtccatggtatgcgtccacgtctggtgttgattggcgcggggcatgtcaaccgggcgatagcccagagtgccgcgctattaggatttgatattgccgttgccgatatttatcgcgaaagcctcaatcctgaactattcccaccatcaaccacgcttctccatgctgagtcgtttggtgcggcagtggaagcactggatattcgccctgataattttgtcctgattgccacgaataatcaggatcgtgaagccctcgacaaactcattgaacagcccattgcatggttggggttgctggcaagtcgccgcaaggttcagcttttcctgcgtcaattgcgtgagaaaggcgtggctgaagaacatattgcccgtttacatgcgcccgttggttacaacataggtgcggaaacgccgcaggagatcgccatcagcgtgctggcagaaatattacaggtgaaaaataacgcgccgggtgggctgatgatgaaaccttctcatccttccggacaccagctggtggtgattcgcggtgcgggagatatcgccagtggtgtggcgctacgtctgtatcatgcgggttttaaagtgatcatgctggaagtggaaaaaccgacagtgattcgttgtaccgtggcgtttgcccaggccgtgttcgatggcgaaatgacggtcgaaggcgtcactgctcgcctggcaaccagctctgcggaagcgatgaaacttaccgaacgcggattcatccctgtgatggtagatcccgcctgttcattgcttgatgaactgaaaccgctttgcgtggtggacgctattctggcgaaacagaatttgggaacgcgggcagatatggcaccagtaacaatcgcgcttgggccgggctttactgcagggaaggattgtcatgcggtaattgaaacaaatcgcgggcactggctcggtcaggtgatttactctggttgtgcgcaggagaataccggtgttcctggcaatattatggggcataccacccgacgggtgatccgtgctcctgctgcaggcattatgcgatccaacgtgaaattaggcgatctggtgaaagagggcgatgtgattgcctggattggtgagcatgaaattaaagcaccgttgacggggatggtgcgtggcttgttgaacgacggcctggcagtggttggtggttttaaaattggtgatatcgatcctcgtggtgaaaccgctgatttcaccagcgtttctgataaagcccgggcgattggcggcggcgtacttgaggcgttaatgatgttgatgcatcagggcgtgaaagcgacaaaagaagtgctggaagtggcttaa

SEQ ID NO: 462478 - DNA, 771 bp, Shigella boydii
gtgaaaagtatagttgacccatcggcattattcattgatttaggtgcgcagaaacgtcccactgtgatttctgttgttggtgctggggggaaaaccagcttgcttttttggctggcagaactgctccaggctagcggcaggcgtgtgttaatcacgacgacaacacatatgtttatgccaacgtctcactggcccgtggttttctgtcgtgatcccgccatgcttcctcatgcgtctcttacatcccccatttcattttgttttcacagctggaaagcgaaccagggaaaagtgcagggatttacgccagaagcgattgatgcactggtgcaacgaccagagtgtgacgtaattctcattgaagcagatggctcgcgtgcaatgccgttaaaagcgcctgatgagcacgaaccttgcatacccaaaagcagttgctgcgtgattgctgtgatgggaggacatattttgggcgcgaaagtgagcacagaaaatgtccatcgctggtcgcagtttgctgatattactgggttaacacctgatgcaaccttgcaactgagcgatctcgttgcgctggttcgccaccctcagggggcgtttaaaaacgtaccgcaaggttgtcggcgagtctggttcattaaccgtttttctcaatgtgagaatgcgattgcacaaagcgagctccttcaaccgctgcaacaacacgacgtagaggcaatctggctaggcgatatacaagaacatcctgcaatcgcgcgcagatttgtgaattag

SEQ ID NO: 462479 - DNA, 579 bp, Shigella boydii
atgtcagccatcgactgtataattaccgctgccggattatcatcaagaatggggcaatggaaaatgatgttaccctggcaacaggggacaattcttgatacaagtatcaaaaatgcgttgcagttttgtagccgaattattttagtcaccggctatcgtggtaatgaactgcacgaacgttatgtgaaccagagcaatatcactattatccacaacccagattatgcgcagggtttactaacatcagtaaaggccgcagtacccgcagtgcaaacagaacattgttttctcacccacggtgacatgccaaccctcaccatcgatattttcagaaaaatctggtcgttacgaaatgatggcgcaatactgccactccataatggcatccccggccatccgattttagtgtcaaaaccatgcctgatgcaggcaatcaagcgccccaatatcaccaatatgcgtcaggcactccttatgggagctcattattccgtcgaagtagaaaatgcagaaataattttagatattgatactccggacgactttattacagtgcaaaaaaggtatactaaaatttaa

SEQ ID NO: 462480 - DNA, 963 bp, Shigella boydii
ttgacggacttcgggggaaaaacgagtatttttagtcatcctgtttacctctttctcaggaagtttagtctccaggattcccggggcggttcaatccttatcggtcgtccgaacgtgatcgaaatgcgcattcagaaactgggcttgcagatcaaagcgggcgttgattttgagatcgtcaataacgaatccgatccgcgctttaaagagtactggaccgaatacttccagatcatgaagcgtcgcggtgtcactcaggaacaggcgcagcgggcgctgatcagtaacccgacagtgatcggcgcgatcatggttcagcgtggggaagccgatgcaatgatctgcggtacggtgggcgattatcatgaacattttagcgtggtgaaaaatgtctttggttatcgcgatggcgttcacaccgcaggtgcaatgaacgcgctgctgctgccgagtggtaacacctttattgccgatacctacgtcaatgacgaaccagacgcagaagagctggcggagatcaccttgatggcggcagaaactgtccgtcgttttggtattgagccgcgcgttgctctgttgtcgcactccaactttggttcttctgactgcccgtcgtcgagcaaaatgcgtcaggcgctggaactggtcagggatcgtgcgccagatctgatgattgatggtgaaatgcacggcgatgcagcgctggtggaagcgattcgcaacgaccgtatgccggacagccctttgaaaggttctgccaatattctggtgatgccgaacatggaagctgcccgcattagttacaacttactgcgcgtttccagctcggaaggtgtgactgtcggtccggtgctgatgggcgtggcgaaaccggttcacgtgttaacgccgatcgcatcggtgcgtcgtatcgtcaacatggtggcgctggccgtggttgaagcgcaaacccaaccgctgtaa

SEQ ID NO: 462481 - DNA, 1047 bp, Shigella boydii
atgaacagaactgacgaactccgtactgcgcgtattgagagcctggtaacgcccgccgaactcgcgctacggtatcccgtaacgcctggcgtcgccacccatgtcaccgactcccgccgcagaattgaaaaaatactgaatggtgaagataagcgactgttggtcattattggcccctgctcgatccacgatctcaccgctgcaatggagtacgccacccgtctgcagtcgctgcgcaaccagtaccagtcacggctggaaatcgtaatgcgcacctattttgaaaaaccacgaactgttgtcggctggaaagggctaatctccgatccggatttaaacggcagctatcgggtaaatcacggtctggagctggcgcgcaaattacttttacaggtaaatgagctgggtgtccctaccgcgactgagtttctcgatatggtgaccggtcagtttattgctgatttaatcagttggggcgcgattggcgctcgtactaccgaaagtcagatccaccgcgaaatggcttcagcactctcctgtccggtaggttttaaaaatggtaccgatggcaacacgcggattgccgtggatgctatccgcgcagcccgcaccagccatatgttcctctcgccagacaaaaatggtcagatgaccatctatcagaccagcggcaacccgtatggccacattattatgcgtggcggcaaaaaaccgaattatcatgccgatgatatcgccgcagcctgcgatacgctgcacgagtttgatttacctgaacatctggtggtggatttcagccacggtaactgccagaagcagcaccgtcgccagttagaagtttgtgaggatatttgtcagcaaatccgcaatggctctacggcgattgctggaattatggcggaaagtttcctgcgcgaaggaacgcaaaaaatcgtcggcggtcagccgctcacttacggtcaatccattaccgacccgtgtctgggctgggaagataccgaacgcctggtcgaaaaactcgcctctgcggtagatacccgcttctga

SEQ ID NO: 462482 - DNA, 204 bp, Shigella boydii
atgagcagaaaaaaccaacgttactctaaagagttcaaagccgaagctgtcagaacggttcttgaaaatcaactttcgatcagtgaaggcgcttcccgattatcccttcctgaaggcactttaggacaatgggttaccgccgccagaaaagggctcggtactcctggttcccgcacggtggctgaactggaatctgaaacttga

SEQ ID NO: 462483 - DNA, 1683 bp, Shigella boydii
atgaagtctgcattaaagaaaagtgtcgtaagtacctcgatatctttgatactggcatctggtatggctgcatttgctgctcatgcggcagatgatgtaaagctgaaagcaaccaaaacaaacgttgctttctcagactttacgccgactgaatacagtaccaaaggaaagccaaatattatcgtactaaccatggatgatcttggttatggacaacttccttttgataagggatcttttgacccaaaaacaatggaaaatcgtgaagttgtcgatacctacaaaatagggatagataaagccattgaagctgcacaaaaatcaacgccgacgctcctttcattaatggatgaaggcgtacgttttactaacggctatgtggcacacggtgtttccggcccctcccgtgccgcaataatgaccggtcgagctcccgcccgctttggtgtctattccaataccgatgctcaggatggtattccgctaacagaaactttcttgcctgaattattccagaatcatggttattacactgcagcagtaggtaaatggcacttgtcaaaaatcagtaatgtgccggtaccggaagataaacaaacgcgtgactatcatgacaacttcaccacattttctgcggaagaatggcaacctcaaaaccgtggctttgattactttatgggattccacgctgcaggaacggcatattacaactccccttcactgttcaaaaatcgtgaacgtgtccccgcaaaaggttatatcagcgatcagttaaccgatgaggcaattggcgttgttgatcgtgccaaaacacttgaccagccttttatgctttacctggcttataatgctccgcacctgccaaatgataatcctgcaccggatcaatatcagaagcaatttaataccggtagtcaaacagcagataactactacgcttccgtttattctgttgatcagggtgtaaaacgcattctcgaacaactgaagaaaaacggacagtatgataatactattattctctttacctccgataatggtgcggttatcgatggtcctctgccgctgaacggggcgcaaaaaggctataagagtcagacctatcctggcggtactcacaccccaatgtttatgtggtggaaaggaaaacttcaacccggtaattatgacaagctgatttccgcaatggatttctacccgacagctcttgatgcagccgatatcagcattccaaaagaccttaagctggatggcgtttccttgctgccctggttgcaagataagaaacaaggcgagccacataaaaatctgacctggataacctcttattctcactggtttgacgaggaaaatattccattctgggataattaccacaaatttgttcgccatcagtcagacgattacccgcataaccccaacactgaggacttaagccaattctcttatacggtgagaaataacgattattcgcttgtctatacagtagaaaacaatcagttaggtctctacaatctgacggatctacagcaaaaagataaccttgccgccgccaatccgcaggtcgttaaagagatgcaaggcgtggtaagagagtttatcgacagcagccagccaccgcttagcgaggtaaatcaggagaagtttaacaatatcaagaaagcactaagcgaagcgaaataa

SEQ ID NO: 462484 - DNA, 1158 bp, Shigella boydii
atgcacgttacagccaagccctccagttttcaatgtaatctcaaatgtgattactgtttttaccttgaaaaagagtcgcagtttactcatgaaaaatggatggatgacagcactctgaaagagttcatcaaacaatatatcgcagcgtctggcaatcaggtctattttacctggcaaggcggtgaacccactctggctggcctggattttttccgtaaagttattcactatcaacaacgctatgcaggccaaaaacgtatttttaatgcattacaaacgaatggcattttattgaataatgaatggtgttcctttctcaaagaacatgaatttctggttggtatctcgatcgatggcccccaggagttacatgaccgttacagacgcagtaattcaggtaacggtacttttgcaaaagtgatagcagccatcgagcgtctgaaatcatatcaagttgagtttaatacgttaaccgtcattaataacgttaatgtccattaccctcttgaggtttatcattttttaaaatctatcggcagtaaacatatgcaatttatcgaattgctcgaaaccgggacgccgaatattgatttcagtggtcatagtgagaacacattccgtatcattgatttttctgtgcctcccacggcttatggcaagtttatgtcaaccatttttatgcaatgggttaaaaacgatgtgggtgaaattttcattcgtcagtttgaaagctttgtcagccgttttttggggaatgggcatacaagttgtattttccaggagtcctgcaaggataatctggttgttgaaagtaatggagacatttacgaatgcgaccattttgtctatccacagtacaaaattggaaacattaataaatctgaactcaaaacgatgaacagtgtacaactgacagcgcaaaaaaaacggatttcagcgaaatgtcagcaatgtgcatataaacctatctgcaatggcggttgtcctaagcatcgtattactaaagtaaacaatgagactgtttcttatttttgcgaaggttataaaatccttttttcaaccatggtaccttatatgaacgccatggttgagttagctaagaacagagtaccgctttaccacattatggatgttgcaaaacaaatggagaataattaa

SEQ ID NO: 462485 - DNA, 273 bp, Shigella boydii
atggaaatacgcgaaggccacaataaattttacattaatgacgaacagggcaagcaaatcgctgaaattgtctttgtgccgaccggagagaatttagcgattatcgaacataccgatgtcgatgaaagcctgaaagggcaggggattggtaaacagctggttgcgaaagtcgtggaaaaaatgcgtcgggaaaaacgaaaaattatcccactatgcccatttgcgaaacacgaatttgataaaacgcgggagtatgatgatattcgcagttga

SEQ ID NO: 462486 - DNA, 231 bp, Shigella boydii
atggatcaggcgctactggacgagggttatcgctgttataccggcgaaaagatcgatgtctatttcaacactgcgatatgtcagcattctggcaattgcgtacgtggcaacggcaagttatttaatctcaaacgaaagccgtggatcatgccggatgaagtcgacgtcgtcactgtggttaaagtgattgatacgtgcccgagcggcgcgctgaaataccgtcataaataa

SEQ ID NO: 462487 - DNA, 1632 bp, Shigella boydii
atgagacattcattgccctaccgcatgttactcaaacgtccgatgaaattgagtaccacagtgatcttaatggtcagcgcggtacagttctcggtgctattggtggtgcatctgatttacttctcgcaaatcagtgatatgacacgagacgggctggccaacaaggcactggcagtggcgcgtaccctcgccgactcgccggaaatccgtcagggcttgcagaaaaaaccgcaggagagcggaatccaggccatcgcggaagccgtgcgcaaacgcaacgatctgctgtttattgtcgttacggatatgcaaagtcttcgctactcgcatcctgaagcccagcgtattggtcagccatttaaaggtgatgacatccttaaagcgctgaatggcaaagaaaatgtcgctatcaatcgcggttttctggcgcaggctttacgcgtatttacccccatctacgatgaaaatcataaacaaattggcgtggtggtgagcggccttgagttaagccgcgtgacccaacaaatcaatgacagtcgctggagcattatctggtcggtattatttggcatgctggtcggactgattggcacctgcattctggttaaggtactgaaaaaaatccttttcggcctggaaccctacgaaatctccacgctgtttgagcagcgccaggccatgttgcagtctatcaaagaaggcgtcgttgccgtggacgatcgcggcgaggtcacgctgatcaacgatgccgcacaagaattgctgaattaccgtaagtcgcaggacgatgagaaactgtcgacgctaagccactcatggtcacaggtggtagatgtctcggaagtgttacgcgacggtacgccgcgccgcgacgaagagattacgattaaagaccggctattactgatcaacaccgttccggtgcgcagtaatggcgttatcatcggtgccatttcaaccttcagggacaaaactgaagttcgtaaactgatgcagcgactcgacggtctggtcaactatgctgatgcacttcgtgaacgatcccacgaatttatgaataaattgcatgtgattctcggattattgcatctgaagagttataagcagttggaagattacagtctcaaaacagccaataactataaggaagagattggctctctgctgggtaagatcaaatctccggttatcgctggttttttaatcagcaagattaaccgcgcgaccgatttaggccatacgctgattttaaacagtgaaagcctgctgccagacagcggcagtgaggaccaggtcgcgacgctgattaccacattgggaaatctgatagaaaacgcgctggaagcattagggccggaacccggtggcgaaattagcgtaacattgcactaccgtcacggctggctgcactgcgaagttaacgatgatggaccggggatcgcacccgacaaaatcgatcacatttttgacaaaggtgtctcgacaaaaggaagcgagcgaggcgtcggtttagcacttgtcaaacaacaggtagaaaatctcggcggcagcatcgccgtggaatcggaacccgggattttcacacaattttttgtccagataccctgggacggggagaggtcaaacagatga

SEQ ID NO: 462488 - DNA, 720 bp, Shigella boydii
atgagcaatgtattaattatcgatgacgacgcaatggtcgcggagctgaatcgccgatacgtagcacaaatcccaggctttcaatgctgtggaacagcctcgacgctggagaaagccaaagagattatcttcaatagcgatacgcctatcgacctgatattgctcgatatctatatgcaaaaagagaacgggctcgatttactgcctgtcctgcataacgcgcgttgcaaaagtgatgtgattgtcatctcctccgcagccgatgcggcaaccattaaagattcgctgcattacggtgtcgtggattacctgatcaaacccttccaggcttcccgctttgaagaggcgctcaccggctggcggcaaaagaaaatggcgctggaaaaacatcagtattatgaccaggccgagcttgatcagctaatccacggcagcagctccaacgaacaggatcctcgtcgcttgccaaaaggcttaacgccgcagacgttacgcacgctgtgccagtggattgacgcgcatcaggactatgagttttcaaccgacgagctggctaacgaggttaacatctcgcgtgtttcctgccgtaaatacctcatctggctggtcaactgccacatcttgttcaccagtatccattatggcgtcacggggcgtccggtttaccgttaccgtattcaggcagaacactactcactactgaaacaatattgccaataa

SEQ ID NO: 462489 - DNA, 1341 bp, Shigella boydii
atgttatttactatccaacttatcataatactgatatgtctgttttatggtgccagaaagggtggtatcgcgctgggtttattaggcggtatcggtctggtcattctggtcttcgtcttccaccttcagccaggtaaaccaccggttgatgtcatgctggttatcattgcggtggtggcggcatcggcgaccttgcaagcttcgggcggtcttgatgtcatgctgcaaattgccgagaagttgctgcgccgcaacccgaaatatgtctcaattgtcgcgccgtttgtgacctgtacgctgaccattctttgcggtacgggtcatgtggtttacaccattctgccgatcatctacgacgtcgccattaagaacaacatccgtccggaacgtccgatggcggcaagttctatcggtgcacagatggggattatcgccagtccggtgtcggttgcggtcgtgtctctggttgcgatgctgggtaatgtcacctttgatggtcgccatcttgagttcctcgacctgctggcaatcaccattccatcgacgttaatcggtatcctggcgatcggtatcttcagctggttccgtggtaaagatctggataaagacgaagagttccagaaattcatctccgtaccggaaaaccgtgagtatgtttacggtgataccgcgacgctgctggataaaaaactgccgaaaagcaactggctggcaatgtggattttcctcggggcaatcgctgtagtcgcccttcttggtgctgattcggacctgcgtccatccttcggcggcaaaccgctgtcgatggtactggttattcagatgtttatgctgctgaccggggcgctgattattatcctgaccaaaaccaatcccgcgtctatctcaaaaaacgaagtcttccgttccggtatgatcgccatcgtggcggtgtacggtatcgcatggatggcagaaaccatgttcggtgcgcatatgtctgaaattcagggcgtactgggtgaaatggtgaaagagtatccgtgggcctatgccattgttctgttgctggtttccaagtttgtaaactctcaggctgcggcgctggcggcgattgttccggtcgcgttggcgatcggcgttgatccggcatacatcgtggcttcagcaccggcttgctacggttattacatcctgccgacttatccgagcgatctggcagcgattcagtttgaccgttccggcaccacccacatcggtcgcttcgtcatcaaccacagctttattctgccggggttgattggtgtgagcgtatcgtgcgtcttcggctggatcttcgccgcgatgtacgggttcttataa

SEQ ID NO: 462490 - DNA, 1647 bp, Shigella boydii
atgtcaaacaaaccctttatctaccaggcacctttcccgatggggaaagacaataccgaatactatctactcacttccgattacgttagcgttgccgacttcgacggcgaaaccatcctgaaagtggaaccagaagccctgaccctgctggcgcagcaagcctttcacgacgcttcttttatgctccgcccggcacaccagaaacaggttgcggctattcttcacgatccagaagccagcgaaaacgacaagtacgtggcgctgcaattcttaagaaattccgaaatcgccgccaaaggcgtgctgccgacctgccaggataccggcatcgcgatcatcgtcggtaaaaaaggccagcgcgtgtggaccggcggcggtgatgaagaagcgctgtcgaaaggcgtctataacacctatatcgaagataacctgcgctattcacagaatgcggcgctggacatgtacaaagaggtcaacaccggcactaacctgcctgcgcaaatcgacctgtacgcggtagatggcgatgagtacaaattcctttgcgttgcgaaaggcggcggctctgccaacaaaacgtatctctaccaggaaaccaaagccctgctgactcccggcaaactgaaaaacttcctcgtcgagaaaatgcgtaccctcggtactgcagcctgcccgccgtaccatatcgcgtttgtgattggcggtacgtctgcggaaaccaacctgaaaaccgtcaagttagcaagcgctcactattacgatgaactgccgacggaagggaacgaacatggtcaggcgttccgcgatgtccagctggaacaggaactgctggaagaggcccagaaactcggtcttggcgcgcagtttggcggtaaatacttcgcgcacgacattcgcgttatccgtctgccacgtcacggcgcatcctgcccggtcggcatgggcgtctcctgctccgctgaccgtaacattaaagcgaaaatcaaccgcgaaggtatctggatcgaaaaactggaacacaacccaggccagtacattccacaagaactgcgccaggccggtgaaggcgaagcggtgaaagttgaccttaaccgcccgatgaaagagatcctcgcccagctttcgcaatacccggtatccactcgtttgtcgctcaccggcaccattatcgtgggccgagatattgcacacgccaagctgaaagagctgattgacgccggtaaagaacttccgcagtacatcaaagatcacccgatctactacgcgggtccggcgaaaacccctgccggttatccatcaggttcacttggcccaaccaccgcaggccgtatggactcctacgtggatctgctgcaatcccacggcggcagcatgatcatgctggcgaaaggtaaccgcagtcagcaggttaccgacacgtgtcataaacacggcggcttctacctcggtagcatcggcggtccggcggcggtactggcgcagcagagcatcaagcatctggaatgcgtcgcttatccggagctgggtatggaagctatctggaaaatcgaagtagaagatttcccggcgtttatcttggtcgatgacaaaggtaacgacttcttccagcaaatcgtcaacaaacagtgcgcgaactgcactaagtaa

SEQ ID NO: 462491 - DNA, 630 bp, Shigella boydii
atgacccgcacactcaagccgttaattcttaacaccggcgcactggcgctaacattaatcctgatttataccggcatttcggcccatgacaaactcacctggctgatggaagtgacaccggtgattattgtcgtgccgctactgcttgccaccgccagacgttatccgttaacgccgctgctctatacgctcattttccttcacgccatcatcctgatggtcggcggacaatacacctacgcgaaagtccccgttggttttgaggtgcaggaatggctggggttgagccgtaatccgtatgacaagctggggcactttttccaggggctggtgcctgcactggtggcacgagaaattctcgttcgcgggatgtacgtgcgcggacgtaaaatggtggcgttcctagtctgctgcgtggcgctggcgataagcgcaatgtatgaattaatcgagtggtgggcggcgctggcaatgggtcagggagcggatgattttctcggcacccagggcgaccagtgggacacgcaatccgatatgttctgcgcgctgcttggcgcattaacgacggtgatattcctcgctcgctttcattgccgccagctacggcgctttggcttgataaccggataa

SEQ ID NO: 462492 - DNA, 276 bp, Shigella boydii
gtgccacttcacattgcggttgtgttagggatgattggctatgtaccgaatgttgaacagtctacgcaagccctattaggtatgcagtttattatgattgctctaccaactctgtttttcatggtaacgctgattctctacttccgtttctatcgcctcaatggtgacacgctgcgcaggatccagatccatctgctggataaatatcgcaaagtaccgcccgagcctgttcatgctgatattccggtcggtgcagtgagtgatgtgaaagcctga

SEQ ID NO: 462493 - DNA, 1131 bp, Shigella boydii
atgctcgacagttatgccgagcaggcggataacatgccgttattgcatcgggcgctggtgctggcgtgggcacaggagatgaatctgccgtgcaaaacgttgttgaaagggttggatgaagctatcgcccggcgcggaactaaagatgaagatttctctgaggaagacatccgcgatatcaatgacagcctgatcctcgatacaccggaatctccactggcagatgcggtggcaaacgtcttaaccatgacgttgctgaaaaaagcgcagttgaagtccacggtgatgccacaggttcagcaatatgcgtgggataaagcggcaaacagcaatcagccgctggcgcacacggttgtgctgctcaatagcggtggtgacgctacccagacggccgctattttaagtggtttgaccgctgagcaatccactattgagcgcgcgctggccatgaactggctggcgaaatatatggcgacaatgcctccagttgttttgcctgcgcctgcgggcgcatgggctaaacataagttaactggagggggcgaatactggcgttgggttggtcagggcgtgccggacattctctcttttggtgacgaattatcgccgcaaaatgtgcaggtccgctggcgtgagccggcaaaaatggctcaacaaagtaacattccggtgaccgttgaacgccagttgtatcggcttatccctggtgaagaagagatgagctttattctgcaaccggtgaccagcaatgagattgacagcgatgcgctgtatctcgatgacatcacgcttaccagcgagcaggatgcagttctgcgctacggtcaggtggaagtaccgctgccaccgggagccgacgttgagcgcacaacatggggcatttcggtcaataaacccaacgccgcgaaacagcaggggcaattgctggaaaaagcgcgaaatgaaatgggcgaactggcctatatggtgccggtgaaagaactgacgggaacggtcactttccgccatttgctgcgcttctcgcaaaaagggcaattcgttctgcctcctgctcgttatgtgcgttcctatgcacctgcacagcaaagtgttgcggcagggagtgaatggaccgggatgcaggtgaaataa

SEQ ID NO: 462494 - DNA, 1650 bp, Shigella boydii
gtgaactggcgcagaatcgtctggctattggcgttggttactcagccaacgcttgcggaggagacgccgttacaactggcactgcgtggtgcgcagcacgatcaactgtatcagctgtcgtcatcaggcgtgaccacagtctcagcattacctgactcgctcaccacgccgttagggagtttgtggaaactgtatgtttacgcctggctggaggatacccatcaaccggagcagccctaccagtgtcgcggaaactccccggaagaggtttattgttgtcaggctggggagagcataacgcgcgataccgcgctggtacgttcctgtgggctctattttgcgccgcagcggttgcatattggcgcagatgtgtgggggcaatactggcaacagcgtcaggcgcctgcgtggttagcgtctcttactacgctgaagccagaaacctcggtaacggttaaatcgctgcttgattcattagcgacgttacctgcgcaaaacaaagctcaggaagtcttactggatgtggtgctggacgaggcgaaaatcggtgtcgcatccatgctcggtagtcgggtacgggtgaaaacctggagctggtttgccgatgataaacaggaaatccgtcagggtggttttgccggctggttaaccgatggtacaccgctgtgggttactggcagtggcaccagcaaaacggtactaacccgttatgcgacagtgcttaatcgggttttgccagtgccgacgcaggttgccagtgggcaatgtgtagaggtggagctgtttgcccgctatccgctgaagaaaatcacagcggaaaagagtacgacggcagtaaaacccggcgtacttaatgggcgctatcgtgtgacgtttactaatggtaaccacattacgtttgtcagccacggtgagacgaccttactgagcgaaaagggcaaactgaaattgcagtcgcatctcgatcgtgaagagtacgttgccagagttctggatcgcgaggcgaaaagtacgccccctgaggcagcgaaagccatgaccgtggcgattcacacttttttacagcaaaacgccaatcgggaaggcgattgcctgaccatccccgacagcagcgccacgcagcgtgtttctgcttcgccagcgaccacgggggcgcgaacgatgaccgcctggacgcaggatctcatctatgcaggcgatccggttcattatcatggcagtcgagctaccgaagggacactttcctggcggcaagccacggcccaggcggggcagggagagcgttacgaccagatactcgcgtttgcttatcccgacaacagccttagccgctggggagcgccacgctcaacctgccagttattacccaaagcgaaagcctggctggcgaaaaaaatgccgcagtggcggcgtatattacaaggcgagacggggtacaacgaaccagacgtgtttgcggtctgtcgtttagtctcaggtttcccctataccgatcggcagcagaaacggctgtttattcgtaacttctttacgcttcaggatcggctggatttaacccatgagtatctgcacctggcctttgatggttatcccaccgggcttgatgagaactatatcgaaacgctgacccgacaattattaatggactaa

SEQ ID NO: 462495 - DNA, 696 bp, Shigella boydii
atgcgaaagatttttcttccgttgttactggtggcactttcgcctgtcgctcacagtgaaggtgtgcaggaagtcgagattgacgcaccgctctctggctggcatccggcagagggcgaagatgccagtttttcacaatcgatcaattacccggcgtcgtccgtcaacatggcagatgatcaaaatatctcagcgcagatccgcggcaaaataaagaattatgctgcggcgggtaaaattcagcagggccggctggtggtcaacggtgccagtatgccgcagagagttgaatccgatggttcatttgcacgcccttatattttcactgaaggcagcaacagcgtgcaggtcatcagcccggatgggcaaagccgacaaaaaatgcagttttactcaacgccgggtacaggaacgattcgtgcacgtttacggctggttctctcgtgggatacggacaataccgatctcgatctccatgttgtcacgcccgatggcgaacacgcctggtacggtaacaccgtgctgaaaaacagtggtgcactggatatggatgtcacgacggggtacggacccgagattttcgccatgccagcgccagttcacggacgctatcaggtgtatatgaagtggtcaacaaaaactggccaccgagttagagtttttccagtatcgattttccgattcgtttgggggtaa

SEQ ID NO: 462496 - DNA, 756 bp, Shigella boydii
gtgggtgaattgcgcgatgaagacggatttacaccggacgtccttcaggcgcaaatacttcatggtttttcccacgggatcactttatatggaggtatgcaggctgctgaaaattatggttctgcagctctgggtgtcggtaaagatcttggcgctttgggcgcaatttctttcgatgtgacacatgctcgtgcgaattttagccatgatgatacagaaacgggtcagtcatatcgctttctctattcaaaacgatttgacgacacagacactagcttgcgcctggttggctatcgttactccaccgagggctactataccctcaatgagtgggcatcgcggcgcaacagccctgaagacttttgggaaacaggtaaccgacgtagtcgcgtggagggaacgctaacgcagtcgttggggagagattatggcaatttatacctgacattaagccggcaacaatactggcataccgatgatgtcgaacgattaatgcaatttggctacagcagtagctggaagcgtctctcgtggaacgtctcctggagttattccaatactgccagacaggggacggggaacaaccatgccagtgataacaccagtgagcagatctacatgctctctttatctgttcctttatcgggctggtggggtaatagttacgccacctattctgtttcgcaaaacgataattccggtagctcacatcaagcggtacggcgctggaaagaaataacctttcatggaatttaa

SEQ ID NO: 462497 - DNA, 405 bp, Shigella boydii
atgaaccgattctcaaaaactcaaatttatttacattggataacgctgcttttcgttgcaataacctatgccgcgatggaactccgtggctggtttcctaaaggtagtagtacttatctgctgatgcgagaaacacattacaatgcgggtatattcgtttgggtgttaatgttttcacgcctgattataaaacaccgttatagtgatccttctattgtgccaccgccacctgcctggcaaatgaaagcggcttcgctaatgcacatcatgctttatataaccttccttgcacttcctctgctggggattgctttgatggcttacagtggaaaatcgtggagtttccttggtttcaatgtgtctccctttgttaccccaaacagcgaaattaaagcactgatataa

SEQ ID NO: 462498 - DNA, 303 bp, Shigella boydii; identical to SEQ ID NO: 459543

SEQ ID NO: 462499 - DNA, 642 bp, Shigella boydii
atgagtacgcaacccatcattattgagttcggcagctatcgctggcccagacatcttgcaatacatgaagcagatcatgcgatagccgcatggtttttcggcatacaggaggtagaaattgcgttatcgggtaataaccgagtggcaaaaacctaccttagcggcgatgttgatgaatgtggagctgtcgcggtatggcacgccaactatccacggaatgtggctgaggttaagtcttacaccctctcgaatgatgacaccaggttacgtctgatagaccaggtatgccgggctatggttatctctctggctggtatcgtcgcgcaatcacgctatacgggggatgatattaacgcactgatggaaacgtccgggaaagcagacatgaaaaatgttcgtgatttatcagaggtataccgggtggctggtggggaggatgctgatatacagagaatatccctttcccgtgctgaggcgctgattgccctgaaatggtgggatgttatcgcgctggcgaaaatactggagaaccgtaaccatatgcctgccagcaacttccagcgcattatgggtgatattgacaagcctgtaccaaagcctatgacgctggctgaactggatgaattggtgggtgaagaatga

SEQ ID NO: 462500 - DNA, 324 bp, Shigella boydii
ttgaatgcctatgggctgagtcgattcgcgccgctgggttatgacccgcgcgatttacccatccgtgatttagccgggtacaggaagaaggggaaccacgacggcgacccgataattttctacaccttcccggcagcgtttgagcaggagattgcaaagggcttcaataccaaacagtttgccgaagttctaaagaatgcaggaatgcttacaccaccaacgagcgggcgaggctatcaggggcgagtaagggaggatgggcgacagattcgcgtctatgtactcaatttcatggcagaggaaagcagccagccagaagaataa

SEQ ID NO: 462501 - DNA, 1233 bp, Shigella boydii
gtgagtattgtaaagaatactttatggaatataagtgggtatattataccatcattaatagcaattcctgcgttaggtatactgtctagaattctagggaccgagcaatttggcctttttacgttagctattgccttagttggatatgcaagtatttttgatgctggattgaccagagctgttataagagaagtatcaatatataaaaatgttcataaagaattaagagcgatcatttcaacttcaacggtaattctaactatattgggcttgattggcggtagtgtactatttttgagtagcaatgtaattgttaaattattaaacattaacgcgaatcatgttgtagaatctgtcaaagcaatatatattatttcagctaccatacccttatacttgttaaaccaagtctggttggggatttttgaggggatggaaaagttcagaaaagtaaatttaataaaatcaattaacaactcttttgtggctggattaccagtgattttctgtttttttcatggaggattactaagtgctatatatggtttagttatggcaagagtcttatcacttatagtgacctttatatttagtcgaaaactaataatatcatctgggctgtctgtaaaaattgtaacagttaaaagattaatcggctttggaagctggataacagttagcaatattattagccctattatgacatatatggatcgttttattctttcacacattgtgggggctgataaagtttctttttatactgctccgtctgaaggtatacaacgcttaacgatattaccaagtgcgttgtccagagctatttttccaagattaagttcagaattgcaatcggtaaagcaaactaaaatattatcatattttataatggttattggtatacttccaattgtaatgttgataattattttatcagattttataatgtccgcttggatgggacctacatatcatgggacgccaggtatagtattaaaaattcttgcaataggtttcttttttaattgcattgcacaaatcccatttgtttcagttcaggctagtggaagatcaaaaattacagctattattcatttgctcgaagttatcccatatttatgcatattatatatttttatttatcattggggaattgttggagccgcaatagcatggtctgtaagaacatcgttagattttttgatattattattaattgatacgaaatattaa

SEQ ID NO: 462502 - DNA, 252 bp, Shigella boydii
atgcacttgccttacccactaggaatgctgggtggatattgctttgatatcctgagcaaaattacgggcaaaaaatacgctgtcagctctgtgcgcgtgaaaaaattctgcgcaacaacacagtttgacgcaacgaaagtgcattcttcaggttttgttgcaccgtatacgctgtcgcaaggtctggatcgaactctgcagtatgaattcgtccatgccaaaaaagacgacataacgtttgtttctgagtaa

SEQ ID NO: 462503 - DNA, 369 bp, Shigella boydii
atgcttgaacaaccccttcctgcgcaggacgatgcggcgctggagaattttattcatccgttgccgatttgtgctgatgagagttgtcatacacgtagcaatctgaaggcgctgaaagggcgctatgagatggttaacattaagctcgataaaaccggtggtctgacggaagcgctggcgctggcgactgaagcgcgtgcacaaggtttcagtctgatgctgggctgcatgttgtgtacctctcgtgccattagcgccgctttaccgctggtgccgcaggtcagtttcgccgatcttgacggaccgacctggctggcggtagatgtggaaccggcgcttcagttcacgacgggcgaattgcatctttag

SEQ ID NO: 462504 - DNA, 438 bp, Shigella boydii
atgaaaacgataaaacccgaatcgatagctcttttttgcctcttatctggagatgtggatctggcgaaacatctggctgatatattgccaataacctgttttgttggtgaggactggcagcaagatttccagcctcttgatggtgggcctgtgcaatcgttatcagattcgtatagcgattattcagtgctgctattgatagcagctgaaagcgagatatccgtaccagaatggctcgctcattctgagggaacgacggtaattttgattgcagaacacaatgcccgtttgctgactggtccggctggtggggctgtagcattaatccattatctgaatgaaatctgtcattccagagaaaccgctgtcaatgacgcattttgtcggacgttaacacgaggaagtctggctattccgcaatgccatcttctttcgtaa

SEQ ID NO: 462505 - DNA, 132 bp, Shigella boydii
atgatgatttcggtgacggggggcgtacggagcgggaagagtcgccacgcagaggcgcttattggggactcttcacaggttctgtatacgccacctcgcaaatccttgatgatgagatggctgcacggatag

SEQ ID NO: 462506 - DNA, 429 bp, Shigella boydii
atggctgcacggatagaacatcatcggcaaggccgcccgacgcactggcacacagtggagcgctggcaacatcttgatgaattaattcatgcagacattaacccgcatgaggctgtattgctggaatgcgttaccaccatggtgactaatctgttgtttgattatggcggcgataaagaccctgatgaatgggattatcaggcgatggaacaggcgattaatgctgagattcagtcgttgattgctgcctgccaacgttgtcccgcaaaggttgtattagtgactaacgaagtgggaatggggattgtgccggagagtcgtctggcacgacattttcgtgatattgccgggcgggtaaatcagcagctggccgctgcggcaaatgaagtatggttggtggtttcgggtattggagtaaaaatcaaatga

SEQ ID NO: 462507 - DNA, 333 bp, Shigella boydii
atgttaacgaaagatctttcgattactttttgcggcgtgaagtttcccaacccgttctgcctctcttcttcgccggtaggcaactgctatgagatgtgtgccaaagcctacgacacaggttggggcggtgtggtgtttaaaacgatcggcttttttatcgccaacgaagtctcgccgcgttttgatcatctggtgaaagaagataccggttttatcggcttcaaaaatatggagcagattgccgagcatccgctggaggagaatctggccgccctgcgtcggctgaaagaagattacccggacaaagtattgatcgctagactggccccctga

SEQ ID NO: 462508 - DNA, 261 bp, Shigella boydii
atgaaaactgttaatgagctgattaaggatatcaattcgctgacctctcaccttcacgagaaagattttttgttaacgtgggaacagacgccagatgaactgaaacaagtactggacgttgccgcagcattaaaagcactgcgtgctgaaaacatctcaaccaaagtctttaatagtggattaggtatttccgtattccgcgacaactccactgaaccgccccgggaatcctggagactaaactccctgagaaagaggtaa

SEQ ID NO: 462509 - DNA, 1779 bp, Shigella boydii
atggagcttgctactacgcagtcagtattgatgcaaattcaaccgacaattcagcgttttgccagaatgcttgccagcgttttgcagcttgaggttgagatcgttgatgaaaacttgtgtcgcgtcgccggaacgggcgcgtatgggaagtttcttggtcgccagttgagcggcaactcacgcctgctccgccacgtcctggaaacgaaaactgaaaaagttgtgacacagtctcgcttcgatcccctttgcgaaggttgcgatagtaaagaaaattgccgtgaaaaagcatttctgggtacgcctgtcattttacaggatcgttgtgttggggtgataagtttgattgccgttacccacgagcaacaagagcatatcagtgataatttacgcaaattttctgattatgttcgccatatatccaccatttttgtttcgaaacttctggaggatcaggggccaggagataacatcagtaaaatattcgcgaccatgatcgataatatggatcagggcgtattagttgttgatgatgaaagtcgggttcagtttgttaatcagactgccttaaaaacacttggtgttgtacaaaataatattattgggaaacctatccgtttcagaccattaacatttgagagtaattttactcatggacatatgcagcatattgtttcgtgggacgataaaagtgaattaatcattggtcaattgcataacattcagggccgacaattatttttaatggcatttcaccaatcgcataccagtttttctgtagcaaatgcacctgatgaaccacatattgaacaattggttggcgagtgccgtgttatgcggcaattaaaacgactcattagccgtattgcacccagcccatccagcgttatggtggttggtgaaagcggcacgggtaaagaagtcgtcgcccgagcaatccataagttgagcggaagacggaataaaccctttattgctatcaactgtgccgcgattccggagcagcttctggaaagcgaactgttcggttatgttaaaggcgcatttactggcgcttctgccaacggtaaaacagggttgattcaggcggcgaatacgggcacgctgtttctcgatgaaataggtgatatgccattaatgttgcaggctaaattactgcgcgctattgaggcgcgtgaaattctgccgattggtgccagtagcccaatacaagtcgacattcgcatcatttctgcaactaatcagaatttggcccagttcattgccgaaggtaaattccgcgaagatctcttctaccgacttaatgttatcccgataactctgccaccgctgcgtgaacgtcaggaagatattgaactattggtgcattactttttacatctgcatacccgtcgtctgggatcggtttatcctggcattgctcccgatgtcgtcgaaatattgcgtaagcatcgttggcccggaaacctgcgcgagttaagcaatttgatggaatatctggttaacgtagttccttcaggtgaagttatcgacagcacgctattgccgccaaatctgctgaataatggcacaacggagcaaagtgatgtaacagaggtcagtgaggcgcacctgtcactcgatgatgcgggcggcacggcgctggaggagatggaaaagcaaatgatccgcgaggcgctttcacgtcataacagcaagaagcaagttgctgatgaactgggcatcggcattgctacgctctatcgcaagattaagaaatatgagttgttaaacacataa

SEQ ID NO: 462510 - DNA, 480 bp, Shigella boydii
atgaatcacagcgaaacaattaccatcgaatgcaccattaacgggatgccttttcagcttcacgccgcaccaggcacgccgctctcggaattactccgcgaacaaggactgctaagtgtcaaacaagggtgctgcgtgggtgaatgtggtgcctgtacggtgttggtcgacggcacagcaatagacagttgcttataccttgccgcctgggctgaaggaaaagagatccgcacgctggaaggtgaagcgaaaggcggaaaactttctcatgttcagcaggcttatgcgaaatccggcgcagtgcagtgcgggttttgtacgcctggcctgattatggctaccacggcaatgctggcgaaaccacgcgagaagccattaaccattacggaaattcgtcgcggactggcgggaaatctttgtcgctgcacggggtatcagatgattgtaaatacagttctggattgcgagaaaacgaagtaa

SEQ ID NO: 462511 - DNA, 879 bp, Shigella boydii
atgtttgattttgcttcttaccatcgcgcagcaacccttgccgatgccatcaacctgctggctaacaacccgcaggccaaactgctcgccggtggcactgacgtactgattcagctccaccatcacaatgaccgttatcgccatattgttgatattcataatctggcggagctgcggggaattacgctggcggaagatggctcgctacgtatcggctctgcaacgacatttacccagctaatagaagatcctataactcaacgtcatctcccggcgttatgtgctgcggccatgtccattgctggactgcagatccgtaacgtcgctacctacggtggaaatatttgcaacggtgccaccagcgcagattctgccacgccaacgctaatttatgacgcgaaactggagatccactccccgcgcggtgttcgtttcgtcccgattaatggctttcacaccgggccgggcaaagtgtctcttgagcatgacgaaatcctcgtcgcctttcattttccgccacagccgaaagaacacgcgggcagcgcgcattttaaatatgccatgcgcgacgcaatggatatttcaacgattggctgcgccgcacattgccgactggataacggcaatttcagcgaattacgcctggcatttggtgttgccgcgccaacgccgattcgctgccaacatgccgaacagactgcacaaaatgcgccattaaacctgcaaacgctggaagctatcagcgaatctgtcctgcaagatgtcgccccgcgttcttcatggcgggccagtaaagagtttcgtctgcatctcatccagacgatgaccaaaaaagtgattagcgaagccgtcgccgcggcggggggaaaattgcaatga

SEQ ID NO: 462512 - DNA, 2298 bp, Shigella boydii
atggaagcgcgggaagcaaccgctacgggtgaatcatgcatgcgcgtcgatgccattgctaaggtcaccgggcgggcacgatatactgacgattatgttatggcgggcatgtgttatgcgaaatatgtacgtagccctatcgcacatggttatgccgtaagtattaatgatgaacaagccagaagtttgccgggcgtactggcgatttttacctgggaagatgtgcctgatattccattcgctacagctgggcatgcctggacacttgacgaaaacaagcgcgataccgccgatcgcgcactgctaactcgccatgttcgtcatcatggtgacgccattgccatcgtcgtggcccgcgatgaactcacggcagaaaaagcggcgcaattggtcagcattgagtggcaagaattacccgttatcaccacgccagaagcggcgctggcagaagacgctgcaccaatccataacggtggcaatttactgaaacaaagcacgatgtcgacgggtaatgtccaacaaacaatcgatgccgccgactaccaggtacaggggcactatcagacccccgttattcaacattgtcacatgaaaagcgtaacatcgctggcgtggatggaggatgactcgcgaattaccatcgtttccagcacccagatcccgcacattgttcgccgcgtggttggtcaggcgctggatattccctggtcatgcgtacgagtcatcaaaccatttgtcggtggcggttttggtaataaacaggatgtactggaagagccaatggcggcattcctgaccagcaagcttggcggcattccggtgaaagtttcccttagccgtgaagagtgtttcctcgcaacccgtacccgccacgcttttaccattgacgggcaaatgggcgtgaaccgcgacggaacattgaaaggttatagtctggatgttctgtctaacaccggcgcttatgcatctcacgggcactccatcgcttctgcgggggggaataaagtcgcttacctttatcctcgttgtgcctacgcttacagttcaaagacctgctataccaacctcccctcggctggtgcgatgcgtggttatggcgcgccacaagtcgtatttgccgttgagtctatgcttgatgacgccgcgacagcgttaggtattgatcctgttgaaattcgtttacgcaacgccgcccgcgaaggagatgctaatccgctcacgggcaaacgtatttacagcgcagggttgccggagtgtcttgaaaaaggccggaaaatctttgaatgggaaaaacgccgtgcagaatgccagaaccagcaaggcaatttgcgccgcggcgttggcgtcgcctgttttagctacacctctaacacctggcctgtcggcgtagaaatagcaggcgcgcgccttctgatgaatcaggatggaaccatcaacgtgcaaagcggcgcgacggaaatcggtcagggtgccgacaccgtcttctcgcaaatggtggcagaaaccgtgggggttccggtcagcgacgttcgcgttatttcaactcaagataccgacgttacgccgttcgatcccggcacatttgcctcacgccagagctatgttgccgcgcctgcgctgcgcagtgcggcactattattaaaagagaaaatcatcgctcacgccgcagtcatgctacatcagtcagcgatgaatctgaccctgataaaaggccatatcgtgctggttgaacgaccggaagagccgttaatgtcgttaaaagatttggcgatggacgctttctaccaccctgaacgcggcgggcagctctctgctgaaagctccatcaaaaccaccactaacccaccggcgtttggctgtacctttgttgatctgacggtcgatattgcgctgtgcaaagtcaccatcaaccgcatcctcaacgttcatgattcagggcatattcttaatccactgctggcagaaggtcaggtacacggcggaatgggaatgggcattggctgggcgctatttgaagagatgatcatcgatgctaaaagcggcgtggtccgtaaccccaatctgctggattacaaaatgccgaccatgccggatctgccacaactggaaagcgcgttcgtcgaaatcaatgagccgcaatccgcatacggacataagtcactgggtgagccaccaataattcctgttgccgctgctattcgtaacgcggtgaagatggctaccggtgttgcaatcaatacactgccgctgacgccaaaacggttatatgaagagttccatctggcaggattgatttga

SEQ ID NO: 462513 - DNA, 618 bp, Shigella boydii
atgattaaggtgtatggcgtacccggatggggctctacaatcagtgagctgatgctaacactggctgatattccttatcagttcgttgatgtcagtggttttgaccacgagggaacttcacgcgagttattgaaaaccctgaacccgttgtgtcagattccgacactggcgctggaaaatgacgagattatgacggagacagcggcgattgcattgatggttctcgatcgtcgcccggaccttgcgccaccggttgggcgcgccgaacgtcagcagtttcaacggctattggtctggctggttgctaatgtctatccaacattcactttcgccgattaccctgagcgttgggctcctgacgcacctgaacagttaaagaagaatgttattgaatatcgtaaatcgctttatatctggctgaattcacaattgaccgctgaaccttatgcgtttggtgagcaactaacgctggtggactgttatctttgcactatgcgcacatgggggcctgggcatgaatggtttcaggataatgccacgaatatcagtgcgattgctgatgctgtatgtcagttaccgaaattacaagaagtattaaaaaggaatgaaattatttga

SEQ ID NO: 462514 - DNA, 423 bp, Shigella boydii
atgaacacactacgttattttgattttggagctgcccgccccgttttgttattaattgcccgtatcgccgtggtcttaattttcattattttgggttttcccaaaatgatgggctttgacggtacggtccaatatatggcctcgttgggcgcgccaatgccgatgctggcagcgattattgcggtagttatggaagtgcccgccgcgatattaatcgtgcttggctttttcacccgtccgctggcggtgctgtttattttctacacgctgggtacggcggtgattggtcaccattactgggatatgaccggcgatgcggttgggccaaatatgattaatttctggaagaatgtcagtatcgctggcgcgttcttgctattggcaattaccgggccgggggcaatttctctcgatcggcgttag

SEQ ID NO: 462515 - DNA, 873 bp, Shigella boydii
atgaccatctataccttatctcacggaccgctaaagctggatgtctctgaccagggcggcgtaatcgaaggcttctggcgtgacacgacgccgcttttacgtcctggtaaaaaaagcggtgtggcaaccgatgcttcctgttttccgctggtgccgtttgcaaaccgggtgagcggcaatcgttttgtctggcaggggcgtgagtatcaactgcaaccgaatgttgagtgggatgcgcactatctacacggcgatggctggctgggcgagtggcaatgtgtctcgcacagcgatgatagcttgtgtctggtgtatgaacatcgcagcggtgtctatcactatcgggtaagtcaggcgtttcatttaacggcggatacgctgacggtgacgctctctgtcaccaatcaaggggcagagacgctgccatttggtaccggctggcatccttattttccgttgtcaccacaaacgcggattcaggcgcaggcgagcggttactggctggagcgggagcagtggctggcgggtgagttttgcgagcagctaccgcaggaactggattttaaccagctcgcgccgttgccgcgccagtgggtgaacaatggttttgccggatggaatggtcaggcccgcatcgagcagccgcaggaaggttatgccatcatcatggaaacgacgccacctgcaccgtgttatttcatctttgtttccgaccctgcgtttgataaaggatatgcgtttgatttcttctgtctggaaccgatgagccatgcgccggatgatcatcatcgcccggaagggggtgatctcattgcgctagcaccaggggaatcaacaacttcagagatgtcgttgcgggtagagtggctgtaa

SEQ ID NO: 462516 - DNA, 1062 bp, Shigella boydii
atgaaaacgatgctggcagcttatttaccaggaaattcaaccgtcgatctgcgggaagttgcggtgccgacgccggggattaaccaggtactgatcaaaatgaaatcctccgggatttgcggaagcgatgtccactatatctatcatcaacaccgtgccacggcggcggcacccgataaaccgttataccagggatttatcaacggtcatgaaccatgcgggcagattgtggcgatggggcaaggctgtcgccattttaaagagggtgatcgcgtgctggtgtatcacatttctggctgtggtttttgcccgaactgccgccgcggctttcctatctcttgtactggcaaaggaaaagcggcttacggctggcagcgtgacggcggtcatgccgaatacttgctggcggaagaaaaagatctgatcctcctgccggatgcgcttagctacgaagatggtgcgtttatcagttgcggcgttggtacagcgtatgaaggaattttgcgcggcgaagtttccggcagtgataacgtgctggtggtcggtctggggccagtcggcatgatggcgatgatgctggcgaaaggtcgcggtgcaaaacggatcatcggcgttgatatgctgccggaacgtctggcgatggcaaaacagttaggggtgatggatcacggctatttagcaaccaccgaaggtctgccgcagattatcgccgaactcacccacggtggcgcggatgttgcgctcgattgttctggtaatgccgcaggtcgcttgctggcactgcgatccaccgctgattggggacgggtggtttacatcggagaaaccggaaaagtggagttcgaggtcagcgccgatctgatgcaccatcaacggcggattatcggctcctgggtgaccagtctgttccatatggaaaaatgcgcccatgatctgacggactggaaactgtggccgcgtaacgccattacccatcgcttctcgctggaacaggctggagatgcctatgcgctgatggcgagcggcaaatgcgggaaagttgtgattaacttcccggattaa

SEQ ID NO: 462517 - DNA, 999 bp, Shigella boydii
atgtctgcttcgtcattatcattgccgctgggcaagagcgtctcgctcaaacaatttgtcagtcgccatattaatgagatcggtttgctggtggtaatcgccattctttatctggtcttctccctgaatgcgcctggctttatctcattgaataaccagatgaacgtgcttcgcgatgctgccaccatcgggatcgccgcctgggcaatgacgctgattattatctccggtgaaattgatgtcagcgttggaccgatggtggcttttgtctcggtgtgcctggcatttttgctgcaatttgaagttccgttggcgattgcttgtctgctggtgttgctgttaggcgcgctgatgggaacgctcgccggggtgctgcgcggcgtgtttaacgtgcccagtttcgttgccacactggggctgtggagcgccctgcgcggaatggggctgtttatgaccaacgcactgccagtgccgattgacgaaaacgaggtgctggactggctgggcggacaatttctcggtgtgccagtatccgcgctgatcatgatggtgttgtttgcgctgtttgtgttcattagccgaaaaaccgccttcgggcgctcggtttttgccgttggcggtaatgccacggcggcgcagttgtgcggtattaacgttcgtcgagtgcgcattcttatctttaccctttcgggattattagcggcggtgaccggcattttgctggcggcacgcctcggttccggtaacgcaggtgccgcaaacggtctggagtttgacgtcatcgccgcggtcgtggtcggcggtacggcactttccggcggtcgcggttccctgttcggtacattgcttggtgtgctggtgattacgctaatcggtaacggtctggtgctgctcggtattaactcctttttccagcaggtggtacgcggcgtcatcatcgtggtggcggtgctggcgaatatcttgctgacccagcgaagcagtaaagcgaaacgctaa

SEQ ID NO: 462518 - DNA, 1512 bp, Shigella boydii
atgttcacggcaacagaggcagtcccggtagcaaaagtggtggcaggaaataagcgttaccccggcgtcgttgcgctggataacgttaacttcacgctcaataaaggcgaagttcgtgcgctgttaggtaaaaacggcgcgggcaaatcgactctcattcgaatgcttaccggcagcgaacgcccggatagcggtgatatctggattggcgagacgcgactggaaggtgacgaagctacgttgactcgccgtgccgctgaactgggggggcgtgcggtttatcaggaattaagtctggtggaagggctgacggtggcagaaaacctctgccttggtcaatggcctcgccgcaacggcatgattgattacctgcaaatggcgcaggatgcccaacgttgcttacaggcgctgggcgttgacgttagtcctgaacaacttgtttcaacgctaagcccggcgcaaaagcaactggtggaaattgcacgggtgatgaagggcgagccgcgcgtggtcattcttgatgaacccaccagctcgcttgccagtgcagaagttgaactggtgatcagtgcggtgaaaaagatgtcggcactgggcgtggcggtgatttatgtcagccaccggatggaagaaatccgccgcattgcctcctgtgccaccgttatgcgcgatggtcaggtggcgggcgatgtgatgctcgaaaacacctccacgcatcatattgtgtcgctaatgctagggcgtgatcacgttgatattgcgccggttgcccctcaggaaattgtggatcaggccgtactggaagtccgtgcgttacgccataagcccaagctggaggatatcagctttacgttacgtcgcggcgaagtgcttggcattgctggcctgctgggggcagggcgcagtgaattgctgaaggcgattgttgggctggagacgtatgaacagggcgaaattgttatcaacggcgagaaaatcacgcgccccgattacggcgacatgctgaaacgcggcattggctatacgccagaaaaccgcaaagaagcggggatcattccctggttgggcgttgacgaaaatacagtgctgaccaatcggcaaaaaatcagcgccaacggagtgctgcaatggtccaccatccgccgcctgaccgaagaggtgatgcagcggatgacggtcaaggccgccagtagcgaaacgcccatcggcacgctttctggtggcaatcagcaaaaagtggtgatcggtcgttgggtctatgccgccagccagattttgttgctcgacgagccaacgcgcggcgtcgatatcgaagccaaacagcagatttaccgtattgtccgtgagctggctgccgaaggaaaaagcgtggtgtttatctccagtgaagtggaggagttgccgctggtgtgcgaccgcatcctgttgttacagcacggtacgttctcgcaggagtttcactcgccggtcaatgtggatgagctgatgtccgccattctgtctgtgcactga

SEQ ID NO: 462519 - DNA, 327 bp, Shigella boydii; identical to SEQ ID NO: 5975

SEQ ID NO: 462520 - DNA, 174 bp, Shigella boydii
atgagttattcctcatttaagattattctcattcacgtaaaaaacataattcctatcatcacagccacgctcattttgaattatctgaataatagcgagcgttctttagttaagcagatcttaattgaagacgaaattattgtgcgtgcaacttacttaataccggacatctaa

SEQ ID NO: 462521 - DNA, 225 bp, Shigella boydii; identical to SEQ ID NO: 462228

SEQ ID NO: 462522 - DNA, 582 bp, Shigella boydii
atgtattaccctgtgacagactatatcgctcttgctctcattattagctttctttttctgacattatttatctgcctgttatgccttaaacatgagcgaataaaaaaagaaactatcaggcaaaaaaatgcacatattctggagcatggctggaatgcaactgagttctcatggttccgatacggacagtataacgaaacgggtatttacatctcgatcgagaagaccattatcattacaatcaccgtttctggtgggtgctttaaaaaagaatacagcattgtctcccacatgctggtcactgacaccataacagaggccaccctgtacgaaaacgggctgtatacgcgccacatcagactcagtcgcccagtatctgacagcaaataccccttgccacccggatctcagctcattaaaaatatgaccttacgactgcgcctgcaggatcagcaggaagaaacatccgtgacattatttcagggaaaaatgagtaccgacggaaataactattacatcatcaaaggtaaagtaagctcagtacttctgttattaaaaatgctgcagattaatcacgcctga

SEQ ID NO: 462523 - DNA, 1203 bp, Shigella boydii
atgcagacatcaaacataactaaccatgaaagaaatgactcatcatggatgtcaactgtcaaatcaactacagaagtaagttggaataaattgagtttttgtgacgttttactgaaaataataactttcggaatatattctccacacgaaactctagccgaaaaatatagcgaaaaaaaactaatggatagtttctcaccatcactatcacaagataaaatggacggagagtttgcccacgcaaacatagatggcatttcaatacggctatgccttaacaaaggcatatgttcggttttttatcttgatggagataaaatacaatccactcaactttcatcaaaagaatataataacttgttaagttcactcccccccaaacaattcaacttaggaaaagtacatactattacagctccggtatcagggaattttaaaactcacaagcctgcaccagaagttattgaaacagccattaattgctgtacatcgataataccaaacgatgattactttcccgttaaagacactgattttaatagtgtttggcatgatatttacagagatattcgagcatctgacagcaatagtacaaaaatatatttcaacaatattgaaataccactaaaattaattgcagatctaattaatgagttaggaattaatgaattcattgatagcaaaaaagagcttcaaatgctaagttacaaccaattaaataaaataatcaattcaaacttcccccaacaagacctatgttttcaaacagaaaaacttttgtttacttcactctttcaagaccctgcatttatatccgcactaacatctgcattctggcaatctcttcacatcacgtcttcctctgtggaacacatatatgcccaaattatgtccgaaaacatagaaaacaggcttaatttcatgcctgaacaacgagttattaacaattgtggacatattataaaaatcaacgcagttgtccctaaaaacgacactgcaatctctgcctctggggggagggcttacgaagttagctcatcaatattaccatcgcacataacatgtaatggtgttggtattaataaaatagaaacaagctatctcgttcatgctggaacacttccaagcagtgaagggcttcgcaatgctatccctccagaaagtcgtcaagtatcatttgccatcatatctcctgatgtttaa

SEQ ID NO: 462524 - DNA, 3309 bp, Shigella boydii
atgaatcaaattcacaaatttttttgtaatatgacccaatgttcacaggggggggccggagaattacctacggtaaaggaaaaaacatgcaaattgtctttttctccttttgttgttggtgcatccctgttgctcggggggccaatagcttttgctattcctctttcgggtactcaagaacttcatttttcagaggacaattatgaaaaattattaacacctgttgatggactttctcccttgggagctggtgaagatggaatggatgcgtggtatataacttcttccaacccctctcatgcatctagaactaagctacggattaactctgatattatgattagcgcaggtcatggtggtgctggtgataataatgatggtaatagttgtggcggtaatggtggtgactctattaccggatctgacttgtctataatcaatcaaggcatgattcttggtggtagcggcggtagcggtgctgaccataacggtgatggtggtgaggctgttacaggagacaatctgtttataataaatggagaaattatttcaggtggacatggtggcgatagttatagtgatagtgatggggggaatggaggtgatgccgtcacaggagtcaatctacccataatcaacaaagggactatttccggtggtaatggaggtaacaattatggtgagggtgatggcggtaatggaggtgatgccatcacaggaagcagcctctctgtaatcaataagggcacgttcgctggaggcaacggaggtgctgcttacggttatggttatgatggctacggtggtaatgctatcacaggagataacctgtctataatcaacaatggagctattttaggcggtaatggtggacattggggggatgctataaatggtagcaatatgaccattgctaatagcggatatataatttcaggtaaagaagatgatggaacacaaaatgtagcaggtaatgctatccacatcactggtggaaacaattcattaatactccatgaaggttctgtcattactggtgatgtacaggttaacaattcatccattctgaaaattatcaacaatgattacactgggaccacaccaactattgaaggtgatttatgtgctggtgattgtacaactgtttcactatcaggtaacaaattcactgtttcaggtgacgtttcttttggtgagaacagttctttaaatttagctggaatcagtagtctggaagcttctggaaatatgtcatttggcaacaatgtaaaagtggaagctattataaataactgggcgcagaaggactataaactgctaagtgcagataaagggataacaggtttcagtgtttctaatatatctatcatcaatccgttactcactactggtgctattgactatacaaaaagctatatcagtgaccagaataaattgatctacggtttgagctggaatgatacagatggcgacagtcatggagagttcaatctgaaagaaaacgctgaacttactgttagtactattctggcagataatctcagccatcataatataaatagctgggacggaaaatccctaacaaaatcaggggagggaactctcatcttggcggaaaaaaatacctactctggtttcaccaacatcaatgcaggcattctaaaaatggggacagttgaagctatgacacgtaccgctggtgttattgttaataaaggtgctaccttgaatttttcaggcatgaaccaaactgttaacactttattaaatagtgggactgtgctaatcaataatattaatgccccttttttgcctgaccccgtcattgtcacaggtaacatgactctggagaaaaacggtcatgttattctcaataatagttcgtcaaatgtcggtcagacctatgttcagaaaggtaattggcatggaaagggcggaatattatctttgggcgcggttctcggcaatgacaacagtaaaactgaccggctggaaattacaggccatgcgtctggtattacctatgttgcagtgacaaatgagggaggctctggagataaaactcttgaaggtgttcaaattatttcgacagattcttctgataagaatgcttttattcagaaaggccgtattgttgctggtagttatgactatcgcctgaaacagggcactgtatctggactgaataccaataagtggtatctaactagtcagatggataatcaagaatcaaaacagatgagcaatcaagagtctactcaaatgagtagtcgccgagctagttcacagcttgtatcttcacttaatttgggtgaaggtagtattcacacatggcgccctgaagctggcagttatattgctaacctgatagcaatgaacacgatgtttagtccttctctctatgaccgacacggtagcactattgttgatcctactacaggtcagctcagcgaaaccaccatgtggattcgtactgttggtggacataatgagcataatttagctgatagacaattaaaaaccacagctaacaggatggtttatcagattggtggagatattttgaagacaaacttcactgatcatgatggcttgcatgtgggtattatgggagcttatggatatcaggatagcaaaactcataataagtatactagttatagttcacgaggaactgtgagcggttatactgccggtttgtacagttcttggtttcaggatgaaaaagaacgaacaggtctatatatggatgcttggttgcagtacggttggtttaataatacagtcaaaggagatgggttaactggtgagaaatattccagcaaaggaataacaggagctttggaagctggctatatctacccaaccatacgctggactactcataataatattgacaacgcattgtatctcaatccacaagtccagataactaggcatggggtaaaagcaaacgactatattgaacacaatggcactatggtcacatcctctggggtcaataatattcaagcaaaattgggattgcgtacatccttaattagtcatagttgtatcgataaggagactcttcgtaagttcgaaccatttttggaagtgaattggaaatggagctcaaagcaatatggtgtaattatgaatggcatgtcaaatcaccagataggcaaccgtaatgtgattgaactcaaaactggtgtgggggggcgtcttgcagataacctaagcatctggggaaacgtatctcagcaattgggtaataacagttacagagacacccaaggtattttgggtgtgaaatataccttctga

SEQ ID NO: 462525 - DNA, 372 bp, Shigella boydii
gtgctggatgctctggagcaggcgttatgggcccgtcgaccgtccggcacggtccatcacagtgataaaggttctcagtatgtatcgctggcctacacacagcggcttaaggaagccggattactggcatcaacaggaagtacaggcgactcgtatgacaacgcgatggcggagagcatcaatggtctttacaaagcggaggtaatacaccgtaagagctggaaaaaccgtgcagaagtggaactggccacactcacgtgggtggactggtataataatcgacgattgctggaaaggctgggccacatccctccggcagaagcagaaaaagcttattatgcttccatcggaaacgatgatctggcagcctga

SEQ ID NO: 462526 - DNA, 1107 bp, Shigella boydii
ttggatattctcgccgctatcggtagtgatattgccctgatgcagcttaacggcatcgcccagaaacttaaattcaaagcattacaggagcgggcaaaagaaaaaattgccgacattgccgagagccgcgaactcacggtggcggagcttgaagatcggttagcaccggatctcggtctggatgataacggttcgttgctgctggatttcggcccacgccagttcaccgtcagctttgatgaaaccttaaaaccgtttgtgcgtgacgcttccggcagccgcctgaaagacctgcccaaaccaaacaaaagcgatgatgaatcgcggtcgaacgatgcggttaaccgctacaaattgctgaaaaaagatgcgcgtatcgtcgccgcccagcaggtagcaaggcaggaatccgccatgtgcctgcgtcgccgctggtcgccagaaaactttaagctcttcctggttgagcatccgttggttcgccacttaacccgccgtctgatttggggcgtttatagcgccgaaaaccagctacaggcgtgctttagggtggcggaagataacagctacagcaccgctgacgatgatcttttcaccctgccggaaggcggtatctctatcggcattcctcacgttctggaaatatcaccgacggatgctgccgcctttggtcagctttttgccgactacgaactgctaccaccattccgtcagcttgaccgtaacagttacgccctgacaggagccgagcgcaacgccagcgaactgacccgctgggcaggcagaaaatgcccgagcggtcgggtcatggggctggcgaataaaggctggataaagggcaccccgcaggatggaggctggatcggctggatgatcaaacccctgggccgctggtcgttagtcatggaaatcgatgaaggttttgcggtaggcatgtcgccagccgaactcagcgctgagcagctcttaagcaagctgtggctatgggaaggcaaagcagaaagctatggctgggggagtaattcaacacaggaagcgcagttctccgtaatcgatgccatcaccgccagcgagctaattaacgatattgaagccctgtttgaataa

SEQ ID NO: 462527 - DNA, 243 bp, Shigella boydii
atggacaaggaattaccgtggctggcggataacgcccaactggaactgaaatataaaaaaagcaaaacgccgctcagtcatcgcaattggccgggcgaaccggtgtctgttatcactgaaagcatcattcagacactgggtgatgaattgctacaaaaagctgagaagaaaaaaagattgtctggcgttatgaaaatttttcactggagtggcagtccgccatcacgcaggccatcaacttga

SEQ ID NO: 462528 - DNA, 2067 bp, Shigella boydii
atggcggcgctagcctgtatcgcgcaaaatgacagccaacagttgctcgacgaaatcgtccaacaagaggggctggaatatgcgactgaggtggtaattgcacgcctgtttattgcgcggtgttatgagagtgatcctctggtagtgacattgcagtatcaggacgaggattatggctatggttatcgctcagaaacctataacgaattcgatctccgactgcgtaagcatctctctctggcagaggaaagctgctggcagcgttgcgccgacaaactcattgccgcactaccaggaataaccaaagttcgccgcccttttattgcgctgatcctcccggaaaaaccagaaatagccaatgagttggtaggccttgaatgcccgcgaactcattttcattctaagaagtggttaaaagttgttgctaatgaccccacagcggtgagaaaactcgaacactactggagccaggatatatttagcgatcgagaagccagctacatgtcgcatgaaaaccacttcggctacgcggcctgcgccgcccttttgcgcgaacaaggactggcagccattccgcgcctcgcgatgtatgcccataaagaagattgcggcagtctgctggtacaaattaaccatccgcaagtcatccgcaccttgctactggtggctgataaaaacaaacccagcctgcaacgtgtagctaaataccataaaaacttcccccatgcgacgctcgccgcactggcagaactgctggcgttaacagaaccaccagcccgccctggttatccaatcatcgaagacaaaaagctgcctgcacagcaaaaagcacgcgatgaatactggcgtacgctgttacaaacgctgatggcatcgcagccacaactggcagaagaggtgatgcagtggttaagtactcaagccagggcagtgctgaatagttatttatcggcaccgcccaaaccggttattgatagtaccgataacagcaatctgcctgaaatcctcgtttcgctaccgtggcgtagtaagaaaaaaatgacagctccacgtcttgatttggcaccgctcgaattaactccgcaagtttactggcaaccaggcgaacaagagaggcttgccgccactgagtctgcccgttatttcagcacggaatctcttgcgcaacgcatggaacaaaaaagtggacgagttgtattacaggaactgggttttggggatgatgtatggctgtttctgaattatatactccccggaaaactggatgctgcacgcaattcactcattgttcagtggcattactaccaggggcgggttgaagagatcctgaatggctggaactccccggaagcacaattagcagaacaggcgctccgcagcggtcacatagaagcgttaattaacatatgggaaaatgacaactactcacgttatcgtccggaaaagagtgtctggaacctgtatttattggcacagttgccgcgtgagatggctttgaccttctggctgcgtatcaatgagaaaaagcatctgttcgcgggtgaggactattttctcagtatcctcggattggatgcgctaccaggtctgctgttggctttttcacatcgtccaaaagaaacatttccgttaattttaaattttggcgcaacagaactggcgctgcctgttgcccgcgtctggcgacgtttcgcggcgcagcgtgatctggctcgccagtggattttacaatggccggaacatacggctagtgcacttatccctcttgtctttaccaaacccagcgataatagcgaagccgcattacttgccctgcgtttactgtacgaacagggacatggcgaattgctacaaaccgtggcaaaccgctggcagcgtacagatgtatggtctgccctggagcagttgcttaaacaggggccaatggacatttacccggcacgcattccaaaagcccctgatttctggcatccggcaatgtggtccaggcctcgacttatcactaataatcagcctgttaccggtgacgctctggaaattatcggcgaaatgctgcgctttacctag

SEQ ID NO: 462529 - DNA, 1035 bp, Shigella boydii
atgaataatgatatggcgctgatgcagctgcatcatgtatcacaacgggcgaaatcacgccccttacgtgaaaacgcagcggaatttcttcaggtggtcgcagaaaatcgcgggctaagccaggaagagttagcggacagattagtcccaaccctgggccttgatgatccgcaggcgttgagttttgattttggtccccggcagtttaccgttcgcttcgatgaaaacctcaacccggttatctttgatcagcaaaacgttcgccagaaaagcgttccccggttgcgcgccgatgacgatcaactgaaagcgcccgaggcactggcccgactaaaagggctaaaaaaagatgctactcaggtgagcaaaaacctgctcccgcgtcttgaagctgccctacgtaccacccgacgctggtcgctggcagattttcattctctgtttgttaatcatccctttacccgtctggttacccagcgattaatatggggggtttatccggcaaatgaaccgcgttgtttactcaaagcctttcgtgtggccgcagagggggagttctgcaatgcgcaagatgagccaattgacctgcctgcggacgctctgattggcattgcccacccgttagaaatgacagtagaaatgcgcagtgaatttgcacagctttttgccgattacgaaattatgccgccttttcgccagttgtcgcgccgcacggtgctgctcacacctgacgagtcaaccagtaacagcctgactcgctgggaaggtaaatccgctaccgttgggcagcttatgggaatgcgatacaaaggctgggagtcaggttatgaggacgcatttgtctatgacctgggtgagtaccggctggtccttaagttttcacccggttttaaccactacaatgttgatagcaaagcgctaatgagcttccgttctcttcgagtgtaccgtgacaataaatccgtcacttttgccgaacttgatgtgtttgatttgagtgaggcgttaagcgcacctgacgtcattttccattaa

SEQ ID NO: 462530 - DNA, 363 bp, Shigella boydii
atgatcgtgcaaaaagagctggttgctatttacgattatgaggtccctgtacctgaaaatccgttttccttcagacttgagatccataaatgctctgaattatttacaggttccgtctatcgactggaacggttccggctacgtccaacatttcatcaacgtgatcgagaggatgttgacccgctaataaatgatgcgttgatttatataagagatgagtttattgatgagcggaaattacgaggtgaatcacctgaacctgtaccagtaatttttaattgtgaactacagaatatattcaaccaactaatagaatattactttattaaagtgggaaactgggtaatgctgccaacttactga

SEQ ID NO: 462531 - DNA, 1221 bp, Shigella boydii
atgtcggccgatgcgtggacggctcgcgtcgttggcgtcgttaaaaaagccttgcacgtacagatggatggcttagaaaccgtgttggctgcgatgtgtgaaccgcaaatcgcgattgtctctctgacaatcaccgaaaaagggtatttccactctccggcgaccggacagttaatgctcgatcacccgatggtcgctgccgacgtgcaaaatccccaccagccgaaaacagcaacaggggtgattgttgaggcgctggcccgccgtaaagcggcaggacttcccgcatttaccgtcatgtcatgtgacaacatgccagaaaacggtcatgttatgcgtgacgttgtcacttcatacgcgaaagctgttgatgtaaaactggcacaatggatcgaagataacgtgactttcccatcaacaatggtggaccgtattgtgcccgcagtgacagaggatacgctggcgaaaatcgaacaacttaccggtgtgcgcgatcctgcgggcgttgcctgtgaacctttccgccagtgggtaatagaagataactttgttgccggacgtccagaatgggaaaaagcgggagccgaactggttagtgatgtgctgccttatgaagagatgaagttgcgcatgctcaacggcagtcattcattcctggcgtatttgggttatcttgccggatatcagcacattaatgactgcatggaagatgaacattatcgttatgcggcgtatggcttgatgttgcaggaacaagcgccgacgctgaaagtgcagggcgttgatttgcaagattacgctaaccgattaattgaacgctatagcaatccggcgttacgtcatcgaacctggcagattgcgatggatggtagccagaaattgccacagcggatgttggattctgttcgctggcatctggcgcatgacagcaagttcgatctgctggcgctgggcgtcgcgggttggatgcgttatgtcggtggtgttgatgaacagggaaatccgatagaaatcagtgacccactgttacctgttattcagaaggctgtacaaagtagtgccgaagggaaagcgcgcgtccagtcattgctggcgattaaggcaatctttggtgatgatttgccagacaatagcttgtttactgcaaaagtgacggaagcgtacttgtctttattagcgcatggcgcgaaagcgaccgtggcgaaatattccgtgaagtaa

SEQ ID NO: 462532 - DNA, 168 bp, Shigella boydii
atggtcgaaactcatatagcgcacgcgatcaacggtcgctttcaggttctcaatggtatcccacgccagttgacagtcggcaatctgcgtcaggagttgatggaagttgtcatcaagttcaaaaaatcatccagttgcttgtgctcaatggcaatgcgttgctggtga

SEQ ID NO: 462533 - DNA, 429 bp, Shigella boydii
atgaccgtcgaaacgcaacttaatcccacacagcctgtcaatcagcaaatttatcgtatccttcgtcgcgacattgtccattgcctgattgctccaggcacaccgttgtcggaaaaagaagtttctgttcgtttcaatgtgtcacgccagccggttcgtgaagcctttattaaactggcggaaaacggcctgattcaaattcgtccacagcgtggcagctacgtcaacaaaatttccatggcccaggtgcgcaacggcagttttatccgtcaggccattgagtgcgcggtggcgcgtcgggcggcgagcatgattaccgaaagccagtgctaccaactggaacaaaatcttcaccagcaacgcattgccattgagcacaagcaactggatgattttttgaacttgatgacaacttccatcaactcctga

SEQ ID NO: 462534 - DNA, 294 bp, Shigella boydii
atgaaaccaacgacactactgcttattttcacttttttcgctatgccaggcatcgtatacgccgagtcgccttttagctcactgcagtccgcaaaagagaaaaccacggtattacaagatttacgtaaaatttgcacgccacaggcgtcattatcagatgaagcgtgggaaaagttaatgttgtcagatgaaaacaataaacaacatatacgcgaggccatcgtggcgatggaacgtaataatcagagcaattattgggaagcgttgggtaaggtagaatgcccggatatgtaa

SEQ ID NO: 462535 - DNA, 945 bp, Shigella boydii
atgaaaaaatataaatctgagtttattcctgaatttaagaaaaattatctttcccctgtttactggtctacatggttccttttgggaatgattgcaggtatttcaatgtttcccccttcattcagagatcctgtcttggcaaaaatagggcgttgggcgggcagattgagcaaaaaagctcgtcgcagggcgacgattaatttatcgctttgtttcccagaaaagagtgatacagaacgggaaataattgtcgacaaaatgtttgccacagcattgcaatccatagtgatgatggcagaactggcaattcgtggtccggaaaagttccagaaacgagtgttctggaaaggcctcgaaattcttgaggaaattcgatacaataacagaaatgtgatttttctggttccccatggctggagcgtggatattcctgcaatgttgctggcagctcagggggaaaaaatggccgccatgtttcatcagcaacgaaatccagtgattgattatgtctggaattctgtacggcgtaaattcggggggcgcttacattcccgggaggatgggataaaaccatttattcagtcagtacgccagggatactgggggtattaccttccagatcaggatcatggtcctgaatacagtgaatttgctgatttttttgcgacctataaagcgacattaccaattattggacgtctgatgaacatcagtcaggctatgattataccgcttttcccggtttatgatgaaaaaaaacatttcctgactattgaagttcggccaccaatggatgcatgcattgccagcgcggacaataaaatgattgcccgacaaatgaacaaaacagtggaaattttggtggggtcacatccggaacagtatatctgggttttaaaattgttaaaaacgcgcaaatcaaacgaagcggacccgtacccttga

SEQ ID NO: 462536 - DNA, 486 bp, Shigella boydii
gtggatatccatcttcatcccaaaatcggtgcggactggcaactgcgcggacagcaaaaacgggtggtcacgccgggacagaatgaaaaatattatctggccggagcgctgcacagcgggacaggtaaagtcagctatgtgggcggcaacagcaaaagttcggcgctgttcatcagcctgctgaagcggcttaaagcgacataccgtcgggcgaaaaccatcacgctgatcgtggacaactacattatccacaaaagccgggaaacacagagctggctgaaggagaacccgaagttcagggtcatttatcagccggtttactcgccatgggtgaatcatgctgaacggctatggcaggcacttcacgacacaataacgcgtaatcatcagtgccgctcaatgtggcaactgttgaaaaaagttcgccattttatggaaaccgtcagcccattccccggaggcaaacatggactggcaaaagtgtag

SEQ ID NO: 462537 - DNA, 1749 bp, Shigella boydii
atgctaaacgaacgccagttaaagattgtcgatctgctggagcaacagccgcgcacgcctggtgagctggcgcaacagactggcgtttcaggcaggaccatcctgcgtgatattgactatctcaactttacccttaacggcaaagcccgcatttccgccagtggtagtgcgggctatcagctggaaatcttcgagcgccgcagcttttttcagttgctgcaaaagcacgataacgactatcggctgctggtactgttattactgaatacctttactccccgtgcgcaactcgcctcggcgcttaatttgccagaaacgtgggtcgcagagcgtctgccccggttaaaacagcgttatgaacgcgcttgttgcctggccagccgccccggtttgggccatttcattgatgagacagaagagaagcgcgttatcttgctggcgaacttgctgcgcaaagatccgtttttaattccgctggcgggcgtaacacgagacaaccttcagcatttatccacggcctgcgacaaccaacaccgctggccgctcatgcagggtgattatctctccagcctgattctggcgatttacgccctgcgtaatcaactgaccgatgagtggccgcaatatcccggtgacgagataaaacaaatcgttgaacaaagcggcatgtttcttggtgataacgctgtaagaaccctgacaggtttgatagagaaacagcatcagcaagcgcaggtaatttcagccgatcatgtgctggggttgctgcaaagggtgccagacatcgcgtcattgaatattattgatacgcagttggttgagaatattaccgggcatttattacgttgccttgccgcaccggtgtggattgctgagcaccgccaaagtagcatgaataacctgaaagcagcctggcctgcggcctttgatatgagtctgcactttattacgctactgcgtgaacagctcgatattccccttttcgacagcgatctgatcggtttgtattttgcctgtgcgctggagcggcatcaaaacgaacgccagccgatcattttgctctcggaccagaacgcgattgccactattaatcagctcgccattgagcgcgatgttttaaattgtcgggtaattattgcccgtagcttaagcgaacttgttgccattcgcgaagagattgagccgttattgatcattaacaatagccattatttactggaagacgcggtaaataattacatcaccgtaaaaaatatcattacggctgccggtatcgaacaaataaaacattttctggcgacggcatttattcgccagcaaccggagcgttttttctctgcccccggaagttttcattattcgaatgtacgcggtgaaagctggcaacatattacccggcaaatttgtgcgcaattagtcgcacaacaccatattaccgccgatgaagcacaacgcatcatcgcccgcgaaggcgaaggtgaaaacctgattgttaatcgcctcgccatcccacattgctggagcgaacaggagcgacgttttcgtggatttcttattaccctcgcccaaccagttgaggtgaataacgaagtcattaaccatgtcttgatcgcctgcgccgccgccgatgcgcgtcatgagctaaaaatatttagctatctggcaagcatattgtgtcagcatccggcagaggttattgccgggttaacaggatatgaggcatttatggagttacttcacaaggggtga

SEQ ID NO: 462538 - DNA, 1071 bp, Shigella boydii
atgaacattgagttactgcaacagttgtgcgaagccagcgccgtcagcggcgatgaacaggaagttcgcgacattctgataaacacgctggaaccttgcgttaatgagatcacctttgatggtctgggcagctttgttgcccgtaaggggaataaaggtccaaaagttgccgttgtcgggcatatggatgaagtcggctttatggtcacccacatcgacgagagcggttttctgcgtttcaccaccattggtggctggtggaatcagtcgatgctcaaccaccgggtaaccatacgcacacacaagggagtgaaaatccctggtgtgattggttccgtcgcgcctcatgcgttaacggaaaagcaaaggcaacggccgctgtcatttgatgagatgttcattgatattggcgcaaacagtcgcgatgaggtggaaaaacgcggtgtggcgatgggcgattttattagcccggaagccaattttgcctgctggggcgaagataaagtggtcggcaaggcgctggataaccgcatcggctgcgcaatgatggctgaactattgcagacggtgaataatcccgaaattacgctgtatggcgtcggcagcgtggaagaagaagttgggctacgcggggcacaaacctcggcggaacacattaaaccggatgtagtgatcgtgctggataccgctgtcgcaggcgatgttccgggcattgataacattaaatacccgctgaaactgggccaggggccggggctgatgctgtttgacaagcgctacttccccaaccagaaactggtagcagcgttaaaaagctgtgccgcacataacgatttaccgctgcaattttccaccatgaaaaccggtgcgacggatggcgggcgctacaacgtgatgggcggcgggcgtccggttgttgcgctgtgcctgccaacccgctatctgcacgctaacagcggtatgatttcaaaagccgattacgatgctctgctcacgttgatacgggattttctgaccaccttaaccgcggagaaagtcaacgcgtttagccagttccgtcagatggattaa

SEQ ID NO: 462539 - DNA, 1452 bp, Shigella boydii
atggagtcatccttacgtattgtcgcgatcaccaactgccccgccgggatcgctcacacctacatggtggcggaagccctggaacagaaagcccgttctctcggccataccataaaagtggaaactcaagggtccagtggcgttgaaaaccgcttatccagcgaagagattgccgctgccgattacgtcattctcgctaccgggcgtggcctgagcggtgatgatcgcgcgcggtttaccgggaagaaagtttatgagattgccatctcccaggcgttgaaaaatatcgaccagattttcagcgaattaccgacaaactcgcagctttttgccgcagatagtggcgtgaagcttggcaaacaggaaatgcaaagcggcagcgtgatgagccacctgatggcgggcgtctctgcggcgctgccgtttgtcatcggcggtggtatcctggtggcgcttgccaacatgctggtgcagttcggtttgccgtataccgatatgtcgaaaggcgcgccgtcgtttacctgggtagttgaatccatcggttaccttggcttcacctttatgatccccatcatgggcgcttatattgcctcgtcgattgccgataaaccggctttcgctccggcgtttctggtttgctatctggcgaacgacaaagcgctgctcggcacccagtcgggtgcgggattcctcggcgcggtggtgctggggctggcgattggctatttcgtcttctggttccgcaaagtgcgccttggcaaagcattacaaccgctgctcggttcaatgctgatcccgttcgttactctgctggttttcggcgtgctcacttactacgttatcgggccggtgatgtccgacctcatgggcgggctgctccacttcctgaataccattcctccatcaatgaagtttgcagcagcgtttctggtcggtgcgatgctggcgttcgatatgggcggccccatcaataaaaccgcctggttcttctgcttctcactgctggaaaaacacatttatgactggtacgccatcgtcggcgttgtcgcgttgatgccgcccgttgcggcgggtcttgcgacgttcattgcgcccaaactgtttacccgacaggaaaaagaggctgccagtagtgccattgtggtcggtgccacagtcgcaaccgaaccggctataccttacgctctggcagctccgttgccgatgattaccgccaatacgctggcgggtggcattaccggcgtgctggtgatcgctttcggaatcaaacgtctggcacctggtttgggtatctttgacccgctgatcggcctgatgtcgccggtgggttcgttttatctggtgctggcgattggcctcgcgctgaacatttcattcattatcgtcctgaaaggattgtggttacgccgcaaagcgaaagccgcgcaacaggagcttgtccatgaacattga

SEQ ID NO: 462540 - DNA, 447 bp, Shigella boydii
atggcagctcttactgcaagctgtattgacctgaatattcagggcaatggcgcttattccgttctgaagcagttggcgacaatagcgttacaaaacggttttatcaccgactcacaccagttcctgcaaaccctgctgctgcgcgaaaaaatgcactctactggatttggttccggtgtcgccgtgccgcacggtaaaagcgcctgcgttaaacaaccgttcgtattattcgcccgcaaagcgcaggctattgactggaaagccagcgatggcgaagacgtcaattgctggatctgcctcggcgtgccgcaaagcggcgaagaggatcaggtcaaaatcatcggcacactgtgtcgcaaaattattcacaaggaatttattcatcaactgcaacagggcgataccgaccaagtgcttgccttgttaaatcaaaccctcagctcataa

SEQ ID NO: 462541 - DNA, 657 bp, Shigella boydii
atgtcgttctggaaagttgcagcagcgcaatatgagcctcgtaaaacctcactcaccgaacaggtagctcatcatctggagtttgtgagggccgccgccaggcaacaatgtcagctgttagtttttccatcgctttctttactggcgtgtgattattcgcgacgtgcccttcctgccccacccgatctctcactgttagacccgctttgttatgccgcaacgacctggcgaatgaccatcattgccggccttcccgttgaatataacgatcgctttattcgtggaattgcggtgttcgcaccgtggcgaaaaacgcctgggatctaccatcagagtcatggtgcatgtctgggccgtcgttccagaaccatcacggtggtcgatgaacaaccgcaaggtatggatatggacccgacctgttcactgtttactacagggcaatgtctgggagaacccgacctgctggcgtcggcccgtcgcttacaatttttttcacatcagtactcgattgccgtgctgatggcaaatgcccgtggtaacagtgcactatgggatgaatatggtcgtctcatcgttcgcgccgatcgtggttcattattgttagtcggtcagcgttcatcacagggttggcaaggcgatatcattccattacgctag

SEQ ID NO: 462542 - DNA, 1740 bp, Shigella boydii
atgctttcacgctcggatttactgacgctgttgacaatcaactttatcgtcgtcaccaaaggggccgagcgtatttccgaggtttcagcccgctttaccctggatgcgatgcccggtaagcagatggcgattgacgccgatcttaatgccgggttgatcaatcaggcgcaggcacaaacccgacgtaaagatgttgccagcgaggccgatttctacggcgcgatggacggggcatcgaaatttgtgcgcggggatgctatcgccgggatgatgattctggcgatcaacctgatcggcggcgtctgtatcgggatcttcaaatacaacctgagcgccgacgccgccttccagcagtatgtgctgatgaccatcggcgacgggctggtggcgcaaatcccttccctgctactctccaccgcggcggcgattatcctcacccgcgtcagcgacaacggcgatatcgcccatgacgtgcgtaaccagttgctggcaagcccatcggtgctctacaccgctaccggaattatgttcgtactggcggtagtgccgggaatgccacatctgccgtttttgctgttcagcgccctgcttggctttaccggctggcggatgagcaaacgcccgcaggcggcggaagcggaagagaaaagtctcgaaacgctgacccgcaccatcaccgaaaccagcgagcaacaggtcagttgggaaaccattccgcttatcgagcctatcagtttaagcctcggctacaagctggtggcgctggtcgataaagcccagggcaacccgctcacccagcgtattcgcggcgtgcgacaggtgatatccgacggcaacggcgtgctgctgccggagatccgcattcgggaaaacttccgccttaagcccagccagtacgctattttcatcaacggcattaaggctgatgaagcggatattccggcggataaactgatggcccagccctccagcgaaacctacggcgagatagacggcgtgctggggaacgacccggcgtacgggatgccggtgacctggatccagcctgcgcagaaagcgaaggtgctgaatatggggtatcaggtgatcgacagcgccagcgtgattgctacccatgtaaataagattgtgcgcagctatattcctgatttatttaactatgacgatattacgcagttgcataaccgtttgtcgtcgatggcaccgcgcctggcggaggatttaagcgcggtgctcaattacagccagttgctgaaagtgtaccgggcgctgctgaccgaaggcgtttccctgcgcgatatcgtcaccatcgccaccgtgctggtcgccagtagcgcggtgaccaaagatcatattctgctggcagccgatgtgcgcctggcgctgcggcgcagcattacccatccgttcgttcgcaagcaggagctgacggtgtataccctgaataatgagctggaaaatctgctgactaacctagtgaatcaggcgcaacagggcggtaaagtgatgctcgacagcgtgccagtggacccgaatatgctcaaccagttccagagtacgatgccacaggtgaaagagcagatgaaagcggcggggaaagacccggtgctgctggtgccaccgcagctgcgccctttgctggcgcgttatgcaaggttgtttgcgccggggctgcatgtgctgtcgtataacgaagtgccggacgagctggagttgaagattatgggggcgttgatgtaa

SEQ ID NO: 462543 - DNA, 636 bp, Shigella boydii
gtggcggtgccggaagaaacggagaaaaaagcgcgcgacgtcaatgagaaaacggcgctgctgaagaagaaatccgccaccgagcttggcgagctggcaaccagtatcaccaccattgcccgtgatgcgcatatggaagcgaatctggagatggagattgttccccagggattacgcgtgctgattaaagacgaccagaatcgcaatatgttcgaacgcggcagcgcgcagattatgccgttctttaaaacgctgctggtggagctcgcgccagttttcgactcgctcgataacaaaattattattaccgggcatatcgatgcgatggcttacaaaaacaatatctacaacaactggaacctttcgggtgaccgcgcgctttcggctcgtcgggtgctggaagaggccggaatgccggaagataaagtgatgcaggtaagcgcaatggcggaccagatgctgctggattccaaaaatccgcaaagcgcgggcaaccggcgcattgagattatggtgctgaccaaaagtgcgtccgatacgctgtatcaatactttggtcagcatggggataaagtggtgcagccgctggtgcaaaagctggataagcagcaggtgctttcgcagcgaacgcgttaa

SEQ ID NO: 462544 - DNA, 768 bp, Shigella boydii
atgctgcaaatctctcatctctatgccgattatggcggcaaaccggcactggaagatatcaacctgacgctggaaagcggcgagctactggtggtgctggggccgtccggctgcggtaaaaccacgttgctgaatctgattgccggttttgtgccttatcagcatggcagcattcaactggcgggtaagcgtattgagggaccgggagcagagcgcggggtggtttttcagaatgaagggctgctaccgtggcgcaatgtacaggacaacgtggcgttcggcctgcaattggcaggtatagagaaaatgcagcgactggaaatcgcgcaccaggtgctgaaaaaagtggggctggaaggcgcagaaaaacgctatatctggcagctttccggtggtcaacgtcagcgggtggggattgcccgcgcgctggcggcgaatccccagctgttattactcgacgaaccgtttggtgcgctggacgccttcacccgcgaccagatgcaaactctgctgctgaaactctggcaggagacgggcaagcaggtgctgttgattacccacgatatagaagaagcggtgtttatggcgactgaactggttctgctttcatccggccctggccgtgtgctggagcggctgccgctcaactttgctcgccgctttgttgcgggagagtcgagccgcagcatcaagtccgatccacaattcatcgccatgcgcgaatatgttttaagccgcgtatttgagcaacgggaggcgttctcatga

SEQ ID NO: 462545 - DNA, 162 bp, Shigella boydii
atgttgcagataatgttatttttgatacatacgcgttataaatatcaaaaacacaaaccagataaatatcttatcaatatacaacaaagtttgaattattcaatttatagcagcacaaccaaacgcaaaaaaaaaaaaataataaccaagagctataaataa

SEQ ID NO: 462546 - DNA, 390 bp, Shigella boydii
ttgggccgttggtggagatataagtggatcacttttcatccgtcgttgacacaacactggctctggtatgcgtacaacactaaaactggcggtgtgttggcttacactttcgggccacggaatgatgagacctgtcgggaactgttagccctgttgactccgttctgtatcggcatggtgaccagcgatgactggggcagctacgccagagaagtgccgaaggagaaacacctgaccggcaaaatcttcacgcaacgtattgaacgtaacaaccggaccctccgcacccgcatcaagcggctggcacgtaaaacaatctgcttctcgcgttccgtggaaatccacgaaaaagtcatcggctccttcattgaaaagcacatgttctactga

SEQ ID NO: 462547 - DNA, 372 bp, Shigella boydii
gtgctggatgcactggagcaggcgttatgggcccgtcgaccgtccggcacggtccatcacagtgataaaggttctcagtatgtatcgctggcctacacacagcggcttaaggaagccggattactggcatcaacaggaagtacaggcgactcgtatgacaacgcgatagcggagagcatcaatggtctttacaaagcggaggtaatacaccgtaagagctggaaaaaccgtgcagaagtggaactggccacactcacgtgggtggactggtataacaatcgacgattgctggaaaggctgggccatactcctccggcagaagcagaaaaagcttattatgcttccatcggaaacgatgatctggcagcctga

SEQ ID NO: 462548 - DNA, 384 bp, Shigella boydii
atgctttccgcgtttaccgttattctgctggtggtctgtggtgcgctgtggctggcaacagaccattaccgtgataacgccatcacctacaaagcgcagcgcgataaaaaagccagagagctggagctggcaaacgcaaccattactgacatgcagcagcgccagcgtgatgttgccgctggtcgtaagcgcctgcggatcaacgccacctgctccggtaccgtgcgtgaagccaccggcacctccggaatggataatgcaaccggcccccgactggcagacaccgctgaacgggattatttcaccctcagagagcggttgatgacaatgcagaagcaactggaaggggcgcaggaatatatccgcactcagtgtattaactag

SEQ ID NO: 462549 - DNA, 267 bp, Shigella boydii; identical to SEQ ID NO: 462029

SEQ ID NO: 462550 - DNA, 1071 bp, Shigella boydii
atgatacgtaagtcagctacaggtgttattgttgcgttagccgtaatctggggtggtggcatatggtacacaggtacgcaaattcagcctggtttcgaaaaatttattaaagattttaacgatgctaaaaagaaaggtgaacatgcctacgatatgacgttaagttataaaaactttgacaaaggcttttttaattcccattttcaaatgcaaatttcatttgataacggtgcacccgatctcaatatcaagccaggccagaaagttgcatttgatgtggatgttgagcacggtccgttgcccatcacaatgttaatgcatggtaatgtcatcccagcactggcagcggcaaaagtgaacttagtgaataatgaactgacacaaccgctatttatcgccgcgaaaaataaatcgcccgtggaagcgacattgcgattcgcgtttggtggctcattctctacgacattagatgttgcccctgcagagtatggaaagttttcttttggtgagggccagtttacttttaatggtgatggtagttcattgtctaacctggatattgaaggcaaagtcgaagatattgttctgcaattatcaccaatgaacaaagtaacggcaaaaagttttaccattgattctctgacacgattagaagaaaagaaatttccggttggtgaaagcgagtcgaaatttaatcaggttaatattatcaatcagggggaagacgttgcccaaatcgatgctttcgttgcaaaaaccaggctggatcgcgttaaagacaaagattatatcaatgtcaatctgacctacgaacttgataagttaacaaaagggaatcagcaactcggtagtggtgagtggtcattgattgctgaatctattgatccctcagcagtgcgccaatttatcatccagtataacattgcgatgcagaagcagcttgctgcacaccctgagttagcaaacgatgaagttgctctgaagtggcacactgaatttggccacctgaacagaggtgatatgctcacctcagaacaacacaggtgctccaatgaaaaaaagaaattttag

SEQ ID NO: 462551 - DNA, 930 bp, Shigella boydii
atggtggatttgtgcaacgacttgttaagtataaaggaaggccaaaagaaagagtttacactccattctggtaataaagtttcctttatcaaagccaagattcctcataaaaggatccaagatttaaccttcgtcaaccaaaaaacgaatgtacgcgatcaagaatccctaacagaagaatcattagccgatatcataaaaactataaagctacaacaattcttccctgtaataggaagggagattgatggtagaattgaaattctggatggcactcgtagaagagcatctgcaatatatgcaggagcagatcttgaagttctatattcaaaagaatatatatctactcttgatgccagaaaactagcaaacgatatacaaacagcaaaagagcatagcatccgagaacttggtattggtcttaattttctgaaagtatcagggatgtcctataaagacatagccaaaaaagagaatctgtctcgcgcgaaagtcactcgtgcctttcaggcagcaagcgttccacaggaaataatatctctatttccaatcgcgtcagaacttaactttaatgactacaagatattattcaattattataaaggacttgaaaaggctaatgaatctcttagttctacactaccaatattaaaggaagaaataaaagaccttgatacaaatttgcccccggacatatataaaaaagaaattttaaacatcataaagaaaagcaaaaacagaaagcaaaacccttcgctaaaagttgactcgttatttatttctaaagacaaacggacttacataaaaagaaaagagaataaaacaaacagaactctaatatttacattatctaaaataaacaaaacagttcagagagaaatagatgaagctattcgagatataatttctcgccatctatcgtcttcataa

SEQ ID NO: 462552 - DNA, 684 bp, Shigella boydii
atgatatctcatcagactgatgtgagggtaaatgagaatagagtaaacgaacaaggttgttttttggcgaggaagcagatgtatgacaattcttgtggagctgccagtttactctgtgctgcaaaggaattaggggttgataaaataccacaatacaaagggtctatgtccgaaatgacaaggaagagttctcttgatttggataatcgttgtgagcgggatttatacttaataactagtggtaattataatccgagaatacacaaagataatatcgcggatgccggttattctatgcctgataagatagtcatggctacgaggcttcttggattgaatgcttatgtcgttgaagaaagtaacattttttcgcaagtaattagttttatttatcccgatgcaagggacttattaattggcatgggatgtaatatagtacatcaacgagatgtgttatcttctaaccaaagagttttggaagctgttgctgtatcctttattggagttcctgtcggcctccactgggtgttgtgtagacctgatggaagctatatggatccagctgtaggagaaaattattcttgtttttcaactatggaattaggtgcaagaagaagtaattctaactttataggatatactaaaataggtatttccatagttataactaatgaggctttgtaa

SEQ ID NO: 462553 - DNA, 210 bp, Shigella boydii
atgtgggaccagtactgcctgcagttcttctattgttacagcgatttctttaccaaacagctgaaccaccatcaagataaagatagcctgaacattcatcgcaccattttgttaccaatggcaaaagatttaacgaaccgtgcctgcatcaggcggactttttatccctgctttgttagctccctaaccttgtacagagagcctccataa

SEQ ID NO: 462554 - DNA, 198 bp, Shigella boydii
gtgataaataaaggtaaatgcagaaggtgtagagtctcgcagatttctgacatcatagagcctaacattagatgcataacgctacagattgtagaatctctacaggtgaaatatacactggttggcgtttatgtcgcaaaacatgtcattcaggttcatctcaccaataaggatatgagtgaagtggaggataagtga

SEQ ID NO: 462555 - DNA, 372 bp, Shigella boydii; identical to SEQ ID NO: 462525

SEQ ID NO: 462556 - DNA, 381 bp, Shigella boydii
atgctgggagcagtggaacgccgcttcggcaacgatcttccgtcgtctccagtggagtggctgacggataatggttcatgctaccgggctaatgaaacacgccagttcgcccggatgttgggacttgaaccgaagaacacggcggtgcggagtccggagagtaacggaatagcagagagcttcgtgaaaacgataaagcgtgactacatcagtatcatgcccaaaccagacgggttaacggcagcaaagaaccttgcagaggcgttcgaacattataacgaatggcatccgcatagtgcgctgggttatcgctcgccacgggaatatctgcggcagcgggcttgtaatgggttaagtgataacagatgtctggaaatatag

SEQ ID NO: 462557 - DNA, 333 bp, Shigella boydii
atggaaaacaatcgcaatttccctgccagacaatttcattcgctcacgttctttgccggtctttgtattggcatcacgcctgtggctcaggcactcgccgccgaagggcaaactaacgcggatgacacgctggttgtcgaagcatcaacgccttcgctttatgcgccacaacaatctgccgatccgaaattctcgcgtccggtagcggatactacccgcacgatgacggtgatttctgaacaagtgattaaagatcagggcgcaaccaaccttaccgacgcgctcaaaaacgtccccggcgtgggtaatgccgatcagttaaggatcagttga

SEQ ID NO: 462558 - DNA, 1416 bp, Shigella boydii
atggatgaccagttaaaacaaagtgcacttgatttccatgaatttccagttccagggaaaatccaggtttctccaaccaagcctctggcaacgcagcgcgatctggcgctggcctactcaccaggcgttgccgcaccttgtcttgaaatcgaaaaagacccgttaaaagcctacaaatataccgcgcgcggtaacctggtggcggtgatctctaacggtacggcggtgctggggttaggcaacattggcgcgctggctggcaaaccggtgatggaaggcaagggcgttctgtttaagaaattcgccgggattgatgtatttgacattgaagttgatgaactcgacccggacaaatttattgaagttgtcgctgcgctcgaaccgaccttcggcggaatcaacctcgaagacattaaagcgccagaatgtttctatattgaacagaaactgcgcgagcggatgaatattccggtattccacgacgatcagcacggcacggcaatcatcagcactgccgccatcctcaacggcttgcgcgtggtggagaaaaacatctccgacgtgcggatggtggtttccggcgcgggtgccgcagcaatcgcctgtatgaacctgctggtagcgctgggtctgcaaaaacataacatcgtggtttgcgattcaaaaggcgttatctatcagggccgtgagccaaacatggcggaaaccaaagccgcatatgcggtggtggacgacggcaaacgtaccctcgatgatgtgattgaaggcgcggatattttcctcggatgttccggcccgaaagtgctgacccaggaaatggtgaagaaaatggctcgtgcgccaatgatcctggcgctggcgaacccggaaccggaaattctgccgccgctggcgaaagaagtgcgtccggatgccatcatttgcaccggtcgttctgactatccgaaccaggtgaacaacgtcctgtgcttcccgttcatcttccgtggcgcgctggacgttggcgcaaccgccatcaacgaagagatgaaactggcggcggtacgtgcgattgcagaactcgcccatgcggaacagagcgaagtggtggcttcagcgtatggcgatcaggatctgagctttggtccggaatacatcattccaaaaccgtttgatccgcgcttgatcgttaagatcgctcctgcggtcgctaaagccgcgatggagtcgggcgtggcgacgcgtccgattgctgatttcgacgtctacatcgacaagctgactgagttcgtttacaaaaccaacctgtttatgaagccgattttctcccaggctcgcaaagcgccgaagcgcgttgttctgccagaaggggaagaggcgcgcgttctgcatgccactcaggaactggtaacgctgggactggcgaaaccgatctga

SEQ ID NO: 462559 - DNA, 372 bp, Shigella boydii
gtgctggatgcactggagcaggcgttatgggcccgtcgaccgtccggcacggtccatcacagtgataaaggttctcagtatgtatcgctggcctacacacagcggcttaaggaagccggattactggcatcaacaggaagtacaggcgactcgtatgacaacgcgatggcggagagcatcaatggtctttacaaagcggaggtaatacaccgtaagagctggaaaaaccgtgcagaagtggaactggtcacactcacgtgggtggactggtataacaatcgacgattgctggaaaggctgggccatactcctccggcagaagcagaaaaagcttattatgcttccatcggaaacgatgatctggcagcctga

SEQ ID NO: 462560 - DNA, 456 bp, Shigella boydii
gtgtgcaagactaattaccaggcattacgtgaacgttattcaccaattcaggtgccggaatgtcctgtttgtggcgatgaaatgtcgatacagcgcatattttccagaacgcatattgtgtatgcctgcacaggtgagggggatgatggatattttaaaactggtcgaacttttgcggatgagcattacctgaaatcgcgcgtaaccgtcgttgatgttagcgctcctgacgtactggctttactgaaagagctggaagttaaagacaaacgcattgcagaattgacagatgcgcttacacaaatgattaatgcgcacaaaaccacaattcgttttggtcatgaacgcataactgaatgtggtggtgattgcgactcgccggaaaagatgatttcagaaaatccggatatcagaatggcagaggctgttttgagagcaggaataaaaactgaataa

SEQ ID NO: 462561 - DNA, 306 bp, Shigella boydii
gtgagggtgagagtctatatcgccggtccaatgaccgggtataaaaatttcaaccgtgaggcgtttcacaatgcggaagaggaactgaaacgggaagggcataccgtcttaaacccggcagtacttccggacgggctgacacagccgcagtacatggatatctgcatggcgatgattcgttgtgtggatgcgatttacatgctgaaaggctggcagcggtcagcaggcgctaaggcagaactggcgctggcggagaaactggggcatgcggtgatttttcaggagacagccagtgtgcaagactaa

SEQ ID NO: 462562 - DNA, 423 bp, Shigella boydii
gtggcaaaagtttttacacaagaagagcgggaaaaaattaaagggcaggttcttgaactcgtacgccagagtgggcgcgagacgttacgacaactggaagctaaaactggggcaacaagatatctgatgagcgttctggccagagagctggttgccagtggcgatgtatacaactctggttacgggttattcccgtctgaacaggcgcgtaaggactggcaaaatgcccgtaaaaagctctcaagggcaaagctgaagaaaccatctgcggttgatccggaccttatctggtcattacctgacggagaaatacgtcgctacgacagtcgcctaaacataatctgtcgcgagtgccggaagagcgaagttatgcagcgcatattgtcgttttatcagggtaattttcaggaggtgatggcgtga

SEQ ID NO: 462563 - DNA, 1071 bp, Shigella boydii
atggctaacgcctggctcagattatggcatgacatgccaaatgaccctaagtggcgaacaattgccagggtgtcagggcagccaattgcaacagtgatggcagtgtatatccacctcctggtgagcgcgtcacgaaatgtcacgcgaggtcacattgatgtcacgacagaagatttggcaagtgcgctcgacgtgacagaagaggtaattgattcaattttgcagacgatgcaggggcgggtacttgatggtgatttaatcactggatgggaaaaacgccaggtgctgaaagaggacaacggcaatatttcgcaaaccgcaaaatctcctgcagagcgcaagagggcgcagcgagagagggaaagaaagcgggaacaaaatggcgattgtcacggcgcgtcacgatatgtcacgcacatgtcacgacgagtcacgacagataaagatacagataaagatacagatcaagaagatcaaaacactatggtccatggcgtaaaaaacgccacgaaccaggcaggggatgttcagaccgtcaatcctggtcagccagcaggcacgacaccggaagccgattcagcgtatgcgctgaaagccgattcgggcgctgtgcagcaggcgatgaccgcaagtccggagcaatcacaccaactgcagcagcctgaagccgattccgccattcagcgggaagccgatcgggtagtcccggaaaacaccgggcagtctgtgggacgagtggattatccggatgtgttcgaacaggtctggcgggagtacccgttgcgtgccggggcaaacccgaagaaatccgctttcagtgcctggaaggccagattacgcgagggggtgccaccagaggccatgctggatggcgtgaggcgttacgcaagatacctggcggctaccgggaaaacgggaacggaatttgttcagcgagcgacgacgttttttggaccggaccggaattttgagaacccctggttgctcccggtaagcggcacgaacaaccagcgttgtgtgaatcatatttctgaaccggataacgaaattccgccgggcttcagggggtaa

SEQ ID NO: 462564 - DNA, 426 bp, Shigella boydii
atgaaaatcaagcatgaacacatccgcatggcgatgaatgcctgggcgcatccggacggcgaaaaagtaccggctgcgaaaattaccaaagcgtatttcgagctgggaatgacgttcccggaactgtatgacgacagccatccggaagccctggctcgcaatactcagaaaattttccgctgggtggagaaagacacccctgatgcgcttaaaaaaattcaggcgttgttaccagctatcgaaaaagcaatgccacctctgctggtggcccgaatgcgcagccatagctcagcctattttcgggaactagtggagacgcgggaacgactggtgagagacgctgatgattttgtcgcagtggcgatcgctggtttcaaccagatgaatcgtggtggccctgcaggaaatattgtggctgtgcattga

SEQ ID NO: 462565 - DNA, 255 bp, Shigella boydii; identical to SEQ ID NO: 3619

SEQ ID NO: 462566 - DNA, 420 bp, Shigella boydii; identical to SEQ ID NO: 3620

SEQ ID NO: 462567 - DNA, 1014 bp, Shigella boydii
atgaaaattggaactgtggcaggcactaacgacagtacaacgacaatcgcaacaaatgatatggtgcaagagcatgttaccaacttcactaaagaactgtttgggtatattgcaaatggtataggtgatgatatatcaagtattgccaggacaatgctcggtgaggttgtggaaaaaatagatgattggcaaatagaacggttccaacaatctattcaagatgacaaaatttcatttaccatacaaacggatcattcagaaaaatatagtatgctatcgggcatgcgtgctcatattctacgtagggataataattatcagtttattgtgacaattaatagtaaaaattacggttgctctcttgataatactgatgttaattggtgcagtgttgtttatttacttaataatatgacagtaaatgataatgctaatgatgttgcagttactgagtcgtacaaacccatctggaactggaaaatatcgcaatacaatgtatttgatattaaattcgaaacaattataaacccccagttcgctgacagaatctatttctccaattgttcacctgttgatcccacaagtaccaggccgacctattttggggataccgatggttcagttggtgcagttttgtacgcgctttttgctacgggatatttgggaatcatgactgaaggagaaaatttcctttgccggttgcttactatagaagatgaagttctcaacgtattgctaagggaaaactttaatgagcaacttgacactaatattaatacaataatcagtaacctgaacagaagagataatgttttagaaagtcttcagccttatttagttattaataaagacgcagtcacgccatgtacgtttctgggcgaccaaaccggcgatcgatttagtaatatctgtggcgatcaatttatcatcgatttgttaaaacgcataatgagtatcaatgaaaatgttcatgtattagctggaaatcatgaaacgaattgcaatggtaactag

SEQ ID NO: 462568 - DNA, 828 bp, Shigella boydii
atggcttcattcgcatatgaaaataaaaaattggaaaaactctttactttattagatacgagagacatgatcttgaataagttgcatcaacatgtttttttaaaaggcgatgcgattaccccttgtatctttcttggggatcatacaggcgatagattcagtactatttttggtgataaatatatccttactttgctaaattctatgcggaatatggagagtaataaagatagtcgtataaataaaaatgacgtcgttctggctggaaattatgaaatcaatttcaatggtaactatactgcacgactagcaaatcataaactctctgccggtgatacgtataacttaattaaaacgctcgatgtttgtaattatgactcagaaacgaaagttttaagcagtcatcacggaataataagaaatgaagaaaatgaatgttattgtctaggtgctttgcaggttccatttaatcagatgaaagacccaattgatcctgaggaattagcaaatatatttaataaaaaacataaacaacacatggatgatcgttttatccatctaattagaagcaatgctatagcatccacacctgtatatgacaattattttaataacactactgctttcagaccaaaacctgaagatatcttcaaatgtggacagacgctcaaaaaaactaaacagaaatatggccattatggattaggggtagatcagcatcaaaaaattgataattataccatggggctaaattcctggaagatagctcctaacgaacgtggtgataaaaaaggtgtcccagggcttagttgttttcaaccacattaa

SEQ ID NO: 462569 - DNA, 258 bp, Shigella boydii
atgaaagtatttcacaatatatttaagcacatctcttcaagccatcaagataagcattcagatcaagttaacaatcatcaacaccatggcaaggttgataaaaaacatcgttcaaagatagttgaaattgataagctggataaacattcgcaaatagataacgatttaggcctgcatatcatctatttcctgcaacatggtcgctggaaggtaaatgaatatagttctcagatagaaaaaaatatggttttacaataa

SEQ ID NO: 462570 - DNA, 156 bp, Shigella boydii
atgatggactgtgtgcagtttgttcccgatccgaaaaaacgcagcatccggagaccgcttgttgaagaggatattgaagaaatcattacccgtcttaatctgcgtgcggaggtctttaagctgcatgtggattttttcgctaccgtcgtcagctag

SEQ ID NO: 462571 - DNA, 2022 bp, Shigella boydii
atggcgcaggtacttgatgagcttgttctgtccctcgggattgatgacagggactttactgccggggaacaggcagtacatgctgcccttaaccggctcacgacggtgatggaaggtgtcgctgacacattcagtcagggacagaagaaaaccagtgaatcactggaaaaaaccggaaaagatgctgataaaacggcccgtcgaatggaagatgccgggaaacgggcgtcccgttttttttcagggatccgtagcgagattctggctcttgcgggtgtcagtctgacgctgggggggctgaagaacctggtaacaggttttgcccgtgatctgaaccgtctgtccgtggaatccgatgcttttggcatgaaggccagaaatctggacggatggttacgggctgcgcgggcaaataatgttgatgaaggggaaatgtctggggcattttcccggcttgcaaatgcaaaagcggccttcagagccggaaggtcctttgatcctgtgttacaggatttgtttcaggttgcagccagggcgggcattagtgttgatttaaatactgacagcactgaagccatcatgcgcaagctggcggttatttttccgcgactgacaaagtccgaacaaactgcctacggcaacgcgctgggcttcagttatgccggacagcagtttcttggctccggtcatgcgctgaaagatgtggacgaatttacttcccgttcgcaggttacgccggggcgtacagcgctggcccgtaagctacgaaaagagcttgttgagctcgatcagacctggtccggcatcgggatgacgattagcaccgcgttgatgccgtacgcgctgaagctcagccactggctggagacactcggtgactggatgcagcaacatccggaggaagtgaacaggtttatcaccacatttctgaatgacgttgagtcagtggcctccctggcgaataaggctgccggagaactggggggctggcagaatgtcattattacgctgatcgggctgaaagtggcgtcatgggtgcgggggctgacaaaagccctcagtggccccggaggccttctttttgcgataacggcgctttacccggttgttgacggattactgacatccattgttggcagggaaaataaggactggctggattcacatggttttttctgggcttcagacgggactttctttttcaataagaaagagatggagacgtatcagacaaaactggatgccggagaaaagcctggcaacatcacccgggcacaatcacccacagtatggcagcagggcatgctggatactcaggcttctcaggcaaccgggagggaagcagccttcggtgaatcctggctacagggtatgcgtgcgacgcaggaaaaactcggtaatgccatgcaaaaccgccagcgaccgacgaagaccggggaggccctgttaggctggctgcaaccgaaactgtctcaactggaggaaaaatataacctgccgcccggactgctgcgcagcgttgcgatcaccgaatcccgtggtaatcagtttgccgtctcacctgctggtgcgatgggactgtttcagttcatgccgaagacggccagtgaatttggtctgagggggaacgatgcctttgatcccgaaaaagccgctgatgccgccgcgagaaaacttggtggcctgatacgtttttttcatggcgatctggctaaggctctggcggcatataactggggagagggaaatgttcagcgtaagggactggctgctgctccggaggagacccgcaactatattccgcgggtgctggcgaacctgccttatccgggtgcggcaatggccatacggtcgctccatcctgcgcctgtatcgcagtccaccgtaacggaaaccacgcatatcgggacactgaatgtcaccacaacgtcggacaatgtgaagggtattaccgatgacgcacgtcggcgtatcacgaattcggcgcttgtgtcggtttattccagcggggtaacaggatga

SEQ ID NO: 462572 - DNA, 711 bp, Shigella boydii
atgagtttttctttcgataatatttccctgaataacttttcgctcagtgaaagtaacgtactgagtgcagttcgtggcggcggtgtcctgggactcattaatagtgtactggcaccgtcattcggtatttattacgcacggaatgatccggcaggtgcccatcagaagggtggcaaacctttctccccggattcttttgttgtcgttgaggtgggcgcggaggcttctgtttccaccgtccccgtggagcagggggcttataccacctttaataaaatccagagatcgccggaactgcatgtgactttcattgtagaggggtggacggccttttccggatccgtcccgaacctgacaaatttttccaccacctcgcggacgaatgtgctggaaacgcttgaaaggatgcgtaccacggcaggactctacgatattgagacgccggacaagacatggacatcctgcgaccttgtgaaatatgactaccgaatgcgaagtaataatggtccgaccttactgacggttactgcggtatttcagaccgtaatgaatacaggagaggtgtcagtgggaagtacggataagtcgtctcccacggacaacgataaagcaaaaggggccgcatcggttaaaacgcagccagttacggcgtcggtgacacaaccgtcagacgctgacagacgaagtgccacgaacagggggatcacctga

SEQ ID NO: 462573 - DNA, 303 bp, Shigella boydii
atgctggaaattgttttatctcccgttaaagcccagcagtttacggtgacactgggcgctcaggtctgcaccattcgcctgaatcagcgtactacggggatgtatatcgatatcattgttaatggtgaaccgtgcctgtatggcgtgctgtgtctgaataataaccggattgtccggtacggatacctgccgtttcagggggacctgttttttaccgacacggaggggaatagtgaccctgactggcgggggctcggatcccggtaccggctctactggctgttacctgaggaactgatatga

SEQ ID NO: 462574 - DNA, 381 bp, Shigella boydii
atgtctgataatctgccgtggaaaacctggacgccggacgatctcgcgccaccacaggcagagtttgtgcccatggtcgagccggaagaaaccatcattgaagaggccgaccccagccttgagcagcaactggcgcaactgcaaatgcaggcccatgagcaaggttatcaggcggggattgccgaaggtcgccagcaaggtcatgagcagggctatcaggaaggactggcccaggggctggagcaaggtctggcaaaggcgaagtctcaacaagcgccaattcatgcccggatgcagcaactggtcagcgaatttcaaactacccttgatgcgcttgatagtgtgattgaagtggtcaacaaaaactggccaccgagttag

SEQ ID NO: 462575 - DNA, 996 bp, Shigella boydii
atgagtaacctgacaggcaccgataaaagcgtcatcctgctgatgaccattggcgaagaccgggcggcagaggtgttcaagcacctctcccagcgcgaagtgcaaaccctgagcgctgcaatggcgaacgtcacgcagatctccaacaagcagctaaccgatgtgctggcggagtttgagcaagaagctgaacagtttgccgcactgaatatcaacgccaacgattatctgcgttcggtattggtcaaagctctgggtgaggaacgtgccgccagcctgctggaagatattctcgaaactcgcgataccgccagcggtattgaaacgctcaactttatggagccgcagagtgccgccgatctgattcgcgatgagcatccgcaaattatcgccaccattctggtgcatctgaagcgcgcccaggccgccgatattctggcgttgttcgatgaacgtctgcgccacgacgtgatgttgcgtatcgccacctttggcggcgtgcagccagccgcgctggcggaactgaccgaagtactgaatggcttgctcgacggtcagaatctcaagcgcagcaaaatgggcggcgtgagaacggcagccgaaattatcaacctgatgaaaactcagcaggaagaagccgttattaccgccgtgcgcgaattcgacggcgagctggcgcaaaaaattatcgacgagatgttcctgttcgaaaatctggtggatgtcgacgatcgcagcattcagcgtctgttgcaggaagtggattccgaatcgctgttgatcgcgctgaaaggggccgagcagccactgcgcgagaaattcctgcgcaatatgtcgcagcgtgccgccgatattctgcgcgacgatctcgccaaccgtggtccggtgcgtctgtcgcaggtggaaaacgaacagaaagcgattctgctgattgtgcgccgccttgccgaaactggcgagatggtaattggcagcggcgaggatacctatgtctga

SEQ ID NO: 462576 - DNA, 1659 bp, Shigella boydii
atgaatgcgactgcagcccagacaaaatctcttgagtggcttaatcgcctgcgtgcgaatccgaaaattccattgattgttgccggttccgcggcagtggcggtcatggtcgcactgatcctgtgggcgaaagcccccgactaccgcacattattcagcaatctttccgatcaggatggtggcgcaattgtcagccaactgacgcaaatgaatattccttaccgcttcagcgaagccagcggcgctattgaagttccggcagataaagttcacgagctgcgtctgcgcctggcgcaacaaggtttgcccaaaggcggcgcggtcggtttcgaactactcgatcaggaaaagtttggtatcagccagttcagcgaacaggtgaattatcagcgggcgctggaaggcgagctttctcgtaccatcgaaactatcggcccggtaaaaggggcgcgcgtacatctggcaatgccgaaaccgtctttattcgtccgtgaacaaaaatccccttctgcatcggtgacggtaaatctattacccggccgcgcactcgatgaagggcaaattagcgccattgtacatctggtttccagcgcggttgctggtctgccgccggggaacgtcacgctggtggatcagggtggacatctgttaaccctgtccaataccagcgggcgcgatcttaatgacgctcagttgaaatatgccagcgatgtcgaaggccggattcagcggcgtattgaagcgatcctgtcgccaattgttggtaacggtaatattcacgcccaggtcacggcgcaactggacttcgccagtaaagaacaaacggaagaacagtatcgccctaacggtgatgaatctcatgcggcgcttcgttcacgccagcttaatgagagcgagcaaagcggttccggttatccgggcggcgtaccgggggcgttgtcgaatcaaccggcacctgcgaataacgcgccaatcagcacgcctccggcaaatcaaaataaccgccagcagcaggcgagcaccaccagcaatagcgggccgcgtagcacacagcggaatgaaaccagtaactacgaagtcgatcgcaccattcgtcataccaaaatgaacgtgggcgatgtgcaacgtctgtcagtcgcggtagtggtaaattacaaaaccttgccagacggtaaaccattgcctctcagcaacgaacagatgaagcaaattgaagatctgacccgcgaggcgatgggcttttctgaaaaacgcggtgactcgctcaatgtcgttaactcgccgttcaatagcagtgacgaaagcggcggagaactgccgttctggcaacagcaagcgtttatcgatcagttgctggctgccggtcgctggttgctggtactgctggtggcgtggctgctgtggcggaaagcggtacgcccgcagttaacaagtcgcgccgaggcgatgaaagctgtacagcaacaggcgcaggcccgtgaggaagtggaagatgcggtggaagtccgcctgagcaaagacgaacaactccaacaacgacgcgctaaccaacgtctgggggcagaagtcatgagccagcgtatccgtgaaatgtctgataacgatccgcgcgtggtggcgctggtcattcgccagtggataaataacgatcatgagtaa

SEQ ID NO: 462577 - DNA, 315 bp, Shigella boydii
atgtcagcgatacaggggattgaaggggttatcagccagttacaggctacggcgatgagtgcgcgtgcgcaggattcactgccgcaaccgaccattagttttgccgggcagctgcacgccgcgctcgatcgcataagcgatacacaaacagccgcccgcacgcaggcagaaaaattcaccctcggtgaacccggcgtggcgttaaacgatgtgatgaccgatatgcaaaaagcctcagtttctatgcaaatggggattcaggtgcgtaataagctggtggcggcgtatcaggaagtgatgtccatgcaggtgtag

SEQ ID NO: 462578 - DNA, 1890 bp, Shigella boydii
gtgctgcaaaaactctccggcgtgagcgggatcctggcgattaccgtcggcgtgccgaactcattaggcccgggcgagctgctgcaacattacggcactgacgagcagaaagatcactatctgccgcgtctggcgcgtggtcaggagatcccttgctttgcactgacaagcccggaagcgggttccgatgcgggcgcgattccggacaccgggattgtctgcatgggcgaatggcagggccagcaggtgctggggatgcgtctgacttggaacaaacgctatattacgctggcaccgattgcgactgtgcttgggctggcgtttaaactctccgacccggaaaagctgctgggtggcgcagaagatttaggtattacctgtgcgctgatcccgaccaccacgccgggcgtggaaattggtcgtcgccacttcccgctgaacgtaccgttccagaacggaccgacgcgcggtaaagatgtcttcgtaccgatcgattacatcatcggtgggccgaaaatggccgggcaaggctggcggatgctggtggagtgcctctcggtaggccgcggcatcaccctgccttccaactcaaccggcggcgtgaaatcggtagcgctggcaacgggcgcgtatgctcacattcgccgtcagttcaaaatctctatcggaaagatggaagggattgaagagccgctggcgcgtattgccggtaatgcctacgtgatggatgctgcggcatcgctgattacctacggcattatgctcggcgaaaaacctgccgtgctgttggctatcgttaagtatcactgtacccaccgcgggcagcagtcgattattgatgcgatggatatcactggtggcaaaggcattatgctcgggcaaagcaacttcctggcgcgtgcttaccagggcgcaccgattgccatcaccgttgaaggggctaacattctgacccgcagcatgatgatcttcggacaaggagcgattcgttgccatccgtacgtgctggaagagatggaagcggcgaagaacaatgacgtcaacgcgttcgataaactgttgttcaaacatatcggtcacgtcggtagcaacaaagttcgcagcttctggctgggcctgacgcgcggtttaaccagcagcacgccaaccggcgatgccactaaacgctactatcagcacctgaaccgcctgagcgccaacctcgccctgctttctgatgtctcgatggcagtgctgggcggcagcctgaaacgtcgcgagcgcatctcggcccgtctgggggatattttaagccagctctacctcgcctctgccgtgctgaagcgttatgacgacgaaggccgtaatgaagccgacctgccgctggtgcactggggcgtacaagatgcgctgtatcaggctgaacaggcgatggatgatttactgcaaaacttcccgaaccgcgtggttgccgggctgctgaatgtggtgatcttcccgaccggacgtcattatctggcaccttctgacaagctggatcataaagtggcgaagattttacaagtgccgaacgccacccgttcccgcattggtcgcggtcagtacctgacgccgagcgagcataatccggttggcttgctggaagaggcgctggtggatgtgattgccgccgacccaattcatcagcggatctgtaaagagctgggtaaaaacctgccgtttacccgtctggatgaactggcgcacaacgcgctggcgaagggcctgattgataaagatgaagccgctattctggtgaaagctgaagaaagccgtctgcgcagtattaacgttgatgactttgatccggaagagctggcgacgaagccggtaaagttgccggagaaagtgcggaaagttgaagccgcgtaa

SEQ ID NO: 462579 - DNA, 549 bp, Shigella boydii
atgaaagcggtatatttcctgtatctcaatcgtcacggttaccgtggtttatgtcgctataacaagagcgggcatttcaacattccctacggcaattataaaaatccgtatttccctgaaaaagaaattcgcgcatttgcagaaaaagcccagcgagcaacgtttatctgcgccagctttgatgaaacgctggcgatgttgaaggcgggggatgtggtgtattgcgatccaccgtatgacggtacgttttccggctatcacactgatggtttcactgaagatgaccagtatcacctagcatccgttcttgaacatcggtcatcagaaggacatccggtcattgtttctaacagtgacacatccctgatccgttcgctgtatcgcaattttactcaccactatatcaaggtaaaacgcagcatcggtgtggcagctggcgagggtaaatcagcaacagaaatcattgctgtttccgggccgcgctgctgggtgggatttgattattcgcgtggcgtggatagttctgccgtgtacggagtacgtgcatga

SEQ ID NO: 462580 - DNA, 2415 bp, Shigella boydii
atgagccatgccgatatgaacaactgctgcggctttaacgaggctgccgcagcgttctcatggaacagcccgaaaaaggccattaacccttatctggacccggcggaagttgcgccggtttctgcgctttcaaacctgatcactctgtacgctgccgataacgagcaggaacagttgcgccgcgaggcactgagtgatcaggtctgggagcgttattttttttatgaatcacgtgatcctgtccagcacgaaatggagcaggataagctcattagccgggcaaagctggcgcatgagcagcagcgttttaatccggatatggtcattctggcggacgtcaacgcccagccttcccatatcagcaagccgctgatgcaacgtattgaatacttcagcagcctgggcaggccaaaggcttattcccgctatttacgtgagacgattaagccatgtctggaacgactggagcatgtacgcgacagccagctatctgcatcttttcgttttatggcaagccatgtagggctggacggcctgctgattctgcctgaaatgagtcaggatcaggtgaaacgcctgtctacccttgtcgctgcgcatatgagcatgtgccttgatgcagcttgtggtgatttgtatgccaccgatgacgttaagccagaagaaatccgcaagacatgggaaaaggtggcagcggaaaccctgcgtctggatgtcatcccgcctgcgtttgagcaactccgtcggaaaagaaaccgccgtaaacccgtgccctatgaactcattccgggttcgctggcgcgtatgttgtgcgccgactggtggtaccggaaattatggaaaatgcgttgcgaatggcgggaagagcagttgcgtgctgtctgcctggtcagcaaaaaagcatctccctatgtcagctatgaagccgtgatgcataaacgtgagcagcgccgcaagtcattggagtttttccgttctcatgaactggtgaacgaagagggcgacacgctggatatggaagacgtggtaaacgccagcagcagcaacccggcgcaccgccgcaatgagatgatggcctgtgttaaaggtctggagcttatcgcggaaatgcgcggtgactgcgccgttttctacaccattacctgtccgtcacgtttccattccacgctcaataacggcagaccaaacccaacctggacaaatgcgacggtaagacaaagcagcgattatctggtcggcatgtttgctgcatttcgtaaggcgatgcacaaagccgggttgcgctggtatggcgtgcgggtggctgagccgcatcatgacggtacagttcactggcacctgttgtgttttatgcgcaaaaaagaccgccgcgccattactgcattgttgcgtaagtttgccatccgtgaagaccgcgaggaactgggtaataacactggtccacgctttaaatctgagctgataaacccgcgcaaaggaacgccgacaagctacatcgcgaaatacatcagtaagaacattgacgggcgtggtctggctggcgagatcagcaaggaaacgggtaaatccctgcgtgataacgctgaatacgttaatccctgggcgtctctgcatcgtgttcagcaattccgcttctttggtattccagggcgtcaggcttaccgtgaactgcggttgttggctggtcaggcggcaaggcagcagggtgacaaaaaagcaggtgcgccggtactggataacccgcgccttgatgccatcctggctgctgctgatgctggctgttttgccacctacattatgaggcagggcggcgtgctggttcctcgcaaatatcacttgatcagaaccgcttatgaaatcaatgaagagccgaccgcctatggcgatcacggtattcgtatttatggcatctggtcacccattgcagaaggcaagatctgcactcatgcagtgaagtggaaaatggttcgtaaagccgttgacgttcaggaggcggcagccgaccagggcgcttgcgccccttggactcgtggcaataactgtctccttgctgaaaatttgaaccaacaggagaaagataaatcagctgatgggaaccccagaacggacattaccagcatggatgacaaggagttgcacgattacctgcacagtatgagcaaaaaagagcgccgggaactggcagcaaggttacgcctggtgaaaccgaaacggcgtaaagactacaaacagcgaattacagaccatcagcgactgcagctcgtgtatgagctgaagtccagaggatttgatggcagcgagaaagaggtcgatttactccttcgcggaggcagtattccgtcaggagcaggcctgcgtatcttctatcggaaccagcgtttgcaggaagatgatcagtggcggaacctgtattaa

SEQ ID NO: 462581 - DNA, 189 bp, Shigella boydii
atgcaggactattttttggagtctttgaagctccagcgcattgatttttttcttaagcttgtagcggctagtgagtgtagtgatgaagagaaggggctggctctgcagtgggtttctgaattgactgatgaactcatggcaaaaatcagaacccacgaatacaaccgctcaatggatgtcatcagctga

SEQ ID NO: 462582 - DNA, 234 bp, Shigella boydii
atgcgcattgaaataatgatcgataaagagcagaagattagccagtctaccctggacgctcttgaatccgagctttaccgcaatctgcgccctctgtatcccaaaacggtaattcgtatccgcaaaggtagctctaacggtgtggaacttactggattgcaactggacgaagaaagaaaacaagtgatgaaaattatgcagaaggtgtgggaagacgacagctggctgcattaa

SEQ ID NO: 462583 - DNA, 309 bp, Shigella boydii
gtgaatgataataatgaggcaaaaattaatctgtcagaaagtaatggtgagtcagatcacacagaagtttctttggcattattcaattatgatgatatcaatgtaaaagtggactttatccttttagaaaaaaagatgacaatcaatgaactaaaaatgtatgtagaaaacgaattattcaagtttcccgatgacatagttaaacatgtaaatattaaagtaaatggttctttggttgggcatggggaacttgtttctattgaggatggttatggtatcgagattagttcttggatggtaaaggagtaa

SEQ ID NO: 462584 - DNA, 651 bp, Shigella boydii
atgctgagtgatatgtccctcatcgctacactttctttttttacgctattaccatttttagttgctgctggtacttgttatataaagttttctattgtttttgtaatggtacgaaatgcacttggtttgcagcaggttccatcaaatatgactctcaatggtattgcattgattatggctttgttcgtgatgaaacccattattgaagctggttatgaaaattatctaaatggcccgcaaaaatttgatacaatatcagatattgtccgtttttctgattctggcttgattgaatacaagcaatacttgaaaaagcatacagatcttgagttggcacgttttttccaaaggtctgaagaagaaaatgctgatttaaagagtgcagagaataatgattattcattgttttccctcttgcctgcatatgcgctaagtgaaattaaagatgcgttcaaaataggtttttatttatatttgccatttattgttgttgatcttgttatttcaagcattttacttgcacttggtatgatgatgatgagtccaatcacaatatcagtaccaataaaacttgtattatttgttgcgcttgatgggtgggggatcctgtctaaggccttgattgaacaatatatcaatgttcctgcttag

SEQ ID NO: 462585 - DNA, 261 bp, Shigella boydii
gtgtctgatatagtttatatgggtaataaggctctttatttaatccttatcttttccttatggccagtaggtatagctacggttattggattaactattggtttattacagacagtgactcaacttcaagagcagacacttccttttggtataaagcttataggtgtctcaatatctttgctacttctttctggatggtatggtgaggttttattgtctttttgtcatgaaataatgtttttaattaagagtggggtttga

SEQ ID NO: 462586 - DNA, 771 bp, Shigella boydii
atggacatttcaagctggttcgaaagtattcatgtgtttttaatactcctgaacggcgttttttttagattggctccattatttttctttcttccatttttaaataacggtataatttctccatctattagaatacctgtgatttttcttgttgcatcaggattaattacttctggtaaggtagacataggttcttctgtttttgaacatgtttatttccttatgttcaaggaaataattgttggcctccttctctctttttgcttgtctcttcccttttggatatttcatgctgttggtagtattattgacaaccagcgtggggcaacgcttagtagttcaattgatcctgccaatggtgttgatacgtctgaattggcaaaatttttcaatcttttttctgcagttgtatttctatacagtggtggaatggtctttattttagaatccatacaattgtcttataatatatgcccgttattttctcaatgttctttccgtgtctcaaatatcttaacatttctgactttattggcaagtcaggctgttattttagccagtcctgttatgatagtattgttactatcagaagtattacttggtgtattatcgagatttgctccgcagatgaatgctttttccgtatcattaactattaaaagtttacttgcaatatttattattttcatctgttcttctactatttacttttctaaagttcaatttttcctcggtgaacataaatttttcacaaatctatttgttagataa

SEQ ID NO: 462587 - DNA, 1029 bp, Shigella boydii
atggcaaataaaacagaaaagccgacacctaaaaaactaaaggatgccgcaaaaaaaggacagtcatttaaatttaaggatttaacgacagttgttattattctggtagggacatttactataatatcattcttttccttaagtgatgtaatgctcttatacagatatgtaataattaatgacttcgaaattaatgagggtaaatacttttttgcagtggttattgtcttttttaagataattggcttcccactttttttctgtgttctttcggctgtgttgccaacattggttcaaacaaagtttgttcttgcgactaaagctatcaagattgatttttcagtattaaaccctgttaaagggttaaaaaaaatatttagtataaagacaataaaagaatttttcaaaagcattctgcttcttattattctagcattaacaacctatttcttttggattaatgaccgaaaaataattttttctcaggtgttttctagtgttgatggcttatatcttatttggggggggctatttaaggatataatattatttttcttagcattttctatttttgttattattcttgactttgtgattgagttcattttatacatgaaagatatgatgatggataaacaggagataaaaagagaatatatagagcaagagggacactttgagacaaagtcgagaaggcgtgagttgcatatcgagattctttcagagcagactaaatctgatatacgtaattcaaaattagtggtaatgaacccgactcatattgcaattggtatttattttaatccagaaatagcgcctgcaccttttatttctctcattgaaactaaccagtgtgccttggctgtcagaaaatatgcaaatgaagttggtataccaactgtgcgtgatgtgaaattagctagaaaactatataaaacacatacaaaatatagttttgttgattttgaacacttggatgaagtcctacgtcttattgtttggcttgagcaggttgaaaacactcattaa

SEQ ID NO: 462588 - DNA, 234 bp, Shigella boydii
atgggagttaatttctgtaataaaataggtattgatcagtctgaatttgaaatagaatcttccatcattaactccattgctaatgaggtattgaacccaatatctttccttagcaacaaggatataataaatgttttactcagaaagatttcatctgaatgtgacctggttagaaaagacatttatcgttgtgctcttgagttggtcgttgaaaaaacacctgatgatttataa

SEQ ID NO: 462589 - DNA, 300 bp, Shigella boydii
atgccagtgttacacaaccgcatttccaacgacgcgctaaaagccaaaatgttggctgagagcgaaccgcgaaccaccatttcgttttacaagtatttccacatcgccgatcctaaggcgacccgtgacgctttatatcagctgtttaccgcgctgaatgtttttgggcgagtgtatctggcgcatgagggcattaacgcgcaaatcagcgtacctgcgagcaatgttgaaacatttcgcgcgcagctctgccttcgacccggctttagagggtttacgcctgaatatcgcgttggatga

SEQ ID NO: 462590 - DNA, 174 bp, Shigella boydii
atgtctctctatcaacatatgcttgttttttatgcggttatggcagcaatcgcatttcttatcacctggtttctttctcacgataagaaacgcatccgtttcttaagcgcctttctggtgggggcaacatggccgatgagtttcccggtggcgctgttgttttcactgttttaa

SEQ ID NO: 462591 - DNA, 1008 bp, Shigella boydii
atggggcaacaaaagcagcgtaatcgacgttgggttctggcctcgcgtccacatggcgcaccggttccggagaatttccgtcttgaagaagatgatgtcgccacaccgggtgaaggacaggtgttactgcgcacagtttatttgtccctggacccgtatatgcgtggacgtatgagcgatgagccatcttattcaccgcctgttgatattggcggcgtgatggtcggcggcacggtgagccatgttgtggagtcgaatcatcctgattatcagcctggcgactgggtgctgggctacagtggatggcaggactatgacatatccagtggtgatgatctggtgaaacttggcgatcatccgcaaaatccatcgtggtcgctgggtgtgctggggatgccaggctttaccgcttatatggggctgctggatatcggtcagcctaaagagggcgaaacgttggtggtagctgcggcgacaggtcctgtgggagcaacggtggggcaaatcggcaaacttaaaggttgcagggtggtggggggggccggtggcgcggaaaaatgccgccatgctatcgaggtgctgggcttcgatgtttgtcttgatcaccacgcgggtgattttgccgaacaactggtgaaagcgtgcccaaaaggtattgatatctattatgaaaacgtgggcggtaaggtatttgatgcagtgctaccattacttaatacatctgcgcgcattcccgtttgtggcttagtgagcagctataacgctacagagctaccacccggtccggatcgtttacccctgttgatggcaacggtgctgaaaaaacgtattcgcttgcaagggtttattatcgctcaggattatggtcaccgcatccatgagtttcagaaggagatggggcaatgggtgaaagaggataaaatccacggtaatgactccaacttactgatagtgttttatgttcagataatgcccgatgaccttgtcatgcagctccaccgattttga

SEQ ID NO: 462592 - DNA, 1098 bp, Shigella boydii
atgcaaaacagaaaatggattttgtcctcgctggtaatgacttttttcggcatccccatactgacgcaatttttggcggcggttgttgctatgctgggtgtcggacttgccggtattattgaagtttgtaatatccttatcacgccaacaagttaccttctgctcaacatttttatgctggcgctgggcgcattaatgctatttttctcggggcgagtatgggcaggcgatagtgcaccagaaaaaagagaaatagccgtctggcgacaatgtctttttttagtacccggtttattaatcctggttggctggataatcgcgctgcatctggcagattatcaatttcaccagatgggatcgggttggttggctgatcttatgctcccctggctgggcgttttgttagtctcagtagtcggaggtgagtactggtggatagtcattatacccgttggcgcgcatatcagtttttcgctggggtacggccggccaaccagacatcctttaaccggtacatccgggctacgttgccgtaattccctcctgtttatccttctcatgcttggttttgtcgctggttatcagggttatttatataaacagctcaatcccggcgtcggtgtgcgcgaaaatattgatacctgggcctggcgacccgataaactcaataatcaactgacaccactgcgtggtaaaccgcaaattcagtttacgcaaaactggccgcgactcgatggtgctacggcggcgtacccaatttatgcctctgcattttatgctttgagcgttataccggaagattttcacaccagggaatatctggagagctctcgtacccccgatgcgtataacaggattgttaaaggtgatgctgatattatttttgtggcgcaaccttccggtgggcagaaaaaacgcgctgaggaatcgggcattactttgctgtacacgccttttgcccgtgaagcgtttgttttcatcgtcaatgcggataatccggttaattccctgactgaacaacaggtgcgtgacatcttcagtggtgcaattaccaactggcgtactgttggcggtaacgatcaggagatccagacctag

SEQ ID NO: 462593 - DNA, 312 bp, Shigella boydii
atgtccggcagtgcttttgccgttacgcaccacgccttcagtagcggagcaggaaggacatctgatggaaatggaagccacgcaagcaccttaaaatcaccatcatacactaaatcagtaagttggcagcattacctggaagaggtggtggctttttttagccgtaaacgggtcgcaaaatataaatatcctgaacatatcgtggtaatcgaaaaactaccgcgcactgcctcaggtaaaatacaaaagtttttgttaagaaaagatattatgcggcgattaacgcaggatgtctgtgaagagattgaataa

SEQ ID NO: 462594 - DNA, 627 bp, Shigella boydii
gtgtatgaagattctcaacccggtacgctgaatgattttctcggtgccatgactgaggatgatgcccgtccggaggcactgcgtcgctttgaactgatggtggaagaggtggtgcgtaacgcagaggaggcgaagaagaatgccggagaggcggagacgtcagcgaggaatgccggcatatcagccagtcaggcagaagagagcgctgcaaatgctgacacttcagcaggggatgcatcggagtcagcccggcaggcggcagaaagtgcagcctcagcaaagcagtcagaggaggcgtcctcgtcctcggcctctgcggccgctcaaaaagccagtgagtcattacaaagtgcaacagatgctgagttgtcaaaaaagacggcagaaagtgcagccggtaatgcagtcagggatgcaacgaccgcaacagaaaaagcccgggagtcagcagaaagcgcacagtcagcggaacaaagcaggatagcggcggaagaggccgtaaaccgaatccccaccgtggtgggacctcccgggccaaagggggaaccggggcccgcgggtcctcaggggccgaagggagataaaggagagcgtggcgacaccggcccggcaggggccaaaaggtga

SEQ ID NO: 462595 - DNA, 372 bp, Shigella boydii; identical to SEQ ID NO: 462525

SEQ ID NO: 462596 - DNA, 372 bp, Shigella boydii; identical to SEQ ID NO: 462525

SEQ ID NO: 462597 - DNA, 246 bp, Shigella boydii
atgaaagccatgtcgaacattactgactgttccgttccggatattaaccggatgctgagatttatgttcggaaaaaaacggcgagcttatgttctgaataatggtgggctgaggatgagttacatctttgagtccgcgctctcgttggcagaactggcgattatccagtcgtcgggtgcactgccgtccccgccgggtgtttatgtttcagtagttttaaaggagtcccgtaatgaaggccagtga

SEQ ID NO: 462598 - DNA, 1386 bp, Shigella boydii
atgaaggccagtgataaaccccgccagctggcggtcccctttgcgagtaccggagataaaaaccgtatcccggacaaggcgacacagcagaccagagagagcggtaatgctgcgtatgattcaggttttcctccggtgaccatgacagcggtctcagcgggaggtataccgccacacggcaaggattttaacggtctgatgtacgatattaccgcagcaatacggttcgcccaggctggcggtttgtacacgtataatgccggttttgcgggggccattggtggatatgcaaaaggagccattctcgccggagtcgcaacaacagcggtctggctgaataccacagacgataacctgaccgatcctgaaggctccgacagtgcgggctgggtaaatcttcttgaggatccgaaaaggatattcctgcggcagaagaacaatctgtcagaccttcagaataaagggacggtacgggataatcttcaggtttacagtaaagagcagtcagatcaacgctatgttcatcgggaaggcgataaaataaccggagagctgaaaatccgtggtgttaatgcgctgaggattttcaacgaagcttttggcctgatttttcgtcgttcggaagagtgcctgcaccttattcccaccagtgaaggtcagggggaaaatggcgatattggtcccctgcgcccgttcaccattaatttgcggacgggtgaaatatccatgtcgcataaagtgtctgttggcggtggttcgcaggtcaatggtgcgctgggtatcggcgttcagaacgccctgggggggaattcaattgttcttggtgataatgacaccggatttaaacagaatggagacggtattctggatgtttatgctaatagtcagcgtgtattccgctttcagaatggagtggctattgcttttaagaatattcaggccggaactgccagaaaattcacgttatccagcgccaacaactccacgaaaaatgcagcgttttatttgtggggtaatccatccaggtctgttgttgcagagcttggcgatgattcaggctggcattttttcagccagaggaatacagataacagcatcacgttcgccgtaaacggacaggtaattccgttaaattacggaaacttcgatgcccgctataaatatcgaactgagggggtacaggatgtacggtatggccatgaaatgtattacagccccggcagtaacaccgtttcgtggagatttcgcgcaccttcgggacacgggctgtcagggatagcgatatcggataccggccgtgactcagcggataacgtcaacggcgtgtattaccgcccgcttcagaaactgattaatggcacctggtataacgtggcgagtgtttaa

SEQ ID NO: 462599 - DNA, 504 bp, Shigella boydii
gtggaacaatatcagctgacaaaacaatatgatgtcacctggcttttttcgaaagacggaaaaaactggtatgaagagctgaagaatttcgccagcgacacaattaaaataacttacaccggagacggtcgcgtggtgtgggtcggtaaggatgtgactggcattgaaccccgtaacgccagtgttattgaagttcctgatattaccgccaaccgccgcattaccgcgccgggttactggttttaccgcaatgatgaatttgtctttgactacagactcaaagcggaagatgagcgtgatgcccttctggctcaggtcagtgcccggacaggggaatgggaagaagacctgctgctggggctaatcagcgacgaagaccgggaaaaactgaaagcgtaccgcatttacgcgaaatcgctgcaggcgatggatttcagtgtcatcactgataaaacctcatacaacgccattgaatggcccgcctctccggaaatttcttcctga

SEQ ID NO: 462600 - DNA, 291 bp, Shigella boydii
atgtctgtagtgatatcaggtgcgctgactgatggcgcaggtatccccatgtccggataccatattattctgaaatcccgggtaaacaccccggaagtggtgatgcacactgttgctgatgtgatgacaggaaacgatggtgaatactgtttccatgcgcggactggaaaatatggtgtgtatctgaaaccgggctggcacaacgagtacaacgttggcgacattgctgtatatgaggactcaatgaggtgtactggcaatagcggacactaccatttgttctttttttaa

SEQ ID NO: 462601 - DNA, 372 bp, Shigella boydii
gtgctggatgcactggagcaggcgttatgggcccgtcgaccgtccggcacggtccatcacagtgataaaggttctcagtatgtatcgctggcctacacacagcggcttaaggaagccggattactggcatcaacaggaagtacaggcgactcgtatgacaacgcgatggcggagagcatcaatggtctttacaaagcggaggtaatacaccgtaagagctggaaaaaccgtgcagaagtggaactggccacactcacgtgggtggactggtataataatcgacgattgctggaaaggctgggccacatccctccggcagaagcagaaaaagcttattatgcttccatcggaaacgatgatctggcagcctga

SEQ ID NO: 462602 - DNA, 963 bp, Shigella boydii
atgcaactcgaaaaagaaatagactctttttctgcattttcaaacacagcatctgctgaacagctatcaacccagcagaaatcattaaccggacttgccagtgttactcaattgatggcaacctttattcaactagttggaaaaaataatgaagaatctttaaaaaatgatctggctctattccagtctctccaagaatcaagaaaaactgaaatggagagaaaatctgatgagtatgctgctgaagtacgtaaagcagaagaactcaacagagtaatgggttgtgttgggaaaatacttggggcacttttaactatcgttagtgttgttgcagcagctttttctggaggagcatctctagcactggcagctgttggtttagctcttatggttacggatgctatagtacaagcagcgaccggcaattccttcatggaacaagccctgaatccgatcatgaaagcagtcattgaacccttaatcaaactcctttcagatgcatttacaaaaatgctcgaaggcttgggcgtcgactcgaaaaaagccaaaatgattggctctattctgggggcaatcgcaggcgctcttgtcttggttgcagcagtcgttctcgtagccactgttggtaaacaggcagcagcaaaacttgcagagaatattggcaaaataataggtaaaaccctcacagaccttataccaaagtttctcaagaatttttcttctcaactggacgatttaatcactaatgctgttgccagattaaataaatttcttggtgcagcgggtgatgaagtaatatccaaacaaattatttccacccatttaaaccaagcagttttattaggagaaagtgttaactctgccacacaagcgggaggaaatgtcgcttctgctgttttccaaaacaacgcgtcgaaaaatctagcagatttatccaaagagttttcaggacaccacgggtag

SEQ ID NO: 462603 - DNA, 765 bp, Shigella boydii
gtgagttgtatttcttcccgtcttaattttttattttctggtgaaactagattgggctctcaattgtcattgattgcgttcgatgctacaaaatcagctgcagagaacattgttcggcaaggcctagcagccctatcatcaagcattactggagcggtcacacaagtaggtataacgggtatcggtgccaaaaaaacgcattcagggattagcgaacaaaaaggagccttaagaaagaaccttgccactgctcaatctcttgaaaaagagcttgcaggttctaaattagggttaaataaacaaatagatacaaatatcacctcaccacaaactaactctagcacaaaaattttaggtaaaaataaactggcaccagataatatatccctgtcaactgaacataaaacttctcttagttctcccgatatttctttgcaggataaaattgacacccagagaagagcttacgagctcaataccctttctgctcagcaaaaacaaaacattggccgtgcaacaatggagacatcagccgttgctggtaatatatccacatcaggagggcgttatacatctgctcttgaagaagaagaacaactaatcagtcaggccagcagtaaacaagcagaggaagcatcccaagtatctaaagaagcatcccaagcgacaaatcaattaatacaaaaattattgaatataattgacaacatcaaccaatcaaggaattctacagccagtcagattgctggtaacattcgagcttaa

SEQ ID NO: 462604 - DNA, 999 bp, Shigella boydii
atgaatataacaactctgactaatagtatttccacctcatcattcagcccaaacaataccaacggttcatcaaccgaaacagttaattctgatataaaaacaacgaccagttctcatcctgtaagttcccttactatgctcaacgacacccttcataatatcagaacaacaaatcaggcattaaagaaagatctctcacaaaaaacgttgactaaaacatcgctagaagaaatagcattacattcatctcagattagcatggatgtaaacaaatccgctcaactattggatattctttccaagaaagaatatccaattaataaagacgcaagagaattattacattcagccccgaaagaagccgagcttgatggatatgaaatgatatctcacagagaactgtgggataaaattgcaaagtcaatcaataatattaatgaacagtatctgaaagtatatgaacatgccgttagttcatatactcaaatgtatcaagattttagcgctgttctttccagtcttgccggctggatctctcccggaggtaacgacggaaactccgtgaaattacaagtcaaatcgcttaaagacgaattgacaaagctcaaggaaaaatataaagataaaccgctatatccagcaaataatactgttagtaaggaacaagcaaataaatggcttacagaattaggtggaacaatcggcaaggtatctgaaaaaaacgggggatatgttgtcaatataaacatgaccccaatagacaatatgttaaaaagcttagataatctaggtggaaatggcgaggttgtgctagataatgcaaaatatcaggcatggaatgccggattctctgccgaagatgaaacaatgaaaaataatcttcaaactttagttcaaaaatacagtaatgccaatagtatttttgataatttagtaaaggttttgagtagtacaataagctcatgtacagatacagataaactttttctccatttctga

SEQ ID NO: 462605 - DNA, 1032 bp, Shigella boydii
atgccgatcatagcaccaatttcccgtgacgaacgacgcctgatgcagaaagccatccataaaacacacgataaaaattatgcccgcagactgactgccatgctgatgctgcaccggggcgaccgtgtcagcgacgttgccagaacgctctgctgcgcccgttcctctgttggacgctggattaactggttcacgcagtcgggtgttgagggactgaaatcattacctgccgggcgtgcccgtcgctggccgtttgagcatatctgcacactgttacgtgagctggtaaaacattctcccggcgactttggctaccagcgttcacgctggagtacagaactgctggcaataaaaatcaatgagataaccggttgccagttaaatgccggaaccgttcgccgctggttgccgtctgcggggattgtgtggcgaagggctgcgccaactctgcgtatccgtgacccgcataaagatgaaaagatggcagcaatccataaagcactggacgaatgcagcgcagagcatccggtcttttatgaagatgaagtggatatccatcttcatcccaaaatcggtgcggactggcaactgcgcggacagcaaaaacgggtggtcacgccgggacagaatgaaaaatattatctggccggagcgctgcacagcgggacaggtaaagtcagctatgtgggcggcaacagcaaaagttcggcgctgttcatcagcctgctgaagcggcttaaagcgacataccgtcgggcgaaaaccatcacgctgatcgtggacaactacattatccacaaaagccgggaaacacagagctggctgaaggagaacccgaagttcaggggcatttatcagccggtttactcgccatgggtgaatcatgttgaacggctatggcaggcacttcacgacacaataacgcgtaatcatcagtgccgctcaatgtggcaactgttgaaaaaagttcgccattttatggaaaccgtcagcccattccccggaggcaaacatgggctggcaaaagtgtag

SEQ ID NO: 462606 - DNA, 717 bp, Shigella boydii
atgaatgacaattcattgcttagaaattcttcattattcatcgcctatatgggatgtgtagggtgggtcagtgcttattcttatggctggggaacctctttttactatggatttccatggtgggttgttggtgcaggtttggatgatgttgccagaagtttactctatgctatcatagtaatgggtatactttttaccggttgggggattggtattttattttttcttcttataaagaaaagaagtaaaatacaagacttgagtttttttagactattttttgctattaccctactgtttttccctgtaatattcgaacttttaattctcaaacaatatttcatacttccattatcactttcatgcattattagttcattggttatttcaataataattcgcatatatggacggatcttttctgtatcatgtttttcagatatcccttttgttagagaacaccgcattaagttaattatggctggttttttggtttatttttggcttttttcctttcttgttggctggtataaacctcaattaaaaaaagaatatcagatgctttgttataataatagttggtattatgttcttgctcgttatgattcacggctcgttttgtctagttcatttaaagatgacagtaacagattcttaatatttaatacagaacagtcgggattttatgaaatcaatgatgtttatgtcagaaagtaa

SEQ ID NO: 462607 - DNA, 150 bp, Shigella boydii
atgccgagcattgcaccaataccccgtgatgaacgatgcctgatgcagaaagctccctataaaacaaagaacaaaaactacgaccggcgattcaccgtcatactgatgctgcatcgtggtgacactgtctgtcactttcatgttgactga

SEQ ID NO: 462608 - DNA, 300 bp, Shigella boydii
atgacaaaaacagtatcaaccagcaaaaaaacacgtaaacagcattcgcctgaattttgcagtgaagccctgaagcttgctgaacgcatcggtgttgctgccgcagcccgtgaactcagcctgtatgaatctcagctctatgcgtggcgcagcaaactgcagcaacagatgacctcgtctgagcgtgaaagtgaactggccgctgaaaatgcccgcctgaagcggcaactggcggtgcaggcagaggaactggctatcctccaaaaggccgcgacatactttgcgaagcgcctgaaatga

SEQ ID NO: 462609 - DNA, 384 bp, Shigella boydii
atgaagtatgtctttattgaaaaacatcaggctgagttcagcatcaaggcaatgtgccgcgcgctccgggtggcccgcagcggctggtatacgtggtgtcagcggcggacagggataagccctcgtcagcagttccgtcagcactgcgacagcgttgtcctcgcggcggcctttacccggtcaaaacagcgttacggtgcaccacgcctgacggatgaactgcgtgctcagggttaccactttaacgtaaaaaccgtggcggcaagcctgcgccgtcaggggctgagggcaaaggcctcccggaagttcagcccggtcagttaccgcgcacatggcctgaggtgtactggcaatagcggacaccaccatttgttctttttctaa

SEQ ID NO: 462610 - DNA, 1317 bp, Shigella boydii
gtggttgttttttcatgggtgtttatctttgcgctctatttcacaccttatgcgctaattgttggtcagttaggctcgaccttcaaagatgggaagggcggggtcagtacctggattaaacacacgatgggacccggactggcttatctcgccgcgtggacctactgggtggtgcatattccctatctggcacaaaaaccccaggcaattctgattgcgctcggttgggcgatgaaaagcgacggttcgctaatcaaagaatattcagtcgtagcgttacaggggttaacgctggtgctgtttatcttctttatgtgggttgcttcacgcggtatgaaatcgctgaaaatcgtcggttctgtggcagggattgcgatgtttgttatgtcgctcctgtatgtggcgatggcggtaaccgcgcctgcgattactgaagtgcatattgcgaccacaaacattacctgggaaacgttcattcctcatatcgactttacctacattaccactatttcaatgctggttttcgcggttggcggagcagagaagatttctccttacgttaatcaaacgcgcaacccaggaaaagaatttccaaaagggatgttatgcctggcggtgatggttgcggtttgtgccattctgggctcactggcgatggggatgatgtttgactcgcgtaatatcccggatgacttaatgactaacggtcaatattacgcctttcagaagctgggcgagtattacaacatgggtaatactttaatggtgatttacgccattgcgaataccctgggacaagtagctgcgttggtattctcgattgatgccccgcttaaagtgctattaggtgatgctgacagcaaatatattccagccagtttatgtcgtaccaacgcttctggtacgcccgttaatggctattttctgaccctggtgcaggtggcaattctgattatgctgccgactctcggcatcggtgatatgaacaatctctataaatggctgttgaatcttaactcggtagtgatgccgctgcgttatttatgggtatttgttgcatttattgcagtcgttcgcctggcgcagaaatataaaccagaatatgtctttattcgtaataagcctctggcaatgaccgtcgggatttggtgttttgcctttaccgcctttgcctgtttgacggggatcttcccgaaaatggaagccttcactgcagagtggaccttccagttggcgctgaatgttgcaacgccgtttgtgctggtaggattaggactgattttcccgctgctggcgcgtaaagcgaatagtaaataa

SEQ ID NO: 462611 - DNA, 909 bp, Shigella boydii
atgcggatgaatatgtctgactttgccactttctttgccgtggcccgtaatcaaagctttcgtgcagcgggcgatgagttaggcttatcctcgtccgccattagccatagtattaaaacactggaacaacgtcttaaaattcgcttattcaatcggacaacccgaagcgtatcgttaacggaagcgggttctaatctctatgaacgattgcgcccagctttcgacgaaattcagatcatgttagatgagatgaatgattttcgtctgacaccgacaggaacgctcaaaatcaatgacgcccgggtagctgcacgtatatttttaatgcctttactggttggtttcacacgtgaatatcctgatattaaagtcgagctcacaactgacgactctcttgtcgatatcgtccaacagggctttgacgctggcgttcgacttagtggcatcgtcgaaaaagatatgatcagcgtggcgatcggcccgccagtgaaattatgtgtagcagcaacgccagagtactttgcaagatatggcaaaccccgccatcctcatgatctgcttaatcatcaatgtgttgtttttcgttatcccagcggcaaacctttccactggcaatttgcaaaggagctggaaattgctgtcgcaggaaatatcattctggatgatgttgatgctgaactggaggccgttttgatgggtgctggtatcgggtatctgctctatgaacagatcaaggagtaccttgatactggtcgtttagaatgtgtactgggagactggagcacagagcgtccaggcttccagatctattatccaaaccgccagtatatgtcctgcggcttgcgcgcatttctcgattatgtaaaaacgggtcagatcagccagagtcagcgtcaccgaccacaataa

SEQ ID NO: 462612 - DNA, 165 bp, Shigella boydii
atgaaaaaaagaaattttagcgcagagtttaaacgcgaatccgctcaactggttgttgaccagaaatacacggtggcagatgccgccaaagctatggatgttggcctttccacaatgacaagatgggtcaaacaactgcgtgatgagcgtagactggccccctga

SEQ ID NO: 462613 - DNA, 147 bp, Shigella boydii
atgcaacattccgtcgatctcttcttcgttctgtatatgaacgacattacctttgctcaaaatgtttttcatcgcggtgaagaacatcgtatccctggtaattataagaaacataaccgactcctggtgcggacattaattttataa

SEQ ID NO: 462614 - DNA, 192 bp, Shigella boydii
atgggaaatagggtaaaaagtcaggaagttcgatacctctacagcgaatattttgctgatgatacttccctttgccaaatgaaattaacctctttctctattaccacgtttttccagaagcaagagattgggtatcaagaggctggctgctatgataaggcgtcttgttttttaagcgaggaaagattttga

SEQ ID NO: 462615 - DNA, 267 bp, Shigella boydii; identical to SEQ ID NO: 462029

SEQ ID NO: 462616 - DNA, 225 bp, Shigella boydii; identical to SEQ ID NO: 462228

SEQ ID NO: 462617 - DNA, 330 bp, Shigella boydii; identical to SEQ ID NO: 96322

SEQ ID NO: 462618 - DNA, 396 bp, Shigella boydii
atgcagctcattgtccagagccttcgcggcatttacaggatcatccttcagccgcttaaactgatttatggtatcgctgaccgactggccaaccgatcgctccatctgtgcggcagctctcgccaccataccgatatcgtttccacgaaatgcaccactccccaccacctgagccagcgcaccggctgcagcatgttgcgtgataccattcccagaaatagcacgactgagcgtccacagctgcccggcagtgactccggcataatgccccgtcagcgacagctggcggttaaattcttccccctccttctgaccgtcataccaggctttacccagaccatagacggccgcggcaataccgccaataaccccgccaagcatcatgcctttcggtga

SEQ ID NO: 462619 - DNA, 486 bp, Shigella boydii
ttgccagtaacggcgattctcattcagttgtcggttcaggctctccgtcagcgcctgctcggcctttctgtagtcatccgtgttatatgtccctttctgctcactatcccgcctcaactgctccagctgttgctggtatttctggcgaagactcagttgtacctgatatcgctgccgctgctgatcacccatacccaccgtggcgatatccaggtcatgttgctgacgctgagcgcgctcttcttcagccagttgactggtcagctgaattgtttttttcttcagatcgttgagtgccgtctgtttctgaagctcctgctgttttacatccagcagcgtcagtgcctgaatcagttcatctttacgggccagcacactcttttcatctgccgtcagttttttcccgtccagatcgctgatgcgctgctgcagagccagaagctgtttatgcgcttctgtcatcttttcagtggcaatgcctgctga

SEQ ID NO: 462620 - DNA, 327 bp, Shigella boydii; identical to SEQ ID NO: 5975

SEQ ID NO: 462621 - DNA, 276 bp, Shigella boydii; identical to SEQ ID NO: 461438

SEQ ID NO: 462622 - DNA, 267 bp, Shigella boydii
atgttgggacttgaaccgaagaacacggcggtgcggagtccggagagtaacggaatagcagagagcttcgtgaaaacgataaagcgtgactacatcagtatcatgcccaaaccagacgggttaacggcagcaaagaaccttgcagaggcgttcgagcattataacgaatggcatccgcatagtgtgctgggttatcgctcgccacgggaatatctgcggcagcgggcttgtaatgggttaagtgataacagatgtctggaaatatag

SEQ ID NO: 462623 - DNA, 390 bp, Shigella boydii
atgtttgggttaggaatcacttccccaacggccaatattctgcaatttctggtcgcgggtgacgtgaaatacattaactggggcgttttcctggtgttagggatcttcgtggggtcatttattgcagccaaagcgagccgtgagttccgcgttcgcgcagctgatgcacaaacaacattacgtagcgggttaggtggtgtactgatgggcttcggtgccagtattgcaggtggttgctctatcggtaatggactggttatgactgcaatgatgacctggcagggctggattggccttgtatttatgattctcggagtctggactgcatcctggcttgtgtatgttcgaccgcagcgtaaggcgcgactggcgactgctgcggcaaattaa

SEQ ID NO: 462624 - DNA, 276 bp, Shigella boydii
atgattgatgtcttagggccggagaaacgcagacggcgtaccacacaggaaaagatcgcaattgttcagcagagctttgaaccggggatgacggtctccctcgttgcccggcaacatggtgtagcagccagccagttatttctctggcgtaagcaataccaggaaggaagtcttactgctgtggccgccggagaacaggttgttcctgcctctgaacttgctgccgccatgaagcagattaaagaactgaaccgccccgggaatcctggagactaa

SEQ ID NO: 462625 - DNA, 1080 bp, Shigella boydii
atggcttttaaacactatgatgttgtcagggcggcgtcgccgtcagatcttgcggaaaagctgacacataaactgaaagagggctggcagccgtttggtagtccggtggccataaccccttatactctgatgcaggcgattgcagcagaaggtgcagtaatcagcgccaccagcgacccggagtattactttgttgtggttctggcagggcagtcaaacggcatgtcgtatggtgaaggccttccgctgccggggacatatgaccgtccggacccgcgtattaagcaactggcgcgtcgcagtacggtgacaccgggcggtgcagcatgcaaatataacgacatcattctggcggaccattgtctgcatgatgtgcaggacatgagccgtcttaaccatccgaaagcggacctgtcaaaggggcagtacggaaccgtggggcaggggctgcatatcgccaaaaaactgctgccgtttataccggcgaatgcgggcattctgctggttccgtgctgtcgtggtggttcagcgttcaccaccggagctgatggcacatacagtgacgcgagtggtgcctcggagaattcaacccgctggggtgtggacaagccgctgtataaggaccttatcggtcgaacaaaagcggcactggagaagaacccgaaaaatgtgctgtttgccgtggtgtggatgcagggggaatttgattttggcggtacgccggcaaatcatgccgcacagtttggtgcgctggttgataaattccgtgcagacctggcggatatggcaggccagtgcgtcggtggctctgctggcggtgttccctggatatgcggggacacgacgtatttctggaagcagaagaacgaatccacgtaccagacggtgtacggcagctataaaaataaaacggaaaagaatatccatttcgtaccgttcatgaccgatgagaacggggtgaatgtgccgacgaacaaaccggaagaagacccggacattcggggtatcggttattacggttcgaaatggcgtgacagctcagccacctggacgtcacaggacagggcgagccatttctag

SEQ ID NO: 462626 - DNA, 189 bp, Shigella boydii
atgctgcagcagataatcagcgctagcagtcgtccgggtgacctgattgcagattttttcatggggtcgggttcgacagtgaaagcggcactggcgctcgggcgtcgtgcaattggcgttgagctggagactgaacgttttgagcagacggttcgggaagtacaggatttagtcagccagaacggatga

SEQ ID NO: 462627 - DNA, 477 bp, Shigella boydii
atgtttattgattcagaaaaacggctgaaacaactttcagatgaggcaaagaaaagcaccgaggatctcgaagaagcaaagaagaattcaaggtttacacaggtatccccaaaaggttgggaacgcgttcgagagctgctgaaggatagccaaggcatatcagcactgaagctgtactcatttttagcggagcatatcgatccaacgtgtggcgctgtcgttgcggatcagcaattcctagctgaaaaacttggagttagcagaagcacaattattcggtggctcaattacttagaatcaaaaaatgcattagttagaatccccgttgctggtaaggtttgtgcgtatgccctcgatccacatgaagtctggaagggatacaacactacgaaaaaccatgcagcgtttgtcactaaaacactggtcaacaaagacggtgatattcagcgccgaatcatggccatgttttcaaattga

SEQ ID NO: 462628 - DNA, 585 bp, Shigella boydii
atgagcaaaaaaaataacgtgccaatgatacaaaataatggaaatctccaaccatttagcatgggtaatttaccatctattgctaaaacattcccaatggaaatccatacaactatacttcaacagcttaacccattggagcatatatccaatgctataagtaggatttgttactataaagaacagtgtaaagcacttgagcttgagtcactaaaaataaaagaacaagccagttttatgcaccttaaaatagatactaattttaaaaaggcaatgtatgagctagaaacaagaagaaagagtaatgagttgaagttgatagctgctgcaaatgattttaagcaaatatcaataacaaaatcagacttaattaaagagatatcaaagcttgtttcaagcatatgtagcaatgacgtttcgttggaaagtaaaaaggcgatgaacgatactcttatcattatgaaaggcatgctcagtgatcaacggtctgagtcatatgaaaaattcaaatctttgttaagtagtattgattctagttacaatgatgcgttgttgatagaggatcatcaggataattatgtttaa

SEQ ID NO: 462629 - DNA, 582 bp, Shigella boydii
atgtttaatatcatactcggagttgctgctgtaggtgttggtttatatatcttgaacgaacttgatgatcgcgccggagaagaaaaaaagcgatgggaaaatcaacgagaatcagtatgtaaaagcattgaagaacataagagatatatagaacaacatgtcgaatatgttcaatcaatgtatgattttcatcagttagttgaccttcattattcatgtatgaaagtggcaaatgaagcatataaacttcttaatgatgctaaaaaatcaatgggcgctatttatgatgctatcaataaactcaaagctcaccgctctaaattatttaatgataaaaaagaaagcgatgattatgaaaagaaaaaagaaatacaagcagaaataaacatgatcaaagaaatcatagatggcctatactctgaattagatttaattaaaaaggataaagaacatttttatcaggaattaaaagcttttaacttaaaaactagcagcattaaatacagaattagagacaataccggatataaaggctttgattggtataatcggttacaagaacgaactttacttcgacgttag

SEQ ID NO: 462630 - DNA, 324 bp, Shigella boydii
atggcaaagaattttgtagaagaaggaaaaacggtggcgattgttgccagtgcagccatcagcagcggagatctggtgcaggtgggcgatgtttttgcggtggcgctgaccgatattccacagggtgaaacaggcgacggcatgaccgaaggtgtgtttatgctgcctaagctgaaaacggatgacatgaaaacgggtaagaaggtttatctgaagtccggaaaagttcagctgactaacagcggctctgatccgctggtcggggttgtctgggcagatgccggaaccagtgcagaagaagtgccggtaaaactcaatgtctga

SEQ ID NO: 462631 - DNA, 276 bp, Shigella boydii
atgtctgatcccttttcccggctggcagcgcgtatggatgctatcacggttagaaagatgggaaagacagcctcgattaatgatgtcgatatgactgtgatcccgggagaaacactggcagagctgaatgctctgtccggacctgcggtctctctggtggtgttttcttcgggataccgcccacggcgcggggatcgcgttgtttatgacggacaacaatggacggtcacacggcatgaacgctttaacggtaagccaatgatctttattgagtaa

SEQ ID NO: 462632 - DNA, 579 bp, Shigella boydii
atgaaggggcttgagaatgccatccgcaatctgaacagccttgatacccgtatggtgccacaggccagcgcatgggcgataaaccgtgtggcacagaaagtggtctcggttgccacccggcaggttgccgggaataccgttgcgggagataaccaggtgaaagggatccccctgaaactggtacgtcagcgtgtccgggtgtttaaagccagtccgtcaggaaaaatgacggccaggatccgcgttaaccggggcaatctgcccgccattaagctggggacagcccgggtcagactggcccggcgtggtggaaaactgcagtaccgtggcagtgtgctgaaggtgggtaaatatcttttccgggatgcgtttattcagcaactggcgaatggtcgctggcatgtgatgcgacgtattgatggcaaaaatcgttaccccattgatgtggtgaaaatcccgctgtccggaccgctgacacaggcatttgaagatgcccgcgaccacatcattgctgcggaaatgccgaaacagctggggtatgcactgaaacaacaactgaggttatggctgacccgatga

SEQ ID NO: 462633 - DNA, 402 bp, Shigella boydii
atgaaccgacatacacaaatccgccaggtcgtactggcacgccttcgggaacagtgtggagacagcgccacgttttttgacgggcttccggcatttattgatgagcaggaactgcctgccgtggcggtgtggctgagtgatgctcagtacaccggaaaaatgacggatgaagatgactggcaggctgttctgcatattgccgtcttcatccgggcacaggcaccggattcagagctggatatgtggatggagagcaccattttcccggccctgaatgatgtaccggcactttccggactcatcgacaccctgaacccactcggttttaactatcaacgtgataatgagatggccacctgggcgatggcggaaatcacgtaccagatcacgtacacgaattaa

SEQ ID NO: 462634 - DNA, 744 bp, Shigella boydii
atgaccacaccaaatccactggcaaagacgaaaggtgcggggacgacgttctggatgtataccggcaacggcgacgcatttgcgaaccctttgtcggacactgactggctgcgtcttgcgatggtgaaggatctgcaacctggcgaaatgaccgctgatgcagaagatgatacttatctcgatgatgaagatgcagactggaaaacgacaacccaggggcagaaatcagtcggtgatacttcggcgacgctggcctggcgtccgggtgacagcgggcagaaaaaactggttcagttgttcgactccggtgaagtctgcgcgtttcgtatcaaatatcccaacggtactgttgatgttttccgtggctggctgagttcactgggtaaaaccattgcctcaaaagacgtgatgacccgcactgtgaaaatcagcggtgtggggcgtccgtatctggcagaggaaggcactgaaacagtgagcgttaccgggctgacggtggcaccggcatctgccagtgtaaaagtgggagcaaccaccacgctgacctttacagtaaaacctgacggagccagtgacaaagcgatcagtgtgcattcgtcagatccacagactgccacggtgaccctgaacgggcttgtagccacggtgaaaggcgtgaagcagggcagtgtcagcattgtgggcatgaccgctgacgggaattttgtggctgtggctgcggtgactgtcagcgccgcaggttaa

SEQ ID NO: 462635 - DNA, 588 bp, Shigella boydii
atgagggggcttgagaatgccatccgcaatctgaacagtcttgatacccgtatggtgccgcaggccagcgcatgggcagtaaaccgggttgctgcaaaagttgtctcggttgccacccggcaggtcgccaggaataccgttgcgggagataaccaggtgaaggggggccccctgaaactggtgcgtcagcgcgtccgggtatttaaagccagtccggcaggaaaaatgtatgcccgtatccgtgttaaccggggcaatctgcccgccattaagcttggcacaacatgccggcgtgccggtgacggactgaaggtggggaaatacttttttcgtggtgcgtttatccagcagctggcgaacggtcgctggcatgttctcaggcgtcttcctgaagcgtgttttgaaacaggaaaggacagtaaggggcggcccagaaaaaatcgtctgcccgtggaggttgtgaaaattccgctggccggaccgctgacacaggcatttgaggatgcccgcgaccgcatcattgccgcggaaatgccgaaacagctggggtatgccctgaaacagcaactgaggatacatttgggatga

SEQ ID NO: 462636 - DNA, 741 bp, Shigella boydii
atgaccacaccaaatccactggcaaagacgaaaggtgcgggaacgacgttctggatgtacaccggcaagggcgatgcgtttgcgaaccctttgtcggacactgactggctgcgtcttgcgatggtgaaggatctgcaacctggcgaaatgaccgctgatgcagaagatgacacttatctcgatgatgaagatgcagactggaaaacgacaacccaggggcagaaatccgtcggtgatactttggcgacgctggcctggcgtccgggtgacagcgggcagaaaaaactggttcagttgttcgattccggtgaagtctgcgcgtttcgtatcaaataccccaacggtacggttgatgttttccgtggctggctgagttcactgggtaaaaccattacctcaaaagaggtgatgacccgtactgtaaaaatcagcggtgtggggcgtccgtatctggcagaggagggcgctgaaaccgtgggtgttaccggactgacggtggcaccggcatctgtcagtgtcaaagcgggagcaaccaccacactgacctttacagtaaaacctgacggggccagtgacaaagcgatcagtgtgcattcgtcagatcctcagactgcttcggtgaccctgagcgggcttgtggccacggtgaaaggcgtgaagcagggcagtgtcagcatcgtgggcatgacctctgacggagagtttgtggcagtggctgcggtgaccgtcagcgcaccataa

SEQ ID NO: 462637 - DNA, 2211 bp, Shigella boydii
atgaaactgaatgcaacttatataaaaatacgtgataaatggtgggggcttccgctgttcctgccttttttaatcttgcccattttcgcccacattaatactttcgcgcatatttcttccggtgaggtttttctcttttatctgcctctggcactgatgatcagcatgatgatgtttttcagctgggcggcattgccagggatcgccttagggatttttgtccgcaaatatgcagagctgggtttttacgaaacgctatcattaacggctaattttattatcattatcattatcattatcattatcattctctgttggggcggttacagggtctttactccccggcgtaacaacgtttcacatggtgatacccgtttaatttcccagcgtatattctggcagattgtgtttcctgcaacgctgtttctgatacttttccagtttgctgcatttgtaggattattggcgagcagagaaaatctggtcggtgtcatgccttttaacctcgggactttaatcaattatcaggccttactggtgggtaatctgatcggtgtcccgctgtgctacttcatcattcgggtagtgcgaaatccattttatttacgtagctattattcgcaattaaaacagcaggttgatgccaaagtcaccaaaaaagagttcgcgctctggctactggcattaggtgctttattgttgctgttatgcatgccgttaaatgaaaaaagcacaatttttagcaccaattataccttgtcattattgctgcccctgatgatgtggggagcgatgcgctatggttataagctgatttctctgctctgggcggtcgtgttgatgatcagcatccacagctatcaaaattacattcccatttatcctggctataccacgcagctgaccataacctcctccagttatctggtattctcttttattgtcaattatatggctgtactggcaacccgtcagagagcggtagtcagacgcattcagcggcttgcgtatgtggacccggtggttcatctgccaaatgttcgcgccctgaatcgcgcgttgcgtgatgccccctggtctgcgctttgttatttacgcatccctggcatggaaatgctggttaagaactatggcatcatgctgcggattcaatacaagcaaaaactttctcactggctgtcacccttgctggaaccgggtgaagatgtttatcagctttcgggtaacgatctcgcgctgcgactgaatacagaatcgcaccaggagcgcattaccgcactggatagccatctcaagcaatttcgtttcttttgggatggcatgccgatgcaaccgcagattggcgtcagttactgctatgtgcgctcgccagtgaatcatatctacctgctgctgggagagctaaatacggtcgccgaactttccatcgtgaccaacgccccggaaaatatgcagcgtcgcggggcaatgtatttgcaacgcgaattgaaagataaagtcgcgatgatgaatcgactacagcaggcgctggaacacaaccattttttcctgatggcccagccgattaccggtatgcgtggtgatgtttaccatgaaattcttctgcgcatgaaaggtgagaatgatgaactgatcagccccgatagcttcttgccggtcgcgcacgaatttggtttatcgtcgagtatcgacatgtgggtcattgagcatacgctgcaatttatggctgaaaacagagcgaagatgcccgctcaccgttttgctattaatctgtctccaacctcggtatgtcaggctcgttttccttttgaagtcagtcagttgctggctaaatatcagattgaagcgtggcaacttatttttgaagtcaccgaaagtaatgctctgaccaatgttaagcaggcgcaaatcaccttgcagcatcttcaggaattaggctgccagattgcgattgatgatttcggcaccggctacgccagctatgcacggcttaaaaatgtgaatgccgatctgcttaaaattgacggcagttttatccgcaatattgtgtcaaatagtctggattatcagatagtggcatcgatttgccacctggcgcgaatgaagaaaatgcgggtagtggcagagtacgttgaaaacgaagagatccgcgaggcggtgctctctttggggatcgattatatgcagggttatcttattggtaagccgtag

SEQ ID NO: 462638 - DNA, 372 bp, Shigella boydii; identical to SEQ ID NO: 462525

SEQ ID NO: 462639 - DNA, 1800 bp, Shigella boydii
atgaaaaccgttagggagtccacaacgttgtacaactttctcggatcgcacaatccatactggcggttgacggaaagcagcgatgttttgcgcttttctaccaccgaaaccacagaacctgatcgtactttgcagttatctgccgaacaggctgctcgcatcagggaaatgacggtcatcacctccagcctgatgatgagtctgaccgtcgatgagagcgatctttctgtgcatctggtaggacgaaaaatcaataaacgggaatgggctggcaacgcgtctgcatggcatgacacaccggcagttgctcgtgatttatcacacgggctttcctttgctgagcaggtagtttctgaagcacattccgcaatagtgattctcgacagccgggggaatatccaacgcttcaatcggttatgtgaagattacactgggttgaaagaacacgacgtcattggccaaagcgtgtttaaactgtttatgagccgtcgtgaagctgcggcatccaggcgcaataaccgtgtattttttcgaagcggcaatgcatatgaagtcgaactgtggataccaacatgtaaaggccagcggctgtttctgtttcgcaataaatttgtccacagcggcagtggcaaaagcgagatttttttaatctgttccggcaccgacattaccgaagagcgccgcgctcaggagcgactgcgtattctggcaaataccgacagtatcaccggactgccgaatcgtaacgcaatgcaggatttaatcgatcacgctattaatcatgcagataacaataaagttggggttgtgtatcttgatttggataatttcaaaaaggtcaacgacgcctatgggcatttgtttggtgaccagttattacgcgacgtgtcattggctattttaagctgtctcgaacatgaccaggtgttggcgcgtccaggtggggatgagtttctggtactggcatccaacacctcacaaagcgcgctggaagcaatggcatcacgaattttgacccgcttacggctcccctttcgcattggtttaattgaagtttataccagctgttcagtaggtattgcactctctcccgaacatggttcagacagcacggctattattcgtcacgccgacacagcaatgtacacagcgaaggaaggcggacgaggacaattttgcgtttttaccccagaaatgaatcaacgggtatttgaatatctctggctggataccaacttgcgtaaagcactggaaaacgatcagttggttattcactatcaaccgaaaatcacctggcgtggcgaagtgcgcagtctggaagcactagtacgttggcagtcacctgaacgtgggttgattccaccgttggacttcatttcctacgccgaagagtcagggctaattgtgcctttaggccgttgggtgattctcgatgtcgtacgccaggtggcaaagtggcgggataaaggcataaacctgcgagtggcggtaaatatttctgcacgtcagctcgccgatcaaaccattttcaccgccctgaaacaggttctccaggaactcaattttgaatactgccctatagatgttgaactgacagagagttgtctgattgagaatgatgaactggcactgtctgttattcaacaatttagccaactaggtgcgcaagtgcatctggatgattttggtaccggctactcttcactttcgcaactggcgcgctttccgatcgatgccatcaaacttgaccaggtttttgttcgagatattcacaaacaacctgtctcgcagtcactgtga

SEQ ID NO: 462640 - DNA, 1149 bp, Shigella boydii
atgtccacgtatacccggcctgtcatgcttttgctgtctggcctgcttttgttgactctggcgattgcggcgttaaatacactcgtgccgctttggctcgcccaggaacacatgtccacatggcaggtaggcgttgtcagctcatcctattttaccggcaaccttgtcggtacattgctgacagggtatgtcattaagcgcattggctttaaccgcagctattatctggcctccttcatttttgccgctggctgtgccggccttggcctgatgattggattctggagctggttggcttggcgttttgtcgcgggcgtcggctgtgccatgatttgggtggttgttgagagcgcgctgatgtgcagtgggacgtcacgtaaccgtgggcgtttgcttgctgcgtatatgatggtttattacgtgggaacgtttttaggccagttactggtcagcaaagtttcaaccgagctgatgtccgtattgccgtgggttacaggtttgacgttggcagggatcttaccgctgttgtttacgcgtgtgctgaatcagcaggctgaaaaccatgattcgacgtcaattacgtcaatgctaaaactccgtcaggcgcggcttggcgtgaatggctgcattatctcaggaatcgttctgggatctctatatggcctgatgccgctgtacctcaatcacaaaggggtgagcaatgccagcattggtttctggatggcggtactggtcagtgcgggtatccttggacaatggtcgattggacgtctggcggataagtttggtcgactgctggtgttgcgtgttcaggtctttgtcgtcattctcggcagtatcgcgatgcttagccaggcggcgatggccccagcgttattcatcctcggtgccgctggctttacgctatatccggtggcgatggcatgggcttgcgagaaagttgaacatcatcaactggtggcgatgaaccaggccttactgttgagctatactgtgggaagtctgcttggcccgtcatttaccgctatgctaatgcagaatttctccgataatttattgtttatcatgatcgccagcgtatcgtttatctatttgctgatgctgctgcgcaacgccggtcatacgccgaaacccgttgctcacgtgtaa

SEQ ID NO: 462641 - DNA, 150 bp, Shigella boydii
atggctgggaatgttcaggaaaaacagctgcgatggtacaacattgcgctgatgtcttttatcactgtctggggttttggcaacgttgttaataactacgccaaccaggtggatttgcccctatatttccagacatctgttatcacttaa

SEQ ID NO: 462642 - DNA, 1536 bp, Shigella boydii
atgctggcggcaacgccaaagtcggtaaaggcagcctatgaccttgctaacgggaaatatactgctcaggacgctacgacagcacaaaaaggaattgtccagctcagtagtgcaaccaacagcacatctgaaatgctggcggcaacgccaaagtcggtaaaggcagcctatgaccttgctaacgggaaatatactgctcaggacgctacgacagcacaaaaaggaattgtccagctcagtagtgcaaccaacagcgcatctgaaacgcttgccgcgacaccgaaagcagtgaaagcagctaatgataatgcgaatggtcgggtaccttctgcccgtaaggtgaatggtaaggcgctttcagcggatataacactgacgccgaaagatattggtacgcttaactcaacaacaatgtcattcagcggtggtgctggttggttcaaattagcaacggtaaccatgccacaggcgagttctgttgtttcaattacgttgattggtggtgcgggatttaacgtggggtcacctcaacaggcaggtatatctgaacttgttttgcgtgcaggtaatggtaatccgaaggggattactggtgctttatggcagcgcacatcgacagggtttacaaattttgcctgggtcaatacatctggtgatacttacgatatttacgttgcaatcggaaattatgcgactggtgtaaatattcaatgggattataccagtaatgccagcgtgacgattcatacgtcaccagcatattctgctaataagccggaagggttaacggacggtacagtttattcactctatacgccatcagagcagttttatccgcctggcgcaccaatcccgtggccatcagataccgttccgtctggctatgccctgatgcaggggcagacttttgacaaatctgcatacccgaaacttgcagccgcttatccgtcaggcgtgatccctgatatgcgtggctggacgattaagggcaaacccgccagtggtcgtgccgtattgtctcaggaacaggacggcattaaatcgcacacccacagcgccagcgcatccagtacggatttggggacgaaaaacacatcgtcgtttgattacggaaccaaatccacgaataacaccggggcgcatacgcacagtctgagtggctctacggggtctgccggtgatcatactcatggtaatggtattcgttggccaggaggcggcggttctgcgttagcattttatgatggcggtgggttcacttatgtccaggattcacagtatcaagtaagcccggggacttcttcccgtagattgtattatcaacgtattcagacacagtcagcaggtgctcatacccactcgctgtctggtactgcagcaagttctggcgcacatgcacatactgtaggtattggtgcgcatacgcactccgttgcgattggttcacatggacacaccatcaccgttaacgctgctggtaacgcggaaaacaccgtcaaaaacatcgcatttaactatattgtgaggcttgcataa

SEQ ID NO: 462643 - DNA, 585 bp, Shigella boydii
atggcattcagaatgagtgaacaagcacggaccataaaaatttataatctgctggccggaactaatgaatttattggtgaaggtgacgcatatattccgcctcatacaggtctgccagcaaatagtaccgatattgcaccaccagatattcctgctggctttgtggctgttttcaacagtgatgaggcatcgtggcatctcgttgaagaccatcggggtaaaacggtttatgacgtagcgtcaggggacgagttatttatttctgaactcggtccgttaccggaaaatgttacctggttatcgccggaaggggagtttcagaagtggaacggcacagcctgggtgaaggatacggaagcagaaaaaatgttccggatccgggaggcggaagaaacaaaaaacaacctgatgcaggtagccagtgagcatattgcgccgcttcaggatgctgcagatctggaaattgcaacggaggaagaaacctcattgctggaagcctggaaaaagtatcgggtgttgctgaaccgtgttgatacatcaactgcacctgatattgagtggcctacgaaccctgtcagggagtaa

SEQ ID NO: 462644 - DNA, 819 bp, Shigella boydii
atggcgaagcccttccgcacccacgctgaagtccacggtctgcgtttccagcagttccgttttaatcagccacagcccggcgcggtgcgcctgcccccggctggtacagccaaaggcatccatcttcgtgacgttacgaccgtaacgggcaatggcctgcgtatcttcaacaagctctgtcgccgtctcccagccgttatccgggtcaatccagttcacctcaacggcattatgacggtccttcagggcactgaagctgtagcggaacggcgcgccatcatccggcatcaccacattactgcggttataggtccacaccttatccgacggtcggtcctgcacgaacgtcagcgtctgcccgttccataccggcatacagcgcatcgccgagcagaaatcactgagaacatcccacgccttgcgctgtgtggtcaggtacgcattacaggtgatgcgcggctccgtgccaccaaagccatccggcaccgactggtcgcaattctggccgatgacatacagcgcccatttgtccacatccgccgcaccgagacgcttccccatgccgtagcgcggatgggtcagcatatcccacagacaccaggccatgttgttgctgtatgctggcttaaacgttccgtcccagataccgctgtattgccgcgtctgcgggttatagttcgacggcacctgcagaatgcgcccgcgaagatgataattacggctcacctgctggctgccgaactgttccgagtccacctgcacgccgaccagtgccgtgttcgggtagcactgtttcacatcgatgatttcggtgtatga

SEQ ID NO: 462645 - DNA, 255 bp, Shigella boydii; identical to SEQ ID NO: 5325

SEQ ID NO: 462646 - DNA, 402 bp, Shigella boydii
atgcttaccacccttatttatcgtagccatatacgtgacgacgaacctgtcaaaaaaatcgaagaaatggtttcgatagcaaatcgcaggaacatgcagtctgacgtaacagggatcttactgtttaatggttctcattttttccagcttctggaaggtccggaagaacaggttaaaatgatatatcgggctatatgccaggatccacggcactataatattgttgagctgctgtgcgattacgcgcctgctcgccgttttggcaaagcgggaatggaattatttgatttgcgcctgcacgagcgagatgacgttttacaggccgtattcgacaaaggcacatcaaaatttcagctaacttatgatgacagagcgctacaattttttcgtacttttgggtaa

SEQ ID NO: 462647 - DNA, 213 bp, Shigella boydii
atgcttgaagatactacaattcataatgcaataactgataaagcgttagcaagttactttcgcagttcgggtaatttgttagaagaagagtcagcagtgttagggcaggctgtcaccaatttaatgtggatttgcccctatatttccagacatctgttatcacttaacccattacaagcccgcagccgcagatattcccgtggcgagcgataa

SEQ ID NO: 462648 - DNA, 1554 bp, Shigella boydii
atgtctgagtttgcacgttgccattatgggtatatacaaatccctccagtgacaactttccgcgccgacggaccagaaactcccgaagaagaaaaaggttactggtttcatgcttatcaacccgaagatctttgtaccatccataacccaatgggagatttgcaggattttatcgcattggttaaagatgctaaaaaatttggtatcgatatcattcctgattatacatttaactttatgggaatcgggggtagtggtaaaaatgacctggattatccctctgctgatatacgagcgaagatcagtaaagatatagaaagcggtatccctggctattggcaaggtcaggttttgattccattcattaaagatccagtaacaaaagaacgtaaacaaatccatccagaagatatacatctcactgcaaaagacttcgaagcaagtaaagataacatctctaaggatgaatgggaaaacctccatgcattaaaagaaaagcgtttaaatggaatgcctaaaacaacacccaaaagtggccaggttattatgttgcaaaatcaatacgttcgagaaatgcgaaaatatggcgtacgaggtttacgttatgatgcggcaaaacactcaaaacatgaacaaatagagaggtcgataatcccaccgcttaaaaattataatgagcggttacacaatactaatttatttaacccaaaatatcaaaaaaaagccgttatgaattacatggaatacctggtaacttgtcagttggatgaacaacaaatgtcatcactgctttatgagagagatgatttaagtgccattgatttttctttactcatgaaaacgataaaagccttttcatttggtggagatctccaaacccttgcatcaaaaccgggttccacaatctcaagtatcccatcagaaagacggatattgattaacattaaccacgattttcctaacaatggtaatcttttcaatgactttctatttaaccatcaacaagatgaacaattagcaatggcatatatggccgctctcccgttcagcagacctttagtttactgggatggccaagtattaaaatcaacgactgaaattaaaaattatgatgggtccacgcgtgtcggcggtgaggcgtggcttaataaaggttgctctacctatcagcagctctacaatgaattccacgcattatatatagataaagcaggaatatggagcgcatttgagggtgtatttgcaactaaaaacgttctggcctttagtcgtggggattctgtgaacattaatcactctcctcatgatgggctagttataataaataaaggaaacgaagaagttgaaggtacctggcctaacaaattgcaacctggaatatacaaaaacatggggagtaatagcgttaacattattattaataatacccgaaaaattatcccccctggtaaagtatttacgcttagaggcggaactctaaatatcaatattcctgggcgtagcgctcttcttttagggaaaacaggagaaccgccgaactatctctatttataa

SEQ ID NO: 462649 - DNA, 372 bp, Shigella boydii; identical to SEQ ID NO: 462525

SEQ ID NO: 462650 - DNA, 252 bp, Shigella boydii
atgaccaaatgcgatggttgttatgaccgtgttgcggagggtaaaaagccgatctgtgttgaatcttgtccgctgcgggcgctggatttcggccctatcgacgagctgcgtaaaaaacatggcgatctggcggccgttgcgccgttgccgcgagctcactttaccaaaccgaatattgtgatcaaacccaatgccaatagccgcccgaccggggataccactggctatctggcaaacccgaaggaggtgtga

SEQ ID NO: 462651 - DNA, 372 bp, Shigella boydii; identical to SEQ ID NO: 462525

SEQ ID NO: 462652 - DNA, 633 bp, Shigella boydii
atgctcgactacgaggagatgaaaacgaccgggatctttaagaaaaaatgcccggaagaacactacgtcgctttccgcgcattccgtgaagatccacaggcaaacccgttgaaaacaccttcggggaaaatcgaaatttattctgaacgactggcgaagattgcagatacctgggaattgaaaaaagatgaaattattcatccccttcctgcgtataccccaggttttgatggctgggacgatcccctgcggaaaacctatccactgcagttaacgggcttccactacaaagcgcgtacccactccagctacggcaatattgatgtgttacagcaggcctgcccacaagaggtgtggatcaaccccattgatgctcaggcacgcggtatccgtcatggcgataccgtgcgggtatttaacaataatggagaaatgctgattgccgcaaaagtgactccgcgtattctgcctggcgttaccgccatcgggcaaggtgcgtggcttaaagcggatatgtttggtgaccgggtcgatcacggcggcagtatcaatattctgacctctcaccgcccttcaccgctggcaaagggaaacccgtcgcacagcaatcttgtccagatcgaaaaggtttaa

SEQ ID NO: 462653 - DNA, 669 bp, Shigella boydii
atgaccacacaatatggattttttatcgattccagccgctgtactggctgtaaaacctgcgaactggggtgcaaagattttaaagatcttggcccggaagtcagtttccgccgtatttatgaatatgctggcggcgactggcaggaagataatggcatctggcaccagaacgtgttcgcttattatctctccatctcctgtaaccattgcgatgaccccgcatgtacaaaagtctgccccagcggcgcaatgcataagcgtgaagatggctttgtggtggttgatgaagatgtttgtatcggctgccgctactgccacatggcttgtccgtacggcgcaccacagtacaatgctgaaaaagggcacatgacgaagtgcgatggttgttattcgcgcgtcgccgaggggaaacaacccatatgcatcgaatcctgcccgctgcgtgcacttgagttcggtccaattgaagagctgcgccagaagcacggcactctggctgccgtcgcgccactgccgcgcgcgcatttcacaaaacccaatatcgttatcaaacctaacgccaacagccgcccgaccggcgattggatttgcccctatatttccagacatctgttatcacttaacccattacaagcccgctgccgcagatattcccgtggcgagcgataa

SEQ ID NO: 462654 - DNA, 741 bp, Shigella boydii
atgttttttaacaccaaacatacaacagctttatgcttcgtaacctgtatggcttttagttcatcgtctattgcggacattgtcatttcgggtactcgcgtaatatataaaagcgatcaaaaaagtgtcaacgtacgtctggaaaataaagggaataacccgttgcttgtccagagttggttagatactggcgatgacaacgctgagcctggcagtattacagtcccttttactgccacgccgccagtatcgcgtattgatgccaaacgtgggcaaacaatcaaattaatgtacacagccagcacctcactgcctaaagacagagagagcgtgttctggtttaacgtactggaagttccaccaaaaccagatgcagaaaaggtcgcgaatcaaagtctgctgcaactggcatttcgcacacgtataaaacttttctatcgcccggatggattgaagggaaatccctctgaagccccgttagccctgaagtggttctggtcaggttcagaaggtaaggcgtcattgcgagtgaccaatccaaccccttactacgtctcttttagcagtggtgatttagaagctagcggtaaacgctatccgattgatgtgaaaatgattgcaccatttagtgatgaggtcatgaaagtcactggccttaatggcaaagcaagttctgcaaaagtacatttttacgccattaatgattttggtggcaccattgaaggtaatgccagtctgtaa

SEQ ID NO: 462655 - DNA, 327 bp, Shigella boydii; identical to SEQ ID NO: 5975

SEQ ID NO: 462656 - DNA, 1335 bp, Shigella boydii
atgactgctggcgctcacggggtgccgcgtgaagtgacagaaggcgttatcgacgggcttaattatcccaatcatgaagcaattgatttttatcatcgctataaaacagatattcagttatttgccgagatgggattcaaatgctttcgaacttccattgcctggacacgaatctttccgcaaggtgacgaacaggagccgaatgaagagggtttacaattttatgatgatctgttcgatgaatgccttaagcagggaatggaacctgtggtgacgctttcacattttgagatgccttatcatctggtgacaaaatatggtggctggcgaaaccgtaaactgatcgacttttttatccgcttcgcatcaacggtcttcacgtgctataaagaaaaagtaaagtactggatgacgtttaacgaaatcaataatcaggtgaatttcagcgaaagcctgtgtccatttactaattccggtatcttgtattcgccagaggaagatatcaatgagcgcgaacaaataatgtaccaggcggtacattacgagttagttgccagtgccctggcggtacagactggaaaatcgatcaatcctgaatttaacattggctgtatgatcgccatgtatcccatctatcctctgacgtgtgtacccaacgatatgatgatggccacgaaagcaatgcatcgtcgttactggtttactgatgttcatgctcgtggatattatccgcaacatatgctgaattactttgccaggaaaggattcaacctcgatatcacaccagaagataacgcgattcttgccagtggttgtgtcgactttatcggctttagctactacatgtcttttacgacacaattttcgcccgataacccgcaactggattatgttgaaccacgagatttggtcagcaacccttatatcgatacatccgaatggggatggcaaattgatccggcagggctacgttattcactcaactggttctgggatcatttccagttgccgctgtttattgtcgaaaatggatttggtgcggttgaccagagacaagctgacggcacggtgaacgatcactatcgcattgattactttgcttcccatattcgggaaatgaaaaaagccgtagttgaagatggtgttgacttaattggctacaccccgtggggctgcattgacctggtttctgccggaacaggggaaatgaaaaagcgctacggaatgatttatgtcgataaagacaacgaagggaagggaacgctggaacggatacgtaaagcgtcgttttactggtatcgggatctcatcgccaacaatggcgaaaatatttga

SEQ ID NO: 462657 - DNA, 303 bp, Shigella boydii; identical to SEQ ID NO: 459543

SEQ ID NO: 462658 - DNA, 192 bp, Shigella boydii
atgaaatccatggacaaaatttcaacgggcattgcctacggcacctccgccggcagtgccggctactggtttttgcagtggttggatcaggtcagtccatcacagtgggctgcgattggtgtgctgggaagtctgcttctggggcttctgacttatctgacgaatctgtatttcaaaataagagaacattga

SEQ ID NO: 462659 - DNA, 444 bp, Shigella boydii
gtgaaataccgttatgagtttacggacgcgctggggctgattacgtccttcagttatgccaatgctgaggatgagcaaaaaacgcactacagcgatacccgctggcatgaagattccgtgcgtaaccgctggttcagcgtgatggcggggccgtctgtacgcgtgaatgaatggttcagcgcgtattcgatggcgggtgtggcttacagccgtgtgtcgactttctccggggattatctccgcgtaactgacaacaaggggaaaacgcacgatgtgctgaccggaagtgatgacggtcgccacagcaacacgtctctggcgtggggggctggcgtgcagtttaacccgaccgaatccgtgaccattgaccttgcttatgaaggttccggtagtggcgactggcgaacggatgcatttattgttggtatcggataccgtttctga

SEQ ID NO: 462660 - DNA, 1143 bp, Shigella boydii
atgagcggttggtttgacctgaccttaaatcagcgtgtttataatcaggacggtaaaacggcaaatgcggtcgttacctatgatggcaacgtgggtgagcagtataacgatgcctggtttggtgacagtgccaatgaaaatatcatgcagttcagcgatatttacctgacaacgcgaggttttttacccttcgcaccagaggcagacttctgggtcggcaaacataaactcccgcaatatgagatccagatgctggactggaaaaccttaaccacggatgtcgccgcgggtgtggggattgaaaactgggcacttggtgtagggctgtttgatatgtccttaagccgtgatgatgtcgatgtttactctcgtgatttttcgcgtaccagccagatgaataccaattctgtggatgttcgttatcgcaatatcccgttatgggatgatgcgacattatcattaatggctaaatattccgcacctaataaaacggatcaacaacaagataacgaaaatgacaacagttattttgaaatgaaagatagctggatgctgacttctgttttacggcaaaacctgcaacgcgatacgtttaatgaatttacgttacaggttgccaataattcctatgccagcagttttgccagtttctcagatgccagtaatacgatggcgcatggtcgctattactatggtgatcataccaatgggatcgcctggcgtttaatctctcagggcgagatgtatcttactgacaatattattatggctaacgcgcttgtctattctcacggcgaagatgtttatagttatgaaagtggtgctcatagtgattttgacagtattcgcactgtaataagaccggcctggatctggaatacatggaatcagacggggcttgaattaggctggtttaagcaacagaacaaaactcagcagggtgtaacactaaatgaatcggcttataaaacgacactctggcatgcattgaaagtgggtgaaagcattttaggttcacgaccagaaattcgcttctatggaacgtatatcaatattctggataacgaattatcgaattttaagtttaatgagaacagcaaagacgagtttatggccggcatccaggcggaagtctggtggtaa

SEQ ID NO: 462661 - DNA, 459 bp, Shigella boydii
ttgtcgcttcaggctccccttcagcacctcctcagccctccggtagtcctccgtcccgtaagtgcctttctggcgactgtcattctcaagctgttgcaactgttgccggtattcctgccggatgcgcaactgtgcctggtagcgctgccgctgcttatcccccatacctgcagtggcaatatccagattgtgctgctcacgcagtgcacgttctttgtctgccagctggctggtcagctgaaccgttttttttctcaggtcgttaagcgctgtctgtttctgcagctcctgctgtttcacatccagcagcgtcagcgcctgaatcagctcattcttacgggccagcacactcttttcatctgccgtcagctttttcccgtccaggtcgctgatgcgctgctgcagggccagaagctgtttatgcgcttcagtcatcctttcagtggcaatgcctgctga

SEQ ID NO: 462662 - DNA, 180 bp, Shigella boydii
atgtttgattaccaagtttccaaacatccacattttgatgaagcctgtcgtgcatttgcactgcgccacaatctggtgcaactggcagaacgtgcaggcatgaatgtgcagattctgcggaacaagctgaacccagctcagcctcatttattaaccgcaccagaaatctggctgctttga

SEQ ID NO: 462663 - DNA, 222 bp, Shigella boydii
atgagacctaacatttcaatcactcttaccacgcctcatgtgactattgaacgctatagcgagctgacagggctatccatcgataccatcaatgacatgttggctgatggacgccttatccgtcaccgtctgcgcaaagataaaaaacgcgaaaaagtgatgatcaacatagcagcaatgaccgttgatgcgctttcagaatgcaatctaaaccttaattag

SEQ ID NO: 462664 - DNA, 570 bp, Shigella boydii
atgaatttggagaaaggcggacgaggcgccatagagcgcatggtagaagcttatggattcaagactcgacaggcgttgtgcgatcatttaggaatctctaaaagtacactcgccacacgctacatgcgtgactcattcccagcagaatgggtaatccagtgcgcccttgaaacgggcacctcgcttaattggctcacaaccggacatggttcaaagcaaacttcaggtaatacaaatactatggaagttgctaaatatgtattatctgatggtgccttgcgtgaagacggtttttatatttttgataagggatttctaccctctacgtttaaaaaaccttttgtcatcacagataacaattctgaatttatttgtgataaagaatttgatgacatacgtgatggtaaatgggtaataagtattgatggcgaagtaacgatccgtgacattactcgtttacccggtggaagaatcttcgtcgagggtggaaacagagccttcgaatgtaagatagaagacattgaaataattggtaaaattataagtttaacagttaaatatgttagataa

SEQ ID NO: 462665 - DNA, 192 bp, Shigella boydii
atgcttggtaaagtattttttgtggttttatcatgctctttgttattaagcccactaactacctatgctaaaaattatccttgttctgggaaaaagggaggtgtctctcactgtacctccgatggaaaatttgtttgcaatgatggaactattagtaaatccaaaaaaatctgtactaaaaactcacgataa

SEQ ID NO: 462666 - DNA, 372 bp, Shigella boydii; identical to SEQ ID NO: 462601

SEQ ID NO: 462667 - DNA, 291 bp, Shigella boydii; identical to SEQ ID NO: 462600

SEQ ID NO: 462668 - DNA, 1497 bp, Shigella boydii
atgctgcctgtcggcttaagcatctggctggcccatcagcaggtagaaacatcgtttattgaagagctggatacctattcctcccgcgtcgctattcgggccaataaggtggcgacacaagggaaagatgcgctgcaagagctggaaagatggcaaggcgctgcctgtagcgaagcccatctcatggaaatgcgtcgggtatcttacagttatcgctatattcaggaagtggtttatatcgataacaacgttccccagtgttcgtctctggagcatgaaagtccgcccgataccttccccgagccaggtaaaatttcgaaagatggttatcgtgtctggttaacatcgcataacgatttaggcattatccgttacatggtcgccatgggaacggcacattatgtcgtcatgatcgaccccgcttcctttattgatgtcattccctatagctcatggcaaattgatgccgccattattggcaatgcccataacgttgtcataaccagcagcgatgaaattgctcagggaattattaccaggctacaaaaaacacccggtgagcatatcgaaaataatggaatcatttacgatatcctgcccttcccggagatgaatatttcgatcatcacctgggcttcaacgaaaatgttgcagaaaggctggcatcggcaagtctttatttggttaccgctcgggttggtgattggcctgctggcagcgatgtttgtgctgcgtattttgcgccgtatccagtcaccgcatcatcggctgcaggatgctatcgaaaatcgtgatatttgcgtgcactatcagccgattgtctccttagccaatggcaaaattgtcggtgctgaggcactggcgcgctggccgcagacagacggtagttggttgtcaccagatagttttattccgctggcacagcaaacaggcctttctgagccattgacgctactgattataagaagcgtctttgaagatatgggcgactggctgcgtcagcatccacagcagcatatttcgatcaatcttgaatccaccgtgctcacctcggaaaaaatcccgcaattgctgcgtgaaatgatcaatcactatcaggttaatcccagacagatcgcgcttgaactcactgaacgcgagtttgccgatccgaaaaccagcgccccgataatttctcgctaccgggaggcgggccatgaaatttatcttgatgattttggtacgggatattcaagtttaagttatttacaggatctggatgtcgacattctgaagatcgataaatctttcgttgatgcgctggaatataaaaatgtcacgccgcatatcatcgaaatggcaaaaacactgaaactgaaaatggtagcggagggaatcgaaaccagtaaacaagaagagtggctacgccagcatggcgtgcactacggtcagggctggctctacagcaaggcattaccgaaagaagatttcttacgctgggccgagcaacatttgtga

SEQ ID NO: 462669 - DNA, 267 bp, Shigella boydii
atgttgggacttgaaccgaagaacacggcggtgcggaatccggagagtaacggaatagcagagagcttcgtgaaaacgataaagcgtgactacatcagtatcatgcccaaaccagacgggttaacggcagcaaagaaccttgcagaggcgttcgagcattataacgaatggcatccgcatagtgcgctgggttatcgctcgccacgggaatatctgcggcagcgggcttgtaatgggttaagtgataacagatgtctggaaatatag

SEQ ID NO: 462670 - DNA, 267 bp, Shigella boydii; identical to SEQ ID NO: 462029

SEQ ID NO: 462671 - DNA, 1191 bp, Shigella boydii
atgttacgtgaagtctcaattagtaatgatactataagtgtaaaattctacagaaatgaaaaaatagaatgcgcttgtaattttctgatggataaagattcgcaggggtatatcgacctgtctgattttgatgtaacaaattgtcattttaaaggtgacgttatttctaaggtgtcttttttatcatcaaatctacaacatgtaactttcgaatgtaaagaaattgagaattgcaattttactaaggcaacagttgataatgtcatatttaaatgtcgacgtttacacaatgtgatttttctcaaaacgagtggcgaatgtgttgattttagccaagatattcttgatacagttgacttctcgcagagtcaacttggtcatagtaattttcgcgaatgtcagattagaaattcaaacttcgataattgttatctttacgcttcgcacttcaccagagcagagtttctgtctgccaaagaaatatcatttattaaatcgaatttgacagctgttatgtttgatcatgtgcgaatgtcgacagggaattttaaagattgcattacagaacaattggaattaactattgattattcagatatatttgggaatgaagatctcgatggttatatcaataacattataaaaatgattgatacattgccagataatgcaatgatattgaaatccgttctggcagtaaaactggttatgcaattaaaaattcttaatattgttaataaaaactttattgagaatatgaagaaaacatttagccattgtccttatataaaagatccaattatacgcagttatatccattctggtgaagataacaagttcgatgattttatgcgtcaacatcgattcagcaaggtggatttcgatacccaacagatgatccattttattaacaggtttaatatgaataaagggctgattgataaaaataacaatttttttatccaacttatcgatcaggccttacgatcaacggatgatatgatcaaagcaaatgcctggtatctttataaagagtggattcgtagtgatgatgtttcacctatatttatagaaactgaagaaaagttaagaacctttaacactaataaattaacacgaaacgataatatatttatcctgttctcctctgtcgatgatgggcctgttatggtggtaagctcccagcgctaa

SEQ ID NO: 462672 - DNA, 681 bp, Shigella boydii
atgctgcacggcagtgatggcatacgtaccgtcatcgttctcacggatactcacacagcggaacaggcgctgacgcagcgtcggcagcttcagcccccacacgctgtactcggcaacgccgtcaggaacccggctcactttcacctttacgccgtcggtgacggactggacctccacgctcaccggattgccacttccgtcaaccaggcttatcagcgtggtgccggaggatggcagcgtgatttcacggtcgagcgtcagtgtccgcgtctggctgttcaccgccagcacgcgcccgccggtgctgatccccgcatagtcatcatcacagatttcaatgacatcacctggtacatggcgaagcccttcggcacccacgctgaagtccacggtctgcgtttccagcagttccgttttaatcagccacagcccggcgcggtgcgcctgcccccgcctggtacagccaaaggcatccatcttcgtgacgttacgaccgtaacgggcaatggcctgcgtgtcctccacaagctctgtcgccgtctcccagccgttatccgggtcaatccagttcacctcaacggcattatggcggtccttcagggcgctgaagctgtagcggaacggcgcgccatcatccggcatcaccacattactgcggttataggtccacaccttatctga

SEQ ID NO: 462673 - DNA, 624 bp, Shigella boydii
atggcagtacgaaaactcaccactgggaaatggctttgcgaatgttaccccgccggacgaagtgggcgtcgtgtgcgtaaacaattcgccaccaaaggcgaagcactggcttttgagcgccacacgatggaagaaaccgaagcaaagccctggctgggtgaatcagtggatcgtcgaacactgaaagacgtggttgagctatggttcaaactacatggtaaatctctgacagctgggcagcatgtctatgacaaattgctgttgatggttgacgctctgggcaatcctcttgcaaccgatctcacctctaaaatgtttgcccactatcgagataaacgcctgacaggcgggatctacttcagcgagaaatggaagaaaggagcaagcccggtcaccattaacctggagcaaagctatctaagtagtgtttttagcgaactatcccgtctgggcgaatggtcgtatccgaacccactggagaacatgcgaaaattcaccatcgcagaaaaagagatggcatggcttacccatgagcagattgttgaattgctggctgattgcaaacgtcaggacccaattctggcactggtagttaagatatgcttaagcacaggcgcacgctag

SEQ ID NO: 462674 - DNA, 990 bp, Shigella boydii
atgaaaaaccctaaactccagtacctcactgattattccccctctgacgcggcctgggacgcacacagaagcgtttctgacgacgtgggagggatttacctgcttgcggccgaatatgagcgctacggggctcgtatggcctcctgtggcggtttactgcgtttcgggtggtctaccctcaaggaaaccggagaaacgcgtctgaggctgcgtgaggcgcatttctgccgtgtccggcactgtcctgtctgccagtggaggcgctccctgatgtggcaagcccgtttctaccagtccctgccgcgtatcgtggcggattaccctgatgcccgctggatgttcctgaccctgaccgtgcgcaactgtgcgattggggaactgggcgagatgctgaaccggatgaatgcagcttttcagcgtatgaaggttcgcaaggagttcctgcctgttcagggctggatccgcacaacggaagttacccgcggcagcgacggcagcgcgcatccccacttccacaccctgatgatggtgccgccctcaatgctatctggtgacgggtacgtaaaacatgctcgctgggttgaactctggcgggagtgcctgcgggtcagttacaacccgaatgttgatgtccgggcagtaaaaccccgtaagccaaaggatggcgagtccttagcctgcgcgaccgctgaactggtgcgcggcgcagtggccgaaaccctgaaatattccacgaagccggctgacatggtggccgatcctgaatggttcctcgaactgacccgccagacgcacaagcgccgctttgtggcgaccggcggcgcactcaaagacgtgctgaaactcgatcaggaaaccgacgccgacatggtgatcggggatgatatttccgagggcgacgatgacggttcacgcatcgcgttcgagtggaaaaccgaggtcagaaagtaccgtcgctcaccgacgaaagataaaactgaatcaggctag

SEQ ID NO: 462675 - DNA, 372 bp, Shigella boydii; identical to SEQ ID NO: 462525

SEQ ID NO: 462676 - DNA, 576 bp, Shigella boydii
ttgttttttggggttgaaatttccaatcatcaagaaaaactcccactaaataaaacacatcatactgtagattttggcgccaatgcgtatatcattgatcatgactctccatatggatatatgacattaaccgatcactttgataatgctattccacctgttttttaccatgagcaccaatcatttttcttagataactttaaagaggttgtggatgaagttagcaggtatgtgcatggtaatcaggggaaaactgatgttccaatatttaacactaaagatatgaggcttggaattgggttgcatcttattgattttataagaaagagtaaagaacaaggattccgagagttttgttataacaaaaacattgatcctgttagtctggatagaattataaactttgtgtttcagcttgagtatcatataccaagaatgctaagtacagataacttcaaaaaaataaaactcagagacatatctttggaggatgcgattaaagcatctaattatgaagagattaacaataaagtgactgataaaaaatggctcatcaggcccttgcttattctttag

SEQ ID NO: 462677 - DNA, 543 bp, Shigella boydii
gtgaaagaaagcaatcagcgatggtgctctgacgggttcgagttctgctgtgataacggagagagactgcgtgtcacgttcgcgctggactgctgtgatcgtgaggcactgcactgggcggtgactaccggcggcttcaacagtgaaacagtactggacgtcatgctgggtgcggtggaacgccgcttcggcaacgatcttccgtcgtctccagtggagtggctgacggataatggttcatgctaccgggctaatgaaacacgccagttcgcccggatgttgggacttgaaccgaagaacacggcggtgcggagtccggagagtaacggaatagcagagagcttcgtgaaaacgataaagcgtgactacatcagtatcatgcccaaaccagacgggttaacggcagcaaagaaccttgcagaggcgttcgagcattataacgaatggcatccgcatagtgcgctgggttatcgctcgccacgggaatatctgcggcagcgggcttgtaatgggttaagtgataacagatgcctggaaatatag

SEQ ID NO: 462678 - DNA, 927 bp, Shigella boydii
ttggcagcattaccgatttctgcggcgacacttaattcagaactcattaataaaatcgcgcaggattttgcgcaggcgaccagccttgcggttgtcgtggtcaatattcacggcgatgaaatttccgagctgtttaacttcactccattttgtcagatgatgcggcaacaccctcagctaagcactcgatgtcgcatgagcgatcgttgtgggggcctggaagcctctaaatccgatcagccttgtatttatcgctgtcatgccggattaaccgatttctctattccactggtaatcgccgggcatttagtcggttttgtattgtgcgggcaagttcgtctgcgtaatgattatgtcgatttggtcgatattctgaatgtcgatgattgctggcaggcagatcccgaattacttaatgaatttcgcaaagttcctgagatggattactcaagagttatggcctctgctgatttgttgaagttgattgtagaaaattgcctcaaaaaacaactcaattttgtggttattaaagagaacaaatctcagtcagattcggtgcgccagactcgtgcgcctagtccccacgacaataaaatgaaaaaagctttacgctatattgatgcgcatttatcagacgatttgcgtctggaagatgtcgcctcgcacgtttatctaagcccttattatttcagtaagttattcaagaaataccatggaatcgggtttaatgcgtgggtaaaccaacaacggatggccagcgcgcgtgagttactgtgccatagtgactggagcatcgccagcattgcgcgtaatttaggtttttcgcaaaccagttatttttgcaaagttttccgtcagacttatcaggttacgccgcaggtgtatcgacagcaagtgagtgaaaatgcggcgatggaaacggtatag

SEQ ID NO: 462679 - DNA, 243 bp, Shigella boydii
gtgtgctctggttaccactttaacgtaaaaaccgtggcagccagtctgcgccgtcaggaactgagcgcaaaagcctcccagaagttcagcccgatcagttaccgtgcacacggcctgcctgtatcagaaaatctgctgacgcaggatttttacgccagtggcccgaaccagaagtgggcgggagacatcacgtactattacagctcaccgactgcggggaaacacggggcgccgggttattga

SEQ ID NO: 462680 - DNA, 840 bp, Shigella boydii
atgttgaatgtagctattgaaaaccagaacgggtggaattatagtgcacctgcacctcataaaacgggtgccgggattagcaccccgaaagttactcgagcgcataaccgcgctgaagcggtttttttatgcgtaatgcacagccacattcaaattatggtgaggcgtgcggggcagccgcaaggctggccgggttctcgagtgaccggtagtgctaaccctgtgcgtctcaccacccatgagattagcacctctgctggtgagttaattaacttatcacttgaggatgtcattatggctactaccctttctcaccctgacgtaaccatcgaaaatggtcgcgccgtcactacttctatttcgattgctgagttttttggcaagcagcatcaccatgttgttcaaaaaatagaatccttcgaatgttctgaactatttttaaccagcaacttttcgcgggttaaattcgaacaccgcggcaattcttataacgcctaccaaatcaccaaaaacggcttcgttttcctggtgatgggcttcacgggcaaaaaagccgccacattcaaggaagcctacattgctgagttcgaccgcatggaggccgaactgcgccagaataacaccccacctgctgacaagatgattccgggtgatggtcgcactctggttgttcacttcgacaaattcggcaatgtcgaattcaccgaaaccgttcctgatggcgcactggtctgtaccctggagactttccggttttatctggaaaaacagggctggactcttgtaaaccggggcgcaattaaaaacatgaccgtagagcagttgctttccttaaaataa

SEQ ID NO: 462681 - DNA, 573 bp, Shigella boydii
atgaaaatacctgaagcagtaaatcatattaatgttcagaataatattgatcttgttgatggaaaaacgaatccgaataaagcaacaaaagcattacaaaaaaatatattacgcgtaacaaactcatcttcttctggcataagtgaaaaacatttagatcactgtgctaatactgtgaaaaactttttaaggaagtctatagcagcgcaaagttatagcaaaatgttttctcaagggaccagtttcaaatcactaaatctttctattgaagcgccatctggagcacggtcatcatttcggtcacttgagcatctcgataaggtgtccaggcactatatctctgagataatacaaaaagttcatcctctttcttcagacgaacgtcacttactttctattattattaattctaattttaacttcagacatcaaagtaactctaatctgtcaaataatattcttaatattaaatcctttgataaaattcagtctgaaaatatacaaacacataagaatacatactctgaggatattaaagaaatctctaaccacgattttgttttttggggttga

SEQ ID NO: 462682 - DNA, 519 bp, Shigella boydii
gtggcagaacgacctgaccagctgtgggtggctgattttacttacgtcagcacatggcagggcttcgtctatgtggcgttcattattgatgtgtttgccggatacatcgtggggtggcgggtctcatcgtccatggaaacgacattcgtgctggatgctctggagcaggcgttatgggcccgtcgaccgtccggcacggtccatcacagtgataaaggttctcagtatgtatcgctggcctacacacagcgacttaaggaagccggattactggcatcaacaggaagtacaggcgactcgtatgacaacgcgatggcggagagcatcaatggtctttacaaagcggaggtaatacaccgtaagagctggaaaaaccgtgcagaagtggaactggccacactcacgtgggtggactggtataacaatcgacgattgctggaaaggctgggccatactcctccggcagaagcagaaaaagcttattatgcttccatcggaaacgatgatctggcagcctga

SEQ ID NO: 462683 - DNA, 327 bp, Shigella boydii; identical to SEQ ID NO: 5975

SEQ ID NO: 462684 - DNA, 780 bp, Shigella boydii
gtgtgccacttcaggcagaggggagattattctgcgctgatcagcgaatttaaaaccttctggcactcctatcaacgggaatggcagctttacatgttagccgccctgcctatcgaaaaaacagcgcaggcgtggaatgtcctcagtaaagagccacacgtcggtgtcgagtttgtcatgacgcacctgcaactcgctgggttacagggttttattcactccttttcacgctatccacaagaagctctacctgtagcacaatattttgcggctatcgaattagcgccactgattgcccgtgccttcaacaaactcaaaacgctacgcgaaaacgcccgcacctggctgttgaaatacccggaacatgccattaccggcctgctggcttcggcgctcgacaaagccggtgaagcacaggataacgcccgcgctgccttgcgtatgcttaccgaaaatggtcatcagccattactgcaagaaatcgcccggcgttataaccagccggaagtaaccgacgcggtgaacgctctgcttgcgctcgatcccttagataatcacccaacaaaaatccccactcttccggccttttatcagccatcgctctggacgcgcccggtattaaaagcaaacgcccaatcactgccagatagtgccctcctccacctcggcgaaatgctccgcttccctcaggaagaggctctgtatccgggattattgcaggtgaaagatgcctgtaccgccgactcactggtgaaccgccccgggaatcctggagactaa

SEQ ID NO: 462685 - DNA, 225 bp, Shigella boydii; identical to SEQ ID NO: 462149

SEQ ID NO: 462686 - DNA, 318 bp, Shigella boydii
atgactgatcaagctgaaaaaaagcactctgcattttggggtgttatggttatagcaggtacagtaattggtggaggtatgtttgctttacctgttgatcttgccggtgcctggtttttctggggtgcctttatccttatcattgcctggttttcaatgcttcattccgggttattgttattagaagcaaatttaaattatcctgtcggctccagttttaacaccatcaccaaagatttaatcggtaacacctggaacattatcagcggtattaccgttgccttcgttctcggtaatgctgccaacttactgatttag

SEQ ID NO: 462687 - DNA, 594 bp, Shigella boydii
atgttgtttaccggtatctggccacaacgggcgttcatccactggcgcattcaactggcgaaaagtctgaccgagtataatcgggtctatcaatctgcattctcaccgaacttactcgaacgcccacgtctggaaagccatctacaaaaactcctgaccgatgccgtgaaaatgcgtgggctgattgcgcccgccagcaaagaaacccgtattccaaaatcgatatatgaaggtatccagaccattaaccgcaatctggtttgtatgctggagttgcaaatcaatgcgtactgggccacgcgccccagccatttcgtgttattgaacgcgcaaaaacttcgtgatacccagcacatgatgcagcaaatactgctgagccttgttcatgcgttgtacgaaggtaatccgcagccggtttttgccaatacggaaaaattgaacgatgcagtggaagagctgcgtcagttgctcaataaccaccatgacctgaaggttgtggaaacaccaatctatggttatgtgtggctgaacatggaaacggcacatcagcttgagttgctatcgaatctgatttgccgggccttgcgcaaataa

SEQ ID NO: 462688 - DNA, 426 bp, Shigella boydii
atgaaggaagacgatgtcgggctttacgtcaggggacggttgcttattgatgatgatcccctcgcaaaacgcgcacatgcacacatgaaggccggttcgttaaccggcctttctattgggtacgtcctgaaagactgggaatacgaccggacgaaagaagcctttctgctgaaagaaatcgacctctgggaagtcagtctggtgacgttcccgtctaacgacgaggcgcggatcagcgacgtcaagaacgcgctggcccgcggggaaatccccgaacagaaaaaaatcgaaagagtcctgcgtgatgtcggactctcccgtacccaggccaaagcattcatggccgggggctatggcgcactgtccctgcgcgacgctgaggatgtgagctctgcactgaatgcactgaaaaatctgaacttctaa

SEQ ID NO: 462689 - DNA, 735 bp, Shigella boydii
atggcggtagatattaaagatgtcgaacaggtcgcgcaggagctgcagcagaagtttgacgacttcaaagcaaagaacgacaagcgcgtggatgcgattgagcaggaaaaaggcaagcttgccgggcaggtggaaaccctgaacgggaaactcagcgagctggaaaacctcaaaagcgatcttgaaaaagagctgcttgagctgaaacgtccggcaggtggtgcgcaaaataaactggccaccgagcataaagaagcgtttgtgggcttcctgcgtaaaggccgtggagatggtctgcgcgatctggagcgcaaggcattacaggtgggcaccgatgaagacggcggctatgccgtgccggaagcactggatcgcaacattctcaccctgctgaaagatgaagtggtgatgcgccaggaagcctcggtgatcaccgttggtggttccgactacaaaaaactggtgaatctgggcggcacggcttccggatgggttggcgagactgacgcgcgctcccagactgccacctcaaaactgggcctgattgaacctttcatgggggaaatctacggtatgaaccgccccgggtttcctggagagtgttttatctgtgaactcaggctgccagatcatcgtttccgatggaagcataataagctttttctgcttctgccggagggatgtggcccagcctttccagcaatcgtcgattattataccagtccacccacgtga

SEQ ID NO: 462690 - DNA, 270 bp, Shigella boydii; identical to SEQ ID NO: 5175

SEQ ID NO: 462691 - DNA, 171 bp, Shigella boydii; identical to SEQ ID NO: 5176

SEQ ID NO: 462692 - DNA, 600 bp, Shigella boydii
atgcgtaaagtttgtgcagccattttgtccgcagccatctgtctggctgtatccggtgcgcctgcatgggcgtctgaacatcagtccacgctgagcgccgggtatcttcagccccatactgatatgccaggcagcgatgacctgaagggcattaacgtgaaataccgttatgagtttacggacacgttggggctggtgacgtcattcagctatgccaacgctgaagatgagcaaaaaacgcattacagcgatacccgctggcatgaggattccgtgcgtaaccgctggttcagcgtgatggcggggccgtctgtgcgcgtgaatgaatggttcagcgcgtatgcgatggcgggcgtggcttacagccgtgtgtcgaccttctccggggattatctccgcgtaactgacaacaaggggaaaacgcacgatgtgctgaccgggagtgatgacaaccgccacagcaacacgtctctggcgtggggggctggcgtgcagtttaacccgaccgaatccgtggccattgaccttgcttatgaaggttccggcagtggcgactggcgcactgacggtttcatcgtgggtgtcggttataagttctga

SEQ ID NO: 462693 - DNA, 684 bp, Shigella boydii
atgaaaaaaattgctattgtgggtgccgggcctacggggatctacaccttattctcgcttctacagcaacaaactccactttctatttctatcttcgagcaggctgacgaggccggtgtcgggatgccatacagtgatgaggaaaactcaaaaatgatgctggcaaatattgccagtattgaaataccgccgattaattgtacgtatctcgaatggctacaaaagcaagaagccagccatctccagcgttatggcgttaaaaaagaaaccttgcacgatcgtcagtttttaccgcgaattctgctgggcgaatatttccgcgatcaatttttacgattagtagaccaggcacgacagcaaaaatttgcagtggctgtttatgaatcatgccaggttaccgatctgcaaattacaaatgctggcgtcatgctcgctacaaatcaggatttacccagcgagacgtttgatttagcggtgattgccacgggtcacgtctggcctgatgaagaagaagcaaccagaacgtattttcccagtccgtggtcaggcctgatggaagcaaaggtcgatgcgtgtaacgtgggtattatgggaacatccttgagcggactggatgcggcaatggcagtggctattcagcatggtgaaccgccccgggtttcctggagagtgttttatctgtga

SEQ ID NO: 462694 - DNA, 303 bp, Shigella boydii; identical to SEQ ID NO: 459543

SEQ ID NO: 462695 - DNA, 504 bp, Shigella boydii
atgaaaaaaataattttctctaacgagagtgcagtctatgatgaacttatgattcatttcccatgccagccattacctcatatttcaaatgatattatagggctggatgaactggatattgtatataattttttccaaaagaaacaatggaatgaaatagccaataatttaaaaataaaggatgactcttatgctttagagttaggaattacattcctccctgagaaagtattctgctattacatccctctgtatatttatgtctcgttgtttaataagaatgatttttgggtttttgaatccgattttattcaacaatatttatgtcctgagtatcgggattacgatgattttttgaattttgtttttaatttttcagatatacaactatctattattgcacagtttatgtcttatgaatcagacgctggattcttttatgcaagtaaagcttgtatggatttttgggaagattattcacctctattacataagaaaatttaa

SEQ ID NO: 462696 - DNA, 1062 bp, Shigella boydii
atgccagatggcggaccaacccccggagccaatgagaaaacatcccaacctgtaattcactatcatataaataatgataatagaacttacgataatagagtttttgacaacagagtatatgacaatagctatcacgagaacccagaaaatgatgcacagtctcctacttctcagacaaacgatctattatcccgtaacggaaactcattactaaatccacaaagagcactagttcaaaaagtaacttccgttctaccacactctatatcagatgctgtccagacatttgcaaataattcagctttagaaaaggttttcaaccatactccagataattcggatggaataggttcagacctgttaactacgagtagtcaagaaagatctacaaataactctctttctcggggacacaggcctctgaacatacagaactcttcaaccaccccccctctccacccggaaggagtgacaagcagtaatgataactcatcagatacaactaaaagtagcgcttctctttctcatagagtagcttcgcaaatcaataaattcaactcaaacactgattcaaaagtacttcagactgattttttatcaagaaatggagacacatatttaacacgggaaacgatatttgaagcttcaaaaaaagtaacaaactccctaagtaatcttatatctctcattggaactaaatcaggaacacaagaacgagagttacaggaaaaatcaaaggacattacaaaatccacaacagaacacagaataaacaacaaattaaaagttacagatgcaaatacaataaactacgtaacagaaaccaacgcagatacaattgataaaaatcatgcgatctatgaaaaggcaaaagaagtatctagcgccctcagcaaggtattgtcaaaaattgacgatacctctgcagaattacttacagatgatatatctgatttaaaaaataacaatgatattacagctgaaaacaataatatatataaagcagcaaaagatgtaaccacttccctatcaaaagtattaaagaatatcaataaggattaa

SEQ ID NO: 462697 - DNA, 225 bp, Shigella boydii; identical to SEQ ID NO: 462149

SEQ ID NO: 462698 - DNA, 600 bp, Shigella boydii; identical to SEQ ID NO: 462692

SEQ ID NO: 462699 - DNA, 300 bp, Shigella boydii
atgcctgctgtaatagataaagccctggatttcattggtgccatggatgtatcagcgccaacaccaagttcgatgaatgaaagcacagcgaagggaatctttaaatatttaaaagaactgggagtacccgcgagtgccgctgatattacggcgcgagctgaccaggaaggctggaaccctgggttcacggaaaaaatggttggatgggcaaaaaaaatggagtttggtgaacgcactgtaattaaaaatcctgaatacttttcaacatatatgcaggaagaactaaaagcactggtctga

SEQ ID NO: 462700 - DNA, 327 bp, Shigella boydii
atgactaaaaatactcgtttttcccccgaagtccgtcaacgggcagtccgtatggttctggaaagtcagggcgaatatgactcacaatgggcgacaatttgttccattgctccaaagattggctgtacgccggagactctgcgtgtctgggttcgccagcatgagcgggataccgggggcggtgatggagggctcaccaccgctgaacgtcagcgtctgaaagagctggagcgtgaaaatcgtgaactgcgccgcagtaacgatatccttcgccaggcttccgcttattttgcgaaggcggagttcgaccgcctctggaaaaaatga

SEQ ID NO: 462701 - DNA, 342 bp, Shigella boydii
atgacgctctaccagataaaaccgctctttcagtcgctgttaaggccgacgatgttttggctttataagcaccacgttacagcgaatcacatcactcttacggcactggcgctttctctttttaccggattgctgttggtgttggtggcacaacccatcctctttttgctattgcccatcgtgctttttatccgtatggcgctcaatgcgctggatggcatgttggcgcgtgagtgcaatcagcaaacacgtctgggggcgattttgaatgaaactggcgatgttatttccgatattgcgctctatttaccgtttttatttttaccggaaagtaacgggtaa

SEQ ID NO: 462702 - DNA, 303 bp, Shigella boydii
atgagcagaaaaaaccaacgttactctacggagtttaaagccgaagccgtcaaaacggttcctgaaaatcagctttcgatcagtgaaggcgcttcccgattatctgttcctgaaggcactttaggacaatgggttaccgctgcaagaaaagggctcaatacaccaggctcccgcacagtggctgagctggaatctgaagttatgcaactgcgtaaggctttaaatgaagcacgacttgagcgagatatattaaaaaaagcaacagcgtattttgcccaggagtcgctgaaaaatacgcgttag

SEQ ID NO: 462703 - DNA, 714 bp, Shigella boydii
gtggcacatatccgcactcgcgaaacatatggaacccggcggctccagacggagctggtagataacggaattatcgtcggtcgtgacagactggcacgtcttcgtaaggagctgaggctgcactgtaagcagaaacgcaagttcagggcgaccacaaactctgaccacaatctgccggttacgccgaatctgctgaatcagaactttacgcccacagcacctaatcaggtctgggtcgcagatataacgtatgttgccactcgggaaggatggctgtatctcgccggcgtcaaagatgtttatacgtgcgaaattgtcggttacgccatgggagagtgcatgacgaaagagttgacgggtaaagccctgtttatggcgctcaggagccagcgcccacctgccgggctaatccaccacaccgatcgaggttcacagtactgcgcatacgattaccgggtcatacaggagcagtctggtctgaaaacatcaatgtcgcgtaaaggtaactgttacgacaacgctccgatggaaagcttctggggaacgctgaaaaatgaaagcctgagccactatcgttttaagagccgggatgaggccatctcagtaatacgggaatacattgagattttctacaatcgtcagcgtcgtcactctcgtctggggaatatctccccggcagccttcaggataaaatattatcagatgactgcttag

SEQ ID NO: 462704 - DNA, 243 bp, Shigella boydii
atgtcgcgtaaaggtcactgttacgacaacgctccgatggaaagcttctggggaacgctgaaaaatgagagcctgagccactatcgttttaataaccgggatgaagccatctcagtaatacgggaatacattgagattttctacaatcgtcagcgtcgtcactctcgtctggggaatatctccccggcagccttcagggaaaaatatcatcagatggctgctcaaaaaaagaacaaatggtag

SEQ ID NO: 462705 - DNA, 495 bp, Shigella boydii
atgcagttcggtaaaagctcagaaaaacttcgcgcaaaaaccgaacggcggatacaggaagcacaggagcgaatcagcgcacttcaggaggaaatggcggaaacactgggtgagcaatatgacccggtactgccatcttccctgcgccagtcttcagcccgtaaaccgttaccagcctcacttccccgtgccccccgggtcatccggccggaagaggaatgctgtccggcctgtggtggtgaactcagtccactgggatgtgatgtgtcagagcagctggagcttatcagcagcgcctttaaggttatcgaaaaacaacgccctaaactggcctgtcgccggtgcgaccatatcgtgcaggcaccggtgccttcaaaacccattgcacgcagttatgccggagcggggcttctggcccatgttgttaccggaaagtatgcagaccatctgccattataccgccaaagtgatctactattccacacagctatttag

SEQ ID NO: 462706 - DNA, 591 bp, Shigella boydii
atggattcgttacaggatgattatacaaagctgctgtacggactgatgcagccggggcctgcatggtcagataccgacggtgtacttgacggtctggcaccatcgcttgtgcgtgttcaccagcgggctgatgaactggtgattgaaatcgatcccggtcagtccacagagctgattgaacgttatgaagaattgtatggtttacctgattcctgttcccctgtcggaacccagacattacgccagcgtcagcaacgtcttgaagcaaaagccaatgtggctggtggcataaatgagcagttcttcctggatcagcttgaggcgctgggatataccggcgtaacgatcgaacagttccagcacctggatgcaagccccgatccggaatggggagatcgctggcgttatttctggcgtgtgacgttgccggtggatgccggtgctcagtggcagacatgcacggacgcctgcaacacaccgatccggacgtggggggatacggttgcggagtgcgtgattaataaattatgtccgtcacacaccgtcgttttattttcctatccagatgaggatgaagatgcacaggattga

SEQ ID NO: 462707 - DNA, 642 bp, Shigella boydii
atgccattctatttcaggaaggagtgtccgttaaactcaggctacctcaatgtgattaatcaactggcagataaacaaaccattaaacaaactttatttgcccgtcagccagcaaaaatccacaaaccctatccaactaatagcaagattattatgggagatgtactgaatcatgcagcactgaagcaggccatgcagggacaggacgttgtgtatgccaaccttacgggggaagatttagatattcaggcaaattcagtgatcgctgcgatgaaagcctgtgatgttaaacgtctgatctttgttctttccctcggtatttatgatgaagttccaggaaaatttggcgaatggaataatgcagttattggtgagcccctaaaaccattccgcagggctgcggatgcaattgaggcttctggactggaatatacaattcttcgccctgcctggctgactgatgaagatattattgattatgagcttacctcacgcaatgaaccattcaaaggtacgatcgtatcacgtaagagtgtcgcagcattaatcacagatatcatcgataaacctgagaaacacattggtgagaatataggtatcaatcaacccgtgactgatggtgacaagccattattcatgtaa

SEQ ID NO: 462708 - DNA, 267 bp, Shigella boydii; identical to SEQ ID NO: 462029

SEQ ID NO: 462709 - DNA, 558 bp, Shigella boydii
gtgccacttcaaacaacgggtttagatatcgctgaactgcaatcacagtttgctggttttggtgcttcagctaaagagtctatgggtattcaaggttctgaagagctttttagaaatatgattggctattctcgtttaatgggtcgaagtgaggaagagattaagcgagcactgacagcattatcacagatggctggtaagggtcagattatggctgaagagcttaaggggcaactagctgaagctgttcctggtatggttcaggtattcgctaaagcaaccggaaagagtgaacaggaattatttgatgccatgaagaagggggctttaaaatctgccgatactcttcagaaggtcactcaggaactgaataaacaaatcacagctaaaggtggctggaaagctatttcagaaagcacacaagcacaactggggaacctgaaaaactcttggaataccacgcttgatagtatcttcagaggttctgaaaatggtctgcaagattttacacgaagcctaacaacgcttttaaacagtttaggtggaagtggtaagtga

SEQ ID NO: 462710 - DNA, 372 bp, Shigella boydii; identical to SEQ ID NO: 462525

SEQ ID NO: 462711 - DNA, 267 bp, Shigella boydii
atgtcggcagaaggcttaatggggccgtttgctctgaacgatccggccgcaggtacgaccggcccgtggtacaccaacggtacttttggcttaacggcgggctggcatctcgatatctggggaaagaatcgggcggaggttactgcccgcctgggtacggttaaagcacgggcggcggaacgcgagcaaacccgccaattgctggctggcagcgtagcccgcctgtactgggagtggcaaacccaggtaatgactccaacttactga

SEQ ID NO: 462712 - DNA, 282 bp, Shigella boydii
atgaatcgtgattccttttatccagccatcgcctgttttccgctgttattgatgctggccgggtgtgcgcctatgcatgaaacccgccaggcgttaagccagcaaacgcccgctgcacaagttgacaccgcattacccacggcgctgaaaaatggttggccagacagccaatggtggctggagtatcacgataatcagctcacttcattaattaacaatgcactacagaacgcaccggatatgcaggtggctgaacagcgcattcagctagctgaagcctag

SEQ ID NO: 462713 - DNA, 489 bp, Shigella boydii
atggcgaagcccttctgcgccgacgctgaagtccacggtctgcgtttccagcagttccgttttaatcagccacagcccggcgcggtgcgcctgtccccggctggtacagccaaaggcatccatcttcgtgacgttacgaccgtaacggagaatggcctgcgcgtcctccacaagctctgtcgccgtctcatgaccgttgtccggatcaatccagttcacctcaacgacattatggcggtccttcagggcgctgaagctgtagcggaacggcgcgccatcatccggcatcaccacattactgcggttataggtccacactttatccgacggtcggtcctgcacgaacgtcagcgtctgcccgttccataccggcatacagcgcatcgccgagcagaaatcactgagaacatcccacgccttacgctgtgtggtcaggtaagcgttacaggtgatgcgcggctccgtgccgccaaatccgtccggcactga

SEQ ID NO: 462714 - DNA, 1128 bp, Shigella boydii
atgaacaacaataacacattgtacgtcgggttagatgttcacaaagaatcgattactgtcgcttatgctatcaattcagaacctgttgaactgatgggtaaaattggcacatcacctactgatattcagaatctttgtaaacgtctcaggtcaaagtcatcgcaggtcagtatcgtttatgaagcggggccctgtggttatggactttatcgtcggctggtgaaatccggttttgactgcatggtctgcgccccctcacttatcccgaaaaaaccgggggagcgggttaaaaccgatcgccgtgatgccatcagacttgtgcgttcactgcgtgcaggagatctttctgctgtctacgtacccggcattgaagatgaggcattccgggatttggcccgggcatgggcatctgcccgcgatgatttacggcatgcaaggcaacgtctgaaatcgtttcttctggttcatggggtccattatgtcgggcgagcagattggggccctgcacaccgacgctggctcagcaaatactcattcgaaagtccctggcgacaattagcttttgacgaacaccgtcgtacaatagaagaccggcaggcacaatgtgaacggctggaatccgccctgaaggaggccgttaccgaatggaggctgtatccggtagtagaggcgctgcaagccatgcgagggattcagtttattactgcggttggattaatttctgaactgggtgatctgacccgttttgaacatccacgacaactgatgtcatggtttggtatcacgccatcagaatattcatcgggtggaagcagacatcagggcagcattaccaaagccggaaacagctatgccagaaagctattggtcgaggcagcgtggagttaccgtcatccggcacgcatcagtccggcaatacaaaaaaggcaggaaaatttaccccgccccgtcattgacagagcatgggatgctcaactcaggctttgtaagaggtatcgaaaacttcaggccaaaggaaagaatgtcaatattacaattgttgctgttgcacgtgagctggcgggttttatctgggatatgggccgaatagcaatgtctgtcgcacaacaaccacaatgtcacaaataa

SEQ ID NO: 462715 - DNA, 225 bp, Shigella boydii
atgtcgcgtaaaggtcaatgttacgacaacgctccgatggaaagcttctggggaacgctgaaaaatgagagcctgagccactatcgttttaataaccgggatgaagccatctcagtaatacgggaatacattgagattttctacaatcgtcagcgtcgtcactctcgtctggggaatatctccccggcagccttcagggaaaaatatcatcagatggctgcttaa

SEQ ID NO: 462716 - DNA, 873 bp, Shigella boydii
atggtaggttttttcttcaccggtagcgctattatgggaattctggtcagtcaatttctggcaaggcactccgataaacaaggcgaccgtaaattactgattctgctatgttgcttatttggagtgctggcctgcacgctttttgcgtggaatcgcaactacttcattctcctctctacgggcgtacttctgagtagttttgcttctaccgcaaacccgcaaatgttcgccctcgcccgtgaacacgccgacagaacaggccgtgagacggtcatgttcagtacatttttacgtgctcagatctcgcttgcctgggttatcgggccaccgctcgcttatgaactggcaatggggtttagttttaaagtgatgtatctcaccgctgccatcgcatttgttgtttgcgggctgatagtctggttgtttttgccatcaatacaaagaaatattcctgtcgttacccaacccgtagaaattttaccctccacccataggaagcgggatacgcggctactttttgtggtctgttcaatgatgtgggcggcgaataatctctacatgataaatatgccgctatttattattgatgaactgcatctaaccgataaactggctggagaaatgattggtatcgctgccggtctggaaattccgatgatgttaatcgcaggctattacatgaaacgtattggcaagcgactattaatgctcattgctatcgtgagtggtatgtgtttttacgccagcgtactcatggcgacgactccggcggttgagctggaattgcaaattctaaatgccatcttccttggtattctctgtggtatgaggtgtactggcaatagcggacactaccatttgttctttttttaa

SEQ ID NO: 462717 - DNA, 213 bp, Shigella boydii; identical to SEQ ID NO: 462242

SEQ ID NO: 462718 - DNA, 228 bp, Shigella boydii
atgggaaataatttgttatcagcaaaagcgacactccctgtttatgatcgtaataacctggccccaagaattgttcatttaggctttggtgcatttcaccgtgcgcatcagggcgtgtatgccgatattcttgctacagaacatttcagtgactggggatattataaggtcaacttaatcggcggcgaacagcaaattgccggtaatgctgccaacttattgatttag

SEQ ID NO: 462719 - DNA, 615 bp, Shigella boydii
gtgtccgttaaactcaggctacctcagtcggtgatcattatggatactcatcctatcatcagaatgtctattgaagttctgttgcaaaaaaacagtgaattgcagattgtcctgaaaacggatgattaccgcataaccatcgattatctccgaacccgtcctgttgatttaatcattatggatatagacttgcccggaacagacggttttaccttcctgaaaaggatcaaacaaatccagagcacagtgaaagtgttatttttatcatcgaaatcagaatgcttttatgctggcagagcgatacaagctggtgctaacggttttgtcagtaaatgcaatgatcagaatgatatttttcatgccgttcagatgatcctctccggatacacgttttttcccagcgaaacgcttaactatataaaaagcaataaatgtagtacgaatagttcaacggtcactgtgctatctaatcgtgaagtgaccatattacgttatctggttagcggattatctaataaagaaattgccgataagttattgcttagcaataaaacagttagtgcgcataaatctaatatttatggcaaggataatgctgccaacttactgatttag

SEQ ID NO: 462720 - DNA, 213 bp, Shigella boydii; identical to SEQ ID NO: 462242

SEQ ID NO: 462721 - DNA, 342 bp, Shigella boydii; identical to SEQ ID NO: 462701

SEQ ID NO: 462722 - DNA, 891 bp, Shigella boydii
atgatttcagaccaaacagccgaaagacttgatgcaggccaagaggttagaaacttattaaattcaaaacaagatcaaaataacaacaaaaaaatattttttcccagagctaatcaaaaaaaagacccctatggttattggggggtcagtgctgataaagtatacattccattatcaggtgataataaaacaaaggatggtaaaatcagctataacctttttggccttgatgaaacaaacatgtcaaaatttatatgccaaaagaaagcagatgctttcagacaattggcaaattataaattaatcagtaaatctgaaaactgtgctggtatggcacttaatgttcttaaagcaggaaattctgaaatatactttccactccctgacgttaaattggttgctacacctaacaatgtatacgcgtatgcaaataaagttaggcaacgcattgaaagtctcaatcagtcttataacgagataatgaagtatattgaatctgattttgatctttccagattgactcaattacgacgtagctatcttaaaagtttcaataaaattaaccttatccacaccccaaaaacattcaagcctttatcaatttcactttacaaacatcctactgaaaatgtatcttcagaagactttgatgcggtcatcaacgcttgccactcatacttagtaaaatcagcacccagcaatatgtctcgtgtattaaacgaattaaaaaccggagcaacagataaaaaagaagtaattatcgaaaagtcaataaaaactattgattattacaattctcttaaatcgccagatcttggaaccaaactttacattcacgacttattacaggtcaataagcttttattgaataactctcattctaatatatag

SEQ ID NO: 462723 - DNA, 378 bp, Shigella boydii
atgaccgaatccaggcaggaaaagctgatatggctgcgtgcgcagatgaagctgacgagcctgtgctgggcgctgaaagaactggcaaaggatatctggagcagaccatggagcgaggaaagacgcaacgactggcagagatggctgtcgctggcggccaacagtgacgtccccatgatgaagaatgtggctaaaacgatagggaaaaggttgtacggtatcctgaacgccatgcgccatggcgtatcaaacggaaatgcggaagcactgaacagcaagatcaggctgctgagaataaaagccaagggctaccgcaaccgggagcgctttaagctgggagtgatgttccactatgggaaactgaatatggcgttctaa

SEQ ID NO: 462724 - DNA, 477 bp, Shigella boydii
atgccaggcagcgatgacctgaagggcattaacgtgaaataccgttatgagtttacggacacgttggggctggtgacgtcattcagctatgccaacgctgaagatgagcaaaaaacgcattacagcgatacccgctggcatgaggattccgtgcgtaaccgctggttcagcgtgatggcggggccgtctgtgcgcgtgaatgaatggttcagcgcgtatgcgatggcgggtgtggcttacagccgtgtgtcgactttctccggggattatctccgcgtaactgacaacaaggggaaaacgcacgatgtgctgaccggaagtgatgacggtcgccacagcaacacgtctctggcgtggggggctggcgtgcagtttaacccgaccgaatccgtggccattgatattgcttatgaaggttccggcagtggcgactggcgcactgacggtttcatcgtgggtgtcggttataagttctga

SEQ ID NO: 462725 - DNA, 366 bp, Shigella boydii
atgaggcgcttcgcaggcgcatgtcgtttcgttttcaatcgtgctctggcacgtcagaatgagaatcatgaggtcggtaataaatacatcccttacgggaaaatggcttcctggctggttgagtggaaaaatgccactgaaacgcaatggcttaaagatgccccgtcacagccattgcaacagtcactgaaagaccttgagcgggcttacaaaaacttcttccagaatcgggctgcttttccccgattcaaaaagcggggacagaatgatgtattccgctacccgcagggcgttaagctcgatcaggaaaacagccgtatttttctgccgaaactgggctggatgcgctaccggaacagccgttag

SEQ ID NO: 462726 - DNA, 225 bp, Shigella boydii
atgtcgcgtaaaggtcactgttacgacaacgctccgatggaaagcttctggggaacgctgaaaaatgagagcctgagccactatcgttttaataaccgggatgaagccatctcagtaataagggaatacattgagattttctacaatcgtcagcgtcgtcactctcgtctggggaatatctccccggcagccttcagggaaaaatatcatcagatggctgcttaa

SEQ ID NO: 462727 - DNA, 330 bp, Shigella boydii
gtgccaaaaccttctacccaggtagggcagaaagttctggataaaattttgaactataccaacaccgaaatgaaagaagcgatagcgcagcgtaaaccactggttaccaccgctgggccgcgtagtctgattttccgtggggccattaccggtgtagataccagcaaagaagggctgcaattctatgaagtggttcctgttgcattagtggttgcggggacgcaaatggctacaggtcaccgtaccatggatactcgcctctattttgaaggtgagctgattgatgcagcgactaataaaccggttatcaaagtcgttcgtcagggctaa

SEQ ID NO: 462728 - DNA, 291 bp, Shigella boydii
atggggttttacggcgcaccggataaaaagcgccatctaacgatggcgcgtctggaactactttttgttaacgtcaaacatggtggcatcggtcgccatgtcatcaataacttgtttaatattttcgaaagccattggcgtactttcgttattcaggtctttaccttagccctgacgaacgactttgataaccggtttattagtcgctgcatcaatcagctcaccttcaaaatagaggcgagtatccatggtacggtgacctgtagccatttgcgtccccgcaaccactaa

SEQ ID NO: 462729 - DNA, 327 bp, Shigella boydii
atgactaaaaatactcgtttttcccccgaagtccgtcaacgggcagtccgtatggttctggaaagtcagggcgaatatgactcacagtgggcggcaatttgttccattgccccaaagattggctgtacaccggagactctgcgtgtctgggtacgccagcatgagcgggataccggaggcggtgatggcgggctcaccaccgctgaacgtcagcgtctgaaagagctggaacgtgaaaatcgtgaactgcgccgcagtaacgatatccttcgccaggcttccgcttattttgcgaaggcggagttcgaccgcctctggaaaaaatga

SEQ ID NO: 462730 - DNA, 237 bp, Shigella boydii; identical to SEQ ID NO: 460237

SEQ ID NO: 462731 - DNA, 711 bp, Shigella boydii
atgctaccatctatttcaatcaacaataccagcgcaacttacccagaatccattaatgaaaataacaatgatgaagttaatggattagtacaagagctcaaaaacctttttaatggtaaggaaggaataagcacctgtattaaacatctacttgagcttataaaaaacgccatacgagtaaacgacgatccttatagatttaatattaataattcctcagttacttatattgatattggctccaatgatacagaccatattactattggtatcgacaaccaagaaccaatagaattacctgcgaactataaagacaaagaactcgtccgtactatcattaatgacaacatagttgagaagactcatgatatcaataacaaggaaatgatcttcagcgcattaaaagaaatatatgatggagctcctagttttatcttcgataagatatcacacaaactcagacatacggtaacggaatttgatgagagcgggaaaagcgaaccaacggacttatttacctggtacggtaaagataaaaaaggcgactctctcgctattgtaattaaaaataaaaacggaaatgattacttatccctcggttactacgatcaggacgactaccacattcaaagaggaattcgtattaatggtgatagtctcacccaatattgtagtgaaaacgccaggagtgcttcagcgtggtttgggtaa

SEQ ID NO: 462732 - DNA, 357 bp, Shigella boydii
atgcttccccgttttgccgatatttttcagcagggaaaccgatggcttaactggctggagaagcagccggtgcagatgagccgcctggaacattatgccggtcaggatgaaattggcctgcgttacaacagccaccggacaaaacgagaagaaaaccttgtgatgagtggcgacgagtttatggaaaggttctcctggcatgtggcggataaggggttccggatggtgatacggggtcctgagtccggtgaagcggcgattactggaagatgtggtgtacgccataacggagacagtgagaaaaacggcgaggcaaatcacaaggagagggatgtatcagcagtgactgaaggttga

SEQ ID NO: 462733 - DNA, 324 bp, Shigella boydii
atgagtaacattaatttagttcaattagttagagatagtcttttcacgattggttgtcctccatcaattattacagatttagacagccattcagcgattaccatttctttggatagtatgcctgctattaatatagctcttgtcaatgagcaggttatgttatgggctaatttcgatgcaccaagtgatgtaaaacttcagtcatctgcttataacatattaaatttaatgttaatgaactttagttatagcattaatgagctggtagagcttcatcgttctgatgagtacttacagttaagagttgttattaaagatgactaa

SEQ ID NO: 462734 - DNA, 489 bp, Shigella boydii
gtgactatacagagaatttctgaggtattacaaagattgcttggagaaaatatttctgttcgcaatttaaaacttattatggagtctttggcgctttgggctcccagagaaaaagatgtcataacattagttgaacatgtccgtgcatcactttctaggtatatttgtagtaaaatagctgtttctggtgagattaaagttgtgatgctttccggatatattgaggatgcaataagaaaagggataaggcaaacctctggtggctctttcttgaatatggatatagaggtttcggatgaggtaatggaaactttagcacatgctttgagagaattgagaaatgcaaaaaaaaatttcgttcttttggtatcagtagatatacgtaggtttgttaaaagacttatagataacagatttaagagtatactcgttatatcgtatgctgagattgatgaagcatataccattaatgtattaaagactatttag

SEQ ID NO: 462735 - DNA, 285 bp, Shigella boydii; identical to SEQ ID NO: 461629

SEQ ID NO: 462736 - DNA, 288 bp, Shigella boydii
atgagcagaaaaaaccaacgttactctaaagagttcaaagccgaagctgtcagaacggttcttgaaaatcaactttcgatcagtgaaggcgcttcccgattatcccttcctgaaggcactttaggacaatgggttaccgccgccagaaaagggctcggtactcctggttcccgcacggtggctgaactggaatctgaaattctgcaactgcgtaaggcgttaaatgaagctcgccttgagcgagatatattaaaaaagcaacagcgtattttgcacaggagtcgctga

SEQ ID NO: 462737 - DNA, 180 bp, Shigella boydii; identical to SEQ ID NO: 461173

SEQ ID NO: 462738 - DNA, 252 bp, Shigella boydii
atgagtgttacagtaccggataaagattggactctgagttcattatctgaaacttttgatgatggaactcaaacattacaagggcaactaacatcggcactaaatgcattagctgaaaatccttcgaatccacagttgctggctgaataccaaagtaaattatctgaatatacattatataggaacgcgcaatctaatactgtgaaagtgattaaggatgttgatgctgcaattattcaaaacttcagataa

SEQ ID NO: 462739 - DNA, 447 bp, Shigella boydii
gtgttgaatttagtgagtgataaagcggaattactggtatttttaagtaaagaaagaaatagttcaaaagataccgaacttgagaaattgaaaaatgctctgatagttgaatttccgtatatcaaaaatattaaattcaactatcttagcgatcataatgcaagggaggatgctaaaggtattttcacaaaggtaaatgtccagtataaagagatttgtgaaactaataaagttacatattctgtcagagaagaactgacagatgaaaagcttgagctcattaatagactgatttctgatcataaaaatgtatatggagatcagtatattgagttttctgtacttttgatagatgatgattttaaaggtaaatcatatcttaacagcaaagacagttatgtaatgttgaatgataaacactggttttttttagataaaaataagtga

SEQ ID NO: 462740 - DNA, 342 bp, Shigella boydii; identical to SEQ ID NO: 462701

SEQ ID NO: 462741 - DNA, 327 bp, Shigella boydii; identical to SEQ ID NO: 5975

SEQ ID NO: 462742 - DNA, 378 bp, Shigella boydii
atggaattattatccacgcaacatataagcttactggatagaataaaaggtaatagcgtaacattattctgcgagctgatattaaatttcagaaatgaaatagagcgtagacaattaagcacaaacaccatgaaaagacacaaccagaggttgaaaatcataagtgaatactttggtggtgttccggttaaaaatataggcataagggaggtgtacagctttcttgaaatcagagcagctgggagtaaatttgctattgctaaccagtacagggcgcttttatcagtgaagtggcacactgaatttggccacctgaacagaggtgatatgctcacctcagaacaacacaggtgctccaatgaaaaaaagaaattttag

SEQ ID NO: 462743 - DNA, 321 bp, Shigella boydii
atgaaaggcggttatcttgcggcctgcggtgtatttattggcgatgcagtattgatgtttctggcatgggctggagtggcgacattaattaagaccaccccgatattattcaacattgtacgttatcttggtgcgttttatttgctctatctggagagtaaaattctctacgcgaccctgaagggtaaaaataacgaggccaaatccgatgagccccaatacggggccatttttaaacgcgcgttaattttgagcctgactaatccgaaagccattttgttctatgtgtcgtttggtaatgctgccaacttactgatttag

SEQ ID NO: 462744 - DNA, 327 bp, Shigella boydii
atgactaaaaatactcgtttttcccccgaagtccgtcaacgggcagtccgtatggttctggaaagtcagggcgaatatgactcacaatgggcgacaatttgttccattgctccaaagattggctgtacgccggagactctgcgtgtctgggttcgccagcatgagcgggataccgggggcggtgatggcgggctcaccaccgctgaacgtcagcgtctgaaagagctggagcgtgaaaatcgtgaactgcgccgcagtaacgatatccttcgccaggcttccgcttattttgcgaaggcggagttcgaccgcctctggaaaaaatga

SEQ ID NO: 462745 - DNA, 555 bp, Shigella boydii
atggagcgggagttccccgaagcactggaacggatgaaagagagactgccaccgtatctcattatggttctggaaaaccagtacaaccgactgaatgagctggactcactgatagaggatattgaaaaacagcttaccagcgtggcgaggcagaatgaaacctgtaagcggttgctggatattcctggcgttggaccacttattgcgacggcagcggtggccaccatgggggaagcatcagcgtttaaatcggggcgagagttcgccgcatatgttggtctggttccaaaacaaactggctccggagggaaagtacgtctgctggggataagcaaacgtggtgacacttatctcaggacattatttatccacggtgcaagagcggtggcattagtagctaaagagcctggcccgtggataaccgaactgaaaaaacgtcgtccagccagtgtggcaatcgtcgccatggcaaacaagctggcacgaacagtatgggcgataaccgcccatgaccgtaagtatgacaggaaccacgtcagtatcagaccatattaa

SEQ ID NO: 462746 - DNA, 180 bp, Shigella boydii; identical to SEQ ID NO: 461173

SEQ ID NO: 462747 - DNA, 366 bp, Shigella boydii
atgctggaagcggccagagaggccagacgtcaggaaattgaagcatggcgcgcagaacaggaggcgaagccgttcacgtttgaatggaacggtcgtatctggaatgctggtcccgactcactgggccgcctgtccccggtagtcatgctggcaaaatctgtcgcggcacaaacacatatggtgtggagcgatgcggataatcagcaggtgaaactgtcgatgccggaactggaagaactggcggcagcaatggtgcaggcgcaggtcgatcgcaacgatgagatttatcgccgtcagcgtgaaatgaaagaggagctgagcggtctggatgatttggcttcaattcgggcgtttgacgttgagtaa

SEQ ID NO: 462748 - DNA, 516 bp, Shigella boydii
atgtgccgccggtgctcaaaaaaacatcccgatatcgacggagataatgggccgggtcgctctcgcggcggttttggcaccaaaatccatctggcaacagacggaagtggcctcccgttaaatatcgtgctaagccccggacaagctcatgaaagccagttcgcgcaacgacttctggacgggattggcgttcagcgtcagaacggcagcatgaaacgccgtggacatgcggtactggctgataaagcgtattcagggcgcgcattgcgcaatgagctgaaaaataacggtataaaggcagtaatcccccgaaagtcaaatgagaaaatggcatcggatggacgtgcacagcttgatcgtgatgcgtaccgcaatcgtaatgtcgttgaacggtgctttgggcggctgaaagaatatcgccgcatcgccacgcgttacgacaaaacggcgagaaattacctggcgatggtgaaactgggctgcatccgactcttttatcaacgcttacgtaattaa

SEQ ID NO: 462749 - DNA, 381 bp, Shigella boydii; identical to SEQ ID NO: 458903

SEQ ID NO: 462750 - DNA, 372 bp, Shigella boydii; identical to SEQ ID NO: 462601

SEQ ID NO: 462751 - DNA, 285 bp, Shigella boydii
atgagcagaaaaaaccaacgttactctaaagagttcaaagccgaagctgtcagaacggttcttgaaaatcaactttcgatcagtgaaggcgcttcccgattatcccttcctgaaggcactttaggacaatgggttaccgccgccagaaaagggctcggtactcctggttcccgcacggtggctgaactggaatctgaaattctgcaactgcgtaaggcgttaaatgaagctcgccttgagcgagatgaaccgccccgggtttcctggagagtgttttatctgtga

SEQ ID NO: 462752 - DNA, 471 bp, Shigella boydii
gtgaacgcgaactccgggacgctcaacaacgtcacgattaataagaactgtcgggttctgggaaaattgtccgcgaaccagattgaaggcgatctcgttaaaacagtgggcaaacctttcccacgggactcccgggcaccggagaggtggccatcagggaccattaccgtcagggtttatgacgatcagccgtttgatcggcaaattgttattcccgcggtggcgtttcgcggtgctaaacatgagcggaagaataacaatatttattcgtcatgcagcctgatagtgaagaaaaacggtgctgaaatttataaccgaacgaccctggataatacgctgatatatacgggtgttattgatatgcctgccggtcacggtcacatgacgctggagttttctgtatcggcatggctggtaaatggctggtatcccacagcaagtatcagcgatttgctggttgttgtgaggtag

SEQ ID NO: 462753 - DNA, 444 bp, Shigella boydii
atgtcccctactatttatgatattgccagggttgcaggcgtatcaaaatccaccgtatcacgcgtgctgaataagcaaactaatatctccccggaagcgcgcgaaaaagtgttacgggccattgaagaattacagtatcagccaaacaagcaggcccgcgcgctgacctcttcgggttttgatgccattatggtgatttctacccgttcgaccaaaactacggcgggtaatccgtttttctctgaagttttgcatgccatcaccgccaaagctgaagaggaaggtttcgacgtgatattgcagacgtcgcacaatccggcagaagacttacaaaaatgtgaaagcaaaattaagcagaaaatgggtaatgactccaacttactgatagtgttttatgttcagataatgcccgatgaccttgtcatgcagctccaccgattttga

SEQ ID NO: 462754 - DNA, 192 bp, Shigella boydii
atgaaatccatggacaaaatttcaacgggcattgcctacggcacctccgccggcagtgccggctactggtttttgcagtggttggatcaggtcagtccatcacagtgggctgcgattggtgtgctgggaagtctgcttctggggcttctgacttatctgacgaatctgtatttcaaaataagagaagattga

SEQ ID NO: 462755 - DNA, 366 bp, Shigella boydii; identical to SEQ ID NO: 461917

SEQ ID NO: 462756 - DNA, 180 bp, Shigella boydii; identical to SEQ ID NO: 461173

SEQ ID NO: 462757 - DNA, 675 bp, Shigella boydii
gtggtgagagcgccggagggggagcggtatatcccttgtgtgaatatttctgcagagccggaggcgtattttcgtatcgcaccggaagactggctgcaggcagagatgcagggtgagattgtggcactggtccacagtcatcccggtggtctgccctggctgagtgaggctgaccggcggctgcaggtgcagagtgatttgccgtggtggctggtctgccggggggcgattcacaagttccgctgtgtgccgcatctcaccgggcggcgctttgagcacggggtgacggactgttacacgctgttccgggatgcttatcatctggcggggattgagatgccggattttcatcgcggggatgactggtggcgtcacggtcagaatctctatctggataatctggaggccacagggctgtatcaggtgccgttgtcatcagcacaaccgggcgatgtgctgctgtgctgttttggttcatcggtgccgaatcatgccgccatttactgcggcgacggtgagctgctgcaccatattcctgaacaactgagtaaacgagagaggtataccgacaaatggcagcgacgcacacactccctctggcgtcaccgggaatggcacgcatctgcctttacggggatttgcaacgatttggccgccgcatcgaccttcgtgtga

SEQ ID NO: 462758 - DNA, 330 bp, Shigella boydii
atggagacgtttcactggaaagtgcgcccggatatgaatgtggtatcagagccgaaagtggtgacagtgaagctgggcgatggttatgaacagcgtcgtgcggcgggactgaataaccagttgtcgacttacagcgtgacgatacgtgttcgtaaatgtgaccacccatctttaaaagcctttctggaacggcacggtggcgtccgtgcatttcagtggacgccaccttatgactggaaaccgatcagggtggtttgtcgtaaatggtcggcaagcgtgggggcgctgtgggtaaccataacggcagattttgaacaggtcgtggcatag

SEQ ID NO: 462759 - DNA, 261 bp, Shigella boydii
atgggggaagctggacctgaagccattctgccactgcgtcgtggtgctgacggtaagctgggggttgtggcggatattggtggttcaggtatggcgatgtttgccccgcagtacaacatcgagatcaataacgatggcacgaacgggcagataggtccggctgccctgaaggtggtttatgaccttgggaaaaaagcggcagcggactttatgcaacagcaggcccgtgatggtggtcggttaagtggagcatatcggtaa

SEQ ID NO: 462760 - DNA, 330 bp, Shigella boydii
atggagacgtttcgctggaaggtgcgcccggatatgaatgtggtatcagagccaaaagtggtggcagtgaagctgggtgatggttatgaacagcgtcgcccggcgggactgaataatctgctgtcgacttacagcgtgacgatacgtgttcgtaaaggtgaacacccacctttaaaagcctttctggaacggcacggtggcgtccgcgcatttcagtggacgccaccttatgactggaaaccgatcagggtggcttgtcgtaaatggtcggcaagcgtgggggcgttatgggtgactgtaacggccgattttgaacaggtggtgaactga

SEQ ID NO: 462761 - DNA, 261 bp, Shigella boydii
atgggggaagcgggacctgaagccattctgccactgcgtcgcggtgctgatggtaagctgggggttgtggcggatactggtggttcaggcatggtgatgtttgccccgcagtacaacatcgggatcaataacgacggcacgaacgggcagataggtccggcagcactgaaggtggtttatgacctcgggaaaaaagcggccgcggactttatgcaacagcaggcccgtgatggtggccggttaagtggagcataccggtaa

SEQ ID NO: 462762 - DNA, 372 bp, Shigella boydii; identical to SEQ ID NO: 462525

SEQ ID NO: 462763 - DNA, 168 bp, Shigella boydii
atggacatgaatgcaggctatataagagcagcgcgcatccacttacccaatgcggttgagaaaatagccttcgatcgctttcatgtggcgaaacaaccgggtgaggtggtggataaaacccgccagaatgaaccgccccgggtttcctggagagtgttttatctgtga

SEQ ID NO: 462764 - DNA, 351 bp, Shigella boydii
atgatctcactcccgtcaggcacccgcatctggctcgttgctgggataaccgatatgcgtaagtctttcaacgggctgggtgaacaggtacagcatgtgctgaatgataatcccttctccggtcacctgttcatcttccgtggccgacggggtgacatgattaaaatcctgtgggctgatgctgatggtctgtgcctgttcaccagacgcctggaggaaggccagtttatctggcctgctgtgcgtgacggcaaggtatccattacccgctcgcaactggcaatgctcctcgataagctggactggcgtcagccaaaaacatcccgccttaatgcactgacaatgttgtaa

SEQ ID NO: 462765 - DNA, 327 bp, Shigella boydii; identical to SEQ ID NO: 5975

SEQ ID NO: 462766 - DNA, 321 bp, Shigella boydii
atgaataaaaatactgcagacataaccccatccatgtcattgcaagaaaaatcaatagttgaaaatgataaaaatgtttttcaaaaaaatagtgaaatgacttaccactttaaacagtggggggctggacattctgttagtatttcagtggagtctggttcttttgttctaaaaccgtcagatcaatttgtaggaaataaacttgacttaattttgaaacaagatgctgagggtaattacagatttgatagcagtcaacataataaggggaataaaaataatagtacaggatataatgaacagagtgaagaagaatgctaa

SEQ ID NO: 462767 - DNA, 372 bp, Shigella boydii
gtgctggatgctctggagcaggcgttatgggcccgtcgaccgtccggcacggtccatcacagtgataaaggttctcagtatgtatcgctggcctacacacagcggcttaaggaagccggattactggcatcaacaggaagtacaggcgactcgtatgacaacgcgatggcggagagcatcaatggtctttacaaagcggaggtaatacaccgtaagagctggaaaaaccgtgcagaagtggaactggccacactcacgtgggtggactggtataataatcgacgattgctggaaaggctgggccacatccctccggcagaagcagaaaaagcttattatgcttctatcggaaacgatgatctggcagcctga

SEQ ID NO: 462768 - DNA, 381 bp, Shigella boydii; identical to SEQ ID NO: 461669

SEQ ID NO: 462769 - DNA, 381 bp, Shigella boydii
atgctgggagcggtggaacgccgcttcggcaacgatcttccgtcgtctccagtggagtggctgacggataatggttcatgctaccgggctaatgaaacacgccagttcgcccggatgttgggacttgaaccgaagaacacggcggtgcggagtccggagagtaacggaatagcagagagcttcgtgaaaacgataaagcgtgactacatcagtatcatgcccaaaccagacgggttaacggcagcaaagaaccttgcagaggcgttcgagcattataacgaatggcatccgcatagtgcgctgggttatcgctcaccacgggaatatctgcggcagcgggcttgtaatgggttaagtgataacagatgtctggaaatatag

SEQ ID NO: 462770 - DNA, 501 bp, Shigella boydii
gtgaatgcgaactccgggacgctcaacaacgtcacgattaacgagaactgtcgggttctgggaaaattgtccgccaaccagattgaaggcgatctcgttaaaacagtgggcaaagctttcccccgggactcccgtgcaccggaacggtggccatcagggaccatcaccgtcagggtttatgacgatcagccgtttgaccggcagattgttattccggcggtggcattcagcggcgctaaacatgagcgggagaataacgatatttattcgtcatgccgcctgatagtacggaaaaacggtgctgaaatttataaccgtaccgcgctggataatacgctgatttacagtggcgttattgatatgcctgccggtcacggtcacatgacgctggagttttcggtgtcagcatggctggtaaatgactggtatcccacagcaagtatcagcgatttgctggttgtggtgatgaagaaagccaccgcaggcatcagtatcagctga

SEQ ID NO: 462771 - DNA, 456 bp, Shigella boydii
ttgtgcggtccggaacttcaccagttgcatgcgggtacggtgcagaaccagtaccgactgctgttcttctgtttttacggcgatttctttacccggctgctgaaccgccatccagatagcccgggcatccatcacatcattcttattgcccatgacgaatgccttaacgaagcgggcctgcaacaaccggactttatgaccaagttttgtcagttcccgtgcccagtgctgagaacctccacaggcctccataccaatcaggcatggctcacggttgccgaagaacgtcagaaaatcctgtctacgcaactgtttatcaaccacttcacctgtgtgctcattgatgaagtgaatctgaatgacatgttttgcgataccaacgccaaccggtgtatatttcatttgtggagtctccagtctgagggagctttatgcatcccgtattgggcactatga

SEQ ID NO: 462772 - DNA, 327 bp, Shigella boydii; identical to SEQ ID NO: 35713

SEQ ID NO: 462773 - DNA, 303 bp, Shigella boydii
atgagcagaaaaacccaacgttactctacggagtttaaagccgaagccgtcaaaacggttcctgaaaatcagctttcgatcagtgaaggcgcttcccgattatctgttcctgaaggcactttaggacaatgggttaccgctgcaagaaaagggctcaatacaccaggctcccgcacagtggctgagctggaatctgaagttatgcaactgcgtaaggctttaaatgaagcacgacttgagcgagatatattaaaaaaagcaacagcgtattttgcccaggagtcgctgaaaaatacgcgttaa

SEQ ID NO: 462774 - DNA, 504 bp, Shigella boydii
gtggaacaatatcagctgacaaaacaatatgatgtcacctggcttttttcgaaagacggaaaaaactggtatgaagagctgaagaatttcgccagcgacacaattaaaataacttacaccggagacggtcgcgtggtgtgggtcggtaaggatgtgactggcattgaaccccgtaacgccagtgttattgaagttcctgatattaccgccaaccgccgcattaccgcgccgggttactggttttaccgcaatgatgaatttgtctttgactacagactcaaagcggaagatgagcgtgatgcccttctggctcaggtcagtgcccggacaggggaatgggaagaagacctgctgctggggctaatcagcgacgaagaccgggaaaaactgaaagcgtaccgcatttacgcgaaatcgctgcaggcgatggatttcagtgtcatcactgataaaacctcatacaacgccattgaatggcccgtctctccggaaggttcttcctga

SEQ ID NO: 462775 - DNA, 447 bp, Shigella boydii
gtggcgttcattattgatgtgtttgccggatacatcgtggggtggcgggtctcatcgtccatggaaacgacattcgtgctggatgctctggagcaggcgttatgggcccgtcgaccgtccggcacggtccatcacagtgataaaggttctcagtatgtatcgctggcctacacacagcggcttaaggaagccggattactggcatcaacaggaagtacaggcgactcgtatgacaacgcgatggcggagagcatcaatggtctttacaaagcggaggtaatacaccgtaagagctggaaaaaccgtgcagaagtggaactggccacactcacgtgggtggactggtataataatcgacgattgctggaaaggctgggccacatccctccggcagaagcagaaaaagcttattatgcttccatcggaaacgatgatctggcagcctga

SEQ ID NO: 462776 - DNA, 372 bp, Shigella boydii; identical to SEQ ID NO: 462525

SEQ ID NO: 462777 - DNA, 201 bp, Shigella boydii
atgagaggagacgccgcggaaatggactgccatttttgtcgtggccagaaatccttgcgctccgccgtatatttctcccagcggcacattggtgccaagatggtggcagagaagatagtcgacatcatccagcatgcctttctcggtgacggcgtacgctccgcggacgccctcttcggcgggctggaagatcagctttaa

SEQ ID NO: 462778 - DNA, 465 bp, Shigella boydii
gtggcactgactgaggcctgcccggcacttgttgacgcggcactggcagacgacgcagccgctgtttttgagcctgctgctgcggaggcactctgttctgctgccgtttcagaggacttagcgtttgtctcagacgttttggccgccttcgcggaattgcctgccgccgttgccgaggaggctgcactactggcgctcgaggctgcgctcgtttctgataattttgccgcctcttttgaagccgacgcatcccgggctgaggtggcagcttctgacgctttcgtggtcgcggtggatgcagaagtggctgctgattgttgtgacgctgccgcattcgtttctgacgttttcgccgcaccggcactggtggccgccgcgctttttgaggactcagcagcggcagcactttttgatgcttcagtggcctttgttgatgccgttcctgcgctggaagacgctgactga

SEQ ID NO: 462779 - DNA, 372 bp, Shigella boydii; identical to SEQ ID NO: 462525

SEQ ID NO: 462780 - DNA, 372 bp, Shigella boydii
gtgctggatgctctggagcaggcgttatgggcccgtcgaccgtccggcacggtccatcacagtgataaaggttctcagtatgtatcgctggcctacacacagcggcttaaggaagccggattactggcatcaacaggaagtacaggcgactcgtatgacaacgcgatggcggagagcatcaatggtctttacaaagcggaggtaatacaccgtaagagctggaaaaaccgtgcagaagtggaactggccacgctcacgtgggtggactggtataataatcgacgattgctggaaaggctgggccacatccctccggcagaagcagaaaaagcttattatgcttccatcggaaacgatgatctggcagcctga

SEQ ID NO: 462781 - DNA, 372 bp, Shigella boydii; identical to SEQ ID NO: 462525

SEQ ID NO: 462782 - DNA, 372 bp, Shigella boydii; identical to SEQ ID NO: 462525

SEQ ID NO: 462783 - DNA, 372 bp, Shigella boydii; identical to SEQ ID NO: 462525

SEQ ID NO: 462784 - DNA, 447 bp, Shigella boydii; identical to SEQ ID NO: 462775

SEQ ID NO: 462785 - DNA, 141 bp, Shigella boydii
atgattggaaatttcaaccccaaaaaaaacaaaatcgtggttagctatttcttcaatatcctcagagaatgtgtttttatatgtttgtatattctcagacttaattttatcaaaggacttaatattaagagtattatttga

SEQ ID NO: 462786 - DNA, 222 bp, Shigella boydii; identical to SEQ ID NO: 461706

SEQ ID NO: 462787 - DNA, 168 bp, Shigella boydii
atgcaagcgcgagtgaagtgggtcgaagggttaacttttctgggcgaatccgcctctggtcatcagattttaatggacggcaactcaggcgataaagcaccaagtccgatggaaatggtgttgatggcggcggggggtgcccctattaagttgtcaagcatgttatga

SEQ ID NO: 462788 - DNA, 327 bp, Shigella boydii; identical to SEQ ID NO: 5975

SEQ ID NO: 462789 - DNA, 186 bp, Shigella boydii
gtggccgccggagaacaggttgttcctgcctctgaacttgctgccgccatgaagcagattaaagaactccagcgcctgctcggcaagaaaacgatggaaaatgaactcctcaaagaagccgttgaatatggacgggcaaaaaagtggatagcgcacgcgcccttattgcccggggatggggagtaa

SEQ ID NO: 462790 - DNA, 366 bp, Shigella boydii
atgatggatgacatttattcatatgcttatgacttttacaacaaaggaagaatagaggaagctgaagttttcttcagatttttatgtatatacgacttttacaatgtagactacattatgggactcgcagctatttatcagataaaagaacagttccaacaagcagcagacctttatgctgtcgcttttgcattaggaaaaaatgactatacaccggtattccatactggacaatgccagcttcggttgaaagcccccttgaaagccaaagagtgcttcgaactcgtaattcaacacagcaatgatgaaaaattaaaaataaaagcacaatcatacttagacgcaattcaggatatcaaggagtaa

SEQ ID NO: 462791 - DNA, 264 bp, Shigella boydii
atgctgggagcggtggaacgccgcttcggcaacgatcttccgtcgtctccagtggagtggctgacggataatggttcatgctaccgggctaatgaagcacgccagttcgcccggatgttgggacttgaaccgaagaacacggcggtgcggagtccggagagtaacggaatagcagagagcttcgtgaaaacgataaagcgtgactacatcagtatcatgggtaagcgtcaacggagcaccgtattgacgcttatttattggtga

SEQ ID NO: 462792 - DNA, 333 bp, Shigella boydii
atggcgctatggcaaacagatattctcgctcgcaaatacaacgccgataagtttgaaaagcgattatcagatctggatgacgttgctgaagaaagctggctggaggaaaacctgccgtcagcatttgcacagcatccgtggtgcagctcgcttggctctatcggtggcggcaatcatttcgctgaactgcaacaagttgatcaaatcatcaacgctgaactgtttgcactagcaggtctggatgcacaacatctgcaactgttggttcatagcggctcgcggggggggcccctattaagttgtcaagcatgttatgacccctgcggggtataa

SEQ ID NO: 462793 - DNA, 303 bp, Shigella boydii; identical to SEQ ID NO: 459543

SEQ ID NO: 462794 - DNA, 330 bp, Shigella boydii; identical to SEQ ID NO: 461591

SEQ ID NO: 462795 - DNA, 216 bp, Shigella boydii
atgggaatggatatcaatgcctggctggtttcccgctcactgtggaatgctgagcagtctcaggatgttgagacgctttgcgcatccattatgacaacatggtcgtatgatgcgctgggcgcgggggcggagagggttctgtcgctgagcggtatggggaccattgagaatgccggggatgatgatcatgaggcgctgacgccggaaaagtcctga

SEQ ID NO: 462796 - DNA, 210 bp, Shigella boydii
atggatatcaatgcctggctggtttcccgctcactgtggaatgcggatcagtctaaggatgtagagacgctttgcgcatccgttattacaacatggtcgtatgatgccctgggtgcgggggcggagatggttctgtcgctgagcggtatgggggccattgataatgccggggatttggagcatgaggtgctgacgccggaaaagtcctga

SEQ ID NO: 462797 - DNA, 1218 bp, Shigella boydii
atgaaaaaaaatataatatatcttttttttgtgcagggcacaaactatctgtttccactaataacattgccatatttgattcgcatgttagggagtaactcttttggcatatatgcaatgatacttgctggaatacagtatgttaatataattgttgatttcggttttaacttcactgctacaaaactaatctcaatatataaaaataatgaaaatgagaaaaataaaatattcactgcaacaattataattaaatttattttattctgtctttgcctttctgttctattattattatctttggtattagaacagggaaaatatatacaatatataataataggttctatcgctgtaattgggaatatgctcttacctgtttggttttttcagggaatagagagaatgagtaagattgcattattttctactttatctaaactttcatcattactatttattttttttacggtaaaatcatcagatgatgttggactagctatagcaagttactcattaggcttgctatttactgggctattatcagtttatgttatctttcattataaatatgttaaatttacaaaggtgagtttaaagtttataatcaaattagctaaagatagtgttgatatgtttatatcaaacattactgttagtttttatactacacttaatacaattttagttggtgctattgctggccctgcaacagcaggttacttttcggctgcggataaattaaggatagcggttcaaggacttttaacacctttgcagcaagcaatttttccaagagttacaagtttgattaataatgactataagctgaatgatgtattaaaaacatttggctataaaatgattggctttggattttttctatcactaagcattgcgatcattggagttccattatccgagtggtattttggtaacaataatgcaatatcatcaaaaatacttttaatacttagtccacttccttttgtcgtgtctattggtattgtattcgggcaatggtggctaattaccactaataggacaagaataatcagaaaagtatattttaatttaagcatgctacatgtttttattgcttatttcttaattaagcacattccgaattatggcgtagcaatatcaatagtttttactgaaactatcatatcattattacttacaatttttgctataaaaaactcagttaatcattga

SEQ ID NO: 462798 - DNA, 825 bp, Shigella boydii
ttgtcaaatattccactattgactatttgtgccgttatttctggtgcagaaggatgggaagatatagaggattttggggaaacacatctcgattttttgaagcaatatggtgattttgaaaatggtattcctgttcacgatatcattgccagagttgtatcctgtatcagtcctgcaaaatttcacgagtgctttattaactggatgcgtgactgccactcatcaaatgataaagacgtcattgcaattgatggaaaaacactccggcactcttatgacaagagttgtcgcaggggagcgattcatgtcactagtgcgttctcaacaatgcacagtctggtcatcggacagatcaggacggatgagaaatccaatgaaattacaactatccctgaacttcttaacatgctggatattaaaggaaaaatcatcacaactgatgtgatgggttgccagaaagatattgcagagaagatacaaaaacagggcggtgattatttattcgctgtaaaaggaaatcaggggcggcttaataaagcccttgaggaaaaatttccactgaaagaattaaataatccagagcatgacagttacgcaatcagtgaaaagagtcacggcagagaagaaatccgtcttcatattgtttgcgatgtccctgatgaacttattgatttcacgtttgaatggaaaggactgaagaaattatgcgtggcagtctcctttcggtcaataatagcagaacaaaagaaagagccagaaatgacggtcagatattatatcagttctgctgatttaaccgcagaaaatttcgccacagcgttctga

SEQ ID NO: 462799 - DNA, 558 bp, Shigella boydii
atgaaagtaattaaaactgaaattcctgatgtattaattttcgaaccgaaagtttttggcgatgagcgtggtttctttatggaaagctttaatcagaaagttttcgaagaagctatagggcgtaaggttgaatttgttcaggataaccattcgaagtctaataaaggcgttttacgcgggctgcattatcagttagaaccttatgcgcaaggaaaattagttcgctgtgttgttggcgaggtttttgatgttgctgtggatattcgtaagtcatcccctacgtttggtaaatgggttggtgtgaatttatcttctgagaatatgcgacagttatggatacctgaaggatttgctcatgggtttttggtgctgagtgatactgcggaatttttatataaaacgacgaagtattaccatccagagagtgacagtggtattatttggaatgataaaaatatcggaatttgttggccattaagagaaaaaccaataatatcagaaaaagatagcaatctattaccctttgctcatttaactcgcaaacaaataaatttatga

SEQ ID NO: 462800 - DNA, 1437 bp, Shigella boydii
atggcgcagtcgaaactctatccagtcgtgatggcaggtggctccggtagccgcttatggccgctttcccgcgtactttaccccaagcagtttttatgcctgaaaggcgatctcaccatgctgcaaaccaccatctgccgcctgaacggcgtggagtgcgaaagcccggtggtgatttgcaatgagcagcaccgctttattgtcgcggaacagctgcgtcaactgaacaaactcaccgagaacattattctcgaacctgcagggcgtaacactgcaccggccattgcgctggcggcgctggcggcaaaacgtcatagcccggagaacgacccgttaatgctggtgctggcggcggatcatgtaattgccgatgaagacgcgttccgtgccgccgtgcgtaatgccatgccatatgccgaagcgggcaagctggtgacctttggcattgtgccggatctaccagaaaccggttatggctatattcgtcgcggtgaagtgtctgcgggtgagcaggatacggtggcctttgaagtggcgcagtttgtcgaaaaaccgaatctggaaaccgcccaggcctatgtggcaagcggcgaatattactggaacagcggcatgttcctgttccgcgccggacgctatctcgaagaactgaaaaaatatcgcccggatattctcgacgcctgtgaaaaagcgatgagcgccgtcgatccggatcttgattttattcgtgtggatgaagaagcgtttctggcctgcccggaagagtcggtggattacgcggtcatggaacgtacggcagatgccgttgtggtgccgatggatgcgggctggagcgatgtcggttcctggtcctctttatgggagatcagtgcccacaccgccgagggcaacgtttgccatggcgatgtgattaatcacaaaactgaaaacagctatgtgtacgccgaatctggtctggtcaccaccgtcggggtgaaagatctggtggtggtgcagaccaaagatgcggtgctgattgcagaccgtaacgcggtacaggatgtgaaaaaagtggtcgagcagatcaaagccgatggtcgccatgagcatcgggtgcatcgcgaagtgtatcgtccgtggggcaaatatgactctatcgacgcgggcgaccgctaccaggtgaaacgcatcaccgtgaaaccgggcgagggcttgtcggtacagatgcaccatcaccgcgcggaacactgggtagtggtcgcgggaacggcaaaagtcaccattgatggtgatatcaaactgcttggtgaaaacgagtccatttatattccgctgggggcgacgcactgcctggaaaacccggggaaaattccgctcgatttaattgaagtgcgctccggctcttatctcgaagaggatgatgtggtgcgcttcgcggatcgctacggacgggtgtaa

SEQ ID NO: 462801 - DNA, 1122 bp, Shigella boydii
atgtcaaaagtcgctctcatcaccggtgtaaccggacaagacggttcttacctggcagagtttctgctggaaaaaggttacgaggtgcatggtattaagcgtcgcgcatcgtcattcaacaccgagcgcgtggatcacatttatcaggatccgcacacctgcaacccgaaattccatctgcattatggcgacctgagtgatacctctaacctgacgcgcattttgcgtgaagtacagccggatgaagtgtacaacctgggcgcaatgagccacgttgcggtctcttttgagtcaccagaatataccgctgacgtcgacgcgatgggtacgctgcgcctgctggaggcgatccgcttcctcggtctggaaaagaaaactcgtttctatcaggcttccacctctgaactgtatggtctggtgcaggaaattccgcagaaagagaccacgccgttctacccgcgatctccgtatgcggtcgccaaactgtacgcctactggatcaccgttaactaccgtgaatcctacggcatgtacgcctgtaacggaattctcttcaaccatgaatccccgcgccgcggcgaaaccttcgttacccgcaaaatcacccgcgcaatcgccaacatcgcccaggggctggagtcgtgcctgtacctcggcaatatggattccctgcgtgactggggccacgccaaagactacgtaaaaatgcagtggatgatgctgcagcaggaacagccggaagatttcgttatcgcgaccggcgttcagtactccgtgcgtcagttcgtggaaatggcggcagcacagctgggcatcaaactgcgctttgaaggcacgggtgttgaagagaagggcattgtggtttccgtcaccgggcatgacgcgccgggcgttaaaccgggtgatgtgattatcgccgttgacccgcgttacttccgtccggcagaagttgaaacgctgctcggcgacccgaccaaagcgcacgaaaaactgggctggaaaccggaaatcaccctcagagagatggtgtctgaaatggtggctaatgacctcgaagcggcgaaaaaacactctctgctgaaatctcacggctacgacgtggcgatcgcgctggagtcataa

SEQ ID NO: 462802 - DNA, 549 bp, Shigella boydii
atgcaagatttaagcggtttctcggtgccgaaagggttccggggcggcaacgctattaaagtgcaattatggtgggcagtacaggcaacaatatttgcctggtcgccacaagtattgtatcgctggcgggcttttttattacgtttattcggagcaaaaataggaaaaaacgtagttattcgtccgtcagtaaaaattacctatccgtggaaattaaccttaggtgattacgcgtgggtcggcgatgacgtcaatttatataccctcggtgaaataaccattggcgcacattcggtgatatcgcaaaaaagttatttatgcaccggtagccacgaccatgcaagtcaacatttcaccattaacgccacgcctattgtgattggcgagaaatgctggctggcaaccgatgtctttgttgccccaggcgtcacaatcggcgacggcaccgtcgtgggtgcacgaagcagtgtttttaaatcgcttccggcaaatgtggtttgccgggggaatcccgcagtggtgatacgcgaacgcgttgaaactgaataa

SEQ ID NO: 462803 - DNA, 747 bp, Shigella boydii
atgttgcttagcataatcactgtcgcgtttcgtaacctcgaagggatagtcaaaacacatgcctcgctggcgcatctggcgcaggtggaagatatcagcttcgaatggattgttgtcgatggcggttccaacgacggcacccgtgagtatctggaaaatctcaatggtatctttaacctacgctttgtcagcgagccagataacggtatctacgacgccatgaacaaaggcattgcgatggcacaaggcaagttcgcgttgtttctcaattcgggcgatatttttcatcagaatgccgcaaattttgtccgtaagttaaaaatgcaaaaagataacgtgatgatcaccggcgatgcgctgctggattttggcgacgggcataaaattaaacgtagcgccaaaccgggctggtatatttatcacagcctgcccgccagtcatcaggcgatatttttccctgtatccggcttgaaaaaatggcgttatgacctggaatataaagtttcttccgactacgcgctggcagccaaaatgtataaagccggttatgcatttaaaaaactcaatggcctggtgtctgaattttccatgggtggggtatctaccaccaataatatggaattgtgtgctgacgcgaaaaaagtccaacgacaaatattacatgtgcctggcttttgggctgaattatcctggcatttacgccaacgtactacctcaaagacgaaagccttatataacaaagtctga

SEQ ID NO: 462804 - DNA, 312 bp, Shigella boydii; identical to SEQ ID NO: 457798

SEQ ID NO: 462805 - DNA, 999 bp, Shigella boydii
gtgccgtattttcaattatcattcagggatacaggtattgatacctacgtgttgattgtgggggagtctgtacgtgtcgacaatatgtctttgtatggatatacacgctctacgacaccgcaagttgaagcacaaagaaaacagatcaaactgtttaatcaagcaataagcggcgcaccttacactgcgctgtcggttcccctttctttaactgctgattctgttttgagtcatgacattcataattaccccgacaacattattaatatggctaatcaagcaggatttcagactttctggctaagctcgcaatccgcttttcggcagaatggtacagcagttaccagtatcgccatgcgcgccatggaaacagtttatgtcagaggatttgatgaattgttgttgccgcatttatcgcaagcattacagcaaaatacgcagcaaaagaaactgattgttcttcatttaaatggaagccatgaaccggcttgtagcgcctatccgcaatccagcgccgtgtttcaaccgcaggacgatcaggatgcctgctatgacaactccattcattacacagatagtttgctaggtcaggtttttgaattattaaaagatcgccgcgcctcggtcatgtattttgccgaccacggcctggaacgtgaccctacgaagaagaacgtctattttcatggaggcagggaggctagccagcaggcatatcatgtcccgatgtttatctggtatagccccgttcttggggatggcgtggatcgcacaacggaaaacaacatcttttcgacagcttacaataattaccttattaatgcgtggatgggggtaacaaagccggaacagccgcaaacgcttgaggaagtgattgcacactataaaggagactcacgggttgtggatgcaaaccatgatgttttcgattatgtgatgttcagaaaggagtttacagaggataagcaaggtaaccccccccctgaagggcagggttga

SEQ ID NO: 462806 - DNA, 354 bp, Shigella boydii
atgtcaccaacgattgtggtgaaagacggtaaaacctggctggtcaccggtagccctggcgggagccggatcatcactacagtgctgcaaatggtggtgaatagcatcgattatggcatgaacgtcgccgaagcgaccaatgcgccgcgtttccaccatcagtggttgccggacgagctgcgtgtcgaaaaagggtttagcccggatacgctcaagctgctggaagcaaaaggtcagaaagtggcgctgaaagaggcgatgggcagtacacaaagcattatggttgggccggacggtgagttgtacggcgcatccgacccgcgctcggtggatgatttaacggcggggtactaa

SEQ ID NO: 462807 - DNA, 1071 bp, Shigella boydii
atggcaggactgaaattacaggcagtaaccaaaagctgggatggcaaaacccaggtcattaaaccgctgacccttgatgtggctgatggcgaatttatcgtgatggtcgggccgtctggctgcgggaaatcgacgctgctgcgtatggttgccgggctggagcgggtgaccgaaggcgatatctggatcaacgaccagcgcgtgactgaaatggagccgaaagatcgcgggattgcgatggtgttccagaactacgcgctttatccgcatatgagcgtcgaagaaaacatggcgtgggggcttaaaattcgcggcatgggcaagcagcaaattgccgagcgcgttaaagaagcggcgcgcattctggtgctggacggtctgctcaaacgtcgcccgcgtgagctatccggcggtcagcgtcagcgtgtagcgatgggccgcgcgattgtgcgcgatccggcggtgttcctgtttgatgagccgctctctaacctcgatgccaagctgcgcgtgcagatgcgtcttgaactgcaacagttgcaccgtcgcctgaaaacgacttcactctacgttactcacgatcaggttgaagcgatgacgctcgcccagcgagtaatggtgatgaacggcggcgttgccgaacagattggcacaccagttgaagtctacgaaaagcccgccagcctgtttgtagcgagttttatcggcagtccggcgatgaacctgctgacaggccgcgtgaataacgaaggcacgcatttcgaactggacggcggtattgagctgccgctaaacggtggctaccgtcagtatgccgggcgtaaaatgactctcggcattcgcccggaacatattgtgctaagctcgcaggcagaaggcggcgtaccgctggtgatggacacgctggagatcctcggcgcagataacctggcgcacggacgctggggcgagcagaagctggtggtgcgactggcgcatcaggagcgcccgacggcaggcagcacgctgtggctgcatctggcggaaaatcagctgcatctttttgatggtgaaacaggacaacgagtatga

SEQ ID NO: 462808 - DNA, 213 bp, Shigella boydii; identical to SEQ ID NO: 13195

SEQ ID NO: 462809 - DNA, 687 bp, Shigella boydii
atgaccccaataaaaatatttatgactattgctgatttcaaacggcctaaattggagctcccaaacggggcaaacaaactactactgcactcttgctgtgctccatgttccggtgaagtgatggaggcgcttcaggcctcgggaatcgactacaccatctttttctacaacccgaacattcatcctcagaaagagtatttaattcgtaaggatgaaaatattcgctttgctgaacaacacggcgtgccgtttatcgatgctgattacgacaccgacaactggtttgaacgtgccaaaggaatggaatgggagcctgagagggggatccgttgtaccatgtgttttgacatgcgttttgagcggacagcgttgtacgctgctgaaaatggtttcagtgtgatcagcagttcactgggcatttcacgctggaaaaatatgcagcaggttaacgagtgtgggcggcgagctgttgcgcattatccgggtatggtgtactgggattataactggcgcaagcagggcggctcgtcccgtatgattgaaatcagcaagcgcgaaaaattctatcagcaggaatattgtggctgtgtgtattctctgcgcgataccaatctacaccgcaaatctcagggacgccctcttatcaaaattggccaactccactacggaaaagaagagaaggagtga

SEQ ID NO: 462810 - DNA, 771 bp, Shigella boydii; identical to SEQ ID NO: 17370

SEQ ID NO: 462811 - DNA, 747 bp, Shigella boydii; identical to SEQ ID NO: 7054

SEQ ID NO: 462812 - DNA, 963 bp, Shigella boydii; identical to SEQ ID NO: 7055

SEQ ID NO: 462813 - DNA, 426 bp, Shigella boydii
atgaaaatcaagcatgaacacatccgcatggcgatgaatgcctgggcgcgtcctgatggcgaaaaagttccagcagctggaataacccaggcttattttgagttgggtatgacgttcccagaactgtatgacgacagccatccggaagccctggctcgcaatacccagaaaattttccgctgggtagagaaagacacccctgatgctgttgaaaaaatgcaggctctgttaccggcgatcgaaaaggcgatgccgcctttgctggtggcccgtatgcgcagccacagttctgaatattaccgtgagatcgtcgaacggagggatcggctggtgaaggatgtcgatgattttgttgcgtcagcggttgttttgtatgaccagatgaatcgcggcggcccggcagggaatgctgtggtgatgcactaa

SEQ ID NO: 462814 - DNA, 282 bp, Shigella boydii
atggaagaattaagaatatttctcaattctctttcgtcagatgaacagcgtatgtttgcatgcgagtgtggtaccagcatcggttatctaagaaaggcattgagtaaaggtcaagtgttaggggcatcgttatgtgtccttattgagcgagccagtaatggtgaagttacacgtcagcaactaaggccttttgattggatgaatatttggcccgagctggaagataccaaaacgttaacacaaccactttctaggagcttgattcatgaaaatcaagcatga

SEQ ID NO: 462815 - DNA, 474 bp, Shigella boydii
atgtcaatacccacaggttgtttaccttgcggtaatcgcatctattatttacctatggacaaatatgaatttagacgacagcaactcatcaaaattcgtgatgagaaatgcgatggtaaagcggttaacgtggccagaaagatcgggcgcgagccttcttatgtatcaagaatgttgtacccagaggggaaaaagggaaaaaaacggatcgctgatgatatggtggagattatcgaagagtcctttgggttaccccggggatggatggatggtatcgtttcatcatcaacgaacacagcctccagttatgaaacaagggttctaacgccacgacaacgtatttttttagatctcttagacgaactgccagaaagtgaagcggataaattattaaaaactcttgaagagaaaaaacagtattacaatatgatctacgaagaaatccgtaaaaagaaagcacaaaacgcatcatag

SEQ ID NO: 462816 - DNA, 234 bp, Shigella boydii
atgacggcagggttcaactttaataactatgcagcaggtttttgttccgctaccccggcgttaaggggaaatgaggtcagcatggatactatcgatcttggcaacagcgaatctctggtatgtggcgtgttccccaaccaggacggtacgttcaccgcgatgacgtataccagaagcaaaacgtttaaaactgaagctggcgcgcgtcgctggttaaccagaaacactgactga

SEQ ID NO: 462817 - DNA, 402 bp, Shigella boydii
atggaatttaaagatttaccagtaccattccaggaaatggcatcgaatgtggttcgctctcaactggcgactcttgacctgagtaccgtagaaaaggaaaccatcgatactatatccggtaacgtgcgtcgtgcctttataggtctgtatgaagagaagcgcctattcggcggacagaattcgcctgaaaacaagaatcaagcaaatgatgagaagctgaaacacattatcgccttacttttggaagacgcaaaacgtctacagcaactggaaccaaatgcaggcacagaggcccgcatttggattgccatgaaatcactcaaatgtgaaagcagtgattatttcaaaacaacaattaaaactactcaactttcgggagagctactgaagaaattgccataa

SEQ ID NO: 462818 - DNA, 279 bp, Shigella boydii; identical to SEQ ID NO: 11404

SEQ ID NO: 462819 - DNA, 189 bp, Shigella boydii; identical to SEQ ID NO: 17375

SEQ ID NO: 462820 - DNA, 189 bp, Shigella boydii; identical to SEQ ID NO: 17374

SEQ ID NO: 462821 - DNA, 156 bp, Shigella boydii; identical to SEQ ID NO: 461972

SEQ ID NO: 462822 - DNA, 966 bp, Shigella boydii
ttgaaacgccgtcttattattgctgcttctttgttcgtttttaacttatcgtctggttttgcggcggaaaacattcctttttcacctcagcctccagagattcatgccgggtcctgggtattgatggattacaccaccggtcagatcctcaccgcgggtaatgagcatcaacagcgcaatcccgccagcctgacaaagctgatgacgggttatgtcgtggatcgcgctatcgatagtcatcgcattacgccagacgatattgtcaccgtggggcgcgatgcgtgggcgaaagataatccggtgtttgtcggttcttcactgatgtttttgaaagagggcgatcgcgtatcggtacgtgatttaagccgtggtttaattgtggattccggaaatgacgcttgtgttgctctggctgactatattgccggtgggcaacggcagtttgttgaaatgatgaacaactatgccgagaagctgcatctcaaggatacgcattttgaaacagtgcatggtctggatgcacctggccagcatagctcggcttatgatttagctgtgctttctcgtgctatcatccacggcgagcccgagttttatcatatgtacagtgggaaaagtctcacctggaacggtatcacccagcaaaaccgtaacgggttgttgtgggataaaaccatgaatgttgacggcctgaaaacgggtcatacttctggtgccgggtttaatctcattgcttcggctgtagatgggcagcgtcgtctcattgcagtggtaatgggggctgacagtgcaaaaggtcgtgaggaagaggcaagaaaattactgcgttggggcaacaaaactttactacggtgcaaattttgcaccgtgggaaaaaggtcggaacggaacgcatctggtatggcgataaagaaaatatcgacctgggaacggaacaagagttcggtaatgactccaacttattga

SEQ ID NO: 462823 - DNA, 1110 bp, Shigella boydii
atgaaaatttgttatgttataacaaaggctgatgagataggtggagctcaaattcacgtgcgtgatttgtctatacaattagctaaagataataacgaggtttttgtaatagtgggtgaaaatggtgcacttgtagatgaattagtaaataataatatttctgtctacgtattgcctaccttagtcagacaaatcaatcccattaaagatttccaatcaatcctaaaacttcgtaaaatcataaagaaaaataaaccagatttaatatcattacattcttcaaaggctggaatcgttggccgtttggcagcaataggtactgatattcctgtaatatttactgctcatggatgggcttttgcgaatggtgttggaaaaagacaacagaaattatactgtgctattgaaaaaattatgtctccatttgcaaaaaaaattatcactgtttctcagcaagataaagacttagcaattaaatatcgagttgtttcagctgaaaaacaagttgttatacataatggaatgcctgaaattgaaatggtttgtgataataaaaaaattgaatcttatcctacaatcaagctcatatcagttgctcgtttttcagaacagaaagatcataaaacactttttttagcgttaaaagaacttaaagattatgattggtctcttagcttggtcggtaaaggaccattaatagaccactataaaaaatatgcaattgaacttggtatcttcgaacgtattaaatttcttggagagagaagcgatgttgcggatttattatctgagagcaatgtatttttgcttatttctaactgggaaggttttcctcgtagtattcttgaagcaatgagagcaggtttaccagtaattgcatctgatgtaggcgggacatcggaatcagttcttaataataaaacagggtttcttatttctcgaaatgatgtccatactttaaaagaaaagattgaaatcttgattaaaaatgaagcacttcgtaatgaaatggggcggtatgctagagaaatttatctcgcaaactttacttttgattctatgtataataagacagtagcattatataaatctttagttaatatttcataa

SEQ ID NO: 462824 - DNA, 897 bp, Shigella boydii
gtgaaaaatgctactatattagttttatacaaccctaatattaaatatgttattaataacataaatatcatatctgagttaactgacttacttattttaatcgataatactcctgagcatgaaaagagagaaattaacaaaaaaatactactccagtctataagtggttttgacgaagtttattatataggaatgaataatgaggggttgtctaaagcttataatgaaggagtaaaaaagctaaactcatgttgccataaaattggtggggtactgtttcttgatcaagacagtgatgtatctcatgcaacattaaagcaattgtgggatacttataataagttagaggacatctgtgacttaggggttttgggcgcgtatccaattagggttgatggcataggttatagatataatgtaaaaaaagaaaacactaatatattgcctacaaacgttatagaagtaaaacgtgtaattagtagcttttcaatagttccactgagagtattaaatgagttaaatgggttttatgatgatttttttatcgaccatattgataacgattttagtcgacgctgtataaagaaaaataagattgtcgcgatggatttgaatgcgaaatttatacagcgtataggtgaaggctcgattacttttttaggaaagcatattacaccaatatccgcaccttttagacattactatcaggcaagaaatattttattaagcgctaagcgttgtggtgatggaataatatatgccttaccatatcttgtgaaaagatttatcatgatcaatcttcaaggtgtttatgggcataatttaattacaagatataagttttatttgttaggtatattgcatgggattaataatagatcaggaaaattgaaatga

SEQ ID NO: 462825 - DNA, 348 bp, Shigella boydii
ttgctgtcactggctggtggcgacacggcggtgacgattaaagccgctgcccagcaaacttctggcgttaatgccgcaatggcttacggcactgacggtccggtcgcggcgctggggctgcaaaccttaagcgatccgcaaggcgtgcaacctatctacgcgcctgcaccagtggtgcgtgagtcggtgctgaaagagtatccgcaaatggcacagtggctacagccagtcttcgccagcctcgatgcaaaaacattgcagcaactgaatgccagcattgcagtggaaggactggatgccaaaaaagtggctgccgactacctgaaacaaaaagggtgggcgaagtaa

SEQ ID NO: 462826 - DNA, 525 bp, Shigella boydii
atgtttgctctctgtgatgtaaacgcgttttatgccagctgtgagacggtgtttcgccctgatttatggggtaaaccggtggttgtgctatcgaataatgacggttgcgttatcgcccgaaacgctgaggcaaaggcgctgggtgttaaaatgggcgatccttggttcaaacaaaaagatctgtttcgtcgctgtggtgtggtttgctttagcagcaattatgagctttacgcagacatgagcaatcgggtgatgtcgacgctggaagaactatcgccccgcgtcgagatttacagtattgatgaggcattctgcgatctgacaggtgtgcgtaattgtcgcgatctgactgattttggcagagaaattcgcgcaacggtgctacaacgtacccatcttactgttggtgtggggatcgcccagaccaaaacgctggctaagcttgccaatcatgcggcaaaaaaatggcagcggcagacgggggggtggtggatttatcaaatctggaacgccagcgtaaattaa

SEQ ID NO: 462827 - DNA, 300 bp, Shigella boydii
atgaaaataaaaactattttaacgccagtaacctgcgctctgctgataagtttttccgcccatgccgctaacgccgacaattataaaaacgtgattaaccgtactggcgcgccgcagtacatgaaggattacgattacgacgatcaccagcgttttaatccgtttttcgatctcggagcctggcatggtcatctgttgccagacggccctaacaccatgggcggctttccgggcgttgcgctgctgacggaagagtacatcaactttatggccagcaatttcgaccgcctgaccgtctga

SEQ ID NO: 462828 - DNA, 420 bp, Shigella boydii
atgtctgataccaaacgtaatacaatcggcaaattcggcttgctctcgctgacttttgctgccgtttacagctttaacaacgttatcaataataatattgagcttggactggcctcggcaccgatgtttttcctcgcgacgattttttattttattcccttctgtctgatcatcgcagaatttgtttcgttaaataaaaactcagaagccggtgtctacgcgtgggtaaaaagttcgctgggcggacgttgggcatttattactgcctatacctactggttcgtaaacctgttctttttcacctcactgttgccgcgcgttattgcttatgcttcgtatgccttcctcggatacgaatatattatgacgccggttgccaccaccattatcagtatggtgctgttcgccttctccacctag

SEQ ID NO: 462829 - DNA, 468 bp, Shigella boydii
gtgagcgcgtttgatctggcctttttgagcaatcgtgggctttatattccgtcaccgcagctgggagacggatttattgcgtttatcctggctgttgttatggctatagtcctttctgttgggctattccgctttaataaaacataccagataaagaccggacaactgcgccgcacctggccgttcgccgcagtgttgatcatcggtttgcctttactggcgcaatggctttttggcgcagcactacactgggatgtcccagccctacgaggctttaacttccgcggcggaatggttttaattcctgaactggcagccttaacgctggcactttcggtttatacctctgcatttatcgccgagattatccgcgctgggatccaggcagtgccttatggtcaacatgaagcggctcggtcactggggttacgctacgccaggtcattattccccaggcactgcgagtga

SEQ ID NO: 462830 - DNA, 237 bp, Shigella boydii
atgataaaagaaaaaatattatcaatagtggccttttgctatggtatagcgtacagcaaactatctgaagaaactaaatttattgaagatctttctgccgattctctttctctgattgaaatgctggatatgattagttttgagttcaatctacgtatagatgaatctgcattagaacacattattactattggagatcttatttctgtagtcaaaaatagtacaaaatcaatatag

SEQ ID NO: 462831 - DNA, 1902 bp, Shigella boydii
atgcataatgtaaataatactcaagcgccaacattcttatataaggcaacttcaccatcatcaacagaatacagcgagttaaaaagcaaaatatccgatatccatagttcgcaaacttctctaaaaacaccagcatcagtgtctgaaaaagaaaactttgcaacgtcttttaatcagaaatgtcttgattttttattttcttcctcagggaaagaagatgtgttaagaagcatttattccaactcaatgaatgcgtatgccaaaagcgagattctcgaattttcaaatgttttgtactccttagtacatcaaaatggtcttaattttgaaaacgaaaagggacttcaaaaaattgtcgcacagtattcggaactaattataaaagataaattatcccaagattctgcctttggaccatggtcggcaaagaataagaaactccatcaattacgacaaaacattgagcacagacttgcactattagcacaacaacacacatctggtgaagctttatcattgggacaaaaactcctcaatactgaagtatcatcatttatcaagaataatattcttgctgaattaaagttaagtaatgaaactgtttcatctctcaaactagatgatttagttgacgcacaggcaaaacttgcctttgatagtttgcgcaatcaacgtaaaaatactattgatagtaaaggatttggtataggtaaactgtcaagagacttaaatacagtagccgtgtttcctgagctgttgagaaaagtccttaatgatattttagaagatataaaagattcgcatcctatccaagatggcctccctacacctcccgaagatatgccagatggcggaccaacccccggagccaatgagaaaacatcccaacctgtaattcactatcatataaataatgataatagaacttacgataatagagtttttgacaacagagtatatgacaatagctatcacgagaacccagaaaatgatgcacagtctcctacttctcagacaaacgatctattatcccgtaacggaaactcattactaaatccacaaagagcactagttcaaaaagtaacttccgttctaccacactctatatcagatactgtccagacatttgcaaataattcagctttagaaaaggttttcaaccatactccagataattcggatggaataggttcagacctgttaactacgagtagtcaagaaagatctacaaataactctctttctcggggacacaggcctctgaacatacagaactcttcaaccaccccccctctccacccggaaggagtgacaagcagtaatgataactcatcagatacaactaaaagtagcgcttctctttctcatagagtagcttcgcaaatcaataaattcaactcaaacactgattcaaaagtacttcagactgattttttatcaagaaatggagacacatatttaacacgggaaacgatatttgaagcttcaaaaaaagtaacaaactccctaagtaatcttatatctctcattggaactaaatcaggaacacaagaacgagagttacaggaaaaatcaaaggacattacaaaatccacaacagaacacagaataaacaacaaattaaaagttacagatgcaaatacaataaactacgtaacagaaaccaacgcagatacaattgataaaaatcatgcgatctatgaaaaggcaaaagaagtatctagcgccctcagcaaggtattgtcaaaaattgacgatacctctgcagaattacttacagatgatatatctgatttaaaaaataacaatgatattacagctgaaaacaataatatatataaagcagcaaaagatgtaaccacttccctatcaaaagtattaaagaatatcaataaggattaa

SEQ ID NO: 462832 - DNA, 627 bp, Shigella boydii
atgcaaattctaaacaaaatacttccacaggttgaattcgcgattcctcgcccatcatttgattcgttaagtcacaataagcttgtaaagaaaatattatctgtttttaacttaaaacaacgctttcctcagaagaattttggatgcccggtgaatataaataaaatcagggacagcgtcatagacaaaataaaagatagtaattcggggaatcaactattttgttggatgagccaagagcgaacctcttatgtctcttcaatgataaacagaagtatagatgaaatggccatacacaatggagttgttttgacctcagataacaaaaaaaacatatttgcagctattgaaaaaaaattcccggatataaaacttgatgaaaaatcagcacaaacatctatcagtcatacagcactaaacgagattgcctcatctggcctcagagcaaagattttaaaacgttatagcagtgacatggatttgtttaacacacaaatgaaggatcttacaaatctagtatccagttccgtctacgataaaatatttaatgaatcaacaaaagttttacaaatagaaataagcgcagaggttctaaaggctgtataccgtcaaagcaatacaaattaa

SEQ ID NO: 462833 - DNA, 390 bp, Shigella boydii
atgtgtcgcaaactatatgataaactttatgaaataacaggtgcaaagcttgattttaacgataaaaatcaagcctttatattgctcgaagaacaaatacctgtttgtataacagataatgatgaatacatctttttgaccggacttcttaatgaacatgaactttttacagaaaatattattaatccagaacacatactcatccttaactactctttgagtagagattatggttcttctatctgtcttctccctgatactcatcaatgtgttttgaccaagaaacactacaaaaaatatctttcacctgatgaactcattgaatctttgtacgaatttttattttgtattaaactaaccattgcaaacatcacttcagaagtgaactaa

SEQ ID NO: 462834 - DNA, 1485 bp, Shigella boydii
atgattctcaaaattagcaatttcattgacgcaagcaatacaaaagggcctatacgcgttgaagatacagagcatggacctatattggtagcacagaaattcaacctaaaggatctctttttcagaacattaagcactattaatgcaaagataaattcacagatattaaatgaacaactaaaaaattatcgactagcgaatcaaaaatccttattgcttttcctcaagacattagctagcgaaaaatctgcagaaagtgcgtttgccgcctatgaagcagtcaaaaattcaattcaacattcttttacaggtaaagacatcaaattaatgttgaataccgcagagagttttcatggcatcggtacagccaaaaatcttgaaagacatttagtgtttcgttgctggggaaatagaggcataacccatttagggcataccagtatcagtataaaaaacaatttactacaggaaccaactcatacctatctcagctggtatcccggcgggaatgttacaaaagatacagaaataaactacctttttgaaaaacgctcaggttacagtgtcgatacctataaacaagacaaactaaatatgatttcagaccaaacagccgaaagacttgatgcaggccaagaggttagaaacttattaaattcaaaacaagatcaaaataacaacaaaaaaatattttttcccagagctaatcaaaaaaaagacccctatggttattggggggtcagtgctgataaagtatacattccattatcaggtgataataaaacaaaggatggtaaaatcagctataacctttttggccttgatgaaacaaacatgtcaaaatttatatgccaaaagaaagcagatgctttcagacaattggcaaattataaattaatcagtaaatctgaaaactgtgctggtatggcacttaatgttcttaaagcaggaaattctgaaatatactttccactccctgacgttaaattggttgctacacctaacaatgtatacgcgtatgcaaataaagttaggcaacgcattgaaagtctcaatcagtcttataacgagataatgaagtatattgaatctgattttgatctttccagattgactcaattacgacgtagctatcttaaaagtttcaataaaattaaccttatccacaccccaaaaacattcaagcctttatcaatttcactttacaaacatcctactgaaaatgtatcttcagaagactttgatgcggtcatcaacgcttgccactcatacttagtaaaatcagcacccagcaatatgtctcgtgtattaaacgaattaaaaaccggagcaacagataaaaaagaagaaattatcgaaaagtcaataaaaactattgattattacaattctcttaaatcgccagatcttggaaccaaactttacattcacgacttattacaggtcaataagcttttattgaataactctcattctaatatatag

SEQ ID NO: 462835 - DNA, 1617 bp, Shigella boydii
atgcacataactaatttgggattgcatcaggtttcatttcaaagcggagattcctataaaggcgcagaagaaaccggaaaccaaaaaggtgtaagcgtgatttcatatcaaagagttaaaaatggagagagaaataagggggtcgaagcgcttaatcgattatatttacagaaccaaacaagcttaacagggaaaggccttttgtttgcgcgtgacagagctgcagttttttacgaggcaataaagttggcaggtggtgatacgtcaaaaattaaagccatgatggaacaattagatacctataaacttggtgaagttgataaaagaaatattaatgagcttaataaagtaataagtgaagagataggagcacagctaggcattaaaaataaaaaggaattgcaatcggaaataaaacaaatatttactaattatttaaataataagaattgggaaccgatcaacaaaaatattaattatcatgggaaaaattatggttttcaattaacacccgcctctcatatgaagatagggaataaaaatatatttgtcaaagagtataatggaaaaggaatttgttgtgcttctacgagagagagtgagcatattgcgaatatgtggctttcaaaagtggtggatgacgaggggaaggaaattttttcgggtatcagacatggagttatatcagcctatggattgaaaaaaaactcatctgaaagagctgttgcagctcgtaataaagctgaggagttagcaagcgcagcattatatagcagacaagaattattatcacaggctttgtctggtaaaacagtagatttaaagattgtttcgacttctcttctgacgccgaccagtttaactgggggagaggagagtatgttaaaagatcaggtaaaggcattaaaagggttaaactctaaaaggggggaaccaacgaaattattaattcggaatagtgatggtcttctgcaagaagtaaaggttaatctaaaagtggtgacatttaactttggtgtaaatgaattagcgctaaaaatgggcttaggctggaggaatgttgacaagcttaatggtgaatcaatatgttctttgttgggggataatttcctcaaaaatggtgtgattggaggttgggctgcagaagctatagaaaaaaatccaccatgtaagaatgatgtgatatatctggctaaccagataaaagagattgtaaacaagaagttacaaaaaaatgataatggagagccgtataaattgtcacaaagaatggctctattggcttatactataggtgctgtaccttgctggaattgtaagagtgggaaggacagaacaggtatgcaggatgctgaaattaaaagagaaataataagaaaacatgaaacagggcagttttctcaattaaatagtaaattatcctcagaagagaaaagattattttctactattctaatgaatagtggtaatatggaaatccaagagatgaatactggtgtgcctggaaataaagttatgaaaaaattaccgctatcttcgttagagctgtcttatgctgaaagaataggggaccccaaaatatggaatatggtgaaagggtattcgtcatttgtataa

SEQ ID NO: 462836 - DNA, 363 bp, Shigella boydii
atggaagatttagcagatgttatttgccgagccttgggtatcccttcaattgataccgatgatcaagcaatcatgcttgatgatgatgtgttaatatatattgaaaaagaaggagattcaataaatttattatgccctttttgtgtattgcctgaaaatataaatgatcttatatatgcgttgagcctaaattactcagaaaagatatgtttagctactgatgatgaaggtggaagtctaattgcgcgattagatcttaccgggataaatgaattcgaggatatatatgttaatacagaatattatatttcgcgtgtgcgttggctgaaggatgaatttgcgcgaagaatgaaggggtattaa

SEQ ID NO: 462837 - DNA, 459 bp, Shigella boydii
atgtcccgtttcgtatttatttttctgtgttttatcccatatttagggagagctgattgttgggataaggctggtgaaaggtacaacattccatcgagtttgttaaaagcgattgcggaaaaagaatccggatttaataaatttgcagtcaatgttaataacaatggaagtaaagattatggtataatgcaaataaatgactttcattctaaaagacttagagaaatgggatatactgaggaaatgctaattagtcatccatgtctttctgtacattatgcagcaaagttattaaatgagtttatgctgatgtatggaagagggtgggaggctgttggtgcctataatgcaggaacatctccgaaaaagaaaaaagaaagattaaagtacgcagaggatatctataaacgctatttgcggatagcagcagagagcaagcagaataatcgaaggatataa

SEQ ID NO: 462838 - DNA, 294 bp, Shigella boydii
atgaattacatttatccagtcaatcaggttgatattatcaaagccagtgattttcaatctcaagagatatcaagcctggaagacgtcgtgtcggctaaatatagtgatattaagatggatacagatattcaagtatcacaaataatggagatggtaagcaatccagaatcattaaacccagaatctttggccaagttacagacgacgctctcaaattattcaataggagtatcattagctggcacgttagcaagaaaaacagtttcggctgttgaaactttattaaagtcttaa

SEQ ID NO: 462839 - DNA, 837 bp, Shigella boydii
atggaagaaccgcactggttgaaagcgcactacgacaagctgaattatcaggattacagctactactcagcaccatcgtgcggtaattgtgacgacacttgcgcgtctgaacctggcgcggtgcagcaaactggcgcgaacgcctttttaagtaaagaggtggaggcggcgtttgagcagttgggcgttcccgtgcgggaaggcaaagaggtggcggtggatgccattttcgactctgtttcggttgccactacttatcgcgaaaaactggcggagcagggaattattttctgttcctttggtgaggcgatccacgatcacccggaactggtgcgtaaatatctcggcaccgtggtgccggggaatgacaacttctttgccgcgcttaatgcggcggtagcctctgacggtacgtttatttatgtgcctaaaggcgtgcgctgcccgatggaactttccacctattttcgcattaacgcggaaaaaaccgggcagtttgagcgcaccattctggtggccgacgaagacagctacgtcagctacattgaaggctgttccgctccggtgcgtgacagctatcagttacacgcggcagtggtggaagtcatcatccataaaaacgccgaggtgaaatattccacggtacaaaactggttccctggcgataacaacaccggcggtattctcaacttcgtcaccaagcgtgctttgtgcgaaggcgaaaacagcaaaatgtcatggaccaatcagaaaccgggtccgcgattacgtggaaatatcccagctgcattttgcgcggcgataactccattggtgagttttactcagtggcgctga

SEQ ID NO: 462840 - DNA, 783 bp, Shigella boydii
gtgccaaaacctggtacgacgataactattccttcacaactgttattacctgatgcaccgcgtcaggggattatcgttaaccttgcagagctgcgcctttattattatccgccgggagaaaatatcgtgcaggtttatccgataggtattggcttgcaggggctggaaacgccggtgatggaaacgcgtgtggggcagaaaatccctaatccaacctggacgcctacggcaggcattcgtcaacgttcgctggagcgtggcattaaattactgccagtcgttcctgccggaccaaataacccgctaggacgttacgcactgcgcttcgcgcatgataatggcgaatacctcattcatggtaccagtgcgccggacagcgtcggtttgcgcgtcagttcgggctgtattcgcatgaatgcaccggatattaaagccttattctccagcgtgcggacgggaacgccggtgaaagtgatcaacgaaccggtgaaatattccgtggagcctaacgggatgcgttatgttgaagtacatcgaccactatcggcagaagaacagcagaacgttcagacaatgccatacacactgccagcaggctttacgcaatttaaagacaataaggctgtagatcagaagttagtcgataaagcgttgtatcgtcgggcagggtatccggtttcggtgagcagtggagcaactcccgcagccagcaatgcgccttcagtagagtcagcgcagaatggtgaaccagagcaagggaatatgttacgcgcgaggcagtag

SEQ ID NO: 462841 - DNA, 321 bp, Shigella boydii
atgaaagcggtatctcgcgttcacatcaccccgcatatgcactgggatcgagagtggtatttcaccaccgaagagtcacgtattctgctggtcaataatatggaagagatcctgtgccgactggaacaggacaacgaatacaaatattacgtactcgacgggcaaacggcgatcctcgaagattatttcgcggtgaaaccggaaaacaaagaccgtgtgaagaaacaggtagaagccggcggtaatgactccaacttattgatagtgttttatgttcagataatgcccgatgaccttgtcatgcagctccaccgattttga

SEQ ID NO: 462842 - DNA, 210 bp, Shigella boydii
atgacggatggctggccgctgtatgaatcacgcctgaagggaaagctgcacgttatcagcaagcgttacactcagcgcattgagcgacataatctgaatctgagacaacatctggcaaggctgggacggaagtcactgtcgttctcaaaatcggtggagctgcatgacaaggtcatcgggcattatctgaacataaaacactatcaataa

SEQ ID NO: 462843 - DNA, 288 bp, Shigella boydii; identical to SEQ ID NO: 462736

SEQ ID NO: 462844 - DNA, 189 bp, Shigella boydii; identical to SEQ ID NO: 459866

SEQ ID NO: 462845 - DNA, 546 bp, Shigella boydii; identical to SEQ ID NO: 459831

SEQ ID NO: 462846 - DNA, 930 bp, Shigella boydii
atgacagtgtcagcagatatgccgcttgttggctgtgttttgactttgtcactgttggttttgcttatatttatggcagcaaaaggactgcgttatcaggccttgatgactagtctcaacggcgtaagatttagttttaattgctctatgaaagggttctggtgggtaacctttttcttgccgattttaatggccattgggatggggactgttttctttatctcgacaaagatgctacatgccaatagttcaagtagtgttattatatctgtggttctgatggcaatagttggtattgtttccattggtatttttaatggtactttatatagcctggtaatgagttttctctggagcaataccagtttcggtatacatcgtttcaaggtgaaattagatactgcgtattgtataaaatatgccatcctcgcatttttagctttattaccttttctcgctgttgctggttatattatcttcgaacaaatattaaatgcgtatgatagttctgtgtatgcaaatgatgatattgagaatttacagcaatttatggaaatgcaacgtaaaatgataatcgcgcagttaatctattattttgggattgctgttagcaccagttatttaacggtgtcgttgcgaaatcattttatgagcaacctgtcactgaatgatgggcgtattcgttttcgctcaactttaacgtaccacggtatgctttatcgcatgtgtgcgttggtagtgatatccgggattacgggcggtctggcttatccactgctgaaaatatggatgattgactggcaggcaaaaaatacgtatttgctgggcgatttggatgaccttcctttaatcaataaagaagaacaaccagataaaggcttcttagccagtatttcacggggaattatgccttctttaccatttctgtaa

SEQ ID NO: 462847 - DNA, 210 bp, Shigella boydii; identical to SEQ ID NO: 19699

SEQ ID NO: 462848 - DNA, 606 bp, Shigella boydii
ttgattgccctgatctcgcgcctggatgtgcctgcttatcgggccgaactgatagccgaaagcctgtgggagtttattgacgaggaccgcagcgtgcagacacgtctgggccgtgaagacagcgagtatctcgcccgttcggtgccgttctacgccgccaatcaaccgctgtctgatatcagtgagatgcgcgtggtacagggaatggacgccgggctttatcaaaaactgaaaccgctggtctgtgcgctgccgatgatccgccagcaaatcaacatcaatactttagacgtcacgcaaagtgtgattcttgaggcgctgtttgacccgtggttaagccccgttcaggcgcgggcgttattacaacaacgtccggcgaagggctgggaagatgtcgatcagtttcttgcacagccgctacttgctgacgtcgatgagcgtactaaaaaacagctaaaaaccgtcctgagcgtggacagcaattacttctggctgcgttcagatatcaccgtgaatgagattgaactgacgatgaactcgttaattgtccgcatgggcccacaacacttttcggttctctggcatcagacaggagaaagtgagtga

SEQ ID NO: 462849 - DNA, 246 bp, Shigella boydii
atgagcttgctgtcactctttgacgtggtgatatggatgacggatggctggccactgtatgaatcccgcctgaagggaaagctgcacgtaatcagcaagcgatatacgcagcgaattgagcggcataacctgaatctgaggcagcacctggcacggctgggacggaagtcgctgtcgttctcaaaatcggtggagctgcatgacaaagtcatcgggcattatctgaacataaaacactatcaataa

SEQ ID NO: 462850 - DNA, 729 bp, Shigella boydii
atgatgtccctggcgtggccattatttcgcgttacggaacaggcagcgttggctgcctggccgcaaaccggatgtggcgacaaaaataaaattgatggcctggcggtcaccgcgatgcgccaggcattaaacgacgtcgcttttcgtggacgagtggttatcggcgaaggagaaattgaccatgcgccgatgctgtggattggcgaagaggtgggcaaaggcgatgggccagaagtcgatatcgcggttgatcctattgaaggcacgcggatggtggcgatggggcagagcaatgcgctggcggtcatggctttcgcccctcgggatagcctgttacatgcgcccgatatgtatatgaaaaagctggttgttaatcgactggctgccggggtgattgatctgtctttgcctctggcggacaacttgcgtaacgtggcgcgggcgttaggtaaaccgctggacaagctgcgcatggttacgctggataaaccgcgcctgagtgccgcgattgaggaagcaacacagctgggcgtgaaggtttttgccctgccggatggcgatgtcgccgccagcgtgctgacctgctggcaggataatccttacgatgtgatgtacaccatcggcggtgcgccagaaggcgtgatttctgcctgtgccgttaaagcattaggcggggatatgcaggccgagctgattgacttttgtcaggctaaaggggattacacgtaa

SEQ ID NO: 462851 - DNA, 1668 bp, Shigella boydii
ttgattgtattgttaccattgatagttaatgctaataatattgactctcatttattagaacaaaatgacatagcgaaatatgttgctcaaagtgatacggtaggatctttttttgaacgtttttctgcgttattaaattatcctattgttgttagcaaacaagctgcaaaaaagagaatatctggggagtttgatttatctaatccagaagaaatgcttgaaaaaatgacattacttgtgggactcatatggtataaagatggaaatgcattatacatatatgactctggagaattaataagcaaagttattttgctggagaatatatcacttaattatcttattcagtatctgaaggatgctaacctttatgatcacagatatcctataagaggaaacattagtgataaaacattctatatatctggtcctccggcattggttgaactggtagctaatacagcaactttgcttgataagcaggtttcttctattgggacagataaagttaattttggggttataaaattaaaaaatacatttgttagtgacagaacttataatatgagaggggaggatattgtcatcccaggggtggctactgttgtagaacgtttattaaataatggtaaggctctgagtaacagacaagccaaaaatgatccgatgccaccctttaatattacacagaaagtatctgaggatagtaatgacttttcatttagttcagttaccaatagttctatattagaggatgtatcacttattgcatatccagaaaccaattctatattagtcaaaggtaatgatcagcaaatacagattattcgcgatattatcactcagttagatgtagccaaacgacatatagaattatcattatggataatcgatattgataaatctgaattaaataaccttggcgttaattggcaaggaacggcttcatttggtgattcgtttggtgcatcatttaatatgagctcatcagcatcgataagcacgttggacggcaataagtttattgcttcagttatggcattaaatcagaaaaagaaagcaaatgtagtttcaaggccggtgattttgacacaagagaatattccggctatatttgataataacaggactttttatgtgtcattagttggtgagcgcaattcttcgttggagcatgttacgtatggaacattgataaatgttatacctcgcttttcatctcggggacaaattgagatgtctttaacgatagaggatggaacaggaaatagtcagtcaaattacaattataataatgaaaatacatctgtccttccagaagttggaaggaccaaaatcagtacaatagcgagagttccacaaggcaaaagtttgttgataggtggttatacgcatgaaacgaactctaacgaaatagtatctattccttttctctcctctattcctgtaatcggtaatgtgttcaagtataaaacaagtaatatcagtaatattgtaagggtttttctgattcaaccccgtgagataaaggagtcaagttattataatactgcagaatataagagcctcatatctgaaagagaaatacaaaagactacacaaataatcccatctgaaactactttgctggaagacgaaaaatcattggtttcatacttaaattactaa

SEQ ID NO: 462852 - DNA, 1068 bp, Shigella boydii
atgcttgatgttaaaaatacaggagtttttagctctgcattcattgataagttgaatgcaatgacaaattcagatgatggagatgagactgctgatgcagagcttgattctggcttggctaatagcaagtatattgactcatctgatgagatggcttccgctctttcgtcatttataaacagaagagaccttgagaaactgaaaggaacaaatagtgatagtcaggaacgtattttagatggggaagaagatgaaattaatcacaagatttttgatttaaagagaactttaaaagataaccttcctctagatcaggattttatagacagactaaagagatattttaaagatccaagtgatcaagtcttagcattaagggaacttttgaatgaaaaagatcttactgctgaacaagtcgaatcattaactaaaattattaatgagataatatcaggtagtgaaaaaagtgttaatgctggaataaattcagctatacaggctaaattatttggcaacaaaatgaaacttgaaccacagcttttgcgtgcatgttatcgtggttttatcatggggaacatatcaacaacagatcagtatatagaatggcttggtaattttggttttaatcacagacatacaattgtgaattttgtagagcagtcactgattgtagacatggattctgagaaaccgagctgtaatgcttatgagtttggttttgtgttatctaaattaattgcaattaagatgattagaacttcagatgtaatttttatgaagaaactggaatcctcaagcttgctaaaagatggcagtttaagtgcagagcagctattgctaactttattatatatttttcaatatccaagtgaaagtgagcaaattcttacttctgttatagacgtatcacgagccagtcatgaggattctgtagtgtatcaaacatatctatcttctgttaatgaaagtcctcatgatatatttaaaagtgaaagtgaaagagaaattgcgatcaatattctacgagagcttgtcacaagtgcatacaagaaagagctttctagataa

SEQ ID NO: 462853 - DNA, 402 bp, Shigella boydii
atgagtaacattaatttagttcaattagttagagatagtcttttcacgattggttgtcctccatcaattattacagatttagacagccattcagcgattaccatttctttggatagtatgcctgctattaatatagctcttgtcaatgagcaggttatgttatgggctaatttcgatgcaccaagtgatgtaaaacttcagtcatctgcttataacatattaaatttaatgttaatgaactttagttatagcattaatgagctggtagagcttcatcgttctgatgagtacttacagttaagagttgttattaaagatgactacgttcacgatgggattgtttttgcagagattctgcatgagttttatcagaggatggaaatcttaaatgaggtcttataa

SEQ ID NO: 462854 - DNA, 1293 bp, Shigella boydii
atgagctatataaaattgctcactcaattatcttttcctaatagaatctcggggccaatcttggaaacaagtcttagtgatgtttcgattggtgagatttgtaacattcaggctggaattgaaagtaatgaaattattgcaagagctcaggttgtaggatttcatgatgaaaaaacaatattaagcttgattggaaattctcgtggactttcacggcaaacgttgattaagcccactgcccagtttcttcatacgcaagtcggccgtggattattgggagcagtagtcaatcctttaggggaggttactgataagtttgctgttacggataacagtgaaattctttatcgacctgtagataatgctcctccgctatatagtgaaagggctgcaattgagaagccttttttaacaggtgttaaggttattgattctttactcacgtgtggtgaaggacagcgaatggggatttttgcgtcagctggttgtggcaaaacttttctcatgaatatgctcattgaacatagtagtgctgatatatatgttattgggttaattggtgagcgaggtcgagaggttacagaaacggttgattatttgaaaaactctgagaaaaaaagcaggtgtgttttagtatatgcaacttcggattactcttcggttgatcgttgtaatgctgcatatatagccactgctatagccgaattttttaggactgaaggacataaagtagcgctttttattgattcattaacaaggtatgccagagcattacgtgatgtggccttagccgctggagaatcacctgccagaagaggctatccggtttcggtttttgatagcttacccagacttcttgaaaggccaggaaagttaaaggcaggtggctctattactgcattttacactgttcttttggaggatgatgattttgctgatccattagctgaagaggtaagatccattttagatggacatatatatttgagcagaaatctagcccaaaaaggacaatttcctgcaattgattccttaaaaagtataagcagggtatttacacaggttgttgatgaaaaacatcgtattatggccgctgcatttcgggagctactttctgaaatagaagagctaaggacaattattgactttggtgaatacaaaccgggggagaatgcctctcaggataaaatctacaacaaaatatctgttgttgagagttttctgaagcaagattatcgactcggttttacttatgagcagacaatggagcttattggtgaaacaattagataa

SEQ ID NO: 462855 - DNA, 339 bp, Shigella boydii
gtggaggcattagataaaaggattatatacttcctgcaactggagaatgacttggaacctataggcgctcagagtgttagtcagcttttcaatacaagacgtaagatcgctatagtaaaaaagcatattatccaatatcagtctgaacgaattcttctaaagggaagaattgaagaaattcaaaaagatattgatgaggcaaatgcttctaaaagaaaactgcttcataaagagagtaaaatatgtaaacggattggcttgattaaaagaaataactttgccaaacagttgatacttgatgagttatcacaagaggatatgaagtatggcattagataa

SEQ ID NO: 462856 - DNA, 879 bp, Shigella boydii
atggcattagataatataaacctaaattttagtagtgacaaacagatagaaaaatgtgagaaactatcttcaatagataatattgatagtctcgttttgaagaagaagaggaaggttgaaattcctgagtactctttaattgcatctaactattttactattgataagcactttgaacataagcatgataaaggagaaatttatagtggcattaaaaatgcgttcgaacttagaaacgaacgagcgacatattctgatattccagaatcaatggccattaaagaaaatattttgataccagatcaagatatcaaagcaagggaaaaaataaatatcggcgatatgagggggatcttttcatataataagagtggaaatgcagacaagaacttcgaaagaagtcatacttcttctgtaaaccctgataatctgctagaatctgataatagaaatggtcaaattggtttaaaaaatcatagcttgtctattgataagaatattgctgacatcatttctttactaaatggaagtgttgctaaatcatttgagctgcctgtaatgaataaaaatactgcagacataaccccatccatgtcattgcaagaaaaatcaatagttgaaaatgataaaaatgtttttcaaaaaaatagtgaaatgacttaccactttaaacagtggggggctggacattctgttagtatttcagtggagtctggttcttttgttctaaaaccgtcagatcaatttgtaggaaataaacttgacttaattttgaaacaagatgctgagggtaattacagatttgatagcagtcaacataataaggggaataaaaataatagtacaggatataatgaacagagtgaagaagaatgctaa

SEQ ID NO: 462857 - DNA, 1029 bp, Shigella boydii
atggcaaataaaacagaaaagccgacacctaaaaaactaaaggatgccgcaaaaaaaggacagtcatttaaatttaaggatttaacgacagttgttattattctggtagggacatttactataatatcattcttttccttaagtgatgtaatgctcttatacagatatgtaataattaatgacttcgaaattaatgagggtaaatacttttttgcagtggttattgtcttttttaagataattggcttcccactttttttctgtgttctttcggctgtgttgccaacattggttcaaacaaagtttgttcttgcgactaaagctatcaagattgatttttcagtattaaaccctgttaaagggttaaaaaaaatatttagtataaagacaataaaagaatttttcaaaagcattctgcttcttattattctagcattaacaacctatttcttttggattaatgaccgaaaaataattttttctcaggtgttttctagtgttgatggcttatatcttatttggggggggctgtttaaggatataatattatttttcttagcattttctatttttgttattattcttgactttgtgattgagttcattttatacatgaaagatatgatgatggataaacaggagataaaaagagaatatatagagcaagagggacactttgagacaaagtcgagaaggcgtgagttgcatatcgagattctttcagagcagactaaatctgatatacgtaattcaaaattagtggtaatgaacccgactcatattgcaattggtatttattttaatccagaaatagcgcctgcaccttttatttctctcattgaaactaaccagtgtgccttggctgtcagaaaatatgcaaatgaagttggtataccaactgtgcgtgatgtgaaattagctagaaaactatataaaacacatacaaaatatagttttgttgattttgaacacttggatgaagtcctacgtcttattgtttggcttgagcaggttgaaaacactcattaa

SEQ ID NO: 462858 - DNA, 621 bp, Shigella boydii
gtggcacatatccgcactcgcgaaacatatggaacccggcggctccagacggagctggcagataacggaattatcgtcggtcgtgacagactggcacgtcttcgtaaggagctgaggttgcactgtaagcagaaacgcaagttcagggcgaccacaagctctgaccacaatccgccggttacgccgaatctgctgaatcagaactttacgcccacagcacctaatcaggtctgggtcgcagatataacgtatgttgccacccgggaaggatggctgtatctcgctggcgtcaaagatgtttatacgtgcgaaattgtcggttacgccatgggagagcgcatgacgaaagagttgacgggtaaagccctgtttatggcgctcaggagccagcgcccacctgccgggctaatccaccacaccgatcgaggttcacagtactgcgcatacgattaccgggtcatacaggagcagtctggtctgaaaacatcaatgtcgcgtaaaggtaactgttacgacaacgctccgatggaaatcttctggggaacgctgaaaaatgaaagcctgagccactatcgttttaagagccgggatatttcgtcagcatacgggaaaactgattga

SEQ ID NO: 462859 - DNA, 441 bp, Shigella boydii; identical to SEQ ID NO: 460212

SEQ ID NO: 462860 - DNA, 282 bp, Shigella boydii; identical to SEQ ID NO: 460215

SEQ ID NO: 462861 - DNA, 369 bp, Shigella boydii
atgaacaataacgatctctttcaggcatcacgtcggcgttttctggcacaactcggcggcttaacagtcgccgggatgctggggccgtcattgttaacgccgcgcagtgcgactgcggcgcaagcggcggctgtcatctcgaaagagggcattcttaccgggtcgcactggggggctatccgcgcgacggtgaaggatggtcgctttgtggcggcaaaaccgttcgaactggataaatatccgtcgaaaatgattgccggattgccggattgccggattgccggattgccggattgccggattgccggatcacgtacacaacgcggcgcgtattcgttatccgatggtacgcgtggactggctgcgtaa

SEQ ID NO: 462862 - DNA, 660 bp, Shigella boydii
atgctaagccacagcgccgggacagacctggacaacctcgcgggcaatatgaacacaaagcgcctggttatcactccggcaacggataccaccgatgcagtgatggaaagtgacacctcgctgagactacgggcgcaacgggcatatgacggtctgagtgttgctggcccgtcaggtgcatacgagtattttgcacgcagcgccagcggtctggtacgcgatgcgcgggccatcagcccgtctccggccaacgtgacggtttccatcctgtccactgagggcgacggcacagcaacggaggcgttgcttaataccgttcgcgccgttctgaatgcagaggatacccgcccggtggccgaccgcctgaccgtacagagtgccagaatcgtgacatggcggctgaatgcaaaactgtacttttaccccggcccggaatccgaacctattctggccgcggctgaatcgtcgttcaggaagtggctggctgagcaggggcttatcggtcaggacgtggcgttgtccgccattgctgccgcactgcatgtgcacggtgtgcaacgcgtggagataatcgaacccacacagaatatggccatcagcgacatacaggcggcgcgctgtgagtcattcaccatcagcgaaggtggacgcaatgagtaa

SEQ ID NO: 462863 - DNA, 246 bp, Shigella boydii; identical to SEQ ID NO: 460696

SEQ ID NO: 462864 - DNA, 303 bp, Shigella boydii; identical to SEQ ID NO: 458125

SEQ ID NO: 462865 - DNA, 1389 bp, Shigella boydii; identical to SEQ ID NO: 461802

SEQ ID NO: 462866 - DNA, 1725 bp, Shigella boydii; identical to SEQ ID NO: 460348

SEQ ID NO: 462867 - DNA, 819 bp, Shigella boydii; identical to SEQ ID NO: 461362

SEQ ID NO: 462868 - DNA, 255 bp, Shigella boydii; identical to SEQ ID NO: 460515

SEQ ID NO: 462869 - DNA, 1014 bp, Shigella boydii; identical to SEQ ID NO: 460654

SEQ ID NO: 462870 - DNA, 531 bp, Shigella boydii; identical to SEQ ID NO: 31403

SEQ ID NO: 462871 - DNA, 414 bp, Shigella boydii; identical to SEQ ID NO: 31404

SEQ ID NO: 462872 - DNA, 657 bp, Shigella boydii; identical to SEQ ID NO: 380692

SEQ ID NO: 462873 - DNA, 285 bp, Shigella boydii; identical to SEQ ID NO: 31406

SEQ ID NO: 462874 - DNA, 228 bp, Shigella boydii
gtgcagtggcgggaaacgcaacctccgtttgacgccgcggcggcaaaaaccattctctcagatacccatgacgcagaactgccaatttaccggctggctgccgacgatccggatgaggagaacaccctcgccacggcagttttcaccctcgatgccaaccacgtcaggtggcaaattttcgacattaaccgcgacgatgctaaatttcatggagaagtgcgtgggtga

SEQ ID NO: 462875 - DNA, 816 bp, Shigella boydii; identical to SEQ ID NO: 373406

SEQ ID NO: 462876 - DNA, 837 bp, Shigella boydii
atgttcatgtcgcctgtttttcctgctcattggcacgtttcgcaacctgttctcattgcggacaccttttccagcctcgtttggaaagtttcattgccagacgggactcctgcaatcgtcaagggattgaaacctatagaagacattgctgatgaactgcgcggggccgactatctggtatggcgcaatgggaggggagcagtccggttgctcggtcgtgagaacaatctgatgttgctcgaatatgccggggagcgaatgctctctcacatcgttgccgagcacggcgactaccaggcgaccgaaattgcagcggaactaatggcgaagctgtatgccgcatctgaggaacccctgccttctgcccttctcccgatccgggatcgctttgcagctttgtttcagcgggcgcgcgatgatcaaaacgcaggttgtcaaactgactacgtccacgcggcgattatagccgatcaaatgatgagcaatgcctcggaactgcgtgggctacatggcgatctgcatcatgaaaacatcatgttctccagtcgcggctggctggtgatagatcccgtcggtctggtcggtgaagtgggctttggcgccgccaatatgttctacgatccggctgacagagacgacctttgtctcgatcctagacgcattgcacagatggcggacgcattctctcgtgcgctggacgtcgatccgcgtcgcctgctcgaccaggcgtacgcttatgggtgcctttccgcagcttggaacgcggatggagaagaggagcaacgcgatctagctatcgcggccgcgatcaagcaggtgcgacagacgtcatactag

SEQ ID NO: 462877 - DNA, 804 bp, Shigella boydii; identical to SEQ ID NO: 19906

SEQ ID NO: 462878 - DNA, 816 bp, Shigella boydii; identical to SEQ ID NO: 6090

SEQ ID NO: 462879 - DNA, 852 bp, Shigella boydii; identical to SEQ ID NO: 10372

SEQ ID NO: 462880 - DNA, 840 bp, Shigella boydii; identical to SEQ ID NO: 379997

SEQ ID NO: 462881 - DNA, 207 bp, Shigella boydii; identical to SEQ ID NO: 31408

SEQ ID NO: 462882 - DNA, 213 bp, Shigella boydii; identical to SEQ ID NO: 31409

SEQ ID NO: 462883 - DNA, 291 bp, Shigella boydii
atggccgggctggtcaagcgcttcggtgatgacctcagcaagtgcgactttatcgccgcgcagaagctggccagccggggccgcagtgccgaggaaatcggcaaggccatggccgaggccagcccagcgctggcagagcgcaagcccggccacgaagcggattacatcgagcgcaccgtcagcaaggtcatgggtctgcccagcgtccagcttgcgcgggccgagctggcacgggcaccggcaccccgccagcgaggcatggacaggggcgggccagatttcagcatgtag

SEQ ID NO: 462884 - DNA, 249 bp, Shigella boydii
atggcattcggtacagagcgtccagagattcgtctcctcattaccaccaccgaactgaagtgcaattcggtgatcgagttcactgtcacagaggtcaaccacacgaccacagagacggcactgcccggtgtccctgagccagatatgacgcttgagggaaacacgtgcactgccactgacacgacgctgttcacccttcagaatattcacccttcagaatattcacccgtcgggtattcagtgttttga

SEQ ID NO: 462885 - DNA, 246 bp, Shigella boydii; identical to SEQ ID NO: 460696

SEQ ID NO: 462886 - DNA, 645 bp, Shigella boydii; identical to SEQ ID NO: 460607

SEQ ID NO: 462887 - DNA, 507 bp, Shigella boydii
ttgattgagcgttataaagtaccgctggatgagtacccgaaacgctgcgtcgagcagctggcgaactggcataaagagctggaggagtataaaaacgcctcccggattgatattaaaccgtcacgggaatatgccagcacaatcatgaacgctatctggactggcgagccgagtgtgatttacggcaacgtccgtaacgatggtttgattgataacctgccacaaggatgttgcgtggaagtagcctgtctggttgatgctaatggcattcagccgaccaaagtcggtacgctaccttcgcatctggccgccctgatgcaaaccaacatcaacgtacagacgctgctgaccgaagctattcttacggaaaatcgcgaccgtgtttaccacgccgcgatgatggacccgcatactgccgccgtgctgggcattgacgaaatatatgctcttgttgacgacctgattgccgcccacggcgactggctgccaggctggttgcaccgttaa

SEQ ID NO: 462888 - DNA, 297 bp, Shigella boydii
atgtgggtcaataagtatattgacgattgcactgatgaggatttaaacgatcgtgactttattgcatcagttgttgaccgggctatttttcatttcgcgattaatagtatatgtaatcctggggataataaagatgcgactcccattgaacaatgtacttttgatgtagaaactaagaatggccttccctccacggttcagctattttatgaggaatctaaggataatgaacctttagcgaatatacattttcaagcaataggttctggttttttaacgtttgttaatacctgctag

SEQ ID NO: 462889 - DNA, 294 bp, Shigella boydii; identical to SEQ ID NO: 460208

SEQ ID NO: 462890 - DNA, 246 bp, Shigella boydii; identical to SEQ ID NO: 460696

SEQ ID NO: 462891 - DNA, 246 bp, Shigella boydii; identical to SEQ ID NO: 460696

SEQ ID NO: 462892 - DNA, 1338 bp, Shigella boydii; identical to SEQ ID NO: 460789

SEQ ID NO: 462893 - DNA, 669 bp, Shigella boydii; identical to SEQ ID NO: 460814

SEQ ID NO: 462894 - DNA, 246 bp, Shigella boydii; identical to SEQ ID NO: 460696

SEQ ID NO: 462895 - DNA, 396 bp, Shigella boydii; identical to SEQ ID NO: 461551

SEQ ID NO: 462896 - DNA, 543 bp, Shigella boydii
gtgaaaacgggggctgaagccatccgggcactggccacacagctcccggcgtttcgtcagaaactgagcgatggctggtatcaggtacggattgccgggcgggatgcaggagaaaccgaattatcatcccgtcttaatgagccgctggcaaatggtgccgtgatccacatcgtgccgcgtcttgcgggagcaaaaagtggcggtgtgtttcaggcggtgctgggtgcggcgttgattgctacggcaatctggatgccggggatcagtatcgctttcagtgacattctcttttcaatgggtgcggcgatgacgcttggtggtgtggcgcagatgctggcaccgaaagccagaactccccgtacacagacaacggataacggcaaacagaacacctatttctcctcactggataacatggttgcccagggcaatgtcctgcctgttctgtacggtgaaatgcgcgtggggtcacgtgtggcatctcaggagatcagcacggcagatgaaggggatggtggtcaggttgtggtaattgggcggtaa

SEQ ID NO: 462897 - DNA, 600 bp, Shigella boydii
atggctccggaggactggctgcaggcagagatgcagggtgagattgtggcgctggtccacagccaccccggtggtctgccctggctgagtgaggctgaccggcggctgcaggtgcagagcgatttgccgtggtggctggtctgccggggggcgattcacaagttccgctgtgtgccgcatctcaccgggcggcgctttgagtacggggtgacggactgttacacactgttccgggatgcttaccatctggcggggattgagatgccggattttcatcgcggggatgactggtggcgtcacggtcagaatctctatcttgacaatatggaggctactggtttttaccgtgtcgcactgacagaggcgcagccgggcgatgtgctgctgtgctgttttggttcatcggtgccgaatcacgccgccatttactgcggcgacggtgagctgctgcaccatattcctgaacaactgagtaaacgagagaggtataccgacaaatggcagcgacgcacacactccctctggcgtcaccgggaatggcacgcatctgcctttacggggatttgcaacgatttggccgccgcatcgaccttcgtgtga

SEQ ID NO: 462898 - DNA, 699 bp, Shigella boydii
atgcaggatatccggcaggaaacactgaatgaatgcacccgtgcggagcagtcggccagcgtggtgctctgggaaatcgatctgacagaggtcggtggagaacgttattttttctgtaatgagcagaacgaaaaaggtgagccggtcacctggcaggggaggcagtatcaggcgtatcccattcaggggagcggttttgaactgaatggcaaaggcaccagtacgcggccaacgctggcagtctctaacctgtacggcatggtcaccggtatggtggaagatatgcagagtctggtcggcggaacggtggtccggcgtaaggtttacgcccgttttctggatgcggtgaacttcgtcaacggaaacagagacgccgatccggagcaggaggtgatcagccgctggcgcatcgagcagtgcagcgaactgagcgcggtgagtgcctcctttgtactgtccacgccgacggaaacggatggcgctgtttttccggggcgtatcatgctggccaacacctgcacctggacctatcgcggtgatgagtgcggttatcacggtccggcagtcgcggatgaatatgaccagccgacgtccgatatcacgaaggataaatgcagcaaatgcctgagcggctgtaagtttcgcaataacgtcggcaactttggcggcttcctttccattaacaaactttcgcagtaa

SEQ ID NO: 462899 - DNA, 504 bp, Shigella boydii
atgatgacagaaattctgcttaagcaggcaatggtggggattgtcgggagtatcggcagcgccattggcggggctgttggtggcggcgcatccgcgtcaggcggtacagccattcaggccgctgcggcgaaattccattttgcaaccggaggatttacgggaaccggcggcaaatatgagccagcggggattgttcaccgtggtgaatttgtcttcacaaaggaggcaaccagccggattggcgtggggaatctctaccggctgatgcgcggctatgccaccggtggttatgtcggtacaccgggcagtctggctgacagccggtcgcaggcgtccgggacgtttgagcagaataaccatgtggtgattaacaacgacggcacgaacgggcagataggtccggctgctctgaaggcggtgtatgacatggcccgcaagggtgcccgtgatgaaattcagacacagatgcgtgatggtggactgttctccggaggtggacgatga

SEQ ID NO: 462900 - DNA, 165 bp, Shigella boydii
atgtattaccctgtgacagactatatcgctcttgctctcattattagctttctttttctgacattatttatctgcctgttatgccttaaacatgagcgaataaaaaaaagaaactatcaggcaaaaaaatgcacatattctggagcatggctggaatgcaactga

SEQ ID NO: 462901 - DNA, 1233 bp, Shigella boydii; identical to SEQ ID NO: 460732

SEQ ID NO: 462902 - DNA, 159 bp, Shigella boydii; identical to SEQ ID NO: 460731

SEQ ID NO: 462903 - DNA, 627 bp, Shigella boydii; identical to SEQ ID NO: 460730

SEQ ID NO: 462904 - DNA, 294 bp, Shigella boydii; identical to SEQ ID NO: 461047

SEQ ID NO: 462905 - DNA, 510 bp, Shigella boydii
gtgctggtgctgatgcgcccgttcgattacccgctcaacgcccaggcgcgttttagccagaacctgctggatcagggcagccatcccaccagcgaaaaactgctgtcggtgctgcgcccggcatctggtcacgtcgctgacgcgctggggataaccgagggggagaacgtcatccacctgcgcaccctgcgccgggtcaacggcatcgcgctctgtttaatcgaccactactttgcggacctcaccctttggccgacgctgcaacgcttcgacagcggctcgctgcacgattttctgcgcgagcaaaccgggattgcgctgcgccgcagccagacgcggatcagcgcccgccgcgcccaggccaaagagtgccagcgtcttgaaatcccgaatatgtcgccgctgctgtgcgtgcgcacccttaaccaccgtgacggtgaaagcagcccggcggagtactccgtcagcctgacgcgcgccgacatgattgaattcactatggagcactga

SEQ ID NO: 462906 - DNA, 180 bp, Shigella boydii
atgtggctggccgaaaatgaaggggtgaagttctggctcaatgtgctgactgaactgaaaaaacgcggttggtcgccctaccttttcatcaagccagtagtctgcccaccactgcatcatttctctgcgcttatcgagatactgagcatggttgtaaattcaactaacccagtgcgttga

SEQ ID NO: 462907 - DNA, 246 bp, Shigella boydii; identical to SEQ ID NO: 460696

SEQ ID NO: 462908 - DNA, 1251 bp, Shigella boydii
atgaacaaaatatttaaagttctctggaaccctgcgacagggaattatactgttaccagcgaaacggcaaaaagccgtggcaagaaatctgggcgcagtaagctgttaatttctgcgctggttgcgggtggaatgttgtcgtcgtttggggcattggcgaatgccgggaatgacaacggtcagggtgttgattacggtagtggatcagctggcgacggctgggttgctataggcaaaggggcgaaagcaaatacttttatgaacaccagtggttccagtactgctgtgggttatgacgctatagctgaaggccaatatagctctgccatcgggtcaaaaacccatgcgattggtggtgcatcaatggcctttggggttagtgcaatatcagaaggcgatagaagtatagcactgggtgcctcttcgtattcattgggccaatactcaatggccctcggccgttattcaaaagcattgggtaaattgtctattgctatgggggactcttccaaagcggaaggagcaaacgccattgccctgggaaatgccactaaagctactgagattatgagtattgctcttggcgacaccgccaatgcgtcaaaagcgtattcaatggcgctgggagcaagtagcgtcgcatctgaagaaaacgcaattgccctggggcgtagcagtgtagctagcggtactgacagcctcacatttggcagacaatcacttgccagcgcagcgaacgctattgcgataggtgctgagaccgaagccgctgaaaatgcaactgctattggcaataatgcgaaggcaaaagggactaatagcatggcaatggggttcggaagccttgccgataaagtcaatactatcgcattaggaaatggcagccaggctctggcagataatgcaatcgccataggccagggcaacaaagctgatggcgtggatgccatcgctctgggtaatggtagccagtcgagaggcttaaacaccattgccttaggcacagccagtaatgcaactggtgataagagtcttgcgcttggtagtaatagcagtgccaacggtattaactctgtcgcgctgggcgcagattccattgcggatttagacaataccgtctctgtcggcaatagttcattaaaacgcaagatcgttaatgtgaaaaatggcgcgatcaagtctgacagttacgatgccattaatggttcacagctttatgccattagcgactcggtagcaaaaataacgtag

SEQ ID NO: 462909 - DNA, 288 bp, Shigella boydii; identical to SEQ ID NO: 462736

SEQ ID NO: 462910 - DNA, 246 bp, Shigella boydii; identical to SEQ ID NO: 460696

SEQ ID NO: 462911 - DNA, 315 bp, Shigella boydii
atgactcaaaactatgaactgattgtgaaagggatccgcaattttgagaataaagttacggtaactttagcgttacgggacaaaaaacgctttgacggtgaaatttttgacctggacatctcgctggaccgtgttgaaggtgccgcgctggagttttatgaggcagcagccagaaggagcatcagacaggtcttcctggatgttgctgccgggttatgtgaaggggacgagctgttgccagaaacgcgcccctgttcagaggcgcggtataccataaaaattaacagttctgataactcgattacgggttgttag

SEQ ID NO: 462912 - DNA, 822 bp, Shigella boydii
ttgttcaaagccaatcatgttccggtattaatgtatcatcatgtcagtcattgccccggactggttacactttctcccgtgacattccggaagcaaatgaaatggttggctgaaaacaactggaaaacactgtcatcagatgaactggagtttttttatcggggcggaaaactcccccggaaaagcgttatgttgacatttgatgatggataccttgacaactggtttcaggtatatcctttattgaaagagtttaatctcaaagcacatatttttttaattaccggttttattgggaatggtccggttcgtcactctcctggaaaggaatattctcatcgcgattgcgaacatcaaatagcgacagggaatgctgataatgttatgcttcgctggtctgaagtaaacgaaatgttgcaatctggtctggtcgaatttcatgttcatacgcatactcatacacgctgggataaaaagttcagttcacgagaagaacagtgtaaacatcttcggcaggacttgttgagcgggagagaatatttgaaagaaatgacaggaaaatgcagtaaacatttgtgttggccggaaggttattataacaaggattatattcaggtcgctgaagaacttggattctattatttatatacaacagaaagaagaatgaatgctcctgctaaaggaactacacggataggaagaataagcaccaaagaacgggaaagttgcgcatggctgaaaagacgacttttttattatacaacaccgtttttttcatcgttgctggcctttcataaggggccaagattaccggatgattaa

SEQ ID NO: 462913 - DNA, 546 bp, Shigella boydii
ttgtttcttgggagcaactcactggtctattacgtgattattggctggcttccggcgatcctcatcagtcacggctatagcgaagcacaggcgggttcactgcatggtttgctgcaactagccacagcagctcccggtttgctgatccctcttttcttacatcatgtgaaagaccagcgtggtattgcagcgttcgttgccttgatgtgcgcagtgggcgctgttgggctctgctttatgccagcgcacgcgatcacctggactctgcttttcggttttggttccggcgcaacaatgatactggggttgacgttcattggtcttcgggcaagttctgcgcatcaggcggcggcactctcggggatggcacaatccgtcgggtatttgctggcagcctgtgggccgccgctaatgggtaaaatacacgatgctaacggtaactggtccgtaccactgatgggtgttgcaatactttcactactgatggcgattttcggactttgcgccgggagagacaaagaaattcgctcatatccggtgctatag

SEQ ID NO: 462914 - DNA, 900 bp, Shigella boydii; identical to SEQ ID NO: 461193

SEQ ID NO: 462915 - DNA, 1038 bp, Shigella boydii; identical to SEQ ID NO: 461254

SEQ ID NO: 462916 - DNA, 288 bp, Shigella boydii
atgagcagaaaaaaccaacgttactctaaagagttcaaagccgaagctgtcagaacggttcctgaaaatcaactttcgatcagtgaaggcgcttcccgattatcccttcctgaaggcactttaggacaatgggttaccgccgccagaaaagggctcggtactcctggttcccgcacggtggctgaactggaatctgaaattctgcaactgcgtaaggcgttaaatgaagctcgccttgagcgagatatattaaaaaagcaacagcgtattttgcacaggagtcgctga

SEQ ID NO: 462917 - DNA, 267 bp, Shigella boydii
atggtgaggtacttcgggttccttgccaaccgggtgtgtggagagaagctgccgcaggtgtaccgtgctctggggatggataaacaggaaccagtggcgaaagtgtgctatgcacaaatggtgaaacagttcctgagtcgtgacccgttcgaatgcgtgctgtgtggcggccggatggtataccgccgggccatcgcgggactgaatgtggaggagctgaagaaaaacgcgcgggatatcagtctgctgaggtatatgccggcctga

SEQ ID NO: 462918 - DNA, 348 bp, Shigella boydii
atggtgacgaaaaccatcactgaacagcgtgcggaagtacgtatttttgccggtaatgatccggctcataccgccacaggcagcagcgggatttcttctgcaacaccggctctgacgcccctgatgctggatgaagccaccgggaaactggtggtctgggatggacagaaagccggtagtgcggttggcatactggtactgccgcttgaaggcacagagacggtgctgacctattacaagtcggggacctttgcgacggaggcaatccgctggcctgacagtgtggatgaacacaaaaaggcaaatgcctttgccggcacagccctgagtcacgcggctctgccgtaa

SEQ ID NO: 462919 - DNA, 774 bp, Shigella boydii
atgtatgcagcgacgattgaaagtgaccttgataccgaaaaggcctttgaatatatcgccggtgcgccgcaggggcagaaggataatccgcttattaatattctggataagttctccacctggtatgacacgaatagcgtgacgctgggcggtgtcaaaattccgcaccttttccccggtgatgatctgaaacttcagaccgcgcaggattcagacaatggattttcggcgcttgaacaggcgctgctgcggtatatcgccgccggtcttggcgtttcctacgaacagttgtcccgtgattactcgaaggtcagttactcaagtgcccgcgcatccgccaatgagtcgtggcgctattttatggggcggcgaaaatttattgcgtcccggctggccacgcagatgttttcctgctggctggaagaggcacttcttcgggggattattcgtccgccacgggcacggtttgatttttatcaggcgcgatcagcctggtcacgggctgagtggattggagccggaagaatggccattgacgggctcaaggaggttcaggaatcagtgatgcgcattgaggccggactgagcacgtatgagaaagagctggcgctgatgggcgaggattatcaggacattttccgccagcaggtcagggaatctgcagagcgggaaaaagccggactctcacgtccggtgtggatagcgcaggcgtatcagcagcagatagcggagagtcgcaggccggaagaggagacaacaccacgtgagacgtaa

SEQ ID NO: 462920 - DNA, 246 bp, Shigella boydii; identical to SEQ ID NO: 460696

SEQ ID NO: 462921 - DNA, 246 bp, Shigella boydii; identical to SEQ ID NO: 460696

SEQ ID NO: 462922 - DNA, 840 bp, Shigella boydii; identical to SEQ ID NO: 461291

SEQ ID NO: 462923 - DNA, 819 bp, Shigella boydii
atgtgtcgggtacctggtgtatctaggagcggttattacgaccgggtacagcatgccccctcagacagaaaacaaagtgatgagcggctaaaactggagattaaggtggcacatatccgcactcgcgaaacatatggaacccggcggctccagacggagctggtagataacggaattatcgtcggtcgtgacagactggcacgtcttcgtaaggagctgaggctgcactgtaagcagaaacgcaagttcagggcgaccacaaactctgaccacaatctgccggttacgccgaatctgctgaatcagaactttacgcccacagcacctaatcaggtctgggtcgcagatataacgtatgttgccacccgggaaggatggctgtatctcgccggcgtcaaagatgtttatacgtgcgaaattgtcggttacgccatgggagagtgcatgacgaaagagttgacgggtaaagccctgtttatggtgctcaggagccagcgcccacctgccgggctaatccatcacaccgatcgaggttcacagtactgcgcatacgattaccgggtcatacaggagcagtctggtctgaaaacatcaatgtcgcgtaaaggtaactgttacgacaacgctccgatggaaagcttctggggaacgctgaaaaatgaaagcctgagccactatcgttttaagagccgggatgaggccatctcagtaatacgggaatacattgagattttctacaatcgtcagcgtcgtcactctcgtctggggaatatctccccggcagccttcaggataaaatattatcagatgactgcttag

SEQ ID NO: 462924 - DNA, 243 bp, Shigella boydii; identical to SEQ ID NO: 461390

SEQ ID NO: 462925 - DNA, 324 bp, Shigella boydii; identical to SEQ ID NO: 461356

SEQ ID NO: 462926 - DNA, 654 bp, Shigella boydii; identical to SEQ ID NO: 461326

SEQ ID NO: 462927 - DNA, 1251 bp, Shigella boydii; identical to SEQ ID NO: 461349

SEQ ID NO: 462928 - DNA, 276 bp, Shigella boydii
gtggcttctgtttctatcagctgtccctcctgttcagctactgacgggggggtgcgtaacggcaaaagcactgccggacatcagcgctatctctgctctcactgccgtaaaacatggcaactgcagttcacttacaccgcctctcagcccggtacgcaccagaaaatcattgatatggccatgaatggcgtcggatgtcgcgccagtgcacgcattatgggcgttggcctcaacacggttttacgtcacttaaaaaactcaggccgcagtcggtaa

SEQ ID NO: 462929 - DNA, 276 bp, Shigella boydii
gtggcttctgtttctatcagctgtccctcctgttcagctactgacggggtggtgcgtaacggcaaaagcaccgccggacatcagcgctatctctgctctcactgccgtaaaacatggcaactgcagttcacttacaccgtttctcaacccggtacgcaccagaaaatcattgatatggccatgaatggcgttggatgccgggcaactgcccgcattatgggcgttggcctcaacacgattttacgtcacttaaaaaactcagaccgcagtcggtaa

SEQ ID NO: 462930 - DNA, 123 bp, Shigella boydii; identical to SEQ ID NO: 461374

SEQ ID NO: 462931 - DNA, 276 bp, Shigella boydii
gtggcttctgtttctatcagctgtccctcctgttcagctactgacggggtggtgcgtaacggcaaaagcactgccggacatcagcgctatctctgctctcactgccgtaaaacatggcaactgcagttcacttacaccgcttctcaacccggtacgcaccagaaaattattgatatggccatgaatggcgttggatgccgggcaactgtacgcattatgggcgttagcctcaacacgattttacgtcatttaaaaaactcaggccgcagtcggtaa

SEQ ID NO: 462932 - DNA, 195 bp, Shigella boydii
gtgaacaaacagcaacaaactgcgctgaatatggcgcgatttatcaaaagccagagcctgacactgcttgaaaaactggatgctctggatgccgacgaacaggcggccatgtgcgaacgactgcacgaactcgcggaagaactccagaacagcatccaggttcgctttgagaccgaaagtgaaacaggaacataa

SEQ ID NO: 462933 - DNA, 282 bp, Shigella boydii; identical to SEQ ID NO: 14811

SEQ ID NO: 462934 - DNA, 297 bp, Shigella boydii; identical to SEQ ID NO: 14812

SEQ ID NO: 462935 - DNA, 1497 bp, Shigella boydii
atgctgcctgtcggcttaagcatctggctggcccatcagcaggtagaaacatcgtttattgaagagctggatacctattcctcccgcgtcgctattcgggccaataaggtggcgacacaagggaaagatgcgctgcaagagctggaaagatggcaaggcgctgcctgtagcgaagcccatctcatggaaatgcgtcgggtatcttacagttatcgctatattcaggaagtggtttatatcgataacaacattccccagtgttcgtctctggagcatgaaagtccgcccgataccttccccgagccaggtaaaatttcgaaagatggttatcgtgtctggttaacatcgcataacgatttaggcattatccgttacatggtcgccatgggaacggcacattatgtcgtcatgctcgaccccgcttcctttattgatgtcattccctatagctcatggcaaattgatgccgccattattggcaatgcccataacgttgtcataaccagcagcgatgaaattgctcagggaattattaccaggctacaaaaaacacccggtgagcatatcgaaaataatggaatcatttacgatatcctgcccttcccggagatgaatatttcgatcatcacctgggcttcaacgaaaatgttgcagaaaggctggcatcggcaagtctttatttggttaccgctcgggttggtgattggcctgctggcagcgatgtttgtgctgcgtattttgcgccgtatccagtcaccgcatcatcggctgcaggatgctatcgaaaatcgtgatatttgcgtgcactatcagccgattgtctccttagccaatggcaaaattgtcggtgctgaggcactggcgcgctggccgcagacagacagtagttggttgtcaccagatagttttattccgctggcacagcaaacaggcctttctgagccattgacgctactgattataagaagcgtctttgaagatatgggcgactggctgcgtcagcatccacagcagcatatttcgatcaatcttgaatccaccgtgctcacctcggaaaaaatcccgcaattgctgcgtgaaatgatcaatcactatcaggttaatcccagacagatcgcgcttgaactcactgaacgcgagtttgccgatccgaaaaccagcgccccgataatttctcgctaccgggaggcgggccatgaaatttatcttgatgattttggtacgggatattcaagtttaagttatttacaggatctggatgtcgacattctgaagatcgataaatctttcgttgatgcgctggaatataaaaatgtcacgccgcatatcatcgaaatggcaaaaacactgaaactgaaaatggtagcggagggaatcgaaaccagtaaacaagaagagtggctacgccagcatggcgtgcactacggtcagggctggctctacagcaaggcattaccgaaagaagatttcttacgctgggccgagcaacatttgtga

SEQ ID NO: 462936 - DNA, 1620 bp, Shigella boydii
atgttcaccctgtcattactgacaggaaatcctgctatagcgtatgaaacagataaagtatataaaataaccgttctgcatacaaatgaccaccatggacacttttggcgtaacaatcatggtgagtacgggttatcctcccaaaaaactctggtggacaatatccggcagaaagtaataaataatggcggaagtgttctattattatctggtggtgatattaacaccggtgtacctgaatcagaccttcagaaggctgaacccgatattcgtggaatgaatctaattggttatgatgcaatggccgtcggtaatcatgaatttgataatcctctaaatatattacgtcagcaggaaaaatgggccacatttcctttcctttctgctaacatatatcaaaaaagtacagggaggcgtttattcagtccatggaaaattttcatccgtcagaatttgaaaattgcagtcattggcttgacgacagatgatactgcgaaaacaggaaattctgaatattttactgatattgagttccgtcaacctgctgctgaggcgaggagtgtcattgatgaacttaatcagcaggaaaagccagatattattattgcggcaacacatatgggtcactatgacaatggcgagtcaggttcgaatgctcctggtgatgttgaaatggctcgcagtttgccgactggctcattagcaatgattgtgggaggacattcacaagctcctgtctgcatggccagcgataataaaaaacagtggaattatattccggggacaacctgtgtaccagataaacaaaatggcatctggattgtacaagcgcatgagtggggaaaatatgtcggtcaggctgattttgaattctgtaacggtacaatgaaactggttaattatcagttacacccagttaatctcaaaatgagaattaccagagaagatggaaaaacggaattttctttttacacccccgaaattactgaagatccacagatgttatccttactgacaccattccagaataaaggcaaagcacaactggatgtgaaggttggggttgtgaacggacgtctggaaggggacagaagtaaagttcgttttgttcagaccagtatgggccatctgattctgagcgctctgacagaacgtattgacgcagattttgctgttgtcagtggtggggaaattcgagattccatagagagtggtaacatcacatacaaagatatactgaaagttcagccatttggtaatacggtagtaagtattgatttgacggggaaagaagtagctgactacctagctacagtggcacagatgaaaccggattccggagcctacccacaatttttgaataccagctttgtagtcaaaaaaggaaaaatcgaaatgctaaaaataaaaggtaaatcggttgaccttaacaaaaaatatcgtatgacaacatttagctttaatgctactggtggggatggctatccacgtattgataatagacccggatacataaataccggatttattgatgctgaagtacttatcgaatatatccgggaacattcaccgctggatgctgcttcatatgaaccaaaaggtgaagtcagttggcagtga

SEQ ID NO: 462937 - DNA, 186 bp, Shigella boydii
atgaaccaaaaggtgaagtcagttggcagtgataacgtaattgacgatcatcacgtgttttttgctgacagtcgctgtgactttgtgaaagtagtctctgcggatgtttgcgatatgggaatgcagttgctgtattttgtgtttctgcttctgccagttgttgctgaatttaaccttgcggcttaa

SEQ ID NO: 462938 - DNA, 267 bp, Shigella boydii; identical to SEQ ID NO: 7253

SEQ ID NO: 462939 - DNA, 966 bp, Shigella boydii
atgtcagaagataaattcctttcggactacagcccccgtgatgcagtttgggatacccagcgcacgcttaccgattctgtagggggtatctaccagattgctgctgaattcgagcgctatgcactccgtatggcctcctgtagcggtttgttacgttttggttggtctaccatcatggaaaccggagaaacgcgcctacggcttcgtagtgcgcaattttgccgtgtccgtcattgccctgtctgccagtggagaagaaccctcatgtggcaagcccgtttttatcaggctctaccgaaaattgttgtggattacccgtcttcccgatggttgtttctgacgttaactgtcaggaactgcgagataggtgaacttggaacagtccttacagcaatgaatgcggcgtttaagcgaatggaaaagcgaaaggagctatcacctgttcaggggtggatcagggctacggaggtgacgcgaggtaaggatggcagcgcacatccgcattttcactgtctgctgatggtgcaaccttcttggtttaaagggaagaactacgttaagcacgaacgttgggtagaactctggcgcgattgcttgcgggtgaactatgagccgaatatcgatattcgggcagtaaaaactaagacaggtgaggttgtggccaacgttgccgagcaactgcaaagcgcggttgctgaaacgctgaaatactccgttaaaccggaagatatggcaaacgatcctgagtggtttcttgagctgacgcggcagcttcacaagcgccgttttatctcgaccggtggggcgctaaaaaacgtcctccagttggatcgagaaaccaatgaggatcttgtcattgccgacgatgtaggggatggcactgatgacgggaagcggacggcgtttgtctgggattcaggtaaacggcgttacaaacgcgcccctgagaaggataaatcggattaa

SEQ ID NO: 462940 - DNA, 222 bp, Shigella boydii; identical to SEQ ID NO: 461465

SEQ ID NO: 462941 - DNA, 303 bp, Shigella boydii; identical to SEQ ID NO: 458125

SEQ ID NO: 462942 - DNA, 276 bp, Shigella boydii; identical to SEQ ID NO: 458859

SEQ ID NO: 462943 - DNA, 468 bp, Shigella boydii
atgagaatagacatatcacatcaaacacggcataccccgccaaacatgcttcctcgggaacaaaattgtgtagcaatggcattatctgcgtgctttagacaacaactaaaccctgtggtaaacagcttattaaaagagagaataatacactcccctaaagaattggaacatgacaacgcagtaataagagccctgcaaaaactacaaattcaagaagtttgtaacagcaccctttgggagacagccaaacaacaactacttcaaaaatcggacggaagatattttgccatcaattctaaacacttagcctttccaggcccaggagaatctcacgccttctgttgcatcaaatacaaaaatgcaattggcattaacggaaacaatgccgaaacccaatcgacccactaccaaccctatccctatgataaagtcagtatatggggaccattccctcacaatttaacgtaa

SEQ ID NO: 462944 - DNA, 198 bp, Shigella boydii
atgcgttatccctggagcgtgagcgccagctggaaatacaggaacggacactggatggcccttcgctgggatggtaatcagagacaggctaaaatgttgtcagcgcgtttccggtgcattttttgggataatggttggttcgggggcaccgggaacgcgcttcagtcagaccttgctgaaaacacaggaacgcgttaa

SEQ ID NO: 462945 - DNA, 234 bp, Shigella boydii
atgacggagctggaaagacatttgctgaacgcattagagcaactgcaacaggactatatgcagcggctgaacgaatgggagagcgccttcgtggaattgcagaaaatgttttcgcttacgcaacgggacaacgcgatgctgaatgagcgggtcatgcagttgagtcagcaggtgcagcacttgagcgagcagacagaacgcttgagccagttatacagcgagaacaggagataa

SEQ ID NO: 462946 - DNA, 372 bp, Shigella boydii
gtggtgtgggtcggtaaggatgtgacaggcattgaaccccgtaacgccagtgttattgaagttcctgatattaccgccaaccgccgcattaccgcgccgggttactggttttaccgcaatgatgaatttgtctttgactacagactcaaagcggaagatgagcgtgatgcccttctggctcaggtcagtgcccggacaggggaatgggaagaagacctgctgctggggctaatcagcgacgaagaccgggaaaaactgaaagcgtaccgcatttacgcgaaatcgctgcaggcgatggatttcagtgtcatcactgataaaacctcatacaacgccattgaatggcccgcctctccggaaatttcttcctga

SEQ ID NO: 462947 - DNA, 876 bp, Shigella boydii
gtgtgcggtgatgtccacactcaccggcttaccgctgccgttaatcaggttcaccgccgatgtacctgtctccggcagggtaacctcacggtccagcgtcagggtgcgggtggcagcatcaatggacaggacacgtccaccggtcagggtcccggcatagtcattatcacagatttcaataatgtcaccgggtgtgtgccgcagcccctgagacccgagcgtgaagtccaccgtctgcgtttccagcagttcggtctttatcacccacagtccggcacggtgggcctgaccgcggctggtacagccgaacgcgtccatcttcagcagattgcgcccgtagcgcagtatggcttccgggtcttccaccagttccgtggaggtctgccagccgttctgcgggtcggtgtaattcacctccaccgccgtgtgccggtccttcagggcactgaagctgtagcggaaccccacgccgttatcatccaccaccacatcgctgttggtgtacggccacaccacatccgacaggcggtcctgaacaaacgtcagcatctggccgttccataccggcatacagcgcatcgcagagcagaaatcactgagaacgtcccacgccttacgctgttgtgccaggtacgcattaaaggtcatccgcggctcggtccccccgaaaccatccgggaccgtctggtcgcagtactgcccgatggcatacagcgcccacttgtccacatccgccgcccccagacgttttcccatgccgtagcgcgggtgagtcagcatgtcccacaggcaccaggccgggttgttgctgtatgccggtttcagactgccgtcccagataccactgtacgtgcgtttttccgggtcatagtttga

SEQ ID NO: 462948 - DNA, 276 bp, Shigella boydii; identical to SEQ ID NO: 458859

SEQ ID NO: 462949 - DNA, 363 bp, Shigella boydii; identical to SEQ ID NO: 461509

SEQ ID NO: 462950 - DNA, 198 bp, Shigella boydii
atgctaaaacagcaggatatgacagaaaccgccagagtggtgtttaatgaattaagcgttaccgaaccggcgacagtcggggagattgcgcagaatacttacctttcacgcgaacgctgccagttaatactgacccagctggttatggcgggtctggcagactatcagttcggttgttacagacgccttccgcagtga

SEQ ID NO: 462951 - DNA, 705 bp, Shigella boydii
atgacacagaatcgggctgagatggggttttctgcgttccttgggaaaatgggcattagtatgaatgacagagagcgggcaacagaattgctgacagaatatgcactcagtcggtgtgatcgcgtggcggcgttaagaaaactcccggcagaaataaaaccggtagtgatgcgcattatggcttcgtacgcttttgaggattatgcccgcagcgcagcgagtaaaaagcagtgcccttgttgctatggggaaaaatttattgaaagcgtagtttttacaaacaaggtccagtatccggatggtaagccgccggtatgggcaaagtgtacgaaaggtgtgtatccgtcttactgggaagaatggaaaaaagtcagggaggtggtaaaagttgcctgtccggagtgtggcggaaagggtgaggtttccaccgcctgtaaggattgccgtgggcgtggtgtcgccattcatcgtgaagagtcggtaaaacgtggtatgcctgttatcagagactgccagcgttgtggtggtcgtggctgtgaaagactaccatcaacggaggcatttaatgccatatgcaaagtgacgagtgctatcacgcttgatacgtggaaaaaatcagtgaaacgcttttacgatacgttggtggttcggtttgacattgaagaggcatgggcggagcggcagttaaagagggtaacgcgatag

SEQ ID NO: 462952 - DNA, 1365 bp, Shigella boydii
atgtcccagccggttggtgatcttgttattgacctgagtctggatgctgtccgtttcgatgagcagatgagccgggtaaggcgtcatttttcaggtctggataccgacgccagaaaaaccgccagtgctgttgaacagggcctgagccgccaggcgctggctgcacaaaaagccgggatttccgtcgggcagtataaagcggccatgcgaaccctgcccgcacagtttacggatatcgccacgcagcttgcaggtggtcagaatccctggctgatcctgctgcaacagggcggtcaggtgaaggactccttcggcgggatgatccccatgttcagggggcttgccggtgcgatcaccctgccgatggtcggggtcacctcgctggcggtggcgacaggtgcgctggtgtacgcctggtacctgggagattccacgctttcagcgtttaataaaaccctggttctttccggtaatcagtccggactgactgccgatcgtatgctgactctctcaagagccgggcaggcagcagggctgacgtttaaccaggcgagagagtcactggcagccctggtgaatgccggtgtgcgtggtggtgaacagtttgatgccatcaaccagagtgtcgcgcgttttgcgtctgcatccggtgtggaggtggataaagtcgctgaagccttcgggaagctgaccactgacccgacgtcgggactgatggcgatggcgcgccagttccgtaacgtgacggcagagcagattgcgtatgttgcacagctgcagcgttccggagacgaggccggggcattgcaggcggcgaacgatatcgccacgaaaggctttgatgagcagacccgtcgcctgaaagaaaacatgggaacactggagacctgggcggataaaacagggaaggcattcaaatcgatgtgggatgccattctggatatcggtcgtccggaatcctcagcggatatgctcgccagtgcgcagaaggcatttgatgaggcggataaaaaatggcagtggtaccagagccggagccagcgccggggaaagacctcctcttttcgtgcgaaccttcagggggcatgggatgaccgggaaaatgcccgtctgggtctggcagcggccacgctgcagtcggatatggaaaaagccggtgaactggcggcaagggacagggctgagcgtgagtcgtcacagctgaagtataccggagaggcgcagaaggcgtatgagcgcctgcagacgccgctggataaatataccgcccgtcagaaagagctgaataaggccctgaaagacggaaaaatcctgcaggcggattgcaacacgctgatggcgtcggcaaaaaaggattatgaatag

SEQ ID NO: 462953 - DNA, 123 bp, Shigella boydii
atgacccgaagtggtggtgattttcagccccgcccgctgaaacgcctgttcacagccaaccagtgctggacgtccttcctggatgcgggcggtctgcgcgatatcggggttgaggctgtctga

SEQ ID NO: 462954 - DNA, 1416 bp, Shigella boydii; identical to SEQ ID NO: 461512

SEQ ID NO: 462955 - DNA, 432 bp, Shigella boydii
atgattttggtgacggggggcgcacggagcgggaagagtcgccacgcagaggcgcttattggggactcttcacaggttctgtatatcgctacctcgcaaatccttgatgatgagatggctgcacggatagaacatcatcggcaaggccgcccggagcactggcgcacagtggagcgctggcaacatcttgatgaattaattcatgcagacattaacccgaatgaggttgtgttgctggaatgcgttaccacaatggtgactaatctgttgtttgattatggcggcgataaagaccctgatgaatgggattatcaggcgatggaacaggcgattaatgctgagattcagtcgttgattgctgcctgccaacgttgccccgcaaaggttgtattagtgactaacgaagtgggggtaatgctgccaacttactga

SEQ ID NO: 462956 - DNA, 465 bp, Shigella boydii
atgatccgtagctgcccggcggtatatttcccgctttctgccagacgggccagattttctgccgcctgtctgataccaccaccggcttcatcgctgatcaccccggccattttccacaattctgccgttgtggtggcagccgcccctccggtcaggatcagtgaacgcaataaggcccggtcagcctgctctgcctgccaggcggcggcagcaagcgcggccagtacggcaaccccgccacctgccgccacacggaccaccgacataaatcgtcccagctcaccggcattccgggcattttcagccagtgcatttgccgtatctgacagcgactcctctgatgattcagaggcatccctgatcccgagaagttcctccttcagcagggtaagcaggctgagcggttcaccgaatgaatcgctgatctgccccccctgctgcagcatgataaggaagggattctga

SEQ ID NO: 462957 - DNA, 519 bp, Shigella boydii
gtggcagaacgacctgaccagctgtgggtggctgattttacttacgtcagcacatggcagggcttcgtctatgtggcgttcatcattgatgtgtttgccggatacatcgtggggtggcgggtctcatcgtccatggaaacgacattcgtgctggatgctctggagcaggcgttatgggcccgtcgaccgtccggcacggtccatcacagtgataaaggttctcagtatgtatcgctggcctacacacagcggcttaaggaagccggattactggcatcaacaggaagtacaggcgactcgtatgacaacgcgatggcggagagcatcaatggtctttacaaagcggaggtaatacaccgtaagagctggaaaaaccgtgcagaagtggaactggccacactcacgtgggtggactggtataacaatcgacgattgctggaaaggctgggccatactcctccggcagaagcagaaaaagcttattatgcttccatcggaaacgatgatctggcagcctga

SEQ ID NO: 462958 - DNA, 294 bp, Shigella boydii
atgaaaaaaagaaattttagcgcggagtttaaacgcgaatccgctcaactggttgttgaccagaaatacacggtggcagatgccgccaaagctatggatgttggcctttccacaatgacaagatgggtcaaactgaaccgccccgggtttcctggagagtgttttatctgtgaactcaggctgccagatcatcgtttccgatggaagcataataagctttttctgcttctgccggaggagtatggcccagcctttccagcaatcgtcgattgttataccagtccacccacgtga

SEQ ID NO: 462959 - DNA, 294 bp, Shigella boydii
gtggcgcaggtcttaggtgaacgcactctggccacactggagcgtcttctgagcctgctgtcggcctttgaggtcgtggtatggatgacggatggctggccgctgtatgaatcacgcctgaagggaaagctgcacgttatcagcaagcgttacactcagcgcattgagcgacataatctgaatctgagacaacatctggcaaggctgggacggaagtcactgtcgttctcaaaatcggtggagctgcatgacaaggtcatcgggcattatctgaacataaaacactatcagtaa

SEQ ID NO: 462960 - DNA, 438 bp, Shigella boydii
atggctacatacggcggtcagtttacgcttacaataaatatgaaaagatggtttaaataccccgttacttttgacttacactatacggtatcgcatcgtttaatattcgcaccggccagatttttatttctattagttgtcacaatactgaatgcgtacgaccacagtattctggctcctgtgtggtcatgctttaattctgcgttccggacagataagcagttgcttgcaggaatccttcttgtgttaatgtcagttcccctttttaccagtgctgatttccacattccgtccaacagagcttatagcctttccctggattatagcattgtccggctgaagttctttttgaataataatagaagcactgctggcagatccagtccgtttttcataacccactgtactgataaccataatctaatcagtagaaattga

SEQ ID NO: 462961 - DNA, 1185 bp, Shigella boydii; identical to SEQ ID NO: 461532

SEQ ID NO: 462962 - DNA, 429 bp, Shigella boydii
atgattcgacatggtagtaataagttgaaaatatttattttaagtatattgctattaacactgagtgggtgtgctttaaagtcatcatctaattctgaaaaagaatggcatattgttcctgtaagtaaggattatttttctattccaaatgatttattatggtcgtttaatacaaccaataaaagtataaatgtttactctaaatgtattagtggtaaggcggtttatagttttaatgcaggtaaattcatgggcaactttaatgttaaggaagtagatggatgcttcatggatgcacaaaagatagctatagataaactattttctatgctgaaagacggggttgttttaaaaggtaataagataaatgataccatccttatagagaaggatggggaagttaaattaaaattaattcgagggatataa

SEQ ID NO: 462963 - DNA, 408 bp, Shigella boydii
atgattaatcaaataaatgcaagcaatgctctgcagcaaagattaaatagtgaagaatttgttaatttaaatgagagattatcatcttcgcaatcatttgatgaggatataatctatgaaataatgcaatatttctcacagagtgaattaaattccatagataatgatgaactgcacaataagattgaacaattattcaattcacgttttccttatcttacagctgcacaaaaaagttcacttcttaataaactcatagatgcaaatcaatatgtcgatttgcatgagggattttatgcatcattgtccatatataacaatattgatttctatattaagactacaaccttcgattcattaattagtgtctttgaagcagggagagaggcagatgattcgacatggtag

SEQ ID NO: 462964 - DNA, 198 bp, Shigella boydii
atgctgaaacagcaggatatgacagaaaccgccagagtggtgtttaatgaattaagcgtcaccgaaccggcgacagtcggggagattgcgcagaatacttacctttcacgcgaacgctgtcagttaatactgacccaacttgttatggcgggtctggcagactatcagttcggttgttacagacgccttcagtcctga

SEQ ID NO: 462965 - DNA, 606 bp, Shigella boydii; identical to SEQ ID NO: 461990

SEQ ID NO: 462966 - DNA, 1194 bp, Shigella boydii; identical to SEQ ID NO: 461570

SEQ ID NO: 462967 - DNA, 438 bp, Shigella boydii; identical to SEQ ID NO: 461969

SEQ ID NO: 462968 - DNA, 210 bp, Shigella boydii; identical to SEQ ID NO: 9340

SEQ ID NO: 462969 - DNA, 378 bp, Shigella boydii; identical to SEQ ID NO: 462723

SEQ ID NO: 462970 - DNA, 219 bp, Shigella boydii
atgactaaaaatactcgtttttcccccgaagtccgtcaacgggcagtccgtatggttctggaaagtcagggcgaatatgactcacaatgggcgacaatttgttccattgctccaaagattggctgtatactggagactctgcgtgtctggggtcgccagcatgagcgggataccgggggcggtgaggtgggctcaccaccgctgaacgtcagcgtctga

SEQ ID NO: 462971 - DNA, 210 bp, Shigella boydii; identical to SEQ ID NO: 9340

SEQ ID NO: 462972 - DNA, 378 bp, Shigella boydii; identical to SEQ ID NO: 462723

SEQ ID NO: 462973 - DNA, 219 bp, Shigella boydii
atgactaaaaatactcgtttttcccccgaagtccgtcaacgggcagtccgtatggttctggaaagtcagggcgaatatgactcacaatgggcagcgatttgttccattgctccaaagattggctgtatactggagactctgcgtgtctggggtcgccagcatgagcgggataccgggggcggtgaggtgggctcaccaccgctgaacgtcagcgtctga

SEQ ID NO: 462974 - DNA, 552 bp, Shigella boydii
ttgtctaggccttccgaaatcaaccgactgaaggcgctggtcgcgaaactgcagcgtatgcagttcggtaaaagctcagaaaaacttcgcgcaaaaaccgaacggcggatacaggaagcacaggagcgaatcagcgcacttcaggaggaaatggcggaaacactgggtgagcaatatgacccggtactgccatcttccctgcgccagtcttcagcccgtaaaccgttaccagcctcacttccccgtgccccccgggtcatccggccggaagaggaatgctgtccggcctgtggtggtgaactcagtccactgggatgtgatgtgtcagagcagctggagcttatcagcagcgcctttaaggttatcgaaaaacaacgccctaaactggcctgtcgccggtgcgaccatatcgtgcaggcaccggtgccttcaaaacccattgcacgcagttatgccggagcggggcttctggcccatgttgttaccggaaagtatgcagacgatctgccattataccgccaaagtgatctactattccacacagctatttag

SEQ ID NO: 462975 - DNA, 612 bp, Shigella boydii
gtgcagggtggtgagcggtattttttctgtaatgagctgaatgaaaaaggggagccggtcacctggcaggggcgtaagtatgaggcatacccgattgacggcagcggctttgagatgaacggccggggcagcagtgccagaccgtcgctgacggtgtccaatctgttcggtctggtcaccgggatggcggaagacctgcagagtctggtgggggccacggtggtccgccgccgggtgtatgcccgttttctggatgcggtgaatttcgttgcgggcaatccggaggcggacccggagcaggagctgagtgaccgctgggtggtggagcagatgtcgcagctgacagccatgacggcctcgtttgtgctggctacaccgaccgagacggacggggcgctgtttcccgatcgtatcatgctggcgaacacctgtatgtggacctaccgctctgatgagtgtggttacacgggcggggctgtggcggatgagttcgataaacccaccacggatatccgtaaggacagatgcagcaagtgcatgcgcgggtgtgaactgcgcaggaatgtcggcaattttggcggtttcctttccattaataaactttcgcagtaa

SEQ ID NO: 462976 - DNA, 582 bp, Shigella boydii
gtgaagcagctcaccgttgccgcagtaaatggtggcatggttcggtaccgaagcaccaaagcagcacagcagaatatcgcccggctgtgcagaggacaggggcacccggtaaaagccggtgaccgccatattgtccaggtacaggttctggccgttgcgccaccagtcatcctcgcgatgaaaatccggcatatcaattcccgccagatggtatgcatcccggaacagcgtgtaacagtccgtcaccccgtgctcaaagcgccgtcctgtcagatgtggcacacagcggaatttatgaatttccccccggcagaccagccaccagggcagtgcgctttttatctgcagccgccggtcagcctcgctcagccagggcagctcaccgggatgactgtggaccagtgccacaatctccccctgcatctctgcccgcagccagtcttccggtgcgatacgaaaatacgcctccggctctgcagaaatattcacacaagggatataccgctccccctccggcgtgcttatcacgaagccgcacgactccgcaggcgcacaccgccgggcatgcgccagaatcgctga

SEQ ID NO: 462977 - DNA, 297 bp, Shigella boydii; identical to SEQ ID NO: 462009

SEQ ID NO: 462978 - DNA, 291 bp, Shigella boydii; identical to SEQ ID NO: 461599

SEQ ID NO: 462979 - DNA, 552 bp, Shigella boydii
ttgtctaggccttccgaaatcaaccgactgaaggcgctggtcgcgaaactgcagcgtatgcagttcggtaaaagctcagaaaaacttcgcgcaaaaaccgaacggcggatacaggaagcacaggagcgaatcagcgcacttcaggaggaaatggcggaaacactgggtgagcaatatgacccggtactgccatcttccctgcgccagtcttcagcccgtaaaccgttaccagcctcacttccccgtgccccccgggtcatccggccggaagaggaatgctgtccggcctgtggtggtgaactcagtccactgggatgtgatgtgtcagagcagctggagcttatcagcagcgcctttaaggttatcgaaacacaacgtccgaaactggcctgttgccggtgtgaccatatcgtgcaagcaccggtgccttcaaaacccattgcacgcagttatgccggagcggggcttctggcccatgttgttaccggaaagtatgcagacgatctgccattataccgccaaagtgatctactattccacacagctatttag

SEQ ID NO: 462980 - DNA, 210 bp, Shigella boydii
atgacggatggctggccgctgtatgaatcacgcctgaagggaaagctgcacgttatcagcaagcgttacactcagcgaattgagcggcataacctgaatctgaggcagcacctggcacggctgggacggaagtcgctgtcgttctcaaaatcggtggagctgcatgacaaagtcatcgggcattatctgaacataaaacactatcaataa

SEQ ID NO: 462981 - DNA, 357 bp, Shigella boydii; identical to SEQ ID NO: 462732

SEQ ID NO: 462982 - DNA, 378 bp, Shigella boydii; identical to SEQ ID NO: 462723

SEQ ID NO: 462983 - DNA, 486 bp, Shigella boydii
atggtgtcgcactggttcagtgccagtcagtggcagctaccgaacgaaagcgattatctgaaattacagtcgctgtttgcccgggtggcagaagagaaacatcagcggagagaactggaaaagtcccattaccaactggtcagcacatacagtgagctgagccggcagtatatggaactgctgagtgaatataaaaatttgcggaggtatttcggtgtgacggtgcaggtgccgtacaccgatgtgtggacgtataaaccggtgcagtactatccagggaaacatccgtgcgaaaaaccggcagaaatgttgcagcagataatcaacgcgagcagtcgtccgggagaccaggttgcagatttttttatgggctcaggttcaacggtaaaagcggcactggcgctcgggcgtcgtgcgattggcgttgaactggagaccggacgttttgagcagacagtcagggaagttcaggatttaatcgtttga

SEQ ID NO: 462984 - DNA, 486 bp, Shigella boydii
atggtgtcgcactggttcagtgccagtcagtggcagttgccgaacgaaagcgattatctgaaattacaggcactgtttgccagggtggcagaagagaagcatcagcggggggaactggaaaagccccaccaccagctggtggatacgtatacttcactgaaccgacagtatgcggagctgcagagtgaatataaacatctgcggcggtattttggtgtgacggcgcaggtgccgtacacggatgtgtggacacataaaccggtgcagttctatcccgggaaacatccgtgcgaaaaaccggcagaaatgctgcagcagataatcagcgcaagtagtcgtcctggtgatctggttgcggattttttcatggggtcgggttcaacggtaaaagcggcactggcgctcgggcgtcgtgcgattggcgttgaactggagacaggacgttttgagcagacagtcagggaagttcaggatttaatcgtttga

SEQ ID NO: 462985 - DNA, 300 bp, Shigella boydii; identical to SEQ ID NO: 461638

SEQ ID NO: 462986 - DNA, 375 bp, Shigella boydii; identical to SEQ ID NO: 461626

SEQ ID NO: 462987 - DNA, 432 bp, Shigella boydii
atgatgaatgatttagactatccatttgaagcaccgctcaaggaatcatttattgaaagtataatccaaatagaatttaattctaattcaactaattgcctggagaagttatgtaatgaagttagtattctttttaagaatcaacctgattatcttacttttttaagagcaatggatggattcgaagttaatggattacgattatttagcctctcgattccagaaccttcagttaaaaacctttttgccgtaaatgaattttatagaaataatgatgatttcataaaccctgatctacaagaacggttagtgatcggggatgatagcatttcaatatttacttatgacattaaaagtaacttttttgaaattagagataatattggcacagaaaatatattcagttcgttggtaatgactccaacttactga

SEQ ID NO: 462988 - DNA, 642 bp, Shigella boydii; identical to SEQ ID NO: 461621

SEQ ID NO: 462989 - DNA, 369 bp, Shigella boydii; identical to SEQ ID NO: 461996

SEQ ID NO: 462990 - DNA, 375 bp, Shigella boydii; identical to SEQ ID NO: 461626

SEQ ID NO: 462991 - DNA, 303 bp, Shigella boydii; identical to SEQ ID NO: 458125

SEQ ID NO: 462992 - DNA, 234 bp, Shigella boydii
atggaagtagaaaccccgatgatgcaggtaattccaggtggggcatctgctcgcccgtttattacccatcataatgctctggatttagatatgtatctgcgtatcgcgccagagctgtatctgaaacgtctggttgtaggcggttttgaacgggtattcgaaatcaaccgtaacttccgtaatgaaggtatttctgttcgccataatcctgagttcacaatgatggaactctga

SEQ ID NO: 462993 - DNA, 270 bp, Shigella boydii; identical to SEQ ID NO: 461548

SEQ ID NO: 462994 - DNA, 366 bp, Shigella boydii
atgattgatgtcttagggccggagaaacgcagacggcgtaccacacaggaaaagatcgcaattgttcagcagagctttgaaccggggatgacggtctccctcgttgcccggcaacatggtgtagcagccagccagttatttctctggcgtaagcaataccaggaaggaagtcttactgctgtggccgccggagaacaggttgttcctgcctctgaacttgctgccgccatgaagcagattaaagaactccagcgcctgctcggcaagaaaacgatggaaaatgaactcctcaaagaagccgttgaatatggacgggcaaaaaagtggatagcgcacgcgcccttattgcccggggatggggagtaa

SEQ ID NO: 462995 - DNA, 246 bp, Shigella boydii; identical to SEQ ID NO: 460696

SEQ ID NO: 462996 - DNA, 312 bp, Shigella boydii
atgcgtaaattatgtgctgttattttgtccgcagccatctgtctgtccgtatccggtgcgcctgcatgggcgtctgaacatcagtccacgctgagcgcggggtatctccatgcctcgacgaacgttcccggtagtgatgatctgaacgggattaacgtgaaataccgttatgagtttacggacgcgctggggctgattacgtccttcagttatgccaatgctgaagatgagaaaaaaacgcactacagcgatacccgctggcatgaagattccgttcgtaaccgctggttcagcgtgatggcggggccgtga

SEQ ID NO: 462997 - DNA, 246 bp, Shigella boydii; identical to SEQ ID NO: 460696

SEQ ID NO: 462998 - DNA, 525 bp, Shigella boydii
atgttctatttcccgttcatcttcttcgatcttttcttcggcgcgggccagtgcagagcgcaggaaggcctccgtctcttcaaccagactcagttgctggtctttctgacggagctggcattccagttctgcaatgcgaatgaggtatttttgattcatggccgtttttataatccggccatgacatttttacaacattgtcagtgcgttaaggcgggatgtttttggctgacgccagtccagcttatcgaggagcattgccagttgcgagcgggtaatggataccttgccgtcacgcacagcaggccagataaactggccttcctccaggcgtctggtgaacaggcacagaccatcagcatcagcccacaggattttaatcatgtcaccccgtcggccacggaagatgaacaggtgaccggagaagggattatcattcagcacatgctgtacctgttcacccagcccgttgaaagacttacgcatatcggttatcccagcaacgagccagatgcgggtgcctga

SEQ ID NO: 462999 - DNA, 219 bp, Shigella boydii
atgactaaaaatactcgtttttcccccgaagtccgtcaacgggcagtccgtatggttctggaaagtcagggcgaatatgactcacaatgggcgacaatttgttccattgctccaaagattggctgtacgccggagactctgcgtgtctggggtcgccagcatgagcgggataccgggggcggtgaggagggctcaccaccgctgaacgtcagcgtctga

SEQ ID NO: 463000 - DNA, 219 bp, Shigella boydii
atgactaaaaatacacgtttttcccctgaagtccgtcaacgggcagttcgtatggttctggaaagtcagggcgaatatgactcacaatgggcagcgatttgttccattgctccaaagattggctgtatactggagactctgcgtgtctggggtcgccagcatgagcgggataccgggggcggtgaggtgggctcaccaccgctgaacgtcagcgtctga

SEQ ID NO: 463001 - DNA, 408 bp, Shigella boydii
atgactagtctaaaaactagtattaagactatcacttatttaagtgatactggttgtctggagattcagggggccagtctaatgactaaaaatactcgtttttcccccgaagtccgtcagagggcgattcgtatggttctggaaagtcagggcgaatatgactcacagtgggcggcaatttgttccattgccccaaagattggctgtacaccggagactctgcgtgtctgggtacgccagcatgagcgggataccggaggcggtgatggcgggctcaccaccgctgaacgtcagcgtctgaaagagctggaacgtgaaaatcgtgaactgcgccgcagtaacgatatccttcgccaggcttccgcttattttgcgaaggcggagttcgaccgcctctggaaaaagtga

SEQ ID NO: 463002 - DNA, 234 bp, Shigella boydii; identical to SEQ ID NO: 462945

SEQ ID NO: 463003 - DNA, 279 bp, Shigella boydii
atgacggtctccctcgttgcccggcaacatggtgtagcagccagccagttatttctctggcgtaagcaataccaggaaggaagtcttactgctgtggccgccggagaacaggttgttcctgcctctgaacttgctgccgccatgaagcagattaaagaactccagcgcctgctcggcaagaaaacgatggaaaatgaactcctcaaagaagccgttgaatatggacgggcaaaaaagtggatagcgcacgcgcccttattgcccggggatggggagtaa

SEQ ID NO: 463004 - DNA, 519 bp, Shigella boydii; identical to SEQ ID NO: 462957

SEQ ID NO: 463005 - DNA, 393 bp, Shigella boydii
atggatctgcgccgttttattacgcttaaaaccgtggtggaagagggttcctttttgcgagcttcgcaaaaattgtgctgtacacaatcgacggtgacttttcatattcagcagcttgagcaggagttttcagtccagttatttgagaaaattggccgacggatgtgccttacccgcgaaggaaaaaagttgctgccgcacatttatgaacttacccgagtgatggatacgcttcgtgaggctgccaaaaaggagtcagatccggacggggaactacgcgttgtttcgggcgaaacgttgctctcttaccgaatgccgcaggtgttgcagcgttttcggcaacgcgcaccaaaagtgcgtttatccttgcagtcgctgaactgttacgtgtaa

SEQ ID NO: 463006 - DNA, 303 bp, Shigella boydii
atggaagctgacctgaaggcacttcagaaagaaagtgatacccttaccggccgggtcgtcaacccgaccggtaagggtatcactttctttctgaagtgccttcaggtcagcttccatctgtgcgatacgacgggagactttttcggagcggctgccgaagttcatccggcgcagcttatccagctgtgcctgcagatggtctatttcgcgttcacgctcgttcagcttttccagcagggcacggttcagcgcctcctgttcggcaaggagacgtttcagtgcattgatatcgtcaggaagtga

SEQ ID NO: 463007 - DNA, 279 bp, Shigella boydii
atgacggtctccctcgttgcccggcaacatggtgtagcagccagccagttatttctctggcgtaagcaataccaggaaggaagtcttactgctgtggccgccggagaacaggttgttcctgcctctgaacttgctgccgccatgaagcagattaaagaactccagcgcctgctcggtaagaaaacgatggaaaatgaactcctcaaagaagccgttgaatatggacgggcaaaaaagtggatagcgcacgcgcccttattgcccggggatggggagtaa

SEQ ID NO: 463008 - DNA, 150 bp, Shigella boydii
atgagcagaaaaacccaacgttactctacggagtttaaagccgaagccgtcaaaacggttcctgaaaatcagctttcgatcagtgaaggcgcttcccgattatctgtaagcgtacagcctgaaccgtctggtcagaatctgacgaattag

SEQ ID NO: 463009 - DNA, 237 bp, Shigella boydii; identical to SEQ ID NO: 461667

SEQ ID NO: 463010 - DNA, 276 bp, Shigella boydii; identical to SEQ ID NO: 458859

SEQ ID NO: 463011 - DNA, 246 bp, Shigella boydii; identical to SEQ ID NO: 460696

SEQ ID NO: 463012 - DNA, 285 bp, Shigella boydii
ttgaagaaaaaaatcaataaaacacaatatcctggagcatttgtagactgggataatagtgcccgaaaaaaatctagagcattagttattcatggtggttcacctaaaaaatttggactttatttagataagttatataaaagaagcattgaaaataattgtccgtttcttttcattaatgcctggaatgaatgggctgaagggacatatctggagccagatgaaaaaaataaatactcgtatttagaagaattaaaaaaagtcattgaaaaatatgaggtatag

SEQ ID NO: 463013 - DNA, 426 bp, Shigella boydii; identical to SEQ ID NO: 461631

SEQ ID NO: 463014 - DNA, 273 bp, Shigella boydii
atgggacgctggcttgctggcaggctcatgaaagagctggggctggtcagctgtcagcagccgactcaccggtataaacgtggtggtcatgaacatgttgctatccctaactaccttgaaaggcagttcgccgtgaccgagccaaatcaggtgtggtgcggtgatgtgacctgtatctggacgggtaagcgctgggcgtacctcgccgttgttctcgacctgtttgaaccgccccgggaatcctggagactaaacttcctgagaaagaggtaa

SEQ ID NO: 463015 - DNA, 276 bp, Shigella boydii
gtggcttctgtttctatcagctgtccctcctgttcagctactgacggggtggtgcgtaacggcaaaagcactgccggacatcagcgctatctctgctctcactgccgtaaaacatggcaactgcagttcacttacaccgcttctcaacccggtacgcaccagaaaattattgatatggccatgaatggcgttggatgtcgcgccagtgcacgcattatgggcgttggcctcaacacggttttccgtcacttaaaaaactcaggccgcagtcggtaa

SEQ ID NO: 463016 - DNA, 246 bp, Shigella boydii
atgcagaaaaatgtgaatcccggcaggcgaaaaggctgccctaattatcctcccgaatttaaacagcagctcgttgctgcctcctgtgaacccgggatatccatctcaaaacttgctcttgaaaatggcattaatgccaatctgttgttcaaatggcgacaacaatggcgcgagggaaagctgctattaccttcttcagagagcccccagctacttcctgtgactctcgatgcagctgccgaatag

SEQ ID NO: 463017 - DNA, 309 bp, Shigella boydii
atgaatatcagtcaaactcaggctattgcagctttttatcagtatattactgaacaaaagaaactgccatttgtgatcacctcaattgtaaaaacgccgcatgatttattacgtgaaagtacagacatgttagctgaagctcttgcagtgatttccaatctacaggtgtggactgaacagcaggatgggattggaaaagcaaagctaatggagtattaccgccgcctcgacgcactgtactgttgtgcaaaagagaaaataggtcttctttcagataaccgggatgctgaactaggctgtgtcccttaa

SEQ ID NO: 463018 - DNA, 141 bp, Shigella boydii
atgattggaaatttcaaccccaaaaaaaacaaaatcgtggttagagatttctttaatatcctcagagtatgtattcttatgtgtttgtatattttcagactgaattttatcaaaggatttaatattaagaatattatttga

SEQ ID NO: 463019 - DNA, 210 bp, Shigella boydii; identical to SEQ ID NO: 462041

SEQ ID NO: 463020 - DNA, 186 bp, Shigella boydii; identical to SEQ ID NO: 459562

SEQ ID NO: 463021 - DNA, 276 bp, Shigella boydii; identical to SEQ ID NO: 462929

SEQ ID NO: 463022 - DNA, 237 bp, Shigella boydii
atgagcttgctgtcaccctttgacgtggtgatatggatgacggatggctggccactgtatgaatcccgcctgaagggaaagctgcacgtaatcagcaagcgatatacgcagcgaattgagcggcataacctgaatctgaggcaacatctggcaaggctgggacggaagtcactgtcgttctcaaaatcggtggagctgcatgacaaggtcggtgatgctgccaacttactgatttag

SEQ ID NO: 463023 - DNA, 267 bp, Shigella boydii
atggcgacgctggggcgtcttatgagcttgctgtcaccctttgacgtggtgatatggatgacggatggctggccactgtatgaatcccgcctgaagggaaagctgcacgttatcagcaagcgttacactcagcgcattgagcgacataatctgaatctgagacaacatctggcaaggctgggacggaagtcactgtcgttctcaaaatcggtggagctgcatgacaaggtcatcgggcattatctgaacataaaacactatcagtaa

SEQ ID NO: 463024 - DNA, 168 bp, Shigella boydii; identical to SEQ ID NO: 462763

SEQ ID NO: 463025 - DNA, 765 bp, Shigella boydii
atggctttattcattgcttgccataaacaaactgaattacctaatcatgagtgctatatccctattcatgcgggtaagaaaatatcagggaaaatgcttgatcaagtgttgggagatgatacagggaataatatatcatgtaaaaataaaaattattgtgagctgaccgttatatattggctttggaaaaataaactttttaatgatgattatattggcttggttcattataggaggtattttggaaatgttttatcgaattttaaatttaaagaggtgaggatatatgacagagctaatatttctaataaaatgaaacaatatgatataattattccggtgaaagagagtttgaagctatctgttgttgaacactacaggaaattccataatgtcgaagatctaatgttggcaaaaaaaatagttgataaattatatcctgattatagtgttgcattcagagaacttttagaacaaaaaaaaatatcgctttataatatgtttataatgaaggctgggatttttgattgttattgtgattggttgttttccatattagatgagctggagaaagaaataaatttatgcagatacgatgaatatcaatcacgtgtgttcggctttattgctgagcgacttctgaatgtatggattaataaaaataaagaagtttttaaagtcggtgaggaatttgtaattaacactgatgaatgcagtggaagaggagctcaattaatttctcaacttagagctaagcttaaatga

SEQ ID NO: 463026 - DNA, 1248 bp, Shigella boydii
ttgaagcttgttacctctcttaataaaaatatcttctatttagctatattgcaaggaagttattttatactgccattgttaacatttccttatcttgttagagtattaggaccatactcttttggtctattagggttttgtcaagcaacaatgcaatatcttgtgatggtgactgattatgggtttaattggtcagcaacacaagatgtttcgaaaagtaagaatgacaaggaaaaattaacaacaatattttggaatgtcttctttagtaagattatacttgcactttcggcaattgttatatttttcggaataacattttttattaaggagctatattatgctcaagtggtgttaatatcatttattccaatggtgttaggtaatatattataccctgtttggtttttccagggattagaaaaaatgaaatggattacattatgtagtttaagtgcaagattattattaataccattaacttttttgttagtaaaaaatccacaagatatctggttagccgctttgattcaaggcggcgttaattttatagcaggtttaattggatttgctattattataaataataactggattgggaaattggtatttgattatgatggtataatttattcattaaaaagcggatggcatattttcatttcaacagctgctattagcttatatacaacaacaactgttgttgttcttgggtttatatgtggacctgtctctgttggctactttaacgctgctaatacaattagaaatgcagcccagagtctaatgaatcctatttatcaagctgtttatccaagaattaattcattgtttgaagaaaattatgcaaaaagtatgaatcttctgaaaaaatcatttaagggcgtattattcatttcgttttcaggttcattactcctgtgcatactttctccaataataataagatatggagtcggagataaatatactgagtcaattagtattttaagaatattagcctttttgccatttattatttctcttagtaatttttttggcattcaaaccatgctgacacatggttataaaagacaatttagtaaaatactgctaatttgtggtgttatgcatgtgataatcattgctcctttgatcttttttgccggggcgtatggggctgcgatgacggttttaattacagaaaccgtagttgcatcattgatgtatcttttcttaaaaagaaagaaaataaatttgtttaaataa

SEQ ID NO: 463027 - DNA, 1035 bp, Shigella boydii
atggaaattcgcataatgctatttatattaatgatgatggttatgcctgtgagctatgcggcatgttatagtgagttatctgttcagcacaacttggttgttcagggggattttgcacttactcaaacacaaatggcgacatatgagcataattttaatgattcgtcatgcgtgagtacaaatactatcacccctatgagcccgtcggatattattgttggactttataacgataccattaaattaaatttacattttgaatggaccaataaaaataacatcacgttgtcaaataatcagaccagtttcaccaatggttattcggtaacggtgacacctgcggccagtaatgcaaaagtgaatgtttctgcggggggcggcggttcagtgatgattaatggtgttgcgacattatccagtgcttcatcatcgacacgcgggagtgccgcagtacaatttctactgtgtttattaggtggcaagtcatgggatgcatgtgtaaatagctatagaaatgcattggcacaaaatgcaggtgtctattcctttaatctgaccttgtcatacaacccgataaccacaacctgcaaaccggacgatttattaattactttagagggtattcccgtttcacaattaccagccacaggtaacaaagcaacaataaatagtaaaaaaggggatattattctgcgttgtaaaaatttattaggtcaacaaaatcaaacatcacggaaaatgcaggtgtatttatcaagttctgacttgttaaccaacagcaacacaatactgaaaggtgcggaagataatggcgtaggatttattcttgaaagtaatggttcgccagtcacacttttaaatatcactgataacagcaaaggatacacaaatttaaaagaaattgcggcaaagtcaaaacttacagatacaacggtttcaattccgataacagccagttactacgtctacgatacaaacaaagttaaatctggcgcattggaggcaaccgcattaatcaacgtgaaatacgactaa

SEQ ID NO: 463028 - DNA, 2481 bp, Shigella boydii
atgttgagaatgaccccacttgcatcagcaatcgtagcgttattgctcggcattgaagcttatgcagctgaagaaacctttgatacccattttatgataggtggaatgaaagaccagcaggttgcaaatattcgtcttgatgataatcaacccttaccggggcagtatgacatcgatatttatgtcaataagcaatggcgcgggaaatatgagattattgttaaagacaacccgcaagaaacatgtttatcaagagaagttatcaagcggttaggcattaatagcgataacttcgccagcggtaagcaatgtttaacatttgagcaacttgttcagggtgggagctatacctgggatatcggggtttttcgtctcgatttcagtgtcccgcaggcctgggtggaagaactggaaagtggctatgttccaccggaaaactgggagcggggtattaatgcgttttatacctcttattatctgagtcagtattacagcgactataaagcgtcgggtaataacaagagtacatatgtacgttttaacagcgggttaaatttactggggtggcaactgcattctgatgccagtttcagtaaaacaaataacaatccaggggggtggaaaagcaataccctgtatctggaacgtggatttgcccaacttctcggcacgcttcgcgtgggtgatatgtacacatcaagcgatatttttgattctgttcgcttcagaggtgtgcggttgtttcgtgatatgcagatgttgcctaactcgaaacaaaattttacgccacgggtgcaggggattgctcagagtaacgcgctggtaactattgaacagaatggttttgtcgtttatcagaaagaggttcctcctggcccgttcgcgattacagatttgcagttggccggtggtggagcagatcttgatgtcagcgtgaaagaggcggacggttcggtaaccacctatctggtgccttatgcagcggtgccaaatatgctgcaacccggcgtgtcgaaatatgattttgcggcgggtcgtagccatattgaaggggcgagcaaacaaagtgaatttgtccaggtgggttatcagtatggttttaataatttattgacgctgtatggcggctcgatggtcgcgaataattattacgcgtttactttggggactggctggaatacacgcattggtgccatttccgtcgatgccactaagtcgcatagtaaacaagacaacggcgatgtgtttgacgggcaaagttatcaaattgcctacaacaaatttgtgagccaaacgtcgacgcgttttggtcttgcggcctggcgttattcatcgcgtgattaccggacatttaatgatcacgtttgggcaaacaataaagataattatcgccgtgatgaaaacgatgtctatgacattgccgattattaccagaacgattttggccgtaaaaatagcttttctgccaatatgagccagtcattgccagaaggctggggttctgtgtccttaagtacgttatggcgagattactggggacgtagcggcagcagtaaggattatcagttgagttattccaataactggcggcggataagctataccctcgcggcaagccaggcttatgacgagaatcatcatgaagagaaacgatttaatatttttatatcgattccctttgattggggtgatgacgttacgacgcctcgtcggcaaatatatatgtctaactcaacgacgtttgatgatcaggggtttgcctcaaataatacgggattatcaggaacagtagggagtcgggatcagttcaattatggtgtcaacctgagtcatcaacatcagggaaatgaaacgacagctggggcgaatttgacctggaacgcgccggttgcgacagtgaatggcagttatagtcagtcgagtacttatcgacaggctggagccagtgtttcagggggcattgtcgcctggtcgggtggcgttaatctggcgaaccgtctttccgaaacgtttgctgtgatgaatgcgccaggaattaaagatgcttatgtcaatgggcaaaaatatcgcacaacaaaccgtaatggagtggtgatatacgacggaatgacaccttatcgggaaaatcacctgatgctggatgtgtcgcaaagcgatagcgaagcagaattacgtggcaaccggaaaattgccgccccttatcgcggcgcggttgtactggttaattttgataccgatcagcgcaagccctggtttataaaagcgttaagagcggatgggcaaccattaatgtttggttatgaagtcaatgatatccatggtcataatattggcgttgtcggtcagggaagccagttatttattcgcaccaatgaagtaccgccatcggttaatgtagcaattgataagcaacaaggactttcatgcacaatcaccttcggtaaagagattgatgaaagtagaaattatatttgccagtaa

SEQ ID NO: 463029 - DNA, 675 bp, Shigella boydii
atgaaaggattattatctttactcattttttctatggtccttcctgcacatgccggaattgttatctacgggacgcgcattatttacccggcagaaaataaagaagtgatggtgcagttgatgaaccagggaaaccgttcttcgctgctgcaggcgtggattgatgatggcgatacgtcattaccaccagaaaaaattcaggttcctttcatgttaacgccaccagtggcaaaaataggggcaaattccgggcagcaagtaaaaatcaaaattatgccgaataaactgcccactaataaagaaagcattttttatctgaatgttctggatattccaccaaatagtccagagcaagaaggtaagaatgcactgaagtttgcgatgcaaaacagaattaagttgttttaccggccagcgggtattgctccggtaaataaagcgacatttaaaaaattgctggtaaatcgcagtggcaatggtttggtgataaaaaatgactcagctaattgggtgacgatttcggatgtcaaagctaataatgtcaaagtcaattatgaaactattatgattgcccccttagaaagtcagagtgttaatgtcaaaagtaataatgcaaataactggcatctgaccattatcgatgaccatggcaactatattagtgacaaaatttaa

SEQ ID NO: 463030 - DNA, 543 bp, Shigella boydii
atgaaacgttcaattattgctgccgctgtcttttcttctttttttatgagcgctggagtatttgctgcagacgttgataccggaacattaactattaaggggaatattgcagaatctccgtgtaaattcgaagcgggtggtgattcagtaagtattaatatgccgactgtaccaaccagtgtctttgaaggtaaagctaaatattctacctatgatgatgcagtcggtgtaaccagcagcatgttaaaaattagctgcccgaaagaagttgctggtgtaaaactctcgttgattaccaacgataaaataaccggtaacgataaggcgatagccagtagcaacgataccgtgggttactatctctatttaggtgataacagcgatgtcctggatgtttctgcaccttttaacattgagagttataaaacagcggaaggtcaatatgctattccgtttaaagcaaaatacctgaaactgacagataactcagtgcaatcaggtgatgtgttatcttctctggttatgcgtgtggcgcaggattaa

SEQ ID NO: 463031 - DNA, 1710 bp, Shigella boydii
atgtctgaagaaaaattaggtcaacattatctcgccgcgctgaatgaggcatttccgggcgtcgtgctggaccacgcctggcagaccaaagatcagctgactgtcaccgtaaaggtgaactatctgccggaagtggtggagtttctctactacaagcaggggggctggctgtcggtgctttttggtaacgacgaacgcaaactgaatggtcattacgccgtttattacgtgctgtcgatggagaaggggactaagtgctgggtaacggttcgcgtcgaagttgatgccaacaaaccggagtatccgtccgtgacgccgcgcgttccggcggcggtgtggggcgagcgcgaagtgcgcgatatgtacggtttgattccggttggtctgccggatgaacgccgtctggtgctgccggatgactggccggatgaactttatccgctgcgtaaagacagcatggattatcgtcagcgtccggcaccgaccaccgatgctgaaacctacgagttcatcaacgaactgggcgacaagaaaaacaacgtcgtgccgattggtccgctgcacgtcacttctgacgaaccgggccacttccgtctgttcgtcgatggcgaaaacattatcgacgcagactaccgcttgttctatgtccatcgcggtatggaaaaactggcggaaacccgcatgggttataacgaagtgaccttcctctctgaccgtgtgtgcgggatctgcggcttcgcccacagcaccgcctacaccacgtcggtggaaaacgcgatgggtattcaggtgccagaacgtgcgcagatgatccgcgccattctgctggaggtggaacgcctgcactcgcatctgctcaacctcggcctcgcctgccactttaccggcttcgactccggctttatgcaattcttccgcgtgcgtgaaacctccatgaaaatggccgagatcctcaccggtgcgcgtaaaacctacggcctgaacctgatcggcgggattcgtcgcgatctgttgaaagatgacatgatccagacccgccagctggcgcaacagatgcgtcgtgaagtgcaggagctggtggatgtgctgctgagcacaccgaacatggaacagcgcaccgtcggcattggtcgtctggacccggaaattgcccgcgatttcagtaacgttggcccgatggtccgcgccagcggacacgctcgcgatacccgcgctgatcacccgtttgttggttatggcctgctgccaatggaagtccacagcgagcagggctgcgacgttatttcgcgtctgaaagtgcgtatcaacgaagtctataccgcgctgaacatgatcgactacggtctggataacctgccgggtggcccgctgatggtggaaggctttacctacattccgcaccgtttcgcgctgggctttgccgaagcgccgcgcggtgatgatatccactggagcatgactggcgacaaccagaagctgtaccgctggcgctgccgtgccgcgacctacgcgaactggccgaccctgcgctacatgctgcgtggcaacactgtttccgatgcgccgctgattatcggtagcctggacccttgctactcctgtaccgaccgcatgactgtggtcgatgtacgtaagaagaagagcaaagtggtgccgtacaaagaactcgagcgctacagcattgagcgtaaaaactcgccgctgaaataa

SEQ ID NO: 463032 - DNA, 210 bp, Shigella boydii; identical to SEQ ID NO: 9340

SEQ ID NO: 463033 - DNA, 2118 bp, Shigella boydii
atgcgtcgccgtgtctacaatccggaccgcctgaaatatccgatgaaacgagtcggggcgcgcggtgaaggcaaattcgagcgcattagctgggaagaagcctacgacatcatcgcgaccaatatgcagcgcctgatcaaagagtacggcaacgagtctatctatctgaactatggcaccggtacgctgggcggcaccatgacccgctcctggccgccgggaaataccctggtcgcgcggctgatgaactgctgcggcggctatctgaaccattacggcgactactcctccgcgcaaattgcggaaggtttgaactatacctacggcggctgggcagatggcaacagcccgtcggatatcgaaaacagtaagctggtagtgctgtttggtaataaccctggcgaaacgcgaatgagtggcagtggggtgacttactatcttgaacaggcacgccagaaatctaatgcccgcatgatcatcatcgatccgcgctataccgacaccggtgccgggcgcgaagatgagtggatccctattcgtccgggaacagatgccgcactggttaacggtctggcgtacgtcatgatcactgaaaacctggtggatcaggcattcctcgataaatattgcgttggctacgatgagaaaaccctgccagccagtgcgccgaaaaatggccactataaagcttatattctgggtgaagggccagatggcgtggctaaaacaccggaatgggcctcacaaatcaccggtgttccggcagacaaaatcatcaaactggctcgtgaaatcggcagtaccaaaccggcgtttatcagccagggatggggcccgcagcgtcacgctaacggtgaaatcgcaacccgtgctatctcgatgctggcgattctgaccggtaacgttggtattaacggaggcaacagcggcgcgcgtgaaggttcatacagcttaccgtttgtccgtatgccgaccttggaaaacccgatccagaccagcatttcgatgtttatgtggaccgatgccattgaacgtggcccggaaatgacggcgctgcgtgatggtgtacgcgggaaagataagctggatgtgccgatcaaaatgatctggaactatgccggtaactgcctgattaaccagcattctgaaatcaaccgtacccatgaaatccttcaggatgataagaagtgcgagctgattgtggttatcgactgccacatgacctcatcggcgaaatatgctgacatcctgctgcctgactgcaccgcttccgaacagatggactttgcgctggatgcatcctgcgggaatatgtcttacgtgattttcaacgatcaggtgattaaaccgcgctttgaatgtaagaccatctatgaaatgaccagcgaactggcaaaacgtcttggcgttgagcaacagtttactgaaggccgtacacaggaagagtggatgcggcatctgtatgcccagtcgcgggaagcgattcctgaactaccaacgtttgaagagttccgcaagcaggggatctttaaaaagcgcgacccacaagggcaccacgttgcttataaagctttccgtgaagatcctcaggcaaattcactgaccacgccatcgggcaaaattgagatttattcgcaggcgctggctgacattgccgctacctgggaattgccagaaggagatgtgatcgatccactgccgatctacacgccgggctttgaaagttatcaggatccgttgaacaaacagtatccgctgcagcttacgggtttccactataaatctcgcgttcactcaacttacggcgacgttgatgtgctgaaagcagcttgccgtcaggaaatgtggatcaacccgcttgatgcgcaaaaacgcggtatcaacaacggcgataaagtcaggatctttaacgatcttggtgaggttcatattgaggcgaaagtgacgccacgaatgatgccgggtgtggtcgcactgggtgaaggtgcctggtatgacccggatacaaaacgtgtcgataagggcggttgtatcaacgtactgaccactcaacgtccgtctcctctcgctaaggggaatccgtcacatacaaaccttgttcaggttgaaaaggtgtaa

SEQ ID NO: 463034 - DNA, 210 bp, Shigella boydii
gtggtgccgaccacctggaacgccagcccgcgcgatcccaaagggcagattggcgcttatgaagcggcgctgatgaacaccaaaatggcgatccccgagcaaccgctggagatcctgcgtactctgcacagctttgacccgtgcctcgcctgttcaacacacgtgctgggcgacgacggtagcgagctgatctccgtgcaggtgcgttaa

SEQ ID NO: 463035 - DNA, 1119 bp, Shigella boydii; identical to SEQ ID NO: 458544

SEQ ID NO: 463036 - DNA, 210 bp, Shigella boydii; identical to SEQ ID NO: 9340

SEQ ID NO: 463037 - DNA, 921 bp, Shigella boydii
atgagtcaggctaaatcgaacaaaatgggcgtcgttcagttaaccatactgacgatggtcaacatgatgggctccggtatcatcatgctgccgacaaagcttgccgaagttgggacaatctcaattatctcctggctggtgacagccgtaggctcaatggcactggcatgggcattcgcaaaatgcggtatgttcagccgtaaatcaggcggtatgggcggttatgcggagtatgctttcggtaagtccggcaattttatggcgaactacacctacggtgtctcgctgctgattgctaacgtcgcgattgctatttcggcggttggttacggcaccgaactgctcggcgcgagtttgtcgccagtgcagattggtcttgcgaccatcggagtgctgtggatttgtaccgtggctaactttggtggtgcgcgcattaccgggcaaatcagtagcattactgtgtggggagtcattattccggtcgtcggtctgtgcattattggctggttctggtttagtccgacgctgtacgctaactcatggaacccgcaccatgtgccgttctttagcgctgtaggttcttccatcgccatgacgttgtgggctttcctcggtctggagtcagcctgtgccaacgccgaagtagtggaaaacccggaacgtaacgtgccgattgcagttcttggcggtactttaggtgcggcggtgatttatatcgtctccaccaacgtgattgccgggattgtgcctaatatggagctggcaaattcaacggcaccatttggcctggctttcgcacagatgttcacaccagaagtgggtaaagtcattatggcgctgatggtgatgtcctgctgcggttcactgcttggctggcggttcactgcttggctggcagttcaccattgcccaggtgtttaa

SEQ ID NO: 463038 - DNA, 2685 bp, Shigella boydii
atgaataacgaacccttacgtcccgaccccgatcgtctgctggaacaaactgccgcgccgcatcgggggaagctgaaagttttcttcggtgcctgtgcaggcgtcgggaagacctgggcgatgctggcagaagcccagcgactgcgggcgcaagggctggatattgtggttggcgtggtagaaacccacgggcgaaaagataccgacgcaatgctggaagggctggctgttctgccgccaaaacgcctggcgtaccgtgggcggcacatctgcgagtttgacctcgatgccgccctcgcccgccgtccggcgctgatcttaatggacgaactggcgcacagtaatgcgctaggttctcgtcaccctaaacgctggcaggacatcgaagagctgctggaagcaggcattgatgttttcactaccgtcaacgttcagcatctggaaagtctgaatgatgtggtcagcggcgtcaccggaattcaggtacgggaaaccgtgcccgatccttttttcgatgccgccgacgacgtggttctggtggacttgcccccggacgatctgcgccagcggctgaaagaaggcaaagtctatattgccgggcaggcggagcgcgccattgaacattttttccgcaaaggcaatctgatcgccctgcgcgaactggcactgcgccgtactgccgatcgcgttgatgagcaaatgcgcgcctggcgggggcatcctggcgaagagaaagtctggcacacgcgcgacgcgatccttttatgcatcggccataacaccggtagtgagaagctggtccgcgcggcggcgcggctggcgtcacggctgggtagcgtctggcacgcggtgtatgttgaaacccctgccctgcaccgcttaccggaaaaaaaacgtcgggcaattctcagcgccttacgtctggcgcaggagctgggcgcggagacggcaacactttctgatccagcggaagaaaaagcagtagtgcgttatgcccgtgaacataatctcggcaagattattctcggtcgcccggcctcgcgccgctggtggcgtcgggaaacgtttgctgaccgactggcgcgcatcgcccccgatctcgatcaggtgctggtcgcgcttgatgaaccacccgcccgcacgattaacaacgcgccggatagccgctcttttaaagacaagtggcgggtacagattcagggatgcgtggttgccgccgcgttatgcgccgttatcactttaattgccatgcagtggctgatggcgtttgatgccgccaacctggtgatgctgtatctgcttggcgtggtggtggtggcgctattttatggacgctggccttcggtggttgctaccgtcattaatgtggtgagtttcgatctcttttttatcgccccacgcggcacgctcgccgtctctgatgtgcaatatctgctgaccttcgcagtgatgttaaccgtcgggctggtgatcgggaaccttactgctggcgtgcgttatcaggcgcgggtagcccgttaccgcgagcaacgcacacggcacttatatgaaatgtcgaaagctctggcggtgggccgcagtccgcaggacatcgccgccaccatcgaacaatttattgcctccacgtttcatgcccgcagtcaggtgttgttgcccgatgacaacggtaaattgcagccgttaacacatccgcaaggaatgacgccatgggacgataccatcgcgcagtggagttttgataaaggcctgcctgcgggcgcgggcaccgacacgttacccggtgtaccgtaccagattttgccgctaaaaagcggcgagaaaacctacgggctggtggtggtggagccggggaatctgcgccagttgatgatcccggaacagcagcgcctgctggagacgtttacgctgttagtcgccaatgcccttgagcggctgacgctaaccgccagcgaagaacaggcgcggatggcaagcgaacgtgaacagatccgcaacgccctactggcagcgctttcgcatgatttacgcacgccgctcacggtgctgttcggtcaggcagaaatcttaacgctcgatctggcaagcgaaggatcgccccacgcccgccaggccagcgagattcgtcagcatgtgctgaacactacccgactggtgaataatctactggatatggcgcgaattcagtccggcggctttaatttgaagaaagagtggttaacgctggaagaagtggtcggtagcgcgctgcaaatgctggaaccgggtttatcgtcgcccatcaatctttctctgccagaaccgctgaccttaatccacgttgacgggccactctttgaacgggtgctgattaatctgctggagaacgcggtgaaatatgcgggtgcgcaggccgaaattggtatcgatgcccacgttgagggcgaaaatctacaactggatgtctgggataacggccccggtcttccgccaggccaggagcagacgatatttgataagtttgctcgcgggaataaagagtcggcagtaccgggggtagggcttggactggcaatttgtcgggcgatagtggatgtacacgggggcactattaccgcgttcaaccgaccggaaggtggtgcctgttttcgtgttacacttccccagcaaactgcccctgaacttgaagaatttcatgaggatatgtga

SEQ ID NO: 463039 - DNA, 225 bp, Shigella boydii
atgccgatgaaatttgatgagatattaaaacagcgtgataaataccatgctgacaacatggagacgatgagcatcaatgattaccgcgcattcctggagacgggcgcactgattgaaaaggatcagcatggttttgtgagatgtgctctatccggtgaaatgctggcggtaaatcctgaacagatagatgcattgatagaatttctgaaagagatcagagactga

SEQ ID NO: 463040 - DNA, 423 bp, Shigella boydii
atggcggatctgtacagtcatcgctgggaaattgaactgggatacagggagataaaacagacgatgcaactgagcaggctgacgctgagaagtaaaaagccggagcttgtggagcaagagctgtggggtgtcttactggcttataatctggtgagatatcagatgattaaaatggcggaacatctgaaaggttactggccgaatcaactgagtttctcagaatcatgcggaatggtgatgagaatgctgatgacattgcagggcgcttcaccgggacgtataccggagctgatgcgcgatcttgcaagtatgggacaacttgtgaaattaccgacgagaaggggaagggccttcccgagagtggtaaaggagaggccctggaaataccccacagccccgaaaaagagccagtcagttgcttaa

SEQ ID NO: 463041 - DNA, 1338 bp, Shigella boydii
atgggaagccaggaactccaacgcaagctcggattttgggccgttcttgcaatcgccgtcgggacaaccgtcggctccggtatttttgtatctgtgggtgaagtggcaaaagcagcgggcacgccgtggcttacggtgctcacgtttgtcattggcgggttaattgtgatcccgcaaatgtgcgtctatgcggaactatccaccgcttatccggaaaatggcgcagattatgtttatctgaaaaatgccggaagccgaccgctggctttcctctccggctgggccagcttctgggccaacgatgcgccgtcattgtcgattatggcgctggcgattgtcagcaatcttggctttttaacgcctatcgatccgttgcccggtaaatttatcgccgccggattaattatcgcctttatgttgctacacctgcgctccgttgaaggcggcgcagcgtttcagacgctaattaccatcgccaaaattatcccgttcactatcgtcattggccttgggatcttctggtttaaagcggagaattttgccgcccctaccaccactgcgattggcgcaacgggcagctttatggcgctgctggcggggatctctgccaccagttggtcgtataccggcatggcctctatctgttatatgaccggcgaaattaaaaaccccggaaaaaccatgccacgagcgctgattggttcctgtctgctggttctggtgctctacaccctgctggcgctggtgatttccgacctgatgcccttcgacaaactcgccaattctgaaacgccgatttccgacgccctgacctggatccccgcactcggcagcaccgctgggatctttgttgccatcacggcgatgatcgtcattcttggttcgctttccagctgcgtgatgtaccagccgcggctggaatacgcgatggcgaaagacaacctgttctttaaatgcttcggccatgtgcatccgaaatacaacacgccggatgtctccatcatcctgcaaggggcgctggggctcttcttcatcttcgtttccgatctcaccagcctgctgggttatttcaccctggtgatgtgtttcaaaaataccctcaccttcggctccatcatctggtgtcgtaaacgcgacgattacaaaccgctgtggcgtactcctgctttcgggctgatgaccaccctcgccattgcgtcaagcctcattctggtcgcctcaacctttgtctgggcaccgattcccggccttatctgcgccgtcatcgttattgctactggtctgcctgcttacgccttctgggcgaagcgtagccgccagctcaacgctttgtcgtaa

SEQ ID NO: 463042 - DNA, 210 bp, Shigella boydii
atgacggatggctggccgctgtatgaatcacgcctgaagggaaagctgaacgttatcagcaagtgttacactcagcgcattgagcgacataatctgaatctgagacaacatctggcaaggctgggacggaagtcactgtcgttctcaaaatcggtggagctgcatgacaaggtcatcgggcattatctgaacataaaacactatcagtaa

SEQ ID NO: 463043 - DNA, 519 bp, Shigella boydii
gtggcagaacgacctgaccagctgtgggtggctgattttacttacgtcagcacatggcagggcttcgtctatgtggcgttcattattgatgtgtttgccggatacatcgtggggtggcgggtctcatcgtccatggaaacgacattcgtgctggatgctctggagcaggcgttatgggcccgtcgaccgtccggcacggtccatcacagtgataaaggttctcagtatgtatcgctggcctacacacagcggcttaaggaagccggattactggcatcaacaggaagtacaggcgactcgtatgacaacgcgatggcggagagcatcaatggtctttacaaagcggaggtaatacaccgtaagagctggaaaaaccgtgcagaagtggaactggccacactcacgtgggtggactggtataataatcgacgattgctggaaaggctgggccacatccctccggcagaagcagaaaaagcttattatgcttccatcggaaacgatgatctggcagcctga

SEQ ID NO: 463044 - DNA, 879 bp, Shigella boydii
atgttacgtcctgtagaaaccccaacccgtgaaatcaaaaaactcgacggcctgtgggcattcagtctggatcgcgaaaactgtggaattgatcagcgttggtgggaaagcgcgttacaagaaagccgggcaattgctgtgccaggcagttttaacgatcagttcgccgatgcagatattcgtaattatgtgggcaacgtctggtatcagcgcgaagtctttataccgaaaggttgggcgggccagcgtatcgtgctgcgtttcgatgcggtcactcattacggcaaagtgtgggtcaataatcaggaagtgatggagcatcagggcggctatacgccatttgaagccgatgtcacgccgtatgttattgccgggaaaagtgtacgtatcaccgtttgtgtgaacaacgaactgaactggcagactatcccgccgggaatggtgattaccgatgaaaacggcaagaaaaagcagtcttacttccatgatttctttaactatgccgggatccatcgcagcgtaatggtctacaccacgccgaacacctgggtggacgatatcaccgtggtgacgcatgttgcgcaagactgtaaccacgcgtctgttgactggcaggtggtagcaaatggtgatgtcagcgttgaactgcgtgatgcggatcagcaggtggttgcaactggacaaggtaccagcgggactttgcaagtggtgaatccccacctctggcaaccgggtgaaggttatctctatgaactgtgcgtcacagccaaaagccagacagagtgtgatatctacccgctgcgcgtcggcatccggtcagtggcagtgaaggacgaacaaccacaaaccgttctactttactggctttggtcgtcatga

SEQ ID NO: 463045 - DNA, 210 bp, Shigella boydii
atgacggatggctggccgctgtatgaatcacgcctgaagggaaagctgaacgttatcagcaagcgttacactcagcgcattgagcgacataatctgaatctgagacaacatctggcaaggctgggacggaagtcactgtcgttctcaaaatcggtggagctgcatgacaaggtcatcgggcattatctgaacataaaacactatcagtaa

SEQ ID NO: 463046 - DNA, 870 bp, Shigella boydii; identical to SEQ ID NO: 462147

SEQ ID NO: 463047 - DNA, 480 bp, Shigella boydii
gtggcggacctgacgtatgttgccacacaggagggatggttgtacctcgctggcatcaaagatgtttatacgtgcgaaattgtcggctacgccatgggagagcgcatgacaaaagagctgacaggtaaagccctgtttatggcgctcaggagccagcgcccacctgccgggctaatccaccactctgatcgaggttcacagtactgcgcatacgattaccgggtcatacaggagcagtctggtctgaaaacatcaatgtcacgtaaaggtcactgttacgacaacgctccgatggaaagcttctggggaacgctgaaaaatgagagcctgagccactatcgttttaataaccgggatgaagccatctcagtaatacgggaatacattgagattttctacaatcgtcagcgtcgtcactctcgtctggggaatatctccccggcagccttcagggaaaaatatcatcagatggctgcttaa

SEQ ID NO: 463048 - DNA, 237 bp, Shigella boydii
atgacttttttaaaatccccatatattaatgatgtaagaatactggattggtgttttaataaaagaatgcaatattttggtgattctgaaaagataaagtatgcatgctccgtgataaatcatattgattttagccgcgatcaatctaaagattttagctgcgatcaatctaaaattaaaatagctgagaccttatttttcaatctcgataaagaaccctataaaaatagccggtaa

SEQ ID NO: 463049 - DNA, 210 bp, Shigella boydii; identical to SEQ ID NO: 9340

SEQ ID NO: 463050 - DNA, 588 bp, Shigella boydii
atgtatcggatagttctggggaaagtttcgaccttaagcgcagctccactgccaccgggtttacgcgagcaagcaccgcaaggtccacgacgcgaacgctggctggcggggcgtgcattgctttcgcacacgctttccccgctaccggagatcatctatggcgaacaaggcaaacctgcattcgcgccggaaacgccgctatggttcaacttaagccatagcggtgacgatatcgctctgctgttgagcgatgaaggcgaagtcggctgcgatatcgaagtgattcgcccgcgcgccaactggcgctggctggcgaacgccgtgttcagcctcggggaacacgctgaaatggacgccgtgcatcctgatcagcaactggaaatgttctggcgcatctggacgcgcaaagaagccatcgttaaacagcgtggcggcagcgcctggcaaatcgtcagcgtagatagcacctatcactcctcgctgtcagtcagccattgtcagctagaaaatttaagccttgcgatctgcacccccaccccctttacgctcaccgccgacagtgtgcaatggatcgattcagttaactga

SEQ ID NO: 463051 - DNA, 204 bp, Shigella boydii
atgatgggccatcgcctggggatgtccaccatggtggtatttctttcattgttaatttggggatggctgctcggcccggtagggatgctactttcggtgccattaaccagcgtgtgtaaaatctggatggaaaccaccaaaggcggtagcaaactggcgattttactggggctaggcagaccgaaaagtcggttaccgggatga

SEQ ID NO: 463052 - DNA, 381 bp, Shigella boydii; identical to SEQ ID NO: 458903

SEQ ID NO: 463053 - DNA, 162 bp, Shigella boydii
atgcacattggacaggctcttgatctggtatcccgttacgattctctgcgtaacccactgacttctctgggggattggatttgcccctatatttccagacatctgttatcacttaacccattacaagcccgctgccgcagatattcccgtggcgagcgataa

SEQ ID NO: 463054 - DNA, 219 bp, Shigella boydii
atgtttgagtccggccttcgcaccacaccgtatgcaaatcgagtcgctcaagagcggctttttttgtgtctgaaatcacccatatccgtgcagtatataggcctgccagaaaagcagttcagtattcttcattttgtagtcgatggtcccaagtttgctctggctggaagctgcatcgtccacattacgtgggcagggtggtttcgctatgctacttga

SEQ ID NO: 463055 - DNA, 153 bp, Shigella boydii
atgtctgatatcacagcctaccgtccggaagtggtcaacgagaatacggacgttatctgctcaaccagcatccgccgcattctggctgtacgaaagagttcactgctgcaaatcgacacaattatccggcatcaagtgagcgatatcagttaa

SEQ ID NO: 463056 - DNA, 198 bp, Shigella boydii
atgaaatcattaaccacggaaaccgcactggatattctgattgcgtggctgcaggacaatatcgactgcgaatcgggaattatctttgacaacaatgaggataaaacggattcagcagcactgttgccctgtatcgaacaggccagagaagatatccgtaccctgcgccaactgcagcttcagcaccagaaccggtga

SEQ ID NO: 463057 - DNA, 489 bp, Shigella boydii
atgaaactttccctgatgctggaagccgacagaattaatgtgcaggcactgaacatggggcgaattatcgttgacgtcgatggtgttaatctcactgaactgattaacaaggtcgctgaaaacggttattcactccgcgtggtggaggaatccgaccaacagtcaacctgcacactaccaccgtttgcaacccttgccggcatacgctgcagtaccgcacatatcacggaaaaggataacgcctggctgtactcgctgtcgcatcagaccagtgacgttggtgaatcagaatggattcatttcacaggtagcggatatctgttacgtaccgatgcgtggtcatatccggttctgcggcttaaacgcctggggctgtcaaaaacgttccgtcgtctggttatcacgcttacccgacgttatggcgtcagtctcattcatctggatgccagcgctgaatgcctgccgggtttacccactttcaactggtaa

SEQ ID NO: 463058 - DNA, 375 bp, Shigella boydii; identical to SEQ ID NO: 4464

SEQ ID NO: 463059 - DNA, 369 bp, Shigella boydii
gtgtcagacacactttccgggacaacgcatcccgatgacaatgacgaccatccctggtggggactaccctgcacagtgacgccctgtttcggcgcccgtctggtgcaggagggtaaccgcctgcattaccttgccgaccgcgccggtatcagaggcctgttcagcgatgcagatgcgtaccacctggaccaggcctttccgctactgatgaaacaactggaactcatgctcaccagcggtgaactgaatccccgccatcagcataccgtcacgctgtatgcaaaaggtctgacctgcaaagctgacactctcggtagcggtggttacgtttatctggctgtttatccgacgcccgaaacgaaaaagtaa

SEQ ID NO: 463060 - DNA, 222 bp, Shigella boydii
atgaaaatcatcacccgtggtgaagccatgcgtattcaccgtcagcatcctgcatcccgtctttttccgttctgtaccggtaaataccgctggcacggtagtgctgaagcgtataccggtcgtgaagtgcaggatattcccggtgtgctggccgtgtttgcagaacgccgtaaggacagttttggtccgtatgtccggctgatgagcgtcaccctgaactga

SEQ ID NO: 463061 - DNA, 822 bp, Shigella boydii
atgcgattagccagtcgttttggttatgctgcaaaccagatacgtcgtgaccgcccactgacacatgaagagctgatgcaccatgtgccggggattttcggggaagataaacacacgtcccgaagccagaactatacgtacatccccactatcaccgtactggaaagcctgcagcgggaaggttttcagccctttttcgcctgccagacccgtgtgcgcgacccgggccgccggggatacacaaaacacatgctgcgtctgcggcgggccggagagataaacggagaacatgtccctgaaattattctgctcaactctcatgacggtacctccagctaccagatgctgccgggttacttcaggttcgtctgccagaacggatgcgtctgtggtcagtctctgggggaagtgcgtgttccgcaccggggaaatgtggtggacagagtcattgaaggggcttacgaggtggtgggcgtgtttgaccggattgaggaaaagcgtgatgccatgcagtcgctgattctgccgccaccggcacgccaggcgctggcacaggcggcactgacttaccgttatggtgacgaacatcagcccgtcaccaccgccgacattctgacgccacgacgccgggaggattacggtaaggacctgtggagtgcttatcagaccattcaggagaatatgctgaaaggcggaatttcaggtcgcagcgctaaaggaaaacgtatccatacccgtgccattcacagcattgacactgacattaagctcaaccgcgcattgtgggtgatggcggaaaccctgctggagagcctgcgctga

SEQ ID NO: 463062 - DNA, 156 bp, Shigella boydii
atgccgggttacacagagtatgtcctggctgaaggatctttctcatacgggcaggcggttgctgtcataaccgcttaccgcaatgtgtttatccaggatgacccgggaatgcattttcgtcgggttatccgcaacgcggaaggtcagcgacgctga

SEQ ID NO: 463063 - DNA, 456 bp, Shigella boydii
atgattcacctgttcaaaacctgcatgattaccgccttcattctggggttaacgtggtctgccccactccgggcacaggatcaacgttacatcagtatacgcaatacagatacgatatggctcccgggaaatatttgtgcctaccagttccggctggataatggcggaaacgatgaaggatttggccccctcaccatcactctgcaactcaaagacaaatatggtcagacgctggtgaccagaaaaatggaaacggaagcctttggtgacagtaatgccacgcgaaccacagacgcatttctggaaacggagtgcgtggaaaatgtcgccacaaccgaaatcattaaagcaactgaagaaagtaacggccatcatgtcagtctgccgttatcggttttcgatccccaggactaccatccactgctgattaccgtttccggaaaaaacgttaactga

SEQ ID NO: 463064 - DNA, 2517 bp, Shigella boydii
atgttacagatagtcggcgcgctgattctgctgatcgcaggatttgccattcttcgccttttgttcagagcattaaccagcacagcgtctgcgctggcagggttcatattgctgtgtctgttcggtccggctttactggctggctatatcactgaacgcataacccggttattccatattcgctggctggcaggcgtatttctgacgattgccggaatgatcatcagcttcatgtggggacttgatggtaaacatatcgcactggaggctcatacttttgactctgtaaaatttattctgaccaccgctctcgccgctggtctgctggttcttcccgtgcagataagaaccattcagcagagcgggctcacacctgaagatatcagcaaggaaattaacgggtattactgctgtttttatactgcttttttccttatggcgtgttctgcatacgcaccattgatcgcattgcagttcgatatttcaccctcactgatgtggtggggcgggttgttgtactggctggctgcattagtgacgctgctatgggcggccagccagatccaggcgctgaaaagactgaccagtgccatcagccagacactggaagaacaaccggtgctcaacagtaaatcgtggctgagcagtttgcaaaacgattacagccttcctgaaacgctgacggagcgcatctggctgacactcatttcacaacggatttcccggggagaactgagggaatttgaactggcagacggaaactggctactggacaatgcctggtatgaaagaaacatggcagggtttaacgaacagttgaaagagaacctgtcattcacacctgatgaactgaaaacgctcttccggaaccgcctgaatttatcaccggaagcgaatgacgattttctcgatcgttgcctggacggcggtgactggtaccccttttcagaaggccgccgttttgtatcattccaccacgtggatgagcttcgtatctgtgcctcctgcgggctgacagaagtacatcatgccccggaaaatcataagccggatccggaatggtactgctcctctctttgtcgcgaaacagaaacactgtgtcaggacatttctgaacgttcttacaccggttttatttccgatgcaacggcgaatggtctgattctcatgaaactgccggaaacctggagtacaaatgagaaaatgtttgcttccggagggcagggacatgggtttgccgctgaacggggaaaccatattgtcgacagagtccgtctgaaaaacgcacggatcctcggtgataataatgccagaaatggagcagacagactggtcagcggaacagaaatccagacgaaatattgttcaactgcagcccgtagcgtcggtgcggcattcgacggacaaaacggacagtatcgttacatgggaaatcatggtcccatgcaactggaagtcccccgtgatcagtatgccggcgctgtggaaaccatgaagaataagatccgcgaaggtaaagtacccggtgtaaccgatcccgcagaagcgtcccggctgattcgtcggggacatctgacttatacccaggcccgtaatatcacccggttcgggaccatcgaatcggtcacttatgatattgccgaggggtcggttatcagtctggcggccggagggatcagttttgccctgacggcatcggtcttctggctcagcaccggcgatcgcgatgctgccctgcagacagctgctgtccaggcaggaaaaaccttcacccgcacactggctgtctacgtcacaacccagcaactccaccggctcagtgttgttcagggtatgctgaagcacattgatttttcgactgccagcccgactgtccgactggctcttcagaaggggaccggtgcaggaaatatcagtgccctgaacaaagtaatgaagggtacgctggtgacatctctggcactggtagctgtcacaaccggccctgacatgatcaaaatgttgcggggacggatctccggtgcgcagttcatcaggaatcttgccgtggcatcttccggtgtggcaggtggtgctgtcgggtcagtggcgggcggaatactgttcagtccactgggaccatttggtgcactgacagggcgtgtggttggcggtgttctggggggaatgattgcctccgctgtatcaggaaaaattgccggagcgctggttgaagaagatcgcgtcaaaattctggcaatgattcaggagcaggtgacatggcttgccggcagtttcctgctgaccggacatgagattgaaaatctgaacgagaatctggcccgtgttatcgatcagaatgctctggagatcattttcgccgccggtatacaacaacgggccgcgaccaatatgttaatcaaaccactggtggtcagtatcatcaggcaacgccccgtcatggaatatgatgcatcccatctcggcaatatggttaaccgactggaagaagcattccccccggagttaccggcataa

SEQ ID NO: 463065 - DNA, 3120 bp, Shigella boydii
atgaaacgacatctgaatacctgctacaggctggtatggaatcacattacgggcgctttcgtggttgcctccgaactggcccgcgcacggggtaaacgtggcggtgtggcggttgcactgtctcttgccgcagtcacgtcactcccggtgctggctgctgacatcgttgtgcacccgggtgaaacagtgaatggcggaacactggtaaaccatgacaaccagtttgtatccggaacagctgatggcgtgactgtcagtaccgggcttgagctggggccggactctgatgacaacaccggcggtcagcagatagcccggggtggcactgccagaaacaccacggtcaccgcaaacggtctgcaggatgtcatggcaggtggcagtgccacggatacggttatcagtgccggtggaggacagaatctgcgcgggcaggcttacggtactgtccttaacggtggtgaacaatggatacatgcaggcggcagtgcatccggaacggtgattaaccagtctggctaccagaccattaaacatggcgggcaggcaaccggaaccatcgtcaacaccggtgcagaaggtggtccggagtctgaaaatgtgtccagcggtcagatggttggagggacggctgaatccaccaccatcaacaaaaatggccggcaggttatctggtcttcggggatggcacgggacaccctcatttacgccggcggtgaccagacggtacacggcgaggcacataacacccggctggagggaggaaaccagtatgtgcacaaatacggacttgcgctgaacacggtaattaacgaggggggctggcaggtgattaaggaaggaggaactaccgcgcataccaccatcaaccagaaaggaaagctgcaggtgaatgccggcggtaaagcgtctgatgtcacccagaacacgggaggtgcactggttaccagcacagctgcaaccgtcaccggcacaaaccgcctgggagcattctccgttgtggcgggtaaggctgataatgtcgtactggaaaatggcggacgtctggatgtgctgagcggacacacagccactaatacccgtgtggatgatggcggaacgctggatgtccgcaacggtggtgccgccaccaccgtatccatggggaatggcggtgtactgctggccgattccggggccgctgtcagtggtacccggagcgacggaacggcattccgtatcggaggcggtcaggcggatgccctgatgctggaaaaaggcagttcattcacgctgaacgccggtgatacggccacggataccacggtaaatggcggactgttcactgccagagggggctcgctggcgggcaccaccacgctgaataacggtgccacgcttactctttccgggaaaacggtgaataacgataccctgaccatccatgaaggtgatgcactcctgcagggaggcgctcttaccggtaacggcagggtggaaaaatcaggaagtggcacactcactgtcagcaacaccacactcacccagaaaaccgtcaacctgaatgaaggcacgctgacgctgaacgacagtaccgtcaccacggatgtcattgctcagcgcggtacaaccctgaagctgaccggcagcacagtgctgaacggtgccattgaccccacgaatgtcaccctgacatccggtgccacctggaatatccccgataacgccacggttcagtcggtggtggatgacctcagccatgccggacagattcatttcacctccgcccgcacagggaagttcgttccgacaactctgcaggtgaaaaacctgaacgggcagaatggcaccatcagcctgcgtgtacgcccggatatggcgcagaacaatgctgacagactggtcattgacggtggcagggcaaccggaaaaaccatcctgaatctggtgaacgccggcaacagtggtacggggctggcgaccaccggtaagggtattcaggtggttgaggccattaacggtgccaccacggaggaaggggcttttgtccaggggaatatgctgcaggccggggcctttaactacaccctcaaccgggacagtgatgagagctggtatctgcgcagtgaagaacgttatcgtgctgaagtccccctgtacgcctccatgctgacacaggcaatggactatgaccggattctggcaggctcacgcagccatcagaccggtgtaaacggtgaaaataacagcgtccgtctcagcattcagggcggccatctcggtcacgataacaacggcggtattgcccgtggggccacgccggaaagcagcggcagctatggcttcgtccgtctggagggtgacctgctcagaacagaggtcgccggtatgtcactgacgacaggagtgtatggtgctgcaggccattcttccgttgatgttaaggatgatgacggctcccgcgccggcacggtccgggatgatgccggcagcctgggcggatacctgaatctgacacatacatcctccggcctgtgggctgacattgtggcacagggaacccgccacagcatgaaagcatcatcggacaataacgacttccgcgcccggggccggggctggctgggttcactggaaaccggtctgcccttcagtatcactgacaacctgatgctggagccacgactgcagtacacctggcaggggctctccctggatgacggtaaggacaacgccggttatgtgaagttcgggcatggcagtgcacaacatgtgcgtgccggtttccgcctgggcagccacaacgatatgacctttggtgaaggcacctcatcccgtgacaccctgcgcgacagtgcaaaacacagtgtgcgtgaactgccggtgaactggtgggtacagccttctgttatccgcaccttcagttcccggggggacatgagcatgggtacagccgcagccggcagtaacatgacgttctcaccgtcacagaatggtacgtcactggacctgcaggccggactggaagcccgtgtccgggaaaacatcaccctgggcgttcaggccggttatgcccacagcatcaacggcagcagcgctgaaggttataacagtcaggccacgctgaatgtgaccttctga

SEQ ID NO: 463066 - DNA, 873 bp, Shigella boydii
atgaatccgtctgatgccattgaggcaattgaaaaaccgctctcctccctgccttactcactttcccgtcacatcctggaacatctgcgcaaactcaccagtcacgaacccgtgattggcattatgggtaaaagcggggccggtaaatcttcactctgtaatgcactgtttcagggggaggtcacaccggtcagtgatgttcacgccggcacccgggaagtgcagcgcttccgtctgagtggtcacggtcacagcatggttatcactgacctgcccggggtgggcgagagccgggacagggatgcagagtatgaagccctgtaccgtgacattctgcctgaactggacctggtgctgtggctgattaaagccgatgaccgggccctgtctgtggatgagtatttctggcgacacatcctgcagtgcggacatcagcaggtgctgtttgtggtgacgcaggctgacaaaacggaaccctgccatgaatgggatatggcaggtattcagccttctcccgcacaggaacagaacattcgtgagaaaacggaggcggtattccgtctgttccggcccgtacatccggttgttgccgtatcggcccgcaccggctgggaactggatacgctggtcagtgcgctaatgacagcacttcccgaccatgccgccagtcccctgatgacccgcctgcaggacgagctgcgcacggaatctgtccgcgctcaggcccgtgaacagtttaccggtgcggtggaccggatatttgacacggcggagagcgtctgtgttgcctctgttgcccgtacggttctgcgtgccgtccgtgacacggtggtctctgttgcccgcgcggtatggaactggatcttcttctga

SEQ ID NO: 463067 - DNA, 1020 bp, Shigella boydii
atgaataacgaacagatgcttatcaaatgcaaagatccccgtaaatgtcggttttatgccgaatatctgaatcacaaataccccaatgaattccctcagtttgcgcctgacaacccacaaaactgtatcagaaatgttaattcgtttttaaaagaaaagtattataaagcttcaaacaattcttttggtgtttttggttcgactgcagaagaagctctcagcaaagaaattaatgaacttgaaattattgcagggcaggcaatactgcctgaagagagttttctctggttgaaaactgacgaacttgcgactttctttacctggactactatttatctgtcgaaggaagaccatacaaaattcccgaaaataaaccataattcatcaggaataaaaaacggaattgaagtcaggaaaatacgaacagttaccgatgaaacgttaaatacttacaaaaaaagtaaccttccggataatccatcatcccataacgaacgaataaaagtaatcatttcatattttgactcctgccattctttaattaataaaaatgcaaaaagcatatacctcgaggaactcagacaggcgtggcttaaaaagaaaagcgcttgtcaaaagtttaagtggctccttcctgatgatgatgaaatgtgtcagtggttctggacaagactgaaacaaaaacaggatgaaaaacatccagtacataacccagtgacccggtggttcataccatcttcaacgaaagaatattatcttgcctctcttgtcgcctttgctttatggaaagaagcgcctgataccattgaactgttcagaacacgaataaatcatgcctggcatcagaaaaaacaaaaggacaaatatcggagtgatggtaaaaaggccattaatatacatataagaagcaatgtgaaagaaatgcttgatgagctcagaactgtttacggtctgagaacaggagagttttttgaaatgctgattacagagaaatatcttgaacacaagcgaaggaagtaa

SEQ ID NO: 463068 - DNA, 573 bp, Shigella boydii; identical to SEQ ID NO: 7168

SEQ ID NO: 463069 - DNA, 207 bp, Shigella boydii; identical to SEQ ID NO: 7169

SEQ ID NO: 463070 - DNA, 210 bp, Shigella boydii
atggaagttaaaaccaaagaagactggctgtatcagttccgtcgttgttcatcccgggagacgctggaaaaagtgatttcccacacacgttataaacttacccctgcggaactggcctttaactctgcggtcgatcaccggctggcagaactgacaatgaacaaactttacgatcgcgtgccggcttccgtctggaaatatgtcacctga

SEQ ID NO: 463071 - DNA, 570 bp, Shigella boydii; identical to SEQ ID NO: 36787

SEQ ID NO: 463072 - DNA, 402 bp, Shigella boydii; identical to SEQ ID NO: 9339

SEQ ID NO: 463073 - DNA, 435 bp, Shigella boydii
atgcgaattctgaactgttatatggcgaatgacagcaaaggccattttgttacggcgaaagaagctgcgaagcacaaccgacaggacgttttgtgctgtgtgtcctgtggatgcccgttaacacttcagcggggcaatgacggacaaccaccgtggtttgaacatgaccagatgactgtcgctgaaaaaatcctgctgcgatgtacctggcttgacccggcagagaaagaggcccgtcgtttgcatctgcagggcatgacggttccggattatacggtgaaggtgagaaagtggttttgtgtgatgtgtgacgaaaattatgagggggaaaagtgctgcccacgctgcggtaccggggtatacagcagggcgtgggggcggcaggaggtgccgtcggaagatgccagggctgataatccgttacagaggctgtaa

SEQ ID NO: 463074 - DNA, 237 bp, Shigella boydii; identical to SEQ ID NO: 16015

SEQ ID NO: 463075 - DNA, 1008 bp, Shigella boydii
atgaacgacatctcttctgacgacatcttcctgctgaaacagcgcctggccgaacaggaagcgctgatccacgccctgcaggaaaagctgagcaaccgggagcgcgaaatagaccatctgcaggcgcagctggataaactccgccggatgaacttcggcagtcgttccgaaaaagtctcccgccgtatcgcacaaatggaagccgatctgaaccgacttcagaaagagagcgatacgctgactggtagggtgtatgacccggcagtacagcgtccgttgcgtcagacccgcacccgtaagccgttccctgaatcactaccccgtgacgaaaagcgactgttgcctgcggcgccgtgctgcccgaactgcggcggttcactgagctatctgggcgaggataccgccgaacagctggagttgatgcgtagcgccttccgggttatccggacggtacaggaaaaacatgcctgtactcagtgcgataccatcgtgcaggcacctgcaccttcgcggcccatcgagcggggtatcgccggaccggggctgctggcccgcgtgctgacctcgaagtatgcagagcacaccccgctgtatcgccagtcagaaatatacggccggcaaggtgtggagctgagccgttcactgctgtcgggctgggtggatgcatgctgccggctgctgtctccgctggaagaggcgcttcatggctatgtcatgactgacggcaaactccatgccgatgataccccggtccaggtactgctgccgggtaataagaagacgaagaccgggcggttgtgggcgtatgttcgtgatgaccgcaatgccgggtcagcgttggcacctgcagtgaggttcgcttacagcccggacagaaaaggcatccatccgcagactcatcttgcttgcttcagcggtgtgctgcaagcggatgcgtacgccgggttcaacgagctgtatcgcaatggtgggataacggaagctgcctgctgggctcatgcccgctga

SEQ ID NO: 463076 - DNA, 1359 bp, Shigella boydii
atgaaaagaaaaattattcccgtgctaatcggttgtacgctctctttctctgccctggcggcacaacctacggctgagcgctatgtcgtcagttttccagaaggcacgcacgtgaactacgccggcgcatttgccagtgcattcccgaacggccttccggttgggataggttctggcctgctgttcaccggtaaacagggcgatgccctgacattcgcaaccattaccgatcgcggtccgaacgcggattcaccgaaagaggggaaaaacgaaactaaaattttcgttacgccagatttcgcgccgctgctgatgacgattcgtgtacaaaacggcaaagcggaggccatcgatccccgtcctctgcatgacgataaaggtgcgatcaacggtctgccgctggcaagcgacgtgattggctccaccaatgaagtggccttcagcgacacgttacatagactgaagggggataatcacgggctggatacggaagggatcactccggatggtaaaggaggttactggctgtgcgatgagtatggcccgttcctgattaacatcgacagtaaagggaaaatcctggcaatccacggtccgcaggcggcggaaggggaaaaagcgattgcgggcggtttgccaaatatcctcaaatggcgtcaggcgaaccgcggctttgaaggcctcacccgtatgccggacgggcgtattattgtcgccgtgcaaagtacgctggatatcgacgctaagagcaagaaaaaggcgctgtttacgcgtctggtgagcttcgatccggcaagcggaaaaaccgcgatgtacggttatcctatcgacagcgcggcctacagcaaaaacagcgacgctaaaatcggagacatcgtggcgctcgataaccagcacatcctgctgatcgaacagggaagagataaaaacaacagaatgcgtaacctgatttacgaggtcgatctcaataaggcgagcgacctgtcaggcttcgacaagccgggtgagtatccggagtttgatgatgagaaaaccctgtcacagcgcggcattacccttgcgcagaaaacgcaggttgttgatctgcgctccttgggctggcagcaggagaaggctgaagggttggcgctgatcgacagcaaaacgctggcggtggcgaacgataacgactttggcgtgaaggtggcgatgcaacatccggtcgagggcaagacattcaaggattatcgggtgaacgcggaaggaaagctgacgcttgacgacaagcaggttgaaacgaccctcagagtgaagccactggagaaaccggagtctgacagtgaactgtggattgtgacgctgccggaagcgttgaaataa

SEQ ID NO: 463077 - DNA, 258 bp, Shigella boydii; identical to SEQ ID NO: 5052

SEQ ID NO: 463078 - DNA, 519 bp, Shigella boydii; identical to SEQ ID NO: 463043

SEQ ID NO: 463079 - DNA, 357 bp, Shigella boydii
gtgaaatacttcaattcgcaaatcgctcaggagtacaaggctattgaaaaaatcgctcagcaaaaactggtcgatatggttccggaagagctgcgggatatctttgcgccgttaattgacgagcatgcatatagcgatgaagaaaaatcgctggtgaaacaggcagatgcactgtgtgcatatctgaaatgtctggaagaactcgcggccggaaataatgaattcttgctggcaaaaacgcgactggaagcgacgcttgaagcgcgtcgcagccaggagatggactacttcatggaagtatttgttcccagcttccatctttcgctcgatgagattagccaggattcaccgctgtaa

SEQ ID NO: 463080 - DNA, 291 bp, Shigella boydii
atggaaattgcatcgaataaaggcgtcattgcagacgcttcgaccccggcgggtcgtgctggaatgagtgagagcgagtggcgagaagcgatcaaattcgacagtactgacaccggctgggtgattatgagtatcgggatggcgattggcgcggggattgtttttctcccggtgcaggtcggtttgatgggattgtgggtatttttgctctcatcggtgattggttacccggcaatgtatctgtttcagcggttgtttattaatacgctggcagaatcacacagaatgtaa

SEQ ID NO: 463081 - DNA, 399 bp, Shigella boydii
gtgctggagcaggtaagtcgggcgctggaggtgatggtggtgctggtcaccgcctgcggtatgttgctgttgctggcacaggtgcaggtgggaatgcgccagcgtcatcaggagctggtggtatggcgcacactcggtgcggggaaaaaactgctgcgcacgacattgtggtgtgagttcgccatgcttgggtttgtttccggcctggtggccgcaattggtgcggaaacggcactggcagtgttgcaggcgaaagtgtttgatttcccgtgggagccagactggcgattgtggattgttctgccgtgcagcggtgcgctgctgctgtcgcttttcggcggctggctgggtgcgcgactggttaagggtaaggcgctgttcaggcagtttgcggggtga

SEQ ID NO: 463082 - DNA, 210 bp, Shigella boydii; identical to SEQ ID NO: 9340

SEQ ID NO: 463083 - DNA, 351 bp, Shigella boydii; identical to SEQ ID NO: 462764

SEQ ID NO: 463084 - DNA, 420 bp, Shigella boydii
atggaacagaaagcattatctgcagaaccccgcagatcattttcaaatgagtttaaacttcaaatggttaaactggcttcacaaccaggagcctctgttgcccgtattgcccgggaacacgatatcaatgataacctgctgttcaaatggctcaggctctggcagaacgaagggcgcatatcgcggcgtcttccggtaacaacctcttctgacactggcgttgaattattacctgtggagataacgccggatgagccgaaagaacctgtggctgctcttacttcgtctttatctactcagactacagttagtgccagctcctgcaaggtggagttccgtcacggtaacatgacgctggaaaatccttcaccagagctgctcacagtgttgatccgtgaactgaccgggaggggacgatga

SEQ ID NO: 463085 - DNA, 366 bp, Shigella boydii
atgagaaatcgattgattgcggcgatattgggcttgtttggcacgctcactggcgttcaggcagctcctgacgtgaccagtgaaattacgtatgatttggcatctggtagagcggattattacttctggaaggatgaagcgtcggcaggaaataatggatatatgtggtatgaatgttcgtatcctgacctccaacaaacctgtacagctaatggaaatatatcgacagtacaaatctatttaactgaacaacgcagtgggatgcgttggccggtaaaactcaaaggatttaaaacagccattgtaagtagcgatgaagcgccgctaggatgcaagggggggcaaagggcttcagacgaatcttaa

SEQ ID NO: 463086 - DNA, 297 bp, Shigella boydii
atgaagaatactaaattactgctggcgattgcgacctctgcagcattactgacagggtgtcaaaatacccacggtattgataccaatatggctatcagctccggtttaaatgcctataaagcagcaacattaagcgatgccgatgcaaaagcgattgccaatcagggctgtgccgaaatggacagcggcaatcaagtcgcaagtaaatccagcaagtacggtaaacgtctggcaaaaatcgccaaagcattgggtaacaatattaatggcacgccggtcaactataggtttatatga

SEQ ID NO: 463087 - DNA, 1428 bp, Shigella boydii
gtggatttctcaatcatggtttacgcagttattgcgttggtgggtgtggcaattggctggctgtttgccagttatcaacatgcgcagcaaaaagccgagcaattagctgaacgtgaagagatggtcgcggagttaagcgcggcaaaacaacaaattacccaaagcgagcactggcgtgcagagtgcgagttactcaataacgaagtgcgcagcctgcaaagtattaacacctctctggaggccgatctgcgtgaagtaaccacgcggatggaagccgcacagcaacatgctgacgataaaattcgccagatgattaacagcgagcagcgcctcagtgagcagtttgaaaacctcgccaaccgtatttttgagcacagcaatcgccgggttgatgagcaaaaccgtcagagtctgaacagcctgttgtcgccgctacgtgaacaactggacggtttccgccgtcaggttcaggacagcttcggtaaagaagcacaagaacgccataccctgacccacgaaattcgcaatctccagcaactcaacgcgcaaatggcccaggaagcgatcaacctgacgcgcgcgctgaaaggcgacaataaaacccagggcaactggggcgaggtagtattgacgcgggtgctggaggcttccggtctgcgtgaagggtatgaatatgaaacccaggtcagcatcgaaaatgacgcccgctcgcggatgcagccggatgtcatcgtgcggctgccgcagggaaaagatgtggtgatcgacgccaaaatgacgctggtcgcctatgaacgctattttaacgccgaagacgactacacccgcgaaagcgcgctacaggaacatatcgcgtcggtgcgtaaccatatccgtttgctgggacgcaaagattatcaacagctgccggggctgcgaactctggattacgtgctgatgtttattcccgttgaacccgcttttttactggcgcttgaccgccagccggagctgatcaccgaagcgttgaaaaacaatatcatgctggttagcccgactacgctgctggtggcgttgcgtactattgccaacctgtggcgttatgagcatcaaagccgcaacgcccagcaaatcgccgatcgtgccagcaagctgtacgacaagatgcgtttgttcatcgatgacatgtccgcgattggtcaaagtctcgacaaagcgcaggataactaccgccaggcaatgaaaaaactctcttcaggtcgcggaaatgtgctggcgcaggcagaagcgtttcgcggtttaggagtagaaattaaacgcgagattaatccggatttggctgaacaggcggtgagccaggatgaagagtatcgacttcggtcggttccggagcagccgaatgatgaagcttatcaacgcgatgatgaatataatcagcagtcgcgctag

SEQ ID NO: 463088 - DNA, 267 bp, Shigella boydii
atgctttacaaaggcgacaccctgtaccttgactggctggaagatggcattgccgaactggtatttgatgccccaggttcagttaataaactcgacactgcgaccgtcgccagcctcggcgaggccatcggcgtgctggaacagcaatcagatctaaaagggctgctgctgcgttcgaacaaagcagcctttatcgtcggtgctgatatcaccgaatttttgtccctgttcctcgttcctcgttcctcgttcctgaagaacagttaa

SEQ ID NO: 463089 - DNA, 1605 bp, Shigella boydii
atgaaaaaaattgctattgtgggtgccgggcctacggggatctacaccttattctcgcttctacagcaacaaactccactttctatttctatcttcgagcaggctgacgaggccggtgtcgggatgccatacagtgatgaggaaaactcaaaaatgatgctggcaaatattgccagtattgaaataccgccgattaattgtacgtatctcgaatggctacaaaagcaagaagccagccatctccagcgttatggcgttaaaaaagaaaccttgcacgatcgtcagtttttaccgcgaattctgctgggcgaatatttccgcgatcaatttttacgattagtagaccaggcacgacagcaaaaatttgcagtggctgtttatgaatcatgccaggttaccgatctgcaaattacaaatgctggcgtcatgctcgctacaaatcaggatttacccagcgagacgtttgatttagcggtgattgccacgggtcacgtctggcctgatgaagaagaagcaaccagaacgtattttcccagtccgtggtcaggcctgatggaagcaaaggtcgatgcgtgtaacgtgggtattatgggaacatccttgagcggactggatgcggcaatggcagtggctattcagcatggttcgttcattgaagatgataaacaacacgtcgtttttaaccgcgataacgcaagtgaaaagctaaatattacgttgatgtcgcgcacgggtattttacccgaagccgatttctattgccctattccctacgagcccttacacatcgtcaccgatcaggcattaaatgctgagattcaaaaaggtgaagagggccttttggatcgggtatttagattgatagtagaggaaatcaagtttgctgatccagactggagccaacgcatagccttagagagcctgaatgtcgattcctttgttcaagcctggtttgccgagcgcaaacaacgcgacccatttgactgggcagaaaaaaatctccaggaagtcgaacgcaataaacgagaaaaacatactgttccctggcgttatgtcattctgcgcctgcatgaagccgtacaggaaattgttccacatctgaatgaacacgaccataaacggttcagtaaaggccttgcccgggtttttatcgataattatgcggcaatcccttcagagtctattcgtcggctgctggccttacgtgaagcggggatcattcatattctcgccctcggtgaagactacgaaatggaaattaatgagtcgcgcaccgtcctgaaaacggaagacaacagctactcgtttgacgtttttattgatgcccgcggacagcgtccgcttaaagtgaaagatattcctttccctgggctacgcgagcaattacagaaaacaggggatgaaatccctgatgttggcgaagattatacgttacagcaacccgaagatattcgtggacgcgtagcgttcggcgcgttgccctggttgatgcacgaccagcctttcgttcagggacttacggcatgtgcagaaattggtgaggcgatggctcgggcggtcgtaaaacctgcatcccgtgcacgtcggcgtctttcgtttgattaa

SEQ ID NO: 463090 - DNA, 678 bp, Shigella boydii
atgaacccggttgatcgtccactattagatattggcttaacgcgattagaattcttgcgtatatcaggaaaaggccttgctggtctaacaattgcccctgcgttactgtcacttttgggttgcaaacaggaagatattgatagcggcacagtagggttgataaatacacccaaaggggtgctggtgacccagcgagcgcgatgcacgggttgccaccgctgtgaaatctcttgtaccaacttcaacgatggctcagtagggacattcttctcccgtatcaaaatccatcgcaattatttctttggcgacaacggggttggctctggcggcggcctgtatggcgatctcaactataccgcggacacctgccgtcaatgcaaagagccgcaatgcatgaacgtctgcccgattggtgcgattacctggcagcagaaagaaggctgtattaccgtcgatcataaacgctgtattggctgtagcgcctgtactacggcatgcccgtggatgatggccaccgtaaataccgaaagtaaaaaatcctcgaaatgtgtgttatgcggtgaatgtgcaaacgcctgcccaacaggggcgttaaaaattatcgagtggaaagatattactgtgagaatcttgcaaaggaaaaaatcatggctaacggttggacaggtaatatattaa

SEQ ID NO: 463091 - DNA, 210 bp, Shigella boydii; identical to SEQ ID NO: 463045

SEQ ID NO: 463092 - DNA, 210 bp, Shigella boydii; identical to SEQ ID NO: 463045

SEQ ID NO: 463093 - DNA, 1107 bp, Shigella boydii
atgcaatatgatttcataattataggttcaggtttatttggtgcggtttgcgcttatgaattaaataaaagaaataaacgtgtgttggtcattgagaaaagggatcatattggagggaatatctatactgaaaaagttgacgatattcacatacataagtatggtgctcatatatttcatacaaacgatcaatatatctggaattatataaataaattcgcttcttttaatagattcactaattctccattagcatatcataaaggtaaattatataacttacctttcaatatgaataccttttatcagttatgggggacaaaaactccttctgaagctcaagataaaatagatttacaaagaagtaaatattctaacataactcccacaaatttagaagaacaagctctttccctggtaggggaagatgtttatgaaaaactaattaaggggtatacggaaaaacaatggggacgttcatgttctgaattaccgccttttattataaaaagaatcccagttcgattcactttcgataataattatttcaccgatagatttcagggggttcctatcggaggatacacacaaataattgataagatgcttaatggtgttgatcttctgcttaatgttgactatttatcagaaaaggataagtataattctatggcggaacggattatatatactgggcctatagatgcttattttgataaaaagttgggaactttagaatatagatccttaaagtttataacaaaaaaaattgaggaggctaattatcaaggcaatgccgtaattaattatactgaaaaagatattccttttactaggataattgagcataagcattttgatgactcttatgaaactgaatatacctttataactgaagagtacccaatagagtggagtgagggtcaagagccttattatcccattaatgataaaaaaaatatggatatatatcataaatatagagagctttcgcaaatggagagtaaagtaattttcggaggacgccttgctgaatataagtattatgatatgcaccaagttatccgttcagcactgaattgtgtaaataaaatattacatgattaa

SEQ ID NO: 463094 - DNA, 531 bp, Shigella boydii
atgaaagttcaagacactgttctggatggagttaaaattattgaaccggtcgtatatggtgacaacaggggtttttttttagaagtatatcaaaaacaacgttatcaaaatttattaaatatagaatttgatttcgtacaagataactattcacgatcaagcaaaaatgttttaagaggattacatttccaaaaaacgaagccacaaggtaaacttgtaagagttgtgcgcggcgaagtttttgatgttgccgtcgatattagaaaagaatcacctaattatggccaatggattggtgtgttactttctgaaatgaataaaaaacaattttgggtaccaccaggtttcgcacatggttttgttgtattatctgaaatggccgattttgaatataaatgcacagaatattatgatcctgaggatgagtgttgtttattatggaatgatccagaactcaatattcaatggcctttaagtaatcctatattatcagataaagatatgaaaggttgcttacttaaagaactttaa

SEQ ID NO: 463095 - DNA, 1029 bp, Shigella boydii
gtggttgtaccggattatgaatataaggattctattttaaaattcggcgctaaatttgagaaggttgatcttaaaccaaaatctattaatatttttactgaatgtacatctctaatatcatattataaaattataaaaaaattcaatccacaggttatattaacgtttacacccaaagctaatatatattgtggtttgcttgcttataaatttgacgcgaaagtgatacctaatatttctggccttggaagtgcatttgttaatagtaatacgatattaagtcaaattgttaagctattatataagatagcattaaagaaagcagcattcgttttttttcaaaacgaggatgatcgtcagttattgattaattctggctgcgtcaattatgagaaaacatgccgaatatttgggtctggtgttgatttatcaaaatttcttccctcaaataagaatttaaagcaaagatcatgtgtgaaattcatacttgttgctagacttctatataccaaaggcatacttcactatcttaaggccgcagaaataataaaatccaaatatcctaattgttcattttcactgttaggtgcatttgaaaaaaatgaaaagataatcacgaaggaattgattgaaggtttttgtacgaggggtatagttaattactatgggacttccgatgacgttgctagtataatgaagcattatgatgcaatagtattaccatcattttatagagaaggtgtacctaaagcgttgattgaaggtgcttctagtgggttagctattttgacaacagataatgttggctgtagggatatggtgcaaaatgaagttaatggttttttgtgtcaacctaatgatcttgatagcttagttgacattattgaaaagtatattctactgacagacgaaatgaaaaacacaatgtctattaagtcgagagaatttgctgaatcacattgtgatgaaaataagatcatagagaagtatactaatacaattaatgacgttttaaatagaaatcactaa

SEQ ID NO: 463096 - DNA, 210 bp, Shigella boydii; identical to SEQ ID NO: 9340

SEQ ID NO: 463097 - DNA, 1050 bp, Shigella boydii
gtgcctatcattacactgattgtgatgagtggatttggtctgatcattccttttatctggccgccatttttcaatcttttcatgctcattggtcactggatttcaacttccggtcctgttggttatttcttctatgctgttgccgaacgcgtgacgataccttttggcttaaatcacttggtgacatcagttttccgctttaccccaatcggcggatcggcagtgattggcggtgaagagtattacggcaccctgaacatgtttatggcatacgtcaaagagaatgcggtcattccgctggatttggcggggaaaatggagcagggcaaactgatgattcagtatggtctggctggagccgcgctggcgatgtatcgcactgctcatgctcaaaacagaagggctatcaaagcattgctgatttccggtgtgctcacggtaattattggcggcgtcagcgagccgattgaatttctgttcttatttgtcagcccgctgttgtttgtcttccatgcctttatgaatggattggctaacatggttctgccatatatgggcgtgaagatgggctttactggcgatctgattcaatttattagctttggtgtcttacgtggcacaagaacgggatggccattagcggtatgtgttgaagtggcttatttcttcatttattactttgtgttccgttggaccattctcaaatttaacctgatgactgtaggccgtgaagagtccagtcctgtcacgctgaacgctcacgaagaaactgcaatagctaacatcccagttcatgataaatcagagttgcaggcagcggagcaaatggttaaggctctgggtggtaaagaaaatattaaatcactggataattgtgtaactcgtttgcgtttaactatcgcggatatgggattgataaatgaggctgcaataaaaagggccggaggaattgcggttgtgaaacttgatcaaaataccttacaagtcattatcggtacaaaagtcatcgccctacgtcgggatatggataattacatggggatatgttga

SEQ ID NO: 463098 - DNA, 1053 bp, Shigella boydii; identical to SEQ ID NO: 459263

SEQ ID NO: 463099 - DNA, 153 bp, Shigella boydii
atgacacaacaaggggatgctgtagccggggagctggcgacagaaaaagtgggcattaaagggtatctggctttttttctcaccataatcttttttccggtgttttttccggaacagacagctggtggcgcgtttttgatttttccgttctga

SEQ ID NO: 463100 - DNA, 252 bp, Shigella boydii
atgaaagagtttttatttcactccacagtcggcgtcatacaaactcgcaaagcgttgcaggcagcgggcatgacttttcgcgtcagcgatattccccgtgatttacgcggcggctgcgggttatgcatttggctgacctgtccccccggcgaagaaatacaatgggtgatccctgggctgactgagtcaatttattgccagcaggatggtgtctggcgctgcattgcacattaccgggtttctccgcgttaa

SEQ ID NO: 463101 - DNA, 585 bp, Shigella boydii
atgaaaaaagtaaatcattggatcaacggcaaaaatgttgcaggtaacgactacttccagaccaccaatccggcaacgggtgaagtgctggcggatgtggcctctggcggtgaagcggagatcaatcaggcggtagcggcagcgaaagaggcgttcccgaaatgggccaatctgccgatgaaagagcgtgcgcgcctgatgcgccgtctgggcgatctgatcgaccagaacgtgccagagatcgccgcgatggaaaccgcggacaccggcctgccgatccatcagaccaaaaatgtgttgatcccacgcgcttcccacaactttgaatttttcgcggaagtctgccagcagatgaacggcaagacctatccggttgacgacaagatgctcaactacacgctggtgcagccggtgggcgtttgtgcgctggtatcgccgtggaacgtaccgtttatgaccgccacatggaaggtcgcgccgtgtctggcgctgggcaataccgcggtactgaaaatgtcggaactctccccgctgaccgcctgggtgagctggcgctggaagccggtattccggcaggcgtgctga

SEQ ID NO: 463102 - DNA, 282 bp, Shigella boydii
atgaataagtattggctgtcaggaattatttttcttgcctatggattggcttctcccgcattctcttcagagactgccacattagcgattaatggcaggatcagtcccccaacatgcagtatggctatggttaatggtcaacctcaacagcattgtggtcagttaacgtataatgttgacacccgtcatctgttttcttcgcccgtcaaaggtgtaacgacagaagtggttgttgcaggtagcgatagcaaacgtcgaatcgtgttaaatcgctacgattaa

SEQ ID NO: 463103 - DNA, 1137 bp, Shigella boydii
atgtctgaactgaacgatcttctgaccacccgtgagctacaacgctggcgattaattcttggcgaagcggcagaaacgacgctttgtgggctggatgacaacgcccggcagatagaccacgcgctggagtggctgtatgggcgcgatcctgaacggctccagcgtggtgaacgttccggtggattaggtggctcaaatctcaccacccctgagtggatcaacagtattcacacgctgtttccgcagcaggtgattgagcggctggaaagcgatgccgtgctgcgctacggcattgaagatgtggtgacgaatctcgacgtgctggaacgtatgcagccttctgaaagcctgctacgcgctgttttgcacaccaaacatctgatgaaccccgaagtactggctgccgcccgccggatagtgtgccaggttgttgaagaaattatggctcgactggcaaaggaagttcgtcaggctttttctggtgtccgcgatcgccgtcgccgttcatttattccactggcgcgaaactttgatttcaaaagtactctgcgcgccaacctgcaacactggcacccgcaacacggcaagttgtatatcgaatccccccgctttaacagccgcattaaacgccaaagcgaacaatggcaactggtcttactggttgatcaaagcggctcgatggtcgattcggtgatcccctctgcggtgatggcggcctgtttgtggcagttacccggcattcgtacccatctggtggcgtttgacacaagcgtcgttgatctcacggcagacgttgccgatccggtagagttattaatgaaagtacagttgggcggcgggaccaatatcgccagtgccgtggagtatggtcggcaacttattgaacaaccagcgaaaagcgtcattatcctcgtgagcgatttttacgaagggggttcatcatcattactgacgcatcaggtgaaaaagtgtgtccagagcggcatcaaagtgctgggactggcagcgctcgatagcacagcaacaccttgctatgaccgcgatacggcccaggcgctggttaatgtcggcgcacaaatagccgccatgacaccgggcgagctggcatcatggcttgcggagaatcttcagtcatga

SEQ ID NO: 463104 - DNA, 570 bp, Shigella boydii
atgaattcactacgtccggaattattagaactgacaccgcaggccctgacggcgttaagcaatgccggttttgttaagcgcagtcttaaggaactggaaaatggcaacgtcccggagatcagccatgagaacggcgctttaatcgccaccttcagtgacggtgtccgtacccagctggcgaacggccaggcactgaaagaggctcagtgcagctgcggggccagcggtatgtgccgtcatcgcgtgatgctggtgttaagttatcaacgactttgtgctaccgcccagcctacgggaaaagaagaggaatgggatccggcaatctggctggaagaactggctacccttcccgatgccacccgcaaacgcgcacaggcgctggtcgctaaaggcatcaccattgagttgttctgtgcgccgggtgaaattccctctgcccgcttaccgatgagcgatgtgcgtttttattcccgcagcagtattcgtttcgcccgttgtgattgtattgaaggcacactttgcgaacatgttgaaccgccccgggtttcctggagagtgttttatctgtga

SEQ ID NO: 463105 - DNA, 309 bp, Shigella boydii
atgacatggaatctgttggcgctggcgacggcgctgcaaactgtacctgaacaaaatattgatgtaacaaatagcgagaacgcattaattattaaaatgaatgattatggcgatttgcaaatcaatattctttttacttcccgccaaatgattatcgaaacctttatttgtccggtaagtagtatcagcaatccagatgaatttaataccttcttattaagaaatcagggtaatgactccaacttactgatagtgttttatgttcagataatgcccgatgaccttgtcatgcagctccaccgattttga

SEQ ID NO: 463106 - DNA, 1578 bp, Shigella boydii; identical to SEQ ID NO: 62825

SEQ ID NO: 463107 - DNA, 561 bp, Shigella boydii; identical to SEQ ID NO: 5006

SEQ ID NO: 463108 - DNA, 2967 bp, Shigella boydii; identical to SEQ ID NO: 5007

SEQ ID NO: 463109 - DNA, 243 bp, Shigella boydii; identical to SEQ ID NO: 15164

SEQ ID NO: 463110 - DNA, 678 bp, Shigella boydii; identical to SEQ ID NO: 54015

SEQ ID NO: 463111 - DNA, 1200 bp, Shigella boydii; identical to SEQ ID NO: 6086

SEQ ID NO: 463112 - DNA, 885 bp, Shigella boydii; identical to SEQ ID NO: 54013

SEQ ID NO: 463113 - DNA, 1797 bp, Shigella boydii; identical to SEQ ID NO: 120698

SEQ ID NO: 463114 - DNA, 126 bp, Shigella boydii
atgcctcatgtggcggccaggacggccagccgggatcgggatactggtcgttaccagagccaccgacccgagcaaacccttctctatcaggggagcccgcagaattcggaaaaaatcgtacgctaa

SEQ ID NO: 463115 - DNA, 390 bp, Shigella boydii; identical to SEQ ID NO: 22296

SEQ ID NO: 463116 - DNA, 441 bp, Shigella boydii; identical to SEQ ID NO: 22297

SEQ ID NO: 463117 - DNA, 492 bp, Shigella boydii
atggcgggtgatttacgcaggttaaggggagatcgtgacaaaaaaagcgttcctcactgtatcgttcatgcctgcatgaacgggttattcttcctgactacagaattacatcgctccttcagttcatacatcacttttacatcacttatacatcacttttacatcacttttacatcattccttcagctcatacgtcactttcatcctctgtgccatttgtacatcacccccttcctgaacgtgctgacagcgggttttccggctgcgccggcaacgcttcacggccacgcaataaattgcgtccccgttcaccgttttcggatgggaagaacgccggaaacaggacttaccccggctgaatggtgtgaatttccgcgctatgcacttgtgcgcatactcatgcatgccgtaaaaacagagcctgcgcgtttctggcgggttttcgggtggtttgttgcctgttttaccggtttcccgtcagaaacgccctga

SEQ ID NO: 463118 - DNA, 150 bp, Shigella boydii; identical to SEQ ID NO: 193044

SEQ ID NO: 463119 - DNA, 471 bp, Shigella boydii
atgcaggcaggaagcggtcgtaacgttgttcctgcctcggcgttgctgaaagtggaaacacgcggggccagcgacgtcattaatcaatatgtttttgaccgtgcacaacaagcgattcagggcgcagcaaccatgtatggtgtcggcgttgaaactcgtctgatgggtgcagctaccgccagttctccttcgccgcaatgggtcgcatggttgcaaagtcaggcggctcaggtcgcggggggcaatcaggccattgaacgtgttgaagcgcctgcgggttccgaagatgccacattaatgatggcccgcgtgcagcaacatcaagggcaagcctcctacgtggtgtttggcacacagctggcggcaggtcatcacaacgaaaaattcgattttgacgagcaggttctcgctattgccgtcgaaacgctggcgcgcaccgcgctcaattttccctggacgcgaggtatctga

SEQ ID NO: 463120 - DNA, 1683 bp, Shigella boydii; identical to SEQ ID NO: 462483

SEQ ID NO: 463121 - DNA, 1767 bp, Shigella boydii; identical to SEQ ID NO: 462421

SEQ ID NO: 463122 - DNA, 402 bp, Shigella boydii; identical to SEQ ID NO: 462419

SEQ ID NO: 463123 - DNA, 519 bp, Shigella boydii; identical to SEQ ID NO: 463043

SEQ ID NO: 463124 - DNA, 630 bp, Shigella boydii; identical to SEQ ID NO: 462368

SEQ ID NO: 463125 - DNA, 360 bp, Shigella boydii
atggcatgggaaacccgtggtaagcccggcggggtgatgttccacagcgatcagggcagtcattatacgagcaggcagttccggcagttattgtggcgataccagatcagacagagtatgagccggcgcggaaactgctgggataacagcccaatggaacgcttcttcaggagtctgaagaacgaatggatgccggtggtgggttacgtaagcttcagcgaggcagctcacgccataacggactatatcgttggatattacagcgcactaagaccgcacgaatataacggtgggttccccccaaacgaatcggaaaatcgatactggaaaaactctaactcggtggccagtttttgttga

SEQ ID NO: 463126 - DNA, 1266 bp, Shigella boydii
atgaagctcaacgccagacaggtcgagaccgcaaagccaaaagacaaaacctacaaaatggccgatggtggtggtttgtatcttgaggtttcggccaaaggttccaaatactggcgcatgaaatacagacgtccctctgacaaaaaagaggatcgtctcgcgtttggtgtttggcctactgtgacgcttgctcaggcaagagcaaagcgcgatcaagctaaaaagctgttagcgcagggcattgatccaaaagccgaacagaaagaagctcaggccgagaattcgggggcatattctttcgaaactatcgctcgtgaatggcatgctagtaataagcgctggagtgaagatcaccgatcacgcgttctacgttatcttgagctttatatctttcctcatattggttcatctgacatccgtcagctcaaaactagccacctattagccccgattaaaaaagttgatgccagtggtaagcatgacgttgcacagcgccttcagcagcgtgtcacggctattatgcgttatgcagtacagaacgattacatcgactcaaatccagccagtgatatggccggtgcgctatcgacaaccaaagcgcgacattaccccgctttgccctccagccggttccctgagtttcttgctcgtcttgctgcatatcgtggccgtgtaatgacgcggatcgcggttgagctttccttactaacttttgtgcgttccagtgagttacgtttcgcgcgttgggatgagttcgacttcgataaatctctctggcgagtacctgcaaaacgagaagaaattaaaggtgtgcgttactcgtaccgtggcatgaagatgaaagaggagcatatcgttcagcttagtcggcaggcgatgattttgctaaaccagttaaagcagattagtggagataaagagctgctttttccgggtgatcatgacgcaactaaggttatgagcgaaaacacggtaaatagcgcattgcgtgcgatgggctatgacacgaaaaccgaagtttgcgggcacgggtttagaacgatggcccgtggtgcgttgggcgagtccggattatggagtgaagatgctatagaacgacagttgagccattcagagcgtaataatgtacgtgctgcttatattcacacctctgaacatttggatgaacgtcgattgatggttcaatggtgggctgattatctccaagcaaataagggcaaaacaataacaccttatgattttgctaaaataaacaaaagtcgatag

SEQ ID NO: 463127 - DNA, 954 bp, Shigella boydii
atgaaaaagaatatacgtgttatacctaaaaatattcatagcaagttaagaaggcttggtaatacagttgttgctggcacttctattgcatttacggaaaaccaattaaaaagtggagcattagagcaccttggaatatattttgataatggtgttaatgcttatgagacgtcggtcataccagatccattgcagggtaaatattcacttaaaaatgtttttggtgaagaaattgtcagaaaagacctcccaaaagaaactcattacactgaaattgagtcacctaactggggtgatagctctaatggtacacatactgttagattaccttacgagaaatatcccagagacattataccaccaacactcatagccattgaaattaatcacaaacagccctcggacagccatttcatatttaacttcagagtaactagaattttagacaaacaatcaaataagtttgatgatgaattattatttgatttaaatcttcttcaagaaaatcttggtaaatgtggaattgaggatgctgataaacccatatcgacttatgctgatacacttatagtctcatgggaaatatttccaccaggtagtaaagaagaaactttagcaagaatttttagaggtaaaaatatcacttccgacaagaaaaatgtcgctgaaaatagatatgacttcttcatgagtcttgaacctaaaaaaatcgtcacaggaaacagcacgttcagtaattatattggagctatgctggaggacgatttggttgtatttgaaaacatagaatatggtaatgctatatatatcctctatgataactgggatgatatcagcaagctatctcgaattgacttattatcaggaagagcaggaagtaatttcgatagaataatccatagtggcaattggaaagatgaagtacgaaaaaaagttgctgctggaagattatga

SEQ ID NO: 463128 - DNA, 534 bp, Shigella boydii
ttgaaagctatagcaggcatagccaaatacacatggatatacatggcgatattcattatatcgctgatgattatttcgtcatccgatattaactatgtgtataacgattttgccaactattgcactcttctcgtatcagtttctggaatggtttttactattatgggaatttggttagcgtttctttacccaaatgctttgcagcgtattgtgaaccccaaaactatagaaaccgttgatttcaccgaacaactggaagatacaagaagattagaagcaatagttggaagtgttctaaaatcatctttcgttatgattactttacttgttgtatacttagttaaactagtgtttttcaaaagtcatctttatttagagagccaagatgtaataaaaaacacatctttagcattaattattgctatttcgtacatgcagattgaggcagtaattagcgtaatacttgcaaatgttatgtttatcaatgatttacataacaagcgagagcaaagagacattgatgatcaagtatga

SEQ ID NO: 463129 - DNA, 543 bp, Shigella boydii; identical to SEQ ID NO: 462382

SEQ ID NO: 463130 - DNA, 348 bp, Shigella boydii
atgctgcttattatttctgcaaaagtggcgcattcactctggcgctatttctccttttctgcggaatatacggctgtttccccatcggcgaataaaccgccccgtgcggatgcaaaaacgttcgataaaaatgacgtgcaattaatcagccagcaaaactggtttggcaaatatcagcccgtcgccacgccggtaaaacaacccgaacctgtgcctgtggcagaaacgcgtcttaatgtggtgcgcgcgggatcgcctttggtgccagacccggcgcggttattgaagaaggcggtaaacagcaggtctatttgcagggtgaaacgcttggctcgcacaacgcggtga

SEQ ID NO: 463131 - DNA, 3474 bp, Shigella boydii
atgggcaaaggtggcggcagggcgcacacaccgcgtgaggcgaaagacaatctcaaatccacgcagatgatgagcgtgattgatgcgattggtgagggaccgatagaaggcccggtgaaaggcctgcagagtattctggtgaacaaaaccccgctgacggacacggacggtaatcccgtgatacacggtgtgaccgcggtctggcgtgccggggagcaggagcagacaccaccggaaagctttgagtcctccggctctgaaactgtactgggtgtcgaagtgaccagggcaaaaccggtaacacgcaccattacgtcagcgaacattgaccgcctgcgggtgaccttcggggtgcagtcactggtggagaccacgtcaaagggtgaccgtaatccgtcctctgtccgtctgctgattcagttacagcgtaacggtaactgggtgacagaaaaggatgtcaccattaacggcaagaccacctcacagttccttgcgtcggtgattctggataatctgcctccccgcccctttaacatccggatggtcagggagacggcggacagcaccacggaccagctgcagaacagaacgctgtggtcgtcatacaccgaaatcatcgatgtgaaacagtgctacccgaacacggccattgtggggatgcaggtggatgcggagcagtttggtggtcagcagatgacggtgaactaccatatccgcggtcgcatcatccaggtgccgtcaaactatgacccggaaaaacgcacgtacagtggtatctgggacggcagtctgaaaccggcatacagcaacaacccggcctggtgcctgtgggacatgctgactcacccgcgctacggcatgggaaaatgtctgggggcggcggatgtggacaagtgggcgctgtatgccatcgggcagtactgcgaccagacggtcccggatggtttcggggggaccgagccgcggatgacctttaatgcgtacctggcacaacagcgtaaggcgtgggacgttctcagtgatttctgctctgcgatgcgctgtatgccggtatggaacggtcagacgctgacgttcgttcaggaccgcccgtcggatgtggtgtggccgtacaccaacagcgatgtggtggtggatgataacggcgtgggattccgctacagcttcagtgccctgaaggaccggcacacggcggtggaggtgaattacaccgacccgcagaacggctggcagacctccacggaactggtggaagacccggaagccatactgcgctacggacgcaacctgctgaagatggatgcgtttggctgtacctgccgcggtcaggctcaccgtgcaggtctgtgggtgataaagaccggactgctggaaacgcagacggtggacttcacgctcgggtcacaggggctgcgtcacacaccgggtgacattattgaaatctgtgataacgactatgctgggactatgaccggcggacgtgtcctgtccattgatgctgccacccgcaccctgacgctggaccgtgaggttaccctgccggagacaggtacatcggcggtgaacctgattaacggcagtggtaagccggtgagtgtggacatcaccgcacaccccgcgccggaccggatacaggtcagtaccctgcctgatggtgtggagacatacggggtgtggggactctccctgccgtcactgcgccgtcgcctgttccgctgtgtctccgtccgggaaaacacggatggcacctttgccatcacggcggtgcagcacgtaccggaaaaagaagccatcgtggataacggtgcccgctttgagccgcagtcaggctccctgaacagcgtcatcccaccggcagtgcagcacctgacggtggaggtgagcgcagctgacggccagtatctggcacaggcgaaatgggacacgccgcgggtggtgaagggggtgcgcttcagtctgcgactgaccagcggaagcggagaagacagccgtctggtgaccaccgctatcactgcggatacagagcatcgtttcagtggtctgccgctcggggaatacaccctgacagtcagggcaattaacagttatggccagcagggcgaaccggccaccaccaccttccggattaacgcgccagcaaaacccgccaccattgaactgacgccggggtattttcagataacagcggtaccgcgtcttgcggtgtatgacccgacggtacagtttgagttctggttttcggaggcaaaaatcgcagacacatctcaggtggaaacctctgcccgttatctggggaccggcagtcagtggagtgtatccggcccgcacattaagcccgggaaggatttctggttttacgtgcgcagcgtcaacctggtggggaaatctgcttttgtggaggccagtggacgggccagcaatgatgcagaagggtatctggggctgtttcgggaaaaaataggaaaactgcatctggctcaggggctgtgggagctgatagacaacagccagcttgcggatgagatggcggagatgaagaccaccatcaccgaaacccgcaatgaaatcacacagacggtcagtaaaacgctggaggaccagagcgccaccatacagcagatacagcgcgtgcagaaggacacaaatgatgaccttgctgcactttacatgctgaaggtacagaaaacaaaaaatggcataccctatgttgccggtattggagcggggattgaggatactgatggccagcccctgagcaacatactgctgctggctgaccgtattgcgatgattaacccggaggacggcaacaccacgccgttatttgtggcgcaggggaatcagttgttcatgaacgatgtgttcctgaagcggctgtttgcggtgagtatcacctcgtccggcaatcccccgacgttttccctgacgccggagggcaggctgaccgcaagaaatgctgatatcagcggtaacgtgaatgcgaactccgggacgctcaacaacgtcacgattaacgagaactgccgggttctgggaaaactgtccgcgaaccagattgaaggcgatctcgttaaaacagtgggtaaggcttttccgcgggactcccgggcaccggagcggtggccatcagggaccgttaccgtcaggatttatgacgatcagccttttgaccggcaaattgttattccggcggtggcattcagcggcgctaagcatgagagagagcatactgatatttactcctcatgccgtctgatagtgcggaaaaacggtgctgaaatttataaccgtaccgcgctggataatacgctgatttacagttgcgttattgatatgcctgccggtcacggtcacatgacgctggagttttcggtatcagcatggctggtgaataactggtatcccacagcaagtatcagcgatttgctggttgtggtgatgaagaaagccaccgcaggcatcagtatcagctga

SEQ ID NO: 463132 - DNA, 291 bp, Shigella boydii
atggaagtagtcattggggaccttgttggttttgtgtttaacaatatttatacaagcacagctttacaggggagacaatggaaaatttttcagcaagggaaaattgaggggctgatcacgttttgtactgaattgcaggtaacaaaaaaccccgccggagcgaggtttcatcagccgcctgcagctggtaaccgcaaagcacactgtattatgtcaacactgaaagtatacgtgttccgcgcagaacgcgcaatttcggcacgaattttgacgtatttagggcatagttga

SEQ ID NO: 463133 - DNA, 381 bp, Shigella boydii; identical to SEQ ID NO: 458903

SEQ ID NO: 463134 - DNA, 267 bp, Shigella boydii
atgtcgtcaaccctacgagaagccagtaaggacacgttgcaggccaaagataaaacttaccactactacagcctgccgcttgctgctaaatcactgggcgatatcacccgtctacccaagtcactcaaagttttgctcgaaaacctgctgcgctggcaggatggtaactcggttaccgaagaggatatccacgcgctggcaggatggctgaaaaatgcccatgctgaccgtgaaattgcctaccgcccggcaagggtgctgatgtag

SEQ ID NO: 463135 - DNA, 1986 bp, Shigella boydii
atgaaaaccgttagggagtccacaacgttgtacaactttctcggatcgcacaatccatactggcggttgacggaaagcagcgatgttttgcgcttttctaccaccgaaaccacagaacctgatcgtactttgcagttatctgccgaacaggctgctcgcatcagggaaatgacggtcatcacctccagcctgatgatgagtctgaccgtcgatgagagcgatctttctgtgcatctggtaggacgaaaaatcaataaacgggaatgggctggcaacgcgtctgcatggcatgacacaccggcagttgctcgtgatttatcacacgggctttcctttgctgagcaggtagtttctgaagcacattccgcaatagtgattctcgacagccgggggaatatccaacgcttcaatcggttatgtgaagattacactgggttgaaagaacacgacgtcattggccaaagcgtgtttaaactgtttatgagccgtcgtgaagctgcggcatccaggcgcaataaccgtgtattttttcgaagcggcaatgcatatgaagtcgaactgtggataccaacatgtaaaggccagcggctgtttctgtttcgcaataaatttgtccacagcggcagtggcaaaagcgagatttttttaatctgttccggcaccgacattaccgaagagcgccgcgctcaggagcgactgcgtattctggcaaataccgacagtatcaccggactgccgaatcgtaacgcaatgcaggatttaatcgatcacgctattaatcatgcagataacaataaagttggggttgtgtatcttgatttggataatttcaaaaaggtcaacgacgcctatgggcatttgtttggtgaccagttattacgcgacgtgtcattggctattttaagctgtctcgaacatgaccaggtgttggcgcgtccaggtggggatgagtttctggtactggcatccaacacctcacaaagcgcgctggaagcaatggcatcacgaattttgacccgcttacggctcccctttcgcattggtttaattgaagtttataccagctgttcagtaggtattgcactctctcccgaacatggttcagacagcacggctattattcgtcacgccgacacagcaatgtacacagcgaaggaaggcggacgaggacaattttgcgtttttaccccagaaatgaatcaacgggtatttgaatatctctggctggataccaacttgcgtaaagcactggaaaacgatcagttggttattcactatcaaccgaaaatcacctggcgtggcgaagtgcgcagtctggaagcactagtacgttggcagtcacctgaacgtgggttgattccaccgttggacttcatttcctacgccgaagagtcagggctaattgtgcctttaggccgttgggtgattctcgatgtcgtacgccaggtggcaaagtggcgggataaaggcataaacctgcgagtggcggtaaatatttctgcacgtcagctcgccgatcaaaccattttcaccgccctgaaacaggttctccaggaactcaattttgaatactgccctatagatgttgaactgacagagagttgtctgattgagaatgatgaactggcactgtctgttattcaacaatttagccaactaggtgcgcaagtgcatctggatgattttggtaccggctactcttcactttcgcaactggcgcgctttccgatcgatgccatcaaacttgaccaggtttttgttcgagatattcacaaacaacctgtctcgcagtcactggtccgggcgatcgtcgctgtggcccaggcattgaatcttcaggtgatcgccgaaggtgtagagagtgcaaaggaagatgcttttttaaccaagaacgggatcaatgagcggcaaggatttttgtttgccaaaccgatgcccgccgtcgccttcgaacgctggtataaacgctatctgaagcgcgcataa

SEQ ID NO: 463136 - DNA, 378 bp, Shigella boydii
atgcagagagagaaaacaccggagtggagggaaaagcagaaaagctcacgtggcataaggcgtggacagcggtatcgtctggtttttcaatttcctatacgtgaacaggcggctgcatttttaggtgtcgttcccgttgaaaaatattccggcacctcggtcagagggtgtccgaaactgtcaaaaattggtccgccggaaatccgggcgaaactgtatctggcttcgttgtgtggtctgagatttaacccattgatgaaagcgatgtatgagcgattatgcctgagaggtaaggcacaaaatgtgtgccattggtgcgctgatgagaaaactcgtgcactggtgctatggcgtactgaagacctaaaaaccgtttga

SEQ ID NO: 463137 - DNA, 297 bp, Shigella boydii
atggtgaggtacttcgggttccttgccaaccgggtgtgtggagagaagctgccgcaggtgtaccgtgctctggggatggataaaccggaaccagtggcgaaagtgtgctatgcacaaatggtgaaacagttcctgagtcgtgacccgttcgaatgcgtgctgtgtggcggccggatggtataccgccgggccattgcggggctgaatgtggaggggctacgcgcgggatatcagtctgctgaggtatatgccggcctgacacaggctaagtgtgcccgggaatcggtgcaagtataa

SEQ ID NO: 463138 - DNA, 207 bp, Shigella boydii; identical to SEQ ID NO: 462460

SEQ ID NO: 463139 - DNA, 1335 bp, Shigella boydii; identical to SEQ ID NO: 461946

SEQ ID NO: 463140 - DNA, 522 bp, Shigella boydii
atgtctgaccgcgccactaccacagcttccttaacgttcgagtcgctttatggcacacatcacggctggttgaaaagctggctgacgcgcaaactccagtctgcttttgatgcagatgacattgcccaggacacttttttgcgggtaatggtcagcgaaacgctctcgacgatccgcgatcctcgctccttcctgtgcactatcgccaaacgcgtgatggtggacctgtttcgccgaaacgcgctggaaaaagcgtatctggagatgctggcgcttatgccggaggggggagcgccttcacctgaggaacgcgaaagccaactcgagaccctacaactcctcgacagcatgctggacgggctaaacggcaaaacacgtgaagcgtttctgctttcgcaactggatggtctgacatacagcgagattgcgcacaaactcggtgtttccatcagctccgtgaaaaaatacgtggcgaaagccgtcgagcactgcctgctgttccgtctggagtatgggttatga

SEQ ID NO: 463141 - DNA, 954 bp, Shigella boydii
atgaatcctttgttaaccgattcccgccgtcaggcgctgcgttcagcttcccactggtatgccgttctaagcggcgagcgcgtcagcccacaacaggaagcgcgctggcaacagtggtatgaacaggatcaggataaccagtgggcctggcagcaggttgaaaacctgcgcaaccagcttggcggtgtgcctggcgacgttgccagccgggcgttgcacgatacccgcctcacccgccgtcacgtgatgaaaggattactgctgttgctcggcgctggcggaggctggcagctctggcagtcggaaaccggcgaaggtctgcgggcagattaccgcaccgccaaaggcacagtcagccgtcagcaactggaagatggctccctgctcacgctgaatacccaaagcgcggcggatgtgcgttttgatgcgcatcaacgcaccgtccggctctggtacggtgaaatcgccattactaccgcgaaagatgccctgcaacgccccttccgtgtcctgacccgtcagggccagctcactgctttagggacagaatttaccgtccgccagcaggataatttcacgcagcttgacgtgcagcagcacgctgtggaagtgcttctcgccagtgcccccgcgcaaaaacgcatcgtgaacgctggtgaaagcctgcagttcagcgcctctgagtttggcgcagtgaaaccgctggatgacgagagtacaagctggacgaaggacatcctgagcttcagcgataaaccgctgggtgaggtgatagccacgctaacccgttaccgcaacggcgtgctgcgctgcgatcccgccgttgccgggctgcgcctgagcgggacgttcccgctgaaaaataccgatgcgatcctgaacgttatcgcgcaaacgcttcccgttaaaattcagtctattacgcggtactggataaacatttcaccactgtaa

SEQ ID NO: 463142 - DNA, 2325 bp, Shigella boydii
atgacgccgttacgcgtttttcgtaaaacaacacctttggttaacaccattcgcctgagcctgctgccgctggccggtctctcgttttccgcttttgctgcacaggttaatatcgcaccgggatcgctcgataaagcgctcaatcagtatgccgcacacagcggatttaccctctcggttgacgccagcctgacgcgcggcaagcagagcaacggcctgcacggcgattacgacgtcgagagcggcctgcaacaactgctggacggcagcggactgcaggtaaaaccgctgggaaataacagctggacgctggagcccgcgcccgcaccaaaagaagatgccctgaccgtggtcggcgactggctgggtgatgcgcgtgaaaacgacgtatttgaacatgctggcgcgcgtgacgtgatccgccgtgaggatttcgccaaaaccggcgcaaccaccatgcgtgaggtacttaaccgcatccctggcgtcagcgcgccggaaaacaacggcaccggcagccacgacctggcgatgaactttggcatccggggcctgagcccgcgcctcgccagccgctcgaccgtcctgatggacggcatccccgtccccttcgccccttacggtcagccgcagctttcactggctcccgtttcgctcggcaacatggatgccattgacgtggtacgcggtggtggtgcggtgcgttacggaccgcagagcgtgggcggcgtggtgaactttgttacccgtgccattccgcaggactttggtatcgaggcgggcgtggaaggtcagctcagcccaacctcttcacaaaacaacccgaaagagacgcacaacctgatggtgggcggcacagcggacaacggttttggcaccgcgctgctctactccggcacgcgcggcagtgactggcgcgagcacagcgccacccgcatcgacgacctgatgctgaaaagcaaatatgcgccggatgaggtgcacaccttcaacagcctgctgcaatattacgacggtgaagccgacatgcccggtggcctgtctcgcgcggattacgacgccgatcgctggcaatccacccgcccgtatgaccgcttctggggtcgtcgcaagctggcgagcctgggctaccagttccagccagacagccagcataaattcaacattcaggggttctacacccaaaccctgcgcagcggctacctggagcaaggcaaacgcatcaccctctcgccgcgtaactactgggtgcgcggtattgagccacgctacagccagatctttatgatcggcccttccgcgcacgaagtgggcgtgggctatcgctatttgaatgaatcaacgcatgaaatgcgttactacaccgccaccagcagcgggcagttgccgtccggctcaagcccttacgaccgcgatacgcgttccggcaccgaggcgcacgcctggtatctggatgacaaaatcgacatcggcaactggaccatcacgccgggtatgcgtttcgaacatatcgagtcataccagaacaacgccatcacaggcacgcacgaagaagtgagctataacgcaccgcttccggcgttgaacgtgctctatcacctgactgacagctggaatctttatgcaaacactgaaggctcgttcggcaccgtacagtacagccagattggcaaggctgtgcaaagcggcaatgtggaaccggaaaaagcgcgaacctgggaactcggtacccgctacgacgacggcgcgctgacggcggaaatagggctgttcctgattaactttaacaatcagtacgactccaaccagaccaacgacaccgtcactgcacgtggcaaaacgcgccataccgggctggaaacgcaggcacgttacgatctgggtacgctaacgccaacgcttgataacgtttccatctacgccagctatgcgtatgtgaacgcggaaatccgcgagaaaggcgacacctacggcaatctggtaccattctccccgaaacataaaggcacgctgggcgtggactacaagccaggaaactggacgttcaatctgaacagcgatttccagtccagccagtttgcggataacgccaatacggtgaaagagagcgccgacggcagtaccggccgcattcccggcttcatgctctggggcgcacgcgtggcgtatgactttggcccgcagatggcagatctgaacctggcattcggtgtgaaaaacatcttcgaccaggactacttcatccgctcttatgacgacaacaacaaaggcatctatgcaggccagccgcgcacgctgtatatgcaggggtcgttgaagttctga

SEQ ID NO: 463143 - DNA, 903 bp, Shigella boydii
atgttggcatttatccgttttctttttgcaggcctgctgctggtgatcagccacgcctttgccgccatggttcaggacgaacacggcacgtttacactcgaaaaaacgccacaacggattgtggtgctggaactctcgttcgccgatgcgctggccgccgtggacgtcagcccgatcggtattgccgacgataacgatgcaaaacgcatcctgcccgaagtgcgtgcgcacctgaaaccgtggcagtccgtcggaacgcgcgcgcagccgagcctggaagccattgccgctctgaaaccagacctgatcattgccgacagcagtcgccatgcgggggtttacatcgccttgcagcaaatcgcgccggtactgctgcttaagtcccgcaacgaaacctacgctgaaaatttgcaatctgcggctatcatcggcgaaatggtgggtaaaaagcgagagatgcaggcacgtctggaacaacataaagagaggatggcgcagtgggccagccagcttcccaaagggacacgcgtggcctttggcacatcacgcgaacagcaattcaacctgcatactcaggagacctggaccggcagcgtgctggcctctctggggctgaacgttcccgctgcgatggtgggtgcgtccatgccgtccatcggcctggagcaactgctggcggtcaatcctgcctggctgctggttgcccactatcgcgaagagagcattgttaaacgctggcaacaagatccgctctggcagatgttaaccgccgcgcagaagcagcaggttgcttcggtcgacagtaacacctgggcgcggatgcgcggtatttttgctgcagagcgtattgccgctgacacggtaaaaatcttccaccatcagccgcttaccgttgtgaaatga

SEQ ID NO: 463144 - DNA, 999 bp, Shigella boydii
atgaccgcgataaaacacccggtgctgctgtgggggcttcccattgcagcacttattattattttctggctgagtctgttttgctactcggccattcctgtttccggagcagatgcaacccgcgccctgctgcctggacacacgccaacgctaccagaagcgctggtgcaaaaccttcgtttgccacgaagcctggtcgccgttctgatcggcgcaagcctggcgctcgcgggcacgctgctgcaaaccctgacccacaacccaatggcctctccttcactgctcggcattaacagcggcgcggcgctggctatggcgcttaccagcgcgctaagtccgacgccgattgcaggctattctctgtcgttcatcgcggcatgcgggggcggcgtgagctggctgctggtcatgaccgcaggaggcggatttcgtcatacccatgacagaaacaaactgatcctcgcgggtatcgcgctgtcggccttttgtatgggccttacccgcatcaccctgctgctggccgaagatcatgcttacggcatcttttactggctggcaggcggagtgtcccacgcccgctggcaggatgtctggcagctcttgccggtggtggtcactgcagtccctgtcgtgttgctgctggcgaatcaactgaacctgctcaacctcagcgacagcaccgcccatacgctgggagtgaacctgacgaggctacgtttggtcatcaatatgttagtgctgcttctggttggtgcgtgcgtcagcgtggcaggtccggtggcgtttatcggtctgctggtgccacatctggcgcgcttctgggcaggcttcgatcagcgcaacgtactgccagtgagcatgctgctgggggccacgctgatgctgctggcagatgtactcgcacgcgcgctggccttccccggagatctgcccgcaggcgcagtgctggcgctgattggcagcccttgctttgtctggcttgtgaggaggcgaggatga

SEQ ID NO: 463145 - DNA, 957 bp, Shigella boydii
atgaaaattgcgctggttattttcatcacccttgccctggcgggctgtgcgctgttatcactccatatgggagtgatccccgtgccgtggcgcgcgctgctgaccgactggcaggccggacgcgagcattattatgtattgatggagtaccgactgccgcgcttgctgctggcactgtttgtcggtgcagccctcgccgtggcgggcgtgctgatacaggggattgtgcgcaaccctctggcatcaccggatattctcggcgttaaccatgccgccagcctggcctctgtgggggctctacttcttatgccgtcactgcccgtgatggtgctgccgctgctggcctttgcgggcggcatggcggggttgatattactgaagatgctggcaaagacccaccagccgatgaagctggcgctcaccggcgtggcgctttctgcatgctgggccagcctgacggattatctgatgctctcgcgcccacaggatgtgaacaacgccctgctgtggctgaccggcagcttatggggccgtgactggagctttgtgaagattgccatcccgctgatgattttatttctgccgctgagcctgagtttttgccgcgatctcgacctccttgcactcggcgatgcgcgcgccaccacgctcggtgtgtcggtgccccatacccgattctgggctttgttactagctgtcgccatgacatctaccggcgtggccgcctgcggcccgattagctttattggtctcgtggtgccgcatatgatgcgtagcatcaccggtggacgtcaccgcagactgctgcctgtttcagccctgacaggtgcgttgctgttggtggttgccgatctgctggcgagaattattcatcccccactggagctcccggttggcgtgctgaccgccattatcggtgcgccgtggtttgtctggttgcttgtgagaatgcgataa

SEQ ID NO: 463146 - DNA, 768 bp, Shigella boydii
atgactttacgaactgaaaatctgacggtcagttacgggacagacaaggtacttaacgacgtttcactctcactgccaacggggaagatcaccgccctgatcggtcctaacggttgcgggaaatcgacgctgttaaactgtttttcgcggcttttaatgccgcagtctggcaccgtatttctcggcgataatcccataaatatgctctcatcgcgccagttggcccgcaggctttcgctgctgcctcagcaccatttaacgccagaggggatcacagtccaggagctggtttcgtatggtcgtaatccctggctgtcactctgggggcgtctctccgctgaagacaatgcacgagttaatgtcgccatgaaccagacccggatcaatcatcttgccgttcgtcggttaaccgagctttccggcggtcagcgccagcgcgcatttctggcgatggtcctggcccagaatacgcccgttgtattacttgatgagccaaccacctatcttgatatcaatcaccaggtggacctgatgcggttgatgggcgaactccggactcaggggaaaacggtggtcgctgtgctgcacgaccttaatcaggctagccggtactgcgatcaactggtggtaatggcaaacggacatgttatggcgcaaggcacaccagaagaggtgatgaccccaggattgctgagaacagtattcagcgtggaagcggaaatacaccccgagccggtatctggcaggccgatgtgcctaatgaggtag

SEQ ID NO: 463147 - DNA, 258 bp, Shigella boydii; identical to SEQ ID NO: 5061

SEQ ID NO: 463148 - DNA, 1524 bp, Shigella boydii
ttgataatcagcgaaatgcaacgcaagcttgccacatgggcagccaccgatccgtccctacggattcaacggctgctgcgtctaataacacaaccagaatggctggctgaagcggcgcggatcacgctttcatcaaagggggcccatacccccggcgttgatggcgtgaacaaaacaatgctacaggccagactggctgttgagctgcaaatcctcagggatgaattactctcaggccactaccagcccttgcccgcaagacgggtttacatccctaaaagcaacggcaaactgcgaccactgggtatccccgcgttgcgggatcgtattgttcagcgggccatgctgatggcgatggagccgatatgggagagtgattttcatacgctctcatatggcttccggcctgagcgcagtgtccaccacgcgatccgcacggtgaaattacagctcacagactgcggtgaaacccggggacgctgggtgattgaaggcgacctgtccagttacttcgacaccgtacatcatcgactgctgatgaaggctgtacgccgcaggatcagtgacgcacgtttcatgactctgctgtggaaaaccatcaaggcgggacatatcgatgtcggtctctttcgggcggccagtgaaggtgtgccacagggcggtgttatatcgccgctattatcgaacatcatgctgaatgagttcgatcaatacctgcatgagcgctacctgagcgggaaagccagaaaagatcggtggtactggaataacagtatccaacggggccgaagtacggcggtcagagaaaactggcagtggaaacccgcggtggcgtactgccgctatgccgatgattttgtcctcatcgtcaaaggcaccaaagcacaggcggaagccatcagggaggagtgtcggggtgtgctcgaaggcagtctgaaactcaggctgaacatggataagactaaaatcacccatgttaatgacggctttatctttctggggcacaggatcattcgcaaacgcagtcgttatggcgagatgcgagtgatctcaacgatcccgcaggagaaagccagaaacttcgccgcatcgctgacagcactgttatcaggcaactacagtgaaagcaaagtcgatatggctgaacaactcaaccgaaaactgaaaggctgggccatgttctatcagttcgttgattttaaggccaaagtcttcagttatatcgaccgtgtcgtgttctggaagctggctcactggctggcccgcaaataccgtacaggtatcgcttccctgatgaggtggtggtgtaaatcaccgaaaccgggtcagagcaaaacgtgggttttatttggtaaaaccaatcacggcaagctcagcggcgaaatactgtaccggttggtggggcaaggcaagaagctgttccgctggcggctacccgaaggtaatccctatctgaggacggagaccagaaacacgtatacatcgcgctttacagaagtggcaatggcgttcgccagcatttaa

SEQ ID NO: 463149 - DNA, 240 bp, Shigella boydii
atgggacgctggcttgctggcaggctcatgaaagagctggggctggtcagctgtcagcagccgactcaccggtataaacgtggtggtcatgaacatgttgctatcccgaatcatcttgagcgacagttcgccgtaacggaaccaaatcaggtgtggtgcggtgatgtgacctatagtgtgcccggagttcagggcgggcatggatgcttaaatgaaccgcgagtctgtctggaatattga

SEQ ID NO: 463150 - DNA, 261 bp, Shigella boydii
atgactcgcctgcgcccgatggggagcactgtcgatgttgaaacagccaaccgccacggtctgcgctggctgcacgatgtcgctaaccaacgaaagcatgaaacaatccaggcccgtccctgtgatcgctggctcgaagagcagcagtccatgctggcactgcctccggagaaaaaagagtatgacgtgcatcctggtgaaaatctggtgagcttcgacaaccccgttactttattcgtaccccttataatggggggttag

SEQ ID NO: 463151 - DNA, 543 bp, Shigella boydii
gtgaaaacgggggctgaagccatccgcgcactggccacacagctcccggcgtttcgtcagaaactgagtgacggctggtatcaggtgcgcattgccgggcgtgatgcaggtgaaaccgaattgtctgcccgtcttaatgagccgctggcaaatggtgcagtgatccacatagtaccgcgtctggtgggagctaaaagtggcggtgtgtttcaggcggtgctgggggcagctgttatggcggttgctatatggatgccgggggtaggaattatggcgagtaatctgctgttttctctcggtgccagtatgacgcttggcggtgttgcacagatgctggcaccgaaagccagaactccccgtacacagacaacggataacggcaaacagaacacctgtttctcctcactggataacatggttgcccagggcaatgttctgcctgttctgtacggtgaaatgcgcgtggggtcgcgggtggtatctcaggagatcagcacggcagacgaaggggatggtggtcaggttgtggtgattggtcgctga

SEQ ID NO: 463152 - DNA, 744 bp, Shigella boydii
atgacacagacagaatcagcgattctggcgcacgcccggcgatgtgcgccagcggagtcgtgtggcttcgtggtgagaacgccggagggggagcggtatatcccttgtgtgaatatttctgcagagccggaggcgtattttcgtatcgcaccggaagactggctgcgggcagagatgcagggggagattgtggcactggtccacagtcatcccggtggtctgccctggctgagtgaggctgaccggcggctgcaggtgcagagtgatttgccgtggtggctggtctgccggggggcgattcacaagttccgctgtgtgccgcatctcaccgggcggcgctttgagcacggggtgacggactgttacacgctgttccgggatgcttatcatctggcggggattgagatgccggattttcatcgcggggatgactggtggcgtcacggtcagaatctctatctggataatctggaggccacagggctgtatcaggtgccgttgtcatcagcacaaccgggcgatgtgctgctgtgctgttttggttcatcggtgccgaatcatgccgccatttactgcggcgacggtgagctgctgcaccatattcctgaacaactgagtaaacgagagaggtataccgacaaatggcagcgacgcacacactccctctggcgtcaccgggaatggcacgcatctgcctttacggggatttgcaacgatttggccgccgcatcgaccttcgtgtga

SEQ ID NO: 463153 - DNA, 441 bp, Shigella boydii
atggtcgccgggatggcggaagatctgcagagtctggtcggcggaacggtggtccggcgtaaggtttacgcccgttttctggatgcggtgaacttcgtcaacggaaacagtgacgccgatccggagcaggaggtgatcagccgctggcgcatcgagcagtgcagcgaactgagcgcggtcagtgcctcttttgtgctggccacaccaacggagacggatggcgcggttttcccggggcgtatcatgctggcgaatacctgtatgtggacctaccgttctgatgagtgtggttacacgggcagggcagtggctgacgagttcgacaaaccaacgacggatatccggaaggacaaatgcagcaagtgtatgcgcgggtgtgagttgcgcaacaataccggtaatttcggcggtttcctttccatcaataaactttctcagtaa

SEQ ID NO: 463154 - DNA, 201 bp, Shigella boydii
atgcaggatatccggcaggaaacactgaatgaatgcacccgtgcggagcagtcggccagcgtggtgctctgggaaatcgacctgacagaggtcggtggagaacgttattttttctgtaatgagcagaacgaaaaaggtgagccggtcacctggcaggggcgacagtatcagccgtatcccattcagggggagtggttttga

SEQ ID NO: 463155 - DNA, 330 bp, Shigella boydii; identical to SEQ ID NO: 462760

SEQ ID NO: 463156 - DNA, 3042 bp, Shigella boydii
atggaccagatagccaacctggtcattgatttggggattgatgcggcagagtttaaaaatgaaattccccgtatcaaaaaccttctgaatggtgcagccggtgatgcagaacggtcttctgcccgtatgcagcgttttatggagcgtcagactcaggcggcccggcagacaatgcatgcggcttcttcggctgcaacagcagcatcagcccatgcgcagacggtggagaagaatgcacgggctcatgaacgcatggcccgtgaggtggaacaaacccgtctgcgcgtggatgccctgaatcagaaaatgcgcgaggaacaggcgcaggccagggcactggcggaggcgcaggataaagcggctgccgccttttatcgccagattgacagtgtgaaacaggccggtgcggggcttcaggaattacagcgtattcagcagcagatccgacaggccagaaacagtggcggggttggtcagcaggattatctggcgctgatttcggagatcacggcgaaaacccgtgccctgacgcaggcagaggaacaggccacccggcagaaagcggcgtttatccgccagcttaaagagcaggcaacccgccagaatctgtcgtcttctgagttgcttcgcgccagggcggctcagctgggggtaagcagtgctgcagaagtgtatatccgcaaaatggagcgggcaggaaaagccacacattcgctggggctgaaaagtgcggcagcccggcgggagctgggggtgttaatcagtcagatggcgcgcggcaattttggtgcgctgaggggatccgggataacgctggctaaccgtgccggatggacaggcgcactgatgtcgccgaaaggcatgatgactggcggcgttattggcggacttgtcgcggcggtcctgggtctgggtaaagcctggcatgacggccggaaggagggcgaggaatttaaccgtcagctggcgctgacgggacattatgccggtgtcactgtcgggcagttgtggaaactcagccgggccatatccgggaatggtatcacgcaacatgcggcagccggtgcgctggcacaggtggtgggcagtggggcatttcatggaaacgatattggtatggtggcgaaagctgccgcacagatggagcgatcggttggccagtcggtcagcgataccataaatcagtttaagcggctgaaggatgatcctgtaaatgccgcgaaggcgctggacaatgcgctgcattttttgactgccactcagcttgagcagatacgcgtccttggggagcaggggcggtccagtgatgcggcccggatcgccatgtctgcgctggcagaggaaaccggtaaacgcacatctgatattgataataatctcaatgcgctgggtagtacgctgcaaaccttgtctgactggtggaagcagttctgggatgcggccatgaatattggtcgtgaagactcgctggatgcgcagattgatgcgttacaggaaaaaattcagcgcgcgaaaaaatatccgtggacaaacgcctccacacaggtggagtacgatcagcagcgtcttaacgatcttcaggagaaaaaacgccggaaggatttgcaggatgcaaaagcgcaggcagaacggaattaccaggagcaacagaaacgccggaatgctgaaaatgccgcgctgaaccggatgaatgaaacggaagctgcacgacatcagcgggaaattgcgcgtattaatgccatgcagtacgccgaccaggctgtcagggatgcggcgatacagcgtgaaaatgaacgttacgaaaaagccattaagaaaaatacacgggcaacccgtaatgatgaggccacccggttattgctgcagtacagtcagcagcaggcacaggtggaagggcagattgctgctgccagacagtcagcaggcattgccactgaaaggatgactgaagcgcataaacagcttctggccctgcagcagcgcatcagcgacctggacgggaaaaagctgacggcagatgaaaagagtgtgctggcccgtaagaatgagctgattcaggcgctgacgctgctggatgtgaaacagcaggagctgcagaaacagacagcgcttaacgacctgagaaaaaaaacggttcagctgaccagccagctggcagacaaagaacgtgcactgcgtgagcagcacaatctggatattgccactgcaggtatgggggataagcagcggcagcgctaccaggcacagttgcgcatccggcaggaataccggcaacagttgcaacagcttgagaatgacagtcgccagaaaggcacttacgggacggaggactaccggagggctgaggaggtgctgaaggggagcctgaagcgacaactgaatgaaaacaaacgctactggcaggaactggaagtggcgcagggcgactggaaaaacggtgccatgcgggcgtttcagaattttacggcggatgcggataatgcggtgggaacggcagaacagatgtttacagtggcattcagcagtgccggtaatgcactggcgacattctgtaccaccggtaagctgaattttaaatccttcacctcttccctgttgtcagatatggccagaattatggcacagatggccatgatgcaggcggtaaagggcgtcggctctttattcggcttcacgactaatgctgatggcggtgtttaccagtctgctgatttgagtcgctacagtggcacggtggttaaccgtccgacgttttttgcttttgcaaaaggcgcgggtgtgatgggggaagcgggacctgaagccattctgccactgcgtcgcggtgctgatggtaagctgggggttgtggcggatactggtggttcaggcatggtgatgtttgccccgcagtacaacatcgggatcaataacgacggcacgaacgggcagataggtccggcagcactgaaggtggtttatgacctcgggaaaaaagcggccgcggactttatgcaacagcaggcccgtgatggtggccggttaagtggagcataccggtaa

SEQ ID NO: 463157 - DNA, 222 bp, Shigella boydii
atgcagagcttcagtgatgtgtggatggatgcgcagtttgcctcgctgaaggcattgatcgtgagaatggtgtccggcagcagtgatgctgcggtggctgatttcagccttttaccggaagagaacgggataccggagcgaacggacgaagaactgatgcatcttggggaaggtatttccggaggtgtgcgttatggaccagatagccaacctggtcattga

SEQ ID NO: 463158 - DNA, 387 bp, Shigella boydii
atgtttctgaaacaggatacgtttaattatgaaaaacagtccgtggtgctcagtgagctgtccgggctgcagagaattgaatatctgacgtttgttcagcagcgaacggcaaagtttgatgcacaggagggagaactgccggaggctgaacgacagattgcttttctgcgtatgggaatggatatcaatgcctggctggtttcccgctcactgtggaatgctgagcagtctcaggatgttgagacgctttgcgcatccattatgacaacatggtcgtatgatgcgctgggcgcgggggcggagagggttctgtcgctgagcggtatggggaccattgagaatgccggggatgatgatcatgaggcgctgacgccggaaaagtcctga

SEQ ID NO: 463159 - DNA, 741 bp, Shigella boydii; identical to SEQ ID NO: 462636

SEQ ID NO: 463160 - DNA, 402 bp, Shigella boydii
atgaacaggcacacacaaatccgccaggcagtactggcaagcctgaagggcgaatgcggggggaatgtcgtgctttttgacgggcttccggcatttattgatgcgcaggaactgcccgccgtggcggtgtggctgagtgatgcgcagtacaccggaaaaatgacggatgaggacgactggcaggctgttctgcatattgccgttttcgtccgtgcacaggcgccggattctgagctggatacgtggatggagaacaccatatttccggccatgaaggatattccggtgctttccggactcatcgacaccatgatcccactcggttttaactatcaacgtgataatgagatggccacctgggcgatggcggaaatcacgtaccagatcacgtacacgaattaa

SEQ ID NO: 463161 - DNA, 588 bp, Shigella boydii
atgagggggcttgagaatgccatccgcaatctgaacagtcttgatacccgtatggtgccgcaggccagcgcatgggcagtaaaccgggttgctgcaaaagttgtctcggttgccacccggcaggtcgccaggaataccgttgcgggagataaccaggtgaaggggggccccctgaaactggtgcgtcagcgcgtccgggtatttaaagccagtccggcaggaaaaatgtatgcccgtatccgtgttaaccggggcaatctgcccgccattaagcttggcacaacatgccggcgtgccggtgacggactgaaggtggggaaatacttttttcgtggtgcgtttatccagcagctggcgaacggtcgctggcatgttctcaggcgtcttcctgaagcgtgttttgaaacaggaaaggacagtaaggggcggcccagaaaaaatcgtctgcccgtggaggttgtgaaaattccgctggccggaccgctgacacaggcatttgaggatgcccgcgatcgcatcattgccgcggaaatgccgaaacagctggggtatgccctgaaacagcaactgaggatacatttgggatga

SEQ ID NO: 463162 - DNA, 294 bp, Shigella boydii; identical to SEQ ID NO: 25632

SEQ ID NO: 463163 - DNA, 867 bp, Shigella boydii
gtgttggttgtcactcttagtcataacagcaggcgtattgatgtggatatcaaccttgataaccaggctgacgatcatcgccttcgtgtcctggtccctacaccttttaacaccgacagtgttctggcagatacgcagtttggttcgctaacgcgccccgtgaacgacagtgcaatgaacaactggcagcaagaaggctggaaagaagcgccggttccggtatggaatatgctcaactatgttgccttacaggaagggcgtaacggcatggctgtctttagcgaagggttacgtgaatttgaagtcatcggtgaagagaagaaaacctttgccattacgttgctgcgtggcgtgggcttactgggcaaagaagatctgcttttaaggcctgggcggccttcgggaattaaaatgccagtcccggactcacaactacgtggtctgctttcttgtcgcctaagtttattgagttataccggtacgccaaccgccgctggtgtagctcagcaggcgcgagcatggctgactccagtacagtgttacaacaaaatcccatgggatgcgatgaagctcaacaaagccggattcaacgtgccggaaagttatagtttgttgaaaatgcccccagtgggatgcctgataagcgcacttaagaaagctgaagaccgacaagaagtgattttacggctgtttaatccggctgaatcagcaacctgtgatgcgactgttgctttcagtcgcgaggtgatttcttgctcagaaacgatgatggatgaacacattaccaccgaggaaaatcaaggttcaaatctatcggggccttttttacccggccagtcacggacgttcagttaccggcttgcctga

SEQ ID NO: 463164 - DNA, 249 bp, Shigella boydii
atgccattctatttcaggaaggagtgtccgttaaactcaggctacctcatatctctggaagtagagccagatgaacgcgaatcctatgaattatttatggaaaaacatttcggtggcttagtagatagtcggagagcaaaaaacggcgataacgaatacatggcatgggatatgactctcggttggatcgtctggcaacaacgagctggcattcatttttcaacaatatcacagcaagaggtgaaataa

SEQ ID NO: 463165 - DNA, 210 bp, Shigella boydii; identical to SEQ ID NO: 9340

SEQ ID NO: 463166 - DNA, 288 bp, Shigella boydii; identical to SEQ ID NO: 462397

SEQ ID NO: 463167 - DNA, 678 bp, Shigella boydii; identical to SEQ ID NO: 462206

SEQ ID NO: 463168 - DNA, 948 bp, Shigella boydii; identical to SEQ ID NO: 19334

SEQ ID NO: 463169 - DNA, 1248 bp, Shigella boydii
atggttacgccgttacggtacgcattaatctttttgctgtgggcgatggtggcggtgatttatgcaccgctgatcccggcagctctcacgctgatatcgcctgcgttgtcgttgacacactggcaggcgttatttgccgatccacagttaccgcatgcattactggcaacgctggtgtcgacaaccatcgcggcggtcggggcattgttgattgccctgctggtgattgtggcgctatggcctgggccgaaatggcagcgtatgtgcgcccgtctgccgtggctgctcgccattccccatgtggcttttgccaccagcgccctgctgctctttgctgacggagggctgctatatgactatttcccgtatttcactccgccaatggaccgatttggcatcggtctgggcctcacccttgcagtgaaagaaagcgcatttctgctgtggatcttagcggcagtattgagcgaaaaacggctgttgcagcaggtcattgtgctggattcgctgggctacagccgctggcaatgcctgaactggctgctgttgccctccgtcgcgccttcgctggcaatggcgatgctggcgattgttgcctggtcgctttcggtcgtggatgtggcgattattcttgggccaggtaatccaccgacgctggcagtaattagctggcagtggttaactcagggcgacgcggatcaacaaacgaaaggcgcactcgccagtctgctgctgatgctgttactcgccgcctacgttttgctgagctatctgctatggcgcagctggcggcgcactattccccgcgtagatggcattcgcaagcctgccacacctttattaccaggcactacgctggcgagttttttacccttaaccggtgtgctgtgtgtggttctgctggcgatcctcgcggatcagtcgacgatcaatagtgaagcactcatcaacagtctgacaatggggctggtagcaacattcatcgctttgctcctgttactgctgtggctggaatgggggccacagcgtcgccagttgtggctatggttgcccattctattgcccgctctgccactggtggcgggccagtacacgctggcgctatggctgaacctggatggaagctggacggcggtggtctgggggcatctgctgtgggtaatgccgtggatgctgtttatcctgcaacccgcctggcagcgcattgattcacggttaattttgattgcacaaacactgggctggtag

SEQ ID NO: 463170 - DNA, 579 bp, Shigella boydii; identical to SEQ ID NO: 459836

SEQ ID NO: 463171 - DNA, 807 bp, Shigella boydii
atgacgcaatactcctctctccttcgtggtcttgcagcgggttctgcatttttattcctttttgccccaacggcattcgcggccgaacaaaccgttgaagcgccgagcgtggatgcgcgtgcatggattttaatggattacgccagcggtaaagtgctggcagaaggcaatgcggatgagaaactggatcccgcgagcctgactaaaatcatgaccagctatgtggttgggcaggcgcttaaggccgataagattaaactcaccgatatggtgacggtcggtaaagatgcctgggcgacgggaaatccggcactgcgtggttcatcggtaatgttcctcaaaccgggcgatcaggtttcggtggcagacttgaacaaagatgtgattatccagtccggtaatgacgcctgtattgcgctggccgattacgttgccgggagccaggagtcatttattggtctgatgaatggttatgccaaaaaactgggtctgaccaacactaccttccagacggtgcacggcctggatgcgccggggcagttcagtaccgcgcgcgatatggcattgctgggtaaagcattgatccacgatgtgccggaagagtacgccattcataaagagaaagagttcaccttcaacaaaattcgtcagcctaaccgtaaccgtctgctgtggagcagcaatctgaatgttgatggcatgaagacaggaaccacggcaggcgcgggatataatctggttgcttcggctacccagggcgatatgcgtttaatctccgtagtgttgggggcgaaaactgaccgatga

SEQ ID NO: 463172 - DNA, 948 bp, Shigella boydii
atgaaaaggaatttattatcttccgctattatagtcgccatcatggccctcggtctgacgggttgtgatgataaaaaagccgaaacagaaacgcccccgcctgccaatagtcaacctgccgcaccagctcctgaagctcccgttgcaaaagcagaagctaaacctgaaacacctgcgcaaccggtggtcgatgaacaagcggttttcgacgaaaaaatggatgtctatatcaagtgctataacaagttacagatccctgtacagcgcagtctggcgcgttatgttgactggctgaaagattttaaacaggggcctaccggtgaagagcgtactgtttatggcatctacggcattagtgaatccaacctcgctgagtgtgaaaaaggcgtaaaaagtgctgtggcgttaacgcctgcgctgcaaccaattgatggcgtggcggtgagttatatcgatgctgccgtggcgttgggtaataccattaacgaaatggataaatattacacccaggaaaattataaagacgatgcgtttgcgaaagggaaaacgctgcaccagacattcttaaaaaatctggaagcctttgaacctgtagcagaatcttatcatgcggcgattcaggaaattaacgataagcgccagcttgcggaactgaaaaatattgaagaaagagaagggaaaatattccactactattctctggcagtcatgatttcagcgaaacaaattaataacctgatatcgcaagagaagtttgatgttgatgcggcaatgaagaaagtgtctgaactggaaacgctggtggcgcaggccaaagaagcggataaaggcggcatgaatttctcgtttattaattcggcaggccagtatcaactcgaggctaaaaaatacgttcgccgcatcagagataaagtcccgtactctgaggtaatgactccaacttactga

SEQ ID NO: 463173 - DNA, 210 bp, Shigella boydii; identical to SEQ ID NO: 9340

SEQ ID NO: 463174 - DNA, 186 bp, Shigella boydii
atgctcgttcactttattaatatgaaattcaacggggatctcagggaagaaactttcaagattttgtttcttgaaatagtccccggttttaaatacgacacggtaatcgcccgtagttgcagtttgctcgggccacagtgctttaattcgtccatccttatctgttttggcggtattaagttgtaa

SEQ ID NO: 463175 - DNA, 177 bp, Shigella boydii
atggacgtggataagaaataccccactatcgattttcgctacagtggcaataaaacctgcgaagtggctctggaactcaaccaagcgcgcggtgccgtctgggtcggtgatgtggtctgcagcggcctctcatcgtgggcggcggtgacgcagacaggagaagagaatgagagttaa

SEQ ID NO: 463176 - DNA, 342 bp, Shigella boydii
atggcgctcaggagccagcgcccacctgccgggctaatccaccactctgatcgaggttcacagtactgcgcatacgattaccgggtcatacaggagcagtctggtctgaaaacatcaatgtcgcgtaaaggtcactgttacgacaacgctccgatggaaagcttctggagaacgctgaaaaatgagagcctgagccactatcgttttaataaccgggatgaagccatctcagtaatacgggaatacattgagattttctacaatcgtcagcgtcgtcactctcgtctggggaatatctccccggcagccttcagggaaaaatatcatcagatggctgcttaa

SEQ ID NO: 463177 - DNA, 408 bp, Shigella boydii
atggtgtcagcgaaaaacgaaaccgctgttgaaatccctggaaagctggttgcggaaaagatgaagaccctgtcgcgacactcagagttggcgaaggcgttcgcgtacgcacttaaccagtggccggcactgacgtactatgcgaacgatggctgggtggaaatcgacaacaacatcgctgaaaatgccttgcgggcggtcagtctgggtcgtaaaaacttcctgttcttcggctctgaccatggtggtgagcggggagcgctactgtacagcctgatcgggacgtgcaaactgaatgacgtggatccagaaagctaccttcgccatgtgcttggcgtcatagcagactggccggtcaaccgggtcagcgaactgcttccgtggcgcatagcactgccagctgaataa

SEQ ID NO: 463178 - DNA, 210 bp, Shigella boydii; identical to SEQ ID NO: 9340

SEQ ID NO: 463179 - DNA, 642 bp, Shigella boydii; identical to SEQ ID NO: 462707

SEQ ID NO: 463180 - DNA, 210 bp, Shigella boydii
atgacggatggctggccgctgtatgaatcacgcctgaagggaaagctgcacgttatcagcaagcgttacactcagcgcattgagcgacataatctgaatctgagacaacatctggcaaggctgggatggaagtcactgtcgttctcaaaatcggtggagctgcatgacaaggtcatcgggcattatctgaacataaaacactatcagtaa

SEQ ID NO: 463181 - DNA, 369 bp, Shigella boydii
atgaaaactgttaatgagctgattaaggatatcaattcgctgacctctcaccttcacgagaaagattttttgttaacgtgggaacagacgccagatgaactgaaacaagtactggacgttgccgcagcattaaaagcactgcgtgctgaaaacatctcaaccaaagtctttaatagtggattaggtatttccgtattccgcgacaacttgaaccgccccgggtttcctggagagtgttttatctgtgaactcaggctgccagatcatcgtttccgatggaagcataataagctttttctgcttctgccggagggatgtggcccagcctttccagcaatcgtcgattattataccagtccacccacgtga

SEQ ID NO: 463182 - DNA, 519 bp, Shigella boydii; identical to SEQ ID NO: 463043

SEQ ID NO: 463183 - DNA, 480 bp, Shigella boydii
gtggcggacctgacgtatgttgccacacaggagggatggttgtacctcgctggcatcaaagatgtttatacgtgcgaaattgtcggctacgccatgggagagcgcatgacaaaagagctgacaggtaaagccctgtttatggcgctcaggagccagcgcccacctgccgggctaatccaccactctgatcgaggttcacagtactgcgcatacgattaccgggtcatacaggagcagtctggtctgaaaacatcaatgtcgcgtaaaggtcactgttacgacaacgctccgatggaaagcttctggggaacgctgaaaaatgagagcctgagccactatcgttttaataaccgggatgaagccatctcagtaatacgggaatacattgagattttctacaatcgtcagcgtcgtcactctcgtctggggaatatctccccggcagccttcagggaaaaatatcatcagatggctgcttaa

SEQ ID NO: 463184 - DNA, 480 bp, Shigella boydii; identical to SEQ ID NO: 463047

SEQ ID NO: 463185 - DNA, 219 bp, Shigella boydii
atgactaaaaatacacgtttttcccctgaagtccgtcaacgggcagttcgtatggttctggaaagtcagggcgaatatgactcacaatgggcagcgatttgttccattgctccaaagattggctgtatactggagactctgcgtgtctgggtacgccagcatgagcgggataccgggggcggtgaggtgggctcaccaccgctgaacgtcagcgtctga

SEQ ID NO: 463186 - DNA, 210 bp, Shigella boydii; identical to SEQ ID NO: 9340

SEQ ID NO: 463187 - DNA, 303 bp, Shigella boydii
atgagcagaaaaacccaacgttactctacggagtttaaagccgaagccgtcaaaacggttcctgaaaatcagctttcgatcagtgaaggcgcttcccgattatctgttcctgaaggcactttaggacaatgggttaccgccgcaagaaaagggctcaatacaccaggctcccgcacagtggctgagctggaatctgaagttatgcaactgcgtcaggctttaaatgaagcacgacttgagcgagatatattaaaaaaagcaacagcgtattttgcccaggagtcgctgaaaaatacgcgttag

SEQ ID NO: 463188 - DNA, 480 bp, Shigella boydii
gtggcggacctgacgtatgttgccacacaggagggatggttgtacctcgctggcatcaaagatgtttatacgtgcgaaattgtcggctacgccatgggagagcgcatgacaaaagagctgacaggtaaagccctgtttatggcgctcaggagccagcgcccacctgccgggctaatccaccactctgatcgaggttcacagtactgcgcatacgattaccgggtcatacaggagcagtctggtctgaaaacatcaatgtcgcgtaaaggtcactgttacgacaacgctccgatggaaagcttctggggaacgctgaaaaatgagagcctgagccactatcgttttaataaccgggatgaagccatctcagtaatacgggaatacattgagattttctacaatcgtcagcgtcgtcactctcatctggggaatatctccccggcagccttcagggaaaaatatcatcagatggctgcttaa

SEQ ID NO: 463189 - DNA, 294 bp, Shigella boydii; identical to SEQ ID NO: 462534

SEQ ID NO: 463190 - DNA, 1020 bp, Shigella boydii
atgttatattctatacagtttttgcggggtattgctgctcttcttgtcgttatggctcatactgctcataaaggaaatatttacaatacagaaactttaagttggtttcatataggcgggtcgggggtcgatcttttttttattatttcaggttttataatgtgctacacaacacataataaaaatttaacaatcataagttttttgacgttgcgtgttcagagaatcattcctctttactgggtatttacgactctagctctgactgtgttcgttatatctcccagccttgttaactcatctggtggagaaactagcatcatagattcgtattttttaataccatctagtgccaaatacttggtaaataacggatggacattaagctatgaattttattactatctaatcttttcgttatttttggttgctttctcgtcaaccaaactaagatatgcatgtatcattgctactctcttaattttatcctcttttggattgatttttcagccagaagatatagtggtggattttttgttaagcagttggctgtatgagtttgcgattggtgttatattatttgttgcttatgacagggggttggtgaaagctaattttggttatatctcagttacattggcattggcttttttgctatataaaaactttaacatggagtatttatcaggtgctccaagagtgatatctattggtgttccaatggggttgctgttttatggtttcttatcatttgaggggtattttaaacgaaaaaaacattttatctcaaatttatttgaacggattggagatagctcttactccttatacctttcccatcctttcgttttaagtccgatggcaattattgctagtaagttaggggtgacaaattcatttctttttggggttatattaattgggtcgtccgtatttattggttatgcaacttacgtaattatcgagaaaagaataatttatttcaccaaaattaaattggtgatgccttcagtaggttga

SEQ ID NO: 463191 - DNA, 270 bp, Shigella boydii
atggaaaccattacccatcccaccctggtacaactggtggcggccggtgctgttcgtgtcgtgatcgcagttggccaacctggcggctggacgctgctggtgcgctacggtctagccgaacgtgccctggccgcccagcgcagcaagcagctcagagtttttcgcaagctcgataccctggttctctacctgcagcagatcggggtttgccggttcgaggtggatgccacgggcttcatgggtgccccgagacagatcaggagctcttga

SEQ ID NO: 463192 - DNA, 267 bp, Shigella boydii
ttggtctggacgattaactattccgaccgggcgctcaaatcgttacgcaagatggacaaacagaacgcacgacggattgtggattttatggatttacgcattgcagttgctgccgatcctcgccagtcagggaagccgctcaaaggtgagctgggcgagttctggcgctatcgggtgggagattatcgcattctgtgtgagatccgggatgacgagctggttatccttgccgccaccattggccatcgccgcgaagtttacgactga

SEQ ID NO: 463193 - DNA, 225 bp, Shigella boydii
atgcttgctatccggttatctgatgagattgagtcccgtctggactcgctggcgaagcaaaccggcagaacaaagacgttctatgcgcgggaagcaatactggcgcatctggaagacctggaagattattatctttcagcagaaactgccgcacgcgttcgccgtggtgatgaagccgtgcattcgtctgaagacgtgaggaagtcacttggtctggacgattaa

SEQ ID NO: 463194 - DNA, 147 bp, Shigella boydii
atgaaagtgcttcatgtgacaggggaaaatgcagctacagggcgtaagggagaaaatgggagttacggtgatatgacgcctcctcgctcactcggtcgctacgctcctgccgtgaggctgcggcgggcgttacctgctcacgaatga

SEQ ID NO: 463195 - DNA, 768 bp, Shigella boydii; identical to SEQ ID NO: 462544

SEQ ID NO: 463196 - DNA, 810 bp, Shigella boydii
atgagtgtgctcattaatgaaaaactgcattcgcggcggctgaaatggcgctggccgctctcgcgtcaggtgaccttaagcattggcacgttagcggttttactcactgtatggtggacggtggcggcgctgcaactgattagcccgctgtttttgccgccgccgcaacaagtactggcaaaactgctcaccattgccggaccgcagggatttatggacgccacgctgtggcagcatctggcagccagcctgacgcgcattgtgctggcgctactcgcggcggtggtgatcggtattccggtcgggatcgccatggggctaagcccgacggtgcgcggcattctggatccggtaatcgaactttatcgtccggtgtcgccgctggcttatttgccgctgatggtgatctggtttggtattggtgaaacctcgaagatcttactgatctatttagcgatttttgcaccggtggcgatgtcggcgctggcgggggtgaaaagcgcgcagcaggttcgcattcgtgccgcccagtcgctgggtgccagccgtgcgcaggtgctgtggtttgtcattttgcccggcgcgctgccggaaatcctcaccggattacgcattggtctgggtgtgggctggtctacgctggtagcggcggagctgattgccgcgacgcgcggtttaggatttatggttcagtcagcgggtgaatttctcgcgactgacgtggtgctggcgggaatcgcggtgattgcgattatcgcctttcttttagaactgggtttgcgcgcgttacagcgccgtctgacgccctag

SEQ ID NO: 463197 - DNA, 1176 bp, Shigella boydii
atgcgtctgttttctattcctccacccacgctactggcggggtttctggcggtattaattggctacgccagttcagcggcaataatctggcaagcagcgattgtcgccagagccaccactgcacaaatctctggctggatgacggcgctggggctggcaatgggcgtcagtacgctgactctgacattatggtatcgcgtacctgttctcaccgcatggtcaacgcctggcgcggctttgttggtcaccggattgcagggactaacacttaacgaagccatcggcgtttttattgtcaccaacgcgttaatagtcctctgcggcataacgggactctttgctcgtctgatgcgcattattccgcactcgcttgcggcggcaatgcttgccgagattttattacgctttggtttacaggcgtttgccagtctggacggtcaatttacgttgtgtggaagtatgttgctggtatggctggcaaccaaggccgttgcgccgcgctatgcggtaattgccgcgatgattattgggatcgtgatcgtcatcgcgcaaggtgacgttgtcacaactgatgttgtctttaaacccgttctccccacttatattacccctgatttttcgtttgctcacagcctgagcgttgcactccccctttttctggtgacggtggcatcgcaaaacgcaccgggtatcgcagcaatgaaagcagctggatattcggctcctgtttcgccattaattgtatttactggattgctggcactggttttttcccctttcggcgtttattccgtcggtattgcggcaatcaccgcggctatttgccaaagcccggaagcgcatccggataaagatcaacgttggctggcagctgccgttgcaggcattttctatttgctcgcaggtctgtttggtagtgccattaccgagatgatggctgccctgcccgtaagttggatccagatgctggcaggtctggcgctgttgagtaccattggcggcagtttgtatcaggcgctgcataatgagcgtgagcgcgacgcggcggtggtggcatttctggtaacggcaagtggattgacgctggtcgggattggttctgcgttctggggattaattgccggaggcgtttgttacgtggtgttgaatttaatcgctgacagaaaccaatattga

SEQ ID NO: 463198 - DNA, 537 bp, Shigella boydii
atggaaaatctcgctcgctttttatccaccacacttaaacaactacgccagcagcgcggctggagtctttcgcgactggcagaagcgacgggcgtttctaaagcaatgttagggcagattgagcgtaatgagtccagtccgacggtcgcgacattatggaaaattgccaccgggttgaacgtaccattttcaacatttatttctccgccgcagtccgctacgccttcagtttatgatccacaacagcaggcgatggtgatcacttcgctgtttccttatgatccacaactctgctttgaacacttctcgattcagatggcatctggtgcaataagcgaatcgacgccccatgagaagggggtaatcgaacatgtcgtcgtcattgatggacaacttgatctgtgcgttgatggggaatggcagacccttaattgtggggaaggcgttcgatttgctgcagacgtcacgcatatctatcgtaatggtggggagcaaaccgtacattttcattccctcatccattacccgcgcagttaa

SEQ ID NO: 463199 - DNA, 1962 bp, Shigella boydii
gtgaccgtatcttctcatcgacttgaactgttaagcccggcacgcgatgccgccattgcccgcgaagctattttgcacggtgccgatgctgtttatatcggcggccctggttttggtgcccgtcataatgccagtaatagcctgaaagatattgccgagctggtgccgtttgcccatcgttatggtgcaaaaattttcgtcacgcttaacaccattttgcatgatgatgagctggaacccgcgcaacggctgattactgacctctaccagaccggtgtcgatgcgctgattgttcaggatatggggattctggaacttgatattccgccgattgaactgcacgccagtacgcagtgcgacattcgtacagttgaaaaagcgaagttcctctctgatgttggcttcacgcagattgtgctggcgcgagagctgaatcttgatcagatccgcgcgattcaccaggctacggacgcgaccattgaattctttattcatggggcactgtgcgtggcctattcgggtcagtgctacatttctcatgcgcaaacagggcgtagcgccaaccgtggcgattgctcgcaggcgtgccgtttgccatacacattgaaagacgatcaggggcgggtggtttcctatgaaaaacatctgctgtcgatgaaagataacgatcagactgccaacctcggcgcgctgattgatgctggtgtacgctccttcaagattgaaggtcgttacaaagatatgaactacgtgaagaatatcaccgcccattatcgccagatgcttgatgccattattgaagaacgtggcgatctggcgcgcgcttcatcaggtcgtactgaacatttctttgttccatcgacggaaaagactttccaccgtggtagcacagattattttgtgaatgcccgtaaaggcgatattggcgcgttcgattcgccgaaatttatcggcctgccggtgggtgaagtattgaaagtggcgaaagatcatctcgatgttgccgtcaccgagccactggcaaatggtgatggcctgaacgtgatgattaaacgtgaagtcatcggttttcgtgccaatacggtcgagaaaaccggagaaaatcagtaccgcgtctggcccaatgaaatgccagcagatttgcacaaaattcgtccacatcacccactaaaccgtaatcttgatcataactggcagcaggcactgacaaaaacctccagcgaacgtcgggtggcggtagacattgaactgggcggctggcaggaacaactgattctgaccctcaccagtgaagagggtgtcagcatcacgcatacgctggacgggcagttcgacgaagccaataacgccgaaaaagcaatgaacaatctgaaggatggtctggcaaaactggggcaaaccctctattacgcccgcgatgtgcaaattaatttgccgggggcgctgtttgtaccaaacagtctgttaaaccagttccgccgtgaagctgctgacatgctggatgctgcgcgtcttgccagttaccagcgcggcagccgtaaaccggttgctgagcctgcgccggtttatccgcaaacgcatctgagtttcctcgcgaacgtatacaaccagaaagcgcgtgaattttatcatcgctatggtgtgcagctgattgacgcggcgtatgaggcacatgaagagaagggcgaagtcccggtgatgatcaccaagcattgtctgcgctttgcctttaatctgtgcccgaaacaggcgaaaggcaatatcaaaagctggaaggcgacgccaatgcaactggttaacggcgatgaagtattaacgctaaagtttgattgccgcccatgcgagatgcacgtcattggcaaaatcaaaaatcacatactgaaaatgccgttaccgggaagcgtagtggcatccgtaagtccggatgagctgctgaaaacattgcctaagcgaaaagggtaa

SEQ ID NO: 463200 - DNA, 171 bp, Shigella boydii
atggcagggcacaaaggacatgaatttgtgtgggtaaagaatgtggatcatcagctgcgtcatgaagcggacagcgatgaattgcgtgctgtggcggaagagtcggcggaaggtttgcgcgagcatttttactggcaaaaatcgcgcaaaccagaagcgggacaacgttga

SEQ ID NO: 463201 - DNA, 480 bp, Shigella boydii
gtggcggacctgacgtatgttgccacacaggagggatggttgtacctcgctggcatcaaagatgtttatacgtgcgaaattgtcggctacgccatgggagagcgcatgacaaaagagctgacaggtaaagccctgtttatggcgctcaggagccagcgcccacctgccgggctaatccaccactctgatcgaggttcacagtactgcgcatacgattaccgggtcatacaggagcagtctggtctgaaaacatcaatgtcgcgtaaaggtcactgttacgacaacgctccgatggaaagcttctggggaacgctgaaaaatgagagcctgagccactatcgttttaataaccgggatgaagccatctcagtaatacgggaatacattgagattttctacaatcgtcagcgtcgtcactctcgtctggggaatatctccccggcagccttcagggaaaaatatcatcagatggctgattaa

SEQ ID NO: 463202 - DNA, 4056 bp, Shigella boydii
atgaacaaaatatttaaagttatctggaaccctgcgacagggaattatactgttaccagcgaaacggcaaaaagccgtggcaagaaatctgggcgcagtaagctgttaatttctgcgctggttgcgggtggaatgttgtcgtcgtttggggcattggcgaatgccgggaatgacaacggtcagggtgttgattacggtagtggatcagctggcgacggctgggttgctataggcaaaggggcgaaagcaaatacttttatgaacaccagtggttccagtactgctgtgggttatgacgctatagctgaaggccaatatagctctgccatcgggtcaaaaacccatgcgattggtggtgcatcaatggcctttggggttagtgcaatatcagaaggcgatagaagtatagcactgggtgcctcttcgtattcattgggccaatactcaatggccctcggccgttattcaaaagcattgggtaaattgtctattgctatgggggactcttccaaagcggaaggagcaaacgccattgccctgggaaatgccactaaagctactgagattatgagtattgctcttggcgacaccgccaatgcgtcaaaagcgtattcaatggcgctgggagcaagtagcgtcgcatctgaagaaaacgcaattgccctggggcgtagcagtgtagctagcggtactgacagcctcgcatttggcagacaatcacttgccagcgcagcgaacgctattgcgataggtgctgagaccgaagccgctgaaaatgcaactgctattggcaataatgcgaaggcaaaagggactaatagcatggcaatggggttcggaagccttgccgataaagtcaatactatcgcattaggaaatggcagccaggctctggcagataatgcaatcgccataggccagggcaacaaagctgatggcgtggatgccatcgctctgggtaatggtagccagtcgagaggcttaaacaccattgccttaggcacagccagtaatgcaactggtgataagagtcttgcgcttggtagtaatagcagtgccaacggtattaactctgtcgcgctgggcgcagattccattgcggatttagacaataccgtctctgtcggcaatagttcattaaaacgcaagatcgttaatgtgaaaaatggcgcgatcaagtctgacagttacgatgccattaatggttcacagctttatgccattagcgactcggtagcaaaaaggcttggaggaggggctgcagtagatgttgatgacggtactgttacagcaccaacctacaatttaaaaaatggtagcaaaaataacgtaggggctgcgctcgctgtacttgatgaaaacaccctgcaatgggaccaaaccaaaggcaaatacagcgctgctcatggtactagtagcccaactgccagcgtaatcaccgatgttgcggatggcacgatttcagcctccagtaaggatgcggttaacggttcccaactgaaagctaccaatgacgatgtcgaagccaacaccgccaatatcgctactaataccagcaacattgccacgaatacggcaaatattgccaccaataccaccaatatcaccaacctgacggattccgttggtgaccttcaggctgatgccctgctctggaacgaaactaaaaaggcattcagtgcagctcacggccaggataccaccagcaaaatcaccaacgttaaagatgccgacctgacggctgacagcactgatgctgttaacggctctcagctgaaaaccaccaacgatgctgtggcgacgaataccaccaatatcgccaataacacttccaatattgccactaacaccaccaacatctctaatctgactgagacggtgactaatcttggtgaggatgcgctgaaatgggataaggacaatggtgtattcacggcagctcatggcaccgagaccaccagcaaaatcaccaacgttaaagatggcgacctgacgactggcagcaccgatgccgttaacggctctcagctgaaaaccaccaacgatgccgtggcgacgaataccaccaatatcgccactaacaccaccaacatctctaatctgactgagacggtgactaatcttggtgaggatgcgctgaaatgggataaggacaatggtgtcttcactgcagctcatggcaacaataccgccagcaaaatcaccaatatcctggacggcacagtcactgcaaccagttccgatgccattaacggtagccagctttatgacttaagcagcaatatcgccacctacttcggcggcaatgcttctgtgaatactgacggtgtgtttaccggtccaacctacaaaatcggtgaaacaaattattataacgtcggcgatgcactggctgcgattaactcctcatttagcacgtctctcggcgatgctctgctttgggatgccaccgcaggtaaattcagtgccaaacacggtactaatggtgacgcaagcgtgatcactgatgtcgcagatggtgaaatttcagactccagttctgacgcagtaaacggctcacaactccacggcgtgagcagttatgttgttgatgcgctggggggtggtgccgaagtcaatgcagacggcaccatcactgcgccgacgtacaccattgctaatgctgattacgataatgtcggtgatgccctgaatgctatcgataccactcttgacgacgctctgctctgggatgcggacgccggtgaaaatggtgcatttagcgccgctcacggaaaagataaaactgccagtgtaatcactaacgtcgctaacggtgcaatctctgctgccagcagagacgcgattaacggctcacaactctataccaccaataagtacatcgctgatgcgctggatggtgacgcagaagtcaacgctgacggcaccatcaccgcaccgacttacaccattgcgaacgccgagtacaacaacgtcggtgacgctctggatgcgcttgatgataacgccctgctgtgggatgagactgccaatggcggtgctggagcctacaatgccagccatgacggtaaagccagcatcatcactaatgtcgctaatggcagtattagtgaggacagtaccgatgcagtgaacggttctcagttgaatgcgacgaatatgatgattgagcagaacacccaaattatcaatcagctcgctggtaacaccgacgcaacctatatccaagaaaacggtgcgggtattaactatgtgcgtactaacgacgacggcttagcgttcaacgacgccagcgcacagggtgttggcgctacagctataggttataactctgtcgccaaaggcgatagcagcgtagctattggtcagggcagctacagcgacgttgatacgggtatcgccctaggtagcagctctgtttccagccgagtgattgccaaaggctcccgtgacaccagcataacggaaaatggcgttgttattggttacgacaccacggatggcgaactgctcggtgcattgtctatcggtgatgacggtaaatatcgtcaaatcatcaacgtagccgatggttccgaagcccatgacgccgttacggttcgtcaattgcagaatgcgattggtgcggtcgcaaccacgccgactaaatacttccacgctaattcaacggaagaagattcactggcagtgggaactgactcgctggcaatgggtgcgaaaaccatcgtgaatggcgataaaggtattggtatcggttatggtgcctacgtggacgcgaatgcacttaacggcattgccattggtagcaatgcgcaagtcattcatgtcaacagtattgcgataggtaatggttctacgaccactcgtggcgctcaaaccaattataccgcctacaacatggacgcaccgcagaactctgtcggtgaattctcagtcggtagtgcggatggtcaacgtcagatcacaaacgtcgcagctggttcagcggataccgatgcggttaacgtgggtcagttgaaagtcactgatgagcgcgtagcgcaaaatacccagtag

SEQ ID NO: 463203 - DNA, 381 bp, Shigella boydii; identical to SEQ ID NO: 458903

SEQ ID NO: 463204 - DNA, 519 bp, Shigella boydii
gtggcagaacgacctgaccagctgtgggtggctgattttacttacgtcagcacatggcagggcttcgtctatgtggcgttcattattgatgtgtttgccggatacatcgtggggtggcgggtctcatcgtccatggaaacgacattcgtgctggatgctctggagcaggcgttatgggcccgtcgaccgtccggcacggtccatcacagtgataaaggttctcagtatgtatcgctggcctacacacagcggcttaaggaagccggattactggcatcaacaggaagtacaggcgactcgtatgacaacgcgatggcagagagcatcaatggtctttacaaagcggaggtaatacaccgtaagagctggaaaaaccgtgcagaagtggaactggccacactcacgtgggtggactggtataataatcgacgattgctggaaaggctgggccacatccctccggcagaagcagaaaaagcttattatgcttccatcggaaacgatgatctggcagcctga

SEQ ID NO: 463205 - DNA, 483 bp, Shigella boydii
atggcagcggcgctggaactctcaaggctgatgggattacgttcgcaggaggtggtgcaaagtgcgcagtcattaagaacgtggaagcaatcgctggagcggggtgagccccgtttaaccgtggtgttcggcaccaaaggcgggcgtccgcgagaaaccgttattctggatgctgtcgctatcagaaaagcgctggataatgcgttggttgtggcagaagatcgccacggcaggctgatagataaacccgacctgaaaagcgcgatgaaatactggcacagccaggcgtcacgtctcgggttaactggcacatattccccgcactcgttgcgctatgcgtgggcgcaggatgccattcgtcattatctggcgcagggattcagtgagaaagaagcgctggcaatgacggcgatggatttgggacacggcgacgggcgcgggcggtatgtggcgcaggtttacggaagaaaggatactgattga

SEQ ID NO: 463206 - DNA, 1455 bp, Shigella boydii; identical to SEQ ID NO: 462461

SEQ ID NO: 463207 - DNA, 537 bp, Shigella boydii
atgagttttatccagactcttaccggtaagaagttcaattatatcaactccaccattgacgatatttatatcgaggatatcgccggtgcgctttcaaatatctgccgcttcgcgggacacttgccggatttttacagcgtggcgcagcattccgttctgtgcagtcaacttgtggcgccagagttcgcctttgaagcgttaatgcatgatgcaacagaagcgtattgtcaggacatccccgcgcaactgaaacgccttcttcctgactataaacggatggaagaaaaaatagacgccgtaatccgtgagaaatacgggttacccccggttatgagcacgcccgtgaaatatgccgatctcatcatgctggcaaccgaacgccgcgatcttgggcttgatgatggctctttctggcctctactagaaggtatcccagcaacagagatgttcaaagttattccactgtcgccaggccatgcctacgggatgtttatggaacgttttaacgaattatcggagttacgcaaatgcgcatga

SEQ ID NO: 463208 - DNA, 363 bp, Shigella boydii
atgcgcatgaatgttttcgaaatggaagggtttcttcgcgggaaatgtgtaccgcgagatctgaaagtgaatgaaacggatgctgaatacctggtgcgtaaattcgatgcgcttgaagctaaatgtgcggcactggaaaacaaagtaataccagtgtcaactgaactgccaccagcaaatgaaagtgttttgttattcgatgctaacggagaaggctggctaattggctggcgttctctctggtacacctggggacaaaaagaaaccggagactggcagtggacatttcaggtcggggaccttgaaaacgtcaatatcactcactgggcagtaatgccaaaagcaccggaggctggagcataa

SEQ ID NO: 463209 - DNA, 156 bp, Shigella boydii
atgaccacttttaccgacaaagaactgattaaagaaattaaagagcgtatcagcagccttgacgtgcgagacgatattgagcgccgtgcttatgaaatcgcactcctattgaggtgtactggcaatagcggacactaccatttgttctttttttaa

SEQ ID NO: 463210 - DNA, 519 bp, Shigella boydii; identical to SEQ ID NO: 463043

SEQ ID NO: 463211 - DNA, 414 bp, Shigella boydii
atgctggcgtttacctggatcgcgctgcgatttatccatttcacctcgctgatgctggtttttggcttcgcaatgtacggtgcctggctggcccccttgacgattcgtcgcttgctggcgaagcgttttctgcgtttacaacagcacgctgccgtctggagtttgatcagtgccactgcaatgctcgccgttcagggcgggttgatgggaacgggatggacagatgtattttcgccaaacatttggcaggctgttttgcaaacgcagtttggtggcgtctggttatggcaaattgttctcgccctcgtaacgttgcgcccttatgcaaccgcggaatatgccacgtttgctgtttatgctcactaccgcgcaatttattctgctggcgggagtggggcatgcgacgctgaatga

SEQ ID NO: 463212 - DNA, 396 bp, Shigella boydii
atgaaagaaaatggcctgaaggcgaacagcctctgtgttgagatcactgaaaccgtgatcgagcgaattaatgaacatttttatctcaatattgaacaactgcgtaaacaaggggtacggatatcgattgatgactttggcaccggtttgtcaaacctgaaacgtttttatgaaattaatccagacagcataaaggtggactcgcaatttaccggcgatattttcggtactgcgggaaaaattgtgcgcattattttcgatctggcacgctataaccggatcccggtgattgcggaaggcgtagagagcgaagacgttgcacgcgaattaattaaattaggatgtgttcaggctcaggggtatctgtaccagaaacctatgccattctccgcctag

SEQ ID NO: 463213 - DNA, 381 bp, Shigella boydii
atgctgggagcagtggaacgctgcttcggcaacgatcttccgtcgtctccagtggagtggctgacggataatggttcatgctaccgggctaatgaaacacgccagttcgcccggatgttgggacttgaaccgaagaacacggcggtgcggagtccggagagtaacggaatagcagagagcttcgtgaaaacgataaagcgtgactacatcagtatcatgcccaaaccagacgggttaacggcagcaaagaaccttgcagaggcgttcgaacattataacgaatggcatccgcatagtgcgctgggttatcgctcgccacgggaatatctgcggcagcgggcttgtaatgggttaagtgataacagatgtctggaaatatag

SEQ ID NO: 463214 - DNA, 900 bp, Shigella boydii
atgaagcgtgaagaaatcgctgatctgatggcgtttgtcgtcgttgcagaggagcgtagcttcactcgtgcagcagcccgcctgagcatggcgcagtcagctttaagccagatagtgcgtcgtatagaagaacgattgggattgcggcttctgacgcgaaccacgcgcagcgttgttccaactgaagcgggcgagcatcttttgtctgttcttggccctatgttgcatgacatagattcagccctggcatccctgagcgagctgcagaaccgcccatccgggacaatacgtattactactgtagaacatgcagcaaaaacgatattgttaccagcaatgcgcacattcctgaaatcgcatcctgaaattgatattcagctcaccattgattatggtttgaccgatgtcgtttctgaacgttttgatgcaggcgtccgtctgggtggggagatggataaagatatgatcgccattcgaatcgggccagatataccaatggctattgttggctcaccggattatttttctcgccgaagtgttccaacgtcagtgtcacaattaatagatcatcaggcaattaatttgtatcttcccacatcgggtacagcaaatcgctggagattaatacgcggtggacgtgaagttcgtgttcgcatggaaggtcagcttttactgaatacgatagacctgatcattgatgctgcaattgatgggcatggattggcgtatctaccttatgatcaggttgagcgggctattaaagaaaaaaaactgatacgtgttttggataaattcacaccagatttacccggttatcacctgtactatccacaccgtcgacatgctggctcggcattctcattatttatagataggctgaagtataaaggtgctgtttag

SEQ ID NO: 463215 - DNA, 543 bp, Shigella boydii
gtgaaagaaagcaatcagcgatggtgctctgacgggttcgagttctgctgtgataacggagagagactgcgtgtcacgttcgcgctggactgctgtgatcgtgaggcactgcactgggcggtgactaccggcggcttcaacagtgaaacagtactggacgtcatgctgggtgcggtggaacgccgcttcggcaacgatcttccgtcgtctccagtggagtggctgacggataatggttcatgctaccgggctaatgaaacacgccagttcgcccggatgttgggacttgaaccgaagaacacggcggtgcggagtccggagagtaacggaatagcagagagcttcgtgaaaacgataaagcgtgactacatcagtatcatgcccaaaccagacgggttaacggcagcaaagaaccttgcagaggcgttcgagcattataacgaatggcatccgcatagtgcgctgggttatcgctcgccacgggaatatctgcggcagcgggcttgtaatgggttaagtgataacagatgtctggaaatatag

SEQ ID NO: 463216 - DNA, 1071 bp, Shigella boydii
atgatacgtaagtcagctacaggtgttattgttgcgttagccgtaatctggggtggtggcatatggtacacaggtacgcaaattcagcctggtgtcgaaaaatttattaaagattttaacgatgctaaaaagaaaggtgaacatgcctacgatatgacgttaagttataaaaactttgacaaaggcttttttaattcccattttcaaatgcaaatttcatttgataacggtgcacccgatctcaatatcaagccaggccagaaagttgcatttgatgtggatgttgagcacggtccgttgcccatcacaatgttaatgcatggtaatgtcatcccagcactggcagcggcaaaagtgaacttagtgaataatgaactgacacaaccgctatttatcgccgcgaaaaataaatcgcccgtggaagcgacattgcgattcgcgtttggtggctcattctctacgacattagatgttgcccctgcagagtatggaaagttttcttttggtgagggccagtttacttttaatggtgatggtagttcattgtctaacctggatattgaaggcaaagtcgaagatattgttctgcaattatcaccaatgaacaaagtaacggcaaaaagttttaccattgattctctgacacgattagaagaaaagaaatttccggttggtgaaagcgagtcgaaatttaatcaggttaatattatcaatcagggggaagacgttgcccaaatcgatgctttcgttgcaaaaaccaggctggatcgcgttaaagacaaagattatatcaatgtcaatctgacctacgaacttgataagttaacaaaagggaatcagcaactcggtagtggtgagtggtcattgattgctgaatctattgatccctcagcagtgcgccaatttatcatccagtataacattgcgatgcagaagcagcttgctgcacaccctgagttagcaaacgatgaagttgctctgaagtggcacactgaatttggccacctgaacagaggtgatatgctcacctcagaacaacacaggtgctccaatgaaaaaaagaaattttag

SEQ ID NO: 463217 - DNA, 543 bp, Shigella boydii
gtgaaagaaagcaatcagcgatggtgctctgacgggttcgagttctgctgtgataacggagagagactgcgtgtcacgttcgcgctggactgctgtgatcgtgaggcactgcactgggcggtgactaccggcggcttcaacagtgaaacagtactggacgtcatgctgggtgcggtggaacgccgcttcggcaacgatcttccgtcgtctccagtggagtggctgacggataatggttcatgctaccgggctaatgaaacacgccagttcgcccggatgttgggacttgaaccgaagaacacggcggtgcggagtccggagagtaacggaatagcagagagcttcgtgaaaacgataaagcgtgactacatcagtatcatgcccaaaccagacgggttaacggcagcaaagaatcttgcagaggcgttcgagcattataacgaatggcatccgcatagtgcgctgggttatcgctcgccacgggaatatctgcggcagcgggcttgtaatgggttaagtgataacagatgtctggaaatatag

SEQ ID NO: 463218 - DNA, 333 bp, Shigella boydii
gtgaaccgccccgtgtttcctgtttatcattttctggtcagtgccgcgattctggtattcgtggtgattttctggcggacacaccatcgcgaccaccgtaactggctggctctacggctattcgtattatgctctgtaaaccgttggccattgcggatggttaaaggaacagttgtggggacaactgacacattacgtgaaatgcagcgttatgaacaactgagtcagcacggggctgacaactggaaaatccagccgggagcaccgttatatgatacgattgttattgtcactggtgagagtgtgcgcagggattatatgtcagtgacataa

SEQ ID NO: 463219 - DNA, 981 bp, Shigella boydii
atgagtcatcaacttaccttcgccgacagtgaattcagcagtaagcgccgtcagaccagaaaagagattttcttgtcccgcatggagcagattctgccatggcaaaacatggtggaagtcatcgagccgttttaccccaaggctggtaatggccggcgaccttatccgctggaaaccatgctacgcattcactgcatgcagcattggtacaacctgagcgatggcgcgatggaagatgctctgtacgaaatcgcctccatgcgtctgtttgcccggttatccctggatagcgccttgcctgaccgcaccaccatcatgaatttccgccacctgctggagcagcatcaactggcccgccaattgttcaagaccatcaatcgctggctggccgaagcaggcgtcatgatgactcaaggcaccttggtcgatgccaccatcattgaggcacccagctcgaccaagaacaaagagcagcaacgcgatccggagatgcatcagaccaagaaaggcaatcagtggcactttggcatgaaggcccacattggtgtcgatgccaagagtggcctgacccacagcctagtcaccaccgcggccaacgagcatgacctcaatcagctgggtaatctgctgcatggagaggagcaatttgtctcagccgatgccggctaccaaggggcgccacagcgcgaggagctggccgaggtggatgtggactggctgatcgccgagcgccccggcaaggtaagaaccttgaaacagcatccacgcaagagcaaaacggccatcaacatcgaatacatgaaagccagcatccgggccaaggtggagcacccatttcgcatcatcaagcgacagttcggcttcgtgaaagccagatacaaggggttgctgaaaaacgataaccaactggcgatgttattcacgctggccaacctgtttcgggcggaccaaatgatacgtcagtgggagagatctcactaa

SEQ ID NO: 463220 - DNA, 744 bp, Shigella boydii
atgaccattctcagggcgttcattcgttctctctcggtttctcaggagcaggagcctgccgttcggttcgaaactgaacccggacgacagatgcaggttgactggggcactatgcgtaatggtcgctcaccgcttcacgtgttcgttgctgttcccggatacagccgaatgttgtacatcgaattcactgacaatatgcgttatgacacgctggagacctgccatcgtaatgcgttccgcttctttggtggtgtgccgcgcgaagtgttgtatgacaatatgaaaactgtggttctgcaacgtgacgcatatcagaccggtcagcaccggttccatccttcgctgtggcagttcggcaaggagatgggcttctctccccgactgtgtcgccccttcagggcacagactaaaggtaaggtggaacggatggtgcagtacacccgtaacagtttttacatcccactaatgactcgcctgcgcccgatggggatcactgtcgatgttgaaacagccaaccgccacggtctgcgctggctgcacgatgtcgctaaccaacgaaagcatgaaacaatccaggcccgtccctgcgatcgctggctcgaagagcagcagtccatgctggcactgcctccggagaaaaaagagtatgacgtgcatcctggtgaaaatctggtgaacttcgataaacaccccctgcatcatccactctccatctacgactcattctgcagaggagtggcgtga

SEQ ID NO: 463221 - DNA, 819 bp, Shigella boydii
atgtgtcaggtatttggtgtatccaggagcggttattacaactgggtacagcatgaaccctcagacagaaaacaaagtgatgagcggctaaaactggagattaaggtggcacatatccgcactcgcgaaacatatggaacccggcggctccagacggagctggcagagaatggcatcatcgttggtcgtgaccgactggcacgtcttcgtaaggagctaaggctacgctgtaagcagaaacgcaagttcagagcgactacgaacccgaaccacaatctgccagttgcgccaaatctgctgaaccagacgttcgctcctacagcaccaaatcaggtctgggtggcggacctgacgtatgttgccacacaggagggatggttgtacctcgctggcatcaaagatgtttatacgtgcgaaattgtcggctacgccatgggagagcgcatgacaaaagagctgacaggtaaagccctgtttatggcgctcaggagccagcgcccacctgccgggctaatccaccactctgatcgaggttcacagtactgcgcatacgattaccgggtcatacaggagcagtctggtctgaaaacatcaatgtcgcgtaaaggtcactgttacgacaacgctccgatggaaagcttctggggaacgctgaaaaatgagagcctgagccactatcgttttaataaccgggatgaagccatctcagtaatacgggaatacattgagattttctacaatcgtcagcgtcgtcactctcgtctggggaatatctccccggcagccttcagggaaaaatatcatcagatggctgcttaa

SEQ ID NO: 463222 - DNA, 210 bp, Shigella boydii
atgacggatggctggccgctgtatgaatcacgcctgaagggaaagctgcacgttatcagcaagcgttacactcagcgcattgagcgacataatctgaatctgagacaacatctggcaaggctgggacggaagtcactgttgttctcaaaatcggtggagctgcatgacaaggtcatcgggcattatctgaacataaaacactatcagtaa

SEQ ID NO: 463223 - DNA, 210 bp, Shigella boydii; identical to SEQ ID NO: 9340

SEQ ID NO: 463224 - DNA, 162 bp, Shigella boydii
atgacaggcgaaaatcgtggccggggaaggccgcgaaagacagaaagtacctatgcagatactcgtaatgatctgatccgcagtggccttgaactgctgacgcagaatggttttcttgcgacgggagtcgatgccattgtgtcaacgacggatgaaaagtga

SEQ ID NO: 463225 - DNA, 1371 bp, Shigella boydii
atgatttcacgctggaaatggatgctgaagcagacaattaaaaaactatggttcagggcaacgttattcgcaattgtcgcgataataacggcccttttatcaattctttttaaatcaatgatacctgagtcggtttccgtgaaggttggtgcggaagcagtcgataacattctgaacatactggcatcgagtatgctggcagtgaccacattttcgctgagtatcatggtcacagcctacggttcagccactactaatgtgactcccagagctacgcgtttagttgttgaagacgtcaccacacaaaatgtactggccaccttcatcggttcttttctcttcagtctggtagggattattgccctcaatatgggagcttatggagaaagggggagagtcattttattcattgtcacactggttgtcattgccttaatcctcatcacattgcttcgctggatacagcatttgacctctctggggagggttggtgagacaacggcacaagtagaacaggcggccatcgaaacatttattgcgagagcaagaaatccctgtctcggcggatatccatggcttgagaacaatgaacagccgaaaggaacggttgcagtttatccgaagaagattggctatgttgaatatattgatatggtgaaacttagcaagctgctgaccaatgatccccgtcatgtatacctcgtggcgcagccaggcagtttcatacatccgtccatgccagttttgtacctgagtcagggccaggagtcgtcaatcaacaccgatttacttgagacgattattgtctcggatgcacgttcatttgctcaggatcctcgattttgtcttagcgtcatggccgaaatagcctgccgggccctttcccctgcagtgaacgatcctggaaccgccattgatgtcattggcagaggtgttcgtatactttccacttacgcgcagaataaatctgatgaaatagaagtgaaatatccttcagtacatgttgcaccacttcagaataacgatctactggaagactttttctcacctgtcgcgcgcgatggtgccagtatgagggagattcagataagagtccttaaaggactgtcgatgctgagtaaaggttggcctgagatatttgctgaagccgcacataccctggcatttgaaacattagagcatgcaactcgtgctgaccatatagattctgatagatatctaataaaatcaacttattataatttatttagtggcgaatattctaataaaaaaaatagctgcagagcaagcaattcggttgttggcaagtcaagggcaaagcattcgcgtgagaatgggcgtatgctttgtgccaaaagcaaacgttgctaa

SEQ ID NO: 463226 - DNA, 159 bp, Shigella boydii; identical to SEQ ID NO: 7652

SEQ ID NO: 463227 - DNA, 189 bp, Shigella boydii
atggaaagcttctggggaacgctgaaaaatgagagcctgagccactatcgttttaataaccgggatgaagccatctcagtaatacgggaatacattgagattttctacaatcgtcagcgtcgtcactctcgtctggggaatatctccccggcagccttcagggaaaaatatcatcagatggctgcttaa

SEQ ID NO: 463228 - DNA, 495 bp, Shigella boydii
atggtgtcgcactggttcagtgccagtcagtggcagttgccgaatgaaagcgattatctgaaattacaggcgctgtttgcccgggtggcagaagagaagcatcggcgtggtgaactggaaaagctccaccaccagctggtggatacgtatacctcactgaaccggcagtatgcggagctgctgagtgaatataaacatctgcggcggtattttggcgtgacggtgcaggtgccgtataccgatgtgtggacgcataaaccggtgcagttctatcccgggaaacatccgtgcgaaaaaccggcagaaatgctgcagcagataatcagcgctagcagtcgtccgggtgacctgattgcagattttttcatggggtcgggttcgacagtgaaagcggcactggcgctcgggcgtcgtgcaattggcgttgagctggagactgaacgttttgagcagacggttcgggaagtacaggatttagtcagccagaacggatga

SEQ ID NO: 463229 - DNA, 1137 bp, Shigella boydii
atgttagctcgttcagggaaggtaagcatggctacgaagaagagaagtggagaagaaataaatgaccgacaaatattatgcgggatgggaattaaactacgccgcttaactgcgggtatctgtctgataactcaacttgcgttccctatggctgcggcagcacaaggtgtggtaaacgccgcaacccaacaaccagttcctgcacaaattgccattgcaaatgccaatacggtgccctacatccttggagcgctggaatcggcccaaagcgttgccgaacgtttcggtatttcggtggctgagttacgcaaactcaaccagtttcgtacgtttgctcgaggttttaataatgtccgccagggtgatgaactggatgtcccggcacaagttagtgaaaaaaaattaaccccgccgccgggtaatagcagtgacaacctcgagcaacagatagccagtacttcacagcaaatcgggtctctgctcgccgaagatatgaacagcgagcaagcggcaaatatggcgcgtggatgggcctcttctcaggcttcaggcgcaatgacagactggttaagccgcttcggtaccgcaagaatcacgctgggcgtggatgaagattttagcctgaagaactcccagttcgattttctccatccgtggtatgaaacgcctgataatctctttttcagtcagcatactctccatcgtactgacgagcgtacgcagattaacaacggcttaggttggcgtcatttcactcccacatggatgtcaggcatcaacttctttttcgaccacgatcttagccgttaccactcccgcgccggcattggcgcggagtactggcgcgactatctaaaattaagcagtaacggctatttgcgactgaccaactggcgcagcgcacctgaactggacaacgattatgaagcacgcccggccaatggctgggatgtacgcgcagaaagctggctacccgcctggccgcaccttggcggtaaactggtctatgaacagtattatggcgatgaagtggccctgttcgataaagacgatcggcaaagtaatcctcatgccataaccgctggacttaactatacccccttcccgctgatgaccttcagcgcggagcaacgctag

SEQ ID NO: 463230 - DNA, 1188 bp, Shigella boydii; identical to SEQ ID NO: 461285

SEQ ID NO: 463231 - DNA, 531 bp, Shigella boydii
atgagcaatcttttacagacgggcgcggagttcgagaaaaagctgaaagagagagccgaatctacagagaaaatgctgaacgacgagttcaggaagctcgaagaatctgtaagcaaggctgtgacatcaaacgagacgaaaatcaaagacgctatagccctgttcacagcttcgacagaggaatcactgaaaaaacaccgggaaggggtgaaagaggcgatgatgcagcacaggaaggacgtgttaaagctggcagggaatacgggcatgatgttgctggggatggttattttcctgtttaccgtgagtggcgggacgctctggtatcttggcgggatgatacaggcgaacctggaagaaatcaggaagcagaacgagagtctggagaagctgaacgcgaagacatggggcgtgcgttatcacgaggggagcaacggacgttttctggtgttgcccgaggggatgaaagccgaaacgaactggacgatggaaaacgggaaacagaatgccgtaaggctggtacaggagtaa

SEQ ID NO: 463232 - DNA, 210 bp, Shigella boydii; identical to SEQ ID NO: 9340

SEQ ID NO: 463233 - DNA, 381 bp, Shigella boydii; identical to SEQ ID NO: 458903

SEQ ID NO: 463234 - DNA, 480 bp, Shigella boydii; identical to SEQ ID NO: 463183

SEQ ID NO: 463235 - DNA, 324 bp, Shigella boydii
atgaagcaacctgattttgcgaagtggtacttctatcaattacttaagaagtatgagggcgaacagctgtatcttaatgagttaggatatgtttatggtaatgaagaaaaaacaaatgaaattgtaaataacaatccgggttatgtcgttgagatttttgaagaaaagatgggtaatgaattaaaaattagaacaagaatgatggaaatcctccgggatgggaaaataaatatatgtgaatatattaataaagaacagttagaaaaattaaatcctccggaagatttacgtatagcaataaaaaaattggggtggaataattga

SEQ ID NO: 463236 - DNA, 546 bp, Shigella boydii
atgttgcatttaaaaaatattacggcaggtaatccgaaaaccgcggaacaatatcagctgacaaaacagtatgatgtcacctggcttttttcggaagacggcaaaaactggtatgaagaacagaagaactttgccagtgacaccataaaaatggtttacaccggagacgggcgcgtggtgtgggtcggtaaggatgtgacaggcattgaaccccgtaacgccagtgttattgaagttcctgatattaccgccaaccgccgcattaccgcgccgggttactggttttaccgcaatgatgaatttgtctttgactacagactcaaagcggaagatgagcgtgatgcccttctggctcaggtcagtgcccggacaggggaatgggaagaagacctgctgctggggctaatcagcgacgaagaccgggaaaaactgaaagcgtaccgtatttacgcgaaatcgctgcaggcgatggatttcagcgccatcactgataaatcctcatacaacgccattgaatggcccgtctctccggaaggttcttcctga

SEQ ID NO: 463237 - DNA, 843 bp, Shigella boydii
atgaaggccagtgataaaccccgccagctggcggtcccctttgcgagtaccggagataaaaaccgtatcccggacaaggcgacacagcagaccagagagagcggtaatgctgcgtatgattcaggttttcctccggtgaccatgacagcggtctcagcgggaggtataccgccacacggcaaggattttaacggtctgatgtacgatattaccgcagcaatacggttcgcccaggctggcggtttgtacacgtataatgccggttttgcgggggccattggtggatatgcaaaaggagccattctcgccggagtcgcaacaacagcggtctggctgaataccacagacgataacctgaccgatcctgaaggctccgacagtgcgggctgggtaaatcttcttgaggatccgaaaaggatattcctgcggcagaagaacaatctgtcagaccttcagaataaagggacggtacgggataatcttcaggtttacagtaaagagcagtcagatcaacgctatgttcatcgggaaggcgataaaataaccggagagctgaaaatccgtggtgttaatgcgctgaggattttcaacgaagcttttggcctgatttttcgtcgttcggaagagtgcctgcaccttattcccaccagtgaaggtcagggggaaaatggcgatattggtcccctgcgcccgttcaccattaatctgcggacgggtgaaatatccatgtcgcataaagtgtctgttggcggtggttcgcaggtcaatggtgcgctgggtatcggcgttcagaacgccctggggggaattcaattgctttcggggataacgatacaggtataa

SEQ ID NO: 463238 - DNA, 483 bp, Shigella boydii
ttgttgaccacttcactgttgcccatttcagcagcggataagcggaggttttattattattttcaggaaaaaaacaccccaaacatagaacgcttcttcgtttttgattcttccgagtatcgttatgcgttaaatatgcgtgaagtggtatttcatcagttcctttctgatggtctgcggccaatcgttgacgaagacgatgatgcctacgaagacgattattttaatgtccatatcacgctggtaaacggcggaccagtgattccactgagtgttgagccagatgcgccgcaaaacgaagagacggatgatatcggccagttgaatgcattttttgacgcgctggattgcgagcctgaaaccacggatcgttttatgataaccgacgaagatggagaagatgctttcattcgtattggttctatcgctatggtgcgagttgcgcttgatgtgctggaaccagtggaagacgatgatgagtag

SEQ ID NO: 463239 - DNA, 1266 bp, Shigella boydii
atggcattaacagatatcaaagtcagagcagccaagccaacggataagcaatataagctgactgatggtggcggtatgcatctgcttgtccatccaaatggttctaagtactggcgtttgcagtaccgttatgagggaaagcaaaaaatgctggcacttggggtttatcctgaaatcacactagcggatgccagagtacgtcgtgacgaggcgcgtaacctgcttgcgaatggcgtcgatccgggagacaaaaagaaaaatgataaggttgaacagagtaaagcacgaacctttaaagaagtcgcgattgagtggcatggcaccaataaaaagtggtctgaagatcacgcccatcgtgtgctaaaaagtcttgaagataatctttttgcagcgcttggtgaacgtaatatcgctgagttaaaaactcgagatttattagcacctattaaggccgtagaaatgtctggacgtcttgaagtggccgctcgtcttcagcagcgcactacagccatcatgcgctatgcagtgcaaagtgggttaattgattataacccggcacaagagatggctggggcggttgcttcctgtaatcgacaacatcgtcccgcgcttgaattaaagcgcatccctgagttgcttacaaaaatagatagctatactggtaggccgctaacccgatgggcgatagaactcactttgctgatctttattcggtccagtgagctgcgttttgctcgttggtcagagatcgatttcgaagcgtctatatggactatcccaccggagcgggagcctattcctggagtgaaacattcccatagaggctcaaaaatgcgtacaactcatctagtgcctctttcaacgcaagctcttgcaattttaaagcagataaaacagttttatggggcccatgacttgatatttattggtgatcacgattcgcacaaacccatgagtgagaatacggtaaatagtgcgttacgggtcatggggtatgatacaaaagtagaggtttgtggtcatggctttcgaacaatggcctgtagttcattggtcgaatcaggtttgtggtctcgtgatgctgttgaacgtcagatgagccacatggagcgaaattcagtgagggccgcgtatatccataaagcagagcatctggaagaacggcgattgatgctacagtggtgggccgattttctggatgtaaacagagaaagatttatcagtccatttgaatatgcaaagattaataatccattaaaacagtaa

SEQ ID NO: 463240 - DNA, 372 bp, Shigella boydii
gtgctggatgctctggagcaggcgttatgggcccgtcgaccgtccggcacggtccatcacagtgataaaggttctcagtatgtatcgctggcctacacacagcggcttaaggaagccggattactggcatcaacaggaagtacaggcgactcgtatgacaacgcgatggcggagagcatcaatggtctttacaaagcggaggtaatacaccgtaagagctggaaaaaccgtgcagaagtggaactggccacactcacgtgggtggactggtataataatcgacgattgctggaaaggctgggccatactcctccggcagaagcagaaaaagcttattatgcttctatcggaaacgatgatctggcagcctga

SEQ ID NO: 463241 - DNA, 249 bp, Shigella boydii
atgattgatgtcttagggccggagaaacgcagacggcgtaccacacaggaaaagatcgcaattgttcagcagagctttgaaccggggatgacggtctccctcgttgcccggcaacatggtgtagcagccagccagttatttctctggctgaagtggtcaacaaaaactggccaccgagttagagtttttccagtatcgattttccgattcgtttggggggaacccacagttatattcgtgcggtcttag

SEQ ID NO: 463242 - DNA, 126 bp, Shigella boydii
atgaaacgttatttacgctggattgtggcggcagaatttctgttcgccgcagggaatcttcacgccgttgaggtagaagtcccgggattgctaactgaccatactgtttcatctattggccggtaa

SEQ ID NO: 463243 - DNA, 651 bp, Shigella boydii
atgtttaatgaagtccatagtattcatggtcatacattattgttgatcactaaaccttctttgcaggcgacagctctcttgcagcaccttaaacaatcgctggcaattacaggaaaattacataatattcaacgttctctggacgatatctcttcaggctctattattcttctggatatgatggaagcagataaaaagcttatccattattggcaggatactttgagcaggaaaaacaacaatatcaaaatattgttgctaaatacgcctgaagattacccgtaccgcgacattgaaaactggcctcatatcaacggcgttttttattccatggaggatcaagaacgtgttgtcaatgggttgcaaggcgtcctgcgcggcgaatgctactttacgcaaaagcttgccagctacttgattacgcattcaggtaactatcgttataacagcacggaatcagccctccttactcatcgggaaaaagagatcctgaataagctgcgtatcggcgcgtctaataacgagatcgctcgttcgttgttcatcagcgaaaatacggttaaaacgcatctttataatcttttcaagaagatagccgtaaaaaaccggacacaagcggtttcctgggcaaacgataacctcaggcgataa

SEQ ID NO: 463244 - DNA, 456 bp, Shigella boydii
atgaaacttttaaaagtagcagcaattgcagcaatcgtattctccggtagcgctctggcaggtgttgttcctcagtacggcggcggcggtaaccacggtggtggcggtaataatagcggcccaaattctgagctgaacatttaccagtacggtggcggtaactctgcacttgctctgcaaactgatgcccgtaactctgacttgactattacccagcatggcggcggtaatggtgcagatgttggtcagggctcagatgacagctcaatcgatctgacccaacgtggcttcggtaatagcgctactcttgatcagtggaacggcaaaaattctgaaatgacggttaaacagttcggtggtggcaacggtgctgcagttgaccagactgcatctaactcctccgtcaacgtgactcaggttggctttggtaacaacgcgaccgctcatcagtactaa

SEQ ID NO: 463245 - DNA, 207 bp, Shigella boydii
atggaaagcttctggggaacgctgaaaaatgagagcctgagccactatcgttttaataaccgggatgaagccatctcagtaatacgggaatacattgagattttctacaatcgtcagcgtcgtcactctcgtctggggaatatctccccggcagccttcagggaaaaatatcatcagatgactgctcaaaaaaagaacaaatggtag

SEQ ID NO: 463246 - DNA, 294 bp, Shigella boydii; identical to SEQ ID NO: 25632

SEQ ID NO: 463247 - DNA, 1719 bp, Shigella boydii
atgccttttaacctcgggactttaatcaattatcaggccttactggtgggtaatctgatcggtgtcccgctgtgctacttcatcattcgggtagtgcgaaatccattttatttacgtagctattattcgcaattaaaacagcaggttgatgccaaagtcaccaaaaaagagttcgcgctctggctactggcattaggtgctttattgttgctgttatgcatgccgttaaatgaaaaaagcacaatttttagcaccaattataccttgtcattattgctgcccctgatgatgtggggagcgatgcgctatggttataagctgatttctctgctctgggcggtcgtgttgatgatcagcatccacagctatcaaaattacattcccatttatcctggctataccacgcagctgaccataacctcctccagttatctggtattctcttttattgtcaattatatggctgtactggcaacccgtcagagagcggtagtcagacgcattcagcggcttgcgtatgtggacccggtggttcatctgccaaatgttcgcgccctgaatcgcgcgttgcgtgatgccccctggtctgcgctttgttatttacgcatccctggcatggaaatgctggttaagaactatggcatcatgctgcggattcaatacaagcaaaaactttctcactggctgtcacccttgctggaaccgggtgaagatgtttatcagctttcgggtaacgatctcgcgctgcgactgaatacagaatcgcaccaggagcgcattaccgcactggatagccatctcaagcaatttcgtttcttttgggatggcatgccgatgcaaccgcagattggcgtcagttactgctatgtgcgctcgccagtgaatcatatctacctgctgctgggagagctaaatacggtcgccgaactttccatcgtgaccaacgccccggaaaatatgcagcgtcgcggggcaatgtatttgcaacgcgaattgaaagataaagtcgcgatgatgaatcgactacagcaggcgctggaacacaaccattttttcctgatggcccagccgattaccggtatgcgtggtgatgtttaccatgaaattcttctgcgcatgaaaggtgagaatgatgaactgatcagccccgatagcttcttgccggtcgcgcacgaatttggtttatcgtcgagtatcgacatgtgggtcattgagcatacgctgcaatttatggctgaaaacagagcgaagatgcccgctcaccgttttgctattaatctgtctccaacctcggtatgtcaggctcgttttccttttgaagtcagtcagttgctggctaaatatcagattgaagcgtggcaacttatttttgaagtcaccgaaagtaatgctctgaccaatgttaagcaggcgcaaatcaccttgcagcatcttcaggaattaggctgccagattgcgattgatgatttcggcaccggctacgccagctatgcacggcttaaaaatgtgaatgccgatctgcttaaaattgacggcagttttatccgcaatattgtgtcaaatagtctggattatcagatagtggcatcgatttgccacctggcgcgaatgaagaaaatgcgggtagtggcagagtacgttgaaaacgaagagatccgcgaggcggtgctctctttggggatcgattatatgcagggttatcttattggtaagccgtag

SEQ ID NO: 463248 - DNA, 480 bp, Shigella boydii; identical to SEQ ID NO: 463183

SEQ ID NO: 463249 - DNA, 519 bp, Shigella boydii; identical to SEQ ID NO: 463043

SEQ ID NO: 463250 - DNA, 1497 bp, Shigella boydii; identical to SEQ ID NO: 462668

SEQ ID NO: 463251 - DNA, 381 bp, Shigella boydii
atgctgggagcggtggaacgccgcttcggcaacgatcttccgtcgtctccagtggagtggctgacggataatggttcatgctaccgggctaatgaaacacgccagttcgcccggatgttgggacttgaaccgaagaacacggcggtgcggaatccggagagtaacggaatagcagagagcttcgtgaaaacgataaagcgtgactacatcagtatcatgcccaaaccagacgggttaacggcagcaaagaaccttgcagaggcgttcgagcattataacgaatggcatccgcatagtgcgctgggttatcgctcgccacgggaatatctgcggcagcgggcttgtaatgggttaagtgataacagatgtctggaaatatag

SEQ ID NO: 463252 - DNA, 1278 bp, Shigella boydii
atgaataaaataaagaattaccggtggcatatgattgccctcgtatgctttatcactgtaatcaattatctggacagaacggcgttaggtattgcggctccaacgattatggagacaaccggaataactaaagagcaatattcatggattgtcagtgcattccagttggcctatacattagggcaaccggtaatgggcttctttattgataccgtgggtctgaagttaagttttgcgatatgtgccgcaatttggggcctggcgacaatgggccatgcactaaccggaacgtggtctggtctggcatttatgcgcgccctgatgggtttcagcgaagcgtcggcaattccggcgggtgtaaaaaccgcatcaacatggttcccggcaaaagagcgtggcgtggcgacaggtgttttcaatatgggcacctcactcggcgcgatgcttgctccaccgttgattgcctggtgcattatgtttcatagctggcaatttgcgtttattgtttcaggtagtcttgctttgctcgcggctttattttggttcttttgttataaagatccgaaagatgccaaacgcctttctgatgaagagcgccactatattgaatcagggcaagaacagcatcttaaaacagataagaaagaaaaaacgtcaatcaagcatatcctcagccaacgtaatttctgggggattggcatcgcgcgttttctcgcagacccggcatggggaaccattaacttctgggtgccgattttcttcgtcgaaacgctgcattttagcctgaaagaaattgccatgttcgtctggctgcctttcctgctgggcgatctcggctgtttagccagtggttttgtcgcgaagttcttccacgatcgcggcgtgagtttaattaactcacgaagaattaccttcactattgcagccgtcattatgatgacgattggcctggtgagtattgtcgaaaatccctacattgccgtattactgattagtattggcgcgttctcgcatcaatgtctttctactgtagcagcaactctgggtggcgatctgttcaaaaaagacgaagtagctaccgcagtgggtatggcaggagcctgtgcgtggagcggtcagttgattttcaacctgttcatcggggcattcgttcacattatcggcttcgcgccgttctttattgccctggctttctttgacattattggtgctattgcgttgtggacgcttatcaaagttaaagatgaagaaccacaagtacagttagctacccactaa

SEQ ID NO: 463253 - DNA, 822 bp, Shigella boydii
ttgttcaaagccaatcatgttccggtattaatgtatcatcatgtcagtcattgccccggactggttacactttctcccgtgacattccggaagcaaatgaaatggttggctgaaaataactggaaaacactgtcatcagatgaactggagtttttttatcggggcggaaaactcccccggaaaagcgttatgttgacatttgatgatggataccttgacaactggtttcaggtatatcctttattaaaagagtttaatctcaaagcacatatttttttaattaccggttttattgggaatggtccggttcgtcactctcctggaaaggaatattctcatcgcgattgcgaacatcaaatagcgacagggaatgctgataatgttatgcttcgctggtctgaagtaaacgaaatgttgcaatctggtctggtcgaatttcatgttcatacgcatactcatacacgctgggataaaaagttcagttcacgagaagaacagtgtaaacatcttcggcaggacttgttgagtgggagagaatatttgaaagaaatgacaggaaaatgcagtaaacatttgtgttggccggaaggttattataataaggattatattcaggtcgctgaagaacttggattctattatttatatacaacagaaagaagaatgaatgctcctgctaaaggaactacacggataggaagaataagcaccaaagaacgggaaagttgcgcatggctgaaaagacgacttttttattatacaacaccgtttttttcatcgttgctggcctttcataaggggccaagattaccggatgattaa

SEQ ID NO: 463254 - DNA, 480 bp, Shigella boydii; identical to SEQ ID NO: 463201

SEQ ID NO: 463255 - DNA, 534 bp, Shigella boydii
atgtcacgttataaaacaggtcataaacaaccacgatttcgttattcagttctggcccgctgcgtggcgtgggcaaatatctctgttcaggttctttttccactcgctgtcacctttaccccagtaatggcggcacgtgcgcagcatgcggttcagccacggttgagcatgggaaatactacggtaactgctgataataacgtggagaaaaatgtcgcgtcgtttgccgcaaatgccgggacatttttaagcagtcagccagatagcgatgcgacacgtaattttattaccggaatggccaccgctaaagctaaccaggaaatacaggagtggctcgggaaatatggtacagcgcgcgtcaaactgaatgtcgataaagatttctcgctgaaggattcttcgctggaaatgctttatccgatttatgatacgccgacaaatatgttgttcactcagggggcaatacatcgtacagacgatcgtactcaatcaaatattggttttggctggcgtcatttttcaggaaatgactga

SEQ ID NO: 463256 - DNA, 210 bp, Shigella boydii; identical to SEQ ID NO: 9340

SEQ ID NO: 463257 - DNA, 213 bp, Shigella boydii; identical to SEQ ID NO: 462647

SEQ ID NO: 463258 - DNA, 156 bp, Shigella boydii
gtgatactacgtcatcgtactggcccggcattccaggccataaaagacagtctggcagtgggactaaatgcactgacgctgacggatattaccaaaaatgcaacgtatggcgttgagatagaaagtctggtgctggagataaatgcaccggcatga

SEQ ID NO: 463259 - DNA, 1185 bp, Shigella boydii
atggtggggtttggtaataaatacattgccgctcaattcggcatttcgccgggtcttgctgcaaccgtcaatgcatcagtattaatcgccgcgttaattggcggtttattagcgaaccgagtaataaaccgctttgggcaaaagcgggcatttattattggcatggggctgtgcaccatcggtgctgcagcggtagctattgctcccagtatctggtgggtgctggtgtgccgcgtcatcatgggctttggtttaggcatcgacttccctttggcaaccaatgccgtggcagagcttcgtggttcaacgtcgaagaaaaccggaacgtcggtcaacctctggcaaatggcctggtatgtttcgacaaccgttgtttatttggtacttttgccgctgcttctgtcgggtatcgctgaagaacaattgtggcgttacggaatattcatcggagctatttttgcagtcatcttcatgattttgcgttacttctttattggtgaatccgcaatgtgggccgcacgcgtcgggcgttaccaggaagcgtgcgacattctgggaaaacgttatggtgttcaggctcgcgttgcggcatcgggtacaacagaagcgaaattctcggaaaaagcagagaataaatacagtggtggatatggcatcttatttaatgatcgttaccgcaaacgcaccattcttggctgtgtcgtggcaaccatgcaggcgtggcaatataacgccgtaggtgtttatcttcctcttacgttggcgggaataataagtggcgggcttactggcgcgttgaccggttctgccgtcgtgaatgccctttgtggggtgacaggcgggatgatcggctcgtttattctccaacgactgggtactcgccgacagtcgatgtatggatttgctgttgtgaccttagcattgctgtcgttaggcgcactggcaacgactaatccctggctgtctttagggttattgggatcaattattttcttccattcagcgggtcctggtgggctgggcatgaccattgccacactctcttatcttcccgctattcgccctactggggtcggatttgcccgcgctattatgcgcacaggggcaattgcaggactcattttctggccgatgctgtggggtgcgttgaaaactgaagcgttttactggttggcaatcgggtaa

SEQ ID NO: 463260 - DNA, 291 bp, Shigella boydii; identical to SEQ ID NO: 462600

SEQ ID NO: 463261 - DNA, 546 bp, Shigella boydii
atgttgcatttaaaaaatattactgcgggcaatccgaaaaccgtggaacaatatcagctgacaaaacaatatgatgtcacctggcttttttcgaaagacggaaaaaactggtatgaagagctgaagaatttcgccagcgacacaattaaaataacttacaccggagacggtcgcgtggtgtgggtcggtaaggatgtgactggcattgaaccccgtaacgccagtgttattgaagttcctgatattaccgccaaccgccgcattaccgcgccgggttactggttttaccgcaatgatgaatttgtctttgactacagactcaaagcggaagatgagcgtgatgcccttctggctcaggtcagtgcccggacaggggaatgggaagaagacctgctgctggggctaatcagcgacgaagaccgggaaaaactgaaagcgtaccgcatttacgcgaaatcgctgcaggcgatggatttcagtgtcatcactgataaaacctcatacaacgccattgaatggcccgcctctccggaaatttcttcctga

SEQ ID NO: 463262 - DNA, 519 bp, Shigella boydii; identical to SEQ ID NO: 463043

SEQ ID NO: 463263 - DNA, 249 bp, Shigella boydii
atgatgaataataaagtcagcttcactaacagcaataatccaaccatctctttgtctgcagtgatctatttccctccaaaatttgatgaaacccgtcagtatcaggcaattgtggtatctcacccaggtggggcgttaaagaacaaacggccggaacctatgccaaaaaactggcggaaaagggatttgtcactattgcttatgacgcatcttatcaaggtgaaagtggcggcgagccgcgtcagttag

SEQ ID NO: 463264 - DNA, 297 bp, Shigella boydii
atggcggttatggggcttgccggtgttctccggggtaaaaaggtccacactaccgtcagccggaaagccgttgccgcaggcgaccgcgtaaaccgtcatcaaggcaatgtgccgcgtactccgggtggcccgcagcggctggtatacgtggtgtcagcggcggacaaggataaacacacgtcagcagttccgtcagcactgcgacagcgttgtccgcaaggcttttacccagtccagcgttacggtgccccacgcctgacggatgaactgtgtgctctggttaccactttaacgtaa

SEQ ID NO: 463265 - DNA, 837 bp, Shigella boydii
gtgggctacatcgcctggctggcgaccgcttaccggatgagcttttcccgcgaaatcaatctgggcctggcgcaacatgagttcgaattgttctgtcagcctttgcttaatgcgcgcagccagcaatgtattggtgtagagattttgctgcgctggaacaatccgcgtcagggccggatttcaccggatgtgtttattcctatcgcggaagaacatcatttaattgtgccactgacccgctatgtgatggcagaaaccattcgtcagcgccatgttttcccgatgagtagtcagtttcatgttggcattaacgtcgcacccagccattttcgccgtggtgtgctgataaaagatctcaatcagtactggtttagcgctcacccgattcagcaactgatcctcgaaatcaccgaacgcgatgccttactggatgttgattatcggattgcccgcgagctacatcgtaaaaacgtcaaactggcgattgatgacttcggcaccggcaacagttcattttcctggcttgaaacattacgtcctgacgtgctgaaaattgataagtcatttaccgcagctataggttctgacgcggttaactcgacggtgaccgatatcatcatcgcgctggggcaaagactgaatattgaactggtggcggagggcgtggaaacgcaagaacaggcgaagtatttgcgccgtcatggcgtgcatattttgcaagggtatttgtacgcacagccgatgccgctacgcgattttcccaaatggctggcgggcagccaaccgccgcccgcccggcataatggacatatcacgcccattatgccgttacgttaa

SEQ ID NO: 463266 - DNA, 480 bp, Shigella boydii; identical to SEQ ID NO: 463183

SEQ ID NO: 463267 - DNA, 267 bp, Shigella boydii
gtgtgccacttcaaaccgaagaacacggcggtgcggagtccggagagtaacggaatagcagagagcttcgtgaaaacgataaagcgtgactacatcagtatcatgcccaaaccagacgggttaacggcagcaaagaaccttgcagaggcgttcgagcattataacgaatggcatccgcatagtgcgctgggttatcactcgccacgggaatatctgcggcagcgggcttgtaatgggttaagtgataacagatgtctggaaatatag

SEQ ID NO: 463268 - DNA, 1143 bp, Shigella boydii; identical to SEQ ID NO: 462660

SEQ ID NO: 463269 - DNA, 189 bp, Shigella boydii
atgtataaaattacagccactattgaaaaggaaggtggttctcctgccagctggacaagatactcaaagacaaaactaacgaaatcagaatgcgaaaaaatgctctcaggggaaaaagaagctggcgtttccagagagcagaaagtaaaattgataaattttaattgcgagaaacttcagtcctcgtga

SEQ ID NO: 463270 - DNA, 210 bp, Shigella boydii; identical to SEQ ID NO: 9340

SEQ ID NO: 463271 - DNA, 480 bp, Shigella boydii
gtggcggacctgacgtatgttgccacacaggagggatggttgtacctcgctggcatcaaagatgtttatacgtgcgaaattgtcggctacgccatgggagagcgcatgacaaaagagctgacaggtaaagccctgtttatggcgctcaggagccagcgcccacctgccgggctaatccaccactctgatcgaggttcacagtactgcgcatacgattaccgggtcatacaggagcagtctggtctgaaaacatcaatgtcgcgtaaaggtcactgttacgacaacgctccgatggaaagcttctggggaacgctgaaaaatgagagcctgagccactatcgttttaataaccgggatgaagccatctcagtaataagggaatacattgagattttctacaatcgtcagcgtcgtcactctcgtctggggaatatctccccggcagccttcagggaaaaatatcatcagatggctgcttaa

SEQ ID NO: 463272 - DNA, 210 bp, Shigella boydii; identical to SEQ ID NO: 9340

SEQ ID NO: 463273 - DNA, 1068 bp, Shigella boydii
gtgtccgttaaactcaggctacctcaggtggttgaagagcgtcagcgcgggttaaccagtttgcgccaaattaaccgcaagacccgggaagtcattggtattgcctttgatgatccagcctatgtgacctggattgcctacaatccagaacctgaaaccgcgcgattgcgttatggttattcttccatgaccacaccagacactttgtttgaactggatatggataccggtgagcgtcgtgtattaaaacaaacggaagttcctggttttgatgcggcgaattaccgcagtgaacacctgtggatagtcgcccgtgatggcgtcgaagttccggtttcgttggtctaccatcgcaaacattttcgcaaaggacacaacccgttgctggtgtatggctatggttcttacggcgcaagtattgatgccgatttcagttttagccgcttgagtttgttagatcgtggctttgtctacgccattgtccatgttcgcggcggtggtgagctggggcaacaatggtacgaagacggaaaatttctgaagaagaaaaatacgtttaatgattatcttgatgcctgcgatgcattgttaaaactgggctatggctctccttcgctttgttatgcgatgggcgggagtgcggggggcatgttgatgggcgttgcaattaatcaacgcccggaattattccacggcgttatcgcccaggtaccgtttgttgatgttgtaacaacgatgcttgatgaatcaattcctcttaccactggtgagtttgaagagtggggtaacccgcaggatccgcaatattacgagtacatgaaaagctacagcccgtatgacaacgtcaccgcacaggcttatccgcatttactggtaacgaccggtttacacgattctcaggtgcaatattgggaaccggcaaaatgggtcgctaaattgcgcgagctgaaaaccgataaccatcttttattgctctgtaccgacatggactcaggccatggcggtaaatctggccgctttaaatcgtacgaaggcgtagtgaaccgccccgggaatcctggagactaa

SEQ ID NO: 463274 - DNA, 594 bp, Shigella boydii
gtgtgtgggggtggtgactatgccattaatgccgcgctgacagaaaaacgaattaaagcagtagtgagtattacgggtgttaatatcgggcgtctttttcgggaaggtttcagcaattacgatccgattggcgcattgaatgcaatggcgtcgcaacgaaccaaagaggctcgtggtggagaattacagatcaacgaattacttcccgccagcctggatgcagcaaaagcccatggactgaccgaacgcgatgtttatgaagcaactgactactataaaacaccacgcgggcaacaaccgggaggtgcgacaaaaatgttgttctcacatgcacagaaaacgctggcctgggatgccttcgcatttactgaagtgttactgactcagccggtgatggtagtcgttggtgaaaaagtcggtgccttcggtgcttatcgtgatggactggaagtctatggccgggcgatggtttcgcaggatcgtcagttagtttcattacccgatttctcacattatgaactgtatgacaaaccggaagcagttcaggaggcgctggaaaaagttattccttttttcaacccccatctgggataa

SEQ ID NO: 463275 - DNA, 192 bp, Shigella boydii; identical to SEQ ID NO: 462754

SEQ ID NO: 463276 - DNA, 1089 bp, Shigella boydii
atgaacaacaataacacattgtacgtcgggttagatgttcacaaagaatcgattactgtcgcttatgctatcaattcagaacctgttgaactgatgggtaaaattggcacatcacctactgatattcagaatctttgtaaacgtctcaggtcaaagtcatcgcaggtcagtatcgtttatgaagcggggccctgtggttatggactttatcgtcggctggtgaaatccggttttgactgcatggtctgcgccccctcacttatcccgaaaaaaccgggggagcgggttaaaaccgatcgccgtgatgccatcagacttgtgcgttcactgcgtgcaggagatctttctgctgtctacgtacccggcattgaagatgaggcattccgggatttggcccgggcatgggcatctgcccgcgatgatttacggcatgcaaggcaacgtctgaaatcgtttcttctggttcatggggtccattatgtcgggcgagcagattggggccctgcacaccgacgctggctcagcaaatactcattcgaaagtccctggcgacaattagcttttgacgaacaccgtcgtacaatagaagaccggcaggcacaatgtgaacggctggaatccgccctgaaggaggccgttaccgaatggaggctgtatccggtagtagaggcgctgcaagccatgcgagggattcagtttattactgcggttggattaatttctgaactgggtgatctgacccgttttgaacatccacgacaactgatgtcatggtttggtatcacgccatcagaatattcatcgggtggaagcagacatcagggcagcattaccaaagccggaaacagctatgccagaaagctattggtcgaggcagcgtggagttaccgtcatccggcacgcatcagtccggcaatacaaaaaagcaggaaaatttaccccgccccgtcattgacagagcatgggatgctcaactcaggctttgtaagaggtatcgaaaacttcaggccaaaggaaagaatgtcaatattacaattgttgctgttgcacgtgagctggcgggttttatctgggatatgggccgaatag

SEQ ID NO: 463277 - DNA, 711 bp, Shigella boydii; identical to SEQ ID NO: 462731

SEQ ID NO: 463278 - DNA, 378 bp, Shigella boydii
atgcagtcactgtatgaccggatacagcaacagatgaaaacactgtcgcgtcactcggatacggcaaaagcgttcgcatacctactgaaacagtggaaggccctgaacgtgtactgcagtaatggctgggtggaaatcgacaacaacatcgcagagaacgccttacggggagtggccgtaggccggaaaaactggctcttcgcgggttccgacagcggtggcgaacatgcggtggtgttgtactcgctgatcggcacatgccgtctgaacaatgtagagccagaaaaatggctgcgttacgttattgagcatctccaggactggccggcaaaccgggtacgcgatctgttgccctggaatgaggtgtactggcaatag

SEQ ID NO: 463279 - DNA, 480 bp, Shigella boydii; identical to SEQ ID NO: 463201

SEQ ID NO: 463280 - DNA, 543 bp, Shigella boydii; identical to SEQ ID NO: 463215

SEQ ID NO: 463281 - DNA, 210 bp, Shigella boydii; identical to SEQ ID NO: 9340

SEQ ID NO: 463282 - DNA, 294 bp, Shigella boydii; identical to SEQ ID NO: 25632

SEQ ID NO: 463283 - DNA, 297 bp, Shigella boydii
atgccacaacgacaccaccagggacataaacgcacaccgaaacagttggcgctcatcatcaaacgctgtttgccgatggtgctcactggcagcggcatgctttgcactaccgctaacgccgaagagtattatttcgaccccattatgctggaaactacaaaaagtggtatgcaaacaactgatctgtcacgtttttcaaaaaaatacgcacaactaccaggaacttatcaggttgatatctggctgaataaaagtaagcgtcaacggagcaccgtattgacgcttatttattggtga

SEQ ID NO: 463284 - DNA, 543 bp, Shigella boydii; identical to SEQ ID NO: 462677

SEQ ID NO: 463285 - DNA, 324 bp, Shigella boydii
atgtgtaatggagaatcaattaacgagaataaagaatatggtggactaatatgtaagaagcaaggtgaatatttccccatgaatccgataagttcaaatgataatgatagtgtagacttgcgaaatataaaatgccctgaaggttcagagagagtaggcgattatcacactcacggtttttactctgacgataaaggaaataaagtaacaaaagaaaatgatgtttatgatagtctaaatttttcaagcaaagatttaacgaattcttatatgaatggaatgggaaaaaaagaatacaagcagttacttgggaacaccaaataa

SEQ ID NO: 463286 - DNA, 996 bp, Shigella boydii
gtgttaacgggaaaatactgcgaacacctgccactgtatcgtcagagtgaaatttttgcccgtcagggtgtcgaactgagccgtgcattactctccaacttggttgacgcgtgctgccagttaatgacgccgctgaatgatgctctgtaccgttatgtaatgaacagccgcaaagttcacactgatgacacaccagtaaaagtgctggcaccgggcaggaagaaggcgaaaacaggatatatctggacgtatgtccgggatgacaggaatgccggttcgccagagcctccggcggtctggttcgcctactcaccggaccatcagggtaaacatccggagcagcaccttagtcccttccggggtatcctgcaggcagatgcgtttaatggttacgatcggctgttcagtgccgaacgagaaggcggcgcgttgacggaagcaggatgctgggctcatgcgcggcgcaaagtccacgatgtatatatcagtaccaaaagcgcgacagcggaagaagccctgaaactaatcggtgagctgtacgccatcgagcacgaaatacgcgggttgccggtgtctgaacgcctggcggtcaggcaaatgcagagtaaaccgctactgacttccctgtataagctgatgcaggagaaagaacacacgttatcgaaaaaatgccgtctgagagatgcgttccggtatatcaggaagcactgggttgcgttgtgcaacttcagtgatgatggtctggctgaggcggataataatgccgcggaaagagcgcttcgtgcagtctgtctcggaaagaaaaactttatgttcttcggcagcgatcacggtggagagcgtggtgcgctactgtacgggctgatcggcacctgccgactgaacggtatcgatccggaagcgtatctgcgctatatcctgagcgtactgccggaatggccttccaaccgtgttgacgaactcctgccatggaacgtagcactcaccaataaataa

SEQ ID NO: 463287 - DNA, 519 bp, Shigella boydii
gtggcagaacgacctgaccagctgtgggtggctgattttacttacgtcagcacatggcagggcttcgtctatgtggcgttcattattgatgtgtttgccggatacatcgtggggtggcgggtctcatcgtccatggaaacgacattcgtgctggatgctctggagcaggcgttatgggcccgtcgaccgtccggcacggtccatcacagtgataaaggttctcagtatgtatcgctggcctacacacagcggcttaaggaagccggattactggcatcaacaggaagtacaggcgactcgtatgacaacgcgatggcggagagcatcaatggtctttacaaagcggaggtaatacaccgtaagagctggaaaaaccgtgcagaagtggaactggccacactcacgtgggtggactggtataataatcgacgattgctggaaaggctgggccacatccctccggcagaagcagaaaaagcttattatgcttctatcggaaacgatgatctggcagcctga

SEQ ID NO: 463288 - DNA, 942 bp, Shigella boydii
gtggttgataaacagttgcgtagacaggattttctgacgttcttcggcaaccgtgagccatgcctgattggtatggaggcctgtggaggttctcagcactgggcacgggaactgacaaaacttggtcataaagtccggttgttgcaggcccgcttcgttaaggcattcgtcatgggcaataagaatgatgtgatggatgcccgggctatctggatggcggttcagcagccgggtaaagaaatcgccgtaaaaacagaagaacagcagtcggtactggttctgcaccgtacccgcatgcaactggtgaagttccggaccgcacaaattaatgccctgcacgggacgttactggagtttggtgaaaccatccacaaaggccgggcagcgatggagcgggagttccccgaagcactggaacggatgaaagagagactgccaccgtatctcattatggttctggaaaaccagtacaaccgactgaatgagctggactcactgatagaggatattgaaaaacagcttaccagcgtggcgaggcagaatgaaacctgtaagcggttgctggatattcctggcgttggaccacttattgcgacggcagcggtggccaccatgggggaagcatcagcgtttaaatcggggcgagagttcgccgcatatgttggtctggttccaaaacaaactggctccggagggaaagtacgtctgctggggataagcaaacgtggtgacacttatctcaggacattatttatccacggtgcaagagcggtggcattagtagctaaagagcctggcccgtggataaccgaactgaaaaaacgtcgtccagccagtgtggcaatcgtcgccatggcaaacaagctggcacgaacagtatgggcgataaccgcccatgaccgtaagtatgacaggaaccacgtcagtatcagaccatattaa

SEQ ID NO: 463289 - DNA, 210 bp, Shigella boydii
atgacggatggctggccgctgtatgaatcacgcctgaagggaaagctgcacgttatcagcaagcgttacactcagcgcattgagcgacataatctgaatctgagacaacatctggcaaggctgggacggaagtcactgtcgttctcaaaatcggtggggctgcatgacaaggtcatcgggcattatctgaacataaaacactatcagtaa

SEQ ID NO: 463290 - DNA, 540 bp, Shigella boydii
atgggacgctggcttgctggcaggctcatgaaagagctggggctggtcagctgtcagcagccgactcaccggtataaacgtggtggtcatgaacatgttgctatccctaactaccttgaaaggcagttcgccgtgaccgagccaaatcaggtgtggtgcggtgatgtgacctgtatctggacgggtaagcgctgggcgtacctcgccgttgttctcgacctgttcgcaataaaaccagtgggctgggccatgtcgttctcgccggacagcaggctcaccatgaaagcgctggaaatggcatgggaaacccgtggtaagcccggcggggtgatgttccacagcgatcagggcagtcattatacgagcaggcagttccggcagttattgtggcgataccagatcagacagagtatgagccggcgcggaaactgctgggataacagcccaatggaacgcttcttcaggagtctgaagaacgaatggatgccggtggtgggttacgtaagcttcagcgaggcggtaatgactccaacttactga

SEQ ID NO: 463291 - DNA, 210 bp, Shigella boydii; identical to SEQ ID NO: 9340

SEQ ID NO: 463292 - DNA, 858 bp, Shigella boydii
gtgataattgtactatattatcctgatgttagtaaaatcaataaaatgattgactcactgggaaaaaaacagtgcgaaatattacttgttgacaatacacctgagctccacttagaaagtgatgttttgtgtaataacaacattcattactatcatttaggagataacaaaggcattgcgtttgcgcagaactatggtttcattaaagctatcggattaggaaagtccttattctttacatttgatcaagattcatgtatatcaaaagattatatatcatcaatgttaaaagagtatgagtacgcttgctctctccggagtaatattgctgcattaggtccaacaataataaatgaacgtaatgggaaaaagtatgatcgtgaaataaagctgggctcccagataagtgaaacgatacatgatgttgaaagtataatatcttctggtgcactcatacccctagaggcaattatcaatattggattaaataaagtatcttggtttatcgatttaattgacatagaatggagtttcagagctaggaaagaaggctggaatatcctagtgacagataaagtccttatttctcacaatataggatctaaagatataaatattatggggattaaaacatttacagtttgcagtccatttcgtttgtattatgtttatagaaattggttattagctctgagagagcctgtatttcctttaagatataagttaaaaaaattgataacaatgcctgtccgaatcattatttacgctttttgtgaacgtggaggacaacgattaaattatatttttaaggggataaaagatggactgcttggacgaaaaggatcatttaagggataa

SEQ ID NO: 463293 - DNA, 207 bp, Shigella boydii; identical to SEQ ID NO: 463245

SEQ ID NO: 463294 - DNA, 342 bp, Shigella boydii
atggcgctcaggagccagcgcccacctgccgggctaatccaccactctgatcgaggttcacagtactgcgcatacgattaccgggtcatacaggagcagtctggtctgaaaacatcaatgtcgcgtaaaggtcactgttacgacaacgctccgatggaaagcttctggggaacgctgaaaaatgagagcctgagccactatcgttttaataaccgggatgaagccatctcagtaatacgggaatacattgagattttctacaatcgtcagcgtcgtcactctcgtctggggaatatctccccggcagccttcagggaaaaatatcatcagatggctgattaa

SEQ ID NO: 463295 - DNA, 411 bp, Shigella boydii
ttggaagagttggcgaatttgttttatgatgaatttctcatttttaaagaaaagaatgaagttatggcacttttagaacgatataaacatgagaagatcattttaatgtctgcttccgttgatcctgtcataaatgtaattgctaaaaatttgaatgttgaggcagtatcatctaaattagaatttatcgacaataaatcaacagggttattagaatataatcttactggtataaagcatttacaagttaataaccctgtaagtttgattgtcactgataatttcagtgatattaatcttattaaacttgcagatacagcagtgattatttcaaaagccaaagataaaaataaatggagagtactattaaatagatttggtgtctccaaagataaagtgaggtttatgtga

SEQ ID NO: 463296 - DNA, 375 bp, Shigella boydii; identical to SEQ ID NO: 461626

SEQ ID NO: 463297 - DNA, 165 bp, Shigella boydii; identical to SEQ ID NO: 461984

SEQ ID NO: 463298 - DNA, 366 bp, Shigella boydii; identical to SEQ ID NO: 462747

SEQ ID NO: 463299 - DNA, 207 bp, Shigella boydii; identical to SEQ ID NO: 463245

SEQ ID NO: 463300 - DNA, 168 bp, Shigella boydii
atgccgcagcttaaaggtgtgattaaaacgcccacgggagaaccgctggacggcgcaaccattacactaacctccatacacaaccgtgcagggattctgaaaagtgttttcagccatgtcaccacacagaacggggaatatgacttccccgttctgccgggtgtgtga

SEQ ID NO: 463301 - DNA, 372 bp, Shigella boydii
gtggtgtgggtcggtaaggatgtgacaggcattgaaccccgtaacgccagtgttattgaagttcctgatattaccgccaaccgccgcattaccgcgccgggttactggttttaccgcaatgatgaatttgtctttgactacagactcaaagcggaagatgagcgtgatgcccttctggctcaggtcagtgcccggacaggggaatgggaagaagacctgctgctggggttaatcagcgacgaagataaagaaaagctgaaagcctgtcgtatttacgcgaaatcgctgcaggcgatggatttcagcaccatcacagataaagccacatataacgccatcaactggccggagcgtcccgatgccgcagcttaa

SEQ ID NO: 463302 - DNA, 468 bp, Shigella boydii
ttgttctataagttgctcagcaagctcattttcgctgttcttcatcgtgccgaaggctgcagccgtcagcagatggctggtcagttccatctggcagaccattttgacctgcgggtagagcgccgggttcccggcatgtgtctggcgggggaaggctgcatcgttctctggtgtatccggtgtgcgccagaacacaccatcgatagccagcagggtcaggccgcaccagtgcggatgcggcgtggcgttatgccagagctgcgctgttttcgtgaacacgcggcggacagcctcacttcccaggcgctggcgggcctgaataacggcactgggggcaacgaaggggcgattgcccggcagcatgatgtccaggcgattcacaatctggtgaagaggttctttacgctcaagcgccatgccaacaatacaccagaccatcatttcgaggggaagacggcgcttgcgtag

SEQ ID NO: 463303 - DNA, 519 bp, Shigella boydii; identical to SEQ ID NO: 463043

SEQ ID NO: 463304 - DNA, 342 bp, Shigella boydii
atggcgctcaggagccagcgcccacctgccgggctaatccaccactctgatcgaggttcacagtactgcgcatacgattaccgggtcatacaggagcagtctggtctgaaaacatcaatgtcgcgtaaaggtcactgttacgacaacgctccgatggaaagcttctggggaacgctgaaaaatgagagcctgagccactatcattttaataaccgggatgaagccatctcagtaatacgggaatacattgagattttctacaatcgtcagcgtcgtcactctcgtctggggaatatctccccggcagccttcagggaaaaatatcatcagatggctgcttaa

SEQ ID NO: 463305 - DNA, 543 bp, Shigella boydii; identical to SEQ ID NO: 463215

SEQ ID NO: 463306 - DNA, 600 bp, Shigella boydii; identical to SEQ ID NO: 462692

SEQ ID NO: 463307 - DNA, 276 bp, Shigella boydii
atgaaactgaatgcaacttatataaaaatacgtgataaatggtgggggcttccgctgttcctgccttttttaatcttgcccattttcgcccacattaatactttcgcgcatatttcttccggtgaggtttttctcttttatctgcctctggcactgatgatcagcatgatgatgtttttcagctgggcggcattgccagggatcgccttagggatttttgtccgcaaatatgcagagctgggtttttacgaaacgctatcattaacggctaattga

SEQ ID NO: 463308 - DNA, 519 bp, Shigella boydii; identical to SEQ ID NO: 463043

SEQ ID NO: 463309 - DNA, 519 bp, Shigella boydii; identical to SEQ ID NO: 463043

SEQ ID NO: 463310 - DNA, 519 bp, Shigella boydii; identical to SEQ ID NO: 463043

SEQ ID NO: 463311 - DNA, 147 bp, Shigella boydii
atgacggatggctggccgctgtatgaatcacgcctgaagggaaagctgcacgttatcagcaagcgttacactcagcgcattgagcgacataatctgaatctgagacaacatctggcaaggctgggacggaaggtaagcgtaaactga

SEQ ID NO: 463312 - DNA, 519 bp, Shigella boydii; identical to SEQ ID NO: 463043

SEQ ID NO: 463313 - DNA, 381 bp, Shigella boydii
atgctgggagcggtggaacgccgcttcggcaacgatcttccgtcgtctccagtggagtggctgacggataatggttcatgctaccgggctaatgaaacacgccagttcgcccggatgttgggacttgaaccgaggaacacggcggtgcggagtccggagagtaacggaatagcagagagcttcgtgaaaacgataaagcgtgactacatcagtatcatgcccaaaccagacgggttaacggcagcaaagaaccttgcagaggcgttcgaacattataacgaatggcatccgcatagtgcgctgggttatcgctcgccacgggaatatctgcggcagcgggcttgtaatgggttaagtgataacagatgtctggaaatatag

SEQ ID NO: 463314 - DNA, 141 bp, Shigella boydii
atgcaggcgacgatagccataacactggtaattacggttaaagatatctgtcagcatcttacgtatcgtggcgtatttatcaccggctttcagtgcagcccggtgataaaaataactgctacgggcaaggcccagaactga

SEQ ID NO: 463315 - DNA, 543 bp, Shigella boydii; identical to SEQ ID NO: 463215

SEQ ID NO: 463316 - DNA, 156 bp, Shigella boydii
atgcttgatgttaaaaatacaggagtttttagctctgcattcattgataagttgaatgcaatgacaaattcagatgatggagatgagactgctgatgcagagcttgattctggcttggctaatagcatccagattttctatcattgccaaagatga

SEQ ID NO: 463317 - DNA, 303 bp, Shigella boydii
atgagcagaaaaacccaacgttactctacggagtttaaagccgaagccgtcaaaacggttcctgaaaatcagctttcgatcagtgaaggcgcttcccgattatctgttcctgaaggcactttaggacaatgggttaccgctgcaagaaaagggctcaatacaccaggctcccgcacagtggctgagctggaatctgaagttatgcaactgcgtcaggctttaaatgaagcacgacttgagcgagatatattaaaaaaagcaacagcgtattttgcccaggagtcgctgaaaaatacgcgttag

SEQ ID NO: 463318 - DNA, 303 bp, Shigella boydii
atgagcagaaaaacccaacgttactctacggagtttaaagccgaagccgtcaaaacggttcctgaaaatcagctttcgatcagtgaaggcgcttcccgattatctgttcctgaaggcactttaggacaatgggttaccgctgcaagaaaagggctcaatacaccaggctcccgcacagtggctgagctggaatctgaagttatgcaactgcgtaaggctttaaatgaagcacgacttgagcgagatatattaaaaaaagcaacagcgtattttgcccaggagtcgctgaaaaatacgcgttag

SEQ ID NO: 463319 - DNA, 378 bp, Shigella boydii
atgaccgaatccaggcaggaaaagctgatatggctgcgtgcgcagatgaagctgacgagcctgtgctgggcgctgaaagaactggcaaaggatatctggagcagaccatggagcgaggaaagacgcaacgactggcagagatggctgtctctggcggccaacagtgacgtccccatgatgaagaatgtggctaaaacgatagggaaaaggttgtacggtatcctgaacgccatgcgccatggcgtatcaaacggaaatgcggaagcactgaacagcaagatcaggctgctgagaataaaagccaagggctaccgcaaccgggagcgctttaagctgggagtgatgttccactatgggaaactgaatatggcgttctaa

SEQ ID NO: 463320 - DNA, 303 bp, Shigella boydii; identical to SEQ ID NO: 459543

SEQ ID NO: 463321 - DNA, 123 bp, Shigella boydii
atgattgcccgacaaatgaacaaaacagtggaaattttggtggggccacatccggaacagtatgtctgggttttaaaattgttaaaaacacgcaaatcaaacgaagcggacccgtacccttga

SEQ ID NO: 463322 - DNA, 318 bp, Shigella boydii
gtgggttccccccaaacgaatcggaaaatcgatactggaaaaactctaactcggtggccagtttttgttgaccacttcattcttaacctgggaggtgaacacctcggcatcgatacctcacgggataacagtgaattatttgccaacgacggtacaccgacatggctaaaagaaaagcgtgcaaaagaaatcgcacttgatgaaattatcgagttgctcaacaagcaccatgggggcaccagtaacgacgccaaacgcgcaaaagctgatttgctggaaaaaacattcacctcccgggtaatgctgccaacttactga

SEQ ID NO: 463323 - DNA, 303 bp, Shigella boydii; identical to SEQ ID NO: 463187

SEQ ID NO: 463324 - DNA, 333 bp, Shigella boydii; identical to SEQ ID NO: 462792

SEQ ID NO: 463325 - DNA, 294 bp, Shigella boydii
gtggcgcacgtcttcggtgaacgcactctgaccacactggagcgtcttctgagcctgctgtcggcctttgaggtcgtggtatggatgacggatggctggccgctgtatgaatcacgcctgaagggaaagctgcacgttatcagcaagcgttacactcagcgcattgaacgacataatctgaatctgagacaacatctggcaaggctgggacggaagtcactgtcgttctcaaaatcggtggagctgcatgacaaggtcatcgggcattatctgaacataaaacactatcagtaa

SEQ ID NO: 463326 - DNA, 186 bp, Shigella boydii
atggggattattgcctgggcgttgaatacctggggcaccaacttccatcagatcattatggataccatctcaaccccactggcatcgttgggtagcgtggtgggctgggcctatgtgatctttgttccactgctctgtgaaccgccccgggaatcctggagactaaacttcctgagaaagaggtaa

SEQ ID NO: 463327 - DNA, 123 bp, Shigella boydii
atgattgcccgacaaatgaacaaaacagtggaaattttggtggggtcacatccggaacagtatatctgggttttaaaattgttaaaaacgcgcaaatcaaacgaagcggacccgtacccttga

SEQ ID NO: 463328 - DNA, 198 bp, Shigella boydii
gtgaaaacgataaagcgtgactacatcagtatcatgcccaaaccagacgggttaacggcagcaaagaaccttgcagaggcgttcgagcattataacgaatggcatccgcatagtgcgctgggttatcgctcgccacgggaatatctgcggcagcgggcttgtaatgggttaagtgataacagatgtctggaaatatag

SEQ ID NO: 463329 - DNA, 180 bp, Shigella boydii; identical to SEQ ID NO: 461689

SEQ ID NO: 463330 - DNA, 1161 bp, Shigella boydii
atgtccggcagtgcttttgccgttacgcaccacgccttcagtagcggagcaggaaggacatctgatggaaatggaagccacgcaagcaccttaaaatcaccatcatacactaaatcagtaagttggcagcattaccaaagattactctcaattgcaaacacggtgccgtattttcaattatcattcagggatacaggtattgatacctacgtgttgattgtgggggagtctgtacgtgtcgacaatatgtctttgtatggatatacacgctctacgacaccgcaagttgaagcacaaagaaaacagatcaaactgtttaatcaagcaataagcggcgcaccttacactgcgctgtcggttcccctttctttaactgctgattctgttttgagtcatgacattcataattaccccgacaacattattaatatggctaatcaagcaggatttcagactttctggctaagctcgcaatccgcttttcggcagaatggtacagcagttaccagtatcgccatgcgcgccatggaaacagtttatgtcagaggatttgatgaattgttgttgccgcatttatcgcaagcattacagcaaaatacgcagcaaaagaaactgattgttcttcatttaaatggaagccatgaaccggcttgtagcgcctatccgcaatccagcgccgtgtttcaaccgcaggacgatcaggatgcctgctatgacaactccattcattacacagatagtttgctaggtcaggtttttgaattattaaaagatcgccgcgcctcggtcatgtattttgccgaccacggcctggaacgtgaccctacgaagaagaacgtctattttcatggaggcagggaggctagccagcaggcatatcatgtcccgatgtttatctggtatagccccgttcttggggatggcgtggatcgcacaacggaaaacaacatcttttcgacagcttacaataattaccttattaatgcgtggatgggggtaacaaagccggaacagccgcaaacgcttgaggaagtgattgcacactataaaggagactcacgggttgtggatgcaaaccatgatgttttcgattatgtgatgttcagaaaggagtttacagaggataagcaaggtaaccccccccctgaagggcagggttga

SEQ ID NO: 463331 - DNA, 354 bp, Shigella boydii; identical to SEQ ID NO: 462806

SEQ ID NO: 463332 - DNA, 1533 bp, Shigella boydii; identical to SEQ ID NO: 458502

SEQ ID NO: 463333 - DNA, 822 bp, Shigella boydii
atgaaactggaagatttaccgaaatactactccccaaaatcccctagcctgaccgatgcatcggcctcaacgtcaaaagatgcgctgagtatcactgatgtgatggccgcgcagggcatgacacagaatcgggctgagatggggttttctgcgttcctggggaaaatgggcatcagtatgaatgacagggcgcgggcaacagaattactggcagattatgcactcagtcggtgcgatcgtgtggcggcgttgagaaaacttccggcagaaataaaaccggtagtgatgcgcattatggcttcgtatgcgtttgaagattatgcccgtagcgcggcgagcaaaaaacagtgcccttgttgctatggggaaaaatttattgaaagcgaggtttttacaaacaagatccagtatccggatggtaagccaccagtgtgggcaaagtgcacaaaaggcgtgtatccgtcttactgggaagaatggaaaaaagtcagggaggtggtaaaagttgcctgtccggagtgtggcggaaagggtgaggtttccaccgcctgtaaggattgccgtgggcgtggtgtcgccattcatcgtgaagagtcggtaaaacgtggtatgcctgttatcagagactgccagcgttgtggtggtcgtggctgtgaaagactaccatcaacggaggcatttaatgccatatgcaaagtgacgagtgctatcacgcttgatacgtggaaaaaatcagtgaaacgcttttacgatacgttggtggttcggtttgacattgaagaggcatgggcggagcggcagttaaagagggtaacgcgatag

SEQ ID NO: 463334 - DNA, 213 bp, Shigella boydii; identical to SEQ ID NO: 36005

SEQ ID NO: 463335 - DNA, 243 bp, Shigella boydii; identical to SEQ ID NO: 458899

SEQ ID NO: 463336 - DNA, 384 bp, Shigella boydii; identical to SEQ ID NO: 458900

SEQ ID NO: 463337 - DNA, 276 bp, Shigella boydii; identical to SEQ ID NO: 458859

SEQ ID NO: 463338 - DNA, 765 bp, Shigella boydii
atgtttttctattgtacaattgtttcattactaacaataagctttggcatttattggaagatatatacagcggaaaattcaatattattgatagggttattatttcttatcatgaaggaaatagtgcttgtatctaggttttatttattcccaaccttcttatcattaatgcttatactttattgctttgataaaaagattacgcgaaagcgtatatcaatctacatgtttttattattaatgccaattatatttgcttttttactaaaaagcaatggttcattagatacagtattttataatgccagaaattactttgtagtggggttttcattatttacaaatgcaattgattcagaacttacggatcagctacattatatgggaagcccttttgcttttttgggcgttttcagcacatttttttataataaaaatttgttctttgaaaaaattcaagaatttgtctctctaggtgatgctggttattttaatgctttttacacatcgtttttgctgccatacttatattttggatttattggaactataatatgtagcatatttttcggactgctaatttcttataatttatatcggttaaccataactcaatcgttttttaattttaatactctatttgcatcccttctcatttttttcagccaacaatttaccccagtacaattgacctttttttgggattatttttatttatcaatagttgctcagttcgtcagacgattgtgtttacgtaaaatctga

SEQ ID NO: 463339 - DNA, 201 bp, Shigella boydii
gtgtatgatggtgattttaaggtgcttgcgtggcttccatttccatcagatgtccttcctgctccgctactgaaggcgtggtgcgtaacggcaaaagcactgccggacatcagcgctatctctgctctcattgccgtaaaacatggcaactacagttcacttacaccgcctctcagcccggtacgcaccagaaaatcatag

SEQ ID NO: 463340 - DNA, 867 bp, Shigella boydii
atgttgattcaatgctcgctggcccgtggtgatttagataacgcccgtagccagctgaaccgtctggaaaacctgctggggaatggcaaatatcacagcgactggatctctaacgccaacaaagtccgggtgatttactggcaaatgaccggcgataaagccgccgctgccaactggttgcgtcatacggctaaaccggagtttgcgaacaaccacttcctgcaaggtcaatggcgcaacattgcccgcgcacaaatcttgctgggcgagtttgaacctgcggaaattgttctcgaagaactcaatgaaaatgcccgcagtctgcggttgatgagcgatctcaaccgtaacctgttgctgcttaatcaactgtactggcaggccggacgtaaaagtgacgcccagcgcgtgttgctggacgcattaaaactggcgaatcgcaccggatttatcagtcattttgtcatcgaaggcgaagcgatggcgcaacaactgcgccagctgattcaactcaatacgctgccggaactggaacagcatcgcgcgcagcgtattctgcgagaaatcaatcaacatcatcggcataaattcgcccatttcgatgagaatttcgttgaacgtctgctaaatcatccggaagtgccagaactgatccgcaccagcccgttgacccaacgtgaatggcaggtcctggggctgatctactccggttacagcaatgagcaaattgcgggcgagctggaagtggcggcaaccaccatcaagacgcatatccgcaatctgtaccaaaaactcggcgtcgcccaccgtcaggccgcggtacaacacgcgcagaaactgctgaagatgatgggatatggggtgtga

SEQ ID NO: 463341 - DNA, 1071 bp, Shigella boydii; identical to SEQ ID NO: 459168

SEQ ID NO: 463342 - DNA, 288 bp, Shigella boydii; identical to SEQ ID NO: 462736

SEQ ID NO: 463343 - DNA, 213 bp, Shigella boydii
gtgtatgatggtgattttaaggtgcttgcgtggcttccatttccatcagatgtccttcctgctccgctactgaaggcgtggtgcgtaacggcaaaagcactgccggacatcagcgctatctctgctctcattgccgtaaaatatggcaactacagttcacttacaccgcctctcagcccggtacgcaccagaaaatcattgatatggccatga

SEQ ID NO: 463344 - DNA, 303 bp, Shigella boydii; identical to SEQ ID NO: 458125

SEQ ID NO: 463345 - DNA, 213 bp, Shigella boydii
gtgtatgatggtgattttaaggtgcttgcatggcttccatttccatcagatgtccttcctgctccgctactgaaggcgtggtgcgtaacggcaaaagcactgccggacatcagcgctatctctgctctcattgccgtaaaacatggcaactacagttcacttacaccgcctctcagcccggtacgcaccagaaaatcattgatatggccatga

SEQ ID NO: 463346 - DNA, 546 bp, Shigella boydii
atgtccagaatcaataagttcgtacttacagtcagtctgctgatttttatcatgatttcagcagttgcctgcgggatctacactcaaatggtaaaggaacgggtgtatagcctgaaacagtccgttattgatactgcttttgcggtggcaaatattgctgaatatcggcgtagcgtggcaattgatcttatcaacacgctaaatcccacggaggaacagctgttggttggtttgcgcacagcttacgccgactcggtttccccctcttatttgtacgatgtcggtccttatctgatttccagtgacgaatgtattcaggtaaaggagttcgagaaaaattattgtgcagatattatgcaggttgtgaagtatcgacatgtcaaaaatacagggtttatctcttttgacggtaaaaccttcgtctattacctctatccggtaactcacaatcgtagtctgatatttttgcttggtctggagcgtttttctttactgtcaaaatcgctggcgatggacagcgagaaccctgatgttctctctatttaa

SEQ ID NO: 463347 - DNA, 375 bp, Shigella boydii; identical to SEQ ID NO: 461773

SEQ ID NO: 463348 - DNA, 477 bp, Shigella boydii; identical to SEQ ID NO: 460213

SEQ ID NO: 463349 - DNA, 2238 bp, Shigella boydii
atggtacgcgtggactggctgcgtaagcgccatctcagcgatacctcccagcgcggtgataaccgttttgtgcgcgtgagctgggatgaagccctcgacatgttctatgaagaactggaacgcgtgcagaaaactcacaggccgagtgccttgctgaccgccagtggttggcaatcgacggggatgttccataacgcttcggggatgctggcgaaagctattgccttgcatggtaatagcgttggtacgggcggagattactctaccggtgctgcgcaggtgatcctgccgcgcgtagtcggttcgatggaagtgtatgaacagcaaacctcctggccgctggtattgcagaacagcaaaaccattatgctgtggggctccgatttgctgaaaaaccagcaagcgaactggtggtgcccggatcacgatgtttatgaatattacgagcaactaaaagcgaaagtcgccgccggtgaaattgaggtcatcagcatcgatccggttgtcacatccacccatgagtatctggggcgcgagcatgtgaagcacattgcggttaacccgcaaactgacgtgccgctgcaactggcgctggcgtatacgctgtacagtgaaaacctgtacgacaaaaacttcctcgctaactactgtgtaggttttgagcagttcctgccgtatctgctgggtgagaaagacggtcagccgaaagatgccgcatgggctgaaaaactgaccggcattgatgccgaaaccattcgtgggctggcgcggcagatggcggcgaacagaacgcaaattattgctggctggtgcgtgcagcgtatgcagcacggtgaacagtgggcgtggatgattgtggttctggcggcgatgctggggcaaattggcctgccaggtggtggttttggttttggctggcactacaacggcgcaggcacgccggggcgtaaaggcgttattctgagtggtttctccggctctacgtcgattccgcctgttcacgacaacagtgactacaaaggctacagcagcaccattccgattgcccgttttatcgatgcgatcctcgaaccggggaaagtgatcaactggaacggtaaatcggtaaaactgccgccactgaaaatgtgtatttttgccggaactaacccattccatcgccatcagcagatcaaccgcattattgaaggctggcgcaagctggaaacggttatcgccatagataaccagtggacctcaacctgccgctttgccgatattgtactgcctgcgaccacgcagtttgagcgtaacgatctcgaccagtacggcaaccactccaaccgtggcattatcgccatgaaacaggtggtgccgccgcagttcgaggcgcgcaacgactttgatattttccgcgagctgtgccgtcgctttaatcgcgaagaagcctttaccgaagggctggacgaaatgggctggttgaaacgcatctggcaggaaggtgtacaacaaggcaaaggacgcggcgttcatctgccagcgtttgatgacttctggaataacaaagagtacgtcgagtttgaccatccgcagatgtttgttcgccaccaggcattccgcgaagatccggatctcgaaccgctgggcacgccgagtggcctgattgagatctactcgaaaaccatcgccgatatgaactacgacgattgtcaggggcatccgatgtggtttgagaaaatcgaacgctcccacggtgggcccggctcgcagaagtatccgttgcatctgcaatctgtgcatccggatttccgacttcactcgcagttatgtgagtcggaaactctgcgtcagcaatatacggtagcgggtaaagagccagtattcattaacccgcaggatgccagcgcgcgcggtattcgtaacggtgatgtggtacgcgtctttaacgctcgcggtcaggtgttggcaggggcagtagtttctgaccgctatgcacccggcgtggcacgaattcacgaaggggcatggtacgatccagataaaggcggcgagcctggtgcgctgtgcaaatacggtaaccccaacgtgctgaccatcgacatcggtacttcgcagctggcgcaggcgaccagtgcgcacactacgctggtggaaattgagaagtacaatggagcagtggagcaggtgacggcgtttaacggccctgtggagatggtggcgcagtgcgaatatgttcccgcgtcgcaggtgaaatcatga

SEQ ID NO: 463350 - DNA, 213 bp, Shigella boydii; identical to SEQ ID NO: 462242

SEQ ID NO: 463351 - DNA, 732 bp, Shigella boydii
atggctcctcacaaagaaaatatcactgaaagagctcagcagtttaaaagagttttagttttacaggatacaacagaacttaattattctggtcagaaagaaaaacaaggagttggtcacaaaaaacataaagatgaaagaaacttatttcttcatcctcaactcgtcatcagtgagtcaggtgtttgcctcggtgtttatgatgactatcagtggttcagggatgaattaaaaaccagtaaaaatacccgacaagaaatctgcaatgatttacttcataaaaaacatgtcagtgaaaaagaaacctggcgttgggttgaaggatataataaagcaacagaactggctcgccaatgccctgatacccatgtattgtcaatttctgatcgtgaaggcgatttttatgacctgtttgaacgcgcagagcagactcccggaataaaagctgactggcttgtcagaatgaaatttaataacagagcaacgctgaatattaatggtaaacgggatcataggttgttgcacgaaagaatcatggagattacaccgcagcaactggttgaattcactatacctgatgggcgggggcagcaagccagaacactgcctgacatgctttcatcagacgcaggtcctctctcatatcctctgatttactccagtaaggtgatgatcatatctttatttgatagtacggtaatgccagataaatacagacacaatggtaaataa

SEQ ID NO: 463352 - DNA, 1419 bp, Shigella boydii
atgtcgtcaaccctacgagaagccagtaaggacacgttgcaggccaaagataaaacttaccactactacagcctgccgcttgctgctaaatcactgggcgatatcacccgtctacccaagtcactcaaagttttgctcgaaaacctgctgcgctggcaggatggtaactcggttaccgaagaggatatccacgcgctggcaggatggctgaaaaatgcccatgctgaccgtgaaattgcctaccgcccggcaagggtgctgatgcaggactttaccggcgtacctgccgttgttgatctggcggcaatgcgcgaagcggttaaacgcctcggcggcgatactgcaaaggttaacccgctctcaccggtcgacctggtcattgaccactcagtgaccgtcgatcgttttggtgatgatgaggcatttgaagaaaacgtacgcctggaaatggagcgcaaccacgaacgttatgtgttcctgaaatggggaaagcaagcgttcagtcggtttagcgtcgtgccgccaggcacaggcatttgccatcaggttaacctcgaatatctcggcaaagcagtgtggagtgaattgcaggacggtgaatggattgcttatccggatacactcgttggtactgactcgcacaccactatgatcaacggccttggcgtgctggggtggggcgtgggtgggatcgaagcagaagccgcaatgttaggccagccggtttccatgcttatcccggacgtagtgggctttaaacttaccggtaaattacgtgaaggtattaccgccacagacctggttctcactgttacccaaatgctgcgcaaacatggcgtggtggggaaattcgtcgaattttatggtgatggtctggattcactaccgccggcggatcgcgccaccattgccaatatgtcgccagaatatggtgccacctgtggcttcttcccaatcgatgctgtaaccctcgattacatgcgtttaagcgggcgcagcgaagatcaggttgagttggtcgaaaaatatgccaaagcgcagggcatgtggcgtaacccgggcgatgaaccgatttttaccagtacgttagaactggatatgaatgacgttgaagcgagcctagcagggccaaaacgcccacaggatcgcgttgcactgcccgatgtaccaaaagcatttgccgccagtaacgaactggaagtgaatgccacgcataaagatcgccagccggtcgattatgttatgaacggacatcagtatcagttacctgatggcgctgtggtcattgctgcgataacctcgtgcaccaacacctctaacccaagtgtgctgatggccgcaggcttgctggcgaaaaaagccgtaactctgggccgctgcccgatcctatcgaaacggcaatcaaaaaaggcgatttaa

SEQ ID NO: 463353 - DNA, 507 bp, Shigella boydii; identical to SEQ ID NO: 462887

SEQ ID NO: 463354 - DNA, 171 bp, Shigella boydii
gtgtatgatggtgattttaaggtgcttgcgtggcttccatttccatcagatgtccttcctgctccgctactgaaggcgtggtgcgtaacggcaaaagcactgccggacatcagcgctatctctgctctcattgccgtaaaacatggcaactacagttcacttacacggtga

SEQ ID NO: 463355 - DNA, 171 bp, Shigella boydii
atgactcatcatcttgggtgcgagaaaaatcagcttagatctggcagcaattcccgcaatggttgcttaacgaagattatcactactggagatgaacctctggaaatccgtactctgcgtgatcgtaatggcactttcgaaccgcaacagctgaagaaaaaccagccctag

SEQ ID NO: 463356 - DNA, 1503 bp, Shigella boydii; identical to SEQ ID NO: 461838

SEQ ID NO: 463357 - DNA, 159 bp, Shigella boydii; identical to SEQ ID NO: 460731

SEQ ID NO: 463358 - DNA, 957 bp, Shigella boydii
gtgattcaggccaacctgcaactccccgaccgcccggactgccccggctactccttcccgtgggtgggcggcgaagccacgcatgtggttattcccaacgaggtcatggaacaagattgcctgctggcatacgacggcgaaacctattttgaaggctcactggttgaaccgctttcctgcgtgattggcgcgttcaacgccaactatcatcttcaggaaggtagttataaccacacgatggggattcgcccgcaagggcgcatgctgatcctcggcggcaccggaccaatgggactgttggcgattgattatgcgctacatggacccgttaacccgtcgcagctcgtcattaccgataccgacaacgataaattgagttatgcgcgcaagcactatccatcagaaccgcaaacactgattcattatctcaatgccgccgatgcagcatttgatacgctaatggcgctgagtggcggtcacggcttcgatgatattttcgtctttgtgcctaatgaaggactggtgactctcgcctcttccttgctggcgacagatggttgcctgaatttcttcgccggaccgcaggataaacatttcagcgcgccaattaatttctacgatgtgcattatgcatttacccactacgtgggcacgtcaggcggcaataccgacgacatgcgcgcggcggtcaaactgattgaagagaaaaaagtgcaggccgcaaaagtggtaacacatattcttgggctgaatgccgcgggcgaaaccacgcttgaattgcctgccgtcggcggcggcaaaaagctggtgtataccgggaaatacctgccgctgacgtcactcacgcagattcaggatcaagcactggcggcgattctggcgcgtcatcaggggatctggtccggtgaggcggagcaatatctgctcactcatgcagaggcaatttcccatgattaa

SEQ ID NO: 463359 - DNA, 705 bp, Shigella boydii; identical to SEQ ID NO: 460960

SEQ ID NO: 463360 - DNA, 1992 bp, Shigella boydii
gtgcactcattgacgggctttcagaatggcactttaaatatcgatgctggtggcaatgttactgttaatcaaggtagttttgctggcaccatcgaaggtgctggtcagctcaccattgcgcaaaacggcagctacgtgctgtcgggggcgcagtcgatggcgctaaccggcgatatagtcgttgatgatggtgcggtgctttcgctggaaggcgacgcggcagatctcgccgctctccaggacgatccgcagtcgatcgtgttaaacggcggtgtgctcgatctctttgatttctccacctggcagagcggcacatcatacaatgatggccttgaagtcagtggcagcagcggaacggttatcggcagtcaggatgtggtagatcttgcaggtggcgacaatttgcatatcggcggcgacgggaaagatggcgtctacgtggtggtcgatgcgagcgacgggcaggtaagtctggcaaacaataatagttatttgggcacaacacaaatcgcctccggtacgctgatggtgagcgacaactcgcagcttggagatacccactataaccgccaggttatctttaccgataagcaacaagaaagcgtgatggagattactgccaatgtcgatactcgcactacgacgactgagcatgggcgtgatattgaaatgcgcgccgacggtgaagtggcagttgatgcgggggtagacacgcagtggggcgcactgatggctgacagcagcgggcagcatcaggatgagggtagcacatttactaaaacgggggcgggtacgctggagctgaccgccagcggtacaacgcagtcggcagtacgtgtcgaagaaggcaccctgaaaggcgatgttgcggatatctttccttatgcttcgtcactgtgggtcggtgatggggcgacgttcgttactggcgcggatcaggatattcagtctatcgatgctacttccagcggcactatcgatatcagcgatggtacggttttgcgtctgaccgggcaggatacttccgtcgcccttaatgcctcattgtttaacggcgatgggacgctggtgaatgctaccgatggcgtgacgttgacaggtgagcttaataccaaccttgaaactgacagcctgacctatcttgccgacgtgacggttaatggtgatctgaccaatacgtccggtgcggttagcctgcaaaatggcgtcgctggcgatacgctaacggtaaacggtgattataccggcggcggtacgctactgttcgacagcgaattaaacggcgatgactcggtaagcgatcaattggtgatgaacggtaatactgctggcaacacaactgtggtggttaactccattacagggattggtgagccgatatcgacaggcattaaagtggttgatttcgcagctgatcccacgcagtttcaaaacaatgcacagttcagtctggctggcagtggctacgtcaacatgggagcgtatgactacacgctagtggaagataacaacgactggtatctgcgatcgcaagaagtaacgccgccatcgccacctgatccagacccggacccaacacccgatcctgacccaacacccgatccaatccccgcttaccagccggtgctgaatgccaaagttggcggttatctcaataacctgcgggcggcaaatcaggcgtttatgatggagcgacgcgatcacgctggtggcgatggtcagacgctgaatttacgtgttatcggcggacgttatcattacacggtggcagggcaactggctcagcaggaagacacttctacggtgcagcttagcggcggcttgtttagcgggcgctggggcacggatggcgagtggatgcttggggcggttggtggctacagtgataatcagggcgacagccgctcgaatatgaccggaactcgcgccgataaccagaaccacggttatgccgttgggctgacctcaagctggtatcagcacggtaattag

SEQ ID NO: 463361 - DNA, 327 bp, Shigella boydii
atgactaaaaatacacgtttttcccctgaagtccgtcaacgggcagttcgtatggttctggaaagtcagggcgaatatgactcacaatgggcagcgatttgttccattgctccaaagattggctgtacgccggagactctgcgtgtctgggtacgccagcatgagcgggataccgggggcggtgatggagggctcaccaccgctgaacgtcagcgtctgaaagagctggagcgtgaaaatcgtgaactgcgccgcagtaacgatatccttcgccaggcttccgcttattttgcgaaggcgaagttcgaccgcctctggaaaaaatga

SEQ ID NO: 463362 - DNA, 330 bp, Shigella boydii; identical to SEQ ID NO: 461591

SEQ ID NO: 463363 - DNA, 1251 bp, Shigella boydii; identical to SEQ ID NO: 462908

SEQ ID NO: 463364 - DNA, 471 bp, Shigella boydii
atgcaggcaggaagcggtcgtaacgttgttcctgcctcggcgttgctgaaagtggaaacacgcggggccagcgacgtcattaatcaatatgtttttgaccgtgcacaacaagcgattcagggcgcagcaaccatgtatggtgtcggcgttgaaactcgtctgatgggtgcagctaccgccagttctccttcgccgcaatgggtcgcatggttgcaaagtcaggcggctcaggtcgcgggggtcaatcaggccattgaacgtgttgaagcgcctgcgggttccgaagatgccacattaatgatggcccgcgtgcagcaacatcaagggcaagcctcctacgtggtgtttggcacacagctggcggcaggtcatcacaacgaaaaattcgattttgacgagcaggttctcgctattgccgtcgaaacgctggcgcgcaccgcgctcaattttccctggacgcgaggtatctga

SEQ ID NO: 463365 - DNA, 618 bp, Shigella boydii
gtgcgctgggtatcggcgttcagaacgccctggggggggaattcaattgctttcggggataacgatacaggtataaaacaaaacggcgacggcattctggatgtttatgcgaatggacagcatgtatttcgtttccagaatggtgtggcgatagcgttaaaaaatattcaggccggaaatgctaaaaaattcacgttatccagcgccaacaactccacgaaaaatgcagcgttttatttgtggggtaatccatccaggcctgttgttgcagagcttggtgatgattccggctggcatttctacagccagagaaataccgatggtagtatcacattcgctgtaaacggacaggtaattccgttaaattacggaaacttcgatgcccgctataaacatcgaactgagggggtacaggatgtgcggtatggttatgaaatgtattacaaccctggcagcaacaccgtttcatggacgtttcgctcaccttcgggacacgggttgtcagggatagcgatatcggataccggccgtaactcagcggataacgtcaacggtgtgtattaccgaccgctgcaaaaactgattaatggcacctggtataacgtagcgagtatttaa

SEQ ID NO: 463366 - DNA, 654 bp, Shigella boydii; identical to SEQ ID NO: 461169

SEQ ID NO: 463367 - DNA, 312 bp, Shigella boydii
atgcgtaaagtttgtgcagccattttgtccgcagccatctgtctgtccgtatccggtgcgcctgcatgggcgtctgaacatcagtccacactgagcgcggggtatcttcatgcccgtacgaacgctcccggcagcgataatctgaacgggattaacgtgaaataccgttatgagtttacggacgcgctggggctgattacgtccttcagttatgccaatgctgaagatgagaaaaaaacgcactacagcgatacccgctggcatgaagattccgttcgtaaccgctggttcagcgtaatggcggggccgtga

SEQ ID NO: 463368 - DNA, 282 bp, Shigella boydii; identical to SEQ ID NO: 461870

SEQ ID NO: 463369 - DNA, 261 bp, Shigella boydii; identical to SEQ ID NO: 461397

SEQ ID NO: 463370 - DNA, 738 bp, Shigella boydii
gtggcgctgccctttgctgctgacgcctgtctggtcgcctcatcttttgaagcagacgcagatgatgccgatgacgccgccgaactggcggacgatgcggcagccgtttttgaggattctgcgctggtttccgacgctttcgcgttcgtctcggatgtcttcgctgcggaagcagacctcgctgctgcgctggcctgttcagcggcttcgccagccttcgttgtggctgttgaagcagacgatgcagcactttctgccgattttccggcggcggtggcactggctgaggcctgcccggcacttgttgacgcggcactggcagataatgcagccgctgtttttgagtctgccgcagctgaggcgctctgtcccgctgccgtttcagaagacctggcgttcgtctcggacgtttttgccgccttcgcagaatttgctgccgccgttgccgaggaagctgcgctgctggcgctcgaggctgcgttcgtttctgatgattttgccgcctcttttgaagccgacgcatcccgtgctgaagtggctgcttctgacgctttcgtggtcgcggtggatgcagaagtggctgctgattgttgtgacgctgccgcattcgtttctgacgttttcgccgcaccggcactggtagccgccgcgctttttgaggactctgcagcggcagcactttttaatgcttcagtggcctttgttgatgccgttcctgcgctggaagacgctgactga

SEQ ID NO: 463371 - DNA, 558 bp, Shigella boydii; identical to SEQ ID NO: 461340

SEQ ID NO: 463372 - DNA, 267 bp, Shigella boydii
atggtgaggtacttcgggttccttgccaaccgggtgtgtggagagaagctgccgcaggtgtaccgtgctctggggatggataaacaggaaccagtggcgaaagtgtgctatgcacaaatggtgaaacagttcctgagtcgtgacccgttcgaatgcgtgctgtgtggcggccggatggtataccgccgggccatcgcgggactgaatgtggaggggctgaagaaaaacgcgcgggatatcagtctgctgaggtatatgccggcctga

SEQ ID NO: 463373 - DNA, 1455 bp, Shigella boydii; identical to SEQ ID NO: 461930

SEQ ID NO: 463374 - DNA, 363 bp, Shigella boydii; identical to SEQ ID NO: 461509

SEQ ID NO: 463375 - DNA, 372 bp, Shigella boydii; identical to SEQ ID NO: 462946

SEQ ID NO: 463376 - DNA, 276 bp, Shigella boydii; identical to SEQ ID NO: 111883

SEQ ID NO: 463377 - DNA, 171 bp, Shigella boydii
atgacgattcctccatttcgaatttttttatgtaacgtttactacagtgctttcggcgcggggatttttaaggcaaaaaaacccctgaaacatcaggggtatgaagaggaattattgtggagtaaccaatattatttttatcggctagctacgggctggacaaacccgtaa

SEQ ID NO: 463378 - DNA, 276 bp, Shigella boydii; identical to SEQ ID NO: 461658

SEQ ID NO: 463379 - DNA, 1416 bp, Shigella boydii; identical to SEQ ID NO: 461512

SEQ ID NO: 463380 - DNA, 294 bp, Shigella boydii; identical to SEQ ID NO: 462959

SEQ ID NO: 463381 - DNA, 243 bp, Shigella boydii; identical to SEQ ID NO: 462679

SEQ ID NO: 463382 - DNA, 126 bp, Shigella boydii
atgcataaaaatatctttctatactacgaaactacgaaactacgaaactacgaaactacgaaaattatttttgtgaaagtattgacaacgctaactatttttaattatatattcatggtgctctag

SEQ ID NO: 463383 - DNA, 489 bp, Shigella boydii
atgacaaaaaaatatgatattacttggcttttttcggaggacgacaaaaactggtatgaagaactgaagaatttcgccagcgacacaattaaaatagcttacaccggagacgggcgcgtggtgtgggtcggtaaggatgtgacaggcattgaaccccgtaacgccagtgttattgaagttcctgatattaccgccaaccgccgcattaccgcgccgggttactggttttaccgcaatgatgaatttgtctttgactacagactcaaagcggaagatgagcgtgatgcccttctggctcaggtcagagcccggacaggggaatgggaagaagacctgctgctggggttaatcagcgacgaagataaagaaaagctgaaagcctgtcgtatttacgcgaaatcgctgcaggcgatggatttcagcaccatcacagataaagccacatataacgccatcaactggccggagcgtcccgatgccgcagcttaa

SEQ ID NO: 463384 - DNA, 342 bp, Shigella boydii; identical to SEQ ID NO: 460954

SEQ ID NO: 463385 - DNA, 468 bp, Shigella boydii
atgaaccgtgttttgtgcgtggtcatcattgccctgctggtggcctgtggtgcgcttagtctggggctgaatcattaccgtgttcacgccatcatctacaaagagcagcgcgataaaaaagccagtgagctggagctggcgaacgcgacaattactgatatgcagatacgccagcgtgatgtcgctgcacttgatgccagatactcgagggaattagccgatgcgagagctgaaaatgaaactctgcgtgctgatgttgccgctggtcgtaagcgcctgcggatcaacgccacctgctccggtaccgtgcgtgaagccaccggcacctccggcgtggataatgcaaccggcccccgactggcagacaccgctgaacgggattatttcatcctcagagaacggttgatgacaatgcagaagcagctggaaggggcacaggactatatccgcactcagtgcctgaactaa

SEQ ID NO: 463386 - DNA, 1194 bp, Shigella boydii; identical to SEQ ID NO: 461570

SEQ ID NO: 463387 - DNA, 276 bp, Shigella boydii; identical to SEQ ID NO: 458859

SEQ ID NO: 463388 - DNA, 468 bp, Shigella boydii; identical to SEQ ID NO: 461580

SEQ ID NO: 463389 - DNA, 276 bp, Shigella boydii; identical to SEQ ID NO: 458859

SEQ ID NO: 463390 - DNA, 342 bp, Shigella boydii
atggcgctcaggagccagcgcccacctgccgggctaatccaccactctgatcgaggttcacagtactgcgcatacgattaccgggtcatacaggagcagtctggtctgaaaacatcaatgtcgcgtaaaggtcactgttacgacaacgctccgatggaaagcttctggggaacgctgaaaaatgagagcctgagccactatcgttttaataaccaggatgaagccatctcagtaatacgggaatacattgagattttctacaatcgtcagcgtcgtcactctcgtctggggaatatctccccggcagccttcagggaaaaatatcatcagatggctgcttaa

SEQ ID NO: 463391 - DNA, 276 bp, Shigella boydii; identical to SEQ ID NO: 458859

SEQ ID NO: 463392 - DNA, 177 bp, Shigella boydii; identical to SEQ ID NO: 461613

SEQ ID NO: 463393 - DNA, 450 bp, Shigella boydii; identical to SEQ ID NO: 461614

SEQ ID NO: 463394 - DNA, 432 bp, Shigella boydii; identical to SEQ ID NO: 461628

SEQ ID NO: 463395 - DNA, 342 bp, Shigella boydii
atggcgctcaggagccagcgcccacctgccgggctaatccaccactctgatcgaggttcacagtactgcgcatacgattaccgggtcatacaggagcagtctggtctgaaaacatcaatgtcgcgtaaaggtcactgttacgacaacgctctgatggaaagcttctggggaacgctgaaaaatgagagcctgagccactatcgttttaataaccgggatgaagccatctcagtaatacgggaatacattgagattttctacaatcgtcagcgtcgtcactctcgtctggggaatatctccccggcagccttcagggaaaaatatcatcagatggctgcttaa

SEQ ID NO: 463396 - DNA, 357 bp, Shigella boydii
atgcttccccgttttgccgatatttttcagcagggaaaccgatggcttaactggctggagaagcagccggtgcagatgagccgcctggaacattatgccggtcaggatgaaattggcctgcgttacaacagccaccggacaaaacgagaagaaaaccttgtgatgagtggcgacgagtttatggaaaggttctcctggcatgtggcggataaggggttccggatggtgatacgggatcctgagtccggtgaagcggcgattactggaagatgtggtgtacgccataacggagacagtgagaaaaacggcgaggcaaatcacaaggagagggatgtatcagcagtgactgaaggttga

SEQ ID NO: 463397 - DNA, 303 bp, Shigella boydii; identical to SEQ ID NO: 459543

SEQ ID NO: 463398 - DNA, 369 bp, Shigella boydii; identical to SEQ ID NO: 461996

SEQ ID NO: 463399 - DNA, 171 bp, Shigella boydii; identical to SEQ ID NO: 463354

SEQ ID NO: 463400 - DNA, 219 bp, Shigella boydii
atgactaaaaatactcgtttttcccccgaagtccgtcaacgggcagtccgtatggttctggaaagtcagggcgaatatgactcacaatgggcgacaatttgttccattgctccaaagattggctgtacgccggagactctgcgtgtctgggttcgccagcatgagcgggataccgggggcggtgaggagggctcaccaccgctgaacgtcagcgtctga

SEQ ID NO: 463401 - DNA, 450 bp, Shigella boydii
atggctcgctacgaccttcccgatgaggcatggaccatcatcaagcccctgttacctcctgaacccgccacaccacgggccggacgcccatgggctgagcaccgtaaaatcatcaatggcatgttctgggtgttatgttccggtgcaccatggcgcgatttacccgaacgatatggggcatggaaaactgtttataaccgctttaaccgatggtcaaagtcaggcgtgattaatattattttcaacaggttgctttcgctacttgatgcaaacggctttattgactggtctgccaccgcgctggatggcagtaatatccgggcgctgaaatgtgccgccggtgctcaaaaaaacatcccgatatcgacggagataatgggccgggtcgctctcgcggcggttttggcaccaaaatccatctggcaacagacggaagtggcctcccgttaa

SEQ ID NO: 463402 - DNA, 378 bp, Shigella boydii; identical to SEQ ID NO: 462723

SEQ ID NO: 463403 - DNA, 267 bp, Shigella boydii
atggcgacgctggggcgtcttatgagcttgctgtcaccctttgacgtggtgatatggatgacggatggctggccactgtatgaatcccgcctgaagggaaagctgcacgttatcagcaagtgttacactcagcgaattgagcggcataacctgaatctgaggcagcacctggcacggctgggacggaagtcgctgtcgttctcaaaatcggtggagctgcatgacaaagtcatcgggcattatctgaacataaaacactatcaataa

SEQ ID NO: 463404 - DNA, 426 bp, Shigella boydii
ttggagtcattaccgcgtaatgattacgcaggtgtcgaaaaactcggatataaccgtgcgattaaccgtaaaaaatatcacagtaaagagataacccgagaactgaacgatgaagctacattaaggcatgcggtatatcatgagttgtcgcgtttaattacacctcgtcgcagccataacgagtttcatccggataataattttaccatcgatacgattaattcatccgtaatgcgtattcaaagaagtaacgctgatggtaattgtctgactggattgtttaatgtcagtaaaaatattcagcatgtaaatattactaatctgcatggtcgggatctgattagtgaagttgatatattgggtaatgaaataacgctgcgcccctggcaggttatgtggattaaggtaatgactccaacttattga

SEQ ID NO: 463405 - DNA, 285 bp, Shigella boydii; identical to SEQ ID NO: 461629

SEQ ID NO: 463406 - DNA, 210 bp, Shigella boydii; identical to SEQ ID NO: 9340

SEQ ID NO: 463407 - DNA, 342 bp, Shigella boydii; identical to SEQ ID NO: 462006

SEQ ID NO: 463408 - DNA, 258 bp, Shigella boydii; identical to SEQ ID NO: 460919

SEQ ID NO: 463409 - DNA, 303 bp, Shigella boydii; identical to SEQ ID NO: 461664

SEQ ID NO: 463410 - DNA, 525 bp, Shigella boydii; identical to SEQ ID NO: 462998

SEQ ID NO: 463411 - DNA, 123 bp, Shigella boydii; identical to SEQ ID NO: 461677

SEQ ID NO: 463412 - DNA, 354 bp, Shigella boydii
atgcgtgattttcagaatgcctttgatgctgccctcgccggggtagacagtacgatcgttgaagtgatggggctctgtgcgcagttcacctcgggagcacagcgtggaagcgaagttcagggggtttttgatgatccggagtcgctgggttttgccggtggcggggtccgtattgaaggaagcagcccgtcattatttgtgcggacggatacggtgcgtgccgtgcggcgtggtgacacgctgaccattaatggtgagatattctgggtggatcgtgtttctccggatgacgggggcagctgttatctctggctcaaccgtggtcaaccacccgcagttaaccggcgacgataa

SEQ ID NO: 463413 - DNA, 354 bp, Shigella boydii; identical to SEQ ID NO: 461559

SEQ ID NO: 463414 - DNA, 456 bp, Shigella boydii
ttgtgcggtccggaacttcaccagttgcatgcgggtacggtgcagaaccagtaccgactgctgttcttctgtttttacggcgatttctttacccggctgctgaaccgccatccagatagcccgggcatccatcacatcattcttattgcccatgacgaatgccttaacgaagcgggcctgcaacaaccggactttatgaccaagttttgtcagttcccgtgcccagtgctgagaacctccacaggcctccataccaatcaggcatggctcacggttgccgaagaacgtcagaaaatcctgtctacgcaactgtttatcaaccacttcacctgtgtgctcattgatgaagtgaatctgaatgacatgttttgcgatatcaacgccaaccggtgtatatttcatttgtggagtctccagtctgagggagctttatgcatcccgtattgggcactatga

SEQ ID NO: 463415 - DNA, 150 bp, Shigella boydii; identical to SEQ ID NO: 463008

SEQ ID NO: 463416 - DNA, 519 bp, Shigella boydii; identical to SEQ ID NO: 462957

SEQ ID NO: 463417 - DNA, 375 bp, Shigella boydii; identical to SEQ ID NO: 461676

SEQ ID NO: 463418 - DNA, 303 bp, Shigella boydii; identical to SEQ ID NO: 461664

SEQ ID NO: 463419 - DNA, 387 bp, Shigella boydii
atgtccggcagtgcttttgccattacgcaccacgccttcagtagcggagcaggaaggacatctgatggaaatggaagccacgcaagcaccttaaaatcaccatcatacactaaatcagtaagttggcagcattaccgtgaatttgaacgtagctggacattgaaaccattcattaccaaacctgaaaatccgattataggaaatgatgtctggataggaaatgatgttgtattgaaaggtggcatcgcaataggtgatggtgctgttattgctgccaattccgttgttaccaaagacctgcccccaggtaatgactccaacttattgatagtgttttatgttcagataatgcccgatgactttgtcatgcagctccaccgattttga

SEQ ID NO: 463420 - DNA, 426 bp, Shigella boydii; identical to SEQ ID NO: 461631

SEQ ID NO: 463421 - DNA, 381 bp, Shigella boydii; identical to SEQ ID NO: 458903

SEQ ID NO: 463422 - DNA, 270 bp, Shigella boydii; identical to SEQ ID NO: 462031

SEQ ID NO: 463423 - DNA, 348 bp, Shigella boydii; identical to SEQ ID NO: 461694

SEQ ID NO: 463424 - DNA, 279 bp, Shigella boydii
ttgtgcaacttcagtgatgatggtctggctgaggcggataataatgccgcggaaagagcgcttcgtgcagtctgtctcggaaagaaaaactttatgttcttcggcagcgatcacggtggagagcgtggtgcgctactgtacgggctgatcggcacctgccgactgaacggtatcgatccggaagcgtatctgcgctatatcctgagcgtactgccggaatggccttccaaccgtgttgacgaactcctgccatggaacgtagcactcaccaataaataa

SEQ ID NO: 463425 - DNA, 276 bp, Shigella boydii
atgcaggatgctgaaattaaaagagaaataataagaaaacatgaaacagggcagttttctcaattaaatagtaaattatcctcagaagagaaaagattattttctactattctaatgaatagtggtaatatggaaatccaagagatgaatactggtgtgcctggaaataaagttatgaaaaaattaccgctatcttcgttagagctgtcttatgctgaaagaataggggaccccaaaatatggaatatggtgaaagggtattcgtcatttgtataa

SEQ ID NO: 463426 - DNA, 294 bp, Shigella boydii
gtggcgcacgtcttcggtgaacgcactctggccacactggagcgtcttctgagcctgctgtcggcctttgaggtcgtggtatggatgacggatggctggccgctgtatgaatcacgcctgaagggaaagctgcacgttatcagcaagcgttacactcagcgcattgagcgacataatctgaatctgagacaacatctggcaaggctgggacggaagtcactgtcgttctcaaaatcggtggagctgtatgacaaggtcatcgggcattatctgaacataaaacactatcagtaa

SEQ ID NO: 463427 - DNA, 276 bp, Shigella boydii
gtggcttctgtttctatcagctgtccctcctgttcagctactgacggggtggtgcgtaacggcaaaagcaccgccggacatcagcgctatctctgctctcactgccgtaaaacatggcaactgcagttcacttacaccgcttctcaacccggtacgcaccagaaaatcattgatatggccatgaatggcgtcggatgtcgcgccagtgcacgcattatgggcgttggcctcaacacggttttacgtcacttaaaaaactcaggccgcagtcggtaa

SEQ ID NO: 463428 - DNA, 189 bp, Shigella boydii
atggaacgcttcttcaggagtctgaagaacgaatggatgccggtggtgggttacgtaagcttcagcgaggcagctcacgccataacggactatatcgttggatattacagcgcactaagaccgcacgaatataacggtgggttacccccaaacgaatcggaaaatcgatactggaaaaactctaagtaa

SEQ ID NO: 463429 - DNA, 219 bp, Shigella boydii; identical to SEQ ID NO: 9348

SEQ ID NO: 463430 - DNA, 246 bp, Shigella boydii
atgagcttgctgtcaccctttgacgtggtgatatggatgacggatggctggccactgtatgaatcccgcctgaagggaaagctgcacgttatcagcaagcgttacactcagcgcattgagcgacataatctgaatctgagacaacatctggcaaggctgggacggaagtcactgtcgttctcaaaatcggtggagctgcatgacaaggtcatcgggcattatctgaacataaaacactatcagtaa

SEQ ID NO: 463431 - DNA, 1038 bp, Shigella boydii
atgatcaaagcctttggtctggaagatcgccagtcggcgttatttgccgcggatgccgaagataccggcaaaaaaaacatgcgggtggcgcgtattgatgctcgtttcgacccgaccatctatatcgcgattggtatggcgaacttgctggcgattggcggcggtagttggatggtggtgcagggcagtttaacgctgggccagctcaccagttttatgatgtatttaggtctgatgatttggccaatgctggcgctggcatggatgtttaacattgtggaacgtggtagtgctgcatacagccgtattcgcgcgatgctggcggaagcgccggtggtgaacgatggtagcgaacccgtgccggaagggcgtggcgaactggatgtaaatattcaccagttcacgtatccgcagactgaccatcctgcgctggaaaacgtcaatttcgccctgaaacccggtcagatgctgggtatctgcgggccgactggttccggcaaaagtaccctgttgtcgctcattcagcgtcatttcgacgtcagcgagggggatattcgctttcatgatattcctctgacgaagttacaactcgatagctggcgtagccgcctggcggtagttagccagacaccgttccttttttccgacaccgtagcgaacaacatcgcgttgggttgcccgaatgccacccagcaagagattgagcatgtcgcgcggttagccagcgtacatgacgatattttgcgtctaccgcaaggttacgatacagaagtgggcgagcgcggcgtgatgctttccggtgggcaaaaacagcgtatctccattgctcgagcgttattagtcaacgcggaaatcctcatccttgatgatgcgctttcggcggtggacggacgcacagagcaccagatcctgcataacctgcgtcagtggggacagggaagaacggtaatcatcagtgcccatcgcctttcggcactgacggaagccagtgaaaatgtaatgaacgcatcccacacaattaaacacggagcagtatga

SEQ ID NO: 463432 - DNA, 231 bp, Shigella boydii
atgttgcacctgttcagcggtaaaccaatccccgacaaccggggaaacatcacccttcgtctggatgatcacattcagtctgttcagggtaaagagagctatgaagatgagatgttcagcatcagatactttaagaagggctccgcgcatatcacgttcagaaaaccagaactggttgacagactgaatgatattatcgcaaaacactatcctgatatgctggcagtatag

SEQ ID NO: 463433 - DNA, 1005 bp, Shigella boydii
atgcagaacatcacacttattggtatcgatctcggaaagcactccttccacattcattgtcaagacaagtctggtaaggctcttctgcgtaaaaaatttacccgtactaaactgatgcagtttctggcgacatgtccgccctcagttgttgtaatggaagcctgtgcgggtgcacactttatggctcgctgtatctctgattttgggcatgaaactaagctgatttctccacagttcgttcgcccgtttgtcaaaagtaataagaatgattttgttgatgcagaagccatatgcgaagcggcttcacgaccatcaatgcgttttgtccagccaagaactgagacccagcaggccatgagggcgttacaccgggtcagagaatcgctcatcagagataaggtgaaaacaaccaaccagatccacggtttcttgctggaatttggaatcagcctgccgataggtgatgctgtaataaaacggttgtctctcgtgttggctgaacacgaaatccccgaatatctgagccgccttttggtgaggttgcatacccactacttttaccttgttgagcaaatagcagagctggaatcagaattaagtcagtcaatcaacgctgatgataccgctcagcgcattatgacaattcctggtgttggtccgattactgccagcttactatcgtcgcaacttggtgacgggaaacagttctcatgcagcagggattttgcagcttccacaggacttgttccccggcagtatagcactggaggaaaatcgactctgttgggtatcagtaagcgaggtgataaaaatttacgccggttactggttcagtgtgcccgctcattcataatgcgacttgaacgcaagcatggaaaacttgctgagtgggttcgggagcaactcaacaagaagcattcgaatgtggttacctgcgctctggcaaataaactggctcgaattgcctgggcaatcactactcagaaaaaagaatatcaggcctga

SEQ ID NO: 463434 - DNA, 564 bp, Shigella boydii
atgtcagatatcacaatctcccgtccggaagtggtcaacgggcatacggacgttatctgctcaaccagcattcgccacattctggctgtacgaaagagtacactgttgcaaatcgacacacttatccgacaactggctgaaatctcggtgctgacggaaagcatcggaggtaaaactgccccggactgggccatgaaacaggattttcgctgcggctgctggctgatggagaaacccgaaacagcaatgaaagccattacccggaatcttgatcgcgaaatctggcgtgacctgatgcaacgttccgggatgctgtcattaatggatacgcaggcccgtgatacatggtaccggtcactggagtacgataattttccggaaatcagcgaagcgaacattctgagcacatttgaacaactgcaccagaataaggatgaggtgtttgagcgaggggtgatcaacgtcttcagagggctgaactggaattacaaaaccaattgcccctgtaaatttggcagtaaaattatcgtcaacaatctggtgagatgggaccggtggggataa

SEQ ID NO: 463435 - DNA, 492 bp, Shigella boydii
atgatgaaactggccctgacactggaagccgacagcgttaacgtacaggcactgaacatagggcgcattgtcgttgacgtcgatggtattgagctcgctgaactgattaacatggtctgcgataacggctactcccttcgtgttgttgatgaatctgaccagacctcagcagaatgcacgccaccatttgctacccttaccggcatacgctgcagtaccgcacatatcacggaaacggacaacgcctggttgtactcgctgtcacaccagaccagtgacttcggtgaatcagaatggattcattttacaggtagcggatatctgttacgtaccgatgcgtggtcatacccggttctgcggcttaaacgcctggggctgtcaaaaacgttccgtcgtctggtcgtcacactcatccggcgttatggcgtcagtctcattcatctggatgccagcgctgaatgcctgccgggtttacccactttcgactggtaa

SEQ ID NO: 463436 - DNA, 159 bp, Shigella boydii; identical to SEQ ID NO: 6188

SEQ ID NO: 463437 - DNA, 2847 bp, Shigella boydii
atgaaacgacatctgaacaccagctacaggctggtatggaatcacattacgggcaccctggtggtggcttccgaactggcccgctcacggggaaaacgcgccggtgtggcggttgtgctgtctcttgctgctgtcacatcagtcccggcactggctgctgacacgattgtacaggcgggagaaaccgtgaacggcggaacactgacaaatcatgacaaccagattgttctcggtacggccaacggaatgaccatcagtagcggtctggagtatgggccggataacgaggccaataccggcgggcaatggatacaaaatggcggtatcgccaacaacactactgtcaccggtggtggtcttcagagagtgaatgccggaggaagcgtttcagacacggttatcagtgccggaggcggacagagccttcaggggcaggcagtgaataccactctgaacggcggtgagcagtgggtacatgaaggcgggattgcaacgggtaccgtcattaatgagaagggctggcagaccgtcaaatccggcgcaatggcaaccgacacggttgtgaataccggcgcggaagggggaccagatgcagaaaatggtgataccgggcagtttgttcgcggaaatgccgtacgtaccactatcaatgaaaatggtcgtcagattgtggctgctgaaggaacagcaaataccactgtggtttatgccggcggcgaccagacggtacacgggcatgcgctggataccacactgaatggcggttaccagtatgtgcacaacggcggtacggcgtctggcactgttgtaaacagtgacggctggcagattatcaaggaaggtggtctggcggatttcaccaccgttaaccagaaaggcaaactgcaggtgaacgccggtggtaccgccacacatgtcaccctgaaacagggtggagcactggttaccagtactgcggcaacggttcttggcagcaaccgtctgggcaatttcacggtggaaaacggtaaggctgacggagttgttctggagtccggcggtcgcctggatgtactggaaggccattcagcgcagaaaacacgggtggatgacggcggaaccctggcagtgtctgccggtggtaaggcaacaggtgtcaccatgacatccggtggtgccctgattgcagacagtggtgccactgttgaggggaccaatgccagcggtaagttcagtattgatggcacatccggtcaggccagcggactgctgctggaaaatggcggcagctttacggttaatgccggaggactggccagcaacaccactgtcggacatcgtggaacactgacgctggctgccgggggaagtctgagtggcagaacacagctcagtaaaggtgccagcatggtactgaatggcgatgtggtcagtaccggcgatattgttaacgcaggggagattcgctttgataatcagacgacaccggatgccgcgctgagccgtgctgttgcaaaaggcgactccccggtaacgttccataaactgaccaccagtaacctcaccggtcagggtggcaccatcaatatgcgtgttcgccttgatggcagcaatacctctgaccagctggtgattaatggtggtcaggcaaccggcaaaacctggcttgcgtttacaaatgtcggaaacagtaacctcggggtggcaacctccggacagggtatccgggttgtggatgcacagaatggcgccaccacagaagaaggtgcgtttgccctgagtcgcccgcttcaggccggcgcctttaactacaccctgaaccgtgacagcgatgaagactggtacctgcgcagtgaaaatgcttatcgtgctgaagtccccctgtatacatccatgctgacacaggcaatggactatgaccggattctggcaggctcccgcagccatcagaccggtgtaaacggtgaaaataacagcgtccgtctcagcattcagggcggtcatctcggtcacgataacaacggcggtattgcccgtggagccacgccggaaagcagcggcagctatggcttcgtccgtctggagggtgacctgctgagaacagaggttgccggtatgtctctgacgacaggggtgtatggtgccgcaggccattcttccgttgatgttaaggatgatgacggttcccgcgccggcacggtccgggatgatgccggcagcctgggcggatacctgaatctgacacacacgtcctccggcctgtgggctgacattgtggcacagggaacccgccacagcatgaaagcgtcatcggacaataacgacttccgtgcccggggctggggctggctgggctcactggaaaccggtctgcccttcagtatcactgacaacctgatgctggagccacaactgcactatacctggcagggacttaccctggatgacggccaggataacgccggttatgtgaagttcgggcatggcagtgcacaacatgtgcgtgccggtttccgtctgggcagccacaacgatatgagctttggtgaaggcacctcatcccgtgacactctgcgcgacagtacaaaacaccgtgtgagtgaactgccggtgaactggtgggtacagccttctgttatccgcactttcagctcccggggtgacatgagcatggggacagccgccgccggcagtaacatgacgttctcaccgtcccggaatggcacgtcactggacctgcaggccggactggaagcccgtgtccgggaaaatatcaccctgggcgttcaggccggttatgcccacagcgtcagcggcagcagcgctgaaggttataacggtcaggccacgctgaatgtgactttttga

SEQ ID NO: 463438 - DNA, 918 bp, Shigella boydii; identical to SEQ ID NO: 22868

SEQ ID NO: 463439 - DNA, 129 bp, Shigella boydii
atgaaaagaggcgtgtcccgtaaatataacgaatcatcgcaggatatacattatcaggtgataccagagggcattaaactgtcgccacggataagaatatacaacatttctgataacaaaacatcataa

SEQ ID NO: 463440 - DNA, 603 bp, Shigella boydii; identical to SEQ ID NO: 7227

SEQ ID NO: 463441 - DNA, 267 bp, Shigella boydii
gtggctgagccgtaccggtataccgggtggttgttgcgaaaagatgcttccgcacgcacgcgcgataaagaggggatagttttcgtgaggacagggagagaagcaggcgttctgataattgcagagttgttttcggaggtagttacagtgagtcagcccgttcctggcgaggaggagactgatatcaccgatgggataaggctgtctgattggtattataaatataagaagtcatcagagagtaacgtaaaggatttgccagagtaa

SEQ ID NO: 463442 - DNA, 177 bp, Shigella boydii
gtggcagcccgtaatacgtcaggagacgcgggaaaagtgaattcccacacgcgttataaacttacccttgcggagctggaagcctttaactctgccgttgacaaccggctggcagaactgacaatgaacaaactttacgatcgcgcgccggcttccgtctggaaatacgtcacctga

SEQ ID NO: 463443 - DNA, 201 bp, Shigella boydii; identical to SEQ ID NO: 7224

SEQ ID NO: 463444 - DNA, 303 bp, Shigella boydii
atgctcacctcagaacaacacaggtgccataatgaaaaaagaaatttcagcgcagagtttaaacgcgaatccgctcaactggtcgttgaccagaaatacaccgtggcagatgcagccagcgctatggatgtcggcctttccacaatgacgcgatgggtgaaacaattacgtgatgagcggcagggaaaaacaccaaaagcctcccccattaccccggaacaaattgaaatccgtgagctcaggaaaaagctacaacgtattgaaatggaaaatgaaatattaaaaaggctaccgcgctcttga

SEQ ID NO: 463445 - DNA, 612 bp, Shigella boydii; identical to SEQ ID NO: 15986

SEQ ID NO: 463446 - DNA, 1449 bp, Shigella boydii; identical to SEQ ID NO: 462136

SEQ ID NO: 463447 - DNA, 270 bp, Shigella boydii
atgaacgctaagataattgcctcgctggccttcaccagcatgttcagcctcagcaccctgttaagcccggcacacgccgaagagcaggaaaaggcgctgaatttcggcattatttcaacggaatcacagcaaaacctgaaaccgcaatggacgccattcttacaggatatggagaagaagctgggcgtgaaggtgaacgccttctttgccccagactacgcaggcattatccagggaatgcgcttcaataaagtggatatcgcctggtaa

SEQ ID NO: 463448 - DNA, 1389 bp, Shigella boydii
gtgccgggcggcagtattccgctgaagaaaaacgttgatgacgcgctgaaaaacccgaacgtcaccagcgtagagcatgtggtggtactgaagcgtactggcgggaaaattgactggcaggaagggcgcgacctgtggtggcacgacctggttgagcaagcgagcgatcagcaccaggcggaagagatgaacgccgaagatccgctgtttattctctacacctccggttctaccggtaagccaaaaggtgtgctgcatactaccggcggttatctggtgtacgcggcgctgacctttaaatatgtctttgattatcatccgggtgatatctactggtgcaccgccgatgtgggctgggtgaccggacacagttacttgctgtacggcccgctggcctgcggtgcgaccacgctgatgtttgaaggcgtacccaactggccgacgcctgcccgtatggcgcaggtggtggacaagcatcaggtcaatattctctataccgcacccacggcgatccgcgcgctgatggcggaaggcgataaagcgatcgagggtaccgaccgttcgtcgctgcgcattctcggttccgtgggcgagccaattaacccggaagcgtgggagtggtactggaaaaaaatcggcaacgagaaatgtccggtggtcgatacctggtggcagaccgaaactggcggtttcatgatcacgccactgcctggcgctaccgggctgaaagccggttcggcaacacgtccgttcttcggcgtgcaaccggcgctggtcgataacgaaggtaacccgctggaaggcgctaccgaaggcagcctggtgatcaccgactcctggccgggtcaggcgcgtacgctgtttggcgatcacgaacgttttgaacagacctacttctccaccttcaaaaatatgtatttcagcggcgacggcgcgcgtcgcgatgaagatggctattactggatcaccgggcgtgtggacgacgtgctgaacgtctccggtcaccgtctggggacggcagagattgagtcggcgctggtggcgcatccgaagattgccgaagccgccgtagtaggtattccgcacaatattaaaggtcaggcgatctacgcctacgtcacgcttaatcacggggaggaaccgtcaccagaactgtacgcagaagtccgcaactgggtgcgtaaagagattggcccgctggcgacgccagacgtgctgcactggaccgactccctgcctaaaacccgctccggcaaaattatgcgccgtattctgcgcaaaattgcggcgggcgataccagcaacctgggcgatacctcgacgcttgccgatcctggcgtagtcgagaagctgcttgaagagaagcaggctatcgcgatgccatcgtaa

SEQ ID NO: 463449 - DNA, 303 bp, Shigella boydii
atgtcatctgaaaaactgtattccccactgaaagtgggcgcgatcacggcggcaaaccgtatttttatggcaccgctgacgcgtctgcgcagtattgaaccgggtgacattcctaccccgttgatggcggaatactatcgccaacgtgccagtgccggtttgattattagtgaagccacgcaaatttctgcccaggtaaaaggatatgcaggtgcgcctggcatccatagtccggagcaaattgccgcatggaaaaaaatcaccgctggcgttcatgctgaaaatggtcatatggccgtgtag

SEQ ID NO: 463450 - DNA, 342 bp, Shigella boydii
atggcgctcaggagccagcgcccacctgccgggctaatccaccactctgatcgaggttcacagtactgcgcatacgattaccgggtcatacaggagcagtctggtctgaaaacatcaatgtcacgtaaaggtcactgttacgacaacgctccgatggaaagcttctggggaacgctgaaaaatgagagcctgagccactatcgttttaataaccgggatgaagccatctcagtaatacgggaatacattgagattttctacaatcgtcagcgtcgtcactctcgtctggggaatatctccccggcagccttcagggaaaaatatcatcagatggctgcttaa

SEQ ID NO: 463451 - DNA, 879 bp, Shigella boydii; identical to SEQ ID NO: 463044

SEQ ID NO: 463452 - DNA, 537 bp, Shigella boydii; identical to SEQ ID NO: 462223

SEQ ID NO: 463453 - DNA, 552 bp, Shigella boydii
atggctcgcacaaaactgaaattccggctgcatcgggcagtgattgtcctgttctgtcttgccttgttagtggcgctgatgcagggagcgtcatggtttagtcaaaaccaccagcgacaacgtaatccacagctggaagaactggcccgcaccctggcgcgtcaggtaacgctgaacgttgcaccgctgatgcgtaccgactcaccggatgaaaaacgcattcaggcgatcctcgatcagttaacggatgaaagccgtatcctcgacgcgggtgtgtatgacgaacaaggcgatcttatcgcacgttctggcgaaagcgtcgaagtgcgcgaccggctggcgctcgacacccatacgctcgccaccgaagcccaacaggtggataacaccactaacattttacgcctgatgttgctgctttcactggcaatcggcgtagtgctgacccgcacgctgctacagggtaaacgtacccgctggcagcaatcgcccttcctgttaaccgccagcaaaccggtgccggaagaggaagaaagcgagaaaaaagagtga

SEQ ID NO: 463454 - DNA, 132 bp, Shigella boydii
atggatgccctgcaattattaacctggtcgctgatcctctttctgtttgccagtctggcttcgctgttttactcggtctggacagactggctattaagctttccggcatcacatcgctggtgggcggcgtga

SEQ ID NO: 463455 - DNA, 1230 bp, Shigella boydii
atgaaaacaacagctctgcgtctttatggtaaacgtgatttacgcctggaaacctttgaccttcctgaaatgcaggaggatgaaatcctcgcgacggtggtcactgacagcctgtgcctctcttcctggaaagaggccaatctgggtgaaaaccataaaaaagtacccgacgatgtggcgaccaaccccatcatcatcggccacgagttttgcggcgatattctggccgtgggtaaaaagtggcagcacaaattccagccgggtcagcgttatgtgattcaggccaacctgcaactccccgaccgcccggactgccccggctactccttcccgtgggtgggcggcgaagccacgcatgtagttattcccaacgaggtcatggaacaagattgcctgctggcatacgacggcgaaacctattttgaaggctcactggttgaaccgctttcctgcgtgattggcgcgttcaacgccaactatcatcttcaggaaggtagttataaccacacgatggggattcgcccgcaagggcgcatgctgatcctcggcggcaccggaccaatgggactgttggcgattgattatgcgctacatggacccgttaacccgtcgcagctcgtcattaccgataccgacaacgataaattgagttatgcgcgcaagcactatccatcagaaccgcaaacactgattcattatctcaatgccgccgatgcagcatttgatacgctaatggcgctgagtggcggtcacggcttcgatgatattttcgtctttgtgcctaatgaaggactggtgactctcgcctcttccttgctggcgacagatggttgcctgaatttcttcgccggaccgcaggataaacatttcagcgcgccaattaatttctacgatgtgcattatgcatttacccactacgtgggcacgtcaggcggcaataccgacgacatgcgcgcggcggtcaaactgattgaagagaaaaaagtgcaggccgcaaaagtggtaacacatattcttgggctgaatgccgcgggcgaaaccacgcttgaattgcctgccgtcggcggcggcaaaaagctggtgtataccgggaaatacctgccgctgacgtcactcacgcagattcaggatcaagcactggcggcgattctggcgcgtcatcaggggatctggtccggtgaggcggagcaatatctgctcactcatgcagaggcaatttcccatgattaa

SEQ ID NO: 463456 - DNA, 747 bp, Shigella boydii
atgcgttatgcagtacagaacgattacatcgactcaaatccagccagtgatatggccggtgcgctatcgacaaccaaagcgcgacattaccccgctttgccctccagccggttccctgagtttcttgctcgtcttgctgcatatcgtggccgtgtaatgacgcggatcgcggttgagctttccttactaacttttgtgcgttccagtgagttacgtttcgcgcgttgggatgagttcgacttcgataaatctctctggcgagtacctgcaaaacgagaagaaattaaaggtgtgcgttactcgtaccgtggcatgaagatgaaagaggagcatatcgttcagcttagtcggcaggcgatgattttgctaaaccagttaaagcagattagtggagataaagagctgctttttccgggtgatcatgacgcaactaaggttatgagcgaaaacacggtaaatagcgcattgcgtgcgatgggctatgacacgaaaaccgaagtttgcgggcacgggtttagaacgatggcccgtggtgcgttgggcgagtccggattatggagtgaagatgctatagaacgacagttgagccattcagagcgtaataatgtacgtgctgcttatattcacacctctgaacatttggatgaacgtcgattgatggttcaatggtgggctgattatctccaagcaaataagggcaaaacaataacaccttatgattttgctaaaataaacaaaagtcgatag

SEQ ID NO: 463457 - DNA, 1080 bp, Shigella boydii
atgaatgtagggcatctcaatttcttcaaggttaataagtgcggtttatacaaggtaaatgatgacaatacctatggtttagaacttagcgaaacatttgacctcatacaggattgggtgggaactaaatctcttgcactcacgataccatgggatccaaaagaaaaaccaaacagttcaaagtgttattgcaaggatatttataaggatgaaaatactggtgatttcttagtcatgttatggaaatctgatactgatagtacgggctctttattaggagctagtgaagacggtgaaatcggaagctcatcggtggttaaatatactaatagctacagagggaaaaaagttatctgggggcggccatgcttttattgggttatacctgaacttgaaactatagtatccattaaattcgaccattctgtttgtgattctgaactatttcaagactatgtacactcatctattactaatagagttaaacatagcaaaagggttaaaaataaaaccgagaaaggttatataaggctatctaataccgatgacgaagacttatataaatatatgtacaggtttgatatgaagctcagaagcttagaaaccactcatactgagttaggtaaactaataccaaaaataacacacatagttcgcagggaaactattattataaatccaaatgatgcacgagctgattggttaaagacctttagcactctcgttccatttgtgtccggaaagaaaaatgccaaaacaagacaaattgaaataaaagcagaagcaaaaccatccttgaatgaagttcaagaaatcattgaaaagtattcggctgaggatagagaaaaacgtctttgggacaatgttggatttgctacagacaagggtataacttgggtggataaatatagaatgcgtgatattctcaatgtcccttctgacgactattcaacatattccgccgcatatatttacgaacaaatatcacacaaaagaaaagaatttatttcccctatattaaaagaattaaaagcattacaatctcaaccaagaataaagaaagcatctggagaggattga

SEQ ID NO: 463458 - DNA, 573 bp, Shigella boydii
atggaaagcacagccttacagcaggtctttgacacctgtcagaataacaaagcagcatggctgcaacgcaaaaatgagctggctgcggccgaacaggaatatctgcggcttctgtccggggaaggcagaaacgtcagtcgcctggacgaattacgcaatattatcgaagtcagaaaatggcaggtgaatcaggctgccggtcgttatattcgttcgcatgaagccgttcagcacatcagcatccgcgaccggctgaatgattttatgcagcagcacggcacagcactggcggcggcactggcaccggagctgatgggctacagtgagctgacggccattgcccgaaactgtgccatacagcgtgccacagatgccctgcgtgaagcccttctgtcctggcttgcgaagggggaaaaaattaattattccgcacaggatagtgacattttaacgaccatcggattcaggcctgacgcgacttcggtggatgacagccgtgaaaaattcacccctgcgcagaacatgattttttcgcgtaaaagtgcgcaactggcatcacgtcagtctgtgtaa

SEQ ID NO: 463459 - DNA, 501 bp, Shigella boydii
atgatttactgcccgtcgtgtggacatgttgctcacacccgtcgcgcacatttcatggacgatggcaccaagataatgattgcacagtgccggaatatttattgctctgcgacatttgaagcgagtgaaagctttttctctgactgtaaagattcaggaatggaatacatttcaggcaaacagagataccgcgattcactgacgtcagcctccggcagtatgaaacgcccgaaaagaatgcttgttaccggatattgttgtcggagatgtaaaggccttgcactgtcaagaacatcgcggcgtctgtctcaggaagtcaccgagcgtttttatgtgtgcacggatccgggctgtggtctggtgtttaaaacgcttcagaccatcaaccgttttattgtccgcccggtcacgccggacgaactggcagaaagcctgcatgaaaaacaggaactgccgccagtacgcttaaaaacacaatcatattcgctgcgtctggaatga

SEQ ID NO: 463460 - DNA, 735 bp, Shigella boydii
atgtctgacaacaccatccctgaatatctgcaacccgcactggcacaactggaaaaggccagagccgcccaccttgagaacgcccgcctgatggatgagaccgtcacggccattgaacgggcagagcaggaaaaaaatgcgctggcgcaggccgacggaaatgacgctgacgactggcgcacggcctttcgtgcagccggtggtgtcctgagcgacgagctgaaacagcgccacattgagcgcgtggcacgccgggagctggtacaggaatatgacaatctggccgtggtgctgaattttgaacgtgaacgcctgaaaggggcgtgtgacagcacggccaccgcctaccggaaggcacatcatcacctgctgagtctgtatgcagagcatgagctggaacacgccctgaatgaaacctgtgaggcgcttgtccgggcaatgcatctgagtatcctggtacaggaaaatccgctcgccaacaccaccggccatcagggctacgtcgcaccggaaaaggctgtcatgcagcaggtgaaatcatcgctggaacagaaaattaaacagatgcaaatcagcctcaccggcgagccggttctccggctgaccggactgtcagcggcaacactcccgcacatggattatgaggtggcaggcacaccggcacagcgcaaggtgtggcaggacaaaatagaccagcagggagcagagcttaaggccagaggactgctgtcatga

SEQ ID NO: 463461 - DNA, 267 bp, Shigella boydii
atgcaagctgttttttcttccccgtctcccgcccctgtgacgccactgatgccgctgccggacatcacgcaggagcgttttttacgtctgccggaagtgatgcacctgtgcggcctgtcacgctcgaccatctatgaactcatccgtaagggggaatttccgccgcaggtgagtcttggcggtaaaaatgtggcctggctgcactctgaagtcaccgcatggatggccggacgcattgccggacgcaaacgggggtacgacgcatga

SEQ ID NO: 463462 - DNA, 600 bp, Shigella boydii
atgatgatgcccgctctgcaaaaactccctttttctggcttgcctttttccggcatttgcggatatagtttttccgctgccgcaaaatcggcagccgggcgtgagaacccgagcaattcacaggcgacatatgacgcgccacgcgtctttttttgtgtcgcaatcaatgccacagagcgccagattatggtgtggtgtgtggtcagtcgtgcagatggcattccgtgcatcctgcccgcgtccgctcattatgccgcagagtcaatggtagctcaggcggggcagcctccgggctggccggtatcctgtgaagccggtattctcacccccgtctgggctatcgccatcgagcgtgagaactccggcgatagcgttatttgctattcacaggaggctgccatcatggctacaacccttaccccctcacaccctgaatttgtctttgtgtttgcggctgtccgtcgcgcagaccgtcatccccgtatctgtatgcttcgcaccgtggccggtgatgaacgcagtgcccgccgttcccttgtccgtgactatgtgctctcccttgctgcccgtctgccggtggtggaggtgtcccgtgcgtaa

SEQ ID NO: 463463 - DNA, 288 bp, Shigella boydii
gtgcgtaataaaaaagcccctcagaccgtctcagcacgtcatgacgcccgtgaacacctcagcattgaggcttaccataagctcaaccgcgccagcgccgtatcccagtttgttgggggtgatttgattcaccgtgaactctccggcctgcatcagctctacattccgcatattttcagctacctgaatgaagatattgattttgtgctgaatgagctgaaagccaaaggcctgtgccgcgattttctcgcccagcagaaagaccggggagacaggacgcatgtttga

SEQ ID NO: 463464 - DNA, 456 bp, Shigella boydii
atgtttgattttccccagcccggtgagatttaccgttctgccggttttcccgatgtggccgtggtcggcattctggaagacggtattccgtgggaaatgccgtaccgctgcccggacattgtctggaacccgtaccgccgtaaattcagtatccttgtgcgtatcctcgccgacgggcgcaccacagacatcccgctggggcgttttctgcgggaatttacctgtgaccgtcctgacctgtttaaacgcagccccgtaaaccggcatgcggtactgaaagaaatggccggagacccggaattacagaaatggcgggagaaatatctggatatttacccgcaggacactgttccggtcagccgggcagcaccggtagcgcgggaatggcgggaaattccccgcacggagcctgacccggaaatcaccccggataacagttaccgcaattatctgtaa

SEQ ID NO: 463465 - DNA, 321 bp, Shigella boydii
atgaaaacacccttaccgcccgtcttacgcgcagccctttaccgtcgtgctgtcgcctgtgcctggctgaccgtgtgcgaacgtcagcaccgctacccgcatctcacccttgagtcactggaggcggccatcgccgctgagctggaaggcttttatctgcgccagcacggtgaggaaaaagggcgtcagatagcctgtgccctgctggaagatttaatggaatccggccccctgaaggccgcaccgtcgctgtcctttctcgggctggttgtgatggatgaactctgtgcccgtcacataaaagcgccggtactgcactga

SEQ ID NO: 463466 - DNA, 2334 bp, Shigella boydii
atgaaaatgaacgtaaccgccaccgtcagccatgcgctcggccactggccgcgtattctcccggcgctggggattcaggtgctgaagaaccatcatcagccctgtccggtctgtggcgggagtgaccgcttccgttttgatgacagggaggggcgcggcacctggtactgcaatcagtgtggtgccggtgacggcctgaaactggttgaaaaggtgtttggtgtctccccgtccgacgtggccgcaaaggtggctgccgtgaccggcagtctgcccccggctgacccggcagtgacggccgccgccgttgctgaaacagacgctgcccggaagaacgccgccgcactggcacaaaccctgatggcaaaaacccgtcccggaaccggtaacgcctacctgacccgcaagggctttcccggccgggaatgccggatgctgaccggcacacacagagccggtggcgtgagctggcgcgccggtgaccttgtggtgccactgtatgacgacagcggcgaactggttaaccttcaattaatcagtgctgacggccgtaagcgcaccctgaaaggcggacaggtcaggggcacctgtcacacccttgaaggacagaatcaggccggaaaacgtctgtggatagcggagggatacgcgaccgcacttaccgtacatcacctgaccggtgaaacggtgatggtggcgctttcttccgtgaacctcctttctctggccagccttgcccggcagaagcatccggcctgtcagattgtccttgccgcagaccgtgacctcagcggtgacggccagaaaaaagccgccgcagccgcagatgcgtgtgaaggtgttgttgccctgccgccggtcttcggtgactggaatgatgccttcacgcagtacggcggggaggtcacccgtaaggccatttacgatgccatccggccaccggctgaaagcccgttcgacaccatgagcgaagcagagttttccgccatgagtaccagcgaaaaggccatgcgtatctatgagcattacggcgaggcgctcgcggtcgatgccaacggccagcttctgtcccgctatgaaaatggtgtctggaaggtgctgccgccactggactttgcccgggatgtggccgggctgtttcagcgtctgcgcgcgccgttctcctccgggaaggtggcctccgtggtggacaccctgaagctgattattccgcagcaggaagccccctcccgccgcctgattggctttcgtaacggtgtgctcgacacacagaacggcacgttccacccgcacagtccgtcacactggatgcgtaccctgtgcgatgtggatttcaccccaccggtggaaggggaaacgctggaaacccacgcccccgcgttctggcgctggcttgaccgtgccgccggtggccgtgcggaaaaacgcgacgtgattctggccgcactgtttatggtgctggcaaaccgctacgactggcagctctttctggaggtgaccggtcccggcggcagcggcaaaagtatcatggccgaaatcgccaccctgctggccggggaggataacgccacgtcggccaccattgagacgctggaatccccgcgtgaacgtgccgcgttaactggcttctcactgatacgcctgccggaccaggaaaaatggagcggcgacggtgccggactcaaggccatcaccggcggcgatgcggtgtccgtggacccgaaataccgggatgcgtactccacgcatatcccggcggtgattctggccgtgaacaataacccgatgcgcttcaccgaccgcagcggcggcgtgtcacgccggcgggtgattattcacttcccggaacagatagccccgcaggagcgcgacccgcagcttaaggacaaaatcacccgcgagctggcggtcatcgtgcgtcacctgatgcagaagttcagcgacccgatgctcgcccggtcactgcttcagtcccagcagaactcagacgaggcgctgaacatcaaacgggatgccgacccgacgtttgattttatcggctatctggaaaccctgccgcagaccagcggcatgtatatggggaacgccagtatcatcccgcgtaattaccgtaaatacctctatcacgcctatctggcctacatggaggcaaacggctaccggaatgtactcagtctgaaaatgttcgggctggggctgccggtgatgctgaaggaatacggactgaattacgagaagcgccataccaaacaggggatacagaccaacctgacactgaaagaggaaagctacggcgactggctgccaaaatgtgacgaccctgcaacaacctga

SEQ ID NO: 463467 - DNA, 237 bp, Shigella boydii
atggtgaacagtgtgaacagttctttcgaaaaaaaattttttatgtggataaaagatgcactggtttggatccgggctacggatccaaacttactgattaaaaattatttaactttccgatttattgatgggctgaaaatagattggtcagaaaaacagtgggggcacaaaagggggcatatttcattgttgtgttttattatttgttttttatcattaacttattttgatatttga

SEQ ID NO: 463468 - DNA, 1227 bp, Shigella boydii
atgaattacgaattactgaccactgaaaatgccccggtaaaaatgtggaccaaaggcgtgccggtagaagccgatgcgcgtcagcaacttattaatacggcgaagatgccgtttattttcaaacatattgcggtaatgcctgatgtacacctgggtaaagattccaccattggtagcgtgatcccgaccaaaggggcgattattccggcggcggtgggcgtggatattggctgtggaatgaacgcgctgcgtaccgcgttaacggcggaagacctgcctgaaaacctggcagagctgcgtcaggcgattgaaacggccgtgccgcacgggcgtactaccgggcgttgtaaacgtgataaaggcgcatgggaaaacccgcctgtcaacgtcgatgcgaaatgggctgagcttgaagccggttatcagtggttaacgcaaaaatatccccgtttcctgaataccaataactataaacacctgggaacgctgggaaccggtaaccactttattaaaatctgccttgatgagtcggaccaggtgtggattatgctgcactccggttcacgcggaattggtaacgccatcgggacttactttatcgatctggcacaaaaagagatgcaggaaacgcttgagacgttgccgtcgcgtgatctggcgtactttatggaaggtacggaatactttgatgattacctgaaagccgtggcctgggcgcagctttttgccagccttaaccgcgatgtgatgatggaaaacgtggtaacggcattgcagagcattacgcagaaaacggtcagacagccacaaacgctggcgatggaagagatcaactgtcaccacaactatgtgcaaaaagaacagcactttggtgaagagatctacgtgacgcgtaaaggcgcggtgtctgcgcgtgctggtcaatatggaattattcccggttcgatgggagcaaaaagctttatcgtccgtgggctgggaaatgaagagtcgttctgttcgtgcagccacggtgccgggcgggtaatgagccgaactaaagcgaaaaaactgttcagcgtggaagatcaaattcgtgccaccgcgcatgtggaatgccgtaaagatgccgaagtgatcgacgaaatcccgatggcgtataaagatattgatgcggtgatgacggcacaaagcgatctggtggaagttatctataccctgcgtcaggtggtgtgcgtaaaaggataa

SEQ ID NO: 463469 - DNA, 723 bp, Shigella boydii
atgaccggcgataaagccgccgctgccaactggttgcgtcatacggctaaaccggagtttgcgaacaaccacttcctgcaaggtcaatggcgcaacattgcccgcgcacaaatcttgctgggcgagtttgaacctgcggaaattgttctcgaagaactcaatgaaaatgcccgcagtctgcggttgatgagcgatctcaaccgtaacctgttgctgcttaatcaactgtactggcaggccggacgtaaaagtgacgcccagcgcgtgttgctggacgcattaaaactggcgaatcgcaccggatttatcagtcattttgtcatcgaaggcgaagcgatggcgcaacaactgcgccagctgattcaactcaatacgctgccggaactggaacagcatcgcgcgcagcgtattctgcgagaaatcaatcaacatcatcggcataaattcgcccatttcgatgagaatttcgttgaacgtctgctaaatcatccggaagtgccagaactgatccgcaccagcccgttgacccaacgtgaatggcaggtcctggggctgatctactccggttacagcaatgagcaaattgcgggcgagctggaagtggcggcaaccaccatcaagacgcatatccgcaatctgtaccaaaaactcggcgtcgcccaccgtcaggccgcggtacaacacgcgcagaaactgctgaagatgatgggatatggggtgtga

SEQ ID NO: 463470 - DNA, 381 bp, Shigella boydii; identical to SEQ ID NO: 458155

SEQ ID NO: 463471 - DNA, 471 bp, Shigella boydii; identical to SEQ ID NO: 462313

SEQ ID NO: 463472 - DNA, 1218 bp, Shigella boydii
atggcagtattgacggatacgaaagcaagacatatcaaacctgatgacaaaccattgccccatgggggaattaccggactgacccttcatccttcttcagtaaaggggcgggggaaatgggtttttcgttatgtaagtccggtgacacaaaaaagacgtaatgctggattgggaacttacccagaggtcagtattgctgaagctgcacgtactgcccggataatgcgagagcaacttgctgcaggtgatgatcctctggagattaaaaaggctgaatctgagaaagtcgttatcccaacatttgccgatgcagccaggcgtgtacatgcagaactgtctcctggatgggagaatccaaagcatgtaaggcagtggttatcgacgcttgagaattacgcgtttcctcaactgggagcaaaaacgctggattcgattacggctgcggacgtggcagaaacactgcgtccagtctggttaaccttgtcagaaacggcaagccgggttaaacagcgcattcatgttgttatgcagtggggatgggcgcacggtttttgtgtggcaaatcctgttgatgtggttgaccatttgcttcctcagcagacaagaggacgtgatgaacaccaacccgcaatgccctggaggcagttaccgctttttgtggcgaccagtgtgtatagtgatgaaccttataatgttacccgcgcactgttattaatggtgatacttacagcaactcgctcgggcgaagccaggggaatgcgctgggctgaaattgattttcataagcgggtatggactatacctgcagaaagaatgaaagctaggctacagcatcgtgttcctttatcccggcaggctatttacattctggaaaatatacgtggcctgcatgatgaactggtgttcccttcacccagaaagcagcagatcctttccgatatggtgttgacaagttttctgcgtaaaaagaaagccgtcagtgacattccggggcgagttgccacggcacatggttttcgctcaacattcagggactggtgtagtgaacaggggtattcgcgggatctggcggaaagggcgctcgctcatacgctgaaaaataaggttgaggcggcatatcatcgtactgatctactggagcagcgtgtaccgatgatgcaggcatgggcggattatgtgatgtctcaacttgctaaaaacactaaggaattcgcttag

SEQ ID NO: 463473 - DNA, 1530 bp, Shigella boydii
atgatgacgacaaaactatcactccctgaacttgacacaactaaactgcctgacaggtgccaggcattacttgatgaaatgcatgaagaaacaggaatacgccgtgaaatacttctgtctgttatgctgacggtcatggctgcctcggtccaggatacgcatgaagttgaactttccggagggcaacgtaccagccttcagatatttatgtgtctttcatcagcatcaggcagtggaaaaacctctgcctgcgcaaaattaatcgctcctgttcatgaaacagaagaagaactacatcaggcatatatcgacgataaaaaaaactatgaccgaatgatggaaatgtggacaacagataaaaaaatcctggagcggagatataaaaaggaaattgaaagatccccggaaaatgctgctgctgcacgagcagcacttgaaaagtgtatagcaaataaacccgaacctcccgtacaacaggttctcatcgtgaatgacgcgacaccagaagggatagctttgaaactcagccagtcaccctctcttctgttgctgtctgatgaaggaggtactattctggataagcgtttcgaacgcaaatcggcactgtacaacacattatggagtgggcaaccagtcaacgttgaacgggcatccagacccgggttccggctgaatgatgtccgtctcactatacttatactgactcaaccggtaatatttaataagttttttactctcactggcgatcagatccggggcaatggctttctggcccggttgctattttgcgaacccggagcaattaaaataatgacgacagaaccgcatactgccactcctgttgtgacgcaacaatgtgcaagctgttttcgtaagaaaagttttggcagtcagatcagagactctctgagagcatccagagaaagacgtgcaaaaagtaaagagcgcatctgcatgacattatcaaatgcagcatcccgcgcactggagcgctttcacaaagaaaatatggatactgtcagacagaatcctcatatgggtacatttgaagacattattgtcagaaaaagagagcaggttgtcaggatagcagcacttctggaactggagaaagatccagactcgacagtaataacgctggaaagtactaatagcgccatttatctcattgaattttatttcaagcatcttatatataaacttgaatcccttcgggaaatatccccggctgagaaacttgataaatggcttcagaaaagaattatcacaacagcaggttacatattccagaaaagttatattttacaatatgccccatatgctctcaggaaaaaatgtgttctggatgaagcacttgacatactggcggaacaaaggaaaataaggattgatgataacctggttgtttatataggaaacacgattacaccatccgaactggcaaaaaaactaaatattcctgcattcgatgccggagttttcatttgtgatcatcaaaacatactgaagtatcaccgaaacagactatag

SEQ ID NO: 463474 - DNA, 288 bp, Shigella boydii; identical to SEQ ID NO: 15969

SEQ ID NO: 463475 - DNA, 1836 bp, Shigella boydii; identical to SEQ ID NO: 15968

SEQ ID NO: 463476 - DNA, 564 bp, Shigella boydii
atgtataatgccaatcccaattacaaaatggatttcatgattctgaaagacgtgaatgaacacatggatggtatgtttcaacgtttttctaaactgttacctttcagaattgattttgcttacaggaaagacacgcccagtttcgggcattcctgtaagcacagtatgtgtatggaaatataccgtttacttagcgaaacccagacgatgttggcgggatattactgggtaatggaatatacaccagacaaagggcttcatattcattttatcggctacctggatggacaacgtcacaagaactcttatcagatatccaggcaactgggagatatctggaggcggatcacggaaggggagggttattttcatctgtgccgggctaaagacaaatacccggtgcgtatcgatcacgtgattcactatagtgataaatctgcggtagacgacttacgttacgcccttagctatctggctaaacaggatcagaaagaacacggtattattctgggccgtagcaggcttcccgaaaaaagtaaccggggtcgaccacgacataactga

SEQ ID NO: 463477 - DNA, 219 bp, Shigella boydii; identical to SEQ ID NO: 15966

SEQ ID NO: 463478 - DNA, 297 bp, Shigella boydii
atgtcattatcacgtctgcctttttttaacaaagacgcctattaccatctgggaaactatgagcgctctgacaccctgagagggttaattaccggagcctggtacagtgccttagggttggaactggaagatcaccagggattagttcatttccctgctaatggacgttacatcctggatattaacgatcctaatttcccagagcagtaccagcgcttattggtacgtctggattatttgacgaagctcgacactaaagcatcaggccagcgtaactttggctacagcggtttttga

SEQ ID NO: 463479 - DNA, 342 bp, Shigella boydii
atgtatacagaatcaaacattaagctttcctgtaacgccctctggcaaaagtgtgtccttgcaactctgtatcgggctgctgctacacatcctaaaattaaattattacagtttaaattaataccttgccctggtatgaataaggcaattccttctctgattgctgattttactggtgagctgcatagactaatttctgaacatttgcagtgtaagcgacgtaaagataaatcagtcgagcccacccctttatattacctctggagtagggaagctgtggctaacgatgccactccttatcttatggtgctgctacttaataacgatgtctggtgtaagtga

SEQ ID NO: 463480 - DNA, 309 bp, Shigella boydii
atgcagttaactgttagcttaatttgggggattgttgttagtgttccacctcagcaacctattgctaagttagaagtaaatgctgcccaaaaattagttaatgcagggaatcaacgcttaaagattttaacgatcgcttattgtaaaaataatagcaaagaaaattgtaagatacagaccgtaaataaaaacatcttccctggtcaggaaagaaatcttgaaagcatatctggctacgacaaaatcgttgtcaaatataataactggatcaccaaagataatggcgagtttgaactggcggtccattaa

SEQ ID NO: 463481 - DNA, 333 bp, Shigella boydii; identical to SEQ ID NO: 462152

SEQ ID NO: 463482 - DNA, 720 bp, Shigella boydii
gtgaattcactctataccgctgaaggtgtaatggataaacactcgctgtggcagcgttatgtcccgctggtgcgtcacgaagcattgcgcctgcaggttcgactgcccgcgagcgtggaacttgacgatctgctacaggcgggcggcattgggttacttaatgccgtcgaacgctatgacgccctacaaggaacggcatttacaacttacgcagtgcagcgtatccgtggcgctatgctggatgaacttcgcagccgtgactgggtgccgcgcagcgtgcgacgcaacgcgcgtgaagtggcacaggcaatagggcaactggagcaggaacttggccgcaacgccacggaaactgaggtagcggaacgtttagggatcgatattgccgattatcgccaaatgttgctcgacaccaataacagccagcttttctcctacgatgagtggcgcgaagagcacggcgatagcatcgaactggttactgatgatcatcagcgagaaaacccgctacaacaactgctggacagtaatctgcgccagcgggtgatggaagctatcgaaacgttgccggagcgcgaaaaactggtattaaccctctattaccaggaagagctgaatctcaaagagattggcgcggtgctggaggtcggggaatcgcgggtcagtcagttacacagccaggccattaaacggttaagcactaaactgggtaagttataa

SEQ ID NO: 463483 - DNA, 366 bp, Shigella boydii; identical to SEQ ID NO: 463085

SEQ ID NO: 463484 - DNA, 297 bp, Shigella boydii; identical to SEQ ID NO: 463086

SEQ ID NO: 463485 - DNA, 138 bp, Shigella boydii
atgatgacagccatcactggctgtcagattgaaaatttagtggttaacgaattccccggtaatgactccaacttactgatagtgttttatgttcagataatgcccgatgaccttgtcatgcagctccaccgattttga

SEQ ID NO: 463486 - DNA, 282 bp, Shigella boydii
gtgaatgagctaccggacggcgaaccggtattggtggcgggtgatttcaatgactggcggcaaaaagctaatcatccgttaaaagtgcaggccggactggatgagatttttacccgcgcccacggacgcccggcgcgcacgtttccggtgcaatttcctctactacgactggacaggatctacgtcaaaaatgccagcgccagcgcgccaaccgcgttgccgctgcggacatggcgacacctttctgatcatgcccctttaagtgcggagattcatttatga

SEQ ID NO: 463487 - DNA, 210 bp, Shigella boydii; identical to SEQ ID NO: 9340

SEQ ID NO: 463488 - DNA, 1077 bp, Shigella boydii
atgaaaaaaatgaacaaacatatgagtaataccgccattattggtactgtaggtgttcctgcttcgtatggagggtttgaaacacttgttgaaaatttaattgaaactgaaaaggttaattatattgtttattgctcatcaaaaaattaccccaaaaaactaagcacatataaaaatgcgaaattggtttatattcctcttagcgctaatggaatatcaagtgttatttatgacgcatttagcatattgcatgcgattgtattccgaaaagtaaatacactccttattttaggagtctctggttgctttattcttcctataataaaaaaaatatcatctgttaaaataattacaaacattgatggagtagaatggcgtcgagataaatggggtaggtttgctaaaaaatttttaaaatggtctgaaaaaatagctgtgaaaaattctaatattgtgatttctgataataaggaaatcgcaaactatgtgtgctcagaatatatggtaaattctcaagtaattgcctacggcggagatcattcactagtttttgaaacaaaaagatgtaacgatgtggagaattccgaaagtaaatatgctcttgctctctgtcgtattgagccagaaaacaatgttcatgttatattagaatctttttctaaagtcaccaaaaaattgaagtttattggtaattggggaagtagcgactatgggcgtagtcttaagaaaaaatattcaaagtacaataatatagaaattattgatccaatttatgatgttgaacaattaaatattattagaagcggatgtgagttctatgtgcatggacattctgctggaggtactaatccatcactagttgaaatgatgttttttgcaaagccgattatttgttttgattgtaagtataatcgttatacaacatttgaacaagcgtgttatttcagagacctgaaggatcttataattaaaatagaatcacccaaagagagaacacaaggtgttaagttgaagtcgctggctgaaaaacattacacatggaatagaattcgtgaacagtatgagcagcttttgtaa

SEQ ID NO: 463489 - DNA, 879 bp, Shigella boydii
atgtatgactctaaaatggttgaagagttttattcgcaattatacaatcatggtttaataattaatccatttcaaacaagtgaagaaggtattactcttcgttttagtgggatattttcatctgggtttatcttagctagttattgttgctttgcaataatttattattattttaataaatctgtcaatcgtataaagtttgcttttctatttgttggttttgtcataatggttgttttgacatataatagaaacgggatgttggcatttgcagttacatctttatttataatgattcatacttaccttcgtcgatactatctaactcttgcgaatttatattatgtttttttgattggaatattgttcatagcaccaagttttatattatactttggtggtgacattcagaattcatattcttctatagattattcagcttttacaaaattgagtacattattctctcgtatagatgcctggcttcaggttttgaatattaatgacgtctctcgtttattatttggttccggtttagtgcaggggttaggggaagatgatatgaatttttacgtcgataatggttatttatatcttttgcatcagagtggtcttatagctcttgttttatatatcgctacttggagttacatgtttatttctctctctaaaaacttaaagaaaagacgaaaccataattttgtttcagtagatgaaataaatatatgcttacttcttattcttgtaagtttcaccttggcactccttaataatctattttttgaacccgtatttctaattcttgtattaatgaaatgtgtaactgtgaataataaatcaagtagtatttatgaaaaaaatgaacaaacatatgagtaa

SEQ ID NO: 463490 - DNA, 468 bp, Shigella boydii; identical to SEQ ID NO: 462829

SEQ ID NO: 463491 - DNA, 393 bp, Shigella boydii
atgactagtctaaaaactagtattaagactatcacttatttaagtgatactggttgtctggagattcagggggccagtctagttgtcgtgctcaacggaaaaattaatggcaacgcatgtatcgtcgttccattatcaaccactcgcgatcatgacaagttaaatcgtggaatgcatgttgaaatagccagtaatgttatcaatggcctgcaattctttgatcagcagattcgttgggccaaagccgacctggtacaacaagtcagtcgaaaccgattaaatagagcaaggacttacagagggtatcttaatcaatgtttgccacatgagttggttgcagacatacagagggcggtcatcaagtcaatcaatgccatattgctcataaattga

SEQ ID NO: 463492 - DNA, 210 bp, Shigella boydii; identical to SEQ ID NO: 463045

SEQ ID NO: 463493 - DNA, 210 bp, Shigella boydii; identical to SEQ ID NO: 463222

SEQ ID NO: 463494 - DNA, 381 bp, Shigella boydii; identical to SEQ ID NO: 462329

SEQ ID NO: 463495 - DNA, 837 bp, Shigella boydii
gtgcaaaaaaatggcgataccttgtccggtgggcttacttttgaaaatgactcaatccttgcctggattcgaaatactgactgggcgaagattggatttaaaaatgatgccgatggtgacactgattcatacatgtggtttgaaacaggcgacaacggcaatgaatatttcaaatggagaagccgccagagcaccacaacaaaagacctgatgacgctgaaatgggatgcactaaatattcttgttaatgctgtcattaatggcagtcttggagttggttcgacgaatgcgttaggtggtagctctattgttcttggtgataatgacaccggatttaaacagaatggagacggtattctggatgtttatgctaatagtcagcgtgtattccgctttcagaatggagtggctattgcttttaaaaatattcaggccggggatggtaaaaaattcacgctatccagctccaacaactccacaaagaatgcaacgtttaatttatggggtgcttcaacccgtccagtagttgcagagttaggcaatgaggcaggatggcatttctatagccagcaaaatacagataactcggtaatattttctgttaacggtcagatacagcccagcaactgggggaattttgattcacgctatgtaaaagatgttcgcctgggtacgcgtgttgttcaattgatggcgcgtggtggtcgttatgaaaaagccggacacgcaattaccggattaagaatcattggtgaagtagatggcgatgatgaagccatcttcagaccaatacaaaaatacatcaatggcacatggtataacgtcgcacaggtgtaa

SEQ ID NO: 463496 - DNA, 303 bp, Shigella boydii
gtggaagcgcatgagttattacaggcaggggtgacgcagttttcccgtgaaacattctccagtgcgttagagctggggcgcaagactttggtcacgcttgggatgcatccgcatcaggcgcagcgggcgcaactgcattttcgccgcctggatatgcggatgctgcgagagctcatcccaatgcatgccgatactgtacaaatttctcgcgccagggaagcccgacgcgaactggaagagattttccagcgtgaaatgcaacaagaacgacgccagctggacggctgggatgaatttgagtag

SEQ ID NO: 463497 - DNA, 1449 bp, Shigella boydii
ttggcgaaagatgcgcagaaattcgcagccaaagtctttcatgccgataaaacctattttgtgctgaacggcacatcggcagcgaataaagtggtgacgaatgcgctgttaacgcgtggcgatctggtgctcttcgaccgtaacaaccataagtcgaatcatcacggcgcgctgattcaggcgggggcgacgccggtctatctggaagcttcacgcaacccgtttggtttcattggcggtattgatgcgcactgttttaatgaagagtatctgcgccagcaaattcgcgacgttgcgccagaaaaagccgagctgccgcgcccgtttcgcctggcgattattcagctgggaacctatgacggaactgtctataacgcccgtcaggtgatcgataccgttgggcatctgtgtgattacattctgtttgattccgcgtgggtcggttacgaacagtttatcccgatgatggcggatagctcgccgctgctattagaacttaacgaaaacgatccggggatctttgtgactcagtcggtgcacaaacagcaggcgggattctcacagacgtcgcagatccataaaaaagataaccatatccgcggacaggcgcgtttttgcccgcataagcggttgaataacgcctttatgctccatgcttctaccagccctttctatccgctgtttgctgcactggatgttaacgccaaaattcatgaaggggagagtgggcgtcggctgtgggctgagtgcgttgagttgggtattgagtcgcgcaaggctattcttgcgcgctgtaagctgttccgcccgtttatcccgcccgttgttgatggcaaattgtggcaggattatccgacatcagtgttagccagcgaccgccgttttttcagttttgagccgggggcgaagtggcacggctttgaaggatatgccgcggatcagtattttgttgatccgtgcaagctgttactcactacaccaggtatcaatgccgaaaccggcgaatatagcgactttggcgttccggcgacgattctggcgcactatctgcgtgagaacggcattgtgccggagaagtgcgatctcaactccattctgttcttattaactccggcggaaagccacgagaagctggcacaactggtagagatgttggcgcagtttgaacagcatattgaggatgactcgccgctggctgaggtgttgccgagcgtttataacaaatatccggtgcgctatcgcgactacactttgcgccagttgtgtcaggagatgcacgatctgtatgtcagtttcgacgtcaaagacctacaaaaagcgatgttccgccagcagagtttcccgtcagtggtgatgaacccccaggatgcgcatagcgctgatatgactttccgtgtcaaaccggaatctctaattttgacgattttctttttaggtttaattccctga

SEQ ID NO: 463498 - DNA, 210 bp, Shigella boydii
atgacggatggctggccgctgtatgaatcacgcctgaagggaaagctgcacgttatcagcaagtgttacactcagcgcattgagcgacataatctgaatctgagacaacatctggcaaggctgggacggaagtcactgtcgttctcaaaatcggtggagctgcatgacaaggtcatcgggcattatctgaacataaaacactatcagtaa

SEQ ID NO: 463499 - DNA, 330 bp, Shigella boydii
atgaagaccttccactggaaagtgaaacccggtatggatgtggcttcagccccttccgtcaggaaagtgcgctttggtgatggctattcccagcgagcgcctgccgggctgaatgccgacctgaaaacgtacagcgtgacgctttctgttccccgttgggaggccacggcgcttgagtcgtttctggctgagcacgggggctggaaatcctttctgtggacgccgccttatgagtggcggcagataaaggtgacctgcgcaaaatggtcgtcgcgggtcagtatgctgcgtgttgagttcagcgcagagtttgaacaggtggtgaactga

SEQ ID NO: 463500 - DNA, 471 bp, Shigella boydii
gtgctggatgagccaaccgcagttgcggagctgctgcaactggacaacgccggtgtagtggatatcggcggcggcactaccggcattgccatcgtgaaaaagggcaaggtgacgtactcggcggatgaagcaaccggcggacatcacatctctctgactctcgccggaaatcgccgtatttcgctggaagaggcggagcagtacaagcgcggtcacggtgaagagatttggcctacggtgaaaccggtgtacgaaaaaatggcggacattgtcgcccggcatattgaagggcagggcattactgatttatggctggcgggcggctcttgtatgcaaccgggcgtggcggaactgtttcgcaaacaattcccggcgttacaggtgcatttaccgcagcacagtttgtttatgaccccgctggcgatcgccagtagtgggcgagagaaagcggaggggctatatgcaaaatga

SEQ ID NO: 463501 - DNA, 219 bp, Shigella boydii
atgtacatgtcgaagaaaatggccggcgggaggaatacggcgcgctacctgggtcgttatctgaagaagccgccgatagcggcctcccggctggcacattacaacggaggggcgagcctgagcttccgttacctggaccacaaaacgggagaaacggcgacggaaacgctgacacagcgtgagctggtcgcgaggctgaaacagcacatcccggagtaa

SEQ ID NO: 463502 - DNA, 1455 bp, Shigella boydii; identical to SEQ ID NO: 462461

SEQ ID NO: 463503 - DNA, 267 bp, Shigella boydii
atgttgggacttgaaccgaagaacacggcggtgcggagtccggagagtaacggaatagcagagagcttcgtgaaaacgataaagcgtgactacatcagtatcatgcccaaaccagacgggttaacggcagcaaagaaccttgcagaggcgttcgaacattataacgaatggcatccgcatagtgcgctgggttatcgctcgccacgggaatatctgcggcagcgggcttgtaatgggttaagtgataacagatgtctggaaatatag

SEQ ID NO: 463504 - DNA, 1119 bp, Shigella boydii
atggaagcattacttcagcttaaaggcatcgataaagccttcccgggcgtaaaagccctctcgggcgctgcgttaaatgtctatccgggccgcgtgatggcgctggtgggcgaaaacggcgcgggtaaatccaccatgatgaaagtgcttactggtatctatgctcgcgatgccggcacgcttttatggctggggaaagaaacgacatttaccgggccgaaatcttcccaggaagccgggattgggattatccatcaggaactgaacctgatcccgcagttgaccattgccgaaaacattttcctcggtcgtgagtttgttaatcgctttggcaaaattgactggaaaaccatgtatgccgaagcggataaattgctggctaaacttaacctgcgctttaaaagcgacaagctggtgggcgatctttccatcggtgaccagcaaatggttgaaatcgccaaagtgctgagctttgagtcgaaagtcatcattatggatgaaccgaccgatgcgctgaccgataccgaaaccgaatccctgttccgcgtcatccgcgaactaaaatcgcaaggccgcggtattgtctatatctcccaccgcatgaaagaaatcttcgagatttgcgatgccgttaccgtttttcgtgacgggcaatttattgctgagcgcgaagtggcatcactgaccgaagattcgctgattgagatgatggtgggtcgcaagctggaagatcaatatccacacctggacaaagcgccgggagatatccgcctgaaagtcgataatctctgcggacctggcgttaacgatgtctcttttactttacgcaaaggcgaaattcttggcgtctctggtttgatgggcgcaggtcgtaccgaactgatgaaagtgctctacggcgcactaccgcgcaccagcggttacgtcaccctggatgggcatgaagtcgttacccgttcaccgcaggatggcctggcaaacggcattgtgtatatctccgaagaccgtaaacgtgacggtttagtgttgggcatgtcagtaaaagagaacatgtcgctgacagcgctgcgctacttcagccgcgctggcggcagtttgaagcatgccgatgaacagtag

SEQ ID NO: 463505 - DNA, 3474 bp, Shigella boydii; identical to SEQ ID NO: 463131

SEQ ID NO: 463506 - DNA, 780 bp, Shigella boydii; identical to SEQ ID NO: 15990

SEQ ID NO: 463507 - DNA, 876 bp, Shigella boydii; identical to SEQ ID NO: 8102

SEQ ID NO: 463508 - DNA, 1014 bp, Shigella boydii; identical to SEQ ID NO: 5004

SEQ ID NO: 463509 - DNA, 201 bp, Shigella boydii; identical to SEQ ID NO: 5005

SEQ ID NO: 463510 - DNA, 561 bp, Shigella boydii; identical to SEQ ID NO: 15275

SEQ ID NO: 463511 - DNA, 2967 bp, Shigella boydii; identical to SEQ ID NO: 59353

SEQ ID NO: 463512 - DNA, 378 bp, Shigella boydii; identical to SEQ ID NO: 16790

SEQ ID NO: 463513 - DNA, 660 bp, Shigella boydii; identical to SEQ ID NO: 52324

SEQ ID NO: 463514 - DNA, 723 bp, Shigella boydii
atgcgaaagatttttcttccgttgttactggtggcactttcgcctgtcgctcacagtgaaggtgtgcaggaagtcgagattgacgcaccgctctctggctggcatccggcagagggcgaagatgccagtttttcacaatcgatcaattacccggcgtcgtccgtcaacatggcagatgatcaaaatatctcagcgcagatccgcggcaaaataaagaattatgctgcggcgggtaaaattcagcagggccggctggtggtcaacggtgccagtatgccgcagagagttgaatccgatggttcatttgcacgcccttatattttcactgaaggcagcaacagcgtgcaggtcatcagcccggatgggcaaagccgacaaaaaatgcagttttactcaacgccgggtacaggaacgattcgtgcacgtttacggctggttctctcgtgggatacggacaataccgatctcgatctccatgttgtcacgcccgatggcgaacacgcctggtacggtaacaccgtgctgaaaaacagtggtgcactggatatggatgtcacgacggggtacggacccgagattttcgccatgccagcgccagttcacggacgctatcaggtgtatatgaagtggtcaacaaaaactggccaccgagttagagtttttccagtatcgattttccgattcgtttggggggaacccaccgttatattcgtgcggtcttag

SEQ ID NO: 463515 - DNA, 615 bp, Shigella boydii
atgaatcgtgattccttttatccagccatcgcctgttttccgctgttattgatgctggccgggtgtgcgcctatgcatgaaacccgccaggcgttaagccagcaaacgcccgctgcacaagttgacaccgcattacccacggcgctgaaaaatggttggccagacagccaatggtggctggagtatcacgataatcagctcacttcattaattaacaatgcactacagaacgcaccggatatgcaggtggctgaacagcgcattcagctagctgaagcccaggcgaaggcagttgccactcaggatggtccgcagatcgacttttcggcggatatggagcggcaaaaaatgtcggcagaaggcttaatggggccgtttgctctgaacgatccggccgcaggtacgaccggcccgtggtacaccaacggtacttttggcttaacggcgggctggcatctcgatatctggggaaagaatcgggcggaggttactgcccgcctgggtacggttaaagcacgggcggcggaacgcgagcaaacccgccaattgctggctggcagcgtagcccgcctgtactgggagtggcaaacccaggtaatgactccaacttactga

SEQ ID NO: 463516 - DNA, 303 bp, Shigella boydii; identical to SEQ ID NO: 459543

SEQ ID NO: 463517 - DNA, 999 bp, Shigella boydii
atgactgaacaggcaacaacaaccgatgaactggctttcacaaggccgtatggcgagcaggagaagcaaattcttactgccgaagcggtagaatttctgactgagctggtgacgcattttacgccacaacgaaataaacttctggcagcgcgcattcagcagcagcaagatattgataacggaacgttgcctgattttatttcggaaacagcttccatttgcgatgctgattggaaaattcgcgggattcctgcggacttagaagaccgccgcgtagagataactggcccggtagagcgcaagatggtgatcaacgcgctcaacgccaatgtgaaagtctttatggccgatttcgaagattcactggccccggactggaacaaagtgatcgacgggcaaattaacctgcgtgatgcagttaacggtaccatcagctataccaatgaagcaggcaaaatttaccagctcaagcccaatccagcggttttgatttgtcgggtacgcggtctgcacttgccggaaaaacatgtcacctggcgtggtgaggcaatccccggcagcctgtttgattttgcgctctatttcttccacaactatcaggctctgttggcaaagggcagtggtccctatttctatctgccgaaaacccagtcctggcaggaagcggcctggtggagcgaagtcttcagctatgcagaagatcgctttaatctgccgcgcggcaccatcaaggcgacgttgctgattgaaacgctgcccgccgtgttccagatggatgaaatccttcacgcgctgcgtgaccatattgttggtctgaactgcggtcgttgggattacatcttcagctatatcaaaacgttgaaaaactatcccgatcgcgtcctgccagacagacaggcagtgacgatggataaaccattcctgaatgcttactcacgcctgttgattaaaacctgccataaacgcggtgcttttgcgatgggcggcatggcggcgtaa

SEQ ID NO: 463518 - DNA, 3042 bp, Shigella boydii; identical to SEQ ID NO: 463156

SEQ ID NO: 463519 - DNA, 291 bp, Shigella boydii
atggaatatctggttaacgtagttccttcaggtgaagttatcgacagcacgctattgccgccaaatctgctgaataatggcacaacggagcaaagtgatgtaacagaggtcagtgaggcgcacctgtcactcgatgatgcgggcggcacggcgctggaggagatggaaaagcaaatgatccgcgaggcgctttcacgtcataacagcaagaagcaagttgctgatgaactgggcatcggcattgctacgctctatcgcaagattaagaaatatgagttgttaaacacataa

SEQ ID NO: 463520 - DNA, 1479 bp, Shigella boydii
atggagcttgctactacgcagtcagtattgatgcaaattcaaccgacaattcagcgttttgccagaatgcttgccagcgttttgcagcttgaggttgagatcgttgatgaaaacttgtgtcgcgtcgccggaacgggcgcgtatgggaagtttcttggtcgccagttgagcggcaactcacgcctgctccgccacgtcctggaaacgaaaactgaaaaagttgtgacacagtctcgcttcgatcccctttgcgaaggttgcgatagtaaagaaaattgccgtgaaaaagcatttctgggtacgcctgtcattttacaggatcgttgtgttggggtgataagtttgattgccgttacccacgagcaacaagagcatatcagtgataatttacgcgaattttctgattatgttcgccatatatccaccatttttgtttcgaaacttctggaggatcaggggccaggagataacatcagtaaaatattcgcgaccatgatcgataatatggatcagggcgtattagttgttgatgatgaaagtcgggttcagtttgttaatcagactgccttaaaaacacttggtgttgtacaaaataatattattgggaaacctatccgtttcagaccattaacatttgagagtaattttactcatggacatatgcagcatattgtttcgtgggacgataaaagtgaattaatcattggtcaattgcataacattcagggccgacaattatttttaatggcatttcaccaatcgcataccagtttttctgtagcaaatgcacctgatgaaccacatattgaacaattggttggcgagtgccgtgttatgcggcaattaaaacgactcattagccgtattgcacccagcccatccagcgttatggtggttggtgaaagcggcacgggtaaagaagtcgtcgcccgagcaatccataagttgagcggaagacggaataaaccctttattgctatcaactgtgccgcgattccggagcagcttctggaaagcgaactgttcggttatgttaaaggcgcatttactggcgcttctgccaacggtaaaacagggttgattcaggcggcgaatacgggcacgctgtttctcgatgaaataggtgatatgccattaatgttgcaggctaaattactgcgcgctattgaggcgcgtgaaattctgccgattggtgccagtagcccaatacaagtcgacattcgcatcatttctgcaactaatcagaatttggcccagttcattgccgaaggtaaattccgcgaagatctcttctaccgacttaatgttatcccgataactctgccaccgctgcgtgaacgtcaggaagatattgaacattggtgcattactttttacatctgcatacccgtcgtctgggatcggtttatcctggcattgctcccgatgtcgtcgaaatattgcgtaagcatcgttggcccggaaacctgcgcgagttaa

SEQ ID NO: 463521 - DNA, 303 bp, Shigella boydii
atgatttcagacgcacagaaggcagctaatgcagccggtgcgatagctacagggcttttatctctcattattcctgttccactgacgacagttcagtgggccaataaacattattaccttcctaaagagtcgtcttataccccggggcggtgggaaacactgccgtttcaggttggcatcatgaactgtatgggcaacgatttgattcgcactgttaacctgattaaatctgcccgtgttggttatacaaagatgttgctgggagtggaggcttattttattgagcataaatcacgcaactga

SEQ ID NO: 463522 - DNA, 342 bp, Shigella boydii; identical to SEQ ID NO: 460954

SEQ ID NO: 463523 - DNA, 303 bp, Shigella boydii; identical to SEQ ID NO: 463187

SEQ ID NO: 463524 - DNA, 888 bp, Shigella boydii; identical to SEQ ID NO: 10348

SEQ ID NO: 463525 - DNA, 417 bp, Shigella boydii; identical to SEQ ID NO: 10349

SEQ ID NO: 463526 - DNA, 594 bp, Shigella boydii; identical to SEQ ID NO: 10350

SEQ ID NO: 463527 - DNA, 1206 bp, Shigella boydii; identical to SEQ ID NO: 10351

SEQ ID NO: 463528 - DNA, 624 bp, Shigella boydii; identical to SEQ ID NO: 10352

SEQ ID NO: 463529 - DNA, 624 bp, Shigella boydii; identical to SEQ ID NO: 10353

SEQ ID NO: 463530 - DNA, 387 bp, Shigella boydii; identical to SEQ ID NO: 10354

SEQ ID NO: 463531 - DNA, 174 bp, Shigella boydii; identical to SEQ ID NO: 10355

SEQ ID NO: 463532 - DNA, 342 bp, Shigella boydii
atggcgctcaggagccagcgcccacctgccgggctaatccaccactctgatcgaggttcacagtactgcgcatacgattaccgggtcatacaggagcagtctggtctgaaaacatcaatgtcgcgtaaaggtcactgttacgacaacgctccgatggaaagcttctggggaacgctgaaaaatgagagcctgagccactatcgttttaataaccgggatgaagccatctcagtaatacgggaatacattgagattttctacaatcgtcagcgtcgtcactctcatctggggaatatctccccggcagccttcagggaaaaatatcatcagatggctgcttaa

SEQ ID NO: 463533 - DNA, 315 bp, Shigella boydii
gtgagtgcgttggtactgacgttgtggggaagcgataaaatcgttgctaccggcgtggcgattatctgggggctaacttttgcattggttcccgtcggctggtcaacgtggatcacccgctcgctggccgatcaggcagaaaaagccgggtctattcaggtggcggttattcagcttgctaatacctgtggcgcggcaatcggcggttatgcgctggataatattggtctgacttcgccgttgatgttgtccggcacattgatgttgctgactgcattgttggttactgcaaaggtgaaaatgaagaaatcctga

SEQ ID NO: 463534 - DNA, 342 bp, Shigella boydii
atggcgctcaggagccagcgcccacctgccgggctaatccaccactctgatcgaggttcacagtactgcgcatacgattaccgggtcatacaggagcagtctggtctgaaaacatcaatgtcgcgtaaaggtcactgttacgacaacgctccgatggaaagcttctggggaacgctgaaaaatgagagcctgagccactatcgttttaataaccgggatgaagccatctcagtaatacgggaatacattgagattttctacaatcgtcagcgtcgtcactctcgtctggggaatatctccccggcagccttcagggaaaaatatcatcagatgcctgcttaa

SEQ ID NO: 463535 - DNA, 210 bp, Shigella boydii; identical to SEQ ID NO: 463498

SEQ ID NO: 463536 - DNA, 342 bp, Shigella boydii; identical to SEQ ID NO: 460954

SEQ ID NO: 463537 - DNA, 945 bp, Shigella boydii; identical to SEQ ID NO: 462535

SEQ ID NO: 463538 - DNA, 984 bp, Shigella boydii
atgatacgtaagtcagctacaggtgttattgttgcgttagccgtaatctggggtggtggcatatggtacacaggtacgcaaattcagcctggtgtcgaaaaatttattaaagattttaacgatgctaaaaagaaaggtgaacatgcctacgatatgacgttaagttataaaaactttgacaaaggcttttttaattcccattttcaaatgcaaatttcatttgataacggtgcacccgatctcaatatcaagccaggccagaaagttgcatttgatgtggatgttgagcacggtccgttgcccatcacaatgttaatgcatggtaatgtcatcccagcactggcagcggcaaaagtgaacttagtgaataatgaactgacacaaccgctatttatcgccgcgaaaaataaatcgcccgtggaagcgacattgcgattcgcgtttggtggctcattctctacgacattagatgttgcccctgcagagtatggaaagttttcttttggtgagggccagtttacttttaatggtgatggtagttcattgtctaacctggatattgaaggcaaagtcgaagatattgttctgcaattatcaccaatgaacaaagtaacggcaaaaagttttaccattgattctctgacacgattagaagaaaagaaatttccggttggtgaaagcgagtcgaaatttaatcaggttaatattatcaatcagggggaagacgttgcccaaatcgatgctttcgttgcaaaaaccaggctggatcgcgttaaagacaaagattatatcaatgtcaatctgacctacgaacttgataagttaacaaaagggaatcagcaactcggtagtggtgagtggtcattgattgctgaatctattgatccctcagcagtgcgccaatttatcatccagtataacattgcgatgcagaatgaaccgccccgggaatcctggagactaaactccctgagaaagaggtaa

SEQ ID NO: 463539 - DNA, 180 bp, Shigella boydii
atgcagaaacagcttgacccgaatgaagtcgctgcacggcgtagccttgcaggcagccgttatgatctggtggatcgcaacaacaatatcgttctggaatatcgcaaaaaagaactggttcgcctgaccctgacagaccccgtgacagggatgaaccgccccgggaatcctggagactaa

SEQ ID NO: 463540 - DNA, 900 bp, Shigella boydii; identical to SEQ ID NO: 463214

SEQ ID NO: 463541 - DNA, 267 bp, Shigella boydii; identical to SEQ ID NO: 463503

SEQ ID NO: 463542 - DNA, 189 bp, Shigella boydii
atggaaagcttctggggaacgctgaaaaatgagagcctgagccactatcgttttaataaccgggatgaagccatctcagtaatacgggaatacattgagattttctacaatcgtcagcgtcgtcactctcgtctggggaatatctcctcggcagccttcagggaaaaatatcatcagatgactgcttaa

SEQ ID NO: 463543 - DNA, 1299 bp, Shigella boydii
atggtttggctggaaattatcgtagtacttggtgcaatattttttggtattcgccaggggggaatcggtattggtttatgtggcgggcttgggcttgccattctgactctgggatttggtctgcctatggggtcgccgccagtcgacgtgatcctgattattatgaccgttgttgtggcggcctcagccttacaggccgcaggcggaatggattatctggtacgcgtcgctggtaattttatgcggcgtaacccgaaatatatcaacataatcgcgccgattatcacctggtctatgaccattatggccggtactgggtttattgttttttccacgctgccggtgattgctgaagtggcgaaagagtccggtatccgtccttcccgcacgcttgccggttcggttgtcgcttcgcaggttgcgatttccggttcgccgatcagcgccgcaatggcggctatgctcactattatggaggtaaacggtgtcagttttattcaagtgatgtcggtatgtcttcccacctcttttgctgccgcgatggtcgccgcttttattgcttcccgacagggatgtgagttgcaggatgacgaggtctaccttgagcgcctgcaaaaaggactggtgcaaaaatacgagaataatagcagcatcaagccaggtgcgacgctctccgtcggattgttcctgctggcgacggtcgctattgttattcttgctgccttcccccaactgcgtccgggttttgatatcggtaaaccgatggaaacacgcgatatcattattatctgtatgctctctgccgcctgcctgatggtggtgctgtgtaagacggcgaccgatgccattattctcacctccacattccgtgcggggatgagttcgctggcggtaattctcggcattgtaaccttaggcaccacttttattgatgcgcatttaactgagattaaagatattgctggtgatattttgcaggcgtatccgatgttgttggcgctggttctttttggcacttgcgcgctgctctactcgcaaggtgcgaccacgccgttaattatcccgcttgccgtcgcgcttgacgtgcccacctgggcaattctggcgtcctatgtggccgtcaccggagtatttgtactgccaacgtatccaacatcactggctgccatggaatttgatactaccggcacaactcgtgtaggcaaatatgtgctgaatcatccatttatgctgcctgggttggggggaattattgctggagtggcattaggctttgtgattgcgccaatgattatttag

SEQ ID NO: 463544 - DNA, 720 bp, Shigella boydii
gtgaaaggtttaattggtgtactcggtggaatggggccggcagctaccgtcgacctgtttaataaatttgtaacttttaccgctgcacaatgtgatcaggaacatattcctttaattatttcttcgatcccggatattcctgaccgtaccgatgcattaatgcatcatgggcgttcaccattacccgttatgcgtgattatatgcataagctggaagatgccggggcagaatgtattgttattccctgtaataccgcgcattactggttcaaagaattaaaagatgcttgtcatattgatatattaagtatcgtagaaactacgatcaatgaagttcgcgcctgtggtaaaacccgaattggcttgttagccaccaatgccacgctatatatgggtttataccaaaaaggaattgagtcgctgggatttacctgtgtcagccccgatgccgacggtcagaaaaaagtgatggaaagtatttattccttgaaagctggcaatatagcgcacgcacaaaagttgatgaatgagcaggctgaaatattattttcccgcggtgcagaaatccttgttcttggttgtacagaaattccggttattctggcgcaagccgttaaagagcagccttcccgctatattgactcaacggcgtcactcgttcgtgccggaataaaatggtacgaaaatcgtgtcggtaaacattatcttttaacccaataa

SEQ ID NO: 463545 - DNA, 939 bp, Shigella boydii
atgaagaatatcgagacaaaatggttatacgatttcctgacactggaagcctgtcgccatttttctcaggcggcaaaagagcgtaatctttcgcaacccgcattcagccgacgaattaaggcgctggaggcagcgatcggcgttgttttattcgatcgcacgaccacccctttacaattaaccgaagagggcaagctctttcattcccagactcgcagcttattacagcagcttgaatgcaatttgggggagttaaacggccagagtttactcggcgttcccaacattaaaattgcagccgcgcactcactatccctgagcgtattacccaaactggtgcattcacttaccgcctatggcggagaatttgtctatcatgttgaagccattgatgttgtccaggccgtaaatacgttacgcgaaggcaagagtgactttattatttcgtttcgcgatgaagatcttatgcaatcgcctttttgctgcctgaaactgtttgaatctgagttgtacccggtatgtgccgccgacgcacaggggcaccctgtattcgatatcactcagccccaggttcctttgctcaactataccgccacatcttatatgggcaggttggtcaatcgtcatctggcagaggttggaggtattaccgggcgcacgatatttatctcttcgatgagcgagttattaaagaatatggcgctcaacggatacggcattgcctggttaccgatctggtcgatcgtcgatgaactacagaccaaacgtctgatatgccttgatgctgctaaattgacagtccccattcaggcttatatttaccgaatgaacacccgactgaatagaaccgccgagaacctctggcgtattttacaggaacatatgccagacgatttaatccagcagatatcaatggaagagccagcacgccgcaattga

SEQ ID NO: 463546 - DNA, 246 bp, Shigella boydii
atgagcgtatccggctttatgggatatctgaaagggaaaagcagtctgatgctttacgagcagtttggtgatttgaaattcaaatacaggaacagggagttctggtgcaggggggactacgtcgatacagtgggtaagaacacggcgaagatacaggattacataaagcaccagcttgaagaggataaaatgggagagcagttatcgattccctgtccgggcagcccgtttacggaccgtaagtaa

SEQ ID NO: 463547 - DNA, 267 bp, Shigella boydii; identical to SEQ ID NO: 463503

SEQ ID NO: 463548 - DNA, 549 bp, Shigella boydii
atgaagcatgaattatcaagtatgaaggcatttgtcatactggcagagtccagttcgtttaacaatgccgctaaattactcaatattacgcaacctgcattaacgcgaagaataaaaaagatggaggaagatttacatattcaactatttgagcgtacaactcgcaaggttacgttaacaaaagcaggaaaaaggttgctcccggaggcgcgggaattaataaagaaattcgatgaaacgctttttaatattcgtgatatgaatgcttatcatcgtggtatggtgacgttagcgtgtattccgaccgcagtattttattttttaccgctggcaatcggtaaatttaatgagctgtatcccaatattaaagtgcggattctggaacaaggcacgaataattgcatggaatcggtgctgtgtaacgaatcagactttggcataaacatgaacaacgtcacaaattcatccattgattttaccccactggtcaacgagccgttcgtgctgcctgtcggcgtgaccatccattggccaaaaagcagcttgtag

SEQ ID NO: 463549 - DNA, 342 bp, Shigella boydii; identical to SEQ ID NO: 460954

SEQ ID NO: 463550 - DNA, 585 bp, Shigella boydii; identical to SEQ ID NO: 5290

SEQ ID NO: 463551 - DNA, 1416 bp, Shigella boydii
gtggcgcttgaggatgcgagcacgacgaaaaaggggatagtacagctcagcagtgcgactaacagcacttccgagtcactggcggcaacgccaaaagccgttaaggccgcgtatgagctggctaacgggaaatacaccgcacaggatgcaacgacagcacagaaagggatagttcagcttagcaacgcgaccaacagcacatctgaaatgctggcggcaacgccaaagtcggtaaaggcagcctatgaccttgctaacgggaaatatactgctcaggacgctacgacagcacaaaaaggaattgtccagctcagtagtgcaaccaacagcacatctgaaatgctggcggcaacgccaaagtcggtaaaggcagcctatgaccttgctaacgggaaatatactgctcaggacgctacgacagcacaaaaaggaattgtccagctcagtagtgcaaccaacagcgcatctgaaacgcttgccgcgacaccgaaagcagtgaaagcagctaatgataatgcgaatggtcgggtaccttctgcccgtaaggtgaatggtaaggcgctttcagcggatataacactgacgccgaaagatattggtacgcttaactcaacaacaatgtcattcagcggtggtgctggttggttcaaattagcaacggtaaccatgccacaggcgagttctgttgtttcaattacgttgattggtggtgcgggatttaacgtggggtcacctcaacaggcaggtatatctgaacttgttttgcgtgcaggtaatggtaatccgaaggggattactggtgctttatggcagcgcacatcgacagggtttacaaattttgcctgggtcaatacatctggtgatacttacgatatttacgttgcaatcggaaattatgcgactggtgtaaatattcaatgggattataccagtaatgccagcgtgacgattcatacgtcaccagcatattctgctaataagccggaagggttaacggacggtacagtttattcactctatacgccatcagagcagttttatccgcctggcgcaccaatcccgtggccatcagataccgttccgtctggctatgccctgatgcaggggcagacttttgacaaatctgcatacccgaaacttgcagccgcttatccgtcaggcgtgatccctgatatgcgtggctggacgattaagggcaaacccgccagtggtcgtgccgtattgtctcaggaacaggacggcattaaatcgcacacccacagcgccagcgcatccagtacggatttggggacgaaaaacacatcgtcgtttgattacggaaccaaatccacgaataacaccggggcgcatacgcacagtctgagtggctctacggggtctgccggtgatcatactcatggtaatggtattcgttga

SEQ ID NO: 463552 - DNA, 738 bp, Shigella boydii
gtggcgctgccctttgctgctgacgcctgtctggtcgcctcatcttttgaagcagacgcagatgatgccgatgacgccgccgaactggcggacgatgcggcagccgtttttgaggattctgcgctggtttccgacgctttcgcgttcgtctcggatgtcttcgctgcggaagcagacctcgctgctgcgctggcctgtacagcggcttcgccagccttcgttgtggctgttgaagcagacgatgcagcactttctgccgattttccggcggcggtggcactggctgaggcctgcccggcacttgttgacgcggcactggcagataatgcagccgctgtttttgagtctgccgcagctgaggcgctctgtcccgctgccgtttcagaagacctggcgttcgtctcggacgtttttgccgccttcgcagaatttgctgccgccgttgccgaggaagctgcgctgctggcgctcgaggctgcgttcgtttctgatgattttgccgcctcttttgaagccgacgcatcccgtgctgaagtggctgcttctgacgctttcgtggtcgcggtggatgcagaagtggctgctgattgttgtgacgctgccgcattcgtttctgacgttttcgcggcactggcactggtagctgccgcgctttttgaggactctgcagcagcagcacttttcgatgcttcactggcctttgttgatgccgctcctgcgctggaagacgctgactga

SEQ ID NO: 463553 - DNA, 267 bp, Shigella boydii; identical to SEQ ID NO: 462029

SEQ ID NO: 463554 - DNA, 210 bp, Shigella boydii; identical to SEQ ID NO: 9340

SEQ ID NO: 463555 - DNA, 267 bp, Shigella boydii; identical to SEQ ID NO: 463503

SEQ ID NO: 463556 - DNA, 486 bp, Shigella boydii
atggtgtcgcactggttcagtgccagtcagtggcagttgccgaatgaaagcgattatctgaaattacaggcgctgtttgcccgggtggcagaagagaagcatcggcgtggtgaactggaaaagctccaccaccagctggtggatacgtatacctcactgaaccggcagtatgcggagctgctgagtgaatataaacatctgcggcggtattttggcgtgacggtgcaggtgccgtataccgatgtgtggacgcataaaccggtgcagttctatcccgggaaacatccgtgcgaaaaaacggcagaaatgctgcagcagataatcagcgctagcagtcgtccgggtgacctgattgcagattttttcatggggtcgggttcgacagtgaaagcggcactggcgctcgggcgtcgtgcaattggcgttgagctggagactgaacgttttgagcagacggttcgggaagtacaggatttaatcgtttga

SEQ ID NO: 463557 - DNA, 447 bp, Shigella boydii
gtggcgttcattattgatgtgtttgccggatacatcgtggggtggcgggtctcatcgtccatggaaacgacattcgtgctggatgctctggagcaggcgttatgggcccgtcgaccgtccggcacggtccatcacagtgataaaggttctcagtatgtatcgctggcctacacacagcggcttaaggaagccggattactggcatcaacaggaagtacaggcgactcgtatgacaacgcgatggcggagagcatcaatggtctttacaaagcggaggtaatacaccgtaagagctggaaaaaccgtgcagaagtggaactggccacactcacgtgggtggactggtataataatcgacgattgctggaaaggctgggccatactcctccggcagaagcagaaaaagcttattatgcttctatcggaaacgatgatctggcagcctga

SEQ ID NO: 463558 - DNA, 369 bp, Shigella boydii
gtggaacgccgcttcggcaacgatcttccgtcgtctccagtggagtggctgacggataatggttcatgctaccgggctaatgaagcacgccagttcgcccggatgttgggacttgaaccgaagaacacggcggtgcggagtccggagagtaacggaatagcagagagcttcgtgaaaacgataaagcgtgactacatcagtatcatgcccaaaccagacgggttaacggcagcaaagaaccttgcagaggcgttcgaacattataacgaatggcatccgcatagtgcgctgggttatcgctcgccacgggaatatctgcggcagcgggcttgtaatgggttaagtgataacagatgtctggaaatatag

SEQ ID NO: 463559 - DNA, 1455 bp, Shigella boydii
atgaaaatacctgaagcagtaaatcatattaatgttcagaataatattgatcttgttgatggaaaaacgaatccgaataaagcaacaaaagcattacaaaaaaatatattacgcgtaacaaactcatcttcttctggcataagtgaaaaacatttagatcactgtgctaatactgtgaaaaactttttaaggaagtctatagcagcgcaaagttatagcaaaatgttttctcaagggaccagtttcaaatcactaaatctttctattgaagcgccatctggagcacggtcatcatttcggtcacttgagcatctcgataaggtgtccaggcactatatctctgagataatacaaaaagttcatcctctttcttcagacgaacgtcacttactttctattattattaattctaattttaacttcagacatcaaagtaactctaatctgtcaaataatattcttaatattaaatcctttgataaaattcagtctgaaaatatacaaacacataagaatacatactctgaggatattaaagaaatctctaaccacgattttgttttttttggggttgaaatttccaatcatcaagaaaaactcccgctaaataaaacacatcatactgtagattttggcgccaatgcgtatatcattgatcatgactctccatatggatatatgacattaaccgatcactttgataatgctattccacctgttttttaccatgagcaccaatcatttttcttagataactttaaagaggttgtggatgaagttagcaggtatgtgcatggtaatcaggggaaaactgatgttccaatatttaacactaaagatatgaggcttggaattgggttgcatcttattgattttataagaaagagtaaagatcaaggattcagagagttttgttataacaaaaatattgatcctgttagtctggatagaattataaactttgtgtttcagcttgagtatcatataccaagaatgctaagtacagataacttcaaaaaaataaaactcagagacatatctttggaggatgcgattaaagcatctaattatgaagagattaacaataaagtgactgataaaaaaatggctcatcaggcccttgcttattctttaggcaataaaaaagctgatatagcactttatttactatctaaatttaattttacaaaacaagatgtcgcagagatggagaaaatgaacaacaatagatattgtaatctgtatgatgttgaatacttacttagtaaagatggtgccaactataaagtgctagaatattttatcaataatggattggttgatgtaaacaaaaaatttcaaaaagcaaatagtggggacactatgcttgacaatgcaatgaaaagcaaaaatccaaaaatgattgattttttattaaaaaatggagcaatattaggcaaacgatttgagatatga

SEQ ID NO: 463560 - DNA, 354 bp, Shigella boydii
atgccactgctggataagctgcgtaagctgtacggggtcggaccggtatgcagtgaactacatattgccccgtcaacgtattaccactgtcagcaacagcgacatcatcctgataaacgcagtgcccgtgcgcagcgcgatgactggctgaagaaagagatactgcgcgtatacgatgggaatcatcaggtatacggtgtaaagtctggcgtcagttgttacgggaaggtatcagagtggccagatgcactgtggcacgtctcatggcggttatgggacttgccggtgttctccggggtaaaaaggtccacactaccgtcagccggaaagccgttgccgcaggcgaccgcgtaa

SEQ ID NO: 463561 - DNA, 342 bp, Shigella boydii; identical to SEQ ID NO: 460954

SEQ ID NO: 463562 - DNA, 1503 bp, Shigella boydii
atggaaaataaattacatgatgctgaattttttacaactattactaataatatgacatcaattcttcgcagtgagtttgatgaaatatggaaagagatgctgaccttgcaattccatgacatccttcccggatcatgtatttcaagagtttatcttgaaactgaaaaggaatatattaaactagaagcaaaaaccgagaaaattatttctgatacgcagtctactttattaagtaaaattgatacttcttcttataaagatccgcacattttatttaataccacctgttttgctcgtaacgaatggatcaatataaacaacaactggctcaaagcacgagtaaactcttatggttatgctgtgattgatccaaagaataagatcgtaaatggtctgaaggcagaatctcgaagtattgaaaataattacattaaacttcttttttcagaaaacggtgatttaatttcgctatatgataaaagatatggtaaagaatacattactgaaaatatgcacagtgagatccgtgcataccacgaagatgcaggttttttcgcggcctgggattttgcttcaaattatcgtgatggggaatcatatgttttactcgctgaaaaaatgacaactgtaatcagcgggcctaaaactacgatgacgctgatttatcactacaattcctcttatcttcgcttcgcatttaccctgacacaggacagtccacgcgttgatgtccaaacttttattgattggcacgaacctaatgtttctctcaaagtcaaattcccggtgtcagtacaaacatctcttgcacaatgtcaaattcagttcggtgtaattgacagaccaacgcatagcgatgattcgttcgcttttgccaaagatgaaataccagcacatcactgggtcgacctttctgatcgagaaactggcatagctttaatagcaaaaaacaaatatggctatcgtgtcaaagaccagacgcttgacttaactttgctgcgttcgcagcataaacctggggaaattgttaagacagacaattatgataatttcctgattaataattttgcagatattggtaaacaaaaattcatattctccttatttcctcatcatggagattaccgtgtgggtggtgttattaatcaagcctatataatgaatcatcccttacaggtcgtccctgtcaaaccgcacccgggtgaattacccccttcactatcattttttgctatcgatactaacagcgttatcatcgaaacaataaaattagctgaagacggcgacggtataatcgtaagattatatgagagtcatggattagaaatttcagccatgctttcgtgggtatgtaattatcactacgttcaatatgtcgatcttcaagaaaataagttagatgacagtttttattgcaatcaaggtaatgactccaacttactgatagtgttttatgttcagataatgcccgatgaccttgtcatgcagctccaccgattttga

SEQ ID NO: 463563 - DNA, 252 bp, Shigella boydii; identical to SEQ ID NO: 462650

SEQ ID NO: 463564 - DNA, 864 bp, Shigella boydii; identical to SEQ ID NO: 458603

SEQ ID NO: 463565 - DNA, 480 bp, Shigella boydii
atggattcacggcctggcttaaggaccaccagcccgagttccggaaccagaacaggtcgaagtaatacccgcacattacctccagatccgttgctggaatgtgcaggacggacgcggtggccgttcggaataagggagcctgacgaagattatccagtgacgataatcgagactgagggctttcttaatctcgtatccgtgtctgcggtaacactgaatgagccattcagcctgttcttcggtgcaggggtcgtgctgataccagtcagatttgaatgcatgagaacgccgcccgtgcctgctggcaggcgcggcagagttatccgaattgtaaaatttggtatcgtgcgccatctgttttctctgctggcgcagcaggtgccagttgttcaggctgacggatggattgtaaaccagaacgaccagaaaaaacaaaacccgccgaagcgggttaagtgcgggtgcgttgaggatgcctga

SEQ ID NO: 463566 - DNA, 1497 bp, Shigella boydii; identical to SEQ ID NO: 462668

SEQ ID NO: 463567 - DNA, 318 bp, Shigella boydii
gtggcacatatccgcactcgcgaaacatatggaacccggcggctccagacggagctggtagataacggaattatcgtcggtcgtgacagactggcacgtcttcgtaaggagctgaggctgcactgtaagcagaaacgcaagttcagggcgaccacaaactctgaccacaatctgccggttacgccgaatctgctgaatcagaactttacgcccacagcacctaatcaggtctgggtcgcagattcagttgtccaggccttccgaaatcaaccgactgaaggcgctggtcgcgaaactgcagcgtatgcagttcggtaa

SEQ ID NO: 463568 - DNA, 840 bp, Shigella boydii; identical to SEQ ID NO: 462680

SEQ ID NO: 463569 - DNA, 1257 bp, Shigella boydii
ttgacggacttcgggggaaaaacgagtatttttagtcatcctgtttacctctttctcagggagtttagtctccaggattcccggggcggttcactgggacgttttggtaatgagatgagcggttggtttgacctgaccttaaatcagcgtgtttataatcaggacggtaaaacggcaaatgcggtcgttacctatgatggcaacgtgggtgagcagtataacgatgcctggtttggtgacagtgccaatgaaaatatcatgcagttcagcgatatttacctgacaacgcgaggttttttacccttcgcaccagaggcagacttctgggtcggcaaacataaactcccgcaatatgagatccagatgctggactggaaaaccttaaccacggatgtcgccgcgggtgtggggattgaaaactgggcacttggtgtagggctgtttgatatgtccttaagccgtgatgatgtcgatgtttactctcgtgatttttcgcgtaccagccagatgaataccaattctgtggatgttcgttatcgcaatatcccgttatgggatgatgcgacattatcattaatggctaaatattccgcacctaataaaacggatcaacaacaagataacgaaaatgacaacagttattttgaaatgaaagatagctggatgctgacttctgttttacggcaaaacctgcaacgcgatacgtttaatgaatttacgttacaggttgccaataattcctatgccagcagttttgccagtttctcagatgccagtaatacgatggcgcatggtcgctattactatggtgatcataccaatgggatcgcctggcgtttaatctctcagggcgagatgtatcttactgacaatattattatggctaacgcgcttgtctattctcacggcgaagatgtttatagttatgaaagtggtgctcatagtgattttgacagtattcgcactgtaataagaccggcctggatctggaatacatggaatcagacggggcttgaattaggctggtttaagcaacagaacaaaactcagcagggtgtaacactaaatgaatcggcttataaaacgacactctggcatgcattgaaagtgggtgaaagcattttaggttcacgaccagaaattcgcttctatggaacgtatatcaatattctggataacgaattatcgaattttaagtttaatgagaacagcaaagacgagtttatggccggcatccaggcggaagtctggtggtaa

SEQ ID NO: 463570 - DNA, 543 bp, Shigella boydii; identical to SEQ ID NO: 463151

SEQ ID NO: 463571 - DNA, 1107 bp, Shigella boydii
gtgaacaccgttggcaaatcggcattcgtggaggctgttggtcagccgagtgatgatgcatccggttatctggattttttcaaaggcgagatagggaaaacccatctggctcaggagctgtggacgcagattgataacggtcagcttgcgcctgacctggctgaaatcaggacgtccattaaggatgtcagcaatgaaatcacgcagaccgtcaataagaaactggaagaccagagtgcggcaattcagcagatacagaaggttcaggttgatacaaataataatctgaacagcatgtgggctgtgaagctgcaacagatgaaggacggacgcctttatattgcgggtatcggtgccggtattgagaatacgccagcaggaatgcagagtcaggtgctgctggcggcagacaggattgcgatgattaatcctgcgaatggcaacacaaagccgatgtttgttggtcagggcgatcagatattcatgaacgacgtgttcctgaaacgcctgacggctcccaccattaccagcggcggtaatcctccggcattttccctgacaccggacgggcggctgacggcgaaaaatgccgatattagcggtaacgtgaatgcgaactccgggacgctcaacaacgtcacgattaacgagaactgtcgggttctgggaaaactgtccgccaaccagattgaaggcgatctcgttaaaacagtgggcaaagctttcccccgggactcccgtgcaccggagcggtggccatcagggaccattaccgtcagggtttatgacgatcagccgtttgaccggcaaattgttattccggcggtggcattcagtggcgctaagcatgagagagagcatactgatatttactcctcatgccgtctgatagtgcggaaaaacggtgctgaaatttataaccgtaccgcgctggataatacgctgatttacagtggcgttattgatatgcctgccggtcacggtcacatgacactggagttttcggtgtcagcatggctggtaaataactggtatcccacagcaagtatcagcgatttgctggttgtggtgatgaagaaagccactacaggcatcacgattagctga

SEQ ID NO: 463572 - DNA, 381 bp, Shigella boydii; identical to SEQ ID NO: 461669

SEQ ID NO: 463573 - DNA, 231 bp, Shigella boydii
atgcgacatggatatttcacccgtccgcaaattaatggtgaacgggcgcaggggaccaatatcgccattttccccctgaccttcactggtgggaataaggtgcaggcactcttccgaacgacgaaaaatcaggccaaaagcttcgttgaaaatcctcagcgcattaacaccacggattttcagctctccggttattttatcgccttcccgatgaacatagcgttgatctga

SEQ ID NO: 463574 - DNA, 345 bp, Shigella boydii
atgtgcggcagaggcgaaggcgcggcaggcgacctcggtgaggtgtctggctgcggtcctgacaccgactccgggcatactggtcaggaccgggtaaagagggtgagcaagaactcgctgttctacctcaagcgccacctcgtctctttgcttacgcagcgtgatgagctggagtgccagacgtggcagtactacggcagcggcattcgtgccgggaacgacgacggtttgttcggccagtgcctgagctatgtctgctgcaaggcgtttacccagacgaggcgcaagtttgcagagctgggctgccagcttcttctcacccagcgaagcgagtttttctggtga

SEQ ID NO: 463575 - DNA, 513 bp, Shigella boydii
atgcaaaacagaaaatggattttgtcctcgctggtaatgacttttttcggcatccccatactgacgcaatttttggcggcggttgttgctatgctgggtgtcggacttgccggtattattgaagtttgtaatatccttatcacgccaacaagttaccttctgctcaacatttttatgctggcgctgggcgcattaatgctatttttctcggggcgagtatgggcaggcgatagtgcaccagaaaaaagagaaatagccgtctggcgacaatgtctttttttagtacccggtttattaatcctggttggctggataatcgcgctgcatctggcagattatcaatttcaccagatgggatcgggttggttggctgatcttatgctcccctggctgggcgttttgttagtctcagtagtcggaggtgagtactggtggatagtcattatacccgttggcgcgcatatcagtttttcgctggggtacggccggccggtaatgactccaacttactga

SEQ ID NO: 463576 - DNA, 594 bp, Shigella boydii; identical to SEQ ID NO: 463274

SEQ ID NO: 463577 - DNA, 210 bp, Shigella boydii; identical to SEQ ID NO: 9340

SEQ ID NO: 463578 - DNA, 342 bp, Shigella boydii; identical to SEQ ID NO: 463534

SEQ ID NO: 463579 - DNA, 705 bp, Shigella boydii
atgccattctatttcaggaaggagtgtccgttaaactcaggctacctcaatgtgttgcgtcatatcaatcatccgttcgcattgacactgcttatacgtgtagccgggcaaactaaacgctgtcacgatcggatgacgaaagccattgctgcgttcccacatgcagcaatggcggcactgacggaacttcttgggcaaaaagaagagaacagttggcgcattatgctaatgacaatgcttatctcacaaccagcactggcagaacaggtccttccctggctctcgacacccgcagttgccgtactgaaatcataccagcaacaactgacacagccctcaaaccatgcctgcgccgatctactgcctgccgtattagtctcaccgccctggctttcgaaaaagaaaaaatctgtaatgccggtattggatttaacgccattaccgttggagtcatgctgtacattgactgagacggcagaaaaagagattcatacaaggcatcgctggcacgcacatcaaatagacatcggccaaaaagaggatattcagaactacctggcacgtctgggtttcaatcgctggaataatggccagtatatgaaagcgtctgatgctgttgtagaactctggctgaagtggtcaacaaaaactggccaccgagttagagtttttccagtatcgattttccgattcgtttgggggtaa

SEQ ID NO: 463580 - DNA, 528 bp, Shigella boydii
atgaatcaaaaatacctcattcgcattgcagaactggaatgccagctccgtcagaaagaccagcaactgagtctggttgaagagacggaggccttcctgcgctctgcactggcccgcgccgaagaaaagatcgaagaagatgaacgggaaatagaacatctgcgggctcagatagaaaaactgcgccggatgctgttcggtacccgttctgaaaaactgcgtcgtgaagttgaacaggctgaggccctgctgaaacaacgcgaacaggacagtgatcgttacagtgggcgggaagacgatccgcaggttccccgccagttgcgacagtctcgtcatcgtcgcccgttaccggagcatctgccccgcgaaataaatcgcctggagccagaagaaagctgttgcccggagtgtggcggtgagctggattatctgggggaagtcagcgcagaacaactggaactggtgagcagcgctctgaaagtgatccgcacagaacgggtaaaaaaagcctgtacaaaatgtgactga

SEQ ID NO: 463581 - DNA, 195 bp, Shigella boydii
atgattaaaatcctgtgggctgatgctgatggtctgtgcctgttcaccagacgcctggaggaaggccagtttatctggcctgctgtgcgtgacggcaaggtatccattacccgctcgcaactggcaatgctcctcgataagctggactggcgtcagccaaaaacatcccgccttaatgcactgacaatgttgtaa

SEQ ID NO: 463582 - DNA, 189 bp, Shigella boydii
atggaaagcttctggggaacgctgaaaaatgagagcctgagccactatcgttttaataaccgggatgaagccatctcagtaatacgggaatacattgagattttctacaatcgtcagcgtcgtcactctcgtctggggaatatctccccggcagccttcagggaaaaatatcatcagatggctgattaa

SEQ ID NO: 463583 - DNA, 342 bp, Shigella boydii
atggcgctcaggagccagcgcccacctgccgggctaatccaccactctgatcgaggttcacagtactgcgcatacgattaccgggtcatacaggagcagtctggtctgaaaacatcaatgtcgcgtaaaggtcactgttacgacaacgctccgatggaaagcttctggggaacgctgaaaaatgagagcctgagccactatcgttttaataaccgggatgaagccatctcagtaataagggaatacattgagattttctacaatcgtcagcgtcgtcactctcgtctggggaatatctccccggcagccttcagggaaaaatatcatcagatggctgcttaa

SEQ ID NO: 463584 - DNA, 189 bp, Shigella boydii; identical to SEQ ID NO: 463227

SEQ ID NO: 463585 - DNA, 279 bp, Shigella boydii
atgcttccatcggaaacgatgatctggcagcctgagttcacagataaaacactctccaggaaacccggggcggttcactggttcttcggtattcatggcgcgctggcgctgaccgcactggacaacggcattatgacgctgtgggcgctggaaaatatcgcgacctatcagcaatatggttccgtcgaagcggcgctggcagccggtaagaccttccatatctgggccaagccgatgctggactcctttattttccttggggcagtggtgcgactttag

SEQ ID NO: 463586 - DNA, 375 bp, Shigella boydii
gtggcaaaactggcgctgccgtccggcatcttccagattaacgaaccgattctgtttggtctgccaattatcatgaacccggtgatgtttatcccgtttgtactggtacaaccgattctggcggcaatcaccctcgcagcgtactacatgggcattattcctccggtgaccaatattgcaccgtggaccatgccaaccggtctgggagccttctttaacaccaacggtagcgtcgctgcattgctggtcgcactcttcaaccttggtatcgcaacgttaatttatctgccctttgttgtggtggctaacaaagcgcaaaacgcgattgataaagaagagagcgaagaagatatcgctaacgccctgaaattttaa

SEQ ID NO: 463587 - DNA, 135 bp, Shigella boydii
atgcataatgtaagcaccacaaccactggtttgcctcttgccaaaatattggcttccactgagcttggagacaatactatccaggcagtaattttatttgttaatgcagttaaagatttttcaccaagtatttga

SEQ ID NO: 463588 - DNA, 546 bp, Shigella boydii
atgttgcatttaaaaaatattacggcaggtaatccgaaaaccgcggaacaatatcagctgacaaaacagtatgatgtcacctggcttttttcggaagacggcaaaaactggtatgaagaacagaagaactttgccagtgacaccataaaaatggtttacaccggagacgggcgcgtggtgtgggtcggtaaggatgtgacaggcattgaaccccgtaacgccagtgttattgaagttcctgatattaccgccaaccgccgcattaccgcgccgggttactggttttaccgcaatgatgaatttgtctttgactacagactcaaagcggaagatgagcgtgatgcccttctggctcaggtcagtgcccggacaggggaatgggaagaagacctgctgctggggctaatcagcgacgaagaccgggaaaaactgaaagcgtaccgcatttacgcgaaatcgctgcaggcgatggatttcagtgtcatcactgataaaacctcatacaacgccattgaatggcccgcctctccggaaatttcttcctga

SEQ ID NO: 463589 - DNA, 996 bp, Shigella boydii; identical to SEQ ID NO: 463286

SEQ ID NO: 463590 - DNA, 330 bp, Shigella boydii; identical to SEQ ID NO: 462727

SEQ ID NO: 463591 - DNA, 249 bp, Shigella boydii
atggaggccgaactgcgccagaataacaccccacctgctgacaagatgattccgggtgatggtcgcactctggttgttcacttcgacaaattcggcaatgtcgaattcaccgaaaccgttcctgatggcgcactggtctgtaccctggagactttccggttttatctggaaaaacagggatggactcttgttaaccggggcgcaattaaaaatatgactgtggaacaattactcaaaattcattgttga

SEQ ID NO: 463592 - DNA, 225 bp, Shigella boydii
atgtcgcgtaaaggtcactgttacgacaacgctccgatggaaagcttctggggaacgctgaaaaatgagagcctgagccactatcgttttaataaccgggatgaagccatctcagtaatacgggaatacattgagattttctacaatcgtcagcgtcgtcactctcgtctggggaatatctccccggcagccttcagggaaaaatatcatcagatggctgattaa

SEQ ID NO: 463593 - DNA, 243 bp, Shigella boydii
atgtcgcgtaaaggtaactgttacgacaacgctccgatggaaagcttctggggaacgctgaaaaatgagagcctgagccactatcgttttaataaccgggatgaagccatctcagtaatacgggaatacattgagattttctacaatcgtcagcgtcgtcacactcgtctggggaatatctccccggcagccttcagggaaaaatatcatcagatgactgctcaaaaaaagaacaaatggtag

SEQ ID NO: 463594 - DNA, 168 bp, Shigella boydii; identical to SEQ ID NO: 463300

SEQ ID NO: 463595 - DNA, 210 bp, Shigella boydii
atgacagatggctggccgctgtatgaatcacgcctgaagggaaagctgcacgttatcagcaagcgttacactcagcgcattgagcgacataatctgaatctgagacaacatctggcaaggctgggacggaagtcactgtcgttctcaaaatcggtggagctgcatgacaaggtcatcgggcattatctgaacataaaacactatcagtaa

SEQ ID NO: 463596 - DNA, 210 bp, Shigella boydii; identical to SEQ ID NO: 9340

SEQ ID NO: 463597 - DNA, 423 bp, Shigella boydii
gtgactaccggcggcttcaacagtgaaacagtactggacgtcatgctgggtgcggtggaacgccgcttcggcaacgatcttccgtcgtctccagtggagtggctgacggataatggttcatgctaccgggctaatgaaacacgccagttcgcccggatgttgggacttgaaccgaagaacacggcggtgcggagtccggagagtaacggaatagcagagagcttcgtgaaaacgataaagcgtgactacatcagtatcatgcccaaaccagacgggttaacggcagcaaagaaccttgcagaggcgttcgagcattataacgaatggcatccgcatagtgcgctgggttatcgctcgccacgggaatatctgcggcagcgggcttgtaatgggttaagtgataacagatgcctggaaatatag

SEQ ID NO: 463598 - DNA, 612 bp, Shigella boydii
atgggaggggatgtttctctcaccttgtacaatggaataaacaaaaatgatttttttgttaacattccatggaatgaaagggatagagcttcatttttatttctatatcatcctagtgaaagaaagggttgtgatctcttattaagagcaatacaaaaaattcacgaagttgatagctcaattaaattcagttgctttagtgcttatacaaaaccagaaaatttcccttcgtttattcattacgtatatcaacccacagttaaacagctaaataatttatataatgagaatagatacttcatttgcagtagtatatatgaaggatttggtttgactgcagcagaggcatcttttagtggggcaatagtagttacaacgagaaatggtggcgtagaacaatttatcaaaaatgaagtgactggctttgttctcaaggaaagaacgctaaattccttcatggttgctattatgaagctttcacaaaaggatgaagaactaaatctttttgctattgaaagtagtaaaaaagtcagaatacaactagatctcgatataaatttcaagaaaattgatagttactttaaggctagatataataacaagaggaattaa

SEQ ID NO: 463599 - DNA, 237 bp, Shigella boydii; identical to SEQ ID NO: 460237

SEQ ID NO: 463600 - DNA, 267 bp, Shigella boydii; identical to SEQ ID NO: 463267

SEQ ID NO: 463601 - DNA, 528 bp, Shigella boydii; identical to SEQ ID NO: 463580

SEQ ID NO: 463602 - DNA, 360 bp, Shigella boydii
atggcgctcaggagccagcgcccacttgccgggctaatccaccactctgatcgaggttcacagtactgcgcatacgattaccgggtcatacaggagcagtctggtctgaaaacatcaatgtcgcgtaaaggtcactgttacgacaacgctccgatggaaagcttctggggaacgctgaaaaatgagagcctgagccactatcgttttaataaccgggatgaagccatctcagtaatacgggaatacattgagattttctacaatcgtcagcgtcgtcactctcgtctggggaatatctccccggcagccttcagggaaaaatatcatcagatggctgctcaaaaaaagaacaaatggtag

SEQ ID NO: 463603 - DNA, 375 bp, Shigella boydii; identical to SEQ ID NO: 461626

SEQ ID NO: 463604 - DNA, 180 bp, Shigella boydii; identical to SEQ ID NO: 461173

SEQ ID NO: 463605 - DNA, 381 bp, Shigella boydii
atgctgggagcggtggaacgccgcttcggcaacgatcttccgtcgtctccagtggagtggctgacggataatggttcatgctaccgggctaatgaaacacgccagttcgcccggatgttgggacttgaaccgaagaacacggcggtgcggagtccggagagtaacggaatagcagagagcttcgtgaaaacgataaagcgtgactacatcagtatcatgcccaaaccagacgggttaacggcagcaaagaaccttgcagaggcgttcgagcattataacgaatggcatccgcatagtgcgctgggttatcgctcgccacgggaatatctgcggctgcgggcttgtaatgggttaagtgataacagatgtctggaaatatag

SEQ ID NO: 463606 - DNA, 366 bp, Shigella boydii; identical to SEQ ID NO: 461917

SEQ ID NO: 463607 - DNA, 180 bp, Shigella boydii; identical to SEQ ID NO: 461173

SEQ ID NO: 463608 - DNA, 210 bp, Shigella boydii; identical to SEQ ID NO: 9340

SEQ ID NO: 463609 - DNA, 291 bp, Shigella boydii; identical to SEQ ID NO: 462600

SEQ ID NO: 463610 - DNA, 273 bp, Shigella boydii; identical to SEQ ID NO: 167055

SEQ ID NO: 463611 - DNA, 555 bp, Shigella boydii; identical to SEQ ID NO: 462745

SEQ ID NO: 463612 - DNA, 342 bp, Shigella boydii; identical to SEQ ID NO: 462701

SEQ ID NO: 463613 - DNA, 384 bp, Shigella boydii
ttgctttcagaaaatttacatgatgagaggatcattagcactttattggagcagtggcttagttcgttgcgtaatacagtaacagaattaaaagtggttttgcccaagtgtaatttagcactgaggaaaaagttagaacttgatctccataaatatcgctcagatgtcaagattattttaaaatattctgaagggaataattatatattctgtagtggtaatcaagtagtggagtttagtcctcaggatgtaatatcaggtgttaaaatagaacttgcggaaaaattaacaaaaaatgataaaaaatatttcaaagagttagcacataagaaactgagacaaattgcagaagacttgttaaaagagaatcctgttaatgattaa

SEQ ID NO: 463614 - DNA, 267 bp, Shigella boydii
atgttgggacttgaaccgaagaacacggcggtgcggagtccggagagtaacggaatagcagagagcttcgtgaaaacgataaagcgtgactacatcagtatcatgcccaaaccagacgggttaacggcagcaaagaaccttgcagaggcgttcgagcattataacgaatggcatccgcatagtgcgctgggttatcgctcaccacgggaatatctgcggcagcgggcttgtaatgggttaagtgataacagatgtctggaaatatag

SEQ ID NO: 463615 - DNA, 180 bp, Shigella boydii; identical to SEQ ID NO: 461173

SEQ ID NO: 463616 - DNA, 261 bp, Shigella boydii
atgaaagcgctggaaatggcatgggaaacccgtggtaagcccggcggggtgatgttccacagcgatcagggcagtcattatacgagcaggcagttccggcagttattgtggcgataccagatcagacagagtatgagccggcgcggaaactgctgggataacagcccaatggaacgcttcttcaggagtctgaagaacgaatggatgccggtggtgggttacgtaagcttcagcgaggcggtaatgactccaacttactga

SEQ ID NO: 463617 - DNA, 285 bp, Shigella boydii; identical to SEQ ID NO: 460874

SEQ ID NO: 463618 - DNA, 216 bp, Shigella boydii; identical to SEQ ID NO: 5123

SEQ ID NO: 463619 - DNA, 351 bp, Shigella boydii; identical to SEQ ID NO: 462764

SEQ ID NO: 463620 - DNA, 342 bp, Shigella boydii; identical to SEQ ID NO: 462701

SEQ ID NO: 463621 - DNA, 321 bp, Shigella boydii; identical to SEQ ID NO: 462743

SEQ ID NO: 463622 - DNA, 327 bp, Shigella boydii
atgactaaaaatactcgtttttcccccgaagtccgtcaacgggcagtccgtatggttctggaaagtcagggcgaatatgactcacaatgggcgacaatttgttccattgctccaaagattggctgtacaccggagactctgcgtgtctgggtacgccagcatgagcgggataccgggggcggtgatggagggctcaccaccgctgaacgtcagcgtctgaaagagctggaacgtgaaaatcgtgaactgcgccgcagtaacgatatccttcgccaggcttccgcttattttgcgaaggcggagttcgaccgcctctggaaaaaatga

SEQ ID NO: 463623 - DNA, 414 bp, Shigella boydii
gtgaagctgaaaaccagcccgcaggcacgaaaaaagtggccgggactgggaaatgaagtgacagcccgcctgctgaccgtgacgcgcaaaggaaaagtctgccatctgctgacgtcgatgacggacgccatgcgcttccccggaggagaaatggcggatctgtacagtcatcgctgggaaattgaactgggatacagggagataaaacagacgatgcaactgagcaggctgacgctgagaagtaaaaagccggagcttgtggagcaagagctgtggggtgtcttactggcttataatctggtgagatatcagatgattaaaatggcggaacatctgaaaggttactggccgaatcaactgagtttctcagaatcatgcggaatggtgggtaatgctgccaacttactgatttag

SEQ ID NO: 463624 - DNA, 381 bp, Shigella boydii; identical to SEQ ID NO: 461669

SEQ ID NO: 463625 - DNA, 318 bp, Shigella boydii; identical to SEQ ID NO: 463322

SEQ ID NO: 463626 - DNA, 339 bp, Shigella boydii
atgctgttcggtacccgttctgaaaaactgcgtcgtgaagttgaacaggctgaggccctgctgaaacaacgcgaacaggacagtgatcgttacagtgggcgggaagacgatccgcaggttccccgccagttgcgacagtctcgtcatcgtcgcccgttaccggagcatctgccccgcgaaataaatcgcctggagccagaagaaagctgttgcccggagtgtggcggtgagctggattatctgggggaagtcagcgcagaacaactggaactggtgagcagcgctctgaaagtgatccgcacagaacgggtaaaaaaagcctgtacaaaatgtgactga

SEQ ID NO: 463627 - DNA, 267 bp, Shigella boydii
atggtgaggtacttcgggttccttgccaaccgggtgtgtggagagaagctgccgcaggtgtaccgtgctctggggatggataaaccggaaccagtggcgaaagtgtgctatgcacaaatggtgaaacagttcctgagtcgtgacccgttcgaatgcgtgctgtgtggcggccggatggtataccgccgggccatcgcgggactgaatgtggaggggctgaagaaaaacgcgcgggatatcagtctgctgaggtatatgccggcctga

SEQ ID NO: 463628 - DNA, 297 bp, Shigella boydii; identical to SEQ ID NO: 463283

SEQ ID NO: 463629 - DNA, 333 bp, Shigella boydii
atgtgtctggcgggggaaggctgcatcgttctctggtgtatccggtgtgcgccagaacacaccatcgatagccagcagggtcaggccgcaccagtgcggatgcggcgtggcgttatgccagagctgcgctgttttcgtgaacacgcggcggacagcctcacttcccaggcgctggcgggcctgaataacggcactgggggcaacgaaggggcgattgcccggcagcatgatgtccaggcgattcacaatctggtgaagaggttctttacgctcaagcgccatgccaacaatacaccagaccatcatttcgaggggaagacggcgcttgcgtag

SEQ ID NO: 463630 - DNA, 264 bp, Shigella boydii
atgctgggagcggtggaacgccgcttcggcaacgatcttccgtcgtctccagtggagtggctgacggataatggttcatgctaccgggctaatgaaacacgccagttcgcccggatgttgggacttgaaccgaagaacacggcggtgcggagtccggagagtaacggaatagcagagagcttcgtgaaaacgataaagcgtgactacatcagtatcatgggtaagcgtcaacggagcaccgtattgacgcttatttattggtga

SEQ ID NO: 463631 - DNA, 237 bp, Shigella boydii
atgattcgacatggtagtaataagttgaaaatatttattttaagtatattgctattaacactgagtgggtgtgctttaaagtcatcatctaattctgaaaaagaatggcatattgttcctgtaagtaaggattatttttctattccaaatgattgcgaagatgataatctctcatttaaattaacaaattcttcactatttaatctttgctgcagagcattgcttgcatttatttga

SEQ ID NO: 463632 - DNA, 1014 bp, Shigella boydii
atggcaatcaaaaaactcgatgatggtcgatatgaagtggacatccgccctactggacgtaacggaaaacgcatccgtaggaagtttgataagaaaagcgaagctgtcgctttcgaaaaatacacgttgtacaaccaccacaataaagaatggctatcaaaaccaacagacaaacgacgtctgtcggaactgacacagatctggtgggatttaaagggtaaacacgaagagcatgggaaatctaatcttggaaaaattgaaatcttcacaaaaataacgaatgacccatgcgcatttcaaatcacgaaatcccttatcagccagtactgcgccacccgaagaagtcagggtattaaaccttcgagtatcaatcgtgatttaacatgtattagcggcatgtttacagccctgattgaagcggagttattctttggtgagcaccctatcagagggacaaagaggcttaaggaggaaaaaccagaaacaggctatctcacacaggaagaaattgccttactgcttgcagcacttgacggcgacaataaaaagattgcgattctttgcctgagtacaggagcacgttggggagaagcagctcgtttgaaagcagaaaatatcatccataaccgcgtcacgtttgttaaaacgaaaacaaacaaaccacgcaccgtcccgatctcagaggctgttgccaaaatgatcgcggataacaaacgaggttttttattccctgatgctgattaccctcgcttcagacgaacaatgaaagcaataaaaccggatttgccaacggggcaagccacacatgcactaaggcacagctttgccactcatttcatgattaatggaggaagtattatcacgctacaacggatactaggtcacacgcggattgagcaaactatggtttacgctcattttgcgccagagtaccttcaggacgccatttctcttaatccgctaagaggtggtactgaggccgagagtgtccacacagtgtccacagtagagtaa

SEQ ID NO: 463633 - DNA, 300 bp, Shigella boydii
atgtcaaacacgataagcgagaagatagtcttaatgcgaaaatctgagtatttgagcagacaacaacttgctgatttaacaggggttccgtatggcacgctgagttactatgaaagtggtcgttcaacacctccaacagatgtcatgatgaacatcctgcagaccccacaattcaccaaatacactttatggttcatgacaaatcagatcgctcctgagtccgggcaaattgcgcccgctctcgcacactttgggcaaaacgaaacaacgtcgccccactccggtcaaaagactggttaa

SEQ ID NO: 463634 - DNA, 276 bp, Shigella boydii; identical to SEQ ID NO: 12778

SEQ ID NO: 463635 - DNA, 171 bp, Shigella boydii
atgaatgagcctcgttgtattgctcagttactgcgtaacgaaagccccagggcgattgacttcaccattacccacggtaagggacgcaagggaatcattatccgcaccaaaaaacagagtccgttaaagaaggctctgacctttctgaaaagtcggagggtctggaaatga

SEQ ID NO: 463636 - DNA, 501 bp, Shigella boydii
atgacagtgatgacgctcaatcttgttgaaaaacagccagcagctatgcgccggataattggtaagcatctggccgtccctcgctggcaggagacatgcgattattataatcagatgatggaacgtgaacggctaacggtttgcttccatgcgcagttaaaacagcgtcacgcaacgatgcgttttgaagaaatgaatgatgtcgaacgtgaacgactggtatgtgcaattgatgaattgcgtggggcattctcaaaacgccgtcaggttggcgcaagtgagtatgcatatattagttttttaacagtcagtcagcgtcgtactttatttatgcatgccggattgactgaaaaagaattcaaccagccatactggcgaattaatgaagagtcatgttactggcgtgatgctttattccgtgcattacgtgaattattcagcctgtttgagtatgcaccgacaattctgacgtcggtaaaaccagagcaatatctgcattaa

SEQ ID NO: 463637 - DNA, 225 bp, Shigella boydii
atgcatacagtttctgaaaatcagtgcggtaaatacgcattactgctgcaacaggccagaaccgaagcacaggccgacgctgcgacgcgcttttcttctcatcttgatgccatgattcgccacatcacaaaggcggagttatcccgcgtggagatagtcgagctgctcagtcaggagtcggaaaaatttcacaatatcggattgtctcgcggggaggtgctttga

SEQ ID NO: 463638 - DNA, 303 bp, Shigella boydii
atgtcctgttctcgttcagttgtattactgaataacgccttaaaaatcgccgttatgaaaaatggcgatttgtctcttattcaacttggtcttgataaagaaaaacgcgaaataactgagtctgttatcgcgatttatcagaacgaattaaacctcctgtctgatgtggtcaatttacttgttaaacgcgctgtattccacaagcaaatttcctcagtggatgaactgacaaaattaacgacagaacttgccagctattgcgctgatgaatttaaaaaactgaacgacaaaaggaactggtaa

SEQ ID NO: 463639 - DNA, 225 bp, Shigella boydii
atgccggacaacgtagattttattcaggaacaacagactgaattactggagcgccagattaacgcggcaagggtaaaacattgcggtgtttcttcgctggtttgcgaagagtgtgacgcgccaatacctgctgcccgtcgtgcggcttatccgtcagccacgcgttgtgtttcctgtcagtcagtctttgaagcaaaaaacaaacattaccggagaatggcatga

SEQ ID NO: 463640 - DNA, 276 bp, Shigella boydii
atgagcattcgtattgaaattggcgaacgttatgtcgttaccagtgacagctttcagtttattctccacgagaaaaagagagcggaaagcggtaaaaacgccggtcaggaatggctggcggtggttggttattacccgaaattaagccagctcgtttccggcctgatgcatcacgatattctgaccggaagcgcaaagtcttttgctgatttaaacgcgcaggttgagcaactcagcaggcgttgttcagaggcttttggctcatatggccgttaa

SEQ ID NO: 463641 - DNA, 2172 bp, Shigella boydii
atggccgttaaagcctccgggcgttttgtccctccgtcagcatttgccgcaggcaccggtaagacgtttaccggtgcttatgcatggaacgcgccacgcgaggctgtcgggcgcgaaagaccccttacacgtgacgagatgcgtcaggtgcaaggtgttttatccacgattaaccgcctgccttactttttgcgctcgctgtttacttcacgttatgactacatccggcgcaataaaagcccggtgcacgggttttatttcctcacatccacttttcagcgtcgtttatggccgcgcattgagcgtgtgaatcagcgccatgaaatgaacaccgacgcgtcgttgctgtttctggcagagcgtgaccactatgcgcgcctgccgggaatgaatgacaaggagctgaaaaagtttgctgcccgtatctcatcgcagcttttcatgatgtatgaggaactctgcgatgcctgggttgatgcacatggcgaaaaagaatcgctgtttacggatgaggcgcaggctcacctttatggtcatgttgctggcgctgcacgtgctttcaatatttccccgctctactggaaaaaataccgtaaaggacagatgaccacgaggcaggcatattctgccattgcccgcctgtttaacgatgagtggtggactcatcagcttaaaggccagcgtatgcgctggcatgaggcgttactgatagctgtcggggaggtcaataaagaccgttctccttatgccagtaaacatgccattcgtgatgtgcgtgcgcgccgccaggcaaatctggaatttcttaaatcatgtgaccttgaaaacagggaaaccggcgagcgcatcgaccttatcagtaaggtgatgggcagtatttctaatcctgaaattcgccggatggagctgatgaacaccattgccggtattgagcgttacgccgcagcagagggtgatgtggggatgtttatcacgctgaccgcgccgtcaaagtatcacccgacacgtcaggtcagaaaaggcgaaagtaaaaccgtccagctaaatcacggctggaacgatgaggcatttaatccaaaggatgcgcagcgttatctctgccgtatctggagcctgatgcgcacggcattcaaggataatgatttacaggtctacggtttgcgtgtcgtcgagccacaccacgacggaacgccgcactggcatatgatgcttttttgtaatccgcgccagcgtaaccagattatcgaaatcatgcgtcgctatgcgctcaaagaggatggcgacgaaagaggagctgcgcgaaaccgttttcaggcgaaacaccttaaccggggcggtgctgcggggtatatcgcgaaatacatctcaaaaaatatcgacggctatgcactggatggtcagctcgataacgataccggtaagccgcttaaagatactgccgcggctgttaccgcatgggcgtcaacgtggcgcatcccacaatttaaaacggttggtctgccgacaatgggggcttaccgtgaactacgcaaattgccgcgcggcgtcagcattgctgatgagtttgacgagcgcgtcgaggctgctcgcgccgccgcagacagtggtgattttgcgttgtatatcagcgcgcagggtggggcaaatgtcccgcgcgattgtcagactgtcagggtcgcccgtagcccgtcggatgaagttaacgagtacgaggaagaagtcgagagagtggtcggcatttacgcgccgcatctcggcgcgcgtcatattcatatcaccagaacgacggactggcgcattgtgccgaaagtgccggtcgttgagcctttgactttaaaaagcggcatcgccgcgcctcggagtcctgtcaataactgtggaaagttcaccggcggtgacgttccggttatgcaccctacaccgtctgagcatgccgcagcggtgttaaatctggttgatagtggtgttatcggatgggatgacccggaagttgtgacggtgctcaggagtgcattaaaacatggtgcaccgagaccgaattggcaacaaagaaactgcgaaccattaaaaccgtaccagatagcgccatcagggcggatgacaaaggctgaacgttcgcagattccacgcatccatttcgagctggcactaattggtaaaacctatcaatag

SEQ ID NO: 463642 - DNA, 930 bp, Shigella boydii; identical to SEQ ID NO: 38559

SEQ ID NO: 463643 - DNA, 1035 bp, Shigella boydii
atgagcaagaaaaaagggaaaacaccgcaacctgcggcaaaaaaaatgaccgccagcgccccgaaaatggaggcattcacctttggtgagccggtgccggtactcgaccgccgtgacattctggattacgtcgagtgcatcagtaacggcagatggtatgagccaccggtcagctttaccggtctggcaaaaagtctgcgtgctgccgtgcatcacagctcaccgatttacgttaaacgcaatattctggcctcgacatttatcccgcatccgtggctttcccagcaggatttcagccgctttgtgctggattttctggtgttcggtaatgcgtttctggaaaagcgatacagcaccaccggtaaggtcatcagactggaaacctcaccggcaaaatatacccgccgtggtgtggaggaggatgtttactggtgggtaccgtccttcaacgagccgacacctttcacgcccggctccgtatttcacctgctggagcccgatattaatcaggagctgtacggcctgccggaatatctcagcgcccttaactctgcctggctgaatgaatcggccacgctgttccgccgcaagtattacgaaaacggcgcacatgccggatacatcatgtacgtcaccgatgccgtgcaggatcgcaacgatatcgaaatgctccgcgaaaacatggtgaagtcgaaaggccgcaacaactttaaaaacctgtttctctatgccccacaggggaaagccgacggcattaaaattatcccgctcagtgaagtggcaacgaaggacgatttttttaatatcaaaaaagccagcgccgctgacctgctggacgcgcaccgcatcccctttcagttgatgggcggcaagccggagaacgtcgggtcgctgggcgatattgagaaagtggcaaaggtctttgtccgcaatgagcttatcccgctacaggacaggatccgcgagataaacggctggctcggccaggaagtcatccgctttaaaaactactcactggacactgacaacagctga

SEQ ID NO: 463644 - DNA, 1773 bp, Shigella boydii
atgaccatcaccacagacaccactcttttacacgacccgcgtcgtcaggcggcgctgctgtactggcagggattttccgtgccgcagattgccgccatgttgcagatgaaacgcccgacggtgcagagctggaagcagcgcgacggctgggacagcgttgcccccatcagccgtgtcgaaatgagtctggaagcgcggctgacccagctcatcatcaaaccgcagaaaaccggcggtgacttcaaggaaattgacctgctcggacgccagattgaacgactggcacgggtcaaccgttacagtcagaccggcaacgaggcagaccttaatccgaacgtcgctaaccgcaacaaaggcgggcgtcgcaaaccgaaaaagaattttttcagtgacgaggccatcgaaaagctggagcagattttctttgagcagtctttcgactatcagttgcactggtatcgcgccgggcttgagcaccgcatccgcgatatcctgaaatcccgccagattggcgcgacgttttatttttcccgcgaggcgctgctgcgcgccctgaaaaccggccataaccagatttttctgtcggccagtaaaacgcaggcgtatgtgttccgtgaatacatcatcgcctttgcccgtctggttgacgttgaccttaccggtgacccgattgtcctgggcaataacggcgcaaaactgatttttctcggcaccaactccaacaccgcacagagccataacggcgacctgtacgtcgatgagattttctggatcccgaattttcaggtactgcgtaaggtggcatcaggtatggcctcacagagccacctgcgctcgacctatttctccaccccgtccacgctggcgcacgacgcctacccgttctggtcgggtgaactgttcaaccggggacgcgccagcgccgccgaacgcgtggaaatcgacgtcagtcataacgcccttgccggaggtcttctctgtgcggacggccagtggcggcagattgtcaccattgaggacgccctgaaaggcggctgcacgctgttcgacattgagcagctcaaacgcgaaaacagcgccgacgattttaaaaacctgttcatgtgtgaatttgttgacgacaaggcatcggtgttcccgttcgaggagctgcaacgctgcatggtcgacacgctggaagaatgggaagactatgcaccctttgccgccaatccgttcggctcccgcccggtatggattggttacgacccgtcacaccgtggcgacagtgccggatgcgtggtgctggcaccgccggtggtggccggtggcaaattcagaatacttgagcgtcaccagtggaaaggcatggactttgccacccaggctgaatccatccgcaaactcaccgaaaaatataacgtcgaatacatcggtattgatgccaccggcctcggtgtcggcgtgttccagctcgtgcgctcgttctatcctgccgcgcgcgatatccgctacacaccggaaatgaaaaccgcaatggtgctcaaggcaaaagacgttatccgccgtggctgtctggaatatgacgtcagcgccaccgacatcaccagctcgtttatggctatccgcaagaccatgaccagcagcggacgcatcgccacctatgaggccagccgcagcgaggaagccagccacgccgacctcgcctgggcgaccatgcacgccctgttaaatgagccactcaccgccggtatcagcaccccgctgacatccaccattctggagttttactga

SEQ ID NO: 463645 - DNA, 855 bp, Shigella boydii
atggcaaaaaaagtctcaaaattctttcgtatcggcgttgagggtgacacctgtgacgggcgtgtcatcagtgcgcaggatattcaggaaatggccgaaacctttgacccgcgtgtctacggttgccgcattaacctggaacatctgcgcggcatcctgcctgacggtatttttaaacgttatggcgatgtggtcgaactgaaggccgaaaagattgatgacgattcggcgctgaaaggcaaatgggcgctgtttgcgaaaatcaccccgaccgatgaccttatcgcgatgaacaaggccgcgcagaaggtctacacctcaatggaaattcagccgaactttgccaacaccggcaaatgttatctggtggggctggccgtcaccgatgacccggcaagcctcggcacggaatacctggaattctgccgcacggcaaaacacaaccccctgaaccgcttcaaattaagccctgaaaacctgatttcagtggcaacgcccgttgagctggaatttgaagacctgcctgaaaccgtgttcaccgccctgaccgaaaaggtgaaatccatttttggccgcaaacaggccagcgatgacgcccgtctgaatgacgtgcatgaagcggtgaccgctgttgctgaacatgtgcaggaaaaactgagcgccactgagcagcgcctcgctgaggtggaaaccgccttttccgcacttaagcaggaggtgactgacagggcggatgaaaccagtcaggcattcagccgcctgaaaaacagtctcgacaacaccgaaagtctgacccagcagcgccgcagcaaggccaccggtggtggcggtgacgccctgatgacgaactgctga

SEQ ID NO: 463646 - DNA, 1074 bp, Shigella boydii
atgcgccaggaaacccgctttaaatttaatgcctacctgtcccgtgttgccgaactgaacggcatcgacgccggtgatgtgtcgaaaaaattcaccgttgaaccgtcggtcacccagaccctgatgaacaccatgcaggagtcctctgactttctgacccgcatcaacattgtgccggtcagcgaaatgaaaggggaaaaaattggtattggtgtcaccggctccatcgccagcaccaccgacaccgccggtggcaccgagcgtcagccgaaggacttctcgaagctggcgtcaaacaagtacgaatgcgaccagattaacttcgatttttatatccgctacaaaacgctggacctgtgggcgcgttatcaggatttccagctccgtgtccgtaacgccattatcaaacgccagtcccttgatttaatcatggccggttttaacggcgtgaggcgtgccgaaacctctgaccgcagcagtaaccagatgctgcaggatgtggcggtcggctggctgcagaaataccgcaatgaagccccggcgcgcgtgatgagcaaggttactgacgaggaaggtcacacgacctctgaggtcatccgcgtgggtaagggcggtgattatgccagcctcgatgcactggtgatggatgcgaccaacaacctgattgagccgtggtatcaggaagaccctgaccttgtggtgattgtggggcgtcagctactggcggacaagtatttccccatcgtcaacaaggagcaggacaacagcgagatgctggccgctgacgtcatcatcagccagaaacgcatcggtaacctgccggcagtgcgcgtcccgtacttcccggcggatgcgatgctcatcacgaagctggaaaacctgtccatctactacatggatgacagccatcgccgcgtgattgtggaaaacccgaaactcgaccgcgtggagaactacgagtcaatgaacattgattacgtggtggaagactacgccgccggttgtctggtggaaaaaatcaaggtcggtgacttctccacaccggctaaagcgaccgcagagccgggagcgtaa

SEQ ID NO: 463647 - DNA, 750 bp, Shigella boydii
atgacgagtcccgcacagcgccacatgatgcgggtctcggcagcgatgaccgcgcagcgggaagccgccccgctgcgacatgcaactgtctatgagcagatgctggttaagctcgccgcagaccagcgcacactgaaagcgatttattcaaaagagctgaaggccgcgaaaaaacgcgaactgctgccgttctggttgccgtgggtgaacggcgtgctggagcagggcaaaggtgcacaggatgacattctgatgacggtcatgctgtggcgtctggataccggcgatattgccggtgcgctggagattgcccgttatgccctgaagtacggtctgaccatgccgggtaaacaccgccgcaccccgccgtacatgttcaccgaggaggtcgcgcttgcggccatgcgtgcccacgctgccggtgagtctgtggatacccgcctgctgacggagacccttgaactgactgccgctgctgacatgcctgatgaagtgcgcgcaaagctgcacaaaatcaccggtctgtttctgcgtgacggtggtgatgccgccggtgcgctggcgcacctgcaacgtgcgacacagctcgactgtcaggcaggcgtcaaaaaagagattgaacgactggagcgggagctgaaaccgaagccggagccgcagccgcagccaaaagcggccacccgtaccccgcgtaagacccggagcgtgacaccggcaaaacgtggacgcccgaaaaagaaagccagttaa

SEQ ID NO: 463648 - DNA, 510 bp, Shigella boydii
atgatgacgctgattattccgcgaaaggaggctcccgtgtccggtgagggtacggtggtcatcccgcaaccggcaggcgacgagccggtgattaaaaacacgttcttttttcccgatatcgacccgaagcgcgtccgggaacgtatgcgccttgagcagactgtcgcccccgcccgtctgcgtgaggccatcaagtcaggcatggcggaaacaaatgcggagctgtacgagtaccgcgaacagaaaattgccgccggttttacgcgtctggcggacgtcccggcggacgacatcgacggtgaaagcatcagggttttttactacgagcgcgccgtgtgtgcgatggcgaccgcgtcgctgtatgagcgttatcgcggcgtggatgccagtgcgaaaggcgacaagaaggctgacagcattgacagcaccattgatgagctgtggcgggatatgcgctgggcggtggcgcgcatccaggacaagccgcgctgcatcgtgagtcaaatctga

SEQ ID NO: 463649 - DNA, 204 bp, Shigella boydii
atgaagacctttgcgctacagggcgacacgctcgacgccatttgtgtccggtattacgggcgcactgagggcgtggttgagaccgtgctcgccgcaaatccgggactggctgaactgggcgcggtgctgccgcacggcaccgccgtcgaactgcccgacgttcagaccgcgcccgtggctgaaactgtcaatctgtgggagtaa

SEQ ID NO: 463650 - DNA, 282 bp, Shigella boydii
atgacagcagaagaaaaaagcgtcctgtcgcttttcatgattggggtgctgattgttgtcggcaaggtgcttgccggtggtgaacccatcaccccgcgtctgtttatcgggcgcatgttgctcggtggttttgtctcgatggttgccggtgttgttctggtgcagtttcctgacctgtcattgcctgcggtgtgcggcatcggctccatgctgggtatcgccggttatcaggtgattgagattgccattcagcgccgctttaagggcagggggaaaccgtaa

SEQ ID NO: 463651 - DNA, 498 bp, Shigella boydii
atgccggttattaacacgcatcagaatatcgccgcctttctcgacatgctggccgtgtccgaagggacggcgaaccatccgctgacgaaaaaccggggctatgacgtgatagtcaccggactggacggaaagccggaaattttcaccgactacagtgaccacccgttcgcacatggccgaccggcgaaggtgtttaaccgtcgcggtgaaaaatccacggcctccggtcgctatcagcagctttacctgttctggccgcattaccgcaaacagcttgccctgccggatttcagtccgttgtcacaggacagactcgccattcagttgatccgcgaacgcggtgcgctggatgacatccgggcgggacgtattgagcgcgccatttcacgctgtcgcaatatctgggcgtccctgccgggtgccggttacggtcagcgtgagcattcactggaaaaactggtcaccgtctggcgtaccgctggcggcgtaccggcttaa

SEQ ID NO: 463652 - DNA, 426 bp, Shigella boydii
atgaagaaattatccctttcacagatgctgaacgtgtcgctggcgctgatgctggcactgtccctgatttacccgcagagcgtggccgtcaattttgtcgccgcctgggcgattctggcgacggttatctgtgtggttaccggtggtgtcggggtgtatgccactgagtatgtgctggaacgctacgggcgggagctgccgccggaatcgctggccgtgaagattgtcacgtcgctgtttttgcagccggtgccgtggcgcagacgggcggcggctctggtggtgatggtggcgacgtttatcgcgctggtcgctgccgggtggatttttaccgcgctgatttatcttgtggcgtcggtgttcttccggctgatacgtacggcctgccgtcagcgttttgaggggcgggaaccatgtcaaagctga

SEQ ID NO: 463653 - DNA, 426 bp, Shigella boydii
atgtcaaagctgatgattgtgctggttgtgttgttatcactggcggtgccggggctgtttctggtgaagcatgaaaatgccagcctgcgcacctcactggacagggcgaacagcgtcgccagcgggcagcagacgaccatcaccatgctgaaaaatcagcttcatgttgcactcaccagggcagacaaaaacgagctggcgcaggtggcactgcgtcaggaactggagaacgccgcgaagcgtgaagcactgcgcgagaaaaccatcacgaggttacttaatgaaaacgaggatttccgccgctggtatggcgctgacctgcctgatgctgtgcgccggttgcaccagcgtccggcctgcactgacgccagtgattgtcgccaacgcctgcccgaaagtgagcctttgcccgatgccgggcagtga

SEQ ID NO: 463654 - DNA, 159 bp, Shigella boydii
atgccgggcagtgacccgcagaagaacggcgatttaagtgccgatatccggcagcttgagaacgcgctggcacgctgtgccagccaggtaaaaatgattaaacactgtcaggacgaaaacgatgctcaaacccgacagcctgcgcagggcgctgactga

SEQ ID NO: 463655 - DNA, 468 bp, Shigella boydii
atgctcaaacccgacagcctgcgcagggcgctgactgatgccgtcacggtgctgaaaactaaccccgatatgctgcggatattcgtggataacgggagtattgcctccacactggcgacgtcgctgtcgttcgaaaagcgttacacgctcaatgtcattgtgaccgactttaccggtgattttgacctgctcatcgtgccggtgctggcgtggctgcgggaaaatcagcccgacatcatgaccaccgacgaaggccagaaaaagggcttcacgttttatgcagacatcaacaatgacagcagctttgatatcagcatcagcctgatgctgaccgagcgcacgctggtcagtgaggtggacggcgcgctgcatgtgaagaatatcccggaacctccgccgccggagccggtcacccgcccgatggagctttatattaatggcgaactggtgagtaagtgggatgaatga

SEQ ID NO: 463656 - DNA, 453 bp, Shigella boydii
atgaatgagtttaagcgttttgaagacaggctgaccggactgattgagtcgctgtcaccgtcagggcgtcggcgactgagcgccgaactggcgaaacgtctgcgtcagagtcagcagcgtcgggtgatggcacagaaagccccggacggcacaccctacgcaccacgccagcagcagagcgccagaaaaaagaccggtcgcgttaagcgaaaaatgtttgcgaaacttatcaccagtcgttttttgcatatccgcgccagccctgaacaggcatcaatggagttttacggcgggaagtcaccgaaaatagccagtgtgcatcagttcggtctgtcggaagaaacccggaaagacggtaagaaaattgaatatccggcgcgtcctctgctcggctttaccggtgaggatgtgcagatgattgaagagattatcctggctcacctgaatcgttag

SEQ ID NO: 463657 - DNA, 1044 bp, Shigella boydii
atgaaagaattgttcaaagattatctggtctttttgaacacgctgactcccggcacaaactttgaatcaagcagaaacaaaataattgctcaagcaataaacttcatttccgaaaaccctgaagattgggacaaaaaatcccagtacaacattgctatgattggcgacacctttaaaagtttcttaagagaaaagggagaagataacaacagcatcaaccttatattcacttgcttttttagatttatcattgaaccaagcattctctctccggaaatagagtctcacttttcaccactaagaaccatcaaggattttgctctgtataactataatgaattcgatgagcggagcagagcacagatagacttttctcttagagaactgccattagcaatggttaaagaagttttaagctccagcaatgttgacacatataaaaaatacattgatagtttaaacgaagggcgtcaatttttcgaaaagtgcgactccttcttaaaggagcaacatgccaaaatagagtcaatcaaagagtcattaaaagggtatgaggtcgcatttaattttgttggattgtttgaaggctttaattcacttggcaaaaagaaagaaagtgaaatcatgctatcaagaataattcttatcatcttggctataatcattccctccccgctgatatactatggaatgcataaattaccagctctcgaaacgacaaatgctgccacatattttatgtcagcactaccttttgcatcagttacattgattttcatgtattactttagagttgtactgctaaatcatatatcgttacgaactcagattatgcaaatagaactcagaaagagcctttgtcagttcattcagagttatagcgactattcctcagagataaggaaaaacaatccggaagcgctttcaaaattcgaagacgtagtattttcaaacatcatgctatccgatgataagataccatctacatttgatggcattgagcaaatagcatcgttaatcaattcattaaaaaatggaaagtaa

SEQ ID NO: 463658 - DNA, 705 bp, Shigella boydii
ttgtcccttgttgttctgtgcaccagaaatcgtggtgtgatttacttcgagattgtacagaatcattattatcgaatgaatgcacaatacaatgaaattcttcgctttatacgcaatatgattcgcactggcattatcgtcgaaaccgaccttaatgccggtcgctgccgtgtgcagaccggcggcatgtgcaccgactggcttcagtggctgacccatcgcgccggtcgttcgcgcacatggtgggcaccttccgtgggggaacaggtgctgattctggccgtgggcggtgaactcgacacggcgttcgttctgccggggatttattccggcgataaccccgcgccgtcggcgtcggcggatgccctgcatatccgtttccctgacggggcggtgattgagtatgaacctgaaaccagtgcactcacggtaagcggaattaaaacggccagcgtgacggcttctgattctgttactgccacggtgccggtggtcatggtgaaagcatcaacccgcgtcaccctggacacaccggaggtggtctgcaccaacaagctgattaccggcacgctggaagtgcagaagggcgggacgatgcgcggcaacattgaacacaccggcggtgaactttcatcaaacgggaaggtactgcatacccataaacaccccggcgacagcggcggcacaaccgggagtcctctatga

SEQ ID NO: 463659 - DNA, 348 bp, Shigella boydii
atgacagcgcgttatctcggaatgaatcgcagtgatggcctgacggtcactgaccttgagcatatcagccagagtatcggcgatatcctgcgcacaccggtcggctcacgggtgatgcgtcgtgattacggctcgttgctggcatcaatgattgaccagccgcagaccccggcgcttgagttgcagattaaggtcgcctgttacatggcagtgctgaaatgggaaccccgcgtcaccctgtcatccgtcaccacggcgcgcagttttgacgggcgaatgacggtcacgttaaccggtcagcacaacgacaccggccagccactttcgttaaccatccctgtgagttga

SEQ ID NO: 463660 - DNA, 909 bp, Shigella boydii
atgccgattatcgacctgaaccagctacccgcaccggatgtggtcgaggagctggactttgaaaccattcttgccgaacgcaaggcgacactgatttccctttacccggaagaccagcaggaggcggtcgcccgtaccctgacgcttgaatctgagcctctcgtcaaactgctggaggaaaatgcttatcgtgagcttatctggcgtcagcgtgtgaatgaggccgcacgggcggtgatgctggcctgtgctgccggtaatgaccttgatgtgattggtgccaattacaacaccgcgcgcctgattatcaccccggcagatgattcgaccctcccgccgacaccggccgagatggaatctgacaccgattatcgtctgcgtattcagcaggcgtttgaaggtttaagcgtcgccgggtcggtgggggcctatcagtatcatggtcgaagtgccgacgggcgtgtcgcagatatctctgtcaccagtccttctccggcctgcgtcaccatctctgtgctgtcacgtgaaaataacggtgtcgcatccgaagacctgctggcggtggtgcgtaacgcccttaatggcgaggacgtcaggccggtagccgaccgcgtgaccgtgcagtctgccgccatcgttgaataccagataaacgccacgctttacctttaccctggtcccgaaagcgaacccatccgcgctgccgccgtgaaaaaactggaagcgtacatcacggcacagcaccggctggggcgcgacatccgtctgtctgccatttatgccgctttgcatgtggaaggcgtgcagcgtgtcgaactggctgcaccactggccgacattgtgctcaacagtacgcaggcgtctttctgtaccgaataccgcgtcgtgaccggaggctcggatgagtga

SEQ ID NO: 463661 - DNA, 531 bp, Shigella boydii
atgagtgattcgcgcctgctgccgaccggctcatcaccgcttgaagtcgccgccgcaaaagcctgtgcggaaattgaaaaaacgccggtcagtattcgtgatctgtggaacccggatacctgtccggcaaatctgctgccgtggctggcgtgggcgttttcggtcgacaggtgggatgaaaagtggccggaagcgaccaaacgcgccgttattcgcgatgcctatttcatccactgtcataaaggcactataggtgcaatccggcgtgtggtggagccgctgggctatctcatcaacgtgacggagtggtgggaaaccagtgacccgccaggcaccttccggcttgatattggcgtactggaaagcggcatcacagaggcaatgtatcaggaaatggaacggcttattgctgatgccaaacctgcaagccgtcatcttattggcctgaacattacccgggatattcccggctacctgttcgccggtggtgtggcttacgacggcgatgtaattacggtttaccccggataa

SEQ ID NO: 463662 - DNA, 2091 bp, Shigella boydii
atgagcacaaaattcaaaaccgttatcaccactgccggtgcagcaaagctggcagcggcaaccgcaccgggagggcggaaggtcaacattaccacgatggccgtcggggatggcggtggtaaattgcctgtcccggatgccggacagaccgggcttatccatgaagtctggcgacatgcgctgaacaaaatcagccaggacaaacgaaacagtaattatattatcgcagagctggttattccgccggaggtgggcggtttctggatgcgtgaacttggcctgtacgatgatgcgggaacgctaattgccgtggcgaacatggccgaaagttataagccagcccttgccgaaggctcagggcgttcgcagacctgccgcatggtcatcatcgtcagcagtgtggcctcagtggagctgaccattgacaccacaacggtgatggcaacgcaggattacgttgatgacaaaattgcagaacatgaacagtcacgacgtcaccctgacgcctcgctgaccgcaaaaggttttactcagttaagcagtgcgaccaacagcacgtctgaaacactggctgcaactccgaaagcggttaaggccgcatatgaccttgctaacgggaaatataccgcacaggacgctaccaccgcgcgaaaaggccttgttcagctcagtagtgcgactaacagcacgtctgaaacgctcgccgcaacgccgaaagcggtaaaggcagcatatgaccttgctaacgggaaatacactgcacaggatgccacaacagcgcgaaaaggccttgttcagctcagtagcgccaccaacagcgattctgaaacgcttgcggcaacgccaaaggcggttaagacagcatatgaccttgctaacgggaaatacactgcacaggatgccaccacggcgcgaaaaggtcttgtccagctcagtagcgccaccaacagtgattctgaaacgcaggctgcaacgccaaaggcggtgaagtctgcctatgacaatgctgaaaaacgtcttcagaaagatcagaacggtgcggatattccgggaaaggataccttcacgaaaaatatcggtgcctgtcgtgcttatagcggcgctttgagcactgaagccggaaactggacaaccgctcagtttattgaatggctggattcccgtggtgcatttaatcatccgtactggatgtgcaaaggctcctggtcatatgcaaataacaaaatcattacggatactggctgtggcaatattcatcttgctggcgctgttattgaggtaatgggcataaagtctgcaatgactattcgtattaccacaccaacaacatcaagctgtgggggcgctacaagcgcgcaatttacttatattaaccacggggacaactatgctcctggctggcggcgtgactggaaccgttacggcgattctatgtctggaactattaatcaggatagtggaagccagaatgcctatatgtctacggccttatgttccggcaccagaggcggcaaaaaatatctcagaaagtttcgtggtggagaaggagacactatctggcatgaaacagtacagggcggggtaattcgctgggcgacaggtaatactgatgctcaggaagaattatcactcagctctgcttatggtcttcgttcaagaggtgaaattacatcgctcagtgctaatggtctgcgcattgcttatggcaattatggattctttatcaggaatgatggcggcagcacatatttaatgctgacggcctctggcgataaatttggaacatggaacggtttaagaccgctgactatcaataacgccaatggcggagtgtcaatggggcatggcctgagtgttactggacgtgttaacccatcagattacggaaattttgattcccgctatgtgaaagatgttcgcctgggtacgcgtgttgttcagaccatgcaaaaaggcgtgatgtatgagaaatcaggccatgtaattacagggcttggcattgtcggcgaagttgatggcgatgatccggcagtattcagaccaatacaaaaatacattaatggcacatggtataacgtcgcacaggtgtaa

SEQ ID NO: 463663 - DNA, 528 bp, Shigella boydii
atgcagcatttaaaaaatattactgcgggtaatcccaaaactgttgcccaatatcaactgacaaaaaattttgatgttatctggttatggtctgaagacggaaaaaactggtatgaggaagtaagtaattttcaggaagacacgataaagattgtttacgacgagaataatataattgtcggcatcaccagagatgcttcaacgcttaaccctgaaggttttagcgttgtcgaggttcctgatattaccgccaaccgacgtgctgatgactcaggtaaatggatgtttaaggatggtgccgtgattaagcggatttatacggcagacgaacagcagcaactggcagaatcacaaaaggcaactttactttccgaagctgaatccgtgattttgccgctggagcgcgctgtcaggctgaatatggcaacagatgaggagcgcagccgactggaagcatgggaacgctacagcgttctggtcagtcgtgtggatcctgcaaatcctgaatggccggaaatgccgcaataa

SEQ ID NO: 463664 - DNA, 1278 bp, Shigella boydii
atgatttcacgctggaaatggatgctgaagcagacatttaaaaaactatggttcagggcaacgttattcgcaattgtcgcaataataacggcccttttatcaattctttttaaatcaatgatacctgagtcggtttccgtgaaggttggtgcggaagcagtcgataacattctgaacatactggcatcgagtatgctggcagtgaccacattttcgctgagcatcatggtcacagcctacggttcagccactactaatgtgactcccagagctactcgtttagttgttgaagacgtcaccacacaaaatgtactggccaccttcatcggttcttttctcttcagtctggtagggattattgccctcaatatgggagcttatggagaaagggggagagtcattttattcattgtaacactggttgtcattgccttaatcctcatcacattgcttcgctggatacagcatttgacctctctggggagggttggtgagacaacggcaaaagtagaacaggcggccatcgaaacatttattgcgagagcaagaaatccctgtctcggcggatatccatggcttgagaacaatgaacagccgaaaggaacggttgcagtttatccgaaaaagattggctatgttgaatatgttgatatggtgaaactcagcaagctgctgaccaatgatccccgtcatgtatacctcgtggcgcagccgggcagtttcatacatccgtccacgccagttttgtacctgagtcagggccaggagtcatcaatcagcaccgatttacttgagacgattattgtctcggatgtacgttcatttgctcaggacccccgattttgtcttagcgtcatggccgaaatagcctgccgagccctttcccccgcagtgaacgatcctggaaccgccattgatgtcattggcagaggtgtacgtatactttccgcttacgcgcagaataaatctgatgaaatagaagtgaaatatccttctgtacatgttgcaccacttcagaataacgatctacttgaagactttttctcacctgttgcgcgcgatggtgccagtatgagggaaattcagataagggtccttaaaggactgtcgatgctgagtaagggttggcctggaatttttgctgaagccgcacaaaccctagcatttgaaacattagagcatgctactcgtgctgaccatatagattctgacagatatctaataaaatcaatttattataatttatttagtggcgaagattctaataaaaaaccatag

SEQ ID NO: 463665 - DNA, 810 bp, Shigella boydii
atgacgaaaattagtgaacgatggaagcacaatggcattactgaaggttattgcaatatttgtgggaaatatggcttgctcacaaaagatcatgttcctccaaagtgcgccataaccttaggccctgttttgcagaaaacagttagcgaattttttggtattcaggaaccagttaaaccattaaatgctaaaaatggctcttatttcagaaccatttgcagccactgtaacaataaggtattaggtgggctcgatgttgcaattgaaaatgtaacaaagtcctttaaagaacagttaagtcgatatatgaatggtatgaatgtatatccattcattagaataccttttgatagcatatctttcactaaggctatgattgggcacgtgctatcagcaacttcagttgaagattgtaaaaaagaacccgtagatagccccttctatacacctttaaaggattatgttttgggtaaaaattcaagttttgaggaaactcatgatatttactactggttttacccacacagaatgcacatatccgctcaaagtgtagcatttatgaacgaaggacatgtggcatttatttgtgctttacatttttttcctatcggttttattatcacaatgaaaaatgaaggaacataccctgcccactctacaaaattagaacttgaagataaattccttacatttaatatgacctctataaattatgagtatacgacatttccatttgtaaatcttaagggaaaccaaatgtatgcgataagcaacggtcatacttgtgtgagttatccaataattaagtga

SEQ ID NO: 463666 - DNA, 1191 bp, Shigella boydii
atgagtgactatcatcacggcgtgcaggtgctggagattaacgacggcacccgcgtcatttcaaccgtatccaccgccattgtcggcatggtctgcacggccagcgatgcggatgcggaaaccttccccctcaataaaccggtgctgattaccaatgtgcagagcgcaattgcaaaggccggtaaaaaaggcacgctggcggcatcgttgcaggccatcgctgaccagtcaaaaccggtcaccgttgttgtgcgcgtggaagacggcaccggcgacgacgaagaaacgaaactcgcgcagaccgtttccaatatcatcggcaccaccgacgaaaacggtcagtacaccggactgaaagccctgctggcggcggagtcggtaaccggtgttaaaccgcgtattctcggcgtaccgggactggataccaaagaggtggctgttgcactggcatcagtctgtcagaagttgcgcgctttcgggtatatcagcgcatggggctgtaaaaccatttccgaggtgaaagcttaccgccagaatttcagccagcgtgagctgatggtcatctggccggatttcctcgcatgggatacggtcaccagtaccaccgccaccgcgtatgctaccgcccgtgcgctgggtctgcgtgccaaaatcgaccaggagcagggctggcataaaacgctgtccaacgtcggggtgaacggtgttaccggcatcagcgcatctgtattctgggatttgcaggagtccggcaccgatgctgacctgcttaacgagtcaggcgtcacaacactgattcgccgtgacggtttccgcttctggggtaaccgtacctgctctgatgacccgctgttcctctttgaaaactacacccgcaccgcacaggtactggccgacacgatggctgaggcgcacatgtgggcggtggacaagcccatcaccgcaacgctgattcgtgacatcgttgacggcatcaatgccaaattccgtgagctgaaaacaaacggctatatcgtggatgcgacctgctggtttagcgaagaatccaacgatgcggaaaccctcaaggccggaaaactgtatatcgactacgactataccccggtgcctcctcttgaaaacctgaccctgcgccagcgtatcaccgataaatacctggcaaatctggtcacctcggttaacagcaattaa

SEQ ID NO: 463667 - DNA, 519 bp, Shigella boydii
atggcaatgccgcgcaaactcaagttaatgaacgtctttctgaacggctacagctatcagggcgttgcaaagtccgtcacgctgccaaaactgacccgtaagctcgaaaactatcgaggtgcggggatgaacggcagcgcaccggtagacctcggccttgatgacgatgcgctgtcaatggagtggtcgctcgggggcttcccggattcggttatctgggagctttacgccgcaaccggtgtggatgccgtgccgattcgttttgcaggctcttaccagcgcgacgataccggcgaaacggtggccgtcgaggtggtcatgcgtggacgtcagaaagaaatcgacaccggcgagggtaaacagggagaagacaccgagtcgaaaatctccgtggtctgcacctatttccggctgacgatggacggtaaggagctggtcgaaatcgacaccatcaacatgattgagaaggtgaacggcgtcgaccggctggagcaacaccgccgcaatatcggcctgtga

SEQ ID NO: 463668 - DNA, 276 bp, Shigella boydii
atgaacaaagaaaatgtgattaccctggacaatccggtcaagcgtggtgagcaggtcatcgaacaggtcacgctgatgaaacccagtgccgggacgctgcgcggtgtcagtctggctgcggtcgcgaactctgaagtcgatgcactgattaaggtgctgccgcgcatgacggcaccgatgctgaccgagcaggaagtcgccgcgctggaactgcctgaccttgtggcgctggccggtaaggtggtcggttttttgtcgccgaactcggtgcagtga

SEQ ID NO: 463669 - DNA, 2448 bp, Shigella boydii
atgagtaacaatgtaaaattacaggtattgctcagggctgttgaccaggcatcccgcccgtttaaatccatccgcacagcgagcaaatcgctgtcgggggatatccgggaaacacaaaaatcactgcgcgagctgaacggtcaggcatcccgtattgagggattccgcaagaccagtgcacagctcgccgtgactggtcatgcacttgaaaaggcacggcaggaggccgaagcccttgccacacagtttaaaaacaccgaacgtccgacccgtgctcaggcgaaagtgctggaatccgcaaagcgtgcggcggaggacttacaggcgaaatataaccgcctgacagattccgttaaacgccagcagcgggaactggccgctgtgggaattaatacccgcaatcttgcacatgatgagcagggactgaaaaaccgtatcagtgaaaccaccgcacagcttaaccgtcagcgcgacgcgctggcgcgtgtcagtgcacaacaggcaaaacttaacgcagtaaaacagcgttatcaggccggaaaggaactggccggaaatatggcctcggtgggcgctgccggtgtggggattgcggcggcgggaacgatggccggagttaagctgctgatgcccggttatgagtttgcgcagaaaaactcagaattgcaggccgtgctcggagtggtaaaagactccgccgaaatggctgcactacgcaagcaggcgcgtcagctcggcgacaataccgcagcctcggcagatgatgcagctggtgcgcagattattattgcgaaagccggtggggatgttgatgccattcaggcggcaacgccggtcacgctgaatatggcgctggcgaaccgtcgcacgatggaagaaaacgccgccctgctgatggggatgaaatccgcctttcagctttcaaacgataaggtcgctcatatcggggatgttctctccatgacgatgaacaaaaccgccgccgattttgacggcatgagcgatgcgctgacctatgccgcacctgtggcaaaaaatgccggtgtcagcattgaagaaaccgccgcaatggtcggggcgctgcatgatgcaaaaatcacaggctcaatggcgggaacgggaagccgtgccgtgttaagccgcctgcaggcaccgacgggaaaagcatgggatgcactcaaagagcttggtgtgaaaacctcagacagtaagggaaacacccgaccagtatttaccattctgaaagaaatgcaggccagttttgagaaaaaccggctcggtactgcccagcaggctgaatacatgaaaaccattttcggggaggaggccagttcagccgccgccgtgctgatgactgccgcctcaaccggaaagctggacaaactgaccgctgcgtttaaagcctcagacggaaagaccgcagagctggtaaatatcatgcaggacaacctcggcggtgactttaaggagtttcagtccgcttatgaggcggtggggactgacctgtttgaccagcaggaaggcgcactgcgtaagctcacgcagacggccacaaagtatgtgttaaaactcgacggctggatccagaaaaacaaatcactggcgtcaaccatcggcatcattgtcggtggtgcactggcaatgattggtgtcatcggtgccattggcctcgtagcctggccggttatcaccggcatcaatgccatcatcgcggcagcaggcgcaatgggggcaatcttcacgacggttggcagtgctgttatgaccgccattggagcgattagctggccggttgtggccgtggtggccgccattgtcgccggggcgttgcttatccgtaaatactgggagcctgtcagcgcattctttggcggtgtggtggaagggctgaaagcggcatttgcgccggtgggggaactgttcacgccacttaagccggtgtttgactggctgggcgaaaagttacaggccgcgtggcagtggtttaaaaacctgattgccccggttaaagccacacaggacaccctgaaccgttgccgtgacacgggcgtcatgttcgggcaggcactggctgacgcgttgatgctgccgcttaatgcgttcaacaaactgcgcagtggtattgactgggtactggaaaaactcggtgttattaacaaagagtcagacacacttgaccagaccgccgcaaggactaatgccgccacgtatggcaccggtggttatattccggcgaccagctcttatgcaggctatcaggcttatcagccggttacggcaccggctggccgctcttatgtggaccagagtaaaaacgaatatcacatcagcctgacgggtggtactgcgccggggacacagcctgaccgccagttacaggatgcgctcgaaaaatacgagcgggataaacgtgcgcgcgcccgtgccagcatgatgcatgacggttaa

SEQ ID NO: 463670 - DNA, 480 bp, Shigella boydii
atgatgctcgcgttaggtatgtttgtttttatgcgccagacgctgccacaccagaccatgcagcgcgaatcagattatcgctggccgtcaaatccccgtatcggtaaacgggatgcctttcagtttctcggtgtgggtgaggaaaacatgacgcttgccggcgtgctttatcccgaactgaccggcgggaagctgacgatgaccacgctcaggctgatggcagaggaaggccgggcgtggccgttgctggatggcaccggcatgatttacggcatgtatgtcatcagcagggtgagtgaaacagggagtattttctttgcagacggcacaccccggaaaattgattttacgttgtcgctcacccgcgtggatgaatcactggccgcgctttatggcgatatcggtaaacaggcggaatcgctcatcggtaaggctggcagtatggcgactaaattcacgggtatgacgggggcgggataa

SEQ ID NO: 463671 - DNA, 1164 bp, Shigella boydii
atgctggacgcgctgacatttgatgcaggtagtacgctgacgccggattacatgctgatgctcgacagcagggatattaccggcaatatcagcgaccgtctgatgagcatgaccctgacggataaccggggctttgaggctgaccagcttgatattgaactgaacgatgccgacgggcaggtcgggctgccggttcgtggcgctgtcctgacggtgtatatcggctggaaaggttttgccctggtatgcaaagggaaattcaccgttgatgaggttgaacaccggggcgcgccggatgtggtcaccatccgcgcccggagtgcagatttccgcgggacgctcaattcccgccgtgaaggctcctggcatgacaccacgctcggtgcgattgttgaggcgatagcctcccgtaacaggctggaagccagtgtcgctccgtcactggccggaattaaaatcccgcacatcgaccagtcgcaggagtctgatgcgaaattcctgacccgtcttgcagaacgcaacggcggtgaggtctcggtaaaaatgggaaaactgttgtttctcaaagcggggcagggggtgacggccagtggtaaaaaaatcccgcaggtcaccataacccgcagcgacggcgaccgccatcattttgcgattgctgaccgtggagcctataccggcgtaacagcaaagtggttacacaccaaagacccgaagccacaaaagcagaaggtaaaactgaaacgcaaaaagaaagagaaacacctgcgcgcactggagcacccgaaagcgaaaccggtcacgcagaagaaaacgccaaaagtaccggaagcgcgcgaaggtgaatacatggcaggtgaggctgacaacgtttttgccctgaccacggtatatgccacgaaagcgcaggccatgcgcgccgctcaggcgaagtgggataagctgcaacggggcgttgcggagttttccatcagtctggctactggtcgggcagatatttacacggaaacgccggtcaaagtatcaggctttaagcgcgtcatagacgagcaggactggacaatcactaaggtgacacattttctgaataatagcggcttcacgacgtccttagagcttgaggtcaggctttctgatgtggagtacgaaacagaagatgatgagtga

SEQ ID NO: 463672 - DNA, 300 bp, Shigella boydii
atgttttgttttatctgtttgttttataagggtaaattaactaaaatggcaccatcaacaaaaccggaagaggtgctcgcgatgtttcattgtcctttatgccagcatgccgcacatgcgcgtacaagtcgctatatcactgacacgacaaaagagcgttatcaccagtgccagaacgtgaattgcagcgccacgttcatcacttatgagtcggtacagagatacatcgtgaagccgggagaagtccacgcagtaaggccgcacccgttgccgtcagggcagcaaattatgtggatgtaa

SEQ ID NO: 463673 - DNA, 381 bp, Shigella boydii
atgcagaaaaatgtgaatcccggcaggcgaaaaggctgccctaattatcctcccgaatttaaacagcagctcgttgctgcctcctgtgaacccgggatatccatctcaaaacttgctcttgaaaatggcattaacgccaatctgttgttcaaatggcgacaacaatggcgcgagggaaagctgctattaccttcttcagagagcccccagctacttcctgtgactctcgatgcagctgccgaacagccagaatcgctcgcagaggatccggaaaccctcagtatcagctgtgaggtaacgttccggcacgggacgctccgcttcaatggcaatgtcagcgaaaagctcctgactctgctgatacaggaactgaagcgatga

SEQ ID NO: 463674 - DNA, 1224 bp, Shigella boydii
atgaaaatactggtctacggcattaactactcgccggagttaaccggcatcggcaaatacactggcgagatggtggaatggctggtagcacaaggtcatgaggtgcgggtcattaccgcaccgccttactacccgcagtggcaggtgggcgagaactattccacctggcgctacaaacgagaagagggggccgccacggtgtggcgctgcccgctgtacgtgccaaaacagccgagcaccctgaaacgcctgttacatctcggcagttttgccgtcagcagtttctttcctctgatggcgcaacgtcgctggaagccggatcgcattatcggcgtggtgccaacgctgttttgcacgccgggaatgcgcctgctggcgaaactctctggtgcgcgtaccgtgctgcatattcaggattacgaagtggacgccatgctggggctgggccttgccggaaaaggcaaaggcggcaaagttgcacagctggcaacggcgttcgaacgtagcggactgcataacgtcgataacgtctccacgatttcgcgctcgatgatgaataaagccatcgaaaaaggcgtggcggcggaaaacgtcatcttcttccccaactggtcggaaattgcccgttttcagcatattgcagatgccgatgttgatgcccttcgtaaccagcttggcctgccggataacaaaaaaatcattctttactccggcaatattggtgaaaagcaggggctggaaaacgttattgaagctgccgatctcctgcgcgatgaaccgctgatttttgccattgtcgggcagggcggcggcaaagcgcggctggaaaaaatggcgcaacagcgtggtctgcgcaacatgcaattttttccgctgcaatcgtatgacgctttacccgcactgctgaagatgggcgattgccatctggtggtgcaaaaacgcggcgcggcagatgccgtattgccgtcgaaactgaccaatattctggcggtaggcggtaacgcggtgattactgcagaagcccacacagaactgggacagctttgcgaaacctttccgggcattgcggtttgcgttgaaccggaatcggtcgaggcgctggtggcggggatccgtcaggcgctcctgctgcccaaacacaacacggtggcacgtgaatatgccgaacgcacgctcgataaagagaacgtgttacgtcaatttataaatgatattcggggataa

SEQ ID NO: 463675 - DNA, 1437 bp, Shigella boydii
atggcgcagtcgaaactctatccagttgtgatggcaggtggctccggtagccgcttatggccgctttcccgcgtactttaccccaagcagtttttatgcctgaaaggcgatctcaccatgctgcaaaccaccatctgccgcctgaaaggcgtggagtgcgaaagcccggtggtgatttgcaatgagcagcaccgctttattgtcgcggaacagctgcgtcaactgaacaaactcaccgagaacattattctcgaaccggcagggcgtaacactgcacctgccattgcgctggcggcgctggcggcaaaacgtcatagcccggagagcgacccgttaatgctggtgctggcggcggatcatgtgattgccgatgaagacgcgttccgtgccgccgtgcgtaatgccatgccgtatgccgaagcgggcaagctggtgaccttcggcattgtgccggatctacctgaaatcggttatggctatattcgtcgcggtgaagtgtctgcgggtgagcaggatacggtggcctttgaagtggcgcagtttgtcgaaaaaccgaatctggaaaccgctcaggcctatgtggcaagtggcgaatattactggaacagcggcatgttcctgttccgcgccggacgctatctcgaagaactgaaaaaatatcgcccggatattctcgatgcctgtgaaaaagcgatgagcgccgtcgatccggatctagattttattcgcgtggatgaagaagcgtttctcgcctgcccggaagagtcggtggattacgcggtcatggaacgtacggcagatgctgttgtggtgccgatggatgcgggctggagcgatgtcggctcctggtcctcattatgggaaattagcgcccacaccgccgagggcaacgtttgccacggcgatgtgattaatcacaaaaccgaaaacagctatgtgtatgccgaatctggcctggtcaccaccgtcggggtgaaagatttggtggtagtgcagaccaaagatgcggtgctgattgccgaccgtaacgcggtgcaggatgtgaaaaaagtggtcgagcagatcaaagccgatggtcgccatgagcatcgggtgcatcgcgaagtgtatcgtccgtggggcaaatatgactctatcgacgcgggcgaccgctaccaggtgaaacgcatcaccgtgaaaccgggcgagggcttgtcggtacagatgcaccatcaccgcgcggaacactgggtagtggtagcgggaacggcaaaagtcaccattgacggtgatatcaaactgcttggtgaaaacgagtccatttatattccgctgggggcgacgcactgcctggaaaacccggggaaaattccgctcgatttaattgaagtgcgctccggctcttatctcgaagaggatgatgtggtgcgcttcgcggatcgctacggacgggtgtaa

SEQ ID NO: 463676 - DNA, 672 bp, Shigella boydii
gtggatgaccttcgcgccgggatttttttcgaggaacgcttctgccagcaggccgacaatgtagtagccctcgataaactgccctttttcgtcaaacagaaaacagcggtcaaaatcgccatcaaaggcaatgcccatatccgcgccgtgtttgatgaccgcattgcgggtgtcgtcgcgacattccggcagcagcgggttaggaataccgttggagaaattgccgtccggcgtgttgtgcactttgatcaattccacaggtgcgccgagggctttaaagcgggcttcaatggcgtccaccaccggacccgctgcgccattcccggagttaatcaccagcttgagcggcgtgaggtttttgacattgatataaccgaacaggtgatcaacgtaagcgtcacgcagattgatttgctgatagcgaccgcgtttggtttcatcgacgggaggaaagtcgttggcttcagccaggcgctggacatcgcgcagtccggtatcaccgctgatcgggcgagccccttcgcgcaccagtttcatgccgttataatccatcgggttatggctggcggtaacttcaatgccgccatccacgccgagatggaacgtggcgaaatagatctcttcggtgccggacatgccgatatccagcacatcgacgcccgcatcctgtaa

SEQ ID NO: 463677 - DNA, 924 bp, Shigella boydii
atgttcggaaaattatcacttgatgcagtcccgttccatgaacctatcgtcatggttacgatcgctggcattattttgggaggtctggcgctcgttggcctgatcacttacttcggtaagtggacctacctgtggaaagagtggctgacctccgtcgaccataaacgcctcggtatcatgtatatcatcgtggcgattgtgatgttgctgcgtggttttgctgacgccattatgatgcgtagccagcaggctcttgcctcggcgggcgaagcgggcttcctgccacctcaccactacgatcagatcttcaccgcgcacggcgtgattatgatcttcttcgtggcgatgcctttcgttatcggtctgatgaacctggtggttccgctgcagatcggcgcgcgtgacgttgcgttcccgttcctcaacaacttaagcttctggtttactgttgttggtgtgattctggttaacgtttctctcggcgtgggcgaatttgcgcagaccggctggctggcctatccaccgctatcgggaatagagtacagtccgggagtcggtgttgattactggatatggagtctccagctatccggtataggtacgacgcttaccggtatcaacttcttcgttaccattctgaatgatgcgcgcaccgggcatgaccatgttcaagatgccagtatttacctgggcatcactgtgcgcgaacgtactgattattgcttccttcccaattctgacggttaccgtcgcgttgttgaccctggatcgctatctgggcacccatttctttaccaacgatatgggtggcaacatgatgatgtacatcaacctgatttgggcctggggccacccggaagtttacatcctgatcctgcctgttttcggtgtgttctccgaaattgcggcaaccttctcgcgtaa

SEQ ID NO: 463678 - DNA, 948 bp, Shigella boydii
atgagactcaggaaatacaataaaagtttgggatggttgtcattatttgcaggcactgtattgctcagtggctgtaattctgcgctgttagatcccaaaggacagattggtctggagcaacgttcactgatactgacggcatttggcctgatgttgattgtcgttattcccgcaatcttgatggctgttggtttcgcctggaagtatcgtgcgagcaataaagatgctaagtacagcccgaactggtcacactccaataaagtggaagctgtggtctggacggtacctatcttaatcatcatcttccttgcggtactgacctggaaaaccactcacgctcttgagcctagcaagccgctggcacacgacgagaagcccattaccatcgaagtggtttccatggactggaaatggttcttcatctacccggaacagggcattgctaccgtgaatgaaatcgctttcccggcgaacactccggtgtacttcaaagtgacctccaactccgtgatgaactccttcttcattccgcgtctgggtagccagatttatgccatggctggtatgcagactcgcctgcatctgatcgccaacgaacccggtacttatgacggtatctccgccagctacagcggcccgggcttctcaggcatgaagttcaaagctattgcaacaccggatcgcgccgaattcgaccagtgggtcgcaaaagcgaagcagtcgccgaacaccatgtctgacatggctgcgttcgaaaaactggccgcgcctagcgaatacaaccaggtggaatatttctccaacgtgaaaccagacttgtttgctgatgtgattaacaagtttatggctcacggtaagagcatggacatgacccagccagaaggtgagcacagcgcacacgaaggtatggaaggcatggacatgagccacgcggaatccgcccattaa

SEQ ID NO: 463679 - DNA, 573 bp, Shigella boydii
atgctgggtatctgcgggccgactggttccggcaaaagtaccctgttgtcgctcattcagcgtcatttcgacgtcagcgagggggatattcgctttcatgatattcctctgacgaagttacaactcgatagctggcgtagccgcctggcggtagttagccagacaccgttccttttttccgacaccgtagcgaacaacatcgcgttgggttgcccgaatgccacccagcaagagattgagcatgtcgcgcggttagccagcgtacatgacgatattttgcgtctaccgcaaggttacgatacagaagtgggcgagcgcggcgtgatgctttccggtgggcaaaaacagcgtatctccattgctcgagcgttattagtcaacgcggaaatcctcatccttgatgatgcgctttcggcggtggacggacgcacagagcaccagatcctgcataacctgcgtcagtggggacagggaagaacggtaatcatcagtgcccatcgcctttcggcactgacggaagccagtgaaaatgtaatgaacgcatcccacacaattaaacacggagcagtatga

SEQ ID NO: 463680 - DNA, 330 bp, Shigella boydii
ttggcagcattacccgcacaagccttcggcgcgcttattggcgcagtcgctggcggtgttatcggccacaacgtcggttctggcagcaattccggaacgacggcaggggcagttggcggcggagctgtagccgcggcagcgggttctatggtgaatgataaaaccttagtggaaggtgtttctttaacatataaggaaggcaccaaagtgtatacctctacacaggtgggtaaagagtgccagtttacgacaggtttagccgttgttattaccacaacgtataacgaaacgcgtattcagccaaatactaaatgtcctgaaaagagctaa

SEQ ID NO: 463681 - DNA, 1317 bp, Shigella boydii
atgaaaccgttacattatacagcttcagcactggcgctcggactggcgttaatggggaatgcacaggcagtgacgaccattccgttctggcattctatggaaggggaactgggtaaagaggtggattctctggcccaacgttttaacgccgaaaatccggattacaaaattgtaccgacctataaaggcaactacgaacagaatttaagcgcggggattgccgcatttcgtaccggcaacgctccggctattttgcaggtttatgaagttggcaccgccaccatgatggcatcgaaagccattaaaccggtatatgacgtgtttaaagaggcggggattcaattcgatgagtcgcagtttgtgccgacggtttccggttactactccgacagcaaaacgggccacttactctcccagccattcaacagctcgactcccgttctctattacaacaaagacgccttcaagaaagcggggttagacccggaacagccgccgaaaacctggcaggatctggcggactatgccgcgaaactgaaagcctccggcatgaagtgcggctacgccagcggctggcagggctggatccaactggaaaactttagcgcttggaacggtctgccgtttgccagcaaaaacaacggctttgacggcacagatgcggtgctggagttcaacaagccggagcaggtgaaacacatcgccatgctcgaggagatgaacaagaagggcgacttcagctacgtcggtcgtaaggatgaatccaccgagaagttctataacggtgattgcgcgatgaccaccgcctcttccggttctcttgccaacattcgcgagtacgccaaatttaactacggcgtaggcatgatgccttacgacggcgatgcgaaagatgcgccacaaaacgccattatcggcggagccagcctgtgggtgatgcagggtaaagataaagaaacgtataccggtgtggcgaagttcctcgatttcctcgcgaagccagaaaacgctgccgagtggcatcagaaaaccggttatctgccaatcaccaaagcagcgtatgacctgacccgtgagcagggcttttatgagaaaaacccaagggcggataccgcgacgcgtcagatgctgaataagccgccgttgccgttcaccaaagggctgcgtctgggcaacatgccgcagatccgcgtgattgtggatgaagagctggagagcgtgtggaccggtaagaagacaccacagcaggcactggataccgccgttgagcgtgggaaccagttactgcgccgctttgagaaatcgacgaagtcttaa

SEQ ID NO: 463682 - DNA, 270 bp, Shigella boydii
atggacaagcaacgcggttttacacttatcgaactgatggtggttattggcatcattgccattttaagcgccattggtattcccgcttatcaaaactacctgcgcaaagctgcactcaccgacatgctacaaacctttgtgccttaccgtaccgccgtagagttgtgcgcgctggaacatggtggattaggtaatgactccaacttactgatagtgttttatgttcagataatgcccgatgaccttgtcatgcagctccaccgattttga

SEQ ID NO: 463683 - DNA, 840 bp, Shigella boydii
ttgcgctacccgattttgcataaactgaaagacaggttaaatcaaacctggtatcagatccgtattggcgatcgactggcctatatcagcgcgctggatgcccaacccgataatggcctgccggtgctaacctatcaccatattctgcgcgatgaagaaaacacccgttttcgccatacttcgacgaccacctcagtacgcgctttcaataaccagatggcctggctgcgcgacaggggatacgcgacactgagcatggtgcagctggaaggttacgtgaagaataagatcaatctccctgcgcgagcggtggtgattacctttgatgatggcctcaaatcggtgagccgctatgcgtatcccgtgttgaaacaatatggcatgaaggcgacggcgtttattgttacctcgcgcatcaaacgtcacccgcagaagtgggacccaaaatcgctgcaatttatgagcgtttctgaacttaacgaaattcgcgatgtttttgatttccagttacatacccattttttgcatcgggtggatggttatcgccgccccatattactgagccgtagtgaacacaatattctgtttgattttgcacgttcacgccgcgctctggcgcaatttaatccgcatgtctggtatctttcgtatccgtttggcggatttaatgacaaagccgtgaaggcagcaaacgatgccggatttcacctggcggtgacaaccatgaaaggcaaagtaaaaccgggggataatccgttgttactaaaacgactttatatcttaagaacggattcgctggagacgatgtcgcggctggtgagtaaccagccgcagggataa

SEQ ID NO: 463684 - DNA, 207 bp, Shigella boydii; identical to SEQ ID NO: 24440

SEQ ID NO: 463685 - DNA, 612 bp, Shigella boydii
atgaacactatcgtatttgtggaagatgatgcggaagtcggttcactgattgccgcgtacctggcaaaacatgatatgcaggttaccgtagagccgcgcggcgaccaggccgaagaaaccattttgcgagaaaatccggatttggtgttactcgacatcatgctaccaggcaaggacggcatgaccatttgtcgtgatttacgcgcaaagtggtctggaccgattgttcttctaacctctctcgatagcgatatgaaccacatcctggcactggaaatgggtgcgtctctgactccctacaaagccctgcatttcggcacgttgaccatcgatcccatcaaccgcgtagtcaccctggctaacactgaaatctcgctctcgacagctgatttcgaattattgtgggaattagctacccatgccgggcaaatcatggaccgcgatgcattgctgaaaaatttacgcggcgtcagttatgacggactggatcgtaacgtggacgtggctatttcgcggttaagaaaaaaactgctcgataacgccgcagaaccttatcgcattaaaactgtgcgtaacaaaggctatctttttgcgcctcatgcatgggaataa

SEQ ID NO: 463686 - DNA, 222 bp, Shigella boydii; identical to SEQ ID NO: 461706

SEQ ID NO: 463687 - DNA, 207 bp, Shigella boydii; identical to SEQ ID NO: 24440

SEQ ID NO: 463688 - DNA, 1524 bp, Shigella boydii
gtgattctgaaaatggaaatgatgccatttttagactcggtgggactggtacttgatgataataaatattatctcttttcacggagggcgaatgataaaatcgttgtttatcatcaggaacaagtaaatggaccgcttgtcgacgagtcagggcgggttatttttgccgattttaacccatcgaaacgaccgtggtcggtggcttcagatgactctaacaacagctggaatccggcatacaattgctttgatcgtccgggtaaaaaatgtatctcttttacgctacgtatcaacggcaaagatcacgatttgttagcggtagataaaattcatgtcgatttaaactggcggtatttgaacgagtatcttgatcaaatcagcgctaatgatgaagttctatttttgaaacaaggtcatgagatcattgccaagaatcaactcgctcgtgaaaaactgattatttataatagcgaaggtaattatcatattattgattctgtcgatacggagtatattgcaaagacatcagcagtgccaaataatgcattgttcgaaatctatttttattatcctggcggtaatttattgaacgcatcagataaacttttttatctaccgtttgcgttcattattatcgtgttgctggtggtatatttcatgaccactcgtgtgttccgtcggcaattttctgaaatgaccgagctggttaatacgctggcatttttgcccgactcaacggatcagatcgaggctctgaaaattcgcgaaggcgatgcgaaagagattatcagcatcaaaaattcgatcgcggaaatgaaagatgccgaaattgaacggtcaaataaattgctctcactgatctcttacgatcaggaaagcggttttattaaaaatatggcgattattgagtccaacaataatcagtatctggctgtggggatcatcaaactgtgtggtctggaagccgtggaagcggtgtttggtgttgatgaacgcaataaaatcgtcaggaaattgtgtcagcgaattgccgagaaatatgcgcaatgctgcgatatcgtgacattcaatgccgatctctatttacttctgtgtcgggaaaatgtacagacatttacccgtaaaatagcgatggtaaacgattttgacagcagctttggctaccgcaatctgcgcatccataagtctgccatttgtgaacctttgcagggggaaaacgcctggagttacgcagaaaaactgaaactggcgatttccagtatccgtgaccatatgttctccgagtttattttctgtgatgacgcgaaactcaacgaaatagaagagaatatctggattgcgcgtaatattcgccatgcaatggaaattggcgaactattcctcgtctatcaaccgatcgttgatattaacacccgcgccattctgggcgcggaggcgttgtgccgttgggtttctgcggagagggggatcatttcaccgctgaagttcattaccattgctgaagatattgaagtggcacactga

SEQ ID NO: 463689 - DNA, 405 bp, Shigella boydii
atgaaaaacgccacatgcttaactgacgatcaacgctggcaatctgtcttagcccgcgacccgaatgccgacggcgaattcgttttcgccgtgcgcaccacaggcatcttttgccgtccgtcttgccgcgccagacatgccttgcgggaaaatgtctccttctacgcaaatgccagcgaggcactcgccgccggatttcgcccctgcaaacgctgccaacctgataaagccaatgcccagcaacatcggttggataaaatcacccacgcgtgtcgactgctggaacaggaaacgcctgtaacgttggaagccttagccgaccaggtggcgatgagtccatttcatctacatcggttgtttaaagcgactaccggaatgacgcctaaagcctggcaacaggcctag

SEQ ID NO: 463690 - DNA, 696 bp, Shigella boydii; identical to SEQ ID NO: 458726

SEQ ID NO: 463691 - DNA, 303 bp, Shigella boydii; identical to SEQ ID NO: 461506

SEQ ID NO: 463692 - DNA, 2301 bp, Shigella boydii
gtggctatggggatgagtgcgttcccctctttcatgacgcaggcgacgccagcaacgcaaccactgatcaatgctgagccagctgtagccgcccagacggaacaaaatccgcaggtggggcaagtgatgccgggcgtgcagggcgctgatgcgccagtcgtggcgcagaacggtccttcgcgtgatgtgaagctgacctttgcgcaaattgcgccgccgccgggcagcatggtgctacgtggcattaacccgaacggcagcattgagtttggtatgcgcagcgatgaagtggtgacgaaggcgatgctcaacctcgaatacatgccatcgccatcgttactgcctgtccagtcgcagttaaaggtttatctcaatgatgagctgatgggcgtactgccagtgaccaaagaacagttgggtaaaaaaacgctggcgcaaatgcccattaacccactgtttattaccgacttcaaccgtgtgcggctggagtttgtcggccattatcaggacgtgtgcgaaaacccggccagcaccacgctttggctggatgttgggcggagcagtggactggatctgacctatcagaccctgaatgtgaagaatgacctgtcacacttcccggtgccattctttgacccgcgcgataaccgtactaacaccttgccgatggtctttgcgggtgcgccggatgttgggctgcaacaagcatctgccattgtcgcctcgtggtttggttcgcgttctggctggcgtgggcagaacttcccggtgctctataaccaactgccggatcgtaatgccattgtctttgcaaccaacgacaaacggccggacttcctgcgcgatcatccggcggtaaaagccccggtgattgagatgatcaaccatccgcagaatccttacgtcaaactgctggtggtgtttggtcgtgacgacaaagacctgttgcaggcagcgaaaggtatcgctcagggtaacattctgttccgtggtgaaagcgtggtagtgaatgaagtgaaaccgctgctaccgcgtaagccgtacgatgcgccgaactgggtacgtaccgatcgtccggtcacatttggcgaactgaaaacctatgaagaacagttacaatccagcggtcttgagccagcagcgattaacgtttcgctaaacctgccgccggatctctacctgatgcgcagtaccggcattgatatggatattaattaccgctacaccatgccgccggtgaaagacagttcgcggatggatatcagcctgaataaccagttcctgcaatccttcaacctgagcagcaaacaggaggcgaaccgcctgctgctgcggattccggtattacaaggtttgctggatggcaaaacagatgtctctattccggcgctgaaactgggcgcgaccaaccagctgcgcttcgactttgagtatatgaacccgatgccgggcggttcggtggataactgtattaccttccagccggtgcagaatcatgtggtgattggtgacgactccaccatcgacttctcgaagtattaccacttcatcccgatgccggatctacgcgcctttgctaacgcgggcttcccattcagccggatggcggatctgtcgcaaaccatcaccgtgatgccgaaagcgcctaacgaagcacagatggaaacgttgctgaatactgttggttttatcggcgcacagacgggcttcccggcgattaatctgacggtgaccgatgatggcagcaccattcagggcaaagatgccgacatcatgatcatcggtggtatcccggacaaactgaaagacgataagcagatcgacctattggtgcaggcgaccgaaagctgggtgaaaacaccgatgcgccagaccccgttccccggcattgtgccggacgagagcgatcgcgcggcagaaacccggtcaacgctgacctcttccggtgcgatggcggcggtgattggcttccagtcgccgtataacgaccagcgcagcgtgattgcgctgttggcagatagcccacgcggttatgaaatgcttaacgatgcggtgaacgatagcggcaaacgcgccaccatgttcggttcggtcgcggtgatccgcgagtccggtatcaacagcctacgtgttggcgacgtttattacgtaggtcatctgccgtggttcgagcgcgtgtggtatgcgctggcaaaccatccgattctgctggcggctatcagtgtgatattgctggcatgggtactgtggcgtctgctgcgaattattagtcgtcgtcgtcttaacccggataacgagtaa

SEQ ID NO: 463693 - DNA, 3066 bp, Shigella boydii
atggaccagatagccaacctggtcattgatttggggattgatgcggcagagtttaaaaatgaaatcccccgtatcaaaaaccttctgaatggtgcagccagcgatgcagaacgatcttctgcccgtatgcagcgttttatggagcgtcagactcaggccgcccggcagacaacgcaggcggcttcttcggctgcaacagccgcatccgtccatgcgcagacggtggagaagaacgcacaggctcatgaacgcatggcccgcgaggtggagaaaacccgccagcgcatggaggcgctgagccagaaaatgcgcgaggaacaggcgcaggccatggctctggcggaggctcaggataaagcagctgctgcgttttatcgtcagattgacagtgtgaaacaggccagtgcggggctgcaggaattacagcgtattcagcagcagatccgacaggccagaaacagtggcgggattggtcagcaggattatctggcgctgatttctgaggttacggcgaaaacccgtgttcttacgcaggctgaggaagagtctacccgacagaaagtggcgtttatccgtcagcttaaagagcaggcaacccgccagaatctttcttcttctgagttgcttcgtgccagggctgcccagctgggggtaagcagtgctgcagaagtgtatatccgcaaaatggagcaggcaggaaaagccacgcattcgctgggtctgaaaagtgcagcagcccgccaggagataggcgttctgataggtgaactggcccgtggcaatttaggagcgctgaggggatccgggataacgctggctaaccgtgccggatggatagacacactgatgtcaccgaaaggcatgatgctgggcggggttattggcggtattgccgcggccgtctatggtctgggtaaagcctggtatgacggtcagaaggagggggaagaatttaaccgccagctgtcactgacggggcattatgccggagtcactgccgggcagctgtggacgctcagtcgtgctatttccgggaatggtatcacgcaacatgctgcagccggtgcgctggctcaggtggtggggagtggtgcatttcgtggaaacgatatcggtatggtggcgagagctgccgcacagatggagcgatcggttggccagtcggtcagcgataccataaatcagtttaagcggctgaaggatgatcctgtaaatgccgcgaaggctctggacaatgagctgcattttcttactgccactcagcttgagcagatacgcgtccttggggatcaggggcggtccagtgatgctgcacggatagccatgtctgcactggcagaggaaaccggtcggcgtactgcggatattgataataacctcaatgcgctgggcagtacgctgaagtatctgtctgatttatggaatcgtttctgggatgcggccatgaatattggtcgtgaagactcgctggatgaacagattgccgctttacaggagaaagtgtcgcgggcgaaaagactcccctggacggcatcatcttctcaggttgaatacgatcagcagcgtcttaacgatcttcaggagaaaaaacgccagaaggatttgcaggatgcaaaagagcaggcagagcggaattatcaggagcaacagaaacgccgtaatgctgaaaatgctgcactgaaccggatgaatgaaacggaagctgcacgacatcagcgtgaaattgcgcgtattaatgccatgcagtacgccgatcaggctgtcagggatgcggcgatacaacgtgaaaatgaacgttacgagaaagccctggcatccggtaagaaaaaaacacgcgaaacccgtaatgatgaggccacccggttattgctgcagtacagtcagcaacaggcacaggtggaaggacagattgctgctgccagacagtcagcaggcattgccacggaaaggatgacagaagcgcataaacagcttctggctctgcagcagcgcatcagcgacctggacgggaaaaaactgacggcagatgaaaagagtgtgctggcccgtaaagatgaactgattcaggcactgacgctgctggatgtaaaacagcaggagcttcagaaacagacggcactcaacgagctgaagaaaaaaacaattcagctgaccagtcaactggctgaagaagagcgcgctcagcgtcagcaacatgacctggatatcgccacggtgggtatgggtgatcagcagcgacagcgatatcaggtacaactgagtcttcgccagaaataccagcaacagctggagcagttgaggcgggatagtgagcagaaagggacatataacacggatgactacagaaaggccgagcaggcgctgacggagagcctgaaccgacaactgaatgagaatcgccgttactggcaacagcttgaagttgtgcagggtaactggaaaaacggagtcctgcgtgcatttcaggattttaccgtggatgcagataatacggcagaaacagcagaacaggtgttctcgtcagccttcagcaacatgggaaatggcctggcaacttttgtcactaccggcaaactcaatttcaaatccttcacctcttctgtgctgtcagatatggcgaaaatcctggcgcaggcaaccatgatgaaatcgataaaagggattggcagtgtactgggatttgatctcagcagcctttccctgaatgccaatggggggatttatcagtctgctgatttgagtcgttacagtggcacggtggttaaccgtccgacgttttttgcttttgcaaaaggcgcgggtgtgatgggggaagcgggacctgaagccattctgccattgcgtcgtggtgctgacggtaagctgggggttgtggcggatattgggggttcaggtatggcgatgttttccccgcagtacaacatcgagatcaataacgatggcacgaacgggcagataggtccggctgccctgaaggcggtttatgacctcgggaaaaaagcggcagcggactttatgcaacagcaggcccgtgatggtggtcggttaagtggagcatatcggtaa

SEQ ID NO: 463694 - DNA, 318 bp, Shigella boydii
atgcggcttgcccgggagttccggcgggcagactggcggcggatgctgtcggaaatgtcggccactgagcttggtgagtggggcgattatttccggatgcagagcttcagtgatgtgtggatggatgcgcagtttgcctcgctgaaggcattgatcgtgagaatggtgtccggcagtagtgatgctgcggtggctgatttcagccttttaccggaagagaacgggataccggagcgaacggacgaagaactgatgcatcttggggaaggtatttccggaggtgtgcgttatggaccagatagccaacctggtcattga

SEQ ID NO: 463695 - DNA, 387 bp, Shigella boydii
atgtttctgaaacagggcacgtttaattatgaaaagcagtccgtggtgctcagtgagctgtccgggctgcagagaattgaatatctggcgtttgttcagcagcgaacggcaaagtttgatgccgaagagggagaactgccggaggctgaacgacagattgcttttctgcggatggggatggatatcaatgcctggctggtttcccgctcactgtggaatgcggatcagtctaaggatgtagagacgctttgcgcatccgttattacaacatggtcgtatgatgccctgggtgcgggggcggagatggttctgtcgctgagcggtatggggaccattgataatgccggggatgatgagcatgaggcgctgacgccggaaaagtcctga

SEQ ID NO: 463696 - DNA, 744 bp, Shigella boydii
atgaccacaccaaatccactggcaaaaacgaaaggtgcgggaacgacgttctggatgtacaccggcaagggcgatgcgtttgcgaaccctttatcggacactgactggctgcgtcttgcgatggtgaaggatctgcagcctggcgaaatgaccgctgatgcagaagatgacacttatctcgatgatgaagatgcagactggaaaacgacaacccaggggcagaaatccgtcggtgatacttcggcgacgctggcctggcgtccgggtgacagcgggcagaaaaaactggttcagttgttcgactccggtgaagtctgcgcgtttcgtatcaaatatcccaacggtactgttgatgttttccgtggctggctgagttcactgggtaaaaccattgcctcaaaagacgtgatgacccgcacagtgaaaatcagcggtgtggggcgtccgtatctggcagaagaaggcactgaaaccgtgggcgttaccgggctgacggtggcaccggcatctgccagtgtaaaagtgggagcaaccaccacgctgacctttacagtaaaacctgacggagccagtgacaaagcgatcagtgtgcattcgacagatccacagactgccacggtgaccctgaacgggcttgtggccacggtgaaaggcgtgaagcagggcagtgtcagcattgtgggcatgacttctgacggcgattttgtggcagtggctacggtggctgtcagcgccgcaggttaa

SEQ ID NO: 463697 - DNA, 153 bp, Shigella boydii
atgccttcgatgatagcgataattttacttatcatccttcacatctggctctgtagacagggtggtgatcacttctggagtgaatccagattaaacatctcattgctgatgcttgatattgagcatcttgcgcgcggtaaggggctgcgttga

SEQ ID NO: 463698 - DNA, 468 bp, Shigella boydii
atgagcagagtaaccgcgattatctccgctctggttatctgcatcatcgtctgcctgtcgtgggcggtcaatcattaccgtgataacgccatcgcctacaaagaacagcgagataaaaaagtcagtgagctgaagcaggcgaccgccaccattactgacatgcagcagcgccagcgttctgctgatgcactcgatgctaaatacacgaaggagttagctgatgcgaaagctgaaaatgatgctcttcggcgcaagcttgataatggtggtcgggtgttcgtcaaaggaaaatgccctgtgccatcctcagccgaaacctccagcgcctccggcatgggcaatgatgccaccgtcgaactctctccagttgctggacgaaacgttctcggtatccgggacggaatcatcagcgaccaaacagcactgagaacgcttcaggaatacatcaggacgcaatgccttcgatga

SEQ ID NO: 463699 - DNA, 417 bp, Shigella boydii; identical to SEQ ID NO: 7412

SEQ ID NO: 463700 - DNA, 753 bp, Shigella boydii
atgaaccttgaagccttaccaaaatattactccccaaaatctccaaaattgagcgatgacgcaccggcgacaggctcaggtggtttaacgattacggatgtgatggctgcgcaggggatggtgcagtcgaaagcaccgcttgggtttgccttattcctggcaaaagttggtgttcaggatcctcaatttgcgattgaaggtctgctcaattacgcgatggcactggataacccgacattgaacaaattgagtgaagaaacccggttacagatcatcccttaccttgtgaattttgcctttgctgattattccaggtctgcggcaagtaaggctcgctgtgagcattgtgctggtactggatttcataatgtattgcgcgaagtggtgaaacactccagaagcggggaatctgttatcaaggaagagtgggtgaaggaactatgtcagcattgtcatggtaagggagaagtcagcacagcgtgcagagggtgtaagggtaaaggtattgtcctggatgaaaaaaggacccggcttcatggcacgcctgtttataagatttgtgggcgttgcaatggaaaccggtttagccgtttaccaaccacactggcgcggcatcatgtccagaagctggtaccagacctgacggattatcagtggtacgaaggatatgcagatgtcattgataaactggttacaaagtgctggcaggaagaagcatatgcagagatacaattgagaaatgtgacaagataa

SEQ ID NO: 463701 - DNA, 795 bp, Shigella boydii
gtgttccgcaatgaggcagtgatccgtcgtgctggtggcgtggaatgtcttgaaagctggttacttcgtgaaaaaggctgccagtggcctcattccgactggcacagcgagaacatgaccacaatgcgacacgcgccgggcgcaatccgtctgtgctggcactgtgataaccagctgcgcgatcagttcacggaacggctggaatcaatggcaacggataactgtgcccgctgggtgttgtctgttgtgcgtcgggatctcggttttgatgacagtcacgttgtgacaatgccggaactgtgctggtggctgattcgtaatgacctggcggatgccttaccggaaagtgcagcccgtaaggcactgagattaccaaagcctgttgtgccgtctgtcacccgggaaagtgaccttgtgccttcggttcctgccaccagcatcatccaggataaagcgaaaaaggtgctggcgctgaaagtggatccggagtcgccggagtcttttatgttacgcccaaaacgtcgccgctgggttaatgaaaagtacacgcgctgggttaagacacagccgtgtgcatgttgtggaaagcccgctgatgatccccaccacctgataggtcacggtcagggtggaatgggaacaaaagcgcatgacctctttgtgttgcctttgtgcagaaagcatcacgacgagctgcatgcggataccgtggcatttgaagagaagtatggctctcagctggagctgatatttcgttttatcgatcgtgcgctggcaattggcgtattggcgtaa

SEQ ID NO: 463702 - DNA, 231 bp, Shigella boydii
atgaccggtatgacgaatgtaacaaagctggccagcgagccgtcaggccaggaatttctggtatttacccttggtgatgaagagtacggtattgatatcctgaaagtgcaggagatccgtggctacgatcaggtaacacggattgcgaacacgccagcgtttatcaaaggcgtcacgaatctgcgcggcgttattgtgctgattgttgacttacgaattaagttcagctag

SEQ ID NO: 463703 - DNA, 657 bp, Shigella boydii
atgcctgcgatcaatgccaaacgtgtttaccggatcatgcgccagaatgcgctgttgcttgagcgaaaacctgctgtaccgccatcgaaacgggcacatacaggcagagtggccgtgaaagaaagcaatcagcgatggtgctctgacgggttcgagttctgctgtgataacggagagagactgcgtgtcacgttcgcgctggactgctgtgatcgtgaggcactgcactgggcggtgactaccggcggcttcaacagtgaaacagtacaggacgtcatgctgggagcggtggaacgccgcttcggcaacgatcttccgtcgtctccagtggagtggctgacggataatggttcatgctaccgggctaatgaaacacgccagttcgcccggatgttgggacttgaaccgaagaacacggcggtgcggagtccggagagtaacggaatagcagagagcttcgtgaaaacgataaagcgtgactacatcagtatcatgcccaaaccagacgggttaacggcagcaaagaaccttgcagaggcgttcgagcattataacgaatggcatccgcatagtgcgctgggttatcgctcgccacgggaatatctgcggcagcgggcttgtaatgggttaagtgataacagatgtctggaaatatag

SEQ ID NO: 463704 - DNA, 3087 bp, Shigella boydii
gtgccgggtgctgaggacgtactgccagcgccgctgccgccgtaccgggtgcttaccgggatggcggaccgcttcgggcggacgctgacgtaccggcgtgaggccgcaggcgacctggccggggaaatcaccggcgtgacggacggtgccgggcgggagttccgtctggtgctgaccacacaggcgcagcgggcggaagaggcccggcagcaggcggaagaggcccggcagcaggcggtcgtcgccggagcaaaacgaccggacattcctgattcactgccggagagcacagagtacggccccgacaggggtatccgcctttcggcggtgtggctgatgcacgacccggcatacccggagagcctgcccggtgcgccactggcgcggtacacgtatacggaagccggtgaactgctggcggtatatgaccgcagcaatacgcaggtgcgcgctttcacgtatgacgcgcagcacccgggccggatggtggcgcaccgttacgcgggaaggccggagatgcgctaccgctacgacgatacggggcgggtggtggagcaactgaacccggcagggttaagctaccgctatctttatgagcaggaccgcatcaccgtcaccgacagcctgaaccggcgtgaggtgctgcatacagaaggcggggccgggctgaaacgggtggtgaaaaaagaactggcggacggcagcgtcacgcgcagcgggtatgacgcggcaggaaggctcacggcgcagacggacgcggcgggacggcggacagagtacggtctgaatgtggtgtccggcgatatcacggacatcaccacaccggacgggcgggagacgaaattttactataacgacgggaaccagctgacggcggtggtgtacccggacgggctggagagccgccgggaatatgatgaaccgggcaggctggtatcggagacatcgcgcagcggggagacagtacgctaccgctacgatgacgcgcacagtgagttaccggcgacgacaacggatgcgacgggcagcacccggcagatgacggcggttcaccgcgaggaaggtatcagcctttaccgccactatgacaaccgtggccggttaacctcggtgaaagacgcacagggccgtgaaacgcagtatgagtacaacgccgcaggcgacctgactgccgttatcaccccggacggcaaccggagcgagacacagtacgatgcgtggggaaaggcggtcagcaccacgcagggcgggctgacgcgcagtatggagtacgatgctgccggacgtgtcatcagtctgactaacgagaacggcagtcacagcgacttcagctacgatgcgctggaccggctggtacagcagggcggctttgacgggcggacgcaacgttatcattatgacctgaccggaaaactcacgcagagtgaggatgaggggcttgtcaccctctggcactacgatgcgtcggaccgcatcacgcaccggacggtgaacggcgacccggcagagcagtggcagtatgacggccacggctggctgagagaaatcagccacctgagcgaaggccaccgtgtcgctgtccactacggctacgacgataagggccgcctgacgggcgaacggcagacggtggagaacccggagacgggggaactgctgtggcagcatgagacgaaacacgcctacaacgaacaggggctggcaaaccgcgtcacgccggacagcctgccgccggtggagtggctgacctacggcagcggttacctggcgggcatgaagctgggcgggacgccgctggtcgagtatacgcgggacaggctgcaccgtgagacggtgcgcagcttcggcagcatggcaggcagtaatgccgcatatgaactgaccagcacatacacccctgcaggccagttacagagccagcacctgaacagcctggtgtatgaccgtgactacgggtggaatgacaacggcgacctggtgcgcatcagcggtccgcgacagacgcgggaatacggctacagcgccacgggcaggctggagagcgtgcgcaccctcgcaccggacctggacatccgcatcccgtatgcgaccgacccggcgggaaaccggctgccggacccggagctacacccggacagcacgctcacggcgtggccggataaccgcatcgcagaggatgcgcactatgtttaccactatgatgaatacggcagactgacggagaagacggaccgcatcccggcgggtgtgatacggacggacgacgagcggacccaccactaccactacgacagccagcaccgcctggtgttccacacgcggatacagcatggcgagccactggtcgagagccgctacctctacgacccgctgagccgccggacggggaaacgggtgtggcgtcgcgagcgtgacttgacggggtggatgtcgctgtcgcgtaaaccggaggtaacgtggtacggatgggacggcgaccggctgacgacggtacagaccgacaccacgcgtatccagacggtataccagccggggagcttcgcgccgctcatccgcatcgaaacagacaacggtgaacgggagaaagcgcagtgccgcagcctggcggagaagttacagcaggaagggagcgaagacggtcacggtgtggtgttcccggctgaactggtggggctgctggacaggctggagggggaaatccgggcagaccgcgtgagcagtgaaagccgccagtggcttgcgcagtgcgggctgacggtggagcggctggcggcacagatagagccggtttatttgcctgagcgaaaaatacatctttatcactgtgaccaccggggcttgccgctggcgcttatcagtgaagacggcaatacggcgtggagcgcggaatatgatgaatggggcaaccagcttaatgaggagaacccgcatcacctgcaccagccgtaccggctgccggggcagcagtatgataaggagtcggggctgtactacaaccggaaccggtactacgatccgttgcaggggcggtatatcactcaggacccgatagggctggaggggggggtaatgactccaacttattga

SEQ ID NO: 463705 - DNA, 348 bp, Shigella boydii; identical to SEQ ID NO: 461694

SEQ ID NO: 463706 - DNA, 381 bp, Shigella boydii
atgcagaaaaatgtgaatcccggcaggcgaaaaggctgccctaattatcctcccgaatttaaacagcagctcgttgctgcctcctgtgaacccgggatatccatctcaaaacttgctcttgaaaatggcattaatgccaatctgttgttcaaatggcgacaacaatggcgcgagggaaagctgctattaccttcttcagagagcccccagctacttcctgtgactctcgatgcagctgccgaacagccagaatcgctcgcagaggatccggaaaccctcagtatcagctgtgaggtaacgttccggcacgggacgctccgcttcaatggcaatgtcagcgaaaagctcctgactctgctgatacaggaactgaagcgatga

SEQ ID NO: 463707 - DNA, 525 bp, Shigella boydii
atgtttgctctctgtgatgtaaacgcgttttatgccagctgtgagacggtgtttcgccctgatttatggggtaaaccggtggttgtgctatcgaataatgacggttgcgttatcgcccgaaacgctgaggcaaaggtgctgggtgttaaaatgggcgatccttggttcaaacaaaaagatctgtttcgtcgctgtggtgtggtttgctttagcagcaattatgagctttacgcagacatgagcaatcgggtgatgtcgacgctggaagaactatcgccccgcgtcgagatttacagtattgatgaggcattctgcgatctgacaggtgtgcgtaattgtcgcgatctgactgattttggcagagaaattcgcgcaacggtgctacaacgtacccatcttactgttggtgtggggatcgcccagaccaaaacgctggctaagcttgccaatcatgcggcaaaaaaatggcagcggcagacgggggggtggtggatttatcaaatctggaacgccagcgtaaattaa

SEQ ID NO: 463708 - DNA, 348 bp, Shigella boydii; identical to SEQ ID NO: 462825

SEQ ID NO: 463709 - DNA, 984 bp, Shigella boydii
gtgaattatatttctttagaaaccttgatgaatgatattagagactcaataaatctattgagtaaacataattttgatttagttgtaggcattccaagaagtggtatgataccagcctatctgatcagtctttatttgaatattgacgtaaccgatgttaattcttttatcctaaatacaccaattcaaagaggatcgactagaacatcaggaaaacgcatatataacccacatgatgcacaaaggattctcttagtcgatgatagcttttcaacaggtaaatcgatgaggaatattttagattctataccagtggatttaaaaaaaaatattaaaacaatggttgcctatacatctgatgtaaatggcgctggattagatatttatatacgtcatgtttctcaccccagattgtttgaatggaatatactcaatcacagcatcattagcaatagctgtttcgatattgatggtgttttatgtgtcgatcctaatgagcttcagaatgacgatggtgaaaactatataaaatttatatgcgaggcagaacctaagtttatacctaagtttaagataaaatacttggttacaaaccgtcttgaaaaatacagagacataactgaagcatggttgttaaaaaataacatacaatatgagaaattaatcatgttaaatatggcgacaaaagaagaaaggcaatctgcaggaattcattccagacataaagccgaattttataaacgttccggttgtgatttatttgttgaaagtgatattaatcaggcgattgaaattatgaaatataccgggaagtatgtatattgtatagataataatagaatgtactctcctagcgccatacaatatttatctaaaaggccgcttgactttatgaatgatataattctttatttgccacgaattttatatcgtagattacccttagaaacaaagatggctataaaaaaaagattaaaaccttaa

SEQ ID NO: 463710 - DNA, 1413 bp, Shigella boydii
atgagcatttttaacaacttaaagtggaacgctatatcacaattatttaaaatagcaacacagcttataagtatgatttatcttgccagattaattgcaccagaagattatggtattatggctatggccaccgtggtaaccaatttcgcaatcctttttcgtgacttaggaacatcagctgctatagtccagagagattcgatcgacgaaagtctcaaatctgctatcttttggctaaatttattattaggcataatagtaggaactgcaattttatttagctcatcttatttttctgaattatacgacgtacctaaattaaaacctgttttatcattgctatctattaattttttcttacttggggcaacatctgttcacttatcacttcttgaaagagagtcaaaatttgaaaccatctcaaaaatagaaattttttcttttggctctgctttaatcattgctatagcaatggcatatctcaactttggggtatatagtttagtcactcaatctattgttagcacgttgttatcttcaggtttgttttggtatttaagttcatggagtcctagaatcaaaattgagaatatatttaaaaataccaaatcaatattttctttcagctatcagctatctctttttaatttcattaattactttgctcgtaatttagatagtttcctcataggtaagtacatgtcagcaactatattaggtgcatataatctagcatatagaattatgcttttcccacttacttcaataacgtttattgtaaaccgttcgttattccctatattaagtaaaaataaacacaagcatgctgaggtagaaaaaatatatttaaatacagtatatacgatttggtttataaccattcctcttattatatctctactttgtttaaatgaaatggtaataaatataatttttggagaaaaatggcatttatcttcatcaattcttgtatggttagcgcctacagctatcattcaaagcattttgagcaccacaggtataatatttatgtcccaaggccgtactggtatccttgtcttacttggggtacaaggagccatcttgacaggtattgcatttgtgattggcgttaatgacaatatcatttcactcgcaaaatattatttcatagctaatttagttcatttttttccatgtatggctttaaccatgtatgtgataaaatcaaacttttacaaacttattttgaaaacttatcctttatttatagcaggcttcattagctattatataatatatatattaaaaaaacacttggaccatagtttcttatcactagttattttgactattatatgtttcgtcgtgtttatagtttcattattaccgactaaagaagtcaaaaacttcattaatcggttaattaaataa

SEQ ID NO: 463711 - DNA, 360 bp, Shigella boydii; identical to SEQ ID NO: 461764

SEQ ID NO: 463712 - DNA, 294 bp, Shigella boydii
gtggcgcacgtcttcggtgaacgcactctggccacactggagcgtcttctgagcctgctgtcggcctttgaggtcgtggtatggatgacggatggctggccgctgtatgaatcacgcctgaagggaaagctgcacgttatcagcaagcgttacactcagcgcattgagcgacataatctgaatctgagacaacatctggcaaggctgggacggaagtcactgtcgttctcaaaaccggtggagctgcatgacaaggtcatcgggcattatctgaacataaaacactatcagtaa

SEQ ID NO: 463713 - DNA, 321 bp, Shigella boydii; identical to SEQ ID NO: 459259

SEQ ID NO: 463714 - DNA, 294 bp, Shigella boydii; identical to SEQ ID NO: 463712

SEQ ID NO: 463715 - DNA, 573 bp, Shigella boydii
atgaaaacgggaccgttaaacgaaagtgagttggaatggctggacgatattctgaccaaatacaacactaaccacgccatccttgatgtggcggagctggacgatttattgacggcggtgttgagttctccgcaagagattgaaccggaacagtggctggttgccgtgtggggtggggctgactatgtgccgcgctgggcgtcagagaaagagatgacgcgctttatgaacctggcttttcaacatatggccgataccgcagcgcgtctgaacgaattcccggagcagtttgagccgttattcggcttgcgagaagttgatggcagcgagctgacgattgttgaggagtggtgctttggctatatgcggggcgtggcactttctgactggtctacgttgcccgattcgttaaaaccagcgctggaggcgattgcgctgcacggtactgaggaaaacttcgagcgggtagaaaagatgtcgccagaagcgtttgaagagagcgtagatgccattcgactggcggcgcttgatctacatgcgtactggatggcgcatcgtaagcgtacagcctga

SEQ ID NO: 463716 - DNA, 1053 bp, Shigella boydii
  misc_feature (988)..(1012): n is a, c, g, or t
ttgctgggcggcttttttggcctgagcgcgggcaatagccgcggcaactgccgctttgcgcggatcaacctgttcttctggttctgcgttagtctgttgctgttccagcttgcgcgctttggcacgggcaatagcggcttcgacggcggctttgcgcggatcaacctgttcttcaggtaccgcattagcctgttgctgttccagcttgcgtgctttggcacgggcaatagcggcttcgacggcggctttgcgcggatcaacctgttcttcaggtaccgcattagcctgttgctgttccagcttgcgcgctttggcacgggcaatagcggcttcgacggcggctttgcgcggatcaacctgttcttcaggtaccgcattagcctgttgctgttccagcttgcgtgctttggcgcgtgcaatagccgcttcgacggcagctttgcgcggatcaacctgttcttctggctccgcattagcctgttgctgttccagtttgcgcgctttggctcgggcaatagcggcttcgatggcggctttgcgcggatcaacctgttcttcaggtaccgcattagcctgttgctgttccagcttgcgcgctttggcgcgtgcaatagccgcttcgacggcagctttgcgcggatcaacctgttcttctggctccgcattagcctgttgctgttccagtttgcgcgctttggctcgggcaatagcggcttcgatggcggctttgcgcggatcaacctgttcttcaggtaccgcattagcctgttgctgttccagcttgcgtgctttggcgcgtgcaatagccgcttcgacggcagctttgcgcggatcaacctgttcttctggctccgcattagcctgttgctgttccagtttgcgcgctttggctcgggcaatagcggcttcgatggcggctttgcgcggatcaacctgttcttcaggtaccgcattagcctgttgctgttccagcttgcgcgctttggcnnnnnnnnnnnnnnnnnnnnnnnnnctgttgctgttccagcttgcgcgctttggcacgggcaatag

SEQ ID NO: 463717 - DNA, 726 bp, Shigella boydii
atgttgattcaatgctcgctggcccgtggtgatttagataacgcccgtagccagctgaaccgtctggaaaacctgctggggaatggcaaatatcacagcgactggatctctaacgccaacaaagtccgggtgatttactggcaaatgaccggcgataaagccgccgctgccaactggttgcgtcatacggctaaaccggagtttgcgaacaaccacttcctgcaaggtcaatggcgcaacattgcccgcgcacaaatcttgctgggcgagtttgaacctgcggaaattgttctcgaagaactcaatgaaaatgcccgcagtctgcggttgatgagcgatctcaaccgtaacctgttgctgcttaatcaactgtactggcaggccggacgtaaaagtgacgcccagcgcgtgttgctggacgcattaaaactggcgaatcgcaccggatttatcagtcattttgtcatcgaaggcgaagcgatggcgcaacaactgcgccagctgattcaactcaatacgctgccggaactggaacagcatcgcgcgcagcgtattctgcgagaaatcaatcaacatcatcggcataaattcgcccatttcgatgagaatttcgttgaacgtctgctaaatcatccggaagtgccagaactgatccgcaccagcccgttgacccaacgtgaatggcaggtcctggggctgatctactccggttacagcaatgagtaa

SEQ ID NO: 463718 - DNA, 477 bp, Shigella boydii
ttgaatcccgacattcaactgacagcattacaacaacggttaacgggtgaggcgttaaaagatgcggttgcacgggccgatgtggtgctcgactgtaccgacaatatggcgactcgccaggagattaatgccgcctgcgtggtactcaacacgccgcttatcaccgccagcgcggtcggatttggcggtcagttgatggtactgacgccgccctgggagcaggggtgttaccgctgcctgtggccagataaccaggagccagaacgcaactgccgcacggtgggcgtggttggcccggtggtcggggttatgggcactttgcaggcactggaagccattaagttattaagcggtatagagacacctgcgggagaactccgactgttcgacggtaaatcgagccagtggcgcagcctggcgttgcgccgcgccagtggttgcccggtatgcggaggaagcaatgcagatcctgtttaa

SEQ ID NO: 463719 - DNA, 1359 bp, Shigella boydii
atgcaaaccgttttagcgaaaatcgtcgcagacaaggcgatttgggtagaaacccgcaaacagcagcaaccgctggccagttttcagaatgaggttcagccgagcacgcgacatttttatgatgcgctacagggtgcacgcacggcgtttattctggagtgcaagaaagcgtcgccgtcaaaaggcgtgatccgtgatgatttcgatccggcacgcattgccgccatttataaacattacgcttcggcaatttcggtgctgactgatgagaaatattttcaggggagctttgatttcctccccatcgtcagccaaatcgccccgcagccgattttatgtaaagacttcattatcgacccttaccagatctatctggcgcgctattaccaggccgatgcctgcttattaatgctttcagtactggatgacgaccaatatcgccagcttgcagccgtcgctcacagtctggagatgggggggctgaccgaagtcagtaatgaagaggaactggagcgcgccattgcattaggggcaaaggtcgttggcatcaacaaccgcgatctgcgtgatttgtcgattgatctcaaccgtacccgcgagcttgcgccgaaactggggcacaacgtaacggtaatcagcgaatccggcatcaatacttacgctcaggtgcgcgagttaagccacttcgctaacggttttctgattggttcggcgttgatggcccatgacgatttgcacgccgccgtgcgccgggtgttgctgggtgagaataaagtatgtggcctgacgcgtgggcaagatgctaaagcagcttatgacgcgggcgcgatttacggtgggttgatttttgtcgcgacatcaccgcgttgcgtcaacgttgaacaggcgcaggaagtgatggctgcggcaccgttgcagtatgttggcgtgttccgcaatcacgatattgccgatgtggtggacaaagctaaggtgttatcgctggcggcagtgcaactgcatggtaatgaagatcagctgtatatcgatacgctgcgtgaagctctgccagcacatgttgccatctggaaagcattaagcgtcggtgaaaccctgcccgcccgcgagtttcagcacgttgataaatatgttttagacaacggccagggtggaagcgggcaacgttttgactggtcactattaaatggtcaatcgcttggcaacgttctgctggcggggggcttaggcgcagataactgcgtggaagcggcacaaaccggctgcgccggacttgattttaattctgctgtagagtcgcaaccgggcatcaaagacgcacgtcttttggcctcggttttccagacgctgcgcgcatattaa

SEQ ID NO: 463720 - DNA, 288 bp, Shigella boydii; identical to SEQ ID NO: 462736

SEQ ID NO: 463721 - DNA, 294 bp, Shigella boydii; identical to SEQ ID NO: 460244

SEQ ID NO: 463722 - DNA, 636 bp, Shigella boydii; identical to SEQ ID NO: 460246

SEQ ID NO: 463723 - DNA, 837 bp, Shigella boydii
atggctaatgaaaaaaagacatcccgcaaaaagtttcgcgtggctgtctccggatcaactgttgatggccgtgaaatcagtccggtgcatctgcgtgaagccgccgagaacttcaacccggatgtttacgctgcccgcgtgaacgttgagcactatctctcgccatgcccgtcaagcgaattttccgcaatgggcgatgtcaccgcactgagtacggaagacattacggaaggtccgctggccggacgtactgcgctgtatgcagaaatcgaaccgaccgagcgcatgaagcagcttgttgcggacggcaagaaaatctattccagtatcgaactgcacccgcagttctccgttaacgggcgcgcctatctggtcgggctggcgatgaccgacaccccggcaagcctgggcactgagcgcctgaaattcacggcacagcaacgtcaggcggtgatgacgtttaacagtatccagggtgaagcgccgcttatctccgaagccatcgagtctgaaatcatcgaaatggcagaacaacgccaggaagaaggcacccagtggtttaaccgcgtaatggggattattggccgtggccgcaaagcggatgacgccagtttttcccgtattcaggaagcggtggaaggcgtcgcaacgtcacaggccgacattatcgaccgttttaatgtgctggaaacccgccatcagcaggaccgccagaaaattacgtcactgaccacagagctggcagcactgaaggaaaaactgcgcacgcaggacggcgatccgcagaaccgcttcaccgcaacgggcgcagcctccgaccagctggccgacttctga

SEQ ID NO: 463724 - DNA, 234 bp, Shigella boydii
atggctttattgccggataaagaaaaattgctgcgtaattttttacgctgcgccaactgggaagagaaatatctctacattattgagctgggccagcgtctgccagaattacgcgacgaagaccgaagcccacaaaatagcattcagggctgccagaatcaggtgtggattgtcatgcgccagaatgcgcaggaattattgaattgcagggcgacagcgatgcggcgattgtga

SEQ ID NO: 463725 - DNA, 783 bp, Shigella boydii; identical to SEQ ID NO: 461746

SEQ ID NO: 463726 - DNA, 381 bp, Shigella boydii; identical to SEQ ID NO: 463673

SEQ ID NO: 463727 - DNA, 192 bp, Shigella boydii; identical to SEQ ID NO: 459673

SEQ ID NO: 463728 - DNA, 294 bp, Shigella boydii; identical to SEQ ID NO: 460208

SEQ ID NO: 463729 - DNA, 624 bp, Shigella boydii; identical to SEQ ID NO: 461766

SEQ ID NO: 463730 - DNA, 1866 bp, Shigella boydii; identical to SEQ ID NO: 459907

SEQ ID NO: 463731 - DNA, 471 bp, Shigella boydii; identical to SEQ ID NO: 463364

SEQ ID NO: 463732 - DNA, 837 bp, Shigella boydii
atgaacagtttaacggcaaataaccgtttgtcgcaacagctggtggtcagcgtcgctgaacacctgttgttacggcatgaatgcagattaccaaatctcctggctgtaagtaaccacagagaactttacctgactgtggggggcgagttgtgcaggaacttaaccgctggtttcgtgacggaagaggactttatgttcatgttattcgttgggagccagaaacacagcgcgttatctatcttcgcaaagactacccgcatgagtgctttagtcctttgtggaaattcaagcgtgattttgttgagtgtgaaggaccaccagcacattgattctgccattccgggacgttacactgttcaggcaccttataaagcgggtgccgggattggcgtcctggaattgatcaaggcgatatatgacgcgccagcgtcttttttatcgtccgcatttgctcacatcaaagttatggtgggctgggcgggggcatcgaaagatgcgccggtttccttgatcaccggttacgccaaccccgttcagttcaccaccagcgaaattggcgtttccggtggtggaagtatttcaccgatcaaggaggctgccatcatggctactgtcccagccctcactcgtctgaatgatgaagacttacataaactcagttatgtaacaactgcattacgtgctctgcgcaaggtaactctttcggatccgcaggcacatcaggttctggtagaaacccttcttaacttgcaagctgaacgtattcgtctggcggataaggctaattttcatattcaccgtctcctgaatatcagcggagggcatcgtcatgcttaa

SEQ ID NO: 463733 - DNA, 552 bp, Shigella boydii; identical to SEQ ID NO: 399874

SEQ ID NO: 463734 - DNA, 363 bp, Shigella boydii; identical to SEQ ID NO: 12787

SEQ ID NO: 463735 - DNA, 612 bp, Shigella boydii
atgaccactttcaccgataaggaactgattaaagaaatcaaagaacgaatcggcagcttagacgtgcgagacaatgttgagcgccgtgcttatgaaattgctctggcatcactggaagcagagccggtggcgtggcttcattcagacaatggcttaggtattccggcaataaccaggagcaaaaacattgctgacagttggttatcaaagggctggtatgttcagccgctatatatggctcagccagtgtcggtggtgccggatgctcttccgtctttaaataatggcatagtcggctttgatgaaggctggaacgcctgccgcgccgtcatgcttcatggtgccgaacctgtaagccagacttacaagttgaacaagctgtcgggcaaccctcctgtaactccggatggttggataagctgtagtgagcgaatgccagaggacggtcagcacgtaattattttatgtgatggcgcattcgttctttatgcgcaatatcgagacggtgagttttttgatgttgtccgcaatggtgaggagttcttcgaaacgcagagccgcaatgtaacccactggataccgctaccggagccgccgcaggaggtaaattaa

SEQ ID NO: 463736 - DNA, 816 bp, Shigella boydii; identical to SEQ ID NO: 31814

SEQ ID NO: 463737 - DNA, 969 bp, Shigella boydii
atggatgattcggtttctgtcgttataccttattacaatgattcccctcgtattgaaaagtgtttggatagtatatgttcacaaaccagacaagctattgaagttataatagttgatgattgttcaaaagatagtgcattactactaaaaatcattgataaatttaaaaataaaataaatatacgatatttgagaaatgatgaaaataaaaatggggcatattccagaaacgtagggatgagagaagcaaggggaggaattgttgcttttctcgatgctgacgactattgggccacagatcatctcgaggaaagtgtaaatgctttgttgttaaatggggtggaatttgttttttcaaatgtaatagaggttgattgttgtggttgtgagagtcgaagaaaagttactaatccccaatatttggataataaatacgatataatactgctttctcctcctcaaactaattcattcctatttaggaaaaaaatatttgacactaaagagattttttttgatgaaaacttacgtagacatcaagattatcaatttcttactttaatattagaaaaaaatatttcatatcaatatattgataaatatacttcatattatgtgcaatcacatcgtcctcatactgaaagaatggattataaatctgtttttttattttgggaaaaatataattcttatgtttctgggagattactaaaaaaatttattaccggtttagttcttgaggtggttcttgtgtatgggaaaaataaaacaaagagttttattgattcgcatgaacttgtcaagataaacgcatcgaaactatttctttatcttgtgttaaaaacaaattttggtgttaatgctaatagggtgatttatccttttttttattatattttattcagccccaaaagcatattaaaaaagatatcacaaaggattaatagaaagttggtacataatgcgtaa

SEQ ID NO: 463738 - DNA, 1293 bp, Shigella boydii; identical to SEQ ID NO: 462854

SEQ ID NO: 463739 - DNA, 354 bp, Shigella boydii
atggcattagataatataaacctaaattttagtagtgacaaacagatagaaaaatgtgagaaactatcttcaatagataatattgatagtctcgttttgaagaagaagaggaaggttgaaattcctgagtactctttaattgcatctaactattttactattgataagcactttgaacataagcatgataaaggagaaatttatagtggcattaaaaatgcgttcgaacttagaaacgaacgagcgacatattctgatattccagaatcaatggccattaaagaaaatattttgataccagatcaagatatcaaagcaagggaaaaaataaatatcggcgatatgttcatataa

SEQ ID NO: 463740 - DNA, 225 bp, Shigella boydii; identical to SEQ ID NO: 462228

SEQ ID NO: 463741 - DNA, 342 bp, Shigella boydii
atggcgctcaggagccagcgcccacctgccgggctaatccaccactctgatcgaggttcacagtactgcgcatacgattaccgggtcatacaggagcagtctggtctgaaaacatcaatgtcgcgtaaaggtcagtgttacgacaacgctccgatggaaagcttctggggaacgctgaaaaatgagagcctgagccactatcgttttaataaccgggatgaagccatctcagtaatacgggaatacattgagattttctacaatcgtcagcgtcgtcactctcgtctggggaatatctccccggcagccttcagggaaaaatatcatcagatgactgcttaa

SEQ ID NO: 463742 - DNA, 801 bp, Shigella boydii; identical to SEQ ID NO: 461785

SEQ ID NO: 463743 - DNA, 1260 bp, Shigella boydii
atgtttacatcagtggcgcaagccaatgctgcggttatcgaacaaattcgtcgtgctcgtccacactggctggatgtgcaaccggctttttcacttatcagcgaactaaacgagggcaaaacactgcttcacgccgggccgccaatgcgctggcaggagatgaccggacccatgaaaggggcgtgcgtgggcgcatgtctgttcgaaggctgggcgaaagatgaagcgcaggcactggcgatgctggatcagggggaagtgaacttcattccttgtcaccatgtgaatgccgtcgggccaatgggcggcattacttctgccagtatgccgatgctggtggtcgagaacgtgaccgacggcaaccgggcgtactgcaacctcaacgaaggtatcggcaaagtgatgcgttttggcgcttacggcgaagatgtcctgactcgccatcgctggatgcgcgatgtgttaatgccagtattaagcgcggcgctggggcgcatggagcgcggtatcgatctcacggcgatgatggcgcagggcattacgatgggcgatgagttccatcaacgcaatattgcttcctcagcactgttaatgcgtacgctggccccacaaattgctcgcctcgatcatgataaacagcacattgcggaagtgatcgatttcctcagcgtgaccgatcagttcttcctcaacctcgcgatggcctactgcaaggcggcgatggatgctggcgcgatgatccgcgcaggcagcatcgttacggctatgacccgcaacggcaatatgttcgggattcgggtaagcgggctgggtgaacgctggtttactgcgcctgtaaacactccgcaaggtctgtttttcaccggcttctcgcaggagcaggcgaacccggatatgggcgatagcgcgattaccgaaacctttggtatcggaggtgcggcaatgatcgcagcgcctggcgtaacgcgctttgtcggtgcgggtggcatggaagcggccagggcggtatctgaagagatggcggaaatttaccttgaacgcaatatgcagttgcagatcccaggctgggattttcagggcgcgtgcctggggctggatattcgtcgcgtggtagaaaccggcattacgccactcatcaataccggtatcgcccataaagaggcggggatcgggcagattggcgcaggcaccgtgcgggcaccgctggcgtgctttgaacaggcgctggaagcactggctgaaagcatggggattggttga

SEQ ID NO: 463744 - DNA, 183 bp, Shigella boydii; identical to SEQ ID NO: 460595

SEQ ID NO: 463745 - DNA, 576 bp, Shigella boydii
atgaccggcatagctgacatggctcatcatcacgccaatggaaccgatacgggatgtctgggtaaccagccgtcgggagcaggccgacgccagcagcatggccgcagaacaggccgtgtcattacacagtgcccagaccggcttctgctgccggaggcggtaaatcatgtcagcgcagtcaaacacgccggcggcctgcccgcccggactgtcaatgtccagcagtatgccccgcacctggctatctgccattgcctgctgaagacaggtgacaatgccgtcatagccagtcattccggaaaatggccgcatcccccccagccggtgcaccagcgtgccggtcaccggcagtaccgcaataccgttcaccacccggtaaacacgggccggtcgtttacctccggccatgtactcgtccgtttcagccagcatcccgggagcatcaagctgtacctgctgttgcggtaccgaaagacttgctgcccccatctcgcgccccagcgcgcaaaagaaaacccgcgcataggcgggctccagaagcagcggttcattgaatgctgctgcaataatgtgtga

SEQ ID NO: 463746 - DNA, 231 bp, Shigella boydii
atgaaaattggcgtattcgtacctattggcaacaacggctggctcatttcgacccacgcgccgcagtacatgccgacctttgaactgaataaagccattgtgcaaaaagcggagcattaccatttcgatttcgccctgttgaagtggcacactgaatttggccacctgaacagaggtgatatgctcacctcagaacaacacaggtgctccaatgaaaaaaagaaattttag

SEQ ID NO: 463747 - DNA, 492 bp, Shigella boydii; identical to SEQ ID NO: 460462

SEQ ID NO: 463748 - DNA, 171 bp, Shigella boydii
atgaacgtgagtaaatatgtcgctatcttttcctttgtttttattcagttaatcagcgttggtaaagtttttgctaacgcagatgagtggatgacaacgtttagagaaaatattgcaccaacctggcaacagcctgaacattatgatttatatattcctgccatcacctag

SEQ ID NO: 463749 - DNA, 357 bp, Shigella boydii
gtggatagtaataatcaaattgaaccctgtttaagcagaaagtcgtcagaaggtaaaccacaaatatttacaaccttacgaaatattgctcttaaccttctgactatttttgaagctgtatatgtacataaagggatcgttaatgcagcgaaagtgcttaatctgcccccctcggcaatcagtcagtctattcagaaactgcgcgttatattccctgacccattgtttattcgcaaaggccagggtgtcactcctaccgcatttgcgatgcatctacatgagtatatcagtcagggccttgagtccattcttggccgctggatatcgaaggaagctatgataagcaacgaacgataa

SEQ ID NO: 463750 - DNA, 615 bp, Shigella boydii
atgaccgtggcgattcgcacttttttacagcaaaacgccaatcgggaaggcgattgcctgaccatccccgacagcagcgccacgcagcgtgtttctgcttcgccagcgaccacgggggcgcgaacgatgaccgcctggacgcaggatctcatctatgcaggcgatccggttcattatcatggcagtcgagctaccgaagggacactttcctggcggcaagccacggcccaggcggggcagggagagcgttacgaccagatactcgcgtttgcttatcccgacaacagccttagccgctggggagcgccacgctcaacctgccagttattacccaaagcgaaagcctggctggcgaaaaaaatgccgcagtggcggcgtatattacaaggcgagacggggtacaacgaaccagacgtgtttgcggtctgtcgtttagtctcaggtttcccctataccgatcggcagcagaaacggctgtttattcgtaacttctttacgcttcaggatcggctggatttaacccatgagtatctgcacctggcctttgatggttatcccaccgggcttgatgagaactatatcgaaacgctgacccgacaattattaatggactaa

SEQ ID NO: 463751 - DNA, 696 bp, Shigella boydii; identical to SEQ ID NO: 462495

SEQ ID NO: 463752 - DNA, 657 bp, Shigella boydii; identical to SEQ ID NO: 463703

SEQ ID NO: 463753 - DNA, 1470 bp, Shigella boydii; identical to SEQ ID NO: 460832

SEQ ID NO: 463754 - DNA, 1206 bp, Shigella boydii
atgaccctaccaaaaattaaacaggttcgcgcctggtttactggcggtgcgacagcagaaaaaggcgctggcggcggtgattatcacgaccagggggcgaatcactggatagacgatcatattgccaccccgatgagtaaataccgcgattacgagcagtcacgccagtcatttggcattaacgttcttggcacgttggttgttgaagtcgaagcagaaaacggccagaccggattcgctgtttcgacagccggtgaaatgggctgttttatcgtcgaaaaacaccttaaccgtttcattgagggtaaatgtgtcagtgatatcaaactgatccacgatcaaatgctcaatgccaccctgtattactccggctctggtggcttggtgatgaatacgatttcctgtgtcgatctggctctgtgggatctgttcggcaaagtggtcgggcttccggtttataaacttttaggcggcgctgttcgtgatgagattcagttctacgccacaggtgcgcgtccggatctggcaaaagagatgggctttatcggtggcaaaatgccgacgcactgggggccacatgatggcgatgcggggatccgcaaagatgccgctatggtcgcggatatgcgtgaaaaatgcggtgaagatttctggttaatgctcgactgctggatgagtcaggacgtgaactatgcgaccaaactagcccacgcttgcgcgccctataacctgaaatggatcgaagagtgcctgccgccacagcagtatgaaggttatcgcgaactgaaacgcaacgcgccagtcggaatgatggtcaccagcggtgagcaccacggcacactgcaatcttttcgtacgctttcagaaactggtatcgacattatgcagccggatgttggctggtgcggtggtttaaccacgctggtggaaattgccgcaatcgccaaatccagggggcaactggtggtgccgcacggttcgtctgtttactctcaccatgcggtgatcaccttcaccaatacgccattcagcgaattcctgatgaccagcccggattgttcaacgatgcgttcgcagtttgacccgattctgctcaatgagccggttccggtgaatggtcgtattcataaatcagtgcttgataaacccggttttggcgtcgaactcaatcgtgactgcaatttgaaacgcccctacagccactaa

SEQ ID NO: 463755 - DNA, 276 bp, Shigella boydii
gtggcttctgtttctatcagctgtccctcctgttcagctactgacggggtggtgcgtaacggcaaaagcactgccggacatcagcgctatctctgctctcactgccgtaaaacatggcaactgcagttcacttacaccgcttctcaacccggtacgcaccagaaaattattgatatggccatgaatggcgttggatgccgggcaactgcacgcattatgggcgttaacctcaacacgattttacgtcacttaaaaaactcaggccgcagtcggtaa

SEQ ID NO: 463756 - DNA, 498 bp, Shigella boydii
atgattaaggtgtatggcgtacccggatggggctctacaatcagtgagctgatgctaacactggctgatattccttatcagttcgttgatgtcagtggttttgaccacgagggaacttcacgcgagttattgaaaaccctgaacccgttgtgtcagattccgacactggcgctggaaaatgacgagattatgacggagacagcggcgattgcattgatggttctcgatcgtcgcccggaccttgcgccaccggttgggcgcgccgaacgtcagcagtttcaacggctattggtctggctggttgctaatgtctatccaacattcactttcgccgattaccctgagcgttgggctcctgacgcacctgaacagttaaagaagaatgttattgaatatcgtaaatcgctttatatctggctgaattcacaattgaccgctgaaccttatgcgtttggtgagcaactaacgctgggtaatgctgccaacttactgatttag

SEQ ID NO: 463757 - DNA, 450 bp, Shigella boydii; identical to SEQ ID NO: 199159

SEQ ID NO: 463758 - DNA, 681 bp, Shigella boydii; identical to SEQ ID NO: 199158

SEQ ID NO: 463759 - DNA, 468 bp, Shigella boydii; identical to SEQ ID NO: 199157

SEQ ID NO: 463760 - DNA, 1116 bp, Shigella boydii; identical to SEQ ID NO: 199156

SEQ ID NO: 463761 - DNA, 585 bp, Shigella boydii; identical to SEQ ID NO: 199155

SEQ ID NO: 463762 - DNA, 183 bp, Shigella boydii
atgaatgcactttctgcattgctgacaaaaattgaacaggcttcaccaacacagcgggacaaaggtacaacctttgaaaacctttgtgtgcagtatttcctccatgaacctaaatatgccgagctgtacagtgacgtgctgagctacgggtccgcttggaaaaaggaaattatcctacgttaa

SEQ ID NO: 463763 - DNA, 369 bp, Shigella boydii
atgtttagctatctcaaggctatgtatcatcaatcaaaaattcaggctgaactcaaggcacagatacatgaacaaactacggttaatgctatctgtcatcaccctgaatcaatcgagatcattgcggtttgttcgactgatgcgtattaccgaaaacgtaaggacgctgcttttctgacaacctgttctgtgctcatgcgtactttaaaagatgaatccgtaccgatggtactacggaaaacagcatggcgattattgaacgaaagataccaacgaattaagttaaatcaggcttataggatagaaaatttcttgctttttgccgattttgaatatgctctcgaagaacatgatgaactagcagagtag

SEQ ID NO: 463764 - DNA, 306 bp, Shigella boydii
atgaagttcgccaaaaaaggtgaaaaagatacagtcatctataacaataaaattcgcataaaaaacattccaactgaagcctatgactacgttgtgaatggcaagccagctcttgaatgggtgatggagcggcaaggtgtctctactcataaagatagcggtattgtgaatgatgctaatgactgggcagttgaaacaatgaataaccctagatacccactagagctattcctgagaattatcactgtcagcctggaaactcagaaaatcgtcaatagcctgcctaaattagatatcggggtttga

SEQ ID NO: 463765 - DNA, 342 bp, Shigella boydii; identical to SEQ ID NO: 460954

SEQ ID NO: 463766 - DNA, 900 bp, Shigella boydii; identical to SEQ ID NO: 461193

SEQ ID NO: 463767 - DNA, 1647 bp, Shigella boydii
atgaaagtgacattaacgttcaacgaacaacgtcgtgcggcgtatcgtcagcaagggttatggggcgatgcttcactggccgattactggcagcagaccgctcgtgcgatgccagacaaaattgccgtggtcgacaatcatggtgcaacgtacacctatagcgcgctcgatcacgccgcgagctgtctggcaaactggatgttagcgaagggtattgaatcaggcgatcgcatcgcatttcaactgcctggctggtgtgaatttaccgttatctatcttgcctgcctgaaaatcggtgcggtttccgtgccgctgttgccttcctggcgggaagcagaactggtgtcggtgctcaataagtgtcaggcaaaaatgttctttgcaccgacgttgtttaaacaaacacgtccggtagatttaatcctgccgctgcaaaatcagcttccacaactacaacaaattgtcggcgtggacaaactggctcccgccacctcttccctctcattaagtccgattatcgccgacaatacctcactgaccacggcgataacgacccacggcgatgaattagctgcggtgctgtttacctccggaaccgagggtctgccaaagggcgtgatgctaacgcataacaatattctcgccagtgagcgggcttattgcgcgcgactgaatctgacctggcaggatgtctttatgatgcctgcgccacttggtcacgcaacgggctttctgcatggcgtaacggcaccattcttaattggcgctcgcagcgtgttgttagatattttcactcctgatgcgtgtctcgcgctgcttgagcagcagcgttgcacctgtatgctaggcgcaacgccgtttgtctatgatcttttgaatgtactagagaaacaacccgcggacctttcagcgctgcgtttctttctttgcggcggtaccacaatccccaaaaaagtggcacgtgaatgccagcagcgcggcattaaattattaagtgtttatggttccacagaaagttcgccgcatgcggtggtgaatctcgatgatcctttgtcgcgctttatgcacaccgatggttacgctgccgcaggtgtagagattaaagtggtcgatgacgcacgcaagaccttaccgccaggttgcgaaggtgaagaagcctcgcgtggccccaatgtttttatggggtattttgatgaacctgaattaaccgcccgtgcgctggacgaagaaggctggtattgcagcggcgatctctgccgtatggatgaggctggctatataaaaattaccggacgcaaaaaagatattattgtccgcggcggcgaaaatattagcagccgtgaagtggaagatattttattgcagcatcctaaaattcacgatgcctgtgtggttgcaatgcccgatgaacgtttaggtgaacgatcatgcgcttatgtcgtgctgaaagcgccgcatcattcattatcgctggaagaggtggtggctttttttagccgtaaacgggtcgcaaaatataaatatcctgaacatatcgtggtaatcgaaaaactaccgcgcactgcctcaggtaaaatacaaaagtttttgttaagaaaagatattatgcggcgattaacgcaggatgtctgtgaagagattgaataa

SEQ ID NO: 463768 - DNA, 165 bp, Shigella boydii
atgatgccctttgcagccggaaagggcatctctttcagaaaattgctgattttcctcttttccttgattactgttattttttccggtaatgactccaacttattgatagtgttttatgttcagataatgcccgatgactttgtcatgcagctccaccgattttga

SEQ ID NO: 463769 - DNA, 1071 bp, Shigella boydii; identical to SEQ ID NO: 460010

SEQ ID NO: 463770 - DNA, 402 bp, Shigella boydii
ttgtctaattcgtcagattctgaccagacggttcaggctgtacgcttaccggcggatgaaatcactcaacgtacccatgctgccctgcaatgttgtcagttagcagacactgccaactcgcacccgttggatctgcatagtgcgcagcgacggatggtcgccgtcgcctgcctggaagcactctctccgccactattactgctggacgagccgagtcgggattttgacgaaaattggttgagcgtgtttgaaagctggctggagaagtgccgccagcgaggcacgagcgtggtagcaatcagtcatgacgccgcatttacccggcgtcatttctctcgtgtggtgcgactggaagatggtgtaatcaggaacgttaatccaccagacgatattcacccgtag

SEQ ID NO: 463771 - DNA, 381 bp, Shigella boydii; identical to SEQ ID NO: 463673

SEQ ID NO: 463772 - DNA, 1761 bp, Shigella boydii; identical to SEQ ID NO: 461901

SEQ ID NO: 463773 - DNA, 267 bp, Shigella boydii; identical to SEQ ID NO: 462029

SEQ ID NO: 463774 - DNA, 1497 bp, Shigella boydii; identical to SEQ ID NO: 461377

SEQ ID NO: 463775 - DNA, 657 bp, Shigella boydii
atgcctgcgatcaatgccaaacgtgtttaccggatcatgcgccagaatgcgctgttgcttgagcgaaaacctgctgtaccgccatcgaaacgggcacatacaggcagagtggccgtgaaagaaagcaatcagcgatggtgctctgacgggttcgagttctgctgtgataacggagagagactgcgtgtcacgttcgcgctggactgctgtgatcgtgaggcactgcactgggcggtgactaccggcggcttcaacagtgaaacagtacaggacgtcatgctgggagcggtggaacgccgcttcggcaacgatcttccgtcgtctccagtggagtggctgacggataatggttcatgctaccgggctaatgaaacacgccagttcgcccggatgttgggacttgaaccgaagaacacggcggtgcggagtccggagagtaacggaatagcagagagcttcgtgaaaacgataaagcgtgactacatcagtatcatgcccaaaccagacgggttaacggcagcaaagaaccttgcagaggcgttcgaacattataacgaatggcatccgcatagtgcgctgggttatcgctcgccacgggaatatctgcggcagcgggcttgtaatgggttaagtgataacagatgtctggaaatatag

SEQ ID NO: 463776 - DNA, 303 bp, Shigella boydii; identical to SEQ ID NO: 458125

SEQ ID NO: 463777 - DNA, 315 bp, Shigella boydii; identical to SEQ ID NO: 35584

SEQ ID NO: 463778 - DNA, 660 bp, Shigella boydii; identical to SEQ ID NO: 35583

SEQ ID NO: 463779 - DNA, 1191 bp, Shigella boydii; identical to SEQ ID NO: 198466

SEQ ID NO: 463780 - DNA, 129 bp, Shigella boydii; identical to SEQ ID NO: 33085

SEQ ID NO: 463781 - DNA, 306 bp, Shigella boydii; identical to SEQ ID NO: 380685

SEQ ID NO: 463782 - DNA, 912 bp, Shigella boydii; identical to SEQ ID NO: 461417

SEQ ID NO: 463783 - DNA, 342 bp, Shigella boydii; identical to SEQ ID NO: 462006

SEQ ID NO: 463784 - DNA, 252 bp, Shigella boydii
gtggatgatcttcgcgccgggatttttttcgaggaacgcttctgccagcagaccgacaatgtagtagccctcgataaactgccctttttcgtcaaacaggaaacagcggtcaaaatcgccgtcaaaggcaatgcccatatccgcgccgtgtttgatgaccgcattgcgggtgtcgtcacggcattccggcagcagcgggttaggaataccgttggggaaattgccgtccggcgtgttgtgcactttgattaa

SEQ ID NO: 463785 - DNA, 291 bp, Shigella boydii
atgatcaacgtaagcgtcacgcagattgatttgctgatagcgaccgcgttttgtttcatcgacgggagggaagtcgttggcttctgccaggcgctggacatcgcgcagtccggtatcaccgctgatcggacgagccccttcgcgcaccagtttcatgccgttgtaatccatcggattatggctggcagtaacttcaatgccgccatccacgccgagatggaacgtggcgaaatagatctcttcggtgccggacataccaatatccagcacatcgacgcccgcatcctgtaa

SEQ ID NO: 463786 - DNA, 1437 bp, Shigella boydii
atgtcaaataatattatctgtcctgtgattatggctggtggttctggtagccgtctatggcctctttctcgtcttttttatccaaagcaatttctaaaattagtagatgattcaagtatgctacaagaaacaattagtcgccttggagatcttccttgtagcttacctgttgttatatgtaatgaacagcatagatttattgttgctgaacagcttcgaatgattaataagttaacgaataacattatattagaacctgtagggcgcaatacagccccagcaatagctttagcagcaatgatctctgagtctttttcttctttagaagatcccttacttttagtattagctgctgatcatgatattaaaaatcataaatcatttcgtgatgctgtaaggaaagctattccttttgcagaacaaggtaaattagttacttttggtattgttccaagtatggctgaaacaggatatggctatattaagcgtggacatgaaatttctttggaaaatgatgaagtcgcgtatactgtttcgaagttttatgaaaaacctaatataagtgatgcccaaaaattcctcgcttctggaaaattttattggaatagtggtatgtttttatttagagcttctcgttatttgagtgagttaaataaatttagaccagatatatacttagcatgcgcatcttctactaaaaatataaataccgatcttgattttattcgtgttgatgaaaattcattttctaactgcccagatgaatccatagactatgcagtcatggaacaaacttctgatgcagtggttgttcctatgaatgcaggttggagtgatgttggatcatggtcttccctatgggagattagtaaaaaaaatgaacaagggaatgttaatcatggtgatgttattaatcacaatactgagaatagttatgtctatgccgagtctggtttggtgactaccattggggtaaaagacttggttgttgtacaaaccaaagatgccgttcttgttgcagatcgcaattctgtgcaggatgtgaaaaaagtagtggagcagattaaagcccatggtcgttccgaacatcagatgcatagagaagtttatcgtccatggggtaaatatgactctatcgacgcaggcgagcgctaccaggtgaaacgcataaccgtgaaaccgggcgaggggttgtcagtacagatgcattaccaccgttcggaacactgggtagtggtagcgggaacggcaaaagtcactattgatggggttatcaaacttcttggcgaaaacgagtccctctatattccgcaaggggcgaagcattgcctggaaaatccggggaaaataccgcttgagttaatagaagttcgctccgggtcttatctcgaagaggatgatgtggtgcgttttgcagatcgttatggaagagtctag

SEQ ID NO: 463787 - DNA, 252 bp, Shigella boydii; identical to SEQ ID NO: 27034

SEQ ID NO: 463788 - DNA, 342 bp, Shigella boydii; identical to SEQ ID NO: 462015

SEQ ID NO: 463789 - DNA, 336 bp, Shigella boydii
atgcaactcgaaaaagaaatagactctttttctgcattttcaaacacagcatctgctgaacagctatcaacccagcagaaatcattaaccggacttgccagtgttactcaattgatggcaacctttattcaactagttggaaaaaataatgaagaatctttaaaaaatgatctggctctattccagtctctccaagaatcaagaaaaactgaaatggagagaaaatctgatgagtatgctgctgaagtacgtaaagcagaagaactcaacagagtaatgggttgtgttgggaaaatacttggggcacttttaactcactggcagctgttggtttag

SEQ ID NO: 463790 - DNA, 1455 bp, Shigella boydii
atgaaaatacctgaagcagtaaatcatattaatgttcagaacaatattgatcttgttgatggaaaaataaatccgaacaaagatacaaaagcattacaaaaaaacatatcatgcgtaacaaactcatcctcttctggcataagtgaaaaacatttagatcactgtgctgatactgtgaaaagctttttaaggaagtctatagcagcgcaaagttatagtaaaatgttctctcaagggaccagtttcaaatcattaaatctttctattgaagcgccatctggagcacggtcatcatttcggtcacttgagcacctcgataaggtgtccagacactatctttctgaaataatacaaaaaactcatcctctttcttcggatgaacgtcacttgctctctattattattaattctgattttaacttcagacatcaaagtaacgctaacctgtcaaataatactcttaatattaagtcctttgataaaattaagtctgagaatatacaaacatataaaaacacattctctgaggatattgaagaaatagctaaccacgattttgttttttttggggttgaaatttccaatcatcaagaaacactcccactaaataaaacacatcatactgtggattttggtgctaatgcgtatatcattgatcatgactctccatatggatatatgacattaaccgaccactttgataatgctattccacctgttttttaccatgagcaccaatcatttttcttagataactttaaagaggttgtggatgaagttagcaggtatgtgcatggtaatcagggaaaaactgatgtgccaatatttaatactaaagatatgaggcttggaattgggttgcatcttattgattttataagaaagagtaaagatcaaagattccgagagttttgttataataaaaacattgatcctgttagtctggatagaattataaactttgtgtttcagcttgagtatcatataccaagaatgctaagcacagataacttcaaaaagataaaactcagagatatatctttggaggatgccattaaagcatccaattatgaagaaattaacaataaggtgactgataaaaaaatggctcatcaagctcttgcttattctctaggcaatgcaaaatctgatatggcactttatttactatctaaatttaattttacaaaacaagatgtcgcagagatggagaaaatgaacaacaatatgtattgtgagctgtatgatgttgagtatttacttagtgaagatagtgccaactataaagtgctagaatattttattaataatggattggttgatgtaaacaaaagatttcaaaaagcaaatagtggggacactatgcttgacaatgcaatgaaaagcaaagattcaaaaacaattgattttttattaaaaaatggagcggtatcaggcaaacgatttgggaggtga

SEQ ID NO: 463791 - DNA, 237 bp, Shigella boydii; identical to SEQ ID NO: 461459

SEQ ID NO: 463792 - DNA, 657 bp, Shigella boydii; identical to SEQ ID NO: 461455

SEQ ID NO: 463793 - DNA, 705 bp, Shigella boydii
atgtctatgccattaagcaatgcccttcagagtcaaattattacagataatcacttccttcatcatccaaaagtcgacaataagttaacacgtgaatatgaatatgcacgcatggatacggaaaatatctatcttctgcctcttactcgtggaaataaccataattacgatggaaaaagcgttgtcgaaattagaaaacttaatattggcaaacagtcctggccatttaattatgcgacagatacatgcagagaattcaatggtattacaacaacaggacgtatgctctatcgaaacttgaaaatcacctcagctttagacgaaatatatggtggtatatgtaaaaaggcgcatgctgctacagagttagcagaaggtttacggctaaatttatttatgaagagccctttcgatcctgttgaggactatacagttcatgaaataacattaggccctggttgcaatgttcctggttatgccggaaccacgataggatatatttcaacccttccagcttctcaggcaaaaagatggaccaatgagcagccaagaattgatatctatattgatcagataataactgtctcaggggtggcaaattcttccggattcgcccttgccgcattacttaatgctaatattggaatgggaaatgacccaataattggtatagaagctggtgatgctgccaacttactgatttag

SEQ ID NO: 463794 - DNA, 657 bp, Shigella boydii
atgcctgcgatcaatgccaaacgtgtttaccggatcatgcgccagaatgcgctgttgcttgagcgaaaacctgctgtaccgccatcgaaacgggcacatacaggcagagtggccgtgaaagaaagcaatcagcgatggtgctctgacgggttcgagttctgctgtgataacggagagagactgcgtgtcacgttcgcgctggactgctgttatcgtgaggcactgcactgggcggtgactaccggcggcttcaacagtgaaacagtacaggacgtcatgctgggagcggtggaacgccgcttcggcaacgatcttccgtcgtctccagtggagtggctgacggataatggttcatgctaccgggctaatgaaacacgccagttcgcccggatgttgggacttgaaccgaagaacacggcggtgcggagtccggagagtaacggaatagcagagagcttcgtgaaaacgataaagcgtgactacatcagtatcatgcccaaaccagacgggttaacggcagcaaagaaccttgcagaggcgttcgagcattataacgaatggcatccgcatagtgcgctgggttatcgctcgccacgggaatatctgcggcagcgggcttgtaatgggttaagtgataacagatgtctggaaatatag

SEQ ID NO: 463795 - DNA, 1143 bp, Shigella boydii
atgagcggttggtttgacctgaccttaaatcagcgtgtttataatcaggacggtaaaacggcaaatgcggtcgttacctatgatggcaacgtgggtgagcagtataacgatgcctggtttggtgacagtgccaatgaaaatatcatgcagttcagcgatatttacctgacaacgcgaggttttttacccttcgcaccagaggcagacttctgggtcggcaaacataaactcccgcaatatgagatccagatgctggactggaaaaccttaaccacggatgtcgccgcgggtgtggggattgaaaactgggcacttggtgtagggctgtttgatatgtccttaagccgtgatgatgtcgatgtttactctcgtgatttttcgcgtaccagccagatgaataccaattctgtggatgttcgttatcgcaatatcccgttatgggatgatgcgacattatcattaatggctaaatattccgcacctaataaaacggatcaacaacaagataacgaaaatgacaacagttattttgaaatgaaagatagctggatgctgacttctgttttacggcaaaacctgcaacgcgatacgtttaatgaatttacgttacaggttgacaataattcctatgccagcagttttgccagtttctcagatgccagtaatacgatggcgcatggtcgctattactatggtgatcataccaatgggatcgccgggcgtttaatctctcagggcgagatgtatcttactgacaatattattatggctaacgcgcttgtctattctcacggcgaagatgtttatagttatgaaagtggtgctcatagtgattttgacagtattcgcactgtaataagaccggcctggatctggaatacatggaatcagacggggcttgaattaggctggtttaagcaacagaacaaaactcagcagggtgtaacactaaatgaatcggcttataaaacgacactctggcatgcattgaaagtgggtgaaagcattttaggttcacgaccagaaattcgcttctatggaacgtatatcaatattctggataacgaattatcgaattttaagtttaatgagaacagcaaagacgagtttatggccggcatccaggcggaagtctggtggtaa

SEQ ID NO: 463796 - DNA, 474 bp, Shigella boydii
atgatttgcactaatcagcttcgttacactggcaaagatggcgtttactttcatctacaaggccaaccagataatttcttgtcactatcagcaactgaaaacatggaatttgacagccctatgatggttaccactcaaaatatgcaatcagggcagactgtaacagataatgttcaaagagcacccagaacaatcactattagtggtgtggttgtggttggtgaatccggtagtatccttatctcaagagataataagctggtggagaacttcatcgacactcttgaaagctggcgtgaccagaagcagattatttcagtcatctgtaaagatggaattaaaattgatgactccattattacaagctttaaagcctctaaagatgttggaatttctaatggcctaagaatccagctaacttttcaggaaattaacttcaaagctattgttggtcaaactgaagtggcacactga

SEQ ID NO: 463797 - DNA, 657 bp, Shigella boydii; identical to SEQ ID NO: 463703

SEQ ID NO: 463798 - DNA, 240 bp, Shigella boydii
atgaaacagcctgcgcccgtttatcagagaattgcgggtcatcaatggcgacatatctggctttctggcgatatacacggttctcttgagcagttgcgccgcaaattatggcattgtcgttttgatccgtggcgagatttacttatctcagtgggagacgttatcgatcgtggaccgcaaagtttacgttgtctgaggtgtactggcaatagcggacactaccatttgttctttttttaa

SEQ ID NO: 463799 - DNA, 489 bp, Shigella boydii; identical to SEQ ID NO: 461547

SEQ ID NO: 463800 - DNA, 240 bp, Shigella boydii; identical to SEQ ID NO: 463798

SEQ ID NO: 463801 - DNA, 1128 bp, Shigella boydii; identical to SEQ ID NO: 462714

SEQ ID NO: 463802 - DNA, 1092 bp, Shigella boydii
atggttgaacattgtagtaaaaataaaaaaatactcgttgattgtagaatgattaatgcctctggaataggtgtttatactcgtgaaattatcaaagagttaaaaaaatatagatacttgcagatcgagttattgcttcaagaagaacaacagttaccaattgatgttgaagatattggatttaaaatccactatataaatttttctcgctatagtattaaaaacatcggtggtatgaagcatttactgaatggctttgatgtctattttatgccatcattatcgataccacctctattaaaaaaaggctgtttgataatcacaacagtacatgatctgtgtcctgttgcattacggaaattatttggatccaaaaaagctgtagcttattgggctttgctattaatacaacttgtttgttctaataagataatttccatttcaagattcactgctaaagaaataaataagtattactttggtttatttaaaagtaaattatatgtcattggcaatggtataagaaatatttttaatttggaattaaatagtgaaacagaaaattcccatgaagaatatggtatttgcgtgggcaatattaagcctcataaaaatgttgtaccactaattgattaccttaagacaaacatcattaacaaaaaaatatattttataggtgaaataaatgggttttcaacgaaaataaataaaagtttgcttaacgatttgcctgaaaatatagtttttacagggagagtaagtgatcaagaattacataattattaccgtaatgccagtttttttatattcccctcattatacgaaggctttggtttgcctttgctagaggctatgaattataggttgcctatttttgcatcaaatattgatgtatttaaggaagttgctggtgaaacaattaattattttgatccatatacatttgatgctcttgcagatagaattaacaaattaaaaaagaacaagaaatctattgaatcttatgcacgagttttgcagttatatagttgggataataatgttgcaagtctattaaggattatgaatgaagaagatattgctcgtaaataa

SEQ ID NO: 463803 - DNA, 1272 bp, Shigella boydii
gtgtatgacccgacggtacagtttgagctctggttttcggaggcaaaaatcgcagacacatctcaggtggaaacctctgcccgttatctggggaccggcagtcagtggagtgtatccggcccgcacattaagcccgggaaggatttctggttttacgtgcgcagcgtcaacctggtggggaaatctgcttttgtggaggccagtggacgggccagcaatgatgcagaagggtatctggggctgtttcgggaaaaaataggaaaactgcatctggctcaggggctgtgggagctgatagacaacagccagcttgcggatgagatggcggagatgaagaccaccatcaccgaaacccgcaatgaaatcacacagacggtcagtaaaacgctggaggagcagagcgccaccatacagcagatacagcgcgtgcagaaggacacaaatgatgaccttgctgcactttacatgctgaaggtacagaaaacaaaaaatggcataccctatgttgccggtattggagcggggattgaggatactgatggccagcccctgagcaacatactgctgctggctgaccgtattgcgatgattaacccggaggacggcaacaccacgccgttatttgtggcgcaggggaatcagttgttcatgaacgatgtgttcctgaagcggctgtttgcggtgagtatcacctcgtccggcaatcccccgacgttttccctgacgccggagggcaggctgaccgcaagaaatgctgatatcagcggtaacgtgaatgcgaactccgggacgctcaacaacgtcacgattaacgagaactgccgggttctgggaaaactgtccgcgaaccagattgaaggcgatctcgttaaaacagtgggtaaggcttttccgcgggactcccgggcaccggagcggtggccatcagggaccgttaccgtcaggatttatgacgatcagccttttgaccggcaaattgttattccggcggtggcattcagcggcgctaagcatgagagagagcatactgatatttactcctcatgccgtctgatagtgcggaaaaacggtgctgaaatttataaccgtaccgcgctggataatacgctgatttacagtggcgttattgatatgcctgccggtcacggtcacatgacgctggagttttcggtatcagcatggctggtgaataactggtatcccacagcaagtatcagcgatttgctggttgtggtgatgaagaaagccaccgcaggcatcagtatcagctga

SEQ ID NO: 463804 - DNA, 1107 bp, Shigella boydii
gtgaatactgttggcaaatcggcattcgtggaggctgtcggtcgggcgagcgatgatgtggaaggttacctggattttttcaaaggagaaatcgggaaaacacatctggcccaggagctgtggacgcagattgataacggtcagcttgcgccggacctggctgaaatcaggacgtccattacgaatgtcagcaatgaaatcacgcagaccgtcaataaaaaaccggaaaatcagagtgcggcaatccagcagatacagaaagttcaggttgatacaaataataacctgaacagcatgtgggccgtgaaactgcagcagatgcaggacggacgcctttatattgcgggtatcggtgccggtattgagaatacgccagcaggaatgcagagtcaggtgctgctggcggcagacaggattgcgatgattaatcctgcgaatggcaacacaaagccgatgtttgttggtcagggcgatcagatatttatgaatgaagtgttcctgaaatatctgacggctcccaccattaccagcggcggtaatcctccggcattttccctgacaccggacgggcggctgacggcgaaaaatgccgatatcagcggtaacgtgaatgcgaactccgggacgctcaacaacgtcactattaacgagaactgtcgggttctgggaaaattgtccgcgaaccagattgaaggcgatctcgttaaaacagtgggcaaagctttcccccgggactcccgtgcaccagagcggtggccatcaggaaccattaccgtcagggtttatgacgatcagccgtttgaccggcagattgttattccggcggtggcattcagcggcgctaaacatgagaaagagcatactgatatttactcctcatgccgtctgatagtgcggaaaaacggtgctgaaatttataaccgtaccgcgctggataatacgctgatttacagtggtgttattgatatgcctgccggtcacggtcacatgacactggagttttcggtgtcagcatggctggtaaataactggtatcccacagcaagtatcagcgatttgctggttgtggtgatgaagaaagccactgcaggcatcacgattagctga

SEQ ID NO: 463805 - DNA, 228 bp, Shigella boydii
atgattgatgtcttagggccggagaaacgcagacggcgtaccacacaggaaaagatcgcaattgttcagcagagctttgaaccggggatgacggtctccctcgttgcccggcaacatggtgtagcagccagttatttctctggcgtaagcaataccaggaaggaagtcttactgctgtggccgccggagaacaggttgttcctgcctctgaacttgctgccgccatga

SEQ ID NO: 463806 - DNA, 150 bp, Shigella boydii; identical to SEQ ID NO: 461565

SEQ ID NO: 463807 - DNA, 228 bp, Shigella boydii; identical to SEQ ID NO: 463805

SEQ ID NO: 463808 - DNA, 342 bp, Shigella boydii
atggcgctcaggagccagcgcccacttgccgggctaatccaccactctgatcgaggttcacagtactgcgcatacgattaccgggtcatacaggagcagtctggtctgaaaacatcaatgtcgcgtaaaggtcactgttacgacaacgctccgatggaaagcttctggggaacgctgaaaaatgagagcctgagccactatcgttttaataaccgggatgaagccatctcagtaatacgggaatacattgagattttctacaatcgtcagcgtcgtcactctcgtctggggaatatctccccggcagccttcagggaaaaatatcatcagatggctgcttaa

SEQ ID NO: 463809 - DNA, 228 bp, Shigella boydii; identical to SEQ ID NO: 463805

SEQ ID NO: 463810 - DNA, 276 bp, Shigella boydii
gtggcttctgtttctatcaactgtccctcctgttcagctactgacggggtggtgcgtaacggcaaaagcactgccggacatcagcgctatctctgctctcactgccgtaaaacatggcaactgcagttcacttacaccgcttctcaacccggtacgcaccagaaaattattgatatggccatgaatggcgttggatgccgggcaactgcacgcattatgggcgttagcctcaacacgattttacgtcacttaaaaaactcaggccgcagtcggtaa

SEQ ID NO: 463811 - DNA, 267 bp, Shigella boydii; identical to SEQ ID NO: 462029

SEQ ID NO: 463812 - DNA, 303 bp, Shigella boydii; identical to SEQ ID NO: 461506

SEQ ID NO: 463813 - DNA, 267 bp, Shigella boydii; identical to SEQ ID NO: 460238

SEQ ID NO: 463814 - DNA, 1119 bp, Shigella boydii
atgcgcagcgtcttccgggttatccggactgtacgtgaaaagcatgcctgtactcagtgcgatgccatcgtgcaggcccccgcgccttcacggcccatcgagcggggtatcgcaggaccggggctgctggcccgcgtgctgatctcaaagtatgcagagcacaccccgctgtaccgccagtctgaaatgtacggccgccagggcgtggagctgagtcgttcactgctgtcgggctgggtggatgcatgctgccggctactgtcaccgctggaagaagcgcttcaggactatgtgctgactgacggtaagctccatgctgatgacacgcctgtcccggtgctgttgccaggcaataagaaaacgaagaccgggcggttatggacctacgttcgtgacgaccgtaacgccgggtcaacgctggcgccggcggtgtggttcgcttacagcccggacagaaaaggcatccatccgcagacccatcttgcggggttcagtggtgtactgcaggcggatgcatacgccgggttcaacgagctgtaccgggatggccggataacggaagccgcctgttgggctcacgcccgccgtaaaatccacgatgtgcacgttcgcaccccgtcagccctgacggaggaagcgctgaaacggatcggcgaactgtacgccatcgaggcagagataaggggaatgacggcggagcagcgccttgccgaacgtcagttgaaaacgaaaccgctgctgaaatccctggaaagctggctgcgtgaaaagatgaaaaccctgtcgcgacactcagaactggcgaaagcgttcgcatacgccctgaaccagtggccggcgctgacgtactatgcagatgatggctgggctgaggcggacaataacatcgctgaaaatgcgttgcggatggtcagtctgggccgcaaaaactacctgttcttcggttcggatcatggaggagagcggggagcgctgctgtacagcctgatcgggacgtgcaaactgaacggagtggagccagaaagctacctccgctatgtccttgacgtcatagccgactggccgataaaccgggtcggcgaactgctcccctggcgcgtagcactgccgactgaataa

SEQ ID NO: 463815 - DNA, 555 bp, Shigella boydii
gtgtccgttaaactcaggctacctcagacatacaactgcatcagggaggcagcagatcaacttccggcatggttcccattagctatggatttagcccttgtaacaggacaacgtcgcgaagacataacgaatatgcggttcagtgatatttatgatgatcgtctccacatcaggcaaattaagacaggaatgatgattgctatccccctgtcactcagccttcctgtcgctggtttacgacttggtgcagtagttgaacagtgccgcatggtaagtaggggggattatctaatcagtgccgggattagaaaaaacagccctgacggcagcattcacccggacggcctgacaaagaaatttgtcgcagccagaaaattaacaggtatccagttcagtgaaaacccaccaacttttcacgaagtcagaagcctggctggacgattgtacaaagaaacatgtggagaagaatttgctcagcgtctacttggccacacatcggagaagacaacaaaaatgtatcttgatgagagagaaaaaacgtacttactgctctga

SEQ ID NO: 463816 - DNA, 546 bp, Shigella boydii; identical to SEQ ID NO: 461973

SEQ ID NO: 463817 - DNA, 657 bp, Shigella boydii; identical to SEQ ID NO: 463794

SEQ ID NO: 463818 - DNA, 282 bp, Shigella boydii
atgctgaatgctgaagagatgggcatcaattcccagaacgtcgatgaaaaagcggctaatccagcaacgcctgatatggcacatctgctgggtaaagaaggcgattacggcaaggatctgaagttggataataaatgggcctataacatcatcaaacaggtgggtaactactcggaaattttcgagcgtaacgtaggttcagaaagcccgctgaaaattaaacgtgggcaaaataatctctggaataacggcggtattcagtacgcgccgcccgtgcgttaa

SEQ ID NO: 463819 - DNA, 186 bp, Shigella boydii; identical to SEQ ID NO: 459561

SEQ ID NO: 463820 - DNA, 279 bp, Shigella boydii; identical to SEQ ID NO: 463424

SEQ ID NO: 463821 - DNA, 294 bp, Shigella boydii
gtggcgcaggtcttcggtgaacgcactctggccacactggagcgtcttctgagcctgctgtcggcctttgaggtcgtggtatggatgacggatggctggccgctgtatgaatcacgcctgaagggaaagctgcacgttatcagcaagcgttacactcagcgcattgagcgacataatctgaatctgagacaacatctggcaaggctgggacggaagtcactgtcgttctcaaaatcggtggagctgcatgacaaggtcatcgggcattatctgaacataaaacactatcagtaa

SEQ ID NO: 463822 - DNA, 657 bp, Shigella boydii; identical to SEQ ID NO: 463703

SEQ ID NO: 463823 - DNA, 1014 bp, Shigella boydii; identical to SEQ ID NO: 461601

SEQ ID NO: 463824 - DNA, 381 bp, Shigella boydii; identical to SEQ ID NO: 463673

SEQ ID NO: 463825 - DNA, 267 bp, Shigella boydii; identical to SEQ ID NO: 462029

SEQ ID NO: 463826 - DNA, 450 bp, Shigella boydii; identical to SEQ ID NO: 461614

SEQ ID NO: 463827 - DNA, 303 bp, Shigella boydii; identical to SEQ ID NO: 458125

SEQ ID NO: 463828 - DNA, 381 bp, Shigella boydii; identical to SEQ ID NO: 463673

SEQ ID NO: 463829 - DNA, 318 bp, Shigella boydii
gtggcacatatccgcactcgcgaaacatatggaacccggcggctccagacggagctggcagataacggaattatcgtcggtcgtgacagactggcacgtcttcgtaaggagctgaggctgcactgtaagcagaaacgcaagttcagggcgaccacaaactctgaccacaatctgccggttacgccgaatctgctgaatcagaactttacgcccacagcacctaatcaggtctgggtcgcagattcagttgtccaggccttccgaaatcaaccgactgaaggcgctggtcgcgaaactgcagcgtatgcagttcggtaa

SEQ ID NO: 463830 - DNA, 228 bp, Shigella boydii; identical to SEQ ID NO: 463805

SEQ ID NO: 463831 - DNA, 351 bp, Shigella boydii
atgatctcactcccgtcaggcacccgcatctggctcgttgctgggataaccgatatgcgtaagtctttcaacgggctgggtgaacaggtacagcatgtgctgaatgataatcccttctccggtcacctgttcatcttccgtggccgacggggtgacatgattaaaatcctgtgggctgatgctgatggtctgtgcctgttcaccagacgcctggaggaaggccagtttatctggcctgctgtgcgtgacggcaaggtatccattacccgctcgcaactggcaatgctcctcgataagctggactggcgtcagccaaaaacatcccgccttaacgcactgacaatgttgtaa

SEQ ID NO: 463832 - DNA, 375 bp, Shigella boydii; identical to SEQ ID NO: 461579

SEQ ID NO: 463833 - DNA, 315 bp, Shigella boydii
atggaactgctgagtgaatataaaaatttgcggaggtatttcggtgtgacggtgcaggtgccgtacaccgatgtgtggacgtataaaccggtgcagtactatccagggaaacatccgtgcgaaaaaccggcagaaatgttgcagcagataatcaacgcgagcagtcgtccgggagaccaggttgcagatttttttatgggctcaggttcaacggtaaaagcggcactggcgctcgggcgtcgtgcgattggcgttgaactggagaccggacgttttgagcagacagtcagggaagttcaggatttaatcgtttga

SEQ ID NO: 463834 - DNA, 411 bp, Shigella boydii
gtggcagaagagaagcatcggcgtggtgaactggaaaagctccaccaccagctggtggatacgtatacctcactgaaccggcagtatgcggagctgctgagtgaatataaacatctgcggcggtattttggcgtgacggtgcaggtgccgtataccgatgtgtggacgcataaaccggtgcagttctatcccgggaaacatccgtgcgaaaaaccggcagaaatgctgcagcagataatcagcgctagcagtcgtccgggtgacctgattgcagattttttcatggggtcgggttcgacagtgaaagcggcactggcgctcgggcgtcgtgcaattggcgttgagctggagactgaacgttttgagcagacggttcgggaagtacaggatttagtcagccagaacggatga

SEQ ID NO: 463835 - DNA, 303 bp, Shigella boydii
atggcggggccgtctgtgcgcgtgaatgaatggttcagcgcgtatgcgatggcgggtgtagcttacagccgtgtgtcgactttctccggggattatcttcgcgtaactgacaacaaggggaaaaagcacgatgtgctgaccggaagtgatgacggtcgccacagcaatacctctctggcgtggggggctggcgtgcagtttaacccgaccgaatccgtgtccattgatattgcttatgaaggctccggcagtggtgactggcgcactgacggtttcatcgtgggtgtcggttataaattctga

SEQ ID NO: 463836 - DNA, 654 bp, Shigella boydii
atgagtaataaatattgccaggcgctggtggaactgcggaacaaaccagcccatgaactgaaggaagtgggcgatcagtggcgcacgccggacaacattttctggggaattaacaccttgtttggtccgtttgttctggatctgttcactgacggtgataacgccaaatgtgccgcgtattacacggcggaagacaacgcgctggcgcatgactggtcagaacgccttgcggagcttaaaggtgctgcctttggaaatcccccatacagccgcgccagtcagcatgaggggcaatacatcaccggcatgcgttacatcatgaagcatgccagtgccatgcgtgataagggcgggcgctatgttttcctgatcaaagctgccaccagcgaagtgtggtggccggaagatgcagatcatattgcttttattcgcgggcgtattggttttgaactgcctgcctggtttatcccgaaagacgaaaagcaggtgccaacaggtgctttcttcgctggtgctattgctgttttcgacaagacctggaagggaccggcaatcagctatatcgggcgcgatgaacttgaggcatgtggtgaggcgtttctggcgcaggttcgcctgcaggcggaaaagctggtcagggagatggcggcatga

SEQ ID NO: 463837 - DNA, 705 bp, Shigella boydii
atgtcactatttaccagaattttacgtgagctattatataaatacttagatgatttaattgttctaactaaatttgatgagaagtattataaagctaagaaaataaaaacaacagtgattgaaaatgcgtatacagcaatggatgtagataatctcaagactgttagtaaaggaaatgttattctatcaattggaagacatacgtctcaaaagcggtttgataagttgttacatatctggaaagaaatagttaaaaagaatgatgggttaaaactgcggattgttggggatggtcctctattggatgagaacaaaaaattagcccaaaaattgaatctgtccgactcagtagtgtttgctccgccaactaaaaaaattaatgaggaatatcaaaatgcatctttatttttaatgacatctgactatgaagcatttccaatggttttgttggaagctttgaaaaatggtcttccttgcattgcgtttgactgtgatactggacctagagatattatcgttaatggagttgatggatttgttataccaataaatgatagtttgaaatttgtagaaaaaacgatagatgtcatgaataatgaaaacttaagataccaactaagctcgaatgcaaaggttaatgtcgaaaggtttaatgaagaacatatttcaaaaaaatggttgattaagttaaaacaattgcaataa

SEQ ID NO: 463838 - DNA, 657 bp, Shigella boydii; identical to SEQ ID NO: 463703

SEQ ID NO: 463839 - DNA, 657 bp, Shigella boydii
atgcctgcgatcaatgccaaacgtgtttaccggatcatgcgccagaatgtgctgttgcttgagcgaaaacctgctgtaccgccatcgaaacgggcacatacaggcagagtggccgtgaaagaaagcaatcagcgatggtgctctgacgggttcgagttctgctgtgataacggagagagactgcgtgtcacgttcgcgctggactgctgtgatcgtgaggcactgcactgggcggtgactaccggcggcttcaacagtgaaacagtacaggacgtcatgctgggagcggtggaacgccgcttcggcaacgatcttccgtcgtctccagtggagtggctgacggataatggttcatgctaccgggctaatgaaacacgccagttcgcccggatgttgggacttgaaccgaagaacacggcggtgcggagtccggagagtaacggaatagcagagagcttcgtgaaaacgataaagcgtgactacatcagtatcatgcccaaaccagacgggttaacggcagcaaagaaccttgcagaggcgttcgagcattataacgaatggcatccgcatagtgcgctgggttatcgctcgccacgggaatatctgcggcagcgggcttgtaatgggttaagtgataacagatgtctggaaatatag

SEQ ID NO: 463840 - DNA, 657 bp, Shigella boydii; identical to SEQ ID NO: 463775

SEQ ID NO: 463841 - DNA, 153 bp, Shigella boydii
atgagcagaaaaaaccaacgttactctaaagagttcaaagccgaagctgtcagaacggttcctgaaaatcaactttcgatcagtgaaggcgcttcccgattatcccttcctgaaggcactttaggacaatgggtaatgctgccaacttactga

SEQ ID NO: 463842 - DNA, 276 bp, Shigella boydii; identical to SEQ ID NO: 458859

SEQ ID NO: 463843 - DNA, 159 bp, Shigella boydii
atgtctgaggcaaagaactcaaatcttgcaccattcaggttattagtgaaactcacaaacggtgtcggggatgagtttccgttatattatgggaataacttaatttccaggcacaccagtattcatctcttggatttccatattaccactattcattag

SEQ ID NO: 463844 - DNA, 561 bp, Shigella boydii; identical to SEQ ID NO: 461991

SEQ ID NO: 463845 - DNA, 276 bp, Shigella boydii
gtggcttctgtttctatcagctgtccctcctgttcagctactgacggggtggtgcgtaacggcaaaagcactgccggacatcagcgctatctctgctctcactgccgtaaaacatggcaactgcagttcacttacatcgcttctcaacccggtacgcaccagaaaattattgatatggccatgaatggcgttggatgccgggcaactgcacgcattatgggcgttagcctcaacacgattttacgtcacttaaaaaactcaggccgcagtcggtaa

SEQ ID NO: 463846 - DNA, 267 bp, Shigella boydii; identical to SEQ ID NO: 462029

SEQ ID NO: 463847 - DNA, 294 bp, Shigella boydii; identical to SEQ ID NO: 460208

SEQ ID NO: 463848 - DNA, 381 bp, Shigella boydii; identical to SEQ ID NO: 463673

SEQ ID NO: 463849 - DNA, 390 bp, Shigella boydii
atgaagctaatactgccttttccgcccagcgtgaacacgtactggcgacaccccaacaaaggggcgtttgctggtaagagcctgataagcgcggcggggcgaaaattccagagcgcggcgtgcgcagcaatagttgagcagttacgtcgtctgccaaaaccaacgtcggcacctgcttcagtggagatcgtgttgtttcctccggataaccggatccgcgatctggacaactataacaaggcgctgtttgacgccctgacccacgcgggtgtgtgggaagacgacagtcaggtgaaaagaatgctggtggagtggggaccggttatcccgaaagggaaggtcgagatcactatcagtaagtatgagaaaccggcgggtgcagccgcctga

SEQ ID NO: 463850 - DNA, 375 bp, Shigella boydii; identical to SEQ ID NO: 461626

SEQ ID NO: 463851 - DNA, 342 bp, Shigella boydii; identical to SEQ ID NO: 462015

SEQ ID NO: 463852 - DNA, 159 bp, Shigella boydii; identical to SEQ ID NO: 461620

SEQ ID NO: 463853 - DNA, 240 bp, Shigella boydii
atgactgccgcagcattgctggcggaaatgcctgaatcgagcagcctctcgagacgtgaaatcagcgcacttgtcggtgttgctcaggtaaaccgggactcgggaactctgcgcggtcgacgaaccattttcggtgattgtgctggggaagaacagctcggtaatgactccaacttactgatagtgttttatgttcagataatgcccgatgaccttgtcatgcagctccaccgattttga

SEQ ID NO: 463854 - DNA, 294 bp, Shigella boydii; identical to SEQ ID NO: 25632

SEQ ID NO: 463855 - DNA, 264 bp, Shigella boydii
atgtctggaaatataggggcaaatccatcatacaacctcaacggatatcatagtgaaactcctggtcgaagaaatgacagcatttatgctgcttttaacggtgggatgaatttaggtgcatggcgactgcgtgcctcaggcaactacaactggatgaccgattctggcagtaattatgattttaagaatcggtatatacagcgtgatatcgcctcgctgcgttctcaactcattcttggtaatgctgccaacttactgatttag

SEQ ID NO: 463856 - DNA, 495 bp, Shigella boydii; identical to SEQ ID NO: 461605

SEQ ID NO: 463857 - DNA, 426 bp, Shigella boydii; identical to SEQ ID NO: 461631

SEQ ID NO: 463858 - DNA, 315 bp, Shigella boydii; identical to SEQ ID NO: 463833

SEQ ID NO: 463859 - DNA, 276 bp, Shigella boydii; identical to SEQ ID NO: 458859

SEQ ID NO: 463860 - DNA, 327 bp, Shigella boydii
atgacgacgttaactcaatgccagcagcaggtgctggatatgctgatttcttatcagaaagagcgtggcttcccgccaaccaatcaggaggtggcaaccatgctgggataccgttcggtgaatgcagcggtggagcatcttcgcgcactggagaaaaaaggcgtcatcacgataaagcgtggtgtggcccgggggatcacgcttcataccgcggtgaaggacgacgacagcgaggcggtcgggattatccgctcactgcttgccggtgaggaaaacgcaaggctgcgtgcaactcactggttacatgagagaggcctgaaagtatga

SEQ ID NO: 463861 - DNA, 201 bp, Shigella boydii
atgggacgctggcttgctggcaggctcatgaaagagctggggctggtcagctgtcagcagccgactcaccggtataaacgtggtggtcatgaacatgttgctatccctaactaccttgaaaggcagttcgccgtgaccgagccaaatcaggtgtggtgcggtgatgtgacctgtatctggacgggtgaagtggcacactga

SEQ ID NO: 463862 - DNA, 381 bp, Shigella boydii; identical to SEQ ID NO: 461669

SEQ ID NO: 463863 - DNA, 168 bp, Shigella boydii
atggaacgcttcttcaggagtctgaagaacgaatggatgccggtggtgggttacgtaagcttcagcgaggcagctcacgccataacggactatatcgttggatattacagcgcactaagaccgcacgaatataacggtgtgaaccgccccgggaatcctggagactaa

SEQ ID NO: 463864 - DNA, 210 bp, Shigella boydii; identical to SEQ ID NO: 462041

SEQ ID NO: 463865 - DNA, 123 bp, Shigella boydii; identical to SEQ ID NO: 461677

SEQ ID NO: 463866 - DNA, 216 bp, Shigella boydii
atgatcaccagcgacgactggggcagctatggccgggaggtgccgaaggataagcatctgaccggaaaaatattcacccaacggattgagcgcaataacctgacgctgcgcacccgcattaagcgcttggctcgtaaaacaatctgcttctcgcgttcagtagagatccacgaaaaagtcatcgggacgtttattgaaaaacacatgttctactaa

SEQ ID NO: 463867 - DNA, 249 bp, Shigella boydii
atgtcgcgccagtgcacgcattatgggcgttggcctcaacacggttttgcgtcacttaaaaaactcaggccgcagtcggtaacctcgcgcatacaaccgggcagtgatgtgattgtctgcgctgaaatggacgaacagtggggctacgtcggtgctaaatcacgtcagcgctggctgttttacgcgtatgacaggatacggagggtaagcgtacagcctgaaccgtctggtcagaatctgacgaattag

SEQ ID NO: 463868 - DNA, 2118 bp, Shigella boydii
atgcgtcgccgtgtctacaatccggatcgcctgaaatatccgatgaaacgagtcggggcgcgcggtgaaggcaaattcgagcgcattagctgggaagaagcctacgacatcatcgcgaccaatatgcagcgcctgatcaaagagtacggcaacgagtctatctatctgaactatggcaccggtacgctgggcggcaccatgacccgctcctggccgccgggaaataccctggtcgcgcggctgatgaactgctgcggcggctatctcaaccattacggcgactactcctccgcgcaaattgcggaaggtttgaactatacctacggcggctgggcagatggcaacagcccgtcggatatcgaaaacagtaagctggtagtgctgtttggtaataaccctggcgaaacgcgaatgagtggcagtggggtgacttactatcttgaacaggcacgccagaaatctaatgcccgcatgatcatcatcgatccgcgctataccgacaccggtgccgggcgcgaagatgagtggatccctattcgtccgggaacagatgccgcactggttaacggtctggcgtacgtcatgatcactgaaaacctggtggatcaggcattcctcgataaatattgcgttggctacgatgagaaaaccctgccagccagtgcgccgaaaaatggccactataaagcttatattctgggtgaagggccagatggcgtggctaaaacaccggaatgggcctcacaaatcaccggtgttccggcagacaaaatcatcaaactggctcgtgaaatcggcagtaccaaaccggcgtttatcagccagggatggggcccgcagcgtcacgctaacggtgaaatcgcaacccgtgctatctcgatgctggcgattctgaccggtaacgttggtattaacggaggcaacagcggcgcgcgtgaaggttcatacagcttaccgtttgtccgtatgccgaccttggaaaacccgatccagaccagcatttcgatgtttatgtggaccgatgccattgaacgtggcccggaaatgacggcgctgcgtgatggtgtacgcgggaaagataagctggatgtgccgatcaaaatgatctggaactatgccggtaactgcctgattaaccagcattctgaaatcaaccgtacccatgaaatccttcaggatgataagaagtgcgagctgattgtggttatcgactgccacatgacctcatcggcgaaatatgctgacatcctgctgcctgactgcaccgcttccgaacagatggactttgcgctggatgcatcctgcgggaatatgtcttacgtgattttcaacgatcaggtgattaaaccgcgctttgaatgtaagaccatctatgaaatgaccagcgaactggcaaaacgtcttggcgttgagcaacagtttactgaaggccgtacacaggaagagtggatgcggcatctgtatgcccagtcgcgggaagcgattcctgaactaccaacgtttgaagagttccgcaagcaggggatctttaaaaagcgcgacccacaagggcaccacgttgcttataaagctttccgtgaagatcctcaggcaaattcactgaccacgccatcgggcaaaattgagatttattcgcaggcgctggctgacattgccgctacctgggaattgccagaaggagatgtgatcgatccactgccgatctacacgccgggctttgaaagttatcaggatccgttgaacaaacagtatccgctgcagcttacgggtttccactataaatctcgcgttcactcaacttacggcgacgttgatgtgctgaaagcagcttgccgtcaggaaatgtggatcaacccgcttgatgcgcaaaaacgcggtatcaacaacggcgataaagtcaggatctttaacgatcttggtgaggttcatattgaggcgaaagtgacgccacgaatgatgccgggtgtggtcgcactgggtgaaggtgcctggtatgacccggatacaaaacgtgtcgataagggcggttgtatcaacgtactgaccactcaacgtccgtctcctctcgctaaggggaatccgtcacatacaaaccttgttcaggttgaaaaggtgtaa

SEQ ID NO: 463869 - DNA, 252 bp, Shigella boydii
atgcggaatggtgatgagaatgctgatgacattgcagggcgcttcaccgggacgtataccggagctgatgcgcgatcttgcaagtatgggacaacttgtgaaattaccgacgagaaggggaagggccttcccgagagtggtaaaggagaggccctggaaataccccacagccccgaaaaagagccagtcagttgcttaactgactggcattactccgggcggagagggttaacgtcgcttaatattgcgtag

SEQ ID NO: 463870 - DNA, 363 bp, Shigella boydii
atggcgggattaattcaggctaccgcccactggttactgacagaacgcccgttcaaacatcaggagaaagattacctgctgtataaattcaaccgtttccaggcctgtcgctatgggctggaaggcgtcattaccgatccgcacactggcgatcgtcgaccgctaacggaagacaccttgcgattgctggaaaaaatcgccccttccgcacataaaattggtgcatcgagcgcgattgaggccctgcatcgccaggtcgtcagcggtctgaatgaagcgcagctgatgcgcgatttcgtcgccgatggtggctcgctgattgggctggtgaaaaagcattgtgagatctgggccggtgactaa

SEQ ID NO: 463871 - DNA, 282 bp, Shigella boydii
atgcggaatggtgatgagaatgctgatgacattgcagggcgcttcaccgggacgtataccggagctgatgcgcgatcttgcaagtatgggacaacttgtgaaattaccgacgagaaggggaagggccttcccgagagtggtaaaggagaggccctggaaataccccacagccccgaaaaagagccagtcagttgcttaactgactggcattacacacaggcggtgccttttatttttactgaagttcacaggaggtttatgtgtttaattctgacaacctga

SEQ ID NO: 463872 - DNA, 351 bp, Shigella boydii; identical to SEQ ID NO: 462142

SEQ ID NO: 463873 - DNA, 537 bp, Shigella boydii; identical to SEQ ID NO: 462223

SEQ ID NO: 463874 - DNA, 285 bp, Shigella boydii
atggtggtgctcaatacgccgggtaaatatcaatacgatttgaggaaccatttgctggttaatctctttccgatagcattggatgcagaaataactacatccaatgtaaataagcatcaattgcacagaagcaatatacctgcggccctctccggaaattccggtatcactgactacgtaccgttttcagcagaacgaaatgcggcgatggtcatttggcggacagccatagatagccgtccggctgtgtgtaacgatgaggaaggaaccccgggaacgttatga

SEQ ID NO: 463875 - DNA, 1551 bp, Shigella boydii
gtggaacagatgtataaaaaattaaaattaaccacaataagcgaattgattaaaaatatttattgttcattatccgttctcatcattggttgtgcgtcagcttatgccgttgaattcaacaaagatttaatcgaagccgaagatcgtgaaaacgttaacctttcccaatttgaaactgatggccaattacccgtaggtaaatactcattaaacgctattattaataataaaaggacgccaatccatctggacctgcaatgggtattaattgataaccaaactgcagtttgtctgactccagagcaattaacattattaggctttactgatgagattattgaagaggctcagcaaaacctgatcgatggttgttaccctatcgaaaaagaaaaacaaattacaacttatctcgataaagggaaaatgcaattatccatatctgcacctcaggcatggttaaaatacaaagatgcaaactggacgcctcctgaactttgggatcatggtattgctggggcatttcttgactacaatttatatgcctctcattatgcaccacatcagggcgataattcacaaaatataagttcctatgggcaggctggggttaatcttggggcctggcgcctgcgtactgattaccagtacgatcagtcatttaacaatggcaaaagccaggcgaacaacctggattttccgcgtatttatttgtttcgcccaatcccagcaattaatgcaaaactaactataggtcaatacgatactgaatcctctattttcgactctttccatttttctggcgtttcgttgaaaagcgatgagaatatgttgccgcctgatctacgtggttacgcaccgcaaatcacgggtgttgcacaaacgaatgcaaaggtcactgtctcacagaacaaccgtattatttatcaagaaaatgttcctcctggcccatttgctattactaatttattcaatacattacaggggcaactggacgtcaaggttgaagaagaggacgggcaagtcacgcaatggcaagttgcatctaatagtattccttatctgacgcgtaaagggcagattcgctacaccactgctatgggtaaaccgaccagcgttggtggtgattccttacaacaacccttcttctggactggtgaattctcatggggttggctgaacaatgtatccctgcatggtggttcagttttaacaaaccgtgattatcaatctctggctgccggcgttggctttaaccttaactcattgggttcattatcttttgatgtcacacgatctgatactcagttgcataatcaggataaagaaacgggttatagctaccgcgctaactattcaaaacgttttgaatctaccggtagccagctcactttcgctggttaccgtttctctgataaaaactttgtgacaatgaatgaatatatcaatgacactaaccattacacgaattatggtaatgactccaacttactgatagtgttttatgttcagataatgcccgatgaccttgtcatgcagctccaccgattttga

SEQ ID NO: 463876 - DNA, 3039 bp, Shigella boydii; identical to SEQ ID NO: 462234

SEQ ID NO: 463877 - DNA, 180 bp, Shigella boydii; identical to SEQ ID NO: 462239

SEQ ID NO: 463878 - DNA, 597 bp, Shigella boydii
atggaacgactaaaacgcatgtcggtgtttgccaaagtagttgaatttggctcttttaccgccgccgccagacagctacagatgagcgtttcgtccatcagtcagacggtgtcaaaactggaagatgagttgcaggtaaagctgttaaaccgtagcacacgcagcattggcctgaccgaagccggtagaatttactaccagggctgccgtcgtatgcttcatgaagtgcaggatgttcatgagcaactgtatgctttcaataacacccccatcgggacgctacgcattggctgttcttcaactatggcacaaaatgttctcgccgggctgacagccaaaatgctgaaagaatacccaggtttgagcgtcaatctggttaccggaattccagcccccgacctgattgccgacggtctggatgtggtgatccgcgtcggcgcgttgcaggattccagcctgttttcccgccgtcttggcgcgatgccaatggtggtgtgcgccgcgaaaagctatctcacacaatacggcataccggaaaaacccgccgatttaagtagccattcatggcttgaattacagcgtgcggcccgacaatga

SEQ ID NO: 463879 - DNA, 168 bp, Shigella boydii
atgaaaatactggtctacggcattaactactcgccggagttaaccggcatcggcaaatacaccggagaaatggtggaatggctggcggcgcaaggtcatgaggtgcgggttattaccgcaccgccttactacccgcagtggcaggtgggcgagaactattccgcctag

SEQ ID NO: 463880 - DNA, 825 bp, Shigella boydii
atgttaaaagtggaaatgttatccaccggggatgaagtgttacacgggcaaatcgttgacactaacgctgcctggctggccgattttttctttcatcaggggctgccattatctcgcctcaatacggtgggggataaccttgatgacttagtcaccattcttcgcgaacgtagtcagcacgccgatgtgctgatcgttaacggcgggctgggaccgaccagcgatgatttaagcgcactcgccgctgcgacagcaaaaggtgaaggcctggtgctgcatgaagcctggctcaaagagatggaacgctatttccacgaacgtggacgagtaatggcaccgagcaaccgtaaacaagcggagctgcctgccagtgctgaatttatcaataacccggtaggcaccgcctgtggttttgccgtgcagcttaatcgttgcctgatgttctttactcccggcgtaccgtcagaatttaaggtgatggtcgagcacgaaatcctgccgcgcctgcgcgagcgtttttctttaccacagccgccggtttgtctgcgtttaactacctttggtcgttcggaaagcgatctggcacaaagcctggacactctacaactgccgccgggcgtaacaatgggctatcgctcttcaatgccgattatcgaactgaaactcaccggaccggcaagcgagcaacaggcgatggaaaaactgtggctggacgttaaacgtgttgccggacagagcgtgattttcgaaggcaccgaaggactgcccgtgcagatcagtcgcgaattgcaaaaccgccagttcagcctgacgttgagcgagtaa

SEQ ID NO: 463881 - DNA, 405 bp, Shigella boydii
atgaaatcaaatggagctgattcttctttaggagttagatgggatcagtttactgtattaattaatgatcttacagagtctgtatcaaattttgttataggttctggtttgggtaatgtcatcaaaattcaaactcctatccgtgattatagtgcatatatatattatgaattgcagtcagtttattttttaaatcaacttggcgttattttatttactttgtttttattaattaatctccttctcacgattaaaatcataaaatacagtgagttgtgtgtgctatattttctatatgtttcttatgcaattactaatccttatattttagactctaaccatgttgctgtaataattgtattagtgacattaagtaatgttctaaaaaagatgaaagctaaatga

SEQ ID NO: 463882 - DNA, 204 bp, Shigella boydii; identical to SEQ ID NO: 462297

SEQ ID NO: 463883 - DNA, 477 bp, Shigella boydii
atgacctttattatgatgttagttgggctagggatggtgctgggaaatatgctaagtggcaggatttcaggacgttattcaccactgcgcattgcagcagtgactgactttataattgtactggcactgctgatgttctttttctgcggcggcatgaaaacaacgtcgcttatttttgcttttatttgttgcgcgggattatttgccctttcagcaccgctacaaatattgttactacaaaacgccaaaggcggagagttattaggtgccgcaggtgggcaaatagcgtttaacctcggtagcgccgtcggcgcatattgcggtggtatgatgctgacgctggggctggcatataattacgtggcgctgcctgccgccctgctttcgtttgctgcgatgtcgtcgttgctgctgtatggtcgctataagcgccagcaagcggcggatactccggtgctggcgaaaccactggggtag

SEQ ID NO: 463884 - DNA, 303 bp, Shigella boydii
atgaaaaaaagaaattttagcgcagagtttaaacgcgaatccgctcaactggttgttgaccagaaatacacggtggcagatgccgccaaagctatggatgttggcctttccacaatgacaagatggggcaaacaactgcgtgatgagcgtcagggcaaaacaccaaaagcctctccgataacaccagaacaaatcgaaatacgtaagctgaggaaaaagctacaacgcattgaaatggagaatgaaatattaaaaaaggctaccgcgctcttgatgtcagactccctgaactgttctcgataa

SEQ ID NO: 463885 - DNA, 657 bp, Shigella boydii
atgaaaaaaaacacagatgatggggctaaaatttacacaccaattaccctaaagctttatgactggtgggttttgggagtatcaaatcggcttgcatggggatgtcctacaaaggaacaccttcttccacactttctggaacatttaggtaacaaccatctggatattggtgttggaactgggttttaccttactcacgtacctgagagtagtctgatatctttaatggatttgaacgaagctagcctgaacgcggcatctacaagggctggggaatcaaaaattaaacataaaattagccatgatgtttttgaaacttatcccgcggcgttacatggtcaatttgattccatttccatgttttaccttcttcactgcctgcctggaaatatatctacaaaaagctgtgtaatacgcaatgcggcgcaggccttaactgatgatggaactctatacggagccacaattcttggcgatggagttgtgcacaatagcttcggtcaaaaactgatgcgcatttacaatcagaaaggcatcttttcaaacacaaaagattccgaagaaggcttaacacatatactctcagagcatttcgagaatgttaaaaccaaggttcaaggtactgtagtaatgttttctgcttcagggaaaaaatag

SEQ ID NO: 463886 - DNA, 408 bp, Shigella boydii
atgcggaatggtgatgagaatgctgatgacattgcagggcgcttcaccgggacgtataccggagctgatgcgcgatcttgcaagtatgggacaacttgtgaaattaccgacgagaaggggaagggccttcccgagagtggtaaaggagaggccctggaaataccccacagccccgaaaaagagccagtcagttgcttaactgactggcattaccctcgtggagccttttttatatctgccttatttttcttcaacgctgtatgtatagtaagcgataacctgttgattattgaatctttcggggagatggcttataacatttcttacctgaccagggtaccgggaaccaacaccttactggcgtgttgctgtcttttaagaccagaagaggttaacagtgaatattga

SEQ ID NO: 463887 - DNA, 132 bp, Shigella boydii; identical to SEQ ID NO: 462404

SEQ ID NO: 463888 - DNA, 324 bp, Shigella boydii; identical to SEQ ID NO: 462444

SEQ ID NO: 463889 - DNA, 216 bp, Shigella boydii; identical to SEQ ID NO: 462795

SEQ ID NO: 463890 - DNA, 555 bp, Shigella boydii
gtggaaaaagaaaatatcaccatcgatccgcgttcttcatttactccatcttcgtcggcagatattcccgtgccaccagatggattagttcaacgcagtacccgaattaaacgcattcaaaccaccgccatgttgttattattttttgcggcggtaatcaattatctcgaccgcagttcgctgtcggtagcaaatttaacgattcgtgaagaattgggattaagtgccactgaaatcggcgctttgctctccgtgttttcactcgcttacgggattgcgcaacttccttgcggcccactattggatcgtaaaggcccacgcctgatgctaggactggggatgttcttctggtcactgttccaggcaatgtctggcatggtgcacaactttacgcagttcgtgttggtgcgtatcggtatggggattggtgaagcgccgatgaacccatgcggtgtaaaagtcattaacgactggggtaatgactccaacttactgatagtgttttatgttcagataatgcccgatgaccttgtcatgcagctccaccgattttga

SEQ ID NO: 463891 - DNA, 432 bp, Shigella boydii
atgcggacaccacatcttgtgccactcagtaaacaggctgtagccatactgacagaacttcagacatgggcaggtgaaaatggtctgatatttacgggtgcacatgacccgcgtaaaccaatcagtgaaaatactgtaaataaagccctgagggtgatggggtatgacacaacccaggaagtctgtggccatggattccgggcgatggcgtgcagtgcattgattgaatcaggtttgtggtcccgcgatgctgtggaacgtcagatgagccatcaggaacgtaacggtgtacgtgctgcttacattcataaagcagaacatctggaagaacggcgactgatgctacagtggtgggccgattttctggatgcaaacagagaaaaatttatcagtccatttgaatatgcaaagattaataacccattaaaataa

SEQ ID NO: 463892 - DNA, 378 bp, Shigella boydii
atggacgaacagtggggctacgtcggtgctaaatcgcgccagcgctggctgttttacgcgtatgacagtctccggaagacggttgttgcgcacgtattcggtgaacgcactatggcgacgctggggcgtcttatgagcctgctgtcaccctttgacgtggtgatatggatgacggatggctggccgctgtatgaatcccgcctgaagggaaagctgcacgtaatcagcaagcgatatacgcagcgaattgagcggcataacctgaatctgaggcagcacctggcacggctgggacggaagtcgctgtcgttctcaaaatcggtggagctgcatgacaaagtcatcgggcattatctgaacataaaacactatcaataa

SEQ ID NO: 463893 - DNA, 726 bp, Shigella boydii
atgagcatcgatatgcactgtcatctagacttatatcctcggccagacctcgtggctgaagaaagtaaacgtcgagggacttatattctgtcggtgacaacaacacctaaagcatggcatggtacttctttattggctaaagaaagtcaacgaatccgaactgctcttgggctacatcctcaaatcgcgcatcaaagatcgcatgagttagacctgtttgattcattgctttcggaaactaagtatgtaggggaaatagggcttgatggtggacagggatttaaagaacattgggatattcaattgaaagtgttccgacacattctcaacagtgtaaatcgggctggtggcaagattatgactatccatagtcggggaagtgcatcagcggtgcttgatgagattgaaaatatcgatggggtggcaatattgcattggttcactggaacacctaagcagcttgaaagggcaattgatttaggatgctggttctcagtggggcctgctatgctcgatacaataaagggtaaggccttagttttgaaaatacccaaatcacgcattcttacagaaacagatgggccatttgctaagtttcgtaatgacccactaatgccatgggatagtgggattgcagagaaacagttagccgcattatgggggattagtcagatggaggttaatgctcagctagttgataattttaaggtattatgtacatcataa

SEQ ID NO: 463894 - DNA, 1320 bp, Shigella boydii
atgggaggcataccagtgacacaattagttttccatcataaacatcaccatttgccgccagcaagtgagaaagtgttacctgttcagctatatggattaagtggtcagaggcgcggagatatatctgttatcgggaatcctgcgattgatcggatcagacgtttgggagtacagcttccagctaaggtcatggattttctgagtgttgcattagcagtaactgcagcagatactttcgttcagcgtgaaagttccgaggatggttggacccgccaattgtcgttacgactcccccttcatgaaccatccagatggattagtctaaagaaagaacttgagagtgctttgcattttcttagtggagacatctgggatttcgaattttgtgacgatggttatgcaccgccagagccttatagccagcattcaaggcatcgtctgattaagctaaaagggcttgactgtgtcagcttattttcaggaggtctggattcagctattggtgcaatagatcttctggctgcagggcgcgctccacttttggttagtcatgcttataaaggggataagtctcgtcaagatcagattgctgaaaaattaagtggccaattttcgcgctttgagattaatgctgacccacacatttatcaaggcgtgactgatattacgatgcgaactcgtagcctcaattttcttgcccttgcggccgtaggtgcttgtgccgtacaagagatatctcaacaagaaaagattgatttgttcgtacctgaaaatggatttatctcattaaatgcaccacttactccacggcggataggttcgctgagcacacgaacaacacatccacattttattacgagcatacaaaagatctttgatgcgctcggtatttcttgtcaaataatcaatccatatcagtttaagacaaaaggaaaaatgatctccgaatgttcaaataagcagctcttatctaaaattgtggaaagtacagtatcctgcagtcattggaaacgaatggggcagcaatgtggggtatgtataccgtgtatcattcgacgagcatcacttcatgcagggggaattagtagagatgttgaatatattttccagtccttagctaaagtaatgaatgaaatagatcgcagggacgacctgatcgcccttaggattgcgatcacgcagaaatcgactttgaaaataggtacatggattgccaaaagtggccctttgcctacggcagaatttgataatttcaagcaagtatttaaggatggcctagatgaggttgaaagctatttactgagtgagaacatagtatga

SEQ ID NO: 463895 - DNA, 753 bp, Shigella boydii
atgggaacatcacaatcaagtaaaggtccaggaggtggctctccgctggttccaccatgggctgatgatcagccacagcaaccgttaccctcgccgcaagaaaggaggtttgcgccatttcgagaatcgttgggaaatgcggtatcaaatggaaatcgagcagatttcagaaaagccatagggcactacgcgcgaaaagcctccggagggagcagtaacgctgctcggcgattagggagtgtcacgcaagctggggccgaattatttggggctttagtgggaatgccttcggctcccggagaaccaagcatcgatttgggcagtttggcaggccttccatgcgaaatagcaatatcaactattgctcaagctttaacatcacaggatggtgactcagaaaagatctgtgcggccatgaaccatgctttagtggaggctcttgatggcgtagaaattttcgatcctcaaaaaataactgatggtttgattgttgacacaatgattggttatctagcggaaagtattttccttcagatggtaatggattctaatagggcatggaacaaagcagatacaccttcaaaggcaattcatgcagaaattgaactccgggaattgattaaagttgttgttgataaacatatggcaccaaaacttgccggtaacataagatcgttcacacgaaaccaaatggtaaaaattgaacgtcaggccattattgaggcctggcaagaatgggaggcataccagtga

SEQ ID NO: 463896 - DNA, 1785 bp, Shigella boydii; identical to SEQ ID NO: 261932

SEQ ID NO: 463897 - DNA, 1131 bp, Shigella boydii
gtgacaatagcaagagattctgttagtggtgaaattgttcatggtcatgatcttcgggaaatggatgatctttatatacgaacaaccacttttgaatgcccgtatgacaaatgtaggatacccgctactccatgtagcttcaaagaaataaatttaaatcaatcatactttcgatataaagagactcataggccgggatgtaagattcatgatcctaagagtaaaaataagtgtaactcaaagaataataaaaagcataattcaccaccggcattagctatatctcttctgaaacttgatgtgtctgaaagaaattacgactcttctggcagaagaattatcaaacagacgcgagatgatgaaaaagatttgggaggtaaagtacaccctgtgtcatcttcaagcatcaaaccggtagtagactactacattaatggagataatctctatgaaccattatcaattcccccttatggagttagaacttataaagatacttttcaactaatcatctataaagaaggaattagatataataagccagcaatttattttggtaaaattcaatctaatatacggctggagataaattcgaatagatattaccttacttttttagccagaaagaaaggtaccaaacaagcatataaacttgaaattgatgcttcagaatgggatgaaagtaaaaagagttttttctgtagtgagtatgaaaaacaaagagcagaagcaaataagtattataatggactaaaagacaagcgcaaagcaaccaaatatcttaatgttttcttttttggttttcctgatgagtgcgatagttttttatttaagactagtttttttaaattgatttatatcgttttcttagatgattttgatgtgacttataatgacaaaaactacagcatagaaaaagaacagctaattagagatgaaattaacaaagaacatttgacagctcatcaaaatagaataaaccttgctgaggttgctgaggttgctgaggttgctgaggttgctgaggttgctgaggttgctgattttgacaagagcgaatttaacccttcggattctgataggaaaatatggactgggataagaaagcttatttcattctttaaaaaatag

SEQ ID NO: 463898 - DNA, 384 bp, Shigella boydii
atggtacttttccccgacaatccccgtgttcaggaaatggtggataactggcagaagagcgtaaggagtcgtgcgctcccggaagaggcgatgacgggctggaatgaaggcatgacccgcttacagcagctggctgaacgcctgaaccgtctggatgaacagcggggaaaatacatgacggtcagtgaactgaaaacggaggtgtttggcatcatgcaggcttttaaccggcatatcccggcggaagagcagttacgtcgctatgatgaagcccgtaaccagaatggcagtgaacagcagcaaaaacaggctgaaatggcactgaatcagctgattaatcgttatcaggtggaacacgctggcaaaccggagaggcagccatga

SEQ ID NO: 463899 - DNA, 1035 bp, Shigella boydii
atgacttctgaagtgaaactgaaaaccggtggtgacccccggtcattaccggattatgctgccctgcgcgatgaaatcagcaaactgacccacccggcacgcccggatgtggactggcgttacgtggaaacgctctgcctgcgtctgtatgaacacaatggcgtggaattacagacggcatcctggtacaccatcgcccggatgcatacaacagggttaagtggcctgaatgaagggctggctctgattgtggcgctgacccggcatcactggtcagtgatgtggccgctgaatacacacgcccggctggaaattattaccggtctgttcaaccgtctgcaaaaaacgctccgggccatgccaccggatgaccgtgacaacctgcccctgctgtatcagaccgaaacattcctgaaggaactgagtgacacactggcccggtacgaacttaaacagagcagtaaagtggctttaccggaagccatggtgaagggatatatcacccgtctggaaaatcagccggtgcagggcgaagcgtcgtctccggtaacccttccggctcaggcactccggtctgatgctcgggacgtacaggaacatcagcccctgccgcactcccgtctggtgtatgttgtttctgaaacaaaagcagggcccaccccctcccttcaaaaatcccctcccacgtttctgaaaccgtttgtgactggtgtctgtgcggcattgctggcggtcagcgtggccattccgggatggcagtatctgacacagccatcaccggcggagcagcaactcagggcgctgctgacaccaccaccggatgtgctttcagcagaccagatgacacagctcagcagaacaccctcactgttaaatcatgcgtcagagtggataaccctttccggtcagcagataacgcgactgacagaattacccccggcatataacctgcagcgcagtgcgcagtgcgcagttgctgcagcaactgatggtacttttccccgacaatccccgtgttcaggaaatggtggataa

SEQ ID NO: 463900 - DNA, 246 bp, Shigella boydii
atgcggaatggtgatgagaatgctgatgacattgcagggcgcttcaccgggacgtataccggagctgatgcgcgatcttgcaagtatgggacaacttgtgaaattaccgacgagaaggggaagggccttcccgagagtggtaaaggagaggccctggaaataccccacagccccgaaaaagagccagtcagttgcttaactgactggcattacaccgaaaaggtggcgtttgtgcagagggactag

SEQ ID NO: 463901 - DNA, 282 bp, Shigella boydii; identical to SEQ ID NO: 462712

SEQ ID NO: 463902 - DNA, 258 bp, Shigella boydii
atgaaagagtttttatttttatttcactccacagtcggcgtcatacaaactcgcaaagcgttgcaggcagcgggcatgacttttcgcgtcagcgatattccccgtgatttacgcggcggctgcgggttatgcatttggctgacctgtccccccggcgaagaaatacaatgggtgatccctgggctgactgagtcaatttattgccagcaggatggtgtctggcgctgcattgcacattaccgggtttctccgcgttaa

SEQ ID NO: 463903 - DNA, 306 bp, Shigella boydii
gtggcggaaacgggcgatgtctacgacgcgctggcggataaatatctggcgattggctgctcctgtgtttcgccgaacgatcagcgcctgcaaatgctcagccagatggtggaagaatatcaggtcgatggcgtagttgatgtgattttgcaggcgtgccatacctacgcggtggaatcgctggcgattaaacgtcatgtacgtcagcagcacaacattccttatatcgctattgaaacagactactccacctcagatgtcgggcagctcagtacccgtgtcgcggcctttattgagatgctgtaa

SEQ ID NO: 463904 - DNA, 705 bp, Shigella boydii
atgtctggaaatataggggcaaatccaatcgccggtcgggcggctgttggcgttaggtttgataacgatattgggttttgtgaaatgcgcgcgcggcagtggcgcgacggcagccagagtgccgtgcttctggcgcagctcttcaattggaccgaactcaagtgcacgcagcgggcaggattcgatgcatatgggttgtttcccctcggcgacgcgcgaataacaaccatcgcacttcgtcatgtgccctttttcagcattgtactgtggtgcgccgtacggacaagccatgtggcagtagcggcagccgatacaaacatcttcatcaaccaccacaaagccatcttcacgcttatgcattgcgccgctggggcagacttttgtacatgcggggtcatcgcaatggttacaggagatggagagataataagcgaacacgttctggtgccagatgccattatcttcctgccagtcgccgccagcatattcataaatacggcggaaactgacttccgggccaagatctttaaaatctttgcaccccagttcgcaggttttacagccagtacagcggctggaatcgataaaaaatccatattgtgtggtcatgggctactccttaaaccttttcgatctggacaagattgctgtgcgacgggtttccctttgccagcggtgaagggcggtgagaggtcagaatattga

SEQ ID NO: 463905 - DNA, 1017 bp, Shigella boydii
atgattcaacccggtatgttggccgtggtggaacaatatcaggcgggcattgattgggttcctacttcaatgaccgcatatctggcgggcgggatgtttttacaatggctcctggggccgctgtcggatcgtattggtcgccgtccggtgatgctggcgggggtggtgtggtttatcatcacctgtctggcaatattactggcgcaaaacattgaacaattcactctgttgcgcttcttgcagggcataagcctctgtttcattggcgctgtgggatacgccgcaattcaggaatctttcgaagaggcggtttgtatcaagatcaccgcgctgatggcgaacgtggcgctgattgctccgctacttggtccgctggtgggcgcggcgtggatccatgtgctgccctgggaggggatgtttgttttgtttgccgcattggcagcgatctcctttttcggtctgcaacgagctatgcctgaaaccgccacgcgtataggcgagaaactgtcactgaaagaactcggtcgtgactataagctggtgctgaagaacggccgctttgtggcgggggcgctggcgctgggattcgttagcctgccattgctggcgtggatcgcccagtcgccgattatcatcattaccggcgagcagttgagcagctatgaatatggcttgctgcaagtgcctattttcggggcgttaattgcgggtaacttgctgttagcgcgtctgacctcgcgccgcaccgtacgttcgctgataattatgggcggctggccgattatgattggtctgttggtcgctgctgcggcaacggttatctcatcgcacgcgtatttatggatgactgccgggttaagtatttatgctttcggtattggtctggcgaatgcgggactggtgcgattaaccctgtttgccagcgatatgagtaaaggtacggtttctgcggcgatgggaatgctgcaaatgctgatctttaccgttggtattgaaatcagcaaacatgctggctga

SEQ ID NO: 463906 - DNA, 369 bp, Shigella boydii; identical to SEQ ID NO: 462503

SEQ ID NO: 463907 - DNA, 531 bp, Shigella boydii
atgcgtaacgggaaatatgacgttctgagtcccctgtattccggtgagccggtcaatgaggcggaagtcctgggggcggccgtctggctgtggatgcactcccccctgcatcgtgatgcgccattgcataccctgccggacctgctgctgccggtgattaagcaccgacagtatgtgataacaacagagcaggggcgacctgttttcttcatgagctgggcctggctcagccaggaggcagaggcgcgttatcttacgcagccggcaattctcatgcctcagtcggactggaacagcggcgaccggatgtgggtctgtgactgggttgccccctccggacacactccggatatgagtcgtcttgtccggcaggatatttttccccgtctgtgctggcgttcgctgtaccaccgtgggcagcagaccgggttaccggtcactgagccgcgtaaacccacctgtgcgccgctttatatggccagcaaacccggattcacgcatctgcctatttgttccggtaatcagtattaa

SEQ ID NO: 463908 - DNA, 195 bp, Shigella boydii
atggattacggcgaggtggggggagccggcagtgaatacctggtgggacgtcatctggccggtggtgttgtggggctgagggggcaactgttcagtacggattatgacgttttcatcggtcgtccgttttcaaaaccggcgggttttatgacgagtgatgtgacagccggttttaatctgttccgggatttctga

SEQ ID NO: 463909 - DNA, 192 bp, Shigella boydii
atgtcagaagatgttccattaccgaaagtcaatcagcgatacaaagacgatcatggtgcgcttgtcaccgtgaccagtgttgaggaaacccgggtggtgtttatgcgggacggctatccgcatccctgcatgcgaccgatgtacaactttctgggaaaattcaaacccgaaccccgggaagaaacagaataa

SEQ ID NO: 463910 - DNA, 234 bp, Shigella boydii
atggcaaggtccgattatgatattatcaatctgtctctgaaacatgaactgaatgagtggctgacagagagaggttatgccggactggcggataaccggaatcgcctggcagaagttgttacccgcaaattgcaggacagcttttatataaacgtttcctgggatgcgctgaacacggcatacagtgaacacccggagtggttttctgggcttgtctccggggatgagaattaa

SEQ ID NO: 463911 - DNA, 624 bp, Shigella boydii
atgcgtacacaaattgactatctggcggataaatactgttttacagaacggaacgaatcgccccgtcttcgccagcagtggcaggatgttctggaggagtgccggcagacagaggccgggccagaagaacggctgcgtattgcactgctgaatgtggattacgtcaccagttttgaactgccttttcgcttgctgcttacccggacaccacaactgattgccgcgctgcgtgaagaatggggcatcagccagaaaaatgtggtgtttaacgataaacggtttggttgcgtgtacagcctgaaggccagcctttctggtgtgccggatacattccggtatcatctgtctcaccgtattcgtcgcgtggttgggaatgaaaacacatcattgccatatcagcaggttgcccgggaagtgaaagcgccccgtgaacggctgaagtatgcactggaggcgggtttactggtgactgcactggacggcctgttctggtttggtagtcagcgtattgcggctgatgttctgaggctgagaaaggccggaatgccggtggtgaccacgaccgtggaggtgcacgataacctgacaggaacaacccgcaaagtaccggcataccatctctga

SEQ ID NO: 463912 - DNA, 171 bp, Shigella boydii
atgcgacataattacttgatcatgccagtcatgcccctgccggatccggatgtggtccggcgctttgttccgcggacggtggttcactggctgtgtctgctgatgatcctctttatgcgacattcagacagaggagacatcgataaacatcatcatctgtgggccaaatag

SEQ ID NO: 463913 - DNA, 414 bp, Shigella boydii
atgaacggtctaaaaacggggctggggatcacgccgggtgagcacattatcagtgccgattctgcgctcagcagaaatatcaggcattgtttctgcctttcctgtcgtggtcggttgattttgcagacagatgctcagggggcgtggtttgagcatgatttacatgccctgagcgagcaacagaaggcggcctgtgtggtgctgaatccggaaaaatcccatccttacattgatgatatggcgatgtttttatcgccattacctgtcgtgctggagtggcattgcgtgatgtgcgagaggctttttcatgggaagaagttctgtgaaacctgtggtacggggatttattgcagagcggcatgtacgaagtatgtttacagataccagccagatttgctccgggaccaggagtga

SEQ ID NO: 463914 - DNA, 384 bp, Shigella boydii
atgtacgcaaaatcttttctcgcattcgatggcaacggacgcctgactggtgcccgtactgcacagacagcgccttacgatcgatacacctgtcacctttgcggcagtgcgctcagataccacccgcaatacgataccgagcgtccctggtttgaacacactggcgaagggctggctgagcacggtcatgagtgcccttatgtcagaccggagcgcagagaaatactgttgattaaacgcttacagcaatgggtaccggatgccttacccgtggtgcgtaaagccaactggcactgcagacaatgccagcacgattattatggggagcggtactgcacacactgtcatacagggcgtttcagtgaggaggcagtggcaggatga

SEQ ID NO: 463915 - DNA, 600 bp, Shigella boydii
atgaagacttacaacgccaatcccggttacgaaatggatccccagctcctgacacactttaaccagcatctggattcattattcggggtatattcgaaactgttaccgttcagaatggattttgcttaccgaaaaaacacattcagctacggatgcgcctgcaggtatgccatgtgcgcggagatgctgcaactgattaacgaggtaggagataaactggtcgggtatgcctgggtgatggaatatacggaacgtaaagggcttcacattcattttgtgggttatctgaacggtcagatccacaggagttcgtatctggtatccagattgatgggagatatctggaggcgggttaccgatggtaatggttactaccactggtgccggtttaataaaaattatccggtaaacattaaccacgtcattcactattcagaccacaaagcggtgaatgctttacgctatgccattagctaccttgccaaacgagaacagaaagaatgtggcatcgttcttggttgcagcaggcttcctgaaaaaagtcaccgggggcgaccgcgactggacagcaccctgccggggatatgttctcaggtataa

SEQ ID NO: 463916 - DNA, 528 bp, Shigella boydii
atgacaacacgtataactttcaatatgactagtgatgagacgctgcgaattgtggatgagtactgtcatacccacaaactttcgcgctctaaggtaatcgacgcattactcagcgccacagcacctgtccttaacgatattaactgttattatcaacttgcaggcgaactgcagtcacgcttattaaatggagtgtatcaacgggatcttcctcgcaaacgcaatgtcgtcagtgcagagaagtattgtctggaaatctgggaaaacaaacttttcaccagaagagtcctggagtttgacagttcaaatggtgttctgtacgcgctgaaacataaaagacactatcgccgggataagatgattggaagggttgaaagtcggtatatcaaagacatttgcgaataccagatgcagctatccggggagaagacgaaatatgcctgttttatttatatcgaaagaacaatatacaatcacgataatccatcgggcgaaacacctgtaaaagtggctagactggccccctga

SEQ ID NO: 463917 - DNA, 846 bp, Shigella boydii
gtgcgtcagggcgttcaggatgcggcaaaagattcttcagtacaggtacagttaattgaaactaacgcccagggtgatatttcgaaagaaagtacctttgttgataccctcgtggcgcgtaatgtcgatgccattattttatcggcagtgtctgaaaatggcagtagccgtaccgttcgtcgcgccagtgaagcgggtattccggtgatttgctacaacacctgtattaatcaaaagggtgtcgataaatatgtctcggcgtatctggtcggcgatccactggaatttggtaaaaaactgagtaacgctgccgccgattattttattgccaataaaattgaccagccgaaaattgccgtcatcaattgcgaagcctttgaagtttgtgtgcagcgacgtaaaggatttgaagaagtattaaaatcccgcgttcccggcgcgcaaattgtcgctaatcaggaagggactgttttagataaagcgatttccgttggtgaaaaactgattatctccacgccggatctcaacgccattatgggggagtcgggcggtgcgacactcggcgcggtaaaagcggtacgtaatcaaaatcaggccggaaaaattgctgttttcggttcggatatgacaaccgaaattgctcaggagctggaaaacaatcaggtgctgaaagcggtagtggatatttccggtaagaaaatgggcaatgctgttttcgcgcaaacattgaaggttatcaataaacaagccgacggtgaaaaagtgattcaggtgccaatcgatctctataccaaaacggaagatggtaaacagtggctggcaacgcacgttgatggtctgccctaa

SEQ ID NO: 463918 - DNA, 123 bp, Shigella boydii
atgcctaaaaaaatgagaacaacccgtaatctattattaatggctacgctattaggtagcgcactatttgccagggctgcggataaagaaatgaccattggtgcaatataccttgatacctag

SEQ ID NO: 463919 - DNA, 1779 bp, Shigella boydii
atggagcttgctactacgcagtcagtattgatgcaaattcaaccgacaattcagcgttttgccagaatgcttgccagcgttttgcagcttgaggttgagatcgttgatgaaaacttgtgtcgcgtcgccggaacgggcgcgtatgggaagtttcttggtcgccagttgagcggcaactcacgcctgctccgccacgtcctggaaacgaaaactgaaaaagttgtgacacagtctcgcttcgatcccctttgcgaaggttgcgatagtaaagaaaattgccgtgaaaaagcatttctgggtacgcctgtcattttacaggatcgttgtgttggggtgataagtttgattgccgttacccacgagcaacaagagcatatcagtgataatttacgcgaattttctgattatgttcgccatatatccaccatttttgtttcgaaacttctggaggatcaggggccaggagataacatcagtaaaatattcgcgaccatgatcgataatatggatcagggcgtattagttgttgatgatgaaagtcgggttcagtttgttaatcagactgccttaaaaacacttggtgttgtacaaaataatattattgggaaacctatccgtttcagaccattaacatttgagagtaattttactcatggacatatgcagcatattgtttcgtgggacgataaaagtgaattaatcattggtcaattgcataacattcagggccgacaattatttttaatggcatttcaccaatcgcataccagtttttctgtagcaaatgcacctgatgaaccacatattgaacaattggttggcgagtgccgtgttatgcggcaattaaaacgactcattagccgtattgcacccagcccatccagcgttatggtggttggtgaaagcggcacgggtaaagaagtcgtcgcccgagcaatccataagttgagcggaagacggaataaaccctttattgctatcaactgtgccgcgattccggagcagcttctggaaagcgaactgttcggttatgttaaaggcgcatttactggcgcttctgccaacggtaaaacagggttgattcaggcggcgaatacgggcacgctgtttctcgatgaaataggtgatatgccattaatgttgcaggctaaattactgcgcgctattgaggcgcgtgaaattctgccgattggtgccagtagcccaatacaagtcgacattcgcatcatttctgcaactaatcagaatttggcccagttcattgccgaaggtaaattccgcgaagatctcttctaccgacttaatgttatcccgataactctgccaccgctgcgtgaacgtcaggaagatattgaactattggtgcattactttttacatctgcatacccgtcgtctgggatcggtttatcctggcattgctcccgatgtcgtcgaaatattgcgtaagcatcgttggcccggaaacctgcgcgagttaagcaatttgatggaatatctggttaacgtagttccttcaggtgaagttatcgacagcacgctattgccgccaaatctgctgaataatggcacaacggagcaaagtgatgtaacagaggtcagtgaggcgcacctgtcactcgatgatgcgggcggcacggcgctggaggagatggaaaagcaaatgatccgcgaggcgctttcacgtcataacagcaagaagcaagttgctgatgaactgggcatcggcattgctacgctctatcgcaagattaagaaatatgagttgttaaacacataa

SEQ ID NO: 463920 - DNA, 618 bp, Shigella boydii; identical to SEQ ID NO: 462513

SEQ ID NO: 463921 - DNA, 1035 bp, Shigella boydii; identical to SEQ ID NO: 462529

SEQ ID NO: 463922 - DNA, 795 bp, Shigella boydii
atgacaaggataaaaataaacgcacgccgtatcttcagcttattgattccttttttctttttcacttctgttcacgctgaacaaacggcagctcccgcaaaacctgtaactgtggaagcgaagaatgaaacctttgccccgcagcatcccgatcaatatctctcctggaaagccacctcggaacagtcagagcgtgttgacgccctggcggaagatccacggctggtgatcctgtgggcggggtatcccttctcgcgcgattacaacaagccgcgtggacatgcctttgctgtgaccgatgtgcgtgaaaccctgcgtaccggtgcgccgaaaaatgctgaagatggtccgctaccgatggcgtgctggagttgtaaaagcccggatgtggcgcgtctgatccagaaagacggcgaagatggctacttccacggtaagtgggcgcgcggcggcccggaaatcgtcaacaacttaggttgtgccgactgccataacaccgcctcaccagagttcgccaaaggcaaaccggagttaaccctttcccgtccgtatgcggctcgcgcgatggaagccattggtaaaccttttgagaaagccggacgtttcgaccagcaatcgatggtttgcggtcagtgccatgtggagtattacttcgacggcaaaaacaaagcggttaaattcccgtgggatgacggcatgaaagtcgaaaatatggagcagtattacgacaaaattgccttctctgactggactaactccctgtcgaaaacgccaatgctgaaagcgcagcactga

SEQ ID NO: 463923 - DNA, 1389 bp, Shigella boydii
gtgccgggcggcagtattccgctgaagaaaaacgttgatgacgcgctgaaaaacccgaacgtcaccagcgtagagcatgtggtggtactgaagcgtactggcgggaaaattgactggcaggaagggcgcgacctgtggtggcacgacctggttgagcaagcgagcgatcagcaccaggcggaagagatgaacgccgaagatccgctgtttattctctacacctccggttctaccggtaagccaaaaggtgtgctgcatactaccggcggttatctggtgtacgcggcgctgacctttaaatatgtctttgattatcatccgggtgatatctactggtgcaccgccgatgtgggctgggtgaccggacacagttacttgctgtacggcccgctggcctgcggtgcgaccacgctgatgtttgaaggcgtacccaactggccgacgcctgcccgtatggcgcaggtggtggacaagcatcaggtcaatattctctataccgcacccacggcgatccgcgcgctgatggcggaaggcgataaagcgatcgagggtaccgaccgttcgtcgctgcgcattctcggttccgtgggcgagccaattaacccggaagcgtgggagtggtactggaaaaaaatcggcaacgagaaatgtccggtggtcgatacctggtggcagaccgaaactggcggtttcatgatcacgccactgcctggcgctaccgggctgaaagccggttcggcaacacgtccgttcttcggcgtgcaaccggcgctggtcgataacgaaggtaacccgctggaaggcgctaccgaaggcagcctggtgatcaccgactcctggccgggtcaggcgcgtacgctgtttggcgatcacgaacgttttgaacagacctacttctccaccttcaaaaatatgtatttcagcggcgacggcgcgcgtcgcgatgaagatggctattactggatcaccgggcatgtggacgacgtgctgaacgtctccggtcaccgtctggggacggcagagattgagtcggcgctggtggcgcatccgaagattgccgaagccgccgtagtaggtattccgcacaatattaaaggtcaggcgatctacgcctacgtcacgcttaatcacggggaggaaccgtcaccagaactgtacgcagaagtccgcaactgggtgcgtaaagagattggcccgctggcgacgccagacgtgctgcactggaccgactccctgcctaaaacccgctccggcaaaattatgcgccgtattctgcgcaaaattgcggcgggcgataccagcaacctgggcgatacctcgacgcttgccgatcctggcgtagtcgagaagctgcttgaagagaagcaggctatcgcgatgccatcgtaa

SEQ ID NO: 463924 - DNA, 261 bp, Shigella boydii
atgcggaatggtgatgagaatgctgatgacattgcagggcgcttcaccgggacgtataccggagctgatgcgcgatcttgcaagtatgggacaacttgtgaaattaccgacgagaaggggaagggccttcccgagagtggtaaaggagaggccctggaaataccccacagccccgaaaaagagccagtcagttgcttaactgactggcattacggcgttatgccggtatttttttacggaagaggtatcaaatgcgtttaa

SEQ ID NO: 463925 - DNA, 588 bp, Shigella boydii
gtggcgacaccggcccggcaggggccaaaaggtgacaaaggcgatccgggagtggctggaccagcaggtccggcaggtgcgccggggccgaaaggcgataaaggtgatccgggagtagcaggtccagcaggtccggcggggccacagggaccgaagggagacacaggagcccccgggcaaggaacagaactgcttactactgccaatacatggactcaggcacaaacttttaatggtggtattaatggcaatttgacggtgaccggaaacggctcatttaacgatattcagatccgttcggataaacgcaacaagcgaaatctggtaaaactggataatgcgttagatcgtctggaggcacttactggttatctttacgagatacagtactctgccgacggttggcaaacgtcggttggtttaattgctcaggatgcacaaaaagcattgcctgaactggtaactgaagacgcagacgttatatctggtgaaaaacgtctgcgtcttaactacaacggcataattgcattgttagtcgagggctttaaaacacttcgtcatgagattaaagaactccgggagaagtaa

SEQ ID NO: 463926 - DNA, 726 bp, Shigella boydii
atgtcaagtggtgtggatagcctgaccgatatcagttacagagtgagagcattctttgatgaggtgacattagcttatcgtggtttaaccgatgaacaaaagaaagttgttgatgctttaggttctggcttgattaatagtttaaaagtcttggctggtgttattgctgtgaataaagttgttggtgtaaccagaagtatttacgggcttatgactgctatcacaagattaggtcaggtagctgatactacagcggataacgtgaatagaaagaatgggaaaccatcaagactaaaccctatgaatatgctattagctggtagtgctatctatgcaggttatgaaagattagcttctacacctgaacgaatggaagcacaagctaaattaccagagctggctaaagagtctggacttaaacccgctttcactatggatgatgttaaagggtggtttaatagtgctgctatgaatcttgctaacttccagcatccagaattaaacaacattaagcaagattcagcattaacgagtgcagatatccaaagcctgagagatgaaatctccgctttgagcaaacgtattcaggagcctgtgaaagtttcacttggtggtgaagttgccattaaaccagatgaaaccagctttatgacctttagcagtaatatctacgaccaatatgcagaagctacgctattaagttcatcattcccagaagatgattaa

SEQ ID NO: 463927 - DNA, 213 bp, Shigella boydii; identical to SEQ ID NO: 34064

SEQ ID NO: 463928 - DNA, 1749 bp, Shigella boydii
atgacgtccggggagaggagggtggcttcacgactggagagttttctgaatgatgactgccttgtctggtacgatatcccggtgggacggagaaaccggcatccggattttgtcattattgacccggagaacggactggtatttctggaggtcaaggactggacgatttccacgctgcgtgaggcaaatcaggagcaggtcacgctggaaaccgacggtcttcttctgaaatcagaaataaatccgctggtacaggttcgtcgttatgcctgtgatactgttaatgccttaccctcagacccgtgcttacggcagaatgacggtcagtataagggacgactgaacttggcctgggcgtatggtgtggtgtttacccgcattacccgtcagcagctgaagaccctgacagggaatgatgagaatgcggtggaaaagattttcccttcagcacagacaatctgtcaggatgaaatgacgcagtctgttttacctgaggtattccggcaaaaaattgccgggatgtttaccacggggttcagaacccgggtgacaccccggatgagagatattctgcgcgcccatctgtttcctgaagtgaccgtgaaacagaactcacaaatcaaaatcatggatatccagcaggagattctggccagaaatattggtgacggacatcgtgtcattcatggtgtggccggttccggaaaaaccatgattcttttgttccgttgcctttacctggctgagaccacacccggaaagattctggtgttgtgctacaacattaccctggccagctatctgcgggaatgcattgaggccagagggttgacgtcacgggttacggtatctcattttcacagctggtgtgcctcaatggtaaaacgccacggtattaaggtgacggccgacagaaaagaatatcctgataaatgcttcagtgcactggaagaggccgtgaacagcggaaaaatcacccgaaccggatatgatgctgtactggtggatgaggggcatgattttgacagtcgctggctggccctgattgcccgtctgtttgataacgcatcccgttcactgctcctgatgtacgatgacgcccagtccatttaccggcgggagcgggccctgaacttttctctggccagtgtggggattcaggcacagggacgcacttctgtcctgccggtcaattatcgtaatccgaaacgcattctgcactttgcttatgcattctcccgcgagtattttgaaaaacatcagaaccgtgaaataccactcgttcagccacaggcgggtggtgaagagggcacagagccggaaatcctgcgttgtgcttctgaacgtgatgaagccagacaggttgcagactggctggagaagcgccatgccctgtgcggtcactggagtgatatggctgttctgtgtccggcagagttttcagtgaaacaactgaaagaggttatgacacaacgcgggataccgtttgccacctgctttgacagtgaaggtaagaaggcatactcgcgacgtaaggatgtggtgcatttactgacataccagagcagtaaggggctggagttcccgtatgtggcggttatcaatgcttctttcgttccttctggtgtagcggatgagtctgaagtaattccggtgctttatgtggcgtttacccgggcaacccgtgaattactggtgacctgttaccgtgaaaacagtatcagtcgtcaccttgagaattttgcataa

SEQ ID NO: 463929 - DNA, 561 bp, Shigella boydii; identical to SEQ ID NO: 34065

SEQ ID NO: 463930 - DNA, 639 bp, Shigella boydii
gtggcggtcagggcgctgataaaccttaatgagcgctttattgatgcagtatcgaatccggcaggtattattggtttgttttttggtttgcttaccgtatttgcaattttatttcgtttttttatttaccggagactcagaaagaaaacagcagcatttgagcaggccgtttcagggctggttcagagagaacgggattttaatgaaactgtcaatgccgctatagcccggggaatacgacaggaaaaggagcagcttgccagacgtcgtgaggaatttcataccaccagaaataaggccagccgtgcaatgcaacggattgttgattccgcctggagatttaaggcgaagactctgttggctggtgtaacgattaataactggcaaagcaaatatgaccagcttcgtaaggaaagagaggcttacgctgctgtcagtgagaaaattgcctttcttaacctggaagataattctgactgggatagtgtcaggcaacagtttctggacaaagtggcattgctggaaaaagcgcaggaagaaaaggaatatcaggcagagcttaagcgtcagatgcgtgaagaaaaagagcgtcaggatgaacttgaccggcgccagcgggaagcggaagagtcttgctga

SEQ ID NO: 463931 - DNA, 243 bp, Shigella boydii; identical to SEQ ID NO: 462704

SEQ ID NO: 463932 - DNA, 288 bp, Shigella boydii
gtgtcagaggttttcaccatcatccccgaagcgtgcgaggcagctgcggtaaagctcgtcagcgtggtcgtgaagcgcttcgcagatgtcagcctggtcgtcggcgtccagttcattcagtttttccagcagggtcagcgtctggcttctgatgaagcgggccatgttaagggcggttttttcctgtttagtcacagttctgtttctccatgtgtggggagtctgtcggaggtttttaatgataccggtgaaacgcgaaaggatgctcacgatacgggtcacggatga

SEQ ID NO: 463933 - DNA, 348 bp, Shigella boydii
atgataccggtgaaacgcgaaaggatgctcacgatacgggtcacggatgaggaacatgcgcggctgctggcacgttgtgagggaaaacaacttgcgtcatggatgcgtaaggtctgcctgggggcaccgccatcgaaaacgtcaggtcttccgacactggcaccgccgctgttgcgccagttcgcttcggtcggcaataacctgaatcagatagcccggaagataaacagcggacagtggtcggggcatgaccgggttcatgtggtggctgcactgatggccatcggacgtgaactgagtgagctgagggatgaggtccgtaaacagggagagcgggatgatagttaa

SEQ ID NO: 463934 - DNA, 1599 bp, Shigella boydii
atgatagttaagtttcatgccaggggaaaaggcggtggcagtggtccggttgattacctgctgggccgggagcgtaaccgggaaggggcgagagttctgcggggtgctcccgaagaggtgcgggaactcatcgatgccacgccgtttgcgaaaaaatacacctcgggggttctgtcttttgcagagcagaccctgccaccgggagagcgtgaaagggtgatggagagctttgagcgggtactgatgcccggtcttgaaaaaaatcagtacagcatcctgtgggtggagcaccaggacaaggggcgtcttgagctgaattttgtcatcccgaatatggagctggcgagcggaaaacggctccagccctattacgaccgagcggaccgtccgcgaatcaatgcctggcagacactggtgaatcaccattacgggctgcacgacccgaacgcaccggagaacaggcggacacttgtcaccccgaataatctgccgaaagcgaaacaggaggccgcagaagcgattacgaggggactggaggctctttaccatgccggagcgctaaaaacgcgtcaggatgtcactgaggcgcttacagcggcaggttttgaggttgtgaggacaaccaggagcagtatcagtatcgccgacccggagggcgggcgtaatctcaggctgaaaggggcgctgtatgagcaatcttttacaaatggggacagacttcgagaagaaactgaaagagcgtgccgtctctacagagaacatactgaacagcgagttcaggaagctcgaagcgtctgtagacagggaactgaacttaaacgggcagaaaatcagagacgctatcagcgcacacacagcagcggtgaaagaacaactggagacgctgaacagtgccgtgaacgcgcagttcagcgccacagagaacgaactggcccggcggcaggaagagctgctctggaagctggtcaaagggcggatactgtacccgtcgctgacggcgctttgcgtcacgggcgggatttttctggcgtcatgggggctgattcagtggcaggaaagccggattgcggcgaacatcctggctatcagggaccaggaagagacgctggcgaaactccgggaaaaaacatggggtgtgacgtatcacgagggcaggaacgggaaatttctggtattgccgtccggggtgaagggggaaaacaactggacggtggagaagaagaacgcagtaagactggtcagggagtaagtgagtatgacagagctggaaatgcacttactgaacgccttagagcaattgcagcaggactatacgcagcggctgaaagactgggagagcgccttcacggatttgcagcatatgttcgagctgacacgacaggagaacgggcaactgagggaacagtgcgacgacttgagtcagcaggtgcagagattagtcgagcaggtggaccacttgagtcggttatttatcacgaacagcagataagggatgaacaggaaaggcaggcacgcctggaacgggagcgtgcgcggtcctggcatgaagagcaggaacgggaagcacgggtatggcgtggcccgtcaatagggatatga

SEQ ID NO: 463935 - DNA, 207 bp, Shigella boydii
atggtaccggaacgcgttaaaaacgcatccgggcgcgattctggcgtgtcgtttttgttgctgtgttttgcctctttgccagatcgcgctcattcctcagcctcatcccgcgatgtctgcgtatgtcatcaactgaaaagatggaaaaaaaaacagtgtcatgaggtttacgcaggcaaaaccagcgttattcacatggctgaatag

SEQ ID NO: 463936 - DNA, 213 bp, Shigella boydii
atgcggaatggtgatgagaatgctgatgacattgcagggcgcttcaccgggacgtataccggagctgatgcgcgatcttgcaagtatgggacaacttgtgaaattaccgacgagaaggggaagggccttcccgagagtggtaaaggagaggccctggaaataccccacagccccgaaaaagagccagtcagttgcttaactgactggcattag

SEQ ID NO: 463937 - DNA, 495 bp, Shigella boydii; identical to SEQ ID NO: 463228

SEQ ID NO: 463938 - DNA, 288 bp, Shigella boydii
ttggagtcattacccgccgactgcctggaatttatctggtcgttacccgaaaattctgttgacctgatagtcacggacccgccgtactttaaagtgaagcctgagggctgggataaccagtggaagggcgacgatgattacctgaagtggctggagcagtgtctggcgcagttctggcgggtgctgaaacctgccggaagtctttacctgttctgtggtcatcgcctggcatctgatatcgaaatcatgatgcgtgaacgcttcagtgtgctgaaccatattatctga

SEQ ID NO: 463939 - DNA, 267 bp, Shigella boydii; identical to SEQ ID NO: 462622

SEQ ID NO: 463940 - DNA, 435 bp, Shigella boydii
gtgaactttgagctggcgtgggaccctgaagttcatgtacatcgcatcggccgtacagctcgtgcaggaaatagcggtctggcgatcagtttctgtgctccggaagaagcacagcgggccaatatcatttctgacatgttgcagataaaacttaactggcaaacgccgccagctaatagttccattgtgccgctggaagcagaaatggcaacgttgtgtatcgatggcgggaaaaaagccaaaatgcgcccgggtgatgtattaggtgcactgacaggagatatcgggcttgatggcgcagatattggcaaaatcgccgtgcatccggcgcatgtctatgtcgcggtccgtcaggctgttgctcataaagcatggaaacagttacagggcgggaagattaaaggaaaaacgtgccgggtgcggttattaaaataa

SEQ ID NO: 463941 - DNA, 546 bp, Shigella boydii
atgttgcatttaaaaaatattacggcaggtaatccgaaaaccgtggaacaatatcagctgacaaaacaatatgatgtcacctggcttttttcgaaagacggaaaaaactggtatgaagagctgaagaatttcgccagcgacacaattaaaataacttacaccggagacggtcgcgtggtgtgggtcggtaaggatgtgactggcattgaaccccgtaacgccagtgttattgaagttcctgatattaccgccaaccgccgcattaccgcgccgggttactggttttaccgcaatgatgaatttgtctttgactacagactcaaagcggaagatgagcgtgatgcccttctggctcaggtcagtgcccggacaggggaatgggaagaagacctgctgctggggctaatcagcgacgaagaccgggaaaaactgaaagcgtaccgcatttacgcgaaatcgctgcaggcgatggatttcagtgtcatcactgataaaacctcatacaacgccattgaatggcccgtctctccggaaggttcttcctga

SEQ ID NO: 463942 - DNA, 210 bp, Shigella boydii; identical to SEQ ID NO: 9340

SEQ ID NO: 463943 - DNA, 315 bp, Shigella boydii
atgtttctgaaacaggatacgtttaattatgaaaaacagtccgtggtgctcagtgagctgtccgggctgcagagaattgaatatctgacgtttgttcagcagcgaacggcaaagtttgatgcacaggagggagaactgccggaggctgaacgactgaaccgccccgggtttcctggagagtgttttatctgtgaacccaggctgccagatcatcgtttccgatggaagcataataagctttttctgcttctaccggagggatgtggcccagcctttccagcaatcgtcgattattataccagtccacccacgtga

SEQ ID NO: 463944 - DNA, 402 bp, Shigella boydii; identical to SEQ ID NO: 463160

SEQ ID NO: 463945 - DNA, 207 bp, Shigella boydii
atgttcgtcttgataaaaatgatactgcctggatttgcccctatatttccagacatctgttatcacttaacccattacaagcccgctgccgcagatattcccgtggcgagcgataacccagcgcactatgcggatgccattcgttataatgttcgaacgcctctgcaaggttctttgctgccgttaacccgtctggtttgggcatga

SEQ ID NO: 463946 - DNA, 369 bp, Shigella boydii; identical to SEQ ID NO: 463558

SEQ ID NO: 463947 - DNA, 261 bp, Shigella boydii
atgagcattaaattaattgcggtagacatggatggtactttcttaagcgatcaaaaaacctataaccgtgagcggtttatggctcagtatcagcaaatgaaagcacaaggcattcgctttgtggtcgccagcgggaatcaatattatcagttgatctctttcttccctgaaattgctaatgaaattgcctttgtggctgaaaacggcggctgggtactgagagatcccctcataatttccccaaaacgtaaccatgtgtga

SEQ ID NO: 463948 - DNA, 1554 bp, Shigella boydii; identical to SEQ ID NO: 462648

SEQ ID NO: 463949 - DNA, 183 bp, Shigella boydii
atgaacaaaacgctaatcgccgcagctgtggcagggatagttttactcgcttcaaacgctcaggcacaaaccgtaccggaaggctatcagctacagcaagtgctcatgatgaagtggtcaacaaaaactggccaccgagttagagtttttccagtatcgattttccgattcgtttgggggtaa

SEQ ID NO: 463950 - DNA, 267 bp, Shigella boydii
atgttgggacttgaaccgaagaacacggcggtgcggagtccggagagtaacggaatagcagagagcttcgtgaaaacgataaagcgtgactacatcagtatcatgcccaaaccagacgggttaacggcagcaaagaaccttgcagaggcgttcgagcattataacgaatggcatccgcatagtgcgctgggttatcgctcgccacgggaatatctgcggctgcgggcttgtaatgggttaagtgataacagatgtctggaaatatag

SEQ ID NO: 463951 - DNA, 267 bp, Shigella boydii; identical to SEQ ID NO: 462029

SEQ ID NO: 463952 - DNA, 1254 bp, Shigella boydii
atggacttcgggggaaaaacgagtatttttagtcatcctgtttacctctttctcaggaagtttagtctccaggaaacccggggcggttcactgggacgttttggtaatgagatgagcggttggtttgacctgaccttaaatcagcgtgtttataatcaggacggtaaaacggcaaatgcggtcgttacctatgatggcaacgtgggtgagcagtataacgatgcctggtttggtgacagtgccaatgaaaatatcatgcagttcagcgatatttacctgacaacgcgaggttttttacccttcgcaccagaggcagacttctgggtcggcaaacataaactcccgcaatatgagatccagatgctggactggaaaaccttaaccacggatgtcgccgcgggtgtggggattgaaaactgggcacttggtgtagggctgtttgatatgtccttaagccgtgatgatgtcgatgtttactctcgtgatttttcgcgtaccagccagatgaataccaattctgtggatgttcgttatcgcaatatcccgttatgggatgatgcgacattatcattaatggctaaatattccgcacctaataaaacggatcaacaacaagataacgaaaatgacaacagttattttgaaatgaaagatagctggatgctgacttctgttttacggcaaaacctgcaacgcgatacgtttaatgaatttacgttacaggttgccaataattcctatgccagcagttttgccagtttctcagatgccagtaatacgatggcgcatggtcgctattactatggtgatcataccaatgggatcgcctggcgtttaatctctcagggcgagatgtatcttactgacaatattattatggctaacgcgcttgtctattctcacggcgaagatgtttatagttatgaaagtggtgctcatagtgattttgacagtattcgcactgtaataagaccggcctggatctggaatacatggaatcagacggggcttgaattaggctggtttaagcaacagaacaaaactcagcagggtgtaacactaaatgaatcggcttataaaacgacactctggcatgcattgaaagtgggtgaaagcattttaggttcacgaccagaaattcgcttctatggaacgtatatcaatattctggataacgaattatcgaattttaagtttaatgagaacagcaaagacgagtttatggccggcatccaggcggaagtctggtggtaa

SEQ ID NO: 463953 - DNA, 303 bp, Shigella boydii; identical to SEQ ID NO: 461506

SEQ ID NO: 463954 - DNA, 243 bp, Shigella boydii; identical to SEQ ID NO: 462704

SEQ ID NO: 463955 - DNA, 327 bp, Shigella boydii; identical to SEQ ID NO: 462700

SEQ ID NO: 463956 - DNA, 210 bp, Shigella boydii; identical to SEQ ID NO: 9340

SEQ ID NO: 463957 - DNA, 267 bp, Shigella boydii; identical to SEQ ID NO: 462029

SEQ ID NO: 463958 - DNA, 822 bp, Shigella boydii
atggtctggttagcgaatcccgaacgttacgggcagatgcagtaccgctattgcggaaaaagtggtttacgcctgcccgcgttatcgctcggtttatggcacaatttcggtcacgttaacgcgctggaatcacagcgtgcaatcctgcgtaaagcgtttgatttaggcattacgcactttgatttagccaacaattacgggccgcctccaggaagcgcagaagagaactttggtcgcctgctgcgggaggattttgccgcttatcgcgatgaactgattatctctaccaaggctggctacgatatgtggcccggcccttacggctctggcggttcacgtaaatacctgctcgccagcctcgaccaaagcctgaagcgtatggggcttgagtatgtcgatatcttttactctcatcgcgtcgatgaaaatacgccgatggaagaaaccgcctctgcgctggctcatgcggtacaaagcggtaaggcgctgtatgtcgggatctcctcttactcgccagagcggacgcaaaaaatggtcgagttgctgcacgagtggaaaattccgcttttaattcatcaaccttcgtacaatttactgaaccgctgggtggataaaagcggcctgctggataccctgcaaaataacggcgtgggctgtattgcctttactcctctggctcagggattgctgaccggaaaatatctcaacggcattccgcaagattcacggatgcattggatttgcccctatatttccagacatctgttatcacttaacccattacaagcccgctgccgcagatattcccgtggcgagcgataa

SEQ ID NO: 463959 - DNA, 1275 bp, Shigella boydii
atgggtggcttttttgcagcgcaaatgaaattcgctggatacgacgtcattattatcgaagggaaggcgaaatcaccggtatggctgaagattaaagatgacaaagttagcctggaaaaagccgatttcttatggggaaaagggacgcgcgcaacgacggaagaaatttgtcgattgaccagtccggaaacctgtgtggcggctattggccaggctggggaaaaccttgttcctctctctggcatgttgaatagccgtaaccacagcggcggtgcgggaactggcgcaattatgggttcgaaaaacctgaaagcgattgcggttgaagggacgaaaggggtcaacattgccgatcgtcaggagatgaagcgtctcaacgattacatgatgactgaacttattggtgcgaataacaaccatgtcgtgccaagtacgccgcaatcgtgggcagagtattcagatcccaagtcacgttggacagcacgtaaagggctgttttggggcgcggctgaaggtggtccgattgaaacgggggaaattccgccaggcaatcagaacacggtcggctttcgtacctataaatccgtttttgacttaggtccggcggcagagaaatacacagtaaaaatgagtggctgccactcttgcccgatccgttgtatgacccaaatgaatattcctcgggtgaaagagtttggcgtgcccagcacaggtggtaacacttgtgtagccaactttgtccataccaccatcttcccgaacggtccgaaagattttgaagataaagacgatggccgtgtgattggtaacttggttggtctgaatttgttcgatgactacggcctatggtgtaactacgggcagttgcatcgcgactttacttattgttacagcaaaggggtgttcaagtgtgttctgcctgctgaagagtatgcggaaattcactgggatcaactggaagcgggtgacgttaatttcattaaagatttttactaccgtctggcgcatcgtgtgggtgagctgagtcacctggctgatggttcatatgccatcgcagaacgctggaatttgggtgaagagtactggggctacgcgaaaaataaactctggtcgccgtttggctatccggttcaccatgccaatgaagcgtcagcgcaggtcggttccattgttaactgtatgttcaaccgtgactgcatgacacatacccatatcaactttattggttccggcttgccattgaaactgaaccgccccgggaatcctggagactaa

SEQ ID NO: 463960 - DNA, 210 bp, Shigella boydii; identical to SEQ ID NO: 9340

SEQ ID NO: 463961 - DNA, 897 bp, Shigella boydii
ttgttttttggggttgaaatttccaatcatcaagaaaaactcccactaaataaaacacatcatactgtagattttggcgccaatgcgtatatcattgatcatgactctccatatggatatatgacattaaccgatcactttgataatgctattccacctgttttttaccatgagcaccaatcatttttcttagataactttaaagaggttgtggatgaagttagcaggtatgtgcatggtaatcaggggaaaactgatgttccaatatttaacactaaagatatgaggcttggaattgggttgcatcttattgattttataagaaagagtaaagatcaaggattcagagagttttgttataacaaaaatattgatcctgttagtctggatagaattataaactttgtgtttcagcttgagtatcatataccaagaatgctaagtacagataacttcaaaaaaataaaactcagagacatatctttggaggatgcgattaaagcatctaattatgaagagattaacaataaagtgactgataaaaaaatggctcatcaggcccttgcttattctttaggcaataaaaaagctgatatagcactttatttactatctaaatttaattttacaaaacaagatgtcgcagagatggagaaaatgaacaacaatagatattgtaatctgtatgatgttgaatacttacttagtaaagatggtgccaactataaagtgctagaatattttatcaataatggattggttgatgtaaacaaaaaatttcaaaaagcaaatagtggggacactatgcttgacaatgcaatgaaaagcaaaaatccaaaaatgattgattttttattaaaaaatggagcaatattaggcaaacgatttgagatatga

SEQ ID NO: 463962 - DNA, 678 bp, Shigella boydii
atgaatgacccggtaaagggcgaaggccggatgattactgatgccagtggcgtcaccagaagggaaggcgggattttgggaatgtggagcaatatatttccagaacgtaatggtagcaacgagcaaaaaggtgatagcaagccgcacatacccgacatcagggatattcttgatattttccctcagccactgcgggaaaagctgttgaacaaaatcagtgaagccatcgactatgaacccgtgattggtgtcatgggaaaaactggcgcggggaaaagcagcgtatgtaatgcgctgtttaaaggggaggtttgtgcagttagcgacgttgaggcatgtactcgcgaagttcaggaattgcgtatacgcttcggcaaacattcgctaaagatcattgatatacctagtgtcggtgagaatgcccggcgggacaaggagtatgaatatttataccgtaatttgcttccctccctggatcttatcctgtgggtaataaaaggagacgatcgggccttttctgcggatgagcatttctacaataatgttctgctccctgctggtgggggtgagcgcgttttattcgtcctcaaccaggttgataaaattgagccattccgcgagtgggatactcatctgcatcagccatctcctgcacagcgcatcaacatcgaaaagtga

SEQ ID NO: 463963 - DNA, 684 bp, Shigella boydii
atgaaaacacagcatgatcattatgaccgcctgtccgtcaggctatcggtcattatcagccgcttactggctggcgaatctctggagcttaaagcgttagctgatgaatttggtgtctcagaacgcaccctacagagggattttcagcaacgcctgatccatctggatctcgagcattccagcggaagctaccgacttacctgccgaacgggccgggagcactcacccaacacatttgcgttcatccgtaattccgggatttcagggattattccggctcagaatcgcaggttaattcgactgattaccagtaactccggaagctcaccgtgccttatagggcatggagggctgccatctccagttacacaaaccgcctgttttctggaactggcggaagctatccgtgactaccgcgccgttacattattagttaacggtaaaagctacgaagcagtagctccccgccgtctgatatttcagtccaaaaactggtttcttgttgctacccgcaccagaaatttacaggtgtttcggatggaagatgttaacgccgtaaccgttctggatacctcttttcgcagaaagcctgaacttgatgctctgactgccagtgaagagtttatttcagccctccctcactttcgtttcataagtgacgtaattcagaccttcagagagtaa

SEQ ID NO: 463964 - DNA, 576 bp, Shigella boydii
ttgttttttggggttgaaatttccaatcatcaagaaaaactcccgctaaataaaacacatcatactgtagattttggcgccaatgcgtatatcattgatcatgactctccatatggatatatgacattaaccgatcactttgataatgctattccacctgttttttaccatgagcaccaatcatttttcttagataactttaaagaggttgtggatgaagttagcaggtatgtgcatggtaatcaggggaaaactgatgttccaatatttaacactaaagatatgaggcttggaattgggttgcatcttattgattttataagaaagagtaaagatcaaagattccgagagttttgttataataaaaacattgatcctgttagtctggatagaattataaactttgtgtttcagcttgagtatcatataccaagaatgctaagtacagataacttcaaaaaaataaaactcagagacatatctttggaggatgcgattaaagcatctaattatgaagagattaacaataaagtgactgataaaaaatggctcatcaggcccttgcttattctttag

SEQ ID NO: 463965 - DNA, 573 bp, Shigella boydii; identical to SEQ ID NO: 462681

SEQ ID NO: 463966 - DNA, 576 bp, Shigella boydii
ttgttttttggggttgaaatttccaatcatcaagaaaaactcccactaaataaaacacatcatactgtagattttggcgccaatgcgtatatcattgatcatgactctccatatggatatatgacattaaccgatcactttgataatgctattccacctgttttttaccatgagcaccaatcatttttcttagataactttaaagaggttgtggatgaagttagcaggtatgtgcatggtaatcaggggaaaactgatgttccaatatttaacactaaagatatgaggcttggaattgggttgcatcttattgattttataagaaagagtaaagatcaaagattccgagagttttgttataataaaaacattgatcctgttagtctggatagaattataaactttgtgtttcagcttgagtatcatataccaagaatgctaagtacagataacttcaaaaaaataaaactcagagacatatctttggaggatgcgattaaagcatctaattatgaagagattaacaataaagtgactgataaaaaatggctcatcaggcccttgcttattctttag

SEQ ID NO: 463967 - DNA, 210 bp, Shigella boydii; identical to SEQ ID NO: 9340

SEQ ID NO: 463968 - DNA, 927 bp, Shigella boydii
atgacagtgtcagcagatatgccgcttgttggctgtgttttgactttgtcactgttggttttgcttatatttatggcagcaaaaggactgcgttatcaggccttgatgactagtctcaacggcgtaagatttagttttaattgctctatgaaagggttctggtgggtaacctttttcttgccgattttaatggccattgggatggggactgttttctttatctcgacaaagatgctacatgccaatagttcaagtagtgttattatatctgtggttctgatggcaatagttggtattgtttccattggtatttttaatggtactttatatagcctggtaatgagttttctctggagcaataccagtttcggtatacatcgtttcaaggtgaaattagatactgcgtattgtataaaatatgccatcctcgcatttttagctttattaccttttctcgctgttgctggttatattatcttcgaacaaatattaaatgcgtatgatagttctgtgtatgcaaatgatgatattgagaatttacagcaatttatggaaatgcaacgtaaaatgataatcgcgcagttaatctattattttgggattgctgttagcaccagttatttaacggtgtcgttgcgaaatcattttatgagtaacctgtcactgaatgatgggcgtattcgttttcgctcaactttaacgtaccacggtatgctttatcgcatgtgtgcgttggtagtgatatccgggattacgggcggtctggcttatccactgctgaaaatatggatgattgactggcaggcaaaaaatacgtatttgctgggcgatttggatgaccttcctggtaatgactccaacttactgatagtgttttatgttcagataatgcccgatgaccttgtcatgcagctccaccgattttga

SEQ ID NO: 463969 - DNA, 210 bp, Shigella boydii; identical to SEQ ID NO: 9340

SEQ ID NO: 463970 - DNA, 303 bp, Shigella boydii; identical to SEQ ID NO: 461506

SEQ ID NO: 463971 - DNA, 504 bp, Shigella boydii; identical to SEQ ID NO: 462695

SEQ ID NO: 463972 - DNA, 267 bp, Shigella boydii; identical to SEQ ID NO: 462029

SEQ ID NO: 463973 - DNA, 267 bp, Shigella boydii; identical to SEQ ID NO: 462029

SEQ ID NO: 463974 - DNA, 840 bp, Shigella boydii; identical to SEQ ID NO: 462680

SEQ ID NO: 463975 - DNA, 285 bp, Shigella boydii
gtggctgttggtaatgcagtcatcctgctggcaaaagacgtgatatatgacgagtacttttttgatctgcggcagtcatttttcgtgagcgttaaagatctgatggcctctggcgcaaaaggtattccggagacacagaaatatccggacgtttattgctggatcccgcttttctccataaattccggcgtggtcattaccccggtctataaaattgatccccggaaacccgtaacggtaaaaaaaccggatcagatcactgttgtttgtaattacagagaataa

SEQ ID NO: 463976 - DNA, 711 bp, Shigella boydii; identical to SEQ ID NO: 462731

SEQ ID NO: 463977 - DNA, 351 bp, Shigella boydii
atgcgagagacagtcgaaattatgcgttatcccgtcactcttacacccgcgccggaaggcggttatatggtttcttttgtggatatccctgaagcgttgacgcagggcgaaactgtcgctgaagcgatggaagcggcaaaagatgctttactgaccgcatttgatttttattttgaagataacgagcttatcccgttaccttcgccattaaatagtcatgatcactttattgaagtacctttgagcgtcgcctctaaagtattgctgttaaatgcttttttacagtcagaaatcactcagcaagagttagccaggcgaattggcaacccgaatgtagtcaacccaaaataa

SEQ ID NO: 463978 - DNA, 243 bp, Shigella boydii; identical to SEQ ID NO: 462704

SEQ ID NO: 463979 - DNA, 195 bp, Shigella boydii
atggctcatcaggcccttgcttattctttaggcgataaaaaagctgatatagcactttatttactatctaaatttaattttacaaaacaagatgtcgcagagatggagaaaatgaacaacaatatatattgtaatctgtatgatgttgaatacttacttagtaaagatggtgccaactataaagtgctagggtaa

SEQ ID NO: 463980 - DNA, 564 bp, Shigella boydii
ttgctggcagataaattactgccgctgttgcaagacgatgacattatctggatccacgattatcacctgttgccctttgcgcatgaattacgcaaacgtggggtgaataatcgcattggtttctttctgcatattcctttcccgacaccggaaatcttcaacgcgctgccgacatatgacaccttgcttgaacagctttgtgattatgatttgctgggtttccagacagaaaacgatcgtctggcgttcctggattgtctttctaacctgacccgcgtcacgacacgtagcgcaaaaagccatacagcctggggcaaagcatttcgaacagaagtctacccgatcggcattgaaccgaaagaaatagccaaacaggctgccgggccactgccgccaaaactggcgcaacttaaagcggaactgaaaaacgtacaaaatatcttttctgtcgaacggctggattattccaaaggtttgccagagcgttttctcgcctatgaagcgttgctggaaaaatatccgcagcatcatggtaaaattcgttatactgaagtggcacactga

SEQ ID NO: 463981 - DNA, 210 bp, Shigella boydii; identical to SEQ ID NO: 9340

SEQ ID NO: 463982 - DNA, 780 bp, Shigella boydii
gtgtgccacttcaggcagaggggagattattctgcgctgatcagcgaatttaaaaccttctggcactcctatcaacgggaatggcagctttacatgttagccgccctgcctatcgaaaaaacagcgcaggcgtggaatgtcctcagtaaagagccacacgtcggtgtcgagtttgtcatgacgcacctgcaactcgctgggttacagggttttattcactccttttcacgctatccacaagaagctctacctgtagcacaatattttgcagctatcgaattagcgccactgattgcccgtgccttcaacaaactcaaaacgctacgcgaaaacgcccgcacctggctgttgaaatacccggaacatgccattaccggcctgctggcttcggcgctcgacaaagccggtgaagcacaggataacgcccgcgctgccttgcgtatgcttaccgaaaatggtcatcagccattactgcaagaaatcgcccggcgttataaccagccggaagtaaccgacgcggtgaacgctctgcttgcgctcgatcccttagataatcacccaacaaaaatccccactcttccggccttttatcagccatcgctctggacgcgcccggtattaaaagcaaacgcccaatcactgccagatagtgccctcctccacctcggcgaaatgctccgcttccctcaggaagaggctctgtatccgggattattgcaggtgaaagatgcctgtaccgccgactcactggtgaaccgccccgggaatcctggagactaa

SEQ ID NO: 463983 - DNA, 414 bp, Shigella boydii
gtgtgtgggggtggtgactatgccattaatgccgcgctgacagaaaaacgaattaaagcagtagtgagtattacgggtgttaatatcgggcgtctttttcgggaaggtttcagcaattacgatccgattggcgcattgaatgcaatggcgtcgcaacgaaccaaagaggctcgtggtggagaattacagatcaacgaattacttcccgccagcctggatgcagcaaaagcccatggactgaccgaacgcgatgtttatgaagcaactgactactataaaacaccacgcgggcaacaaccgggaggtgcgacaaaaatgttgttctcacatgcacagaaaacgctggcctgggatgccttcgcatttactgaagtgttactgactctgaaccgccccgggaatcctggagactaa

SEQ ID NO: 463984 - DNA, 795 bp, Shigella boydii
atgatccacgcctttattaaaaaagggtgttttcaggattcggtcagtttaatgattatttcacgaaaactcagcgaatcagaaaatgttgatgatgtttccgtaatgatgggtacgcccgccaataaagcgttattagataccacaggtttctggcatgacgattttaataacgccacgccgaacgatatttgcgtggcaattcgtagcgaagcggcggatgcggggatcgcgcaggcgattatgcagcagcttgaagaggcgctaaaacaactggcgcagggggcaggcagcagccagtccttgacgcaggtgcgtcgctgggacagtgcctgtcagaaattatccgatgccaatctggcgctgatttcagtggctggcgagtatgcggcggagctggcgaatcaggcgctggagcgcaacctcaacgtgatgatgttctccgataacgtcacgctggaagatgaaatccaacttaaaacccgcgcgcgagaaaaaggcttgctggtgatggggccggactgcggtacgtcgatgattgccggcacgccgctggcttttgctaacgtgatgccggaaggcaacattggcgtcattggcgcttccggtaccgggattcaggaactgtgttcgcagattgcgcaggcaggggagggaattactcacgcgattggtcttggcgagcgcgacctcagccgtgaagtaggcggcatcagtgcgctgacggcgctggaaatgctcagtgcagacgagaaaagcgaagtgctggcatttgtttcaaagccacctgcctag

SEQ ID NO: 463985 - DNA, 576 bp, Shigella boydii; identical to SEQ ID NO: 463966

SEQ ID NO: 463986 - DNA, 303 bp, Shigella boydii; identical to SEQ ID NO: 461506

SEQ ID NO: 463987 - DNA, 495 bp, Shigella boydii; identical to SEQ ID NO: 462705

SEQ ID NO: 463988 - DNA, 258 bp, Shigella boydii
atgctggcgttttaccgtagtcaatgcaccagccatatccagagccgggttatatctgatgatgccagactgtatggcgtaacgcattacagcagatattctttgctgcagacgactagcgatttcataaatttgttttgcttctgcagcacgaacagggataagcaggtccggggtattgagtgttgtgatatcccggttgccgataaaggggaaaacgtgtgtctcgaggcttttgagtactttatcgctgtgtga

SEQ ID NO: 463989 - DNA, 126 bp, Shigella boydii; identical to SEQ ID NO: 19667

SEQ ID NO: 463990 - DNA, 660 bp, Shigella boydii
ttgaaaaaggtctctattcctaaaacaaccgagcaagagcgcgacactatcgttgaagcttttgagcaaccaagcgtcaaaagaaaaatcaatgcaaataacgttattgaaaccatttcaatgctgattatctgtattgttgttggtggctatatcagtgcattgtttaaagatacttttctgcaactgcctacttttgtctggtgtttatttgtcggtattattatccgtaatacactgactcatgtatttaaacacgaagtgtttgagccgaccgtcgatgtattaggtagcgttgctttatcgcttttcttggcaatggcgttaatgtcattaaaatttggtcaattggcaagcatggcagggccagtattaattatcattgctgtacaaactgttgtcatggtgctatttgcctgctttgtcaccttcaaaatgatgggcaaagattatgatgctgtcgtgatcagcgcgggtcactgtggctttggtatgggagcaacaccaacagcaattgcgaatatgcaaacagtcacaaaagcatttggaccatcacataaagctttccttgtcgttcctatggtcggtgcctttattgttgatatttcaaacagtatcttaattaaaatatttattgaaattggtacatactttacctaa

SEQ ID NO: 463991 - DNA, 225 bp, Shigella boydii; identical to SEQ ID NO: 462726

SEQ ID NO: 463992 - DNA, 480 bp, Shigella boydii; identical to SEQ ID NO: 463183

SEQ ID NO: 463993 - DNA, 393 bp, Shigella boydii
atgactagtctaaaaactagtattaagactatcacttatttaagtgatactggttgtctggagattcagggggccagtctacttcataaaaaacatgtcagtgaaaaagaaacctggcgttgggttgaaggatataataaagcaacagaactggctcgccaatgccctgatacccatgtattgtcaatttctgatcgtgaaggcgatttttatgacctgtttgaacgcgcagagcagactcccggaataaaagctgactggcttgtcagaatgaaatttaataacagagcaacgctgaatattaatggtaaacgggatcataggttgttgcacgaaagaatcatggagattacaccgcagcaactggttgaattcactatacctgatgggtga

SEQ ID NO: 463994 - DNA, 267 bp, Shigella boydii; identical to SEQ ID NO: 462029

SEQ ID NO: 463995 - DNA, 615 bp, Shigella boydii; identical to SEQ ID NO: 462719

SEQ ID NO: 463996 - DNA, 324 bp, Shigella boydii
atgaatgttaattacctgaatgattcagatctggattttcttcagcattgtagtgaggaacagttggcaaatttcgcccgattgctcacccataatgaaaaaggcaaaactcgcctctccagcgtactgatgcgcaacgaactgtttaaatcgatggaagggcatcccgagcaacatcgccgcaactggcagctgattgctggagaattacagcattttggtggcgatagtatcgccaacaaactgcgcggacacggtaaattgtatcgggccattttgctcgatgtttcaaaacgattgaagctgaaagccgacaaagagtga

SEQ ID NO: 463997 - DNA, 303 bp, Shigella boydii
atgaaaaaaagaaattttagcacagagtttaaacgcgaatccgctcaactggttgttgaccagaaatacacggtggcagatgccgccaaagctatggatgttggcctttccacaatgacaagatgggtcaaacaactgcgtgatgagcgtcagggcaaaacaccaaaagcctctccgataacaccagaacaaatcgaaatacgtaagctgaggaaaaagctacaacgcattgaaatggagaatgaaatattaaaaaaggctaccgcgctcttgatgtcagactccctgaacagttctcgataa

SEQ ID NO: 463998 - DNA, 378 bp, Shigella boydii; identical to SEQ ID NO: 462742

SEQ ID NO: 463999 - DNA, 267 bp, Shigella boydii
atgttgggacttgaaccgaagaacacggcggtgcggagtccggagagtaacggaatagcagagagcttcgtgaaaacgataaagcgtgactacatcagtatcatgcccaaaccagacgggttaacggcagcaaagaaccttgcagaggcgttcgagcattataacgaatggcatccgcatagtgcgctgggttatcgctcgctacgggaatatctgcggcagcgggcttgtaatgggttaagtgataacagatgtctggaaatatag

SEQ ID NO: 464000 - DNA, 342 bp, Shigella boydii; identical to SEQ ID NO: 462701

SEQ ID NO: 464001 - DNA, 303 bp, Shigella boydii; identical to SEQ ID NO: 458125

SEQ ID NO: 464002 - DNA, 351 bp, Shigella boydii
gtgccacttcaccgtcgaccgtccggcacggtccatcacagtgataaaggttctcagtatgtatcgctggcctacacacagcggcttaaggaagccggattactggcatcaacaggaagtacaggcgactcgtatgacaacgcgatggcggagagcatcaatggtctttacaaagcggaggtaatacaccgtaagagctggaaaaaccgtgcagaagtggaactggccacactcacgtgggtggactggtataacaatcgacgattgctggaaaggctgggccatactcctccggcagaagcagaaaaagcttattatgcttccatcggaaacgatgatctggcagcctga

SEQ ID NO: 464003 - DNA, 228 bp, Shigella boydii; identical to SEQ ID NO: 462718

SEQ ID NO: 464004 - DNA, 219 bp, Shigella boydii
atgtcactcttccgcagaggtgaaatatggtacgccagtttcacattgccgaacggtaaaagatttaaacagtctcttggaacaaaggacaaaaggcaggcgacagaactccatgacaagctaaaggctgaagcatggcgggtcagcaaacttggtgaaattcctgatataacgttcgaggaagcgtgtgtcaggtggcttgaagagaaagcacattga

SEQ ID NO: 464005 - DNA, 495 bp, Shigella boydii
atgcttctatcggaaacgatgatctggcagcctgagttcacagataaaacattctccaggaaacttggggcggttcaaagtgaggaagagattaagcgagcactgacagcattatcacagatggctggtaagggtcagattatggctgaagagcttaaggggcaactagctgaagctgttcctggtatggttcaggtattcgctaaagcaaccggaaagagtgaacaggaattatttgatgccatgaagaagggggctttaaaatctgccgatactcttcagaaggtcactcaggaactgaataaacaaatcacagctaaaggtggctggaaagctatttcagaaagcacacaagcacaactggggaacctgaaaaactcttggaataccacgcttgatagtatcttcagaggttctgaaaatggtctgcaagattttacacgaagcctaacaacgcttttaaacagtttaggtggaagtggtaagagtctttga

SEQ ID NO: 464006 - DNA, 447 bp, Shigella boydii; identical to SEQ ID NO: 462775

SEQ ID NO: 464007 - DNA, 213 bp, Shigella boydii
atgcggaatggtgatgagaatgctgatgacattgcagggcgcttcaccgggacgtataccggagctgatgcgcgatcttgcaagtatgggacaacttgtgaaattaccgacgagaaggggaagggccttcccgagagtggtaaaggagaggccctggaaataccccacagccccgaaaaagagccagtcagttgcttaactgactggcattaa

SEQ ID NO: 464008 - DNA, 555 bp, Shigella boydii; identical to SEQ ID NO: 462745

SEQ ID NO: 464009 - DNA, 225 bp, Shigella boydii; identical to SEQ ID NO: 462228

SEQ ID NO: 464010 - DNA, 330 bp, Shigella boydii; identical to SEQ ID NO: 461591

SEQ ID NO: 464011 - DNA, 321 bp, Shigella boydii; identical to SEQ ID NO: 462743

SEQ ID NO: 464012 - DNA, 342 bp, Shigella boydii; identical to SEQ ID NO: 462701

SEQ ID NO: 464013 - DNA, 351 bp, Shigella boydii; identical to SEQ ID NO: 462764

SEQ ID NO: 464014 - DNA, 210 bp, Shigella boydii; identical to SEQ ID NO: 463498

SEQ ID NO: 464015 - DNA, 447 bp, Shigella boydii
gtggcgttcattattgatgtgtttgccggatacatcgtggggtggcgggtctcatcgtccatggaaacgacattcgtgctggatgctctggagcaggcgttatgggcccgtcgaccgtccggcacggtccatcacagtgataaaggttctcagtatgtatcgctggcctacacacagcggcttaaggaagccggattactggcatcaacaggaagtacaggcgactcgtatgacaacgcgatggcggagagcatcaatggtctttacaaagcggaggtaatacaccgtaagagctggaaaaaccgtgcagaagtggaactggccacactcacgtgggtggactggtataataatcgacgattgctggaaaggctgggccatactcctccggcagaagcagaaaaagcttattatgcttccatcggaaacgatgatctggcagcctga

SEQ ID NO: 464016 - DNA, 210 bp, Shigella boydii; identical to SEQ ID NO: 9340

SEQ ID NO: 464017 - DNA, 216 bp, Shigella boydii
atggtcacagttaactttcattgcccccgttgccagtccgttcaggtttaccgtcacgggcagaacccaaaaggacatgatcgattccgttgccgtgactgtcaccgggtgtttcagctcacttactgttacgaggcccgtaaaccgggagttaaaaaccaaatcactgaaatggcttcaacggtgccggagttcgcgatactgcccgtacgctga

SEQ ID NO: 464018 - DNA, 309 bp, Shigella boydii
ttgaatgcctatgggctgagtcgattcgcgccgctgggttatgacccgcgcgatttacccatccgtgatttagccgggtacaggaagaaggggaaccacgacggcgacccgataattttctacaccttcccggcagcgtttgagcaggagattgcaaagggcttcaataccaaacagtttgccgaagttctaaagaatgcaggaatgcttacaccaccaacgagcgggcgaggctatcaggggcgagtaagggaggatgggcgacagattcgcgtctatgtactcaatttcatggcagaggaaaggtaa

SEQ ID NO: 464019 - DNA, 351 bp, Shigella boydii; identical to SEQ ID NO: 462764

SEQ ID NO: 464020 - DNA, 351 bp, Shigella boydii; identical to SEQ ID NO: 462764

SEQ ID NO: 464021 - DNA, 276 bp, Shigella boydii
atggttctggaaagtcagggcgaatatgactcacagtgggcggcaatttgttccattgccccaaagattggctgtacaccggagactctgcgtgtctgggtacgccagcatgagcgggataccggaggcggtgatggcgggctcaccaccgctgaacgtcagcgtctgaaagagctggagcgtgaaaatcgtgaactgcgccgcagtaacgatatccttcgccaggcttccgcttattttgcgaaggcggagttcgaccgcctctggaaaaaatga

SEQ ID NO: 464022 - DNA, 198 bp, Shigella boydii
atgttttttaacaccaaacatacaacagctttatgcttcgtaacctgtatggcttttagttcatcgtctattgcggacattgtcatttcgggtactcgcgtaatatataaaagcgatcaaaaaagtgtcaacgtacgtctggaaaataatgaaccgccccgggaatcctggagactaaactccctgagaaagaggtaa

SEQ ID NO: 464023 - DNA, 396 bp, Shigella boydii
atggctggtcagttccatctggcagaccattttgacctgcgggtagagcgccgggttcccggcatgtgtctggcgggggaaggctgcatcgttctctggtgtatccggtgtgcgccagaacacaccatcgatagccagcagggtcaggccgcaccagtgcggatgcggcgtggcgttatgccagagctgcgctgttttcgtgaacacgcggcggacagcctcacttcccaggcgctggcgggcctgaataacggcactgggggcaacgaaggggcgattgcccggcagcatgatgtccaggcgattcacaatctggtgaagaggttctttacgctcaagcgccatgccaacaatacaccagaccatcatttcgaggggaagacggcgcttgcgtag

SEQ ID NO: 464024 - DNA, 267 bp, Shigella boydii; identical to SEQ ID NO: 462029

SEQ ID NO: 464025 - DNA, 327 bp, Shigella boydii
atgactaaaaatactcgtttttcccccgaagtccgtcaacgggcagtccgtatggttctggaaagtcagggcgaatatgactcacaatgggcgacaatttgttccattgctccaaagattggctgtacgccggagactctgcgtgtctgggtacgccagcatgagcgggataccggaggcggtgatggcgggctcaccaccgctgaacgtcagcgtctgaaagagctggaacgtgaaaatcgtgaactgcgccgcagtaacgatatccttcgccaggcttccgcttattttgcgaaggcggagttcgaccgcctctggaaaaagtga

SEQ ID NO: 464026 - DNA, 327 bp, Shigella boydii; identical to SEQ ID NO: 35713

SEQ ID NO: 464027 - DNA, 351 bp, Shigella boydii; identical to SEQ ID NO: 462764

SEQ ID NO: 464028 - DNA, 267 bp, Shigella boydii; identical to SEQ ID NO: 463503

SEQ ID NO: 464029 - DNA, 276 bp, Shigella boydii
atggttctggaaagtcagggcgaatatgactcacagtgggcggcaatttgttccattgccccaaagattggctgtacaccggagactctgcgtgtctgggtacgccagcatgagcgggataccgggggcggtgatggagggctcaccaccgctgaacgtcagcgtctgaaagagctggagcgtgaaaatcgtgaactgcgccgcagtaacgatatccttcgccaggcttccgcttattttgcgaaggcggagttcgaccgcctctggaaaaaatga

SEQ ID NO: 464030 - DNA, 276 bp, Shigella boydii
atgtgtcaggtatttggtgtatccaggagcggttattacaactgggtacagcatgaaccctcagacagaaaacaaagtgatgagcggctaaaactggagattaaggtggcacatatccgcactcgcgaaacatatggaacccggcggctccagacggagctggcagagaatggcatcatcgttggtcgtgaccgactggcacgtcttcgtaaggagctaaggctacgcgaaccgccccgggaatcctggagactaaacttcctgagaaagaggtaa

SEQ ID NO: 464031 - DNA, 168 bp, Shigella boydii; identical to SEQ ID NO: 462763

SEQ ID NO: 464032 - DNA, 801 bp, Shigella boydii
atggcgagtaagcaactctggcgctggcatggcataaccggcgacggcaatgcgcaagatgggatgctatgggcagagagccgtgctttgctgctcatggcactacagcaacagatggttaccccacttagcctgaagcgaatcgccatcaattctgcgcagtggcgaggagataaaagcgcggaagtcattcatcaactggcgacgctactcaaagccgggttaacgctttctgaagggctggcactgctggcggaacagcatcccagtaagcaatggcaagcgttgctgcaatcgctggcgcacgatctcgaacagggcattgctttttccaatgccttattaccctggtcagaggtatttccgccactctatcgggcgatgatccgcacgggtgaactgaccggtaagctggatgaatgctgctttgaactggcgcgtcagcaaaaagcccagcgtcagttgaccgacaaagtgaaatcagcgttacgttatcccatcatcattttagcgatggcaatcatggtggttgtggcaatgctgcattttgttctgccggagtttgccgctatctataagaccttcaacaccccactaccggcactaacgcaggggatcatgacgctggcagactttagtggcgaatggagctggctgctggtgttgttcggctttctgctggcgatagccaataagttgctgatgcgccgaccgacctggcttatagtgcggcagaaattgctgttacgcatcccgattatgggttcactgatgcggggatctttacgattctggcgctga

SEQ ID NO: 464033 - DNA, 306 bp, Shigella boydii
atgcaggaaaacgatctgcatgaaaaacagattattcttcttaccgggaatgatagcgagcgagaagcgcagattgagcagcagttacgcgaactaacgttactgccgctcaacattaaacatatgtcggtaaaggcatttttgcagacaggcgctccgcgcggcgcggcgcggcgcggcgcggcactgattattgcgccttataccatgccgttaccgctcttttcaccaccgctgatctatacggacctgacactgacaacacatcaacaggagcagatccgcaaaatgctcgaatcagcatga

SEQ ID NO: 464034 - DNA, 1767 bp, Shigella boydii
atgaaaaagttacgcgtagccgcctgcatgctaatgctggcgctggcagggtgcgacaacaacgataacgcgccaacagcggtgaaaaaagatgcgccttctgaagttactaaagcggcctcttcagaaaacgcgagttcagcaaaactctccgtaccggagagacaaaaactggcccaacagagtgccggtaaggtgctgacattgctggatctctctgaagtccaacttgatggtgcagccacgctggtgctgacgttctccatccctctcgacccggatcaggatttctcacgcgttattcatgtcgtcgataaaaaaagcggcaaagtggatggtgtctgggagctgtcagataatcttaaagagctacgtttacgccacctcgaaccgaaacgtgatttgatcgttactattggcaaggaggtcaaagcactcaacaacgcaaccttcagtaaagattacgaaaaaactataactacccgcgacatccaacccagcgtcggttttgccagccgtggttcgctgctgcctggcaaagtcgttgaagggctgccggtaatggcgctcaacgttaataatgtcgatgttaacttcttccgcgttaagccagaatctctgccagcattcattagccaatgggaataccgcaattcgctggcgaactggcagtcagacaaactgctgcagatggcggatctggtctacaccggacggtttgatctcaatcctgcgcgtaacacccgtgaaaaattattgctgccgctgggcgatatcaaaccgcttcagcaggcgggcgtgtatctggctgtgatgaatcaggctggacgttacgattacagtaatcccgcgacgctgtttacgttaagtgatatcggcgtttcagctcaccgttatcacaatcgtctggatatctttacccaaagtctggaaaacggcgcggcccagcaaggaattgaagtctctttattaaatgagaaagggcagactctgactcaggcaaccagtgacgctcaggggcatgtgcagctggaaaatgataaaaatgcggcattactgctggcacgtaaagacggtcagacaacgctactcgatttaaaacttccggcgctggacttagcagaatttaacattgctggcgcgccaggctatagcaaacagtttttcatgtttggcccacgcgatctttatcgcccaggtgaaacggtaatcctcaatggtttactgcgcgatgcagacggtaaagcattgcccgatcaacccatcaagttagacgtgattaaacctgacgggcaggtactcaggagcgtcgttagtcagccggagaatggcctctaccactttacctggccactcgatagcaatgcggcaaccggtatgtggcatattcgcgccaacacgggcgataaccagtaccggatgtgggatttccacgtcgaagattttatgccagagcgtatggcgctgaatctgaccggtgagaaaaccccgcttacgccgaatgatgaagtgaaattctccgtggtgggatactacctgtacggtgcgcctgctaatggtaatactttgcaagggcaacttttcctgcgcccactgcgtgaggctgtgtcagccttacctggttttgaattcggcgatatagctgccgaaaacctttcccgcacgctggatgaagttcagttgacgctggatgataaagggcgcggcgaagtttctacagaaagccagtggaaggaaacacattccccattgcaggttattttctag

SEQ ID NO: 464035 - DNA, 1251 bp, Shigella boydii
gtgcttaccgatacaaaattaaagaacctcaagccacaggacaaactgtacaaagtttccgatcgtgacgggctgtatgtagctgtgcttacgtcaggtacggtctcgtttcgctatgactaccgtatcaacggtcgccgcgaaacactggtaatcgggcagtatgggcgtgacggtatcagcctggcagaagcgcgagaagaactgattgctgcaaagaagctgcttaaagcaggccagtcaccggctgcggctaaacgtgacggtatcaaaaagattcgtggtgccgagacgtttgcggtacataccgacagttatatgaaacacgtcatcctggctgaaagtacccgcgcaatgaagcaggcagtgatcgaccgtgacatacttccggttcttggcaacaaaatgatggctgaaattaccacatcgatggttcgtgatttgtgtgaccggattgtcgaacgcggtggccgggcaacagcagtacaggccagggagatcatcagcagcgtataccgtcacgccaatgaccgtggtcatggtttgtttaatcctgcggctgacattaaaccttcgtctatcgccatatttaaaccacgagagcgaacactgacaccagaagaaattggcctgttcttccgtacgctggatgccattggtgctatgggcactatgaaaatggctttaaagctggtgcttatcactatggttcgtaaaggcgaattcaccaatgcaacgtgggatgaaatagattttaaaaaatggacatggacaattccttcagaccgcatgaagggaagccgggcgcacgttatttacctgcctaaacaggcacaggatatattggtcgggttgcagatgtgcgctggtggaagtgaatatctggttcctggtcgttacaatttccggaagccattatctaatgccgcgctgaactctctgatcgacagaacggtgaaaataataaatgaagatggtgagcatattcaggacttcaccgtacacgatatgcgccgtacagccagtacgttgttgcatgaggctggttatccttcagactggattgaaaaggctctggcacatgagcagaaaggtgtgcgcgccgtatataacaaagcggaatacgccagacagcgcgcctacatgttgcagcagtgggccgatatgattgattcctggattaacggggagcatacggacctgattccgttctccccgtcgaagtttgagaagtggatggcgggggaataa

SEQ ID NO: 464036 - DNA, 195 bp, Shigella boydii
atgaacagggcatcaccagcagatttaaggaaatgccttgaaactgcaaacatgcttgcacacagcgggatcaggtttgttcctgttcccgctgtcactgatgctgaatttgcaacactgtcagcaatattcgcagataaaattgaatcactggcagcagaagcagagatggaagaaaatcagcagaactattaa

SEQ ID NO: 464037 - DNA, 663 bp, Shigella boydii
gtggggtggtttatgactaagaaatacacactaatctatgcagatccaccctgggtataccgggacaaagccgcagatggtaatcgcggtgccggttttaaatatccggttatgagtgtgctggatatctgccgccctcctgtgtgggatttggccgatgaaaactgtctgttggccatgtggtgggtgccaacacaaccactcgaagcactaaaagttgttgaagcctggggattccgtctgatgaccatgaagggcttcacgtggataaaatgtggtagtcgacaaccagataaactggttatgggtatgggacacatgactcgcgccaatagtgaagattgcctgtttgcggtaaagggaaaactacctacgcgcattaatgcagggatcgttcagtcatttaccgcaccgcggcttgagcattcaagaaaaccagatatcgttcgtgaaaaacttgtgcaattgttaggcgatgtttctcgcattgaactgttcgcccgccagtcgtctcatggcttcgatgtttggggtaatcagtgcgaagacccggccgtgcaactacacccaggatacgcgttggatattggcggattaacaaattcattcagcaatgctccgctgtcaccaacagacaaccaggggcgggagcgtgcagcatga

SEQ ID NO: 464038 - DNA, 252 bp, Shigella boydii
atgcgcagccattcaaaggttgttgccgttactcctgcggcgatagagatcgaaaaacgcgcgattgaaagagagaaaaaagggcagttccgcattgccgcccacctttggcttcagtgtatggatgttgcttctggtgatgttgagcgtgcaaggatcgcggttcgcagggaccaatgtatcacaaaaggtaacggccttcgccgtggcgactatagcggcataggatgttgtggggtggtttatgactaa

SEQ ID NO: 464039 - DNA, 249 bp, Shigella boydii
atgaaaggtgcattaggtaagaaggaactcctggcggtggtgccactgtcatggagcactatcgaccgtatggagcgcgcaggggaatttcctaaacgctggtatatcaccgataaacgctgcgcatggaaccgtgatgaagttgagcgttggcttgatgaacgtcaggcagcaagcccggcagagttccagggtaaaaaacctcctgttcagcaacgtgtatatcgtcctgtgagcaacgctgcatga

SEQ ID NO: 464040 - DNA, 882 bp, Shigella boydii
atgagcaatgatatcgcaatcacatcacaaccaggcgcaactgtaggcactgctgcggcaatcttcagccccgagggcatgaatcaactggtgcgtttcgcggagttgatgtcacaaagcaaagcgactgtaccgaaacatcttgaaggcaaacctgccgattgcctggcggtgaccatgcaggcggcacagtggggaatgaaccctttcgccgtggcgcagaaaacgcatgtggtaaacggaacgttaggctacgaagcacagttggtaaacgcggtcgtatcctcttccagcctgctagcgacacgcctgaattatcgctggagcggcgactggtcgaatgttaacggcaaaacagataaatcaccgaatctgacggtaactgtgtcagcagttcttaaaggagaagcagaaccccgtgagcttaccatcagtatggcgcaagccggagtgcgtaactctccattgtgggaacaggatccgcgccagcaacttgcctatctttgcacgaaacgatgggctcgcctgcacgctcctgatgtacttctcggtgtttacaccccagacgaattacaggaaacggcaccgcgcgttgagagagacattactccgcaaacgaccactgctgcgggaatgaatagtctgatcaacgctaaaccagcgaaaaagcctgatgagcaaacgcgtaaagcggatagccgtgatccagaagaaatgctgatggcctttaccagcgcagcgatgaattacagcactgtctccgaactggataaggcttacaaatacattgcacaaaaactttcagatgatgacgaactgctggcaaaagccaccgacgtttacagcgttcgtcgggaagaattaaacgaaacatctatgtaa

SEQ ID NO: 464041 - DNA, 822 bp, Shigella boydii
atgaaaccgggaatttatttcgacatcagcaacgaagactaccacgccggtaacggcgtgagtaagtcgcaactggacatggttgccaagaatccggcgcttcttaaatgggttcaggcagcaccagaagacgaagagaaaaagtctgcactagatatgggaactgcattgcactgtctgcttctggaacctggagaattcgacaaacgcttcattgtttcaccaaagttcgatcgtcgaacgaaacaaggtaaagctgacgaagaagcatttcttcgtgatgtagcggatatggggattgcggtacttgatgccgagcagtggcggaaactggagctgatgcgtgatagcgcaatggctcatccggcggcacgctggatgttggaagcacctggttactgcgaagcatcaatgtactggaacgatgaagagacaggtgagttgtgccgaattcgtccagacaaatggctgaacgagcacaacgtgatcgtcgacgtgaaaaaggttgcagatatggaccgttttgcacgccacatcgaggaattccgctaccacgtgcaggacgcaatgtaccgcgaaggcgcaatgagggttactggtcagccgcatggttttttctttcttgccgtgagcgaaagcattgattgtggtcggtatccggtacgcgtgttcgagctggatgcgcaggatgtcgatgctgggcacgctctgttccgccgggatctgaatacctatcacgaatgccgcatcaacgatgaatggggcggagtggaaattattaaacgccctgactgggcacgtaaacaggatatgtacatatga

SEQ ID NO: 464042 - DNA, 300 bp, Shigella boydii
atgaacgttaatcagcagaaaaatcttcaaaaaatcatgctggcattcgacaaggactaccgcctgtcagaacagctatatgaccgacaagttgaactgattgagaccatccggcttcatcaactggcctcaactttcgacgttgtaacaggcaaaggagttcgccaggaagtgctggaagcagctaaagacagccctgagttcgaagaactgatggatgcctaccggcgcgaggcaatggcaattatcgcgcgctgggatctggctgatcagcttgatgggcagagggacgcggcatga

SEQ ID NO: 464043 - DNA, 153 bp, Shigella boydii
atgcagtggaaaatcatcaacggttggtactgcgttactgcatgcggattcatgagctggaagttccgcaccttacaggaaggtattaagtgggctttcgtcagcaaagaagctcgcgatgtggccaacgataacgagatatgggagggctga

SEQ ID NO: 464044 - DNA, 585 bp, Shigella boydii
atgaaaagtatccaggacgtccgcaggcaaaatctcaacgacttgatcgaccgtgaattcaatggtgttcagacgcggatggcagaaaaacttggaactcaggcaaatctggtaaaccgctgggctcttggcaagaaggttatcggcgaccaggttgcgcgaaaaattgaagctgccgccaataaaccccgtaactggcttgatatcgatcgctcgctttctcaggaaggttttcagcctgtcggaccaagcgacattggtcaactggcggctcacaacctggaacgctggatgagcgaaagccgcgacctttcaacacagggaaaacttcaccgcgcatccggcgtcgcccaggtgacaatcagccgcctgttaaacaatgaggtcagcgtttccatttccaccctggagaatgttgcatccgcattcgggcgtcacggctatgaattactgattcacccgcaagaccctgcgaccatcaactatgaccgctcgcgctacgcattgttacccgaaaccgagaaagcaaagatcgaaagttacattgaatttgtcatcaaccagaacgaaaaaaacaaacaataa

SEQ ID NO: 464045 - DNA, 231 bp, Shigella boydii
atgagcgataacggacatttcgatttcaaaaagcactggcttgcacttactccggatgagcgtgaagccttcgcacaggaagccggaacgacgagtcactatatccagactcacttaacaggtaagcgcaaaatgccaggtaaggtattgatggatgggctttttaaagcctgtaaatcaagacaatggctgcgctcaaaagcagaactggcatacttcttctactcatga

SEQ ID NO: 464046 - DNA, 201 bp, Shigella boydii
atggaaatcattacacgtattgatgccgcaaagcgcggacttaaacgctactacaccggaaaaccatgtaagcacggacatgacagtgaacgctgggtttacaacggacactgtgttgagtgcaccatggaatcaaaccgtcgcatcagggcagagattaagcagatcatgattaattcctccccacaacactcaagctga

SEQ ID NO: 464047 - DNA, 816 bp, Shigella boydii
atgagcagacatgcaacagattgggcctgggagacagatccaggtagctcatcattaaagctcatactgctctcgatggctgacagagccgatgaatataacctctgctaccccagcatagaacgcctcgttaaagacacttgcctgaataaaaaaaccgtgcaggccgggcttatatcgctcatgaaaatggggcttatttcagataccggagatagaaagggagcgacaaaaagagtgcgggttttctctcttaatataaccaaaaacgggaacattaaaggcaaccgggaggggggcaatgaacccgaaaacggtaatgttcccgaaaacgggaatatacccaaaaacgggatgttgaatgatcccaaaaacgggatgttgaatgatcccaaaaacgggatccagaaccagtcatataaccagtcatttaaccaagagagggagagcaggacaaaaaccggggattctatgcctcatgaccccggcgcaaacaacgccgtgatgaataactttgttcctcctggtgggccagggcaattaggcaaatttgtcatgcatgaacaatggcaaccatcagatgactttcttcggaaaagctcattgcaggggatctacctggacagtctgccaacggcacaggaacttgcagagttcagaatttactggatggctgagggtaaggcataccatcaggcacagtgggagcagaagctggcaaggcggctgcagattagcagacagaagcaatcaacattacctgataacaacgttccgcactggaacagccctgaagcatgggaggatttcttgtga

SEQ ID NO: 464048 - DNA, 786 bp, Shigella boydii
gtgaacaacgtttttaccgcgatacaaaaccgtgacggagaagccctttctcgcatgtcaggttatgagcatcagtacgtcaacaatgacaatgtggtgaacatgtcagcagagaggcttgttgatgcccttttcaaacagctgaaacagctgtttccggcggcagtggtaaccaacctgaagacgccagagcaggaagttgctgcaaaacagcagtggattgctgcgtttgccgaaggtgggatccgaacccgtgaacaggtttctgctggtatgcgccacgcccgcgccagtgaatctccgttctggccgtcgccagggcaatttatcaagtggtgcaaagacagcaagatggttcttggcgtcaccattgacgatgtgatgacggagtttcaccggtacagcaaggaaaaaagtttatatcctggtggtcccgaaagattcccgtggcggcatccggttatgtactgggtcgtatgtgatacccgccgtgcaatgtatcagcgccagcttagcgagattgaggttgagaaacacgcgcgcaggctgctcgatgattgggcgaaaaaggtggcttccggacagcagatacccgatccggtgatcagcatacaggcaaagccagaacccatgagtacgcctccggacacagggagagacgtttaccatccaccagggcgaagtttcgggtgtatgcctaacgccgccacccttggtggaataacaccggcgcagtggctgatggaggaatacaggcgaggaaaggcggcaggatttatcaagtaa

SEQ ID NO: 464049 - DNA, 345 bp, Shigella boydii
atgagaaaacagatacaggctcttggtcgactcaaaacaggacagatgaacaaaacagaatctgcgtattgccagcaccttgagcagcgtaaacgtgcaggggaaatcgcctggtatcgattcgagggtatcaagctgcggttagctgataacacgttctatacgcccgattttgctgtgatgctcgccaccggcgagatggaactgcacgaagtgaaaggtttctggaccgacgacgccatggtgaaaaccaaagtcgccgcagatcaatatccgttccgaatcatcggggtaacggttaaaccaaagaaagcaggtggtggctggaacatcgaagagttctga

SEQ ID NO: 464050 - DNA, 534 bp, Shigella boydii
atggaaagtaatatcaaagggttaatttccgccgggcatgagatggcttcggaactgaaagcagaatttggtgccgttgatatgcgcagtgtggcaaagctgatcagcgatttggcaacgcaactggaagtgcaactggtgcgtgctaatgcgctggccgaagaccagcagaaagcgatttggtcaattaagcaggctgattcggctgttaagttggcacacgagaagttttcggtgctggctgcggagaatgcgagactgaagacagcacatcctcaaccattcggacctgaaatgatgaaggctcttgatgcgtatgagaagtatcaggatgaagtgccggaggctggaatgcttgatgcatttttcatcttgcgcgacagcatccgtgttgaaaccccagccaccgatgctttcctagctgaagtgcgggcgcagggggtggagatgtttgcggagtgtgcatacacacttgaacatcatgatcacgcagtagcttttgccgccgagctacgtaaaggaggcaaccagtga

SEQ ID NO: 464051 - DNA, 300 bp, Shigella boydii
gtgactgtatgtcttattgataaacgtcgacgtgggcaacaaataccatctgttgaaatgccgaatcacacatggttttgcgtacttgatatcgatggtatggattcgttggttgacactcgtcattactgcgataccgcaacagctactccggcgaaagcaaagaaaatggctgctctgatagaaaactggactccacctgatggttggtgcaatgggaatgatcgagattggcatgaaaaaatgaagggctatatctgcgatttcttacgtaaatgcaacggcttcagggtgatgtga

SEQ ID NO: 464052 - DNA, 603 bp, Shigella boydii
gtgattgcggaatgtcatgttaactgcctggttgaaacagatgttcaggcttatgcaaacgctgaatttattgctgcttttaatccaaatgttgcgctggcactgctggatgaacgggaaagaaaccagcaatacatcaaaagccgtgaccaggagaacgaggaaattgcgctaacggtagggaggcttcgcgttgagctggaaggcaaagacagcaaaatagccaatcttaccgccgaacgcgatgctcttcgtgaaggtgagatgggcgacgctaggcatagcaacacacgggccgcagctgatatctacttccaactggtcgaggagtgcgaaattcctgctggcggatctctggtcgagtacgttgacgatatgcgcgagaagctggaagccgcagagaagcgcattgcagagttagaaagtggttctcaggcacaaaagttagttgaagcaatcattgttgcgatagaaaacgaacaggaaaggctttttgatgaagattacctaatggattcgaaagaatgcattgacgtaattcgtgaagaagtaaagcgatggaatgattcccgtgccgctggcattcgcatcaaaggagagtga

SEQ ID NO: 464053 - DNA, 639 bp, Shigella boydii
atgagcgctataaccaaagaacgtatcaaattattcattaaaaatccgcttgataacggacttactcgtggcgaacaaatggaagtggcacgaattgcactggcatcgctggaacgcgaacagattcgccacgagcatgccaaatggtctgactccacatttggctgcgttggccccattggcccactgaaacacctctcaaaagaggcactggaagccgcagccgaaccagacgatctcagcgagtgggctgatatgcagttcctgttgtgggatgcacagcgccgtgctggtatcagtgatgctgaaattaccgctgctatggaaaataaattgaagatcaacatggaacgccagtggcctgaaccaaaagatggtgagcctcgcttgcacattaaagaacccggcaactctccggtaactccggatggctggataagctgtagtgagcgaatgccggataccaaaacagccgttcttgttgccgtggagtttgacaggaaaggtgactggcgaatgaaatgggcgacttacatcccgggtcatcctgacgctaatgatgggtggataattcctggtgcgtcgtggaaaccgtcacactggatgccgctaccagagccgccgcaggaggcgaaatga

SEQ ID NO: 464054 - DNA, 354 bp, Shigella boydii
atgatggactattcacagttaagtgattttgaaattaacagaatggtaggagacataatttttaaaggcctttgggcgtgtaaaccgggaacatcagggaataacaccaacaaatggtattacggaaatactgatacaacttttgagccattaaaccctttacctgactactgcaataatccatcggatgcatggcctattattgttgataataaaatcagtctaacctgccaccaatctcgcggtgagtggtcagcagtttttaatgccgacaacatttgctttcatgcgaataatccactccgagccgccatgattgtatttctcatgatgcaggaaaatcagaatggctaa

SEQ ID NO: 464055 - DNA, 339 bp, Shigella boydii
atggctaaatcagcagcagagcgcaaagccgctcagagagccagacaagttgcatctggcgtgcgtaagctggaaattgtgcttgatgctcaggaaattgaaatgctggagcgtaactgtgccacgcgtcgccccgggcgtgctccttacgactttggtgagtatatagcgttactgatccgccaggatgatgcacgcgtgcgcgggcgtataaaatcgatcagcagaaaacgttgcggtaagtgcggcgagagagttccagttaattcatgcccgtgtaatggtgactcgcaatgctgggtgactaaaggctggcatgaaacgaaattaatagtgtga

SEQ ID NO: 464056 - DNA, 594 bp, Shigella boydii
atgcctgctgaacctaaaacctataaacgcaaatcaacgcaatttaagccgctcacagcaatgcaggaggcttattgccagtcatacatcaaaacgcctgaaaaccagactcaggcagcgattaacgcaggattctccccaaatacagcggcagttaaagccagtgtcatgatgcgcgatgaacgcattcaaaaacggattgccgagttgatggaggagcgcaacaaacgaatgcgcgtcagtgctgattacgttctcatgcacctggtggagatcgaccagatggacgtgattgatatcctcaacgacgatgggagtcttaagccaatccgcgagtggccgaaaatatggcgcactacgcttagcggctttgatctgtcatcgaccatcatgaacatgaacgaggactcgatagagacaatcctcaaaaaaattaaatggcctgacaaggtgaagaacctagaactgattggtaagcacgtcgacgtcaacgcattcaaagaacgcctggatgttaatgtgaatgtgacaattgctgatcgcatagcagcagccaggaagcgactcaaagaacgtcaggatggtaatcagtga

SEQ ID NO: 464057 - DNA, 1470 bp, Shigella boydii
gtgacagatacagcgttatctcctgaagagcagttaatcgaggatattgcagggttcactcacgatccgcttggctatgccctctatgcgttcccgtggggagaagaggggactgaactggcacatgctaccggcccacgtcagtggcaggctgatgcgttccgagagatacgtgatcacctgcagaatccagagacgcgctatcagccgcttatgttggcacgcgcttctggtcacggtattggtaaatccgcattcatctcaatgctgatcaactggggcatgtccacttgcgaggattgtaaggtcgtggtgaccgccaacaccgacaaccagctacgaacgaagacctggccggaaattatcaagtggtcgaaccttgctatcacgaaagactggtttacctgtaccgctaccgcgatgtacagcaatgatcctggacacgacaagcggtggcgagctgacgcaatcccctggtctgagcacaacactgaggcattcgccggactacacaacgagcgcaaacgcatcatcgtggtattcgatgaagcgtcgaacattgcggatctggtgtgggaagttgctgagggtgcgcttacggacgaagacactgagattatctgggtggcgttcggaaatccgacacgtaacaccgggcgtttccgcgaatgtttccgcaaatataaacaccgctggaaaactgcacagattgacagccggacggtggaaggtactaacaagcagcaattacagaaatgggttgatgactacggggaagacagcgacttcgttaaaatccgtgtgcgcggcatatttcctgatgcatctgaattgcagtttatccctaccggtcttactgacgaggcaatgaaacgggtggtaactgctgcgcaggtggcacatgctccggtgataatcggcgttgacccggcatactccggcgttgatgacgctgtgatatacctgcggcaggggctgcacagtaaggtgctgtggactggcaacaagaccactgacgatctgattatggcgaagcgtatcgctgactttgaagaccagtaccaggctgacgcagtgttcatcgacttcggttacggaactggtctgaagtcaatcggtgatggctggggacgtacatggcaacttgttccgttcagcggtgcgtccactgacccgcagatgcttaacaagcgtggggagatgttcaactcatgcaaggcatggctgaggctgggcggcatgctggatgaccaggaaacagcggacgacctgtcgacggcagagtacaaagttcgcgtggacggtaaaatcgttatcgaaccgaaggaagatatcaaagagcgacttgggcgttcgccgggtaaaggcgatgcgctactgctgacgtttgcgttcccggtagccaagaaaactaatgacccacggcagcagcagggcagggctataacagactatgacccatttgaatga

SEQ ID NO: 464058 - DNA, 849 bp, Shigella boydii
atgaaaaactttaaggtaattagtatgttcgaatcgttcaaagagctgtttttatctactgccaatactgccgtgcatcgagctaaaaaccctgtgcttggtgcttttgttatttcctggtgcgccttcaactggaaatcacttctttatctattttttagcaaatcaaatataatagataaaatttcatacatctcagataacagcacatggaaaactgttatgttttatccatgcttatctgtaattactatctgctgcctattaccatgggtaaacaatatcattaacgtatggcaagcaaagcctcttgataataatgactcaatcgaaaatcaccggaaggcaagaaaaatacaacgtgaaacacggctacagagattgctggctaaaaaagacattacttacgaaaaagtaaaaacaggcgctgaaaaaaacattcaagacatgaaagaggaaataattctttcaaaagacagaatgggacaactcacatctgaattgaaagagagggagacagaactgcgcgcagcacaagctcgtattttagaattatctaaggttattgatgaaacaacatctaaactagaaaatctagaaaaagctcacaaaaatttaaaaaacgaatatgagtcctataaggaaaacattcctttggcaacaaataatacaattgctaatgggtttgtaggtctaaaatcattacaagaccttaatgagtccgtaaagaaatttggcgttactggaattaacaatccagaaatcagtacattattgaataatcctctagtaaatataaatggtggtttaaattccacctatcaaagaaaatcaaaaacacaaaagtaa

SEQ ID NO: 464059 - DNA, 207 bp, Shigella boydii
atgtgcatgggtagctcaccatcagtgcctgcaacaccagaagttcaggcagcaccacaggagcaggatgccgccgttgttgatgcccgcgacgaagaaacacgtcgccgtcgcgctgctgctggtcgtagttctacgctgcttaccggttctcagggcgacacatcaaccgctaataccagcggtaaaacgctgcttggtcagtaa

SEQ ID NO: 464060 - DNA, 1680 bp, Shigella boydii
atggcggaaacaactaaagagcgattgaacaaacagttcgcacaacttgaaagcgagcgtcaatcgttcgagccgcactggcgcgagttgagtgattacatcaacccgcgtggttcccgctttctgacttctgaggtcaaccgtaacgatcgacgcaatacacgcattattgattcgaccgggactatggcggcgcgcactctcgccagcggcatgatgtctggcatcacaagccccgcccgtccgtggtttcgcctggctacgccagatcctgaaatgatggattatggccctgttaagttgtggcttgaggcggtgcagaaccgcatgaacgatatgttcaataagtcgaatctctatcagtcactgccgcagttatacggaagcctcggcacatacagcactggtgcaatggcagtgctggaggatgacgaggacatcattcgcacaatgccattcccgataggcagttactacctggctaactcacctcgtggcagtgtggacacctgttttcgcaagttctctatgactgttcgtcagcttgttcaggagttcgggctaaataacgtcagcgaatccgtaaaaagcatgtgggaaagcggcacctacgagaagtggattgaagtgatgcattcggtttacccgaacattgaccgcgatacatcgaagctggatagcaagaacaagccattcaaatcggtttattacgaggttggtggcgataacgacaagttgttgcgtgagtccggattcgatgagtttccaattatggctccgcgctgggaagttaacggcgaagatgtttatggatcatcatgcccgggtatgctggcgcttggacctgttaaggcattgcagcttctccagaagcgcaagtcgcagttgattgataaagccaccaatccgccgatggttgctccgacttccctcaagaatcagcgtgcctcccttcttcctggcgacatcacgtatatcgatcagattactggtcaggatggtttcaggcctgcttatctggttaaccccagtacagcagatttggtggcagacattcaggacactcgtcaaatcattaacagcgcctactttgtcgatctgttcatgatgttgcagaacatcaatacccgctcgatgcctgttgaagcggtgatcgaaatgaaagaagaaaaacttctgatgttggggccggttctggaacgtctgaacgacgaatgtcttaatcctctcattgaccgcgctttctcgatgatggtgcgtaaaaacatgctgccgccaccgcctgacgcgatggaaggcatgcccctgaaggtcgaatacatttccgtcatggctcaggcgcagaagtctatcggcctgtccagtctggcgtccacggttaacttcattggtcaacttgcgcaagcgaaaccagaagctctcgacaaactcaacgttgatcaggcgatcgatgcattcgctgatatgtccggagtgtctccaaccgtcattgttcctcaggaacaggttgagcatgctcgccagcaacgggcacagcagcaacagcagcaacaaatgatggcgatggggatggcggcggcacagggtgccaagacgctaagcgaagctaaaacttcggatccgagtgttttgtcagctatggcgaatgcagttagtggtcagggtgggcaatcacaatga

SEQ ID NO: 464061 - DNA, 297 bp, Shigella boydii
atgacagattacgaagacgatcaactgaaagaagaaaacgcccgtaagcaacgtgacatggcacagcgtgaaattgatgacattcgctttgtcatgagcagtgaacaggggcgtcgcgttgtctggtcggtgctggagaaaggccgtgtgttttccgctatctcaccgatggacgctatggcaatggcatttaatgaggggcaacgcaatctggcgctggaactgtttcagcgcgttatggcgcattgccctgaacagtatttgaagatggccaaagaggccagtgaacaggagtga

SEQ ID NO: 464062 - DNA, 696 bp, Shigella boydii
atgaatttgtttgagcgtttgctgtatagccgtctttgcaatgagcaaccagtcgatggtggagcagctccggctgcgtcagaaccgtcagcgcctgcaggtgataaccctgctccagttggtgatccatcacaacaggaaggtgataagccacaacctgttgctgatggcgataaacctgctgatgacaaaaagcctgaaaacgataagcaggatgaaaaaaaggacggcgataaaccagagggtgcgcctgagaagtacgagtttcaggctgccgaaggcgtagagctggatacagaagcgttgaaggaattcgagccggtggcgcgagaacttaacctgaccaacgagcaagcgcaaaagctggttgatgcttatccgaagattctggcaggtgttcagcagcgccaggcagaagcctggcagaaaacaaccgagcagtgggctgcggatgtaaaagctgacaaagaaatcggtggcgacaagttgatttctaaccttagcgccgcacagcgtgcgcttgaccagttcgggacacctgaactcaaagaatatctgaacaccaccgggctgggtaatcaccctgatctggtcaaaacgttcgtgaaaatcggaaaggcgatgtctgaagatggcatggtcaccggtggtaatgaaggccagcgtagtgcggccgaagtgctctatggcaaataa

SEQ ID NO: 464063 - DNA, 987 bp, Shigella boydii
atggctgttaaaggcttaactgcgctaacgctggctgactggggtaagcgcgtcgatccaaacgggaaagtcgataagattatcgagcttctcggtcaaactaacccgatccttcaggatatgccttttgtcgaagggaaccttcctaccggacaccgaaccaccattcgttctggtttaccttcagctacctggcgtttgctgaactatggcgtacagccaagcaaatcaaccacagtgcaggtaaccgattccgttggcatgctggaaacctatgctgaagtcgataaatcactggctgatctgaacggcaataccgctgaattccgcctgtctgaagaccgcgcatttattgaagcgatgaatcagcagatggcgcagacgctgttttatggtgattccagcgttaaccctcagcagtttatgggactgtcctcccgctattccagcctgtctgcgggtaatgctcagaacatcattgatgctggtggcacgggtacagataacacctcaatctggttagtggtgtggggcgaaaacaccgtgcatggcatcttcccgaaagggcagaaggctggcatccagatggaagataaaggccaggtgacactggaagatgctaatggcggcaagtacgaaggctatcgcacccattacaaatgggacaacggacttgctctgcgtgactggcgttatgttgttcgcattgcaaacatcgatgtcagcaatctttcagaaccttcctctgccgcaaatattgcgaagttgatggttaaagcactgcatcgcattccaaaccgtggaatgggtcgcccggtgttctacatgaaccgcactgtaggccaggctcttgatctgcaatctctggagaaaacatctctggcgatcagcgtaaaagagacagaaggcgagtggtggacttcattccgtggtgtaccaatccgtgaaactgatgcgcttctggaaacagaagcccgtgtggtgtaa

SEQ ID NO: 464064 - DNA, 438 bp, Shigella boydii
atgatcaccgacaaactgttgatgttctccgaagcacaggcggtaactgataccgcggcttctactgacgtaatcgatctaggtccaattgatggaaatcgtcgcgatatcggcgtgggttacccgcttgagttttgggcgctggttaacgaagccgccacggcaagtggtgaggcaactgtaaacatccagttgcagacgagtgagaataacagctcatggtccactatttatgatagtggcgcactggcaaaggctaccctgacagcaggtaaacgagttgtttctgcaaaggtgcctgccggtgttcagcgatatctgcgtgttaactactccgtcgcaactggcccactaacggccggcaaattcactgcgggtattagtctggatgttgatgccaatacaccgtacccgatccgctcaaaagtaactggttaa

SEQ ID NO: 464065 - DNA, 336 bp, Shigella boydii
atgtcaggtgagaaaccaagataccgcgttctgcgcctctctcatatccataacacactgtggccggagggggcagaaatcgaatacgaaggtgagcctggtagcgcactggaacctgttaacgatgcagccagacaggcaaaagcaaaggtagcaggaaaggtgactatggcagcaaccagcaccaaaatcatcaacgatgtgtcagatgatggtgaactggataagctccgtgaagagtacgaattgctctttaacgagaagccacaccataacgccaaagccgaaacgctccgcgagaagatcgcagataagcgtaaagaactgggcgtgtaa

SEQ ID NO: 464066 - DNA, 1101 bp, Shigella boydii
atgaaaatatacattttcttaggagatttaagttcgaaaggtggtattgagcgtgtttcagtagcattagccaatggattggctaaattttatgatgtcactatcattagcttatatcgtgcaactagaaatttatcatttgtcccggatgaaaaggtcaatgtgatctatttgtacgatgaatttgaaaagagtatgtataatcgtaatctgggagctatcatagggttaaagtttgatttcttatatattataaaaaagttgaagcaacttaaaagattaaatttagaactaaataaaaatgatgtgcttatttcaagcgatattaaaatgtctctgctattatttttctatgcaaaaaaaagcaaaattatagctattgagcattttgaacatgatgttggtaatttagtgttgagaaaaattagaagcgcactatatcctaaattatcagcagttgtatcgcaaactggcgaagatcaaattaagtatttgcaatggttacctagaaagaaacataaaatcattccaaatattattagcttcgaagcgaccgatataccgcaaaataaaatagaacaaaaaaatgtacttgctgtgggacgattaactcatcaaaagggttttgatttacttctacaagcttgggcagacgcaaatactcatgattggcgcttaaagatcattggagacggagaagagctgaaccatttaaattctctaattaccgagttaaatatctctaacgctgaaattatcccttttcaaaaggatattcaaaggcattattcttctgcaggaatattcgtactttcttctcgctttgagggtttgggtatggtgcttttagaagctcttagcagcggcttggcgtgtattagttttgattgtccagctggtcctaaaagtataatctcaagtgataatggggtgttagttccaactggtgacactataaaattatcacaagctatttctttcttgataaataacgaagaagaaagaaaacggttacaaaacaaagctgctgcttctgttgaaaaattcaaagaatcaaacgtaattgcaaaatggcgagagttattgaatgaaatttcatag

SEQ ID NO: 464067 - DNA, 1161 bp, Shigella boydii
atgacgaatttcaaaaaaatagcaagaaaaataattagtaaaagcatttcattgttaaattattttatccccaagaaaaaaaatagaatttttttcaaaagcaaacctgactactcaggtaattgtaaggcactaagcgattatattatagagaaaaaacttccatatcatatcgtttggtctgttaaaaaagaaattaatcaaaaaggaattactgtagtaagagctggttcattgaaagaatttttctattactttacaagtaaatatgttattactacgcataatgaaatgataggtccaattgcaacaaatcaaaaatacataagcttgtggcatggaatgccttttaagaaaatttgttatcttggagagaatgatcatcaaggaatgatagattattcagccattaggattgccacttccgaagtaatgcgttctataatttcagcaagctttcgtgaaaaagccaataatgtatatattacaggccagcctcgtaatgattttttgttcaaaccaattagtctgacagatattggtattaaatctataaagaacaaaaaaattgtaatgtttgctccaacatttcgtatgaataatgaagatataagatattctgatggagcggaaattattgataataattttcttcgagtaaatgatttctgcatggaagagatagattattatcttgaacaaagcaatttacatttgatattaaaattgcatccatacgaggaggaatatttccgcgggatcgcaacactaagttcgaatataactattataagttctgatgaactcacgcaaaaaaatatcgatttgaatcagttgctttccttggtcgatattttaataacagattactcatcaatttatttagattacttaattctaaataaacctctaatttttttagttcctgatgtagatgcttatagttctgcacgcggtgggtttactttagaaccttttgatttttggacgccaggagataaggttagctgtcaaaggtcattattgaattcaataaataaaataatcactggaaatgatgagtatgctgaaaaacgtaaccaaataaatctcataataaataaatactctgatgctaataatagccagagagtcattgaattgatgaagagtttatcatga

SEQ ID NO: 464068 - DNA, 396 bp, Shigella boydii
atgaagagaattattacgtttggtacatttgatgtttttcatgttggtcatgttaatatccttgagcgagctgcttcacttggcgactatcttattgtaggtgtaagttcagataaattgaatttcaataaaaaaggtcgttaccccatttataatcaagaagaccgctgtcgtataataaattctcttagagttgtgaatgatgtatttattgaagaatctttagagcaaaaaaaagagtatataatccaatacgaagctgatattttagttatgggtgatgattgggctggccgatttgattgggtaaatgacatttgtgatgttatttatttaccaagaacaccatcagtatctaccacagaaattattgaagttgtgaagaccctcagatga

SEQ ID NO: 464069 - DNA, 897 bp, Shigella boydii
atgattaatttgaaagcagtcattccggtagccggactgggcatgcatatgctgccagccacaaaagccattcctaaagagatgctaccgatcgtcgacaagccgatgattcaatacatcgtcgacgagattgttgctgcagggatcaaagaaatcgttctggttacgcactcgtccaagaatgcggttgaaaaccacttcgacacctcttacgaactcgaagcgctgctggagcagcgtgttaaacgtcaactgctggcggaagtgcagtccatttgtcctcctggcgtgaccatcatgaacgtgcgtcaggcgcagccgctgggcctgggccactccatcctgtgtgctcgccctgtcgtgggcgacaacccgtttatcgtggtcctgccggatatcatcatcgataccgcttctgcggatccgctgcgctataacctggcggcgatggtggcgcgtttcaacgaaacaggccgcagccaggtgctggcgaaacgcatgaaaggcgatctgtccgagtactctattatccagactaaagaagcgctggagacagaagggcaggtgagccgcatcgttgagttcatcgaaaaaccggatcagccgcagacgctggattctgacctgatggcggttggtcgttatgtcctgaacgcggatatctgggccgagctggaaaaaaccgagccaggcgcctgggatcgtatccagttaaccgatgcgatcgccgagctggcgaaaaagcagtctgttgacgcgatgctgatgaccggtgagagctacgactgcggtaagaagctgggctacatgcaggcgtttgtgaactatgggctgcggaacctgaaggaaggggcgaagttcagaagccggattgagaagttgttagctaacgactga

SEQ ID NO: 464070 - DNA, 1392 bp, Shigella boydii
atgctgaaaaagattacccgacgcagctttgtctcttctctgtccgtcctggcggcaatgccgctactgtcgccccgcgttgcgcgggcggcaaccggcaagacggtctctgtaaatcagtacaataacaacgactggatcgccgcctttaagcaggcgtttaacgaaggcgacaccgtcgtagtgcctgcagggctcacctgcaaagacatcaacacgggcattttcattcctgacggcaaaacgctgctgattcgcggggcgttaagcggcaatggccgggggcgctttgtcctgcaggagggcagcaaagtcatcggtgagggcgaaggccgtaccgaaaatattacccttgacgttcgtggctctgactgtgtcatcaaagggctggcaatgagcggatttggcccggtaacgcaaatctacattggcggcaaaaagcccagcgtgatgcgtaatctggtcattgataacatccgcgtgagccaggccaattacgccatcctgcgtcaggggtttcataaccaggtggatggcgcccgcatcaccaacagcaaattcagccacctgcagggcgatgcgatagagtggaatgtggccatcaatgaccgcaatattctgatctccgaccatgtgatcgacaacatcaactgcaccaacgggaagattaactgggggattggtattggccttgcgggcagtacctacgacaacgactacccggaaaaacagaccgtgaagaactttgtggttgccaatatcaccggcagcaactgccgccagctggtgcacgttgagaacggtaaacactttattatccgcaatattaaagccaaaaatattacgcctgatttcagtaaaaaggcgggaatagacaatgccacggtagcaatttatggctgtgataatttcgttattgataatgtcgatatggtcaatagtgccggcatgttaatcggttacggcgtgattaaaggtgactacctgtcgattccgcagaacttcaagcttaacgatattcgtctggataatagccagcttgcctataagctgcgcggcatacaaatttcatccggtaatgcgacctcatttgtggccatcaccaacgtcgacatgcagcgcgcgacgcttgaactgcataacaaacctcagcaccttttcctacgcaatatcaatgtgatgcaggaagcagcaatcggacccgcgctgaagctgaacttcgacctgcgtaaggatgtgcggggtaagtttatggcgaaagacgagacgttgctgtcgctggcaaacatcaaagcagtgaatgagaaagggcagagctcggtggatattgaccgggtagatcagcatgtggtgaatacggaacggctcaattttgcgctgccgcacagataa

SEQ ID NO: 464071 - DNA, 1221 bp, Shigella boydii
atgaaggttggtttcttcttactgaaatttccactgtcgtctgaaacctttgtactcaatcaaatcaccgcgtttatcgatatgggatatgacgtggaaattatcgccctgcaaaagggcgatacgcaaaacacccatgcggcgtatacccagtatgggctggaggcgaaaacccgctggctgcaggatgagccatccggaaaagtgaacaagctgcgctaccgtgccagccagaccttacgcgggcttcatcgcgcgtcgacctggcgagcgctgaatatctcccgctatggcgcggagtcgcgcaatttgatcctgtcggccatctgtgggcaaacggcgcagccgtaccgcgctgatgtctttatcgcccactttggcccggcaggggtgaccgcagccaaactgcgcgagctgggggtgattgacgggaagatcgccacgatcttccacggcattgatatctccagccgtgaagtgctgaaccactacacgccggagtatcagcagctgttccagcgcggcgacatgatgctgcccatcagcgacctgtgggccggacgcctcaaaaagatgggctgcccgggcgagaaaatcaccgtctcgcggatgggtgtggatttggcgcgttttacccgccgtccggtcaaggtgccgggtaaaccgctgcagattatctccgttgcccgactgaccgagaaaaaagggctgcatgtggcgattgaagcctgccgccagctcaaggcgcgcggggtggatttccgttatcgcattctcggtatcggcccgtgggagcgtcgtctgcgtacgcttattgaacagtatgagctggaaacgcacgtggagatgccgggctttaagccgagtcacgaggtgaaggccatgctcgatgaagccgacgtgtttctgctgccgtccgttactggcgccgatggcaacatggaaggcataccggtggcgctgatggaggcgatggcggtggggattccggtggtatcgacgctgcacagcgggatcccggagctgatcaagtcagatcattccggctggctggtccccgaaaataacgccatggccctggccgatcggctggccgcgtttagcgatatcgaccagcaggcgctggagcccgtgctgcacaatgcccgacaaaaagtcgaggcagattttaaccagcaggtgatcaatcgcaagttagcgagcctgctgcaaacgttgtaa

SEQ ID NO: 464072 - DNA, 1281 bp, Shigella boydii
atgaaattattaattcttggcaaccatacctgcggcaaccgtggcgacagcgccatcctgcgcggtttattggatgcaattaacacccttaagcctgagacagaagtggacgtgatgagccgttacccggtcagctcatcctggttactgaaccgcccggtgatgggcgacccgctctacagccagatgaaacagcacaataacgctgcgggcgtgatgggacgcgtgaagaaagtgttgcgtcgccgctaccagcatcaggtgctgctttctcgcgtaaccgacaccggcaagctgcgcaacatcgccatcgcgcagggctttaccgattttgtgcgtttgctttccggctatgacgccatcattcaggtgggcggttcgttctttgtcgatctctacggcgtgccgcagtttgagcatgcgctctgtacctttatggcgaagaagccgctgtttatgattggtcacagcgtcgggccattccaggaacctcagttcaaccagctggcaaactatgtgtttggccactgcgatgccctgattttacgtgagtcagtcagcctcgacatgatgaagcgcagcgagatcgacacttcgaaagtcgagcacggggtggataccgcgtggctggtggatcaccaggatgacagcttccagccgagctacgcggtgcagcactggctggacgtggcggcgaaacagaaaaccgtcgccattactctgcgcgagctggcaccttttgataagcgtttaggtacgactcaggccgcctacgagaaggcctttgccgaggtcgttaaccgcgtgctggacagcggttatcaggtgctggcgctctctacctgtaccggtatcgatagctacaacaaggatgatcgcatggtggcgctgaacctgcgccatctggtgaacgatccgtcccggtatcacgtggtgatggacgaactgaacgatctggagatgggcaaactgctctctgcctgtgacctgaccgtgggcacccgtctgcactctgccatcatctcgatgaacttcggcacgccggccattgccatcaactatgagcacaaatctgccgggattatgcagcagctggggatgccggaaatggccgtggatatccgtcatctgctggatggctcgctcggcgcaatggtgggcgacacccttgggcaactgcccgccgtgaatgagcgcctggccgtggtggtgaaagccgagcgcgaaaagggaatggggatggtgaagtcggtgcttgaccgcgtgcgggaggggaaatga

SEQ ID NO: 464073 - DNA, 1479 bp, Shigella boydii
atgagcttacgtgaaaaaaccatcagcggcgccaagtggtcagcgatggcgactatagtcatcattggcctggggctggtgcagatgaccgtgctggcgcgcattatcgataatcatcagttcggtctgctgaccgtctcgctggtgattatcgcgctggccgacacgctgtctgacttcggtatcgccaactcgattatccagcgcaaagagattagccagctggagctgaccacgctctactggctgaacgtggggctggggatatctgtttttgtgctggtgttcctgctgagcgatgtgatcgccagcgtgctgcacaacccggatctggccccgctgatgcgcacgctgtcgtttgcctttgtggtgatcccgcacgggcagcagttccgcgcgctgatgcaaaaagagctggagttcaacaagatcggcatgattgaaaccagcgccgtgctggcgggctttaccttcacggtggtgagcgcccatttctggccgctggctatgaccgccattctggggtatctggtgaactctgccgtgcgcacgctgctgttcggctactttggtcgcaagatctaccgcccggggctgcatttctccctggcgtccgtctcctcgaacctgcgttttggcgcttggctgacggccgacagcatcatcaactatgtcaacactaacctttccacgctggtgctggcgcgcattctgggggcgagcgtcacagggggctataacctggcctacaacgttgcggtcgtcccgccgatgaagctcaacccgattatcacccgcgtgttgttcccggcgttcgccaaaattcaggacgacactgaaaagctgcgcgtcaacttctacaagctgctctccgtggtcggcattattaacttcccggtactgctgggtctgatggtggtgtcgagcaactttgtgccgctggtgtttggcgagaagtggaacagcatcatcccgatcctgcagttgctctgcgtggtggggctgctgcgctccgtgggtaacccgattggctccctgctgatggcgaaagcgcgcgtggatatcagctttaaattcaacgtatttaaaaccttcctgtttattccggcaattatcgtcggcggacacatggcgggcgccattggcgtcacgctgggctttctgctggtgcaaatcatcaacaccgtgctgagctacttcatcatgatcaagccagtgctgggctccagctaccgtcagtacatcctgagcctgtggctgccgttttatctctccttgccgaccctggtggtgagctacggtctgggcgtgctcctgaagggccatttgccgctggccgcgctgctggcagtgcaggttgccgcgggcgcactggcgtttggggtgatgattgtgctgtcacgcaatgcgctggtggtggagatgaagcgccagttttgccgtaacgaaaaaatgaaaacgctgcttcgcgcaggctag

SEQ ID NO: 464074 - DNA, 1395 bp, Shigella boydii
atgacgaatctaaaaaagcgcgaacgagcgagaacgaatgcatcgttaatctctatggtgcagcgtttttctgatatcaccatcatggtcggcggattgtgggcggtgtgttggatcggcgggcaatcgttcttatacatgcacctgctgatggcactgattgcgctggtcgtgtttcagatgatcggcgggatgacggatttctatcgttcgtggcgtggcgtcaagatgaccaccgaactgatgctgttgctgcagaactggaccttaagcctgatcttcagcgcgggcctggtggcgttcagccatgattttgataatcgtctggtgacgtatctttgctggtatctgttaaccagcgtcggcatggtggtttgccgctcccttatccgctttggcgcgggctggttgcgtaaccgtggttacaaccgccgctatgtcgccgttgccggcgatctgcctgtgggccaggtgctgcttgatagcttccgcaaagagccgtggttaggttttgaagtggttgggatctaccacgacgcgaaaccgggtggcgtaccgtcggactgggcgggcaactatgaccagcttattgacgatgcgaaagcgggaaaaattcacaacgtctacattgcgatgcagatgaaagaggagtcccgcattaagaaactgatgcgcgacctggcggataccacctgttccgtgatcctcattccggacgtctttaccttcaacattctccattcccgtatcgaagaggtgaacggtgtaccggtagtgccgctgtacgacacgccgctgtcaggtatcaaccgtgttctcaaacgcctggaggacattgtgctctcttcactgatccttctgctgatctcccctgtgctgtgctgtattgccctggcggtgaagctgagctctcccgggccagttatcttccgtcagacgcgctacggcatggacggtaagccgattatggtgtggaaattccgctccatgaaggtgatggagaacgacaaagtggtgacgcaggctacgcagaacgatccgcgcgtgacccgcgtggggagttttctgcgccgcacctcgctggacgagctgccgcagtttatcaacgtctttaccggcggtatgtcgattgtcgggccacgtccgcatgcggttgcccataacgagcagtaccgttcgctgattgaaggctacatgctgcgccataaagtgaagccaggcattaccggctgggcgcaaatcaacggctggcgcggtgaaaccgacacgctggaaaaaatggaaaaacgcattgaattcgaccttgagtacatccgtgagtggagcctctggttcgatatcaaaattgtttttctgaccatcttcaaaggtttcgtgagcaaagcggcgtactaa

SEQ ID NO: 464075 - DNA, 1371 bp, Shigella boydii
atggaaaagttaacctgttttaaagcctacgatattcgcggcaagctgggtgaagagctgaatgaagacattgcgtggcgcatcggccgcgcgtacggcgaatacctgaaaccgaaaactatcgtactgggtggcgacgtgcgtctgaccagcgaatccctgaagctggcgctggcgaaagggctgcaggacgcgggcgtggacgtgctggatatcggcctttccggtaccgaagagatctattttgccaccttccacctgggcgtggacggcgggattgaagtcacggccagccataacccgatggattacaacggtatgaagctggtgcgcaagggtgcgcgccctatcagcggcgataccggcctgcgcgacgtgcagcgtctggcggaagccaacgacttcccgccggtgaacgagtctgcacgcggcagctacaagcagatcgatctgcgtaaagagtacatcgatcacctgctgggttacatcaacgtggcgaaccttaagccgctgaagctggtcattaactccggcaacggcgcggcgggcccggtggtggatgccctggaagcccgctttaaggcgctgaacgtgccggtgaccttcgtcaaggtacacaacaccccggatggcaacttcccgaacggtatcccgaacccgttgctgccagagtgccgcgacgacacccgcaatgcggtgattgaacactgtgcggatatgggcatcgcctttgacggcgatttcgaccgctgcttcctgttcgacgagaaagggcagttcatcgagggctattacattgtcggcctgctggcggaagcgttcctcgagaaaaatccgggggcgaagatcattcatgacccgcgcctctcctggaacaccgttgacgtggtgtcagcggcaggcggcacgccggtgatgtccaaaaccggtcacgcgtttattaaagagcgtatgcgcgaagaagacgccatctacggcggcgagatgagcgcccatcactacttccgcgattttgcctactgcgacagcgggatgatcccgtggctgctggtgaccgaactgctgtgcctgaaaggtcagaccctgggcgagctggtgcgcgaccatatggcggccttcccggcaagtggagagatcaacagcaaactggcacagccggctgaagccattgcccgcgtggaacagcactttgcaattcacgcgctggaaattgaccgtaccgacggtatcagcatggcgttcccgcagtggcgctttaacctgcgctcgtccaataccgagccggtggtgcgcctgaacgtggaatcccgcgccgacaccgcgctgatggaagcccgaacgaaggacattctggctctgttgaatcagtaa

SEQ ID NO: 464076 - DNA, 462 bp, Shigella boydii
atgaaaaagatattacttatgttgagtctgctattttttactaccgcgggctttagtgaagtttcggatacgttagtgacgggaggttatgataaacaagcgatgtctgacgcgattaaacatgcgcggaaagaaaccgataaattcatcgaggttatgaataaaaaagatgccgatactttcgcagtcaaagccccgataaccgatcacggaagaaccgagcatttctggcttacggatgtcacttattctaacggcatgtttattggcgtaatcagcaatgaccctggtattgttacaaacgtagaatatggccaggagtggaaaatcaagaaagaagatatttcagactggatgtatacgcgcggggataaaatttacggcggttataccattgatcctttattggtcacctatccaaaagaagaagccgacgagctaagagcaaaattagttcgctaa

SEQ ID NO: 464077 - DNA, 1425 bp, Shigella boydii
atgtcagtatttccagaaggttttttatggggcggcgcgcttgccgccaaccagtctgaaggtgcgttccgtgaaggcggaaaagggctgaccaccgtcgatatgatcccacacggcgagcatcgaatggcggtgaaactggggctggaaaaacgttttcagttgcgcgatgacgagttttatcccagccatgaggcgacggatttttatcatcgttataaagaagatatcgccctgatggcagagatgggattcaaggttttccgtacctcaattgcctggagccgtctctttccgcagggcgatgaaatcacgcccaatcagcagggcattgctttttatcgttctgtctttgaagagtgtaaaaagtacggtatcgaaccgctggtcacgttgtgccacttcgatgtgccgatgcatctggtcaccgaatatggctcttggcgtaaccgcaagctggtggagtttttcagccgctacgccagaacctgctttgaagcatttgatggtctggtgaaatactggctaaccttcaatgaaatcaacattatgttgcatagcccgttctccggcgcgggtctggtgtttgaagaaggtgaaaatcaggatcaggtgaaatatcaggccgcgcatcaccagctggttgccagtgcgctagccgccaaaatcgcccatgaggttaacccgcaaaatcaggtgggctgtatgctggcgggcggcaacttctacccttacagctgcaaaccggaagatgtctgggcggcgctggagaaagatcgggaaaacctgttttttatcgatgtgcaggcgcgcggcgcgtatccggcttactctgcccgcgtatttcgcgaaaaaggggtaaccatagataaagcgctgggcgatgatgagatcctgaaaaacaccgtcgattttgtctctttcagctattacgcctcgcgctgcgcctcggcggagatgaacgccaacaacagcagtgcggcgaacgtggtgaaatcgctgcgtaacccgtatctgcaagtgagcgactggggctggggaattgatccactcggtctgcgtatcaccatgaatatgatgtacgatcgttatcagaagccgctgtttctggtggaaaacggcctcggcgcaaaagatgaacttgctgccaatggcgagattaacgatgactatcgcatcagctatttacgcgaacatatccgcgcaatgggcgaagcgattgcagatggcattccgctgatgggctacaccacatggggctgtattgatttagtttccgcctctacgggtgaaatgagcaaacgctacggttttgtctacgtagaccgtgacgacgcaggcaacggcacgctgacgcgcacacgtaagaaatcgttctggtggtataaaaaagtgattgccagtaatggggaagatttagagtaa

SEQ ID NO: 464078 - DNA, 714 bp, Shigella boydii
atgggcgcttttacaggtaagacagttctcatcctcggtggtagccgtggaatcggtgccgctatcgtacgtcgtttcgtcaccgatggggccaatgtacgattcacctatgcggggtcgaaagatgccgctgaacgcctggcacaagagactggagcgacagcagtattcacagatagtgctgacaaagacgctgttattgatgtcgttcgtaagagcggcgcattggatatcctggtggtaaatgcaggtattggcatctttggcgatgccctggaattaaatgccgacgatattgatcgccttttcaaaatcaatattcatgctccttaccatgcctctgttgaagccgcccggcagatgcccgaaggcggacgcatcttaatcatcggctccgtgaatggcgatcgtatgcctgttgcaggcatggctgcttatgccgccagtaaatctgccctgcaaggcatggcgcgcgggctggcccgtgatttcggaccgcgtgggatcaccatcaacgtcgtccagccagggccaattgataccgacgctaatcccgccaacgggccaatgcgcgatatgtcgcatagttttatggccatcaaaagacatgggcaaccggaagaggtcgctggtatggtcgcatggttagcagggccagaagccagttttgttaccggcgcgatgcataccattgatggcgcgtttggcgcataa

SEQ ID NO: 464079 - DNA, 774 bp, Shigella boydii
atgtgttcaatttttggcgtattcgatatcaaaacagacgcagttgagctgcgtaagaaagcactcgagctgtcacgcctgatgcgtcatcgtggcccggactggtccggtatttatgccagcgataacgccattctcgctcacgaacgtctgtcaattgttgacgttaacgcgggggcgcaacctctctacaaccaacaaaaaacccacgtactggcggtaaacggtgaaatctacaaccaccaggcattgcgcgctgaatatggcgatcgttatcagttccagacagggtctgactgtgaagtgatcctcgcgctgtatcaggaaaaagggccggaatttctcgacgacttgcagggcatgtttgcctttgccctgtacgacagcgaaaaagatgcctacctgattggtcgcgaccatctggggatcatcccactgtatatgggctatgacgaacacggtcagctgtatgtcgcctcagaaatgaaatcgctggtgccagtttgccgcacgattaaagagttcccggcggggagctatttgtggagccaggacggcgaaatccgttcttattatcatcgcgactggttcgactttgatgcagtgaaagataacgtgaccgacaaaaacgagctgcgtcaggctctggaagattccgttaaaagccatctgatgtctgatgtgccttacggtgtgctgctttctggtggtctggattcctcaattatttccgctatcaccaagaaatacgcagcccgtcgcgtggaagattag

SEQ ID NO: 464080 - DNA, 549 bp, Shigella boydii
atgcgtacgtttagtggcaaacgtagtacgctggcgctggctatcgccggtgttacagcaatgtcgggctttatggcaatgccggaggctcgcgccgaaggattcatcgacgattcaaccttaaccggcggtatatattactggcagcgtgaacgcgaccgtaaagatgttaccgacggcgacaaatacaaaaccaacctttctcactccacctggaatgccaacctcgattttcagtccggttatgctgctgatatgttcggccttgatattgctgtgtttacggcgattgaaatggcggaaaacggcgacagctcccacccgaacgaaatcgcgttttcaaaaagtaataaagcctatgacgaagactggtccggcgacaaaagcggtataagcctgtataaagctgcggccaaatttaaatacggtccggtttgggcgagggcaggttacattcagccaactggtcaaacgctgttagcgccgcaggtacttatcagggggcggaagccggggcgaattttgattacggcgatgctggtgcgttga

SEQ ID NO: 464081 - DNA, 1236 bp, Shigella boydii
atgttaaccgtcgggctggtgatcgggaaccttactgctggcgtgcgttatcaggcgcgggtagcccgttaccgcgagcaacgcacacggcacttatatgaaatgtcgaaagctctggcggtgggccgcagtccgcaggacatcgccgccaccatcgaacaatttattgcctccacgtttcatgcccgcagtcaggtgttgttacccgatgacaacggtaaattgcagccgttaacacatccgcaaggaatgacgccatgggacgataccatcgcgcagtggagttttgataaaggcctgcctgcgggcgcgggcaccgacacgttacccggtgtaccgtaccagattttgccgctaaaaagcggcgagaaaacctacgggctggtggtggtggagccggggaatctgcgccagttgatgatcccggaacagcagcgcctgctggagacgtttacgctgttagtcgccaatgcccttgagcggctgacgctaaccgccagcgaagaacaggcgcggatggcaagcgaacgtgaacagatccgcaacgccctgctggcagcgctttcgcatgatttacgcacgccgctcacggtgctgttcggtcaggcagaaatcttaacgctcgatctggcaagcgaaggatcgccccacgcccgccaggccagcgagattcgtcagcatgtgctgaacactacccgactggtgaataatctactggatatggcgcgaattcagtccggcggctttaatttgaagaaagagtggttaacgctggaagaagtggtcggtagcgcgctgcaaatgctggaaccggttttatcgtcgcccatcaatctttctctgccagaaccgctgaccttaatccacgttgacgggccactctttgaacgggtgctgattaatctgctggagaacgcggtgaaatatgcgggtgcgcaggccgaaattggtatcgatgcccacgttgagggcgaaaatctacaactggatgtctgggataacggccccggtcttccgccaggccaggagcagacgatatttgataagtttgctcgcgggaataaagagtcggcagtaccgggggtagggcttggactggcaatctgtcgggcgatagtggatgtacacgggggcactattaccgcgttcaaccgaccggaaggtggtgcctgttttcgtgttacacttccccagcaaactgcccctgaacttgaagaatttcatgaggatatgtga

SEQ ID NO: 464082 - DNA, 1674 bp, Shigella boydii
atggctgcgcaagggttcttactgattgccacgtttttactggtattaatggtgctggcgcgtcctttaggcagcgggctggcgcggctgattaatgacattcctcttccaggtacagcgggcgttgaacgtatactctttcgtttacctggcgtctctgaccatgagatgaactggaagcaatatctttgtgccattctcggcctgaacatgctggggctggcggtgctgttttttatgttgctcggtcagcactatctgccgcttaatccacagcagttgccggggctgtcgtgggatctggcgctgaataccgccgtcagctttgtcacgaataccaactggcaatcttatagcggtgaaaccacgttgagctatttcagccagatggcaggcttaacggtacaaaactttctttctgccgccagcgggattgcggtgatttttgccttcatccgtgcgtttactcgccagagcatgagcacactcgggaatgcctgggtcgatctgctacgcatcacgttatgggtgctagtccctgtggcgttgttgatcgcactgttttttattcaacaaggtgcgctgcaaaactttctgccctatcaggcagtgaataccgttgaaggagcgcaacagctgttacccatgggaccagtagcttctcaggaagcgatcaagatgctcggtactaacggcggtggcttctttaatgccaactcgtcgcatccgtttgaaaacccaaccgcactgaccaacttcgtgcagatgctggcgatcttcttgatcccaacagctctgtgctttgcctttggtgaagtgacgggcgatcgccgccaggggcgcatgttgctgtgggcgatgtcagtgatttttgtcatctgcgtaggcgtggttatgtgggcagaagttcagggtaatcctcatctgctggcgctcggcgcagacagcagcatcaatatggaaggtaaagagagccgtttcggcgtgctggtcagtagcctgtttgcggtcgtgactacggcggcgtcctgtggcgcggtgattgcgatgcatgattcgtttaccgctctcggcggcatggtgccgatgtggctaatgcaaattggtgaagtggtgttcggcggtgtcggttctggtctttacggcatgatgctgtttgtcctgctggcggtgtttattgccgggctgatgattggtcatacaccggaatatctgggtaaaaaaatcgacgtacgcgagatgaaactgactgcactggcgattctggttactccaacactggtactgatgggcgcggcgttggcgatgatgaccgacgccggacgtagcgccatgcttaaccctggcccgcatggttttagcgaagtgctgtacgccgtgtcgtccgccgctaacaacaacggcagcgcctttgccggattaagcgccaactctccgttctggaactgtttactggcgttctgcatgtttgtcggtcgcttcggggtgattatcccggtgatggcaattgccggttcgctggtgagtaaaaagagccaacccgccagctccggcacgctgccaacgcacggcccgctgtttgttggcccgttaatcggcaccgtgttgctggttggcgcactgacctttatccctgccctggcgcttggtccggtggcggaatatctctcctga

SEQ ID NO: 464083 - DNA, 699 bp, Shigella boydii
gtggcagaccttgaagatgcggtagagaaaagaatatttaccgttgagcagctttatcatcatttgcacgaagcgtggggccagcatgagaaaggttcgctcttttcgctggtggttgaaaatgcctgggaaaaatcacgctcaaatagtttaagccgcagtacggaagatcagttttttatgtatttacgggtaaacaccctaaataaactggtaccctatgcggcacaacgatttattgataatctgcctgcgattttcgccggaacgtttaatcatgcattattggaagatgccagcgaatgcagcgatcttcttaagctatataaaaatgtcgctgtaaaacatgtgcttagccatccagatgtcgagcagcttgaattgcagggctatcgggtcattagcggattattagagatttatcgtcctttattaagcctgtcgttatccgactttactgaactggtagaaaaagaacgggtgaaacgtttccctattgaatcgcgcttattccacaaactctcgacgcgccatcggctggcctatgtcgaggctgtcagtaaattaccgtcagattctcctgagtttccgctatgggaatattattaccgttaccgcctgctgcaggattatatcagcggtatgaccgacctctatgcgtgggatgaataccgacgtctgatggccgtagaacaataa

SEQ ID NO: 464084 - DNA, 492 bp, Shigella boydii
atgaaaagcaaactccagaaaattatattatgtttatttcttctatgctgcatctataatttatggacattgcgtcctgtacagattttgtatacatactctgatgctggcaattcagtctttctggtcgttgatcatcgaccatggactgacagcgataaaataaattggtatctgaagcatcagaatgaaattaaaaatcaacatcccctaccagaaggtagttggcatacctggtatgtcattgatatcggtaatggcttcactgactataaaaaatatatcgaagggccgtatgaagatctctactgtttcccgacaattaagagcaatgataattgcatcgtgacaaattacttaatgattattaatgaatacccttatcgtaacactcatattggtattaacgattttactgagtatcaattaacacaagaaaataaaatagagcgagttttcaatccgcatgactttaaaaaagacaatttttag

SEQ ID NO: 464085 - DNA, 1059 bp, Shigella boydii
atgagcacgtcagacgatatccataacacgacagccactggcaaatgcccgttccatcagggcggtcacgaccagagcgcgggggcgggcacaaccactcgcgactggtggccaaatcaactccgtgttgacctgttaaaccaacattctaatcgttctaacccgctgggtgaggactttgactaccgcaaagaattcagcaaattagattactacggcctgaaaaaagatctgaaagccctgctgacagaatctcagccgtggtggccagccgactggggcagctacgccggtctgtttattcgtatggcctggcacggcgcaggtacttaccgttcaatcgatggacgcggcggcgcgggtcgtggtcagcaacgttttgcaccgctgaactcctggccggataacgtaagcctcgataaagcgcgtcgcctgttgtggccaatcaaacagaaatatggtcagaaaatctcctgggccgacctgtttatcctcacaggtaacgtggcgctggaaaactccggcttccgtaccttcggttttggtgccggtcgtgaagacgtctgggaaccggatctggatgttaactggggtgatgaaaaagcctggctgactcaccgtcatccggaagcgctggcgaaagcaccgctgggtgcaaccgagatgggtctgatttacgttaacccggaaggcccggatcacagcggcgaaccgctttctgcggcagcagctatccgtgcgaccttcggcaacatgggcatgaacgacgaagaaaccgtggcgctgattgcgggtggtcatacgctgggtaaaactcacggtgccggtccgacatcaaatgtaggtcctgatccagaagctgcaccgattgaagaacaaggtttaggctgggcgagcacttacggcagcggcgttggcgcagatgccattacctctggtctggaagttgtctggacccagacgccgacccagtggagcaacttttcttcgagaacctgttcaaatatgagtgggtacagacccgcagtccggctggagcaatccagttcgaagcggtag

SEQ ID NO: 464086 - DNA, 522 bp, Shigella boydii
atgttgaaatcccccctgttctggaaaatgaccaccttgtttggtgcagtattgctgttgttgattccgataatgctgattcggcaagtgattgtcgaacgtgccgattaccgtagcgatgtggaagacgcgattcgccaaagtaccagcgggccgcaaaaactcgttgggccgcttatcgctattcctgtgaccgagctttatacggtgcaggaagaggataaaaccgtggagcggaaacgaagttttatccatttttggttacctgagtcattgatggttgatggcaatcaaaacgtggaagaacgcaagatagggatttataccggtcaggtctggcacagtgatttaacgctaaaagccgatttcgatgtttcgcgtcttagcgagctcaacgcgccaaatatcatcttaggcaagccctttattgtgattagcgtcggggatgcgcgtggtattggtgtggtgaaagcgcctgaagttaacggaacggcactgacattgaacccggtaccgggttag

SEQ ID NO: 464087 - DNA, 3078 bp, Shigella boydii
atgagtgacaataacctgcgtctgcaggtgattcttaatgcggttgacaaactcacccgcccatttcgatccgcgcaggccagttcaagagaactggctgctgctgtcaaaaaatcccgcgatgcaataaagcagcttgatcaggccgggagcagtctggacagcttccgaaagctgcaggcagaaaatcagaaattaggcgacaggctgaactatgcccgccagcgtgcaaatttgctcagtcaggaactgggagcgatggggccgccttcgcaacgtcaggttgttgctctgggccgtcaacggctggctgttcagcgcctggaagaacgccagaaaaagctgcagcagcagacggcgcttgtgcgtgcagaactttatcgtgctggtatttcagctaatgatggcgccagtgcgacggcccgcattacccgtgaaacgatgcgttataacaggcagctttctgagcaggaagcgaggttacgacgtgtcggggagcaacagcgaaaaatgcacaccgcccggggggcttacgccaggcgtcttgaggtaagggatcgtattgcaggtgccggagccaccaccacggctgcagggctggcaatgggcgcaccagtgatggcggcagtaaaaagctataccagcatggaagatgccatgaaaggtgtggcaaagcaggtcaatggtctgcgtgacgataatggcaaccgcactgcgcgtttttacgaaatgcagggtgccatcaaggctgccagcgaacagttgccgatggaaaacggtgctgtggacttcgccgcactggttgaaggtggtgcgcgcatgaacgtcgcaaaccctgacgacagctgggaagaccagaaacgtgacctgctggccttcgccagcacggcggcaaaggcggcaacagcctttgaactgccagcggatgaactgtcagaaagtctggggaaaatcgcccagctctacaaaatccctacccgcaatattgagcagctcggtgatgcgctgaactatctggatgataacgccatgtcgaaaggagcggacatcattgatgtcatgcaacgcctgggcggtgtggctgaccgtctggattatcgtaaagcggcggcgctgggttccaccttcctgacactcggcgctgcgcctgaggttgcagccagtgcagcaaacgcgatggtgcgtgaattgtccattgccaccatgcaaagcaagagtttctttgaagggatgaatctgctgaaactcaatccagaagtgattgaaaagcagatgacgaaggatgcgatgggaactatccagcgggtgctggagaaggtgaatgcgctgccacaggataagcgcctgtctgccatgaccatgttgtttggtaaagagtttggcgatgacgcagcgaaactggcaaacaacctgccggaacttcagcgccagttaaaactgactgcgggcaatgatgcgctcggttccatgcagaaagaatccgacatcaacaaggattcactttctgctcagtggttgctggtcaaaaccggagcacagaacaccttcagcagcctgggggaaacgctgcgccagccgctgatggatattctgtacacggtgaaaagcgtcacgggggcgttgcgtcgctgggtggaagctaacccggaactgacgggcactctgatgaaagtagccgctgtggtagctgccgttaccgtgggcctcggcaccttagcggtggcgctggctgcagtgctggggccgctggcagtcatccgtctgggattctctgtgctgggtatcaaaacgttaccttccgttacggcagcagtaacccgaaccagcaacgcgttgtcctggctggctggcgcaccactggcactgctgcgacgcgggcttgcttcatcgggcaacgctgcaggtttacttactgcgccgttgtcgtctttgcgccgcacggcatcactgacgggaaatgtcctgaaaactgtagcaggtgcgccggttgcacttttgcggtctggattatccggtttacgtgcggttgctgtgatgtttatgaatccactggcggtactacgcggcggactggctgccacaggcacggtgctgcgtatgctcgcatccggtccactggcgatgctgcgcgttgccctgtatgccgtctctggtctgttaggtgctctgctcagtctgataggtcttgtggttactgcactggcgggtgtggcgctggttgtctggaaatactggcagcccatcaccacatttctcggtggcgtggtggaaggattcaaagcggcggcaggtcctgtcagtgccgcgttcgaaccgcttaagcctgtgttccagtggattggcgacaaagtacaggcgctgtggggctggtttactgatctgctgacgcccgttaagtcgacctctgccgaactgcagagtgcagcggcaatggggcgacgattcggggaggctctggcggaagggctgaatatggtcatgcatccgctggactccctgaaatccggcgtttcctggttgctggagaaacttggcattgtcagtaaagaggccgcaaaggcgaaactgccggaaagcgtgacgcgtcagcaacctgcgacggtgaatgcagacggtaaagtgatgatgccatcgggtggttttccgtcatggggatatggctttgcggggatgtatgacagcggcgggtatatcccgcgcgggcagtttggcatcgtcggtgaaaacgggccggaaattgttaacggcccggcaaatgtgaccagccggagaaatacagctgcactggctgccgttgttgccggaatgatgggtgttgctgctacgccagcagagcttccaccgttgcaccctttggcacttcccgcgaaaggcggtgaagcgatggtgagtcgtgcagccactgtgccgcccgttcaacggattgaggcaccgatgcagatcatcattcaaacgcagccaggacaaagtgcgcaggatattgcgcgggaggtggcccgccagcttgatgaacgtgaacgcaggctgaaggcaaaagccaggagtaactacagcgatcaggggggatacgacgcatga

SEQ ID NO: 464088 - DNA, 252 bp, Shigella boydii
gtgaatatcatcaacactccgataaaagtctctgccgaaccaaacggtgcgcgtctggttgaagtacatcagccgctgtcagagaagattgatgacgatccgcagctgctgccaattacgctgaatagcgcaatgcaatcatttaaagatgcagcacaaactgacgctgaagtgatgcaacatgtgatggatgtccgttccgggatgccggtggatgtccgccgtcatcaagtgagcccacaaactctgtaa

SEQ ID NO: 464089 - DNA, 201 bp, Shigella boydii
ttgcctgcggtagtgccggctggaccggataacccaatgggccatcatgcgattcgtctggcggcctatggcggcgtttatttgcttcatggtacgaacgccgatttcggcattggcatgcgggtaagttctggctgtattcgtctgcgggatgacgatatcaaaacactctttagccaggtcacccaggcaccaaagtga

SEQ ID NO: 464090 - DNA, 705 bp, Shigella boydii
atgcagctcggcgtgatgtatatgctgagtttccgcgcttatctctatctgacggtttccgaactgctgctgttcaccgtactgacgccgctctacatcacgctgatttatgacatcatgaataagcgccgtctgcgctggggatatgcttttagtgccttgttggcggtgattggtgccgggattattcgctatgatcaggtcaccgaccatttctggactggcttgttgctggtgcaactctccaatatcacttttgccatcggcatggtgggttacaaacgcctgatggaaactcgcccgataccgcagcataacgcctttgcgtggttctatcttggcgcgtacctggtggcggtaattgcatggttcttgctgggaaatgcgcagaaaatgccgcaaaccacgttgcaatggggcattctggtgtttcttggcgtggtggcttccgggattggctactttatgtggaactacggcgcgacgcaggtggacgccggaacgctgggaattatgaataatatgcacgttccggcagggctgctggtaaacctggctatctggcaccaacagccgcactggccaacgtttattacaggcgcgctggtgatcctggcctcactgtgggtgcatcgtaagtgggtcgctccgcgctcttcacaaacggcagatgatcgcaggcgtgattgcgcgctgagcgaataa

SEQ ID NO: 464091 - DNA, 273 bp, Shigella boydii
atgaccttagaatggtggtttgcctacctgctgacatcgatcattttaagcctgtcgccaggctctggtgcaatcaacactatgaccacctcgctcaaccacggttatcgcggcgcggtggcgtctattgctgggcttcagaccggactggcgattcatattgtgctggttggcgtggggttggggacgctattttcccgctcagtgattgcgtttgaagtgttgaagtgggcaggcgcggcttacttgatttggctgggaatccagcagtag

SEQ ID NO: 464092 - DNA, 657 bp, Shigella boydii
atgacgaacacgaaaaaagcggccccgatatggagccgcctttctgaacaattaacccgctgcgccttatgtgtcaacaaacataagcaagggcatgatagccgctatcaggctggtgggcaatgctatcagtctggttcagtgcgttgccataactgcgaagctctctcctttgatgagtattctttaaggtacttctcaagggcaaaagaacacggcgcgaatcgttctgattcatgctctttctttctgcgtcgtctttttcgtgcaggtgatgttttttcggttgattcttcgttggtcattgtgtgcgcctgtaaagcaatgcgccggagtacctcacaccacggcgctgatagtttttatccttttggttctatgccgcgttgctgtaattctttgcggagaacgcgtttaatccaagtggctaaagatgtgtcgccatcggccttagctgcttcttctagctgcgctctgaagtcttccggtaatcgcatttggtatggaggcgaacgtttttctaatggtgttgacatggtaattacccttcattactatacctacatggtaattaccattgtacttgccattacacaaaaagcaacgccccgcagtgctggaacacatgcagggcgtctaaccaacaacgtaaactag

SEQ ID NO: 464093 - DNA, 465 bp, Shigella boydii
atgcgtaaaaaccgcttgcaaaaaattatcacggggctgtatgcttcccccgtcgcccacatggcgaccgggtttgacagcctgaatactgtagcggacagccgcttacattccgatatgcggtttttttgtgtccgtaaacctacccatacccgcattatggcggggcgtaacgggggagcctttgcgctcgctggtctctacagtgccagtctgtcaaccctgttacgtctcgccaccatgtttgacagcgtagtagcgagactccttaaaattactgtaggagcctttcacatggctgtatccgcacgcccttactttgtctggcgctttatgcagtgcctgacagacagcattgcaatattcaccgttaccgcagccactgaacgcgaagcccgcgcccagttgccgcacgcacatcttatttttgtcgcccgtattcgccagggggggagtcatgcataa

SEQ ID NO: 464094 - DNA, 228 bp, Shigella boydii
atgcataaaataccctttgatgttcttgttcattctgaaaacgcattaatccgcgcaaaggaaatggacgcattactacttaagttaattgatgtgccggaaagtggcgatgaatctgattcaatgatgttttctgccgtgcgtacgctattaacgtctgttattaatgaattaaatacagtgatggcaattcacgagaataataaagcgcagcacaccggagaataa

SEQ ID NO: 464095 - DNA, 300 bp, Shigella boydii; identical to SEQ ID NO: 9207

SEQ ID NO: 464096 - DNA, 1755 bp, Shigella boydii
atgaaactggcaccgaacgtaaaaaaacagccacgcggaataaaacacaaagacacagaggtaattattttcgcgggtagtgatgcctggtcgcacgcgaaacaatggcaggagcaggatggccccgcatccggcgataatgtgccgcctgtgtggcttgggccaaatcagcttgccgaacttgatgcactgaaaattgttccggatggaaaaaaacgcgtaaggctgtaccaggccggagaactggatttagtggaaaccaaaaagattggtcagaagctggcggcggcagatattcaggacgcaaatttttaccctgatggtatgcacggtcagaaggtggagaactggcgcgaatatctggcccgtgagcgccagaatctttctgatggtctggtcattgagcttccggtaaagcaaaaggcgcaactttcgcagatggcggacagtgagcgcgcgcagctgcttgccgatcgctttgatggcgtttgcgtacatcctgaaagtgaaatcgttcacgtatggcgcggcggggtatggtgtccggtcagcacaatggaacttagccgcgaaatggtggcgatctattcagagcacagggccactttcagcaagcgcgtaatcaataacgccgtggaagcgttaaaagttattgccgaaccaatgggcgagccgtccggcgatttgctgccgttcgccaatggtgcgcttgacctgaaaacgggggaattttccccgcacacgccggagaactggatcaccacgcacaacggcattgagtacacgccaccagcaccaggggagaacatccgcgataacgcgccaaactttcataaatggcttaagcacgcagccggaaaagacccgcgcaagatgatgcgtatatgtgccgcgctgtacatgattatggcgaaccggtacgactggcagatgtttattgaggccaccggagacggcgggagcggtaaaagtacattcacgcacatagccagccttctggcagggaaacagaacacggtaagcgctgaaatgacatcgcttgatgatgctggtggacgtgcgcaggttgtcgggagtcgtcttatcgtcctggctgaccagccgaaatatacaggcgaaggaacgggcatcaagaaaatcacgggcggtgaccccgtggaaattaacccgaaatatgaaaagcgttttacggcggtaatcagggcggtggtgctggcgaccaacaacaacccgatgatattcaccgaacgggccggaggtgtggcacgtcgtcgcgtgattttccgtttcgacaatatcgtcagtgaggccgaaaaagacagggagctaccggaaaagatcgcggctgaaatccctgtcattatccgccgattgctggcgaactttaccgaccctgagaaggcacgggctttactactggaacagcgtgacggtgatgaagctctggcaataaagcaacagacggatccggttattgagttttgccagttcctgaattttctggaggaagcacgcggcctgatgatgggcggcggtggcgattcagtgaagtacacgaccagaaacagcctttaccgcgtctatctggcgtttatggcatacgcaggcaggagcaaaccgctaaacgtaaatgactttggaaaggctatgaagcctgccgcaaaagtttacggacatgaatatattacgcggaaagttaagggggtaacgcagactaacgcaataacaacagacgagtgcgacgcgtttttataa

SEQ ID NO: 464097 - DNA, 819 bp, Shigella boydii
atgtgtcaggtatttggtgtatccaggagcggttattacaactgggtacagcatgaaccctcagacagaaaacaaagtgatgagcggctaaaactggagattaaggtggcacatatccgcactcgcgaaacatatggaacccggcggctccagacggagctggcagagaatggcatcatcgttggtcgtgaccgactggcacgtcttcgtaaggagctaaggctacgctgtaagcagaaacgcaagttcagagcgactacgaacccgaaccacaatctgccagttgcgccaaatctgctgaaccagacgttcgctcctacagcaccaaatcaggtctgggtggcggacctgacgtatgttgccacacaggagggatggttgtacctcgctggcatcaaagatgtttatacgtgcgaaattgtcggctacgccatgggagagcgcatgacaaaagagctgacaggtaaagccctgtttatggcgctcaggagccagcgcccacctgccgggctaatccaccactctgatcgaggttcacagtactgcgcatacgattaccgggtcatacaggagcagtctggtctgaaaacatcaatgtcgcgtaaaggtcactgttacgacaacgctccgatggaaagcttctggggaacgctgaaaaatgagagcctgagccactatcgttttaataaccgggatgaagccatctcagtaatacgggaatacattgagattttctacaatcgtcagcgtcgtcactctcgtctggggaatatctccccggcagccttcagggaaaaataccatcagatggctgcttaa

SEQ ID NO: 464098 - DNA, 291 bp, Shigella boydii
atggatctgttgattcattacgactggccgggaaatattcgtgagctggaaaacgcggtggaacgggcagtggtgctgctgaccggggaatatatttccgaacgcgagctgccgctggcgattgccagtacgccgatcccgctggggcaaagtcaggatattcagccgctggtggaagtggaaaaagaggtgattctggcggcactggagaaaacgggcggcaacaaaactgaagccgcccgtcagttagggatcacgcgtaaaacgttattggcaaaactgtcgcgttag

SEQ ID NO: 464099 - DNA, 477 bp, Shigella boydii
ttgaatcccgacattcaactgacagcattacaacaacggttaacgggtgaggcgttaaaagatgcggttgcacgggccgatgtggtgctcgacggtaccgacaatatgccgactcgccaggagattaatgccgcctgcgtggtactcaacacgccgcttatcaccgccagcgcggtcggatttggcggtcagttgatggtactgacgccgccctgggagcaggggtgttaccgctgcctgtggccagataaccaggagccagaacgcaactgccgcacggcgggcgtggttggcccggtggtcggggttatgggcactttgcaggcactggaagccattaagttattaagcggtatagagacacctgcgggagaactccgactgttcgacggtaaatcgagccagtggcgcagcctggcgttgcgccgcgccagtggttgcccggtatgcggaggaagcaatgcagatcctgtttaa

SEQ ID NO: 464100 - DNA, 165 bp, Shigella boydii
gtgaatacggcgattgccgtagcggacgatcccgtcaacatggcgaaggcatttcgtctggcggtagaagcaggcctgctggcacgtcagtccggaccgggcagccgcagtcattttgctcatgccaccagcccgctgactggatttctggaggcatcggcatga

SEQ ID NO: 464101 - DNA, 1134 bp, Shigella boydii
atgaaaaccttcagcgatcgctggcgacaactggactgggatgacatccgcctgcgtatcaacggcaaaacggctgttgacgtagagcgggcgctaaatgcctcgcaattcacccgcgacgatatgatggcgctgttatcgccagccgccagtggctatctggaacaactggcccaacgggcgcagcgtctgacccgtcagcgatttggcaacacagttagtttctacgtcccgctttatctttccaatctttgcgctaacgactgcacgtactgcggattttccatgagtaatcgcatcaagcgcaaaacgctggatgaagcggatattgccagggaaagcgccgctatacgggagatgggctttgaacatctgctattagtcactggtgaacatcaggcgaaagtggggatggattactttcgtcgtcatctccccgccctgcgtgaacagttctcttcactacaaatggaagtgcaaccgctggcgaagacggaatacgccgagttaaagcagcttggtctggatggcgtgatggtttatcaggagacatatcacgaggcgacttatgcccgccatcatctgaaaggcaaaaaacaggacttcttctggcggctggaaacgccggatcggctggggcgtgcggggattgataagataggcctcggcgcgctaattggcctttccgacaactggcgcgttgactgctatatggttgccgaacatttgctatggctgcaacagcattactggcaaagccgttactctgtctcctttccgcgcctgcgcccgtgtactggcggcattgagcctgcgtcgattatggatgaacgccagttagtgcaaaccatctgcgccttccgactgcttgcaccggagattgaactgtcactctccacgcgggaatcaccgtggtttcgcgatcgcgttattccgctggcgatcaataacgtcagcgccttctcgaaaacgcagccaggtggctatgccgataatcaccccgagttggaacagttctcaccgcacgacgatcgcagaccggaagcggttgctgccgcgttaaccgctcagggtttgcagccggtatggaaagactgggacagctatctgggacgggcctcgcaaagactatga

SEQ ID NO: 464102 - DNA, 852 bp, Shigella boydii
atgaaggctgaaatcagccgtagaagtctgatgaaaacctccgcacttggcagtcttgcgctggcaagcagtgctttcactctgccattttcccaaatggtccgggcggcagaggctccggtagaagagaaagcggtctggagttcctgcaccgttaactgcgggagccgctgtctgttacgtttgcatgtgaaagatgacaccgtgtactgggtggagtctgatacgacaggtgacgacgtctacggtaatcatcaggttcgagcgtgtttacgcgggcgctctatccgccgacggatgaatcatcctgataggttgaaatatcccatgaagcgcgtcggcaagtgcggtgaaggtaaatttgaacggataagttgggacgaagccctggataccatcagtgataatcttcggcggatcctgaaagattacggcaatgaggctgtacatgtcctgtacggaacaggcgtagatggcggaaacatcaccaactcaaacgtcccgtaccgtctgatgaactcttgcggtggttttctcagtcgctatggcagctacagtaccgcacagatcagtgccgcaatgagttatatgttcggtgccaatgatggcaacagcccggatgatatcgccaatacgaaactggtcgttatgttcggaaataacccggcagaaacgcggatgagcggcggtggtgtcacttactacgtcgagcaagcccgcgaacgttcaaacgcacgcatgatcgtcatcgatccacgttataacgacactgctgccgggcgtgaagatgaatggctgcccattcgccctggcaccgatggcgcactgcctgtgcgattgcctgggtactga

SEQ ID NO: 464103 - DNA, 303 bp, Shigella boydii
atgggaaatggatggcatgaatggccactggttatctttaccgtattgggtcaatgcgtagtaggcgcgctgattgttagcggaattggctggttcgccgccaaaaatgacgcagaccgtcagcgtattgtccgtggcatgtttttcctctggctgttgatgggcatcgggtttattgcctctgtcatgcacctgggatcgccactgcgagcgtttaactcgctgaatcgaatcggagcttctggtctgagtaacgagattgctgccggttccatattttttgccgttggtggactatggtag

SEQ ID NO: 464104 - DNA, 426 bp, Shigella boydii
atgttttctgggctgttaatcattctggttcccctgattgtgggttacctcattccgcttcgccaacaagcttcgttaaaagttattaatcagctattaagctggatggtttaccttattctcttttttatgggtatcagtctggcgtttctcgataacctcgccagtaacctgttggcgattctgcattattctgccgtcagtattaccgttattttactgtgtaatattgccgccctgatgtggctggagcgaggcctgccgtggcgcaaccaccatcagcaagaaaaactcccgtcgcgtattgcgatggcgctggagtcgctaaaactgtgcggcgtagtagtgattggttttgccattggtctgagtggactggctttcttacaacacgcgaccggtgatgctgccaacttactgatttag

SEQ ID NO: 464105 - DNA, 375 bp, Shigella boydii
atgggcaaagcagtcattgcaattcatggtggcgcaggtgcaattagccgcgcgcagatgagtctgcaacaggaattacgctacattgaggcgttgtctgccattgttgaaaccgggcagaaaatgctggaagcgggcgaaagtgcgctggatgtggtgacggaagcggtgcgtctgctggaagagtgtccactgtttaacgccggaattggcgctgtctttacgcgtgatgaaacccatgaactggatgcctgtgtgatggatggtaacaccctgaaagccggtgcggtggcgggcgttagtcatctgcgtaatccggttcttgccgcccgggtggtgatggagcaaagcccgcatgtgatgatgattggctaa

SEQ ID NO: 464106 - DNA, 534 bp, Shigella boydii
atgccaactccgtccggtttcaccacccgtgaaattggcatttccggtggtggagatcatcatcactcactggaggctgcccctatggcaactaccctcacttctgaatgcaatttactcgtcattcccttcagcgccgttaccaacttcaccactctggcggattactgcgagcatttcgctgaaacgatcatcgagtgccacgatctggcgctgaaaatggcgccctgcggcaggcttagtacctgtcttgcactgctgcggcccacgctgggcgaaccgatcccgccgcacctgatcgaccgctttactgtggatgttcttcctgatgttttaccggaatttacccctgatgcagacctgctctgtgattactgcctggcgctggcgcaggtactgctgggacggtcactgttgccggaaaccgaaacgacgctgaccgggttactgtgcgatctggtctggtattttgccgatggtctgaaagctccgcgctggattcgtaccactgacggcgtgcagccctgtcagtag

SEQ ID NO: 464107 - DNA, 3537 bp, Shigella boydii
atgagcggaaaaccagcggcacgtcagggagacatgacccagtacggcggcccgatagtccaggggtcggcaggcgtgagaattggcgcgccaaccggcgtggcctgttcagtatgtcccggcggagtcacttccggcaacccggtgaatccgctgctcggtgcaaaggtgctgcccggcgaaaccgatttcgcgctacccggcccgttaccgttcattctttcccgcacctacagcagctaccggacgaaaacccctgcgcccgtcggtatcttcggtcccggctggaaagcgccctctgatatccacttacagttacgcgataacgaactgatactcaatgataacggtggcagaagcattcattttgagcacctgtttcccggtgaggatggcttcagccgcagcgaattattctggctggtgcgcggcggcgtggcgaaactgaatgaaagtcaccgtcttgccccactctggcaggctctgccggaagaactccgcctgagtccgcatatttatctggcgacgaacagtccgcaggggccgtggtggatactcggctggagtgagcgggtaccgggtgtggatgagatgctgcctgctccgctgccgccgtaccgggtactgaccggcctggtggaccgcttcgggcgcacactgaccttccggcgtgaggccgcaggcgaatttaccggggaaatcaccggcgtgaccgatggcgccggccgtcagttccgtctggtgctgaccacgcaggcacaacgggcagaaaacgcccggcagcaggccatcgccgcaggaacgaaaggatcggatatcccggattcactgccggactatacggagtatggccgggataacggtatccgcctgtcaggggtgtggctgacgcacgacccggaatacccggagaatctgcccgccgcccccctggtacgctacgactggacggcacgcggtgagctggcggcggtgtatgaccgcagcggtactcagatgcgccactttacttacgatgataaataccggggccggatggtggcgcaccgttacgcaggcaggccggagatgcgttaccgctacgacgacataggtcgcgtgacggagcagtttaatccggcaggcttaagctacgcctatcagtatgagaaaaaccgtatcaccatcaccgacagcctgaaccggcgggaggtgctgcacacggaaggtgaagccgggctgaaacgtgtggtgaaaaaggaattcgcggatggcagcatcacccgaagtaaatttgactatatggggcgactccagtcacagacggatgcagcaggccggacaacagaatacagtccgaatgtggtgacgggactcgtcacgtgcatcaccacgccggacggcaggaaatcggaattttactataacaatcaaaaccagttaacctcagccaccgggcctgacggactggaaatgcgccggaaatatgatgagtacgggcgtctgacgcaggaaacagcacgcaacggcgatgtcacccgctacagttatgataatccacacagtgaattaccctctgtaacagaagatgcgacgggtagccgcaagcagatgacgtggagccgctacgggcagttacagaccttcaccgactgctcaggctatgaaacccgttatgaatatgaccgcttcgggcaaatgacggcggtacaccgtgaggaaggcatcagcacgtacaatacctataatccgcgcggccagctggtcagttggaaggacacgcagggccgtgaaacgcagtatgaatacaacgccgcaggcgacctgaccgccgtcatcaccccggacggcaaccggagtgagacactgtacgatgcgtggggaaaggccgtcagcaccacacagggtggtctgacgcgcagcatggaatacgatgctgcgggacgtgtcatcagcctgaccaacgagaacggtagccatacagaatttaactgggatgtgcttgaccgcctgatacagcagcgcggctttgacgggcggacgcagcgttaccgttatgacctgaccgggaaactcacgcagagcgaggatgaggggcttatcaccctctggcactacgatgcatcggaccgtatcacacaccgcacagtgaacggcgaaccggcagagcagtggcggtataacgaccacggctggctgacagaaatcagccatctcagcgaaggccaccgggtggcggtgcattacggttataaccgtaagggacgtctcacaggcgagcgccagacggtacatcacccggagacgggggaactgctctggcagcatgagacgaaacacacttacaacgagcaggggctggcaaaccgctttcaggcagacagcctgccaccggtggagtggctaacgtatggcagcggttacctggcgggaatgaaactgggcgacacgccgctggtggagtacacacgggacagactgcaccgggaaacggtgcgcagcttcggcaataatgcatatgaactgaccagcacatacactcacgcaggccggttacagaatcagcacctgaacagcctggtgtatgaccgtgactatggctggaatgacaatggcgacctggtgcgcatcagcggcccgcggcagacgcgggaatacggctacagtgccacgggcaggctggagagtgtgcgcaccctcgcaccggacctggatatccgcatcccgtatgcctccgacccggcgggaaaccgcctgccggacccggagctgcacccggacagtacactcacggcgtggccggataaccgaatcaccgaagacgcgcactacctgtaccgctatgacaggtatggcaggctgacggagaagacggaccgcatcccgacgggtgtgatacggacggacgacgagcggacccaccactaccactacgacagccagcaccggctggtgttttacacgcggatacagcatgaggagccactggtcgagagccgctatctctacgacccgctgggccgccggacggggaaacgggtgtggcgtcgcgagcgtgacctgacgggatggatgtcgctgtcgcgtaaaccggaggtgacgtggtacggatgggacggcgaccggctgacgacggtacagaccgacaccacgcgtatccagacggtataccagccggggagcttcgcgccgctcatccgcatcgagacagagaacggcgaactggataaagcgcagcggcgaagcctggtggagaagttacagcaggaagggagtgaggacggtcacggtgtggtgttcccgctggaactggtgaggatgctggacaggctggaaggggaaatccgggcagaccgcgtgagcagtgagagccgggcgtggctggcgcagtgcgggctgacggtggagcggctggcggcacagatagagccggtttatttacctgagcgaaaagttcacctttatcactgcgaccccggggactgccgctggcgctcatcagcgaagacggcaatacgatgtggagcgcggagtatgatgagtggggaaacctgttga

SEQ ID NO: 464108 - DNA, 693 bp, Shigella boydii
atgtggagcgcggagtatgatgagtggggaaacctgttgaatgaggagaacccgcatcacctgtaccagccgtaccgcctgccggggcagcagtacgatgatgaatcggggctgtgctataaccgtaaccggtactacgatccgttgcagggacggtatatcacccaggatccgattgggctgagtggtgggctgaatacatattcgtatccattaaatccaataaatgaaatagatcctttaggattaaaagtgatcgttgtagctagtgatcctaatgaggcaaaattattacaggaggcatatgcacaattaaatacaacaaagagaggacaagaaataacaaaaccgttagaagattcgaaagatgtatataatatatacacaatacatcgcgatgctttttattgccctgccggaacaacagatgtctcctgtcaaggaaaagaaaaagcggtgtttattgagcccaatgagtgtgtaaaattacctacggcacaaggcctggaggttacatcactggcagttgaattaggacatgaattaggtcatgctcatggagtccatgatgatggtggggatagaatgaataacgtaaacttaaatgaaaatcctatccgcgctggtttaggtgaaaacccacggactgcatatgtagtaccacgagtggagtgggaaaaatgtcgaaaataa

SEQ ID NO: 464109 - DNA, 393 bp, Shigella boydii
atgtcgaaaataaattttgtgacactattgttttttattttaaatattccaaatgcaattggtaaagatgaagattatataggggtggtttattggcgagggtttgatattgagtcaataacagggattcctgaaagtcagataaataattatggaatgaagcgatgtattggtagaaatgtttttatggggttattatttcatattaatgattcatatagtcgagaatatgacgatagagatgtcagaggtagtattacttttaataatgatatttattatgtaaatcgatctggtatagttagatataaaaatgatttttatagaataaataaaaaatcatttagtcatataatgaatcaagataagagcaaatgtccgttaattgattaa

SEQ ID NO: 464110 - DNA, 1317 bp, Shigella boydii
atggactccacgctcatctccactcgtcccgatgaagggacgctttcgttaagtcgcgcccgacgagctgcgttaggcagtttcgctggtgccgtcgtcgactggtatgattttttactctatggcattactgccgcactggtgtttaatcgcgagtttttcccgcaagtaagcccggcgatgggaacgctcgccgcatttgccacctttggcgtcggattccttttccgtccgctcggcggtgtcattttcggtcactttggcgaccgactgggacgtaagcgcatgttaatgctgaccgtctggatgatgggcatcgcgacagccttgattggtattcttccttcattctcgaccattgggtggtgggcacctattttactggtgacgctgcgtgccattcagggatttgccgtcggcggcgaatggggaggcgcggcgttgctttccgttgaaagtgcaccgaaaaataaaaaagccttttacagtagcggtgtacaagttggctacggtgtaggtttactgctttcaaccggactggtttcattgatcagtatgatgacgactgacgaacagtttttaagttggggctggcgtattcctttcctgtttagcatcgtactggtactgggagcattgtgggtgcgcaatggcatggaggagtccgcggaattcgaacaacagcaacataatcaagctgccgcgaaaaaacgcatcccggttatcgaagcgctgttacgacatccaggtgctttcctgaagattattgcgctacggctgtgcgagttgctgacgatgtacatcgttaccgcctttgcacttaattattcaacccagaatatggggttaccgcgcgaacttttccttaatattggtttgctggtaggtggattaagctgcctgacaattccctgttttgcctggcttgccgatcgttttggtcgccgcagggtttatatcacaggtgcgttaatcggaacgttgagcgcatttcctttctttatggcgcttgaagcacaatctattttctggatagttttcttctccataatgctggcaaacattgcgcatgacatggtggtgtgtgtgcaacaaccgatgtttaccgaaatgtttggtgccagttatcgctatagtggcgctggagtcggttatcaggttgccagtgtggttggcggaggatttacaccttttattgccgctgcactcatcacttactttgccgggaactggcatagcgtcgccatgtatttgctggctggatgtctgatttctgcaataaccgctttgttgatgaaagacagtcaacgcgcttga

SEQ ID NO: 464111 - DNA, 375 bp, Shigella boydii
atggcaattaacaatacaggctcgcgacgattactcgtcacgctaacagtcctttttgcagcgctttgcgggctgtatctactcattggcggaggctggctggtcgcgattggcggctcctggtactaccctatcgctggccttgtgatgctcggcgtcgcctggatgctgtggcgcagtaaacgtgccgcgctttggctatacgccgccctgctgctcggcaccatgatttggggcgtctgggaagttggtttcgacttctgggcgctgactccgcgcagcgatattctggtcttcttcggcatctggctgatccgcgtcgcctggtcattcctgccagcggcgcagttgccgcactggtggtggcactgctga

SEQ ID NO: 464112 - DNA, 1134 bp, Shigella boydii
atgggcgtgaccacgccggatatctggggcggtaaccgcacaccggaacaggaacgttatgccagctcgattctggcgctgaatgccactaccgggaaactggcgtggagctaccagaccgttcaccacgacctgtgggacatggatcttccggcacagccgacgctggcggacatcaccgttaatggtcagaaagtgccagttatttacgctccggcgaaaaccggcaacatttttgtgctcgatcgtcgcaatggcgaactggtggttccggccccggaaaaaccggtgccgcaaggtgctgcgaaaggcgattacgttactccgacccagccgttctctgaactgagcttccgtccgaagaaagatttgagcagtgcggatatgtggggagccaccatgtttgaccaactggtgtgccgcgtgatgttccaccagatgcgctatgaaggcattttcacgccgccatctgaacagggcacgctggtcttcccgggtaacctgggaatgtttgaatggggcgggatttccgttgatccaaatcgtgaagtggcaattgccaacccaatggcactgccgtttgtttcgaaactgatcccacgcggtccgggtaacccgatggagcagccgaaagatgccaaaggcacgggtacggaatccggcattcagccacagtacggtgtaccgtatggtgtcacgctcaacccgttcctctcaccgtttggtctgccgtgtaaacagccagcatggggttatatctcggcgctggatctgaaaaccaatgaagtggtgtggaagaaacgtattggtacgccgcaggacagtatgccgttcccgatgcctgtaccggtgccgttcaatatgggtatgccgatgctgggcgggccaatctccacggcgggtaacgtgctgtttatcgccgctacggcagataactacctgcgcgcttacaacatgagcaacggtgaaaaactgtggcagggtcgtttaccagcgggtggtcaggcgacgccaatgacctatgaagtgaatggtaagcagtatgtggtgatctccgcaggcggtcacggttcatttggtacgaagatgggcgactatattgtggcttatgccctgccggatgatgtgaaataa

SEQ ID NO: 464113 - DNA, 348 bp, Shigella boydii
atgaagcggagctatgacgacttccgcgacttcagccgtcgccaccccctgacccagcaacaaaaggacgccgctcgtcagcgttatcagtcagcttctcctgagcagcgccaggtgtttaaggaaaaagtacagcagcgcccactgaaccaacagcaacgtgataacgcccgccagcgtgttcaatcagcatcacctgaacaacgtcaggtttttcgggagagagttcaggagagccgcccacaacgtctaaacgacagtaaccgtactgccagattgaataacgatcaacggtcagcagtacgcgaacgtctctctgagcgcggagcaaggcgactggaaaggtaa

SEQ ID NO: 464114 - DNA, 411 bp, Shigella boydii
atgaaaacttttatcaaaactttactcgttgctgtaactattctgttctctgtcttcgctactgcgaaacaagtaaaactgccaaataacatcaaatacgttaatactacagaagcgttttcctgtaccgaaattgacggtatgaattgccagacaaagaatcagttcaactataaagataacagctatgttttcgtgcttgaacgtggtggtgcctggtgctacgactacactgtctcggtagttaacctgaaaaccgggaaagcacaaatgattgaatacggggacaatcaactgtgctcaggtagcaacaaaccgttcttcgaaatcaaaaatggcgtaccgacggtaggagtcatcgacacatccggaaaacctgtcgttgtagcccaggacaaacttaaaatctaa

SEQ ID NO: 464115 - DNA, 684 bp, Shigella boydii
atgaaattacctgtaaagttattaatgagccttatatctctggtcagcgttattgcacgtgccggggaatataaaaattacagccgggatgaaataaaatactggcgatatacatcatacaagggggggaaacttccggaaggtttcactgatgagaaattttccagcgccatttacaacggaagaatatttacaatgaaacgtttacatacccttatgttatttctggcggttctgttcacgggctttaactttaacgcagaagcggctaccgtaaaacaagctcttagttgtaacccagaagcctgggctgaacaacctggagcgtgtccatcaacgtacgagttgtacgaaggtgacgctacctacaaagccgctatcgacaaagcattaaaaccggtcggactgaacggcatgttcggtaaaggcggctatatggatggccctggtggaggtatcacgccagtaaacattaacggtacagtctggttccagggcgacggttgcaaaaccaatacctgcggctgggactttatcgtaacactctataacccaaaaacccatgaagttgttggctaccgttactttggtttagatgacccggcctacctggtttggttcggtgaaattggcgtgcatgaattcgcgtatctggtgaaaaactacgtagctgcggttaactaa

SEQ ID NO: 464116 - DNA, 1071 bp, Shigella boydii
atgagtacagaaatgaaaacggggctggtgctgtccggtggcggggcggtgggcgcttatcaggcgggagtggttaaggcactggcagagtgtggtacacagatcagcatggtttcaggggccagcattggcgcattcaatggtgccattatcgcggcctctcccgatctgtcagaagctgccgtacgcctggaggcgctctgggatcatctggggaataatcaggtgctgtcggtaaacagattggtttacttttcattgctgaaaaaattgttccaggcaatgaacctctgccagatccccggacgtgcaggagcactgcttacgacgcttcttcgccatatatcgacaatcaacgggtttgacaatctgatggctcagccgttgttgtcagatgagcccctgacagcgctgatggatcattatcttgatactgatgctctggcagacgggctaccgctgtatgtgtcgctgtaccccacagaagggggcatgcaggatattattgactgcattcgtgctgaactgggtgtcggaaccacgaaaaacgccgtttttcagcatatccagagcctgccccgcggacagcagaaagaggctctgcttgcgtcagccgcgctgcccctgctgttccgtccccgtgaggttcaggggacaatgttcggtgatggtggtatgggaggatggcgaaatatgcagggaaatacccctgtgacgcctctggtcgatgccggatgcaatatggtgattgtgacgcatctgagtgacggttctttatgggatcgccaggcttttccggacaccacaatccttgagatccgtccccggaaaaggctgaaatatgcaggtgatggtggcaacagcggcggtctgctcagttttacatcggcacataccgacgcctggcgtcagcagggctatgaagacacgatgctggcgatggagcatatccggaaaccgctggcagcacgtcaggcactgacccggtcagaggcggtattgcagaaaagcctggatataacggaagaggcagatttggcactgagaaacgcgatggcccggattaaataa

SEQ ID NO: 464117 - DNA, 906 bp, Shigella boydii; identical to SEQ ID NO: 22494

SEQ ID NO: 464118 - DNA, 2397 bp, Shigella boydii
atgcacgaaaagaacatcgccctgctttgtgatgaagccgaccgacttttgcaactgaacattaatctgctccggcaaatggttgaggagccagatgtgttatctgacagtaagaacgaaaacagactgctttttgataaacagaaagcactgaaaagaattgaggagctggagggcgaacaaatcaaaaccgcccgcagggagatggtgctggctgttgtcggcacgatgaaagcaggcaaatcaaccaccatcaacgccattgtggggcaggaaattctgcctaaccgtaaccgccccatgacctctgtaccgacgctcatccgccacgttcccggaaaaactgagccggttctccatctggaacatattcagcctgtccgcaatttattaatcacactgcaggaaaaactcgccaccccggcaggacagcaggtcgcacagaccctgcagcaaaccggggatacccgcgaactgctggatattctgacggatgatggctggctcaaaaatgaataccacggggaggaggaaatctttaccggactggcatcgttaaacgatctggttcgtcttgctgcggcaatggggactgaatttccttttgatgaatacgcagaagtgcagaaactgccggtgatcgacgtggaattcagccatctggtggggatggatgcatgccagggaacactcacactgctggatacccccggccctaatgaggccggacaaccgcagatggaagtgatgatgcgggatcaactgcagaaagcctctgcggttctggctgtgatggattacacccagatgaactcaaaagcggatgaagacgtccgtaaagagcttaatgccattgctgacgtatcagccggccgcctgtttgtactggtcaataaatttgatgagaaagaccgcaatggcgatggggcagatgccgtacgccagaaagttccggcaatgctgaacagcgatgtgctgcccgcctcccgcgtttatcccggatcctcacgccaggcatacctggctaaccgtgcgcttcatgagttacggaaaaacggaacccttcctgttgatgaagcctgggtcgatgattttatcagaggtgccttcggttgcatgaaaaaagaatacgtctgtaaagacagtgaactggcaactgaaggggcgacagacctgtgggaaggctcacttatcgatcaactgataacggaagtcatacagagctcacattccagagctgcggcactggcggttgactctgccgccgcaaaactgatgcagaatgcagaaaatatcagtgaatacctgttgttacgccatcaggggctacagcaaagcattcagtcactgcagtcgcatatcaccagcctgcttgcggatatccgggaaatcgcggactgtcaggagcagatgaccactgatgtcagaatggccatggaggagatcgatactaaaacccgggaattactgacgggggtctgcacctcactggaagaggagctgaatgactatttcagaagcggtaaacgcaaagaacagcaaatgctggaggaagaagacgcagaacaacgaaggtctcagtccggattatgggggaaaatttctcaatggtccggtatcaacaaccagggccgggaggattacaggaaacgagattttgccccggacagccccgaaataaaattcagtgatcgcagggaagcccttgaactgatgacgcaaatcgaatcgaccgtgaccagcctgcaccgtgaggctgaagcacagttccggcctgagctggagaaaatcgtcagcgggattgaaacaggttttcgtggcacggccctgtacgccacagaaaacattgccggtcgcatcaatgcccgcctggaggatgagggctttaccgtaaaaatcagttttccggcagtcagccagttacagacccggctcgcggtaaaaataaatctgagtgcgcttatggaggaaagaacggagaccgtcacccgtcgccgtcggcagagtggcgtatggggaaccgtttgtcgatggtttggcaccagtgacctgggctgggaaaactatgacgaggatgtgagtcgcagcgtgatcaatatcaacaaggtcagagaggaagttatgtcactgacccgggcatatttcggggagctgcaggcatccattgagcaggatattaaccagcccgtccgccaggaaatcgatgcctttttctgcgcattcagggagaaagttgaacaactgcgtaacacgctgattcagagctctgaagatcataaacgcgatcagcaggcgcaggaacggcttaccgggcgacttcaggcattaaatgaaagggttcctgagctcattactgacagtaaggcgctgagggaagagctggagacaatgctgtga

SEQ ID NO: 464119 - DNA, 1152 bp, Shigella boydii
gtgggaaaggaactggatgatatctgcaccagctgtccgtatatcgatgctgtaaaacggcacaaacaacagctcggtgccatagaggaatatacacagtggttaaaaaaagaaccacgggcatcttatttttttctgttccagctgtatacccgcattcacaatacatttttctcccaaaagcaacaactcccgttcactcccggtggcactcactgcccggaacctgatgtcacccttcgggacttaacgctttcccctggctaccacagtgattatgcccctcaacccattccggagatggacagttctgctgttgttcccccaactaatgaaaacacctcgcctccggaagatactcccgacaacactccggccggaggcaataccggacaagcggaaaagaccagaaacgcaggactcacacccattcctgaaaaacgttcaggaatgcccccggaacatctgcggtttgccacggggtttccatcgcaaccgaagattgccggtcccagagaaaagccgatgcgcaccgtgcatccggataaaatctaccgtgaaattatatggttctgctccagttacctgctgaaatccggaccagaggctacgaggacgattatcaactcagtattctctgaatgggccagcataaacaatgattacccctcccccttttcgtgggtggacagcagggacagtgaacagtgtgactggttatggaacgccatgcaggtccggtgtgtgggaaccccgctgaatccccttaccccggagcagaaatactggtttgcctgcgccacgtttgataactgggagggctggaatgagcaacaggtacagtttttactggaaagtaatcccagacggaacagagcgaagtttacgcaggtctccttccaggcccccaggattcagcataaagcgattcttcttgatgagctgaaaagtgcccgggagcaacaaaaaaggcgtgatgaacgtgctgatggttccgtccctctgaaactgtccggaaaaatccacaaacagcttgaaagtattgcccgaagtcgtggtgtcctcccaaaaaaactgctgaatgaaatgattgagcaggcgtaccatgatttggtggcaaccaggcagaacagccaaatcgattccagataa

SEQ ID NO: 464120 - DNA, 384 bp, Shigella boydii; identical to SEQ ID NO: 18029

SEQ ID NO: 464121 - DNA, 420 bp, Shigella boydii
gtgctgggcccatgcccgccgaaaaatccacgatgttcacgtccgtacccgtcagccctgacggaggaggcgctgaaacggatcggcgagctgtatgccatcgagtcggagctcagaggtaaaagagcagaggaacggcaggcagtccggcaccaaaaagtgctgccgctgctggcgtcactggaggggtggctgcgggagaaacagaaaaccctctcaaggcactcagaactggcgaaggcgttcgggtatgcgctgaaccagtggccggcgctgacccgctatgcagaagatggctgggtggaggtggataataacattgccgaaaacgccctacgactggtcagtctggggagaaaaaactggctgtgtgtgtcacgaaggagaactgatagcggcaatatgaaaattgcagcataa

SEQ ID NO: 464122 - DNA, 582 bp, Shigella boydii
atgggttgtgtcttctgcaatgaatgtgatccccatcccttcgctccagacccattacagatctttcatcactactacgaatgggtccgcccctgtttcccgatacgtgccggaaacaggttctcacgttccctgagatggtctggcccgggatcctgctgccttaacaccggatgccgcgcagtcagtaagcaggtgtcttctgcgcttatcagaggacggctgtacggccccattttgacatcatctaagatttcgatgcttcatcggacagtttactttcgttcagcttcccgaaccccacgtgacagtagatctctgccttttcccgagtcgctcaccactacattccttagaatgaagcagcaccgggtcgtttggtcagtgttcctgcaaaccctgaccggagggcccacctccacccacctcagagcatggataacttatgctgcaattttcatattgccgctatcagttctccttcgtgacacacacagccagttttttctccccagactgaccagtcgtagggcgttttcggcaatgttattatccacctccacccagccatcttctgcatag

SEQ ID NO: 464123 - DNA, 1203 bp, Shigella boydii
atgttaaaagtggaaatgttatccaccggggatgaagtgttacacgggcaaatcgttgacactaacgctgcctggctggccgattttttctttcatcaggggctaccattatctcgccgcaatacggtgggggataaccttgatgacttagtcaccattcttcgcgaacgtagtcagcacgccgatgtgctgatcgttaacggcgggctgggaccgaccagcgatgatttaagcgcactcgccgctgcgacagcaaaaggtgaaggcctggtgctgcatgaagcctggctcaaagagatggaacgctatttccacgaacgtggacgagtaatggcaccgagcaaccgtaaacaagcggagctgcctgccagtgctgaatttatcaataacccggtaggcaccgcctgtggttttgccgtgcagcttaatcgttgcctgatgttctttactcccggcgtaccgtcagaatttaaggtgatggtcgagcacgaaatcctgccgcgcctgcgcgagcgtttttctttaccacagccgccggtttgtctgcgtttaactacctttggtcgttcggaaagcgatctggcacaaagcctggacactctacaactgccgccgggcgtaacaatgggctatcgctcttcaatgccgattatcgaactgaaactcaccggaccggcaagcgagcaacaggcgatggaaaaactgtggctggacgttaaacgtgttgccggacagagcgtgattttcgaaggcaccgaaggactgcccgcgcagatcagtcgcgaattgcaaaaccgccagttcagcctgacgttgagcgagcaattcaccggtggtttattggctttgcaactttctcgcgcaggtgctccattgctggcgtgtgaagtggttccttcacaggaagaaaacctggcgcaaactgcgcactggattacagaacggcgggccaaccattttgccgggctggcactggctgtttcgggtttcgagaacgaacatctcaactttgcgctagccacaccagacggcactttcgctctgcgtgtgtgtttcagcactacgcgctacagcctggctatccgtcaggaagtgtgcgcaatgatggcactgaatatgctgcgccgttggttaaacggccaggatatcgccagtgagcatggctggattgaggttattgagtccatgaccttatctgtctga

SEQ ID NO: 464124 - DNA, 1158 bp, Shigella boydii
atggcggaaggaaaagcaatgtcagaatttttgcctttttcgcgaccagcaatgggcgtggaggaactcgctgcagttaaagaggttctcgaatccggttggatcacaaccggtccgaagaatcaggcgcttgagcaagccttttgccagttgacgggaaatcagcatgccatcgcggtcagttcagccaccgccggaatgcatatcacgctaatggcgttggaaattggcaagggcgatgaagtgattacgccttccctgacctgggtttcaaccctcaatatgatttccttgttgggtgcaacgccggtaatggtggatgtcgaccgcgatacgctgatggtcacgcctgaagcgatcgagtcagccattacgccacgcactaaagccatcattccggtgcattatgccggtgcgccagcagatattgacgccattcgcgccattggcgaacgttacggcatcgcagttatcgaagatgctgcccatgccgtcggtacgtattacaaagggcgacatattggcgcaaaatgtaccgctattttttcatttcatgccattaaaaatattacctgtgcggaaggtggcctgattgtaactgataatgaaaaccttgcccgccagctacggatgctgaaatttcacggcctgggtgtcgatgcctatgacagacaaacctggggccgtgcaccgcaggctgaagtcttaacaccgggctataagtacaatctgaccgatattaacgccgcgattgccctgacacagttagcaaaattagagcacctcaacacccgtcggcgcgaaattgcccagcaatatcagcaagcactggcagctctcccctttcagccattaagccttcccgcctggccgcacgttcacgcctggcatctgtttattattcgtgtcgatgaacaacgttgtggtatcagtcgcgatgcgttgatggaagcgttaaaagaaagaggcattggtaccgggttacatttccgcgccgctcacacacaaaaatattatcgcgagcgttttcccacgctgtcgttaccgaataccgaatggaatagcgaacgcatctgttctttgccgctgttcccggatatgactaccgccgatgccgaccgtgtcatcacagcccttcagcaactcgcaggacaataa

SEQ ID NO: 464125 - DNA, 630 bp, Shigella boydii
atgaaaaccgtcgtttttgcctaccacgatatgggatgcctcggtattgaagctctgctggctgccggttacgaaattagcgccatttttacccataccgataatcccggtgaaaaagccttttatggttcggtggctcatctggcggcggaaagaggcattccggtttatgcgccggataacgttaatcatccgctgtgggtggaacgcattgcccaactgtcaccagaggtgattttctctttttattatcgccatcttatttgcgacgagattttgcagctcgctcccgcaggtgcatttaatctgcacggttcgctgttaccaaaatatcgtggtcgcgcgccgctgaactgggtgctggtgaacggtgaaacggaaacgggcgttacattgcaccgaatggtaaaacgtgccgatgctggggccattgtggcgcaactgcgcgttgccattgcgccagacgatatcgctattacgctgcatcataaattgtgccatgccgcgcgccagctactggaacagacattacccgccattaaacacggtaatattctggaaatcgcccagcgcgaaaacgaagccacctgttttggtcgcagaacgccggatgacagtttccttgaatga

SEQ ID NO: 464126 - DNA, 168 bp, Shigella boydii; identical to SEQ ID NO: 36728

SEQ ID NO: 464127 - DNA, 333 bp, Shigella boydii
atgaacccttatatttatcttggtggcgcaatacttgcagaggtcattggtacaaccttaatgaagttttcagaggggtttacacggttatggccctctgttggcacaattatttgctattatgcatcattttggttattagctcagacactggcttatatacctacagggattgcttatgctatctggtcaggagtcggtatcgttctgattagtttgctttcctggggattttttggccaacgactggacttgccagccatcataggcatgatgttgatttgtgccggtgtgttagtcattaacttgttgtcacgaagcgcaccgcattaa

SEQ ID NO: 464128 - DNA, 411 bp, Shigella boydii
atgacaatatcgacaacttccacgccgcatgatgcggtatttaaatcttttttacgccatccagacaccgcgcgggattttattgatattcatcttcccgcgccgctgcgcaaattgtgtgatttaacgacgcttaaactggaaccaaacagttttattgatgaagacctgcggcaatattattccgacctcttgtggtctgtgaaaacgcaggagggagtgggttatatttatgtagtgatagagcaccaaagtaagccggaagaattaatggcttttcgcatgatgcgttattccattgcggcaatgcaaaaccatcttgatgcgggcggtaatgactccaacttactgatagtgttttatgttcagataatgcccgatgaccttgtcatgcagctccaccgattttga

SEQ ID NO: 464129 - DNA, 129 bp, Shigella boydii
atgacgacttttaccagagagcagttaatagctcacgcagaggagactattgaagcacagagactgtacataccgggcacaatcgaccatgacatcatccgcacatataagattagactggccccctga

SEQ ID NO: 464130 - DNA, 168 bp, Shigella boydii; identical to SEQ ID NO: 9294

SEQ ID NO: 464131 - DNA, 264 bp, Shigella boydii; identical to SEQ ID NO: 9295

SEQ ID NO: 464132 - DNA, 219 bp, Shigella boydii; identical to SEQ ID NO: 9296

SEQ ID NO: 464133 - DNA, 216 bp, Shigella boydii; identical to SEQ ID NO: 9297

SEQ ID NO: 464134 - DNA, 360 bp, Shigella boydii
atgagcgagattaattatcaggaagggcatgaaaaggcagggcaggcaaaaccagtggcatggcgatatcgctacgtgaaaaaaggcgttacagactttcaggggaagcagtgggttggtgactggaaatatgtcccgacaaaagaggattgtaacgacagaccaaactatgaaattcaggcgttattcacggccccgccagcttcggtgacatcagaaggactggttaaagctgtgcgcttttatgaacaggtacggcgtgaggatccgccagttgaaaccggagcatggaaagacgctattgactgggtactcaaggaggcctgcctggttgtaaacacgggcatcaaaggaggctga

SEQ ID NO: 464135 - DNA, 177 bp, Shigella boydii; identical to SEQ ID NO: 16185

SEQ ID NO: 464136 - DNA, 183 bp, Shigella boydii; identical to SEQ ID NO: 9298

SEQ ID NO: 464137 - DNA, 357 bp, Shigella boydii
atggaaataaaaccagaggatgagttaagcaatatcgttttatttccggtaaaagaggatgaccctcgtaatcaggttaattttctttatgagccatcggaaagaccatattgtcatcacgcctctgttcgggttgacgaaaaagagcgtcaggtccgctgtaaaatctgcggtgcagttgtggagccatttgactggatgctctctgtggcgaaaagagaaaccagactggcagatgatgtaaggctattgcgccaggaggaacaggaaaggcggaaaaatatagaaaagttaattcagattgagcgtaacgcgaaagcgcggatatgcagggcgacaaaatccagaactgaataa

SEQ ID NO: 464138 - DNA, 462 bp, Shigella boydii
atgagagaggttaactatgaggcgcttcgtgaggcagcacaaaactatcagtcgacgctggcgtggtatcaggctatcccggacagcccaaatgctgaacgggattgtgatgcggctcttgctgcgtttaagcgtcacatccgtcatcgggaagcggatattatcgctgatttgctggatggactggaagaagcaaaatcacaactcaaagagcagcgtgagtattacgaaggcgttatctctgatgggagcaagcgtattgctgaactggaagcgcgggaagttcaattaccgactcgctacgaccttcgatatggacacccgataaatgcagatgagcgacatgtcatgatacctaaagaaaatggcagttggctttacctgattgacctggaacacgcattacgcgtcgctggcattcgcatcaaaggagaggagcatggaaataaaaccagaggatga

SEQ ID NO: 464139 - DNA, 297 bp, Shigella boydii; identical to SEQ ID NO: 8064

SEQ ID NO: 464140 - DNA, 393 bp, Shigella boydii; identical to SEQ ID NO: 8063

SEQ ID NO: 464141 - DNA, 423 bp, Shigella boydii; identical to SEQ ID NO: 8048

SEQ ID NO: 464142 - DNA, 1041 bp, Shigella boydii
atgagtatcgatgcactacgatgggctaaaaaggtgaaaaccggcagttcatccagtaagtctgtattgacctggcttgctgatatgtgcggtgccgatttgtgtgcatacccgtctgtatctgcactggcagaagtaacggaactaaacaaaaagactgtgcaggacagcttacgacacctgatggagattgggttaattgttgataccggtgagagaaaaggcagaacaaagcaaattgtggtgtaccgacttatcggtgtagaagaaagtgttgccgagcctgaatacacccaaaaacgggagtctttaaaggtgggtaaaattggtgctgttaataaaaacagtaccgaaaatggttatgtttcagcacaaaacagacccaaaaacggaactcttagctgcatggaaaataaccaaagacacccaaattttccatcaaagacacccaaaaacggatcacggaacccaaaggaacccaaagatctaaaccccacacataacgcacgcgagagtgctccgaccagtgagcaggaagttttgtcgttacaggcagcaccccttgtattcctggatggcctgagcgaacccatcggaaaatttccgatgaccgatagctggtatccgtcacgggattttcgacgacgggctgcgttgtgggggatggctttgccggagacagaatttacacctgctgaacttgccgccttccgggactactgggcagcggaggggaaagtgtttacgcagattcagtgggagcagaaattcgcccgtcacgtaaatcacgtcagggcgcaggttaaaccagtcagcaagggggtaaaccatgcagcagcaccaggtggcaccgcatcacgggcagttcaggaaattcgggcagcacgtgagcagtgggaacgtgaaaacggatttatcagcgacggaaacggtctggaagctgtgggaactcatgggggaggtttattcgaaccgctggacccagaagaacggggccgcaccttcgaagctctggattgcacagattggcgcgatgactga

SEQ ID NO: 464143 - DNA, 375 bp, Shigella boydii
atggaatttaaagatttaccagtaccattccaggaaatggcatcgaatgtggttcgctctcaactggcgactcttgacctgagtaccgtagaaaaagaaaccatcgacaatatatccggtaacgtacgccgagcctttatcgggctgtacgaagagaagcagctctctgataaccaggatttacatgaaaaatacttcctggatctaatggacatcattgataaggagtttggcttgttaatgaaaaagaaagggattcgaatagaaccccttgaaaatcattttacagcaagcagtattaattcctgtgatttaaagcatcacacatccgatgggaaagttgaatcaaacaacaaaatatcaattaatcattaa

SEQ ID NO: 464144 - DNA, 189 bp, Shigella boydii; identical to SEQ ID NO: 23121

SEQ ID NO: 464145 - DNA, 360 bp, Shigella boydii
atgcaacgaatcattttaatcatcattggctggctggctggcggtagtgctgggtacgctgggcgtggtattaccggtattaccgacgacgccgtttatcctgctggcggcctggtgctttgcccgttcttccccgcgctttcacgcctggttgctgtaccgctgatggtttggcagctatctacgtttctggcagaaacatcatgcgatgccgcgcggcgtcaaaccgcgggcgattttgcttattttgctcacgtttgccatttctctgtggttcgtccagatgccatgggtgcgcatcatgttgctggtaattctcgcctgtttgcttttctatatgtggcgaattccggtgattga

SEQ ID NO: 464146 - DNA, 870 bp, Shigella boydii
ttgaccggttaccaaaagctttctaatggaaagacttcttccataaaagggcgctcagtggtcacggtaaactactatatgacaaccatagctggaatgtttcaatttgcaacagataatggttatacctcaggaaacccatttaacggtctggctcccttaaaaaagtccaaggtaaaaccagatcctctcacccgtgacgaatttattcgttttattgaggcttgccgtcatcaacaaacaaaaaacctgtggattctcgctgtatacacgggtattcgtcacggggagttggtatcgctggcatgggaagatatagaccttaaagcaaggactataaccatccgtagaaattatacaaaacttggcgaattcactccaccaaaaaccgatgcaggcaccggaaggacaattcatctggttcaaccagctattgatgctcttaaaagccaggcggaaatgaccatgcttggaaagcaacattctgtagaggtgaagcagagggaatatgggagaactgctgtgcataaatgcacttttgtttttagtcctcaggtaacaaaacagcagcagttgtccggacctcactacaaggttgactccatcagggagtcatggacaagtatcttaaaacgcgcaggtctgagacacagaaaatcgtaccaatccaggcatacttatgcatgctggtcacttgccgcaggagctaatcctagttttatcgcaagccagatgggccacacaaacgcacaaatggtattcaatgtttacggagcatggatgaaagacaacaatcacgaacagatagaactccttaacaaaagactatctgaaagtgtcccatgtatgccccataagaaagctgggtaa

SEQ ID NO: 464147 - DNA, 381 bp, Shigella boydii
atgagtaacgcatcatacccgacaggcgttgaaaaacatggaggatcactccgtatatggtttcactataatggcaaacgtgtcagagaaaacctcggtgttcctgacacagccaaaaaccggaagatcgctggtgaacttcgcacttccgtttgttttgcaatcagaatggggagtttcgactacgccgcgcagttccctaattcccctaacctgaaacactttggtctgggaaaaagagagataaccgttaaggcactttcggaaaaatggttggaccttaagaaaattgagatttgtgcgaatgcacttaaccgttaccagtcagtaattaaaaacatgttaccaatgttaggtgaaaaaaactggtttcatccataa

SEQ ID NO: 464148 - DNA, 255 bp, Shigella boydii
atgcagacaatcatctatcagataacccccagcaaatggtgtacggagagagtcctcattgcatcaacagggctaaagcctggcaccattgagcgggcaagaagaaagtcatggatgcagggaaaagaataccgccattacgctgtagaaggtgatccggggcactacagtgaatgcctgtacaacatcgaagaaattatgcgatggatcgaaaaccagaaacaaccaggtgccaaaaatgcaagttccggttaa

SEQ ID NO: 464149 - DNA, 135 bp, Shigella boydii
atgaataaagcatttgaacggtgggtccaccagcgttacggcaatcgctatgacctgacgcgagatgttgacggcttctactgtcgtgaagttgtgaagcgaatgtttgacgtgtggtgccactgccgtggatga

SEQ ID NO: 464150 - DNA, 264 bp, Shigella boydii
atggccactttaacaaaaaaagaacgggcatggttgaatgaattacaggacgttcttgatcgctgtccattaccaaaaaaaattggtttttacaccattggcgataaaaccatttacctgtatgacctacgccgcatggatgaaatcatggaggctcttgataatcgttcgtcgatggattggtgtgttgctgtccatgatatgaatgcagggtttgatgaaaagattttgttcccctcatcagttgaaagcactgcgggttaa

SEQ ID NO: 464151 - DNA, 336 bp, Shigella boydii
atgttctatttcccgttcatcttcttcgatcttttcttcggcgcgggccagtgcagagcgcaggaaggcctccgtctcttcaaccagactcagttgctggtctttctgacggagctggcattccagttctgcaatgcgaatgaggtatttttgattcatggccgtttttataatccggccatgacatttttacaacattgtcagtgcgttaaggcgggatgtttttggctgacgccagtccagcttatcgaggagcattgccagttgcgagcgggtaatggataccttgccgtcacgcacagcaggccagataaactggccttcctccagggttga

SEQ ID NO: 464152 - DNA, 459 bp, Shigella boydii
atgcaaatagtcatgtttgacaggcagtcaatatttattcatggaatgaaaatcagtttacagcagcgtattctaggggtgagtattcagggggccagtcaggcagacgagttatggcaaaagctggaaagttaccctgaagccttagttatgctcgatggcgatcaggatggtgagttttgctactggttgctgcaaaaaaccgtggtgcagtttcctgaggttaaggtgttaatcacggcgacggattgcaataaacggtggttacaggaagttatccattttaatgtgctggccattgtgcctcgtgattcaaccctggaggaaggccagtttatctggcctgctgtgcgtgacggcaaggtatccattacccgctcgcaactggcaatgctcctcgataagctggactggcgtcagccaaaaacatcccgccttaacgcactgacaatgttgtaa

SEQ ID NO: 464153 - DNA, 1008 bp, Shigella boydii
atgaaaacaatcactttaaacgacaaccatattgcacatttaaacgccaaaaacactacaaaactggaatatttaaacttaagcaataacaatttactgccaaccaatgacattgatcaactaatatcatcaaaacatctttggcatgtattagttaacggcatcaacaatgatccacttgcacaaatgcagtactggactgcagtaagaaatataattgatgacactaatgaagtgaccattgatttatcaggacttaatttaaccactcaaccaccagggctgcaaaacttcacctctatcaatcttgataataaccaactcacacattttgatgcaaccaactacgatagactcgtaaagctaagtctgaatagtaatgctcttgagtctataaattttcctcaaggcagaaatgtaagtattacacatatatctatgaataataatgctctcagaaatattgatatagataggctttcatcagttacttattttagtgcggcacataatcaactagagtttgtgcaattagaatcttgcgaatggctgcaatacctgaatctcagccataatcaattaactgatattgttgcaggtaataaaaatgaactcttactgctggatctatcccataataaactaacaagtttacacaatgacttatttcccaacttgaatacgttacttattaacaacaatttgctttctgaaattaaaatattctatagcaacttctgcaatgttcagacattaaacgctgctaacaaccagttgaaatatataaatcttgatttcctgacttatcttccatctatcaaaagtttaagactggacaataataaaataacccacattaatactaataatacatccgatattggaactttattccccataataaaacagagcaaaaacttaaattttttaaatgtttctgggaagaacaattgccctactatgcagctcatgttatttaatttgttttccccagcacttaagcggtaa

SEQ ID NO: 464154 - DNA, 807 bp, Shigella boydii
ttgtccgcacatggacacgaaccaacgatcaacctctatcgccgtgcgcgtgatctgaaaggcattaaaaagatcctgattgcctctggtgtgcgttatgacatcgccgtggaagatccgcgctatatcaaagaactggcgacccatcacgtcggcggttatctgaagattgccccggaacataccgaagaagggccgttatcgaagatgatgaagccgggcatgggcagctatgaccgctttaaagagctgttcgatacttactcaaaacaggcaggtaaagagcagtatctgatcccctatttcatctccgcgcaccccggtacgcgtgatgaagatatggtgaatctggcgctatggctgaaaaagcatcgtttccgtctcgaccaggtacagaacttctacccatcgccgctggcgaactcaaccaccatgtattacaccgggaaaaactcgctggcgaagattggttataagagtgaagacgtcttcgtaccgaagggcgacaagcagcgtcgtttgcataaagcgttgttgcgttaccacgatccggcaaactggccgttaatccgccaggcgctggaagcgatgggtaaaaagcatctgattggtagccgtcgcgattgcttagtgcctgcgccaaccattgaagagatgcgtgaagctcgtcgccagaaccgcaatacccgtccggcgttgacgaaacatacgccgatggcgacccagcgtcagacgcctgctacggcaaaaaaaagcgtcgtctacgcaatctcgtccggtgaatgctggtgcgaagaaacggcctaa

SEQ ID NO: 464155 - DNA, 177 bp, Shigella boydii
atgccgctggttggcgcgctgacggtgggtgtgctgtgggttaacctcgagtcaacgtcactgacactcggtctggtatgggcttcgttaggcggcgcatatttatggtatctgatccgccgctatcgcaaagtgccgttgtatgatggtgacagaacgccggtaagtgaaacgtaa

SEQ ID NO: 464156 - DNA, 375 bp, Shigella boydii
atgacgctaagcagtgagattattggtgtccagacgctaaaagcgggtgagcgtgtgggctacggcggtcgctatactgcgcgcgatgaacagcgaatcggcattgtcgccgcagggtacgccgacggttatccgcgccacgcgcctaccggtacccctgttttagtggacggcgtgcgcaccatgacggtggggaccgtctcgatggatatgctggcggtcgatttaacgccttgcccgcaggcgggtattggtacgccggttgagctgtggggcaaggagatcaaaattgatgatgtcgccgccgctgccggaacggtgggctatgagttgatgtgcgcgctggcgctacgcgtcccggttgtgacggtgtaa

SEQ ID NO: 464157 - DNA, 135 bp, Shigella boydii
atgataccggagttaatcatttcaggggaagaagcgaacggcgagttcttgatgctggttccgggaaagatgctgttttgcagcttttgcgtgatgcttatgaagcaagtacgcaaaattgcgtcggttgaataa

SEQ ID NO: 464158 - DNA, 1290 bp, Shigella boydii
atggcgcatttcaatccggacatcgccaaagagaatatccgcgcggtcttctcctggcagatccagcctggcgaccgcgtgcgtccgcaggatgtgggctttgtccccgacctgatagcgtggaaccttagccccgagcgtggtggcgatggcggcaactggaacgaacgtaataccaaacccagccttgccgcctggtcggtgatagaagtgtacaacgtcacccaggataaagcctggttggcagagatgtacccgaaactggtggcctatcacgactggtggttacgtaaccgcgatcacaacggcaacggcgtgccggaatatggcgcgacccgcgacaaagcccacaacactgagagcggcgagatgctgtttgcggtgaagaaaggcaacaaagaagagacgcagtctgggctgaacaactacgcccgcgtggtggagaaaggccagtacgacagtctggaaattccggcacaggtcgctgcgtcgtgggaatcggggcgtgatgatgccgccgtctttggttttatcgacaaagaacagttggataaatatgtcgctaatggtggcaaacgtagcgactggacggtgaaattcgccgaaaaccgcagtcaggacggaacgttgctgggctactcgctattgcaggagtcggtggatcaggccagctatatgtacagcgataaccattatctggcggagatggcaaccatcctcggtaagccagaagaggccaaacgctatcgccagttggcacagcagctcgcggactacatcaacacctgtatgttcgacccgactacccagttctactatgacgtacgtattgaagataaaccactggcgaacggctgcgcgggcaaaccgattgttgagcgcggtaaagggccggaaggctggtcgccgctgtttaacggtgcggcaacgcaggccaatgccgacgcggtggtgaaggtgatgctcgatcctaaagagttcaacacctttgtcccgctgggaacggcggcgttaaccaatccggcttttggcgctgatatctactggcgcgggcgcgtatgggtggatcagttctggtttgctctgaaagggatggagcgttacggttatcgtgatgatgccctgaagctggcggatacgttcttccggcacgccaaaggattaaccgccaatggcccaattcaggagaattacaacccgctgactggcgcgcagcaaggcgcaccaaatttctcctggagtgccgcgcatttgtatatgttgtataacgattttttccgtaagcaataa

SEQ ID NO: 464159 - DNA, 1200 bp, Shigella boydii
atgagctacccgtcgctgttcgccccgctggatttaggttttaccacgttaaaaaaccgcgtgttgatgggctcaatgcacaccgggctggaggaatacccggacggtgccgagcggctggcagcgttttatgccgaacgcgcccgtcacggcgtggcgctgattgtcagcggcggcattgcaccagatttaacaggcgttggcatggaaggtggcgcaatgctcaacgacgcccgccagatcccacaccatcgcaccattaccgaagcggtacatcaggaaggcggcaaaatagccctgcaaattttgcataccgggcgctacagctaccaaccgcatctggtcgctccctccgcattgcaggcccccatcaaccgtttcgttcctcacgaactcacccatgaagagatcctgcaactgatcgacgatttcgcccactgcgcgcaactggcacgggaggcaggatacgacggtgtagaggtaatggggtccgaagggtatttgatcaacgaatttctgacgctgcacaccaatcagcgtagtgaccagtggggcggcgattaccgcaaccggatgcgatttgccgtagaagtagtgcgtgcggtgcgcgaacgcgtcggcaacgacttcattattatctaccgactgtcgatgctcgacctggtcgaagacggcgggacttttgccgaaacggtagagctggcgcaggccattgaagcggcgggcgcgaccattatcaacaccggcattggctggcatgaagcacgtattccgaccattgccacgcccgtgccgcgcggcgcatttagctgggtcacgcgcaaactgaaaggccacgtctcgctgccgctggtaaccaccaaccggattaacgatccgcaggttgccgacgatattctctcgcgcggcgatgccgatatggtatcgatggcacgaccgtttcttgctgatgcggaactgctgtcaaaagcgcaatcggggcgagccgatgagatcaacacctgcattggctgcaatcaggcctgcctcgatcagatcttcgttggcaaagtcacctcgtgcctggtgaatcctcgcgcctgccacgaaaccaaaatgccaatccttcctgccgtgcagaaaaaaatctggcggtggtcggtgcgggacctgctgggctggcgtttgccattaacgcggcggcgcgtgggcatcaggtaa

SEQ ID NO: 464160 - DNA, 1449 bp, Shigella boydii
gtgagtgcacaacattccgggtgtgcggaatacccggttacctcttcttcaggagatcgtctctacaacatctttaccgtgttttttaaccaggtcatgaccaatgccccgttgttgctgggtattgtgacctgtctgggctacatcctactgcgcaaaagtgtcagcgttattattaaaggcacgattaaaaccataattggtttcatgttgttgcaggcagggtccggcatcctcaccagcaccttcaaaccggtggtggcgaaaatgtccgaagtctacggcattaacggcgcaatttccgatacttacgcgtcgatgatggcaaccatcgaccgcatgggcgatgcctatagctgggtaggttacgcggtgttgttagcgctggcgctgaacatctgttacgtgctgctgcgtcgcattaccggtattcgtaccatcatgctgactggtcatatcatgttccagcaggcggggctgattgccgttacgttgttcattttcggctactccatgtggacaaccattatctgcacggcgattctggtttcgctctactggggcattacctccaacatgatgtacaagccgactcaggaagtgacggacggctgcggtttctccatcggtcaccagcaacagtttgcatcatggattgcctataaagttgcgccgttcctcggcaaaaaagaggaaagcgttgaagacctcaaactgccaggctggctgaatattttccacgacaacatcgtctccacggcgattgtgatgaccatcttctttggtgccattctgctctccttcggtatcgacaccgtgcaggcgatggcaggcaaagtgaactggacggtgtacatcctgcaaactggtttctccttcgcggtggcgatcttcatcatcactcagggcgtgcgcatgtttgtggcggaactctctgaagcatttaacggtatctcccagcgcctgatccctggtgcggttctggcgattgactgtgcggctatctatagcttcgcgccgaacgccgtggtttggggctttatgtggggcaccatcggtcagctgattgcggttggcatcctggtcgcctgcggttcctcgatcctgattattcccggctttatcccgatgttcttctccaacgccaccatcggcgtgttcgctaaccacttcggcggctggcgtgcggcgctgaagatatgtctggtgatggggatgattgaaatctttggctgcgtctgggcggtgaaactcaccggtatgagcgcctggatgggcatggcggactggtcgattctggcaccgccgatgatgcagggcttcttctccatcggtatcgcctttatggccgtcatcattgtaattgcactggcttatatgttcttcgctggccgcgcactgcgcgcagaagaagatgcagaaaaacaactggcagaacagtctgcttaa

SEQ ID NO: 464161 - DNA, 339 bp, Shigella boydii
atgcatcatattaaaacagccgcggatcttaattgttttttaaattcaatggttgctgtttcgcaaccaactgttgataaaattatttttggtgctgaggcgacacttattaataaaattgggacctgctggattgcctcaatggatgttttaagaaaggctgtttttgaaggtgtcaatatcattattacacatgagactacattttattcttatgctgatctggagggtgacgatcttgagttttcatgggccagaaaaataatggattatactcgcggtgaactcagttatttaaaaataattgagcaaaaaaaggagtttttgcataaaaaataa

SEQ ID NO: 464162 - DNA, 261 bp, Shigella boydii
atgattaaaatggcggaacatctgaaaggttactggccgaatcaactgagtttctcagaatcatgcggaatggtgatgagaatgctgatgacattgcagggcgcttcaccgggacgtataccggagctgatgcgcgatcttgcaagtatgggacaacttgtgaaattaccgacgagaaggggaagggccttcccgagagtggtaaaggagaggccctggaaataccccacagccccgaaaaagagccagttagttgcttaa

SEQ ID NO: 464163 - DNA, 582 bp, Shigella boydii
atgaagcaggtaggccacacccgacacatcgaacggcggcgcaccaatctcaccagtcacccattcgaggttatccggttcaaagtagctaagtatctcttttttgcggctggtcattctcatagctggcaggttccttattgtgggatagcactatcatacaataaggcgcaaaagataagaggccagaacagcaagcatgagagcataaaacgagcagccaaagacagcgcctcaaaataccgtgtacacaagggtatacctactgagaaaacgcattacaagaaacacagcaaccacgggcgtttaaagccactactcaataaacagattcaactcgtaacgccaattcttacttttcagccttcacaaatgccgcccactcaaacagagcggcatttttcttccccgcaacttcaattctgttttgcgtgcctgctccagattttgcgatgtttttttgcccagcacactgagaacgtgagatactcacaactgtatataaatacagttacagatttactttctttgcaatcgatatcacatggagtgggcaatgaacgaacatcatcaaccttttga

SEQ ID NO: 464164 - DNA, 1245 bp, Shigella boydii
atgattcagtcaacacgtatttccatggggttattctttaaatattttttatcgttaacgaaaattgatcttggtcaaatctatatatctctgccatcaataaaatccagcactcacattgctctcctttttatggtttctatgggtacacaaaaattaaaagctcaaagcttttttattttcagtttattgctgacattaattttattttgcattactaccttatataacgaaaacacaaatgtaaaactcatcccacagatgaattacctgatggttgttgtggctttgtttttccttaacgccgtcatttttcttttcatgttaatgaaatatttcactaacaaacaaattttaccaacactcattttaagccttgcattcttaagtggccttatctatttagttgaaaccattgtgattatccataaaccaattaacggcagtacactgatccagacaaagtcgaatgatgtttctattttctatattttccgccaactcagttttatttgtttaacctcgctggcactcttttgttatggaaaagacaacatccttgacaacaataagaaaaaaacgggaatcctgttgctggcgttgattccttttttagtttttccccttctggcacacaatctgagcagttataacgctgactattctttgtatgtcgtcgactactgtccggacaaccatactgcgaccaggggaatcaactatacaaaaatattggtttgtctgtgggcatttttactgttctttattatcatgcgtacacgattagccagcgaactatggccgttaatagcattattatgtctggcatcgctatgctgcaacttacttctactgactctggatgagtataattacaccatctggtatatcagtcgcgggattgaagtttccagtaaactgtttgttgtgtcttttctgatttataacatttttcaggagctgcaactctccagcaaactggcagttcatgatgtgctgaccaatatttataatcggcgctactttttcaacagcgtagagtcattattgtcgcgacctgttgttaaggacttctgtgtcatgctggttgatattaatcagttcaaacgcatcaatgcccaatggggacatcgtgtgggtgataaagtgctggtttcaattgtcggtaatgactccaacttattgatagttttttatgttcagataatgcccgatgactttgtcatgcagctccaccgattttga

SEQ ID NO: 464165 - DNA, 447 bp, Shigella boydii
atgcgagggattcagtttattactgcggttggattaatttctgaactgggtgatctgacccgttttgaacatccacgacaactgatgtcatggtttggtatcacgccatcagaatattcatcgggtggaagcagacatcagggcagcattaccaaagccggaaacagctatgccagaaagctattggtcgaggcagcgtggagttaccgtcatccggcacgcatcagtccggcaatacaaaaaaggcaggaaaatttaccccgccccgtcattgacagagcatgggatgctcaactcaggctttgtaagaggtatcgaaaacttcaggccaaaggaaagaatgtcaatattacaattgttgctgttgcacgtgagctggcgggttttatctgggatatgggccgaatagcaatgtctgtcgcacaacaaccacaatgtcacaaataa

SEQ ID NO: 464166 - DNA, 798 bp, Shigella boydii
atgaaactgacaacacatcatctacggacaggggccgcattattgctggccggaattctgctggcaggttgcgaccagagtagcagcgatgcaaaacacattaaagttggcgttataaatggcgcagaacaagatgtcgcggaagtcgctaaaaaggtggcaaaagagaaatatggcctcgatgttgaactggtaggatttagcggttcgttgctaccgaacgatgcgacaaatcatggcgcacttgatgcgaatgtcttccagcatcgaccctttcttgaacaagataatcaggcgcatggttataaactggtagcggtgggaaatacgtttgtcttccctgtggcgggttattccaaaaaaatcacaaccgtggcgcaaataaaagaaggcgcgacagtggcgatccccaacgacccgaccaaccttggtcgcgcacttttactgttgcaaaaagagaagctaattactctgaaagagggaaaagggttattacataccgcgctggatataaccgataatcctcgtcatttgcagattatggaactcgagggggcgcagcttccgcgcgtactggatgatcccaaagttgatgtagcgattatcagcaccacttacattcagcagacagggctttctccggtgcacgacagcgtatttattgaagataagaattcgccgtatgtgaatattttggtggcacgggaagataataagggtaatgactccaacttattgatagtgttttatgttcagataatgcccgatgactttgtcatgcagctccaccgattttga

SEQ ID NO: 464167 - DNA, 1227 bp, Shigella boydii
atgaataattccattaaccataaatttcatcacattagccgggctgaataccaggaattgttagccgtttcccgtggcgacgctgttgccgattatattattgataatgtctctattctcgacctgatcaatggcggagaaatttccggcccaattgtgattaaaggacgttacattgccggtgttggcgcagaatacgctgatgctccggctttgcagcggattgatgctcgcggcgcaacggcggtgccagggtttattgatgctcacctgcatattgaatccagcatgatgacgccggtcacctttgaaaccgctaccctgccgcgcggcctgacgaccgttatttgcgaccctcatgaaatcgtcaacgtgatgggagaagccggattcgcctggtttgcccgctgtgccgaacaggcaaggcaaaaccagtacttacaggtcagctcttgcgtacccgccctggaaggctgcgatgttaacggtgccagttttacccttgaacagatgctcgcctggcgggaccatccgcaggttaccggccttgcagaaatgatggactaccctggcgtaattagcgggcagaatgcgctgctcgataaactggatgcatttcgccacctgacgctggacggtcactgcccgggtttgggtggtaaagaacttaacgcctatattactgcgggtattgaaaactgccacgaaagttatcagctggaagaaggacgccggaaattacaactcggcatgtcgttgatgatccgcgaagggtccgctgcccgcaatctcaacgcgctggcaccgttgatcaacgaatttaacagcccgcaatgcatgctctgtaccgatgaccgtaacccgtgggagatcgcccatgaaggacacatcgatgccttaattcgccgcctgatcgaacaatacaatgtgccgctgcatgtggcatatcgcgtcgccagctggtcgacggcgcgccactttggtctgaatcacctcggcttactggcacccggcaagcaggccgatatcgtcctgttgagcgatgcgcgtaaggtcacggtgcagcaggtactggtgaaaggcgagccgattgatgcgcaaaccttacaggcggaagagtcggcgagactggcacaatccgccagccagtttccgccagcgactttgccctgcaatttacgcccggaaaacgctatcgggtcattgacgtcatccataacgaattga

SEQ ID NO: 464168 - DNA, 984 bp, Shigella boydii
atggcaacacgaattgaatttcacaagcacggtggcccggaagtacttcaagccgtagagttcactcctgccgatccggcagagaatgaaatccaggtcgaaaataaagccatcggcatcaattttatcgacacgtatatccgcagcggcctttacccgccgccatcactacccagcggatcaggtaccgaagcggcaggcatcgtgagtaaagtcggcagtggtgtaaagcatattaaggcaggcgatcgtgtagtctatgcgcagtcggcgttaggcgcttacagctctgtgcataacattaatgcggataaagcggcgattctgcctgcggctatttcttttgagcaagctgcagcatctttcctgaaaggcttaacggtttattatctgctgcgcaaaacctatgaaattaaacccgatgaacagttcctgttccacgcagcggctggcggcgttggcttgattgcctgccagtgggcaaaagctctgggcgcgaaacttatcggcaccgtaggaaccgcgcaaaaagcgcagagcgcgctaaaagccggcgcgtggcaggttattaactatcgtgaagagaatctggtcgagcgattgaaagagatcaccggcggtaagaaagtgcgcgtagtgtacgattccgtgggcagagacacctgggaacggtcgctggattgcctgcaacgccgcggcctaatggtcagttttggcaactcatcaggtgcggttaccggtgtgaacttaggcattctcaatcaaaaaggctcgttgtatgtgacacgcccttccctgcaaggctatatcaccacgcgggaggaattaaccgaggccagtaatgaactgttctctttgattgccagcggtgtgattaaggtcgatgtcgccgagcagcagaaatatccgctgaaggatgcgcagcgtgcgcatgagattctggaaagccgggcgacgcaaggttccagcctgctgattccataa

SEQ ID NO: 464169 - DNA, 642 bp, Shigella boydii
atgcaggaaatctatcgttttatcgacgatgcgattgaagccgatcgccaacgttataccgatattgccgatcaaatctgggatcatccagaaacacgttttgaagagttctggtcagcggagcatctggcttcggcgctggaatctgcaggcttcaccgttacccgcaacgtaggctatatcccaaatgcctttattgcttcgtttggtcaaggcaaaccggttatcgccctgctgggagaatatgacgccctggcaggtttaagtcagcaagcaggttgcgcgcaacctacatccgtgacgcccggtgaaaatggtcacggttgcggacacaatttgctgggaaccgccgcctttgccgctgcaatagccgtcaagaaatggctggaacaatatgggcaaggcggcacggtgcgcttttatggttgtcctggcgaagaaggcggctcggtaaaacgttcatggttcgcgagggggtatttgatgatgtggatgcggcactcacctggcacccggaagcctttgccggtatgttcaatacccgcacgctggcaaacattcaggcatcatggcgctttaaagggatcgcagcacatgccgcgaattcccctcatttgggacgcagcgcccttgatgccgtaa

SEQ ID NO: 464170 - DNA, 750 bp, Shigella boydii
gtgcttaatgacggcggcacactcgatgtgcgggagaaaggcagcgcaacggggatacagcagagtagccagggcgctttggttgcaaccaccagggcgacgcgggtcacaggaacacgcgcggatggcgtcgcgttcagcatcgagcagggtgcggcgaacaatatcctgctggcaaatggcggcgtgttaaccgtggagtcagacacctcttctgacaaaacacaggtcaatacgggcggacgggagatcgtcaaaacaaaagccactgcgacaggcacgacgctcaccggcggcgaacaaatcgtcgagggggtggcgaatgagacaacgattaacgacggcggaatacaaacagtttcagctaacggagaggcaataaaaacaaagatcaatgaaggcggtacgctgacagttaacgataatggcaaagcgacagataccgtccagaacagcggtgccactctccagacgagcacggctaacggtattgaaatcagcggtactcaccagtacggcactttttccatttccggcaatttagcgaccaatatgttgctggaaaatggcggtaatttattggtattagcaggtaccgaagctcgcgactccacggttggcagcggtggagccgccaacggcagttatcgcagcaacgggctgggcggtcacattgaaaccgggatgcgatttaccgatggtaactggaacctgacgccgtatgcatcgttaacgggggttcaccgctga

SEQ ID NO: 464171 - DNA, 840 bp, Shigella boydii
atgacgcaatactcctctctccttcgtggtcttgcagcgggttctgcatttttattcctttttgccccaacggcattcgcggccgaacaaaccgttgaagcgccgagcgtggatgcgcgtgcatggattttaatggattacgccagcggtaaagtgctggcagaaggcaatgcggatgagaaactggatcccgcgagcctgactaaaatcatgaccagctatgtggttgggcaggcgcttaaggccgataagattaaactcaccgatatggtgacggtcggtaaagatgcctgggcgacgggaaatccggcactgcgtggttcatcggtaatgttcctcaaaccgggcgatcaggtttcggtggcagacttgaacaaaggtgtgattatccagtccggtaatgacgcctgtattgcgctggccgattacgttgccgggagccaggagtcatttattggtctgatgaatggttatgccaaaaaactgggtctgaccaacactaccttccagacggtgcacggcctggatgcgccggggcagttcagtaccgcgcgcgatatggcattgctgggtaaagcattgatccacgatgtgccggaagagtacgccattcataaagagaaagagttcaccttcaacaaaattcgtcagcctaaccgtaaccgtctgctgtggagcagcaatctgaatgttgatggcatgaagacaggaaccacggcaggcgcgggatataatctggttgcttcggctacccagggcgatatgcgtttaatctccgtagtgttgggggcgaaaactgaccgtatccgttttaatgagtctgagaaattattgacctag

SEQ ID NO: 464172 - DNA, 303 bp, Shigella boydii; identical to SEQ ID NO: 458125

SEQ ID NO: 464173 - DNA, 474 bp, Shigella boydii
atgtcatggctgaaaacgggtatggcttggcagttatcgtgttctgtcgagaaaaatcgcttgaactccaacgtacagccccctaagtactgccagcaagctgtcagcactaagtccccgatacagcgcggcatagccgcgctaacggggttaaaagggcttacctatacttcatcatcactgaaagcccgcatggcctcgcagggcaggaatgggataggtgaaacctatcaatacgtaccggcttacgccgggcttcggcggtgttactcctgtaccatatgtaactacatcatgccgccttacatgcgctacgcgcatatgaagacaaatagcccacatcaaacggtttttgggtcttcagtacgccatagcaccagtgcacgagttttctcatcagcgcaccaatggcacatattttggccttacctctcaggcataatcgctcatacatcgctttcatcaatgggttaa

SEQ ID NO: 464174 - DNA, 3963 bp, Shigella boydii
atgggaaccaccaccatgggggttaagctggacgacgcgacgcgtgagcgtattaagtctgccgcgacacgtatcgatcgcacgccacactggttaattaagcaggcgattttttcttatctcgaacaactggaaaacagcgatactctgccagagctacctgcgctgctttctggtgctgccaatgagagcgatgaagcaccgactccggcagaggaaccacaccagccattcctcgactttgccgagcaaattttgccccagtcggtttcccgcgccgcgatcaccgcggcctatcgtcgcccggaaaccgaagcggtttctatgctgctggaacaagcccgcctgccgcagccagttgctgaacaggcgcataaactggcatatcaactggccgataaactgcgtaatcaaaaaaatgccagtggtcgcgcaggtatggtccaggggttattgcaggagttttcgctgtcatcgcaggaaggcgtggcgctgatgtgtctggcggaagcgttgttgcgtattcccgacaaagccacccgcgacgcgttaattcgcgacaaaatcagcaacggtaactggcagtcacacattggtcgtagcccgtcactgtttgttaatgccgctacctgggggctgttgtttactggcaaactggtttccacccataacgaagccagcctctcccgctcgctgaaccgcattatcggtaaaagcggtgaaccgctgatccgcaaaggtgtggatatggcgatgcgcctgatgggcgagcagttcgtcacgggtgaaaccatcgcggaagcgttagccaatgcccgcaagctggaagagaaaggtttccgttactcttacgatatgctgggcgaagctgcactgactgccgcagacgcacaggcgtatatggtttcctatcagcaggcgattcacgccattggtaaagcgtctaacggtcgtggcatctatgaaggtccgggcatttcaatcaagctgtcggcgctgcatccgcgctacagccgcgcccagtatgaccgggtaatggaagagctttacccgcgtctgaaatcactcaccctgctggcgcgtcagtatgatattggtattaacatcgatgccgaagaggccgatcgtctggagatctccctcgatctgctggaaaatctctgtttcgagccggaactggcaggctggaacggcatcggttttgttattcaggcttatcaaaaacgctgcccgttggtgatcgattacctggttgatctcgccacccgcagccgtcgccgtctgatgattcgcctggtgaaaggcgcgtactgggatagtgaaatcaagcgtgcgcagatggacggccttgaaggctatcctgtttatacccgcaaggtgtataccgacgtttcttatctcgcctgtgcgaaaaagctgctggcggtgccgaatctaatctacccgcagttcgcgacgcacaacgcccatacgctggcagcgatttatcaactggcaggtcagaactactatccgggtcagtacgagttccagtgcctgcatggtatgggcgagccactgtacgagcaggtcacagggaaagttgccgacggtaaacttaaccgaccgtgtcgtatttatgccccggttggcacacatgaaacgctgctggcgtatctggtgcgtcgcctgctggaaaacggtgctaacacctcgtttgttaaccgtattgccgacacctctttgccactggatgaactggtcgccgatccggtcactgctgtagaaaaactggcgcaacaggaagggcaaactggattaccgcatccgaaaattcccctgccgcgcgatctttacggtcacgggcgcgacaactcggcagggctggatctcgctaacgaacaccgtctggcctcgctctcctctgccctgctcaatagtgcactgcaaaaatggcaggccttgccaatgctggaacaaccggtagcggcaggtgagatgtcgcccgttattaaccctgcggaaccgaaagatattgtgggctttgtgcgtgaagccacgccgcgtgaagtagaacaggcgctggaaagtgcggttaataacgcgccaatctggtttgccacgcctccggctgaacgcgcggcgattttgcatcgcgctgccgtgctaatggaaagccagatgcagcaactgattggtattctggtgcgtgaagccggaaaaaccttcagtaacgctattgccgaagtgcgcgaagcggtcgattttctccactactacgccggacaggtgcgggatgatttcgctaacgaaacccaccgtccattagggcctgtggtgtgtatcagtccgtggaacttcccgctggctattttcaccgggcagatcgctgccgcactggcggcaggtaacagcgtgctggcaaaaccggcagaacaaacgccgctgattgccgcgcaagggatcgccattttgctggaagcgggtgtaccccctggcgtggtgcaattgctgccaggtcagggggaaaccgtgggcgcgcaactgacgggtgatgatcgcgtgcgcggggtgatgtttaccggttcaaccgaagtcgctacgttactgcagtgcaatatcgccagccgcctggacgctcagggtcgccctattccgctcatcgctgaaaccggcggcatgaacgcgatgattgtcgattcttcagcactgaccgaacaagtcgtcgtggatgtgctggcctcggcgttcgacagtgcgggtcagcgttgttcggcactgcgcgtgctgtgcctgcaagatgagattgccgaccacacgttgaaaatgctgcgcggtgcaatggccgaatgccggatgggtaatccgggtcgcctgaccaccgatatcggtccggtgattgatagcgaagcgaaagccaatattgagcgccatattcagaccatgcgtagcaaaggccgtccggtgttccaggcggtgcgggaaaacagcgaagatgcccgtgaatggcaaagcggcacctttgtcgccccgacgctgatcgaactggatgactttgccgaattgcacaaagaggtctttggtccggtgctgcatgtggtgcgttacaaccgtaaccagctaccagagctgatcgagcagattaacgcttccggctatggtctgacgcttggtgtccatacgcgtattgatgaaaccatcgcccaggtcactggctcggcccatgttggtaacctgtatgttaaccgtaatatggtgggcgcagtggttggtgtgcagccgttcggcggcgaagggttgtccggtaccgggccgaaagcaggcggtccgctctatctctaccgtctgctggcgaatcgcccggaaagtgcgctggcagtgacgctcgcgcgtcaggatgcagagtatccggtcgatgcacagttgaaagccgcattgactcagccgctaaatgcactgcgggaatgggcagcaaatcgtccagaattgcaggcgttatgtacgcaatatggcgagctggcgcaggcaggaatacaacgattgctgccggggccgacgggtgaacgcaacacctggacgctgctgccgcgtgagcgcgtgttgtgtattgccgatgatgagcaggatgcgctgactcagctcgccgccgtgctggcggtgggcagccaggtactgtggccggatgacgcgctgcatcgtcagctagtaaaggcattgccatcggcagtcagcgaacgtattcaactggcgaaagcggaaaatataaccgctcaaccctttgatgcggtgatcttccacggtgattcggatcagcttcgcgcattgtgtgaagccgttgctgcgcgggatggcgcaattgtttcggtgcagggttttgcccgtggcgaaagcaatatccttctggaacggctgtatatcgaacgttcgctgagtgtgaataccgctgccgctggcggtaacgccagtttaatgacgatcgattaa

SEQ ID NO: 464175 - DNA, 189 bp, Shigella boydii
atgtggctggaagaaacgctgatccatctggggttatcgattcgtgcctggcagcggttattgaaagttgcacgaaccattgctgatattgatcagtctgacattatcacacgtcaacatttgcaggaggcagttagctatcgagcgattgaccgtttgctcatccatctgcagaaactactgacataa

SEQ ID NO: 464176 - DNA, 141 bp, Shigella boydii
atgaagtttgttgcgccagaacaggcaccggaacaggcggaaatcattagaaatacgccgttctggcctgatgtggacctgtcggagtttcgcagtgtcatgcgcactgacggcacggtgacgcagccgcgtttaaagtag

SEQ ID NO: 464177 - DNA, 417 bp, Shigella boydii
atgtccggcagtgcttttgccgttacgcaccacgccttcagtagcggagcaggaaggacatctgatggaaatggaagccacgcaagcaccttaaaatcaccatcatacactaaatcagtaagttggcagcattacccggtgctttaccgctttaaagatgaaagtggcaaagaacaatttagcggcgcagtggtgaaaacgcgtgaagcaacgccgggtaaagaagtagaggcgatcactcgccgaatgcttgatttcagcccacgactgaaaaaactcgcgggtgtgccatgtcaggtctatgttcgcaccgtagcggcgaataacgcccaaccgctaacccaggatcaatgcttacgcgcgctgcatcacttacgtgttcaatccaccagcaaaactgcaccacaggcgaaataa

SEQ ID NO: 464178 - DNA, 261 bp, Shigella boydii
atgaaatatacaccggttggcgttgatatcgcaaaacatgtcattcagattcacttcatcaatgagcacacaggtgaagtggttgataaacagttgcgtagacaggattttctgacgttcttcggcaaccgtgagccatgcctgattggtatggaggcctgtggaggttctcagcactgggcacgggaactgacaaaacttggtcataaagtccggttgttgcaggcccgcttcgttaaggcattcgtaagcgtaaactga

SEQ ID NO: 464179 - DNA, 282 bp, Shigella boydii
atgaaaacgttaattgcccggcataaagctggtgaacatatcggcatatgttcagtctgttctgcccatccgttggttatcgaagcggcgctggcatttcatcgcaacagcacgcgcaaagtgctgattgaagcaacgtcaaaccaggtcaatcaatttggcggttataccggaatgacaccggcagactttcgcgaatttgtttttacgattgccgataaagttgggtttgcacgcgaacgcattattctcggcggcgatcatctggggccaaactgctga

SEQ ID NO: 464180 - DNA, 957 bp, Shigella boydii
atggaaaaatccgtcgagctggtaaaagcatatgttcgtgctggcttcagtaaaattcatcttgatgcgtcaatgtcctgcgcgggggatcccataccgttagcaccagaaacggttgcggaacgagctgctgtgctttgctttgctgcggaaagtgtggcgacagattgccagcgtgagcaactgagctatgtcattggcaccgaagttccggttccgggcggtgaggccagcgccattcagtcagtacacatcacccatgttgaagatgccgccaatactttacgtacgcatcaaaaggcctttattgcccgtgggctgacagaggcgttaacacgtgtgattgccatcgtggtgcagccgggtgtggaatttgatcacagcaatattatccattatcagccgcaggaagcgcaggcgctggcgcaatggatagaaaacacccgaatggtttatgaagcacattctaccgattaccagacccggacggcttattgggaattagtccgcgatcactttgcaatattgaaagtcggtcccgcattaacctttgctttacgcgaggcgatatttgcactggcacaaattgagcaggaacttatcgcccccgaaaatcgcagcggttgcctggcggtaattgaagaagtgatgctcgacgaaccgcaatactggaaaaaatattatcgtacgggttttaacgattcattactggatattcgttacagcctgtcggatcgtattcgttattactggccgcatagtcggattaaaaatagcgtcgaaacgatgatggtgaatcttgaaggcgtggacatcccactgggcatgattagtcagtatcttcccaaacaatttgaacgcattcagtccggggaattatcagcaataccgcatcagctgattatggataaaatttatgatgttttgcgcgcctatcgctacggctgtgcggaataa

SEQ ID NO: 464181 - DNA, 210 bp, Shigella boydii; identical to SEQ ID NO: 463045

SEQ ID NO: 464182 - DNA, 1746 bp, Shigella boydii
atggcgctgttaaccctgaccagtaccctggtgggatggtacaacctgcgctttatcagccaggtggaaaaagacaacactcaggcattgattcctaccatgaatatggcgcgccagttgagcgaagccagcgcctgggaacttttcgccgcgcagaacctgaccagtgccgataacgaaaagatgtggcaggcgcaggggcgaatgctcaccgcacaaagcctgaagattaatgcgttgctgcaagcgttacgggaacaaggttttgataccaccgctattgaacaacaggagcaggagatctcccgttcgttacgtcagcaaggggaactggtggggcggcgtctgcaactacgccagcaacaacagcaactcagtcagcagatagtcgctgccgccgatgagatcgcacgcctggcgcaaggtcaggcgaataatgcgacaacttccgctggagcgacccaggccgggatttacgatttgatcgaacaagatcagcgtcaggctgctgaaagtgcactcgatcggctgattgatatcgatcttgagtatgttaaccagatgaatgaactgcgccttagcgctctgcgggtgcagcaaatggtgatgaatctggggctggagcagatccagaaaaatgcaccaacgctggaaaagcagctcaataatgcggtgaaaattctgcaacgtcggcaaatacgcattgaagatccgggtgtttgtgcgcaggtcgcaacaacgttaactaccgttagccaatatagcgatttgctggcgctgtatcagcaggacagtgaaatcagcaatcacctacaaactctcgcacaaaataacatcgccctgttcgcgcagtttagtagcgaagtcagtcagctggtcgacaccattgagctgcgtaatcagcacggactggcgcatctggaaaaagccagtgcacgcgggcaatacagcctgttattgctggggatggtttcactttgcgcactgattctgatcctttggcgcgtggtttatcgctcagtcacgcgtccacttgccgaacaaacgcaggcgctgcaacggctgctggacggtgatattgactcccctttcccggaaaccgctggcgtacgggagctggataccatcgggcggctgatggatgcgtttcgcagcactgttcatgcactgaatcgccaccgtgaacagctggcggcgcaggtcaaagcgcgtacagctgaattgcaggaactggtgatagaacaccgacaggcacgggcggaagcagaaaaagccagccaggcaaaatcggcctttctggcggcgatgagccatgagatccgcacaccgctgtacggtattctcggcactgctcaactgctggcagataaccccgcacttaacgcccagcgtgatgatttgcgggcgattaccgactctggcgaatcgttgctgaccatcctcaacgatattctcgattattcggctatcgaagcaggtggcaagaatgtttcggtcagcgatgagccctttgaaccgcgcccgctgctggaaagtaccctgcaattaatgagcggacgggtgaaaggtcgcccgattcgcctggcaacagcaattgccgacgatgtaccgaccgcgttaatgggcgatccgcgacgtattcgtcaggttataaccaacctgttgagcaacgccctgcgttttactgacgaagggcaacacgcagtgttgccgctctggaagcatggttgcataagaaagacctga

SEQ ID NO: 464183 - DNA, 258 bp, Shigella boydii; identical to SEQ ID NO: 460353

SEQ ID NO: 464184 - DNA, 213 bp, Shigella boydii
atgttgcagtttattctccgacgtttgggactcgtcatccccacgtttatcggtattacccttctcacatttgcctttgtccacatgatcccgggcgatccggtgatgatcatggcaggcgaacgtgggatctcccctgagcgtcacgcgcagctgctggctgaactcggcttagataaaccgatgtggcagcagtatctccattacatttag

SEQ ID NO: 464185 - DNA, 624 bp, Shigella boydii
atggtcaaaatgcttgctaacggtaatgagcaaaaaccgctggtgctgtctctgcgcgacgccgagggccagccagtcacgggcatgaaagatcagatcaagactgaactaactttcaaaccggctggaaatattgtgactcgttccctgaaggccactaaatcacaggcaaagccaacactgggtgagttcactgaaactgaagctggggtgtatcagtctgtcttcactaccggaacgcaatcaggtgaggcaacgattactgttagcgttgatggcatgagcaaaaccgtcactgcagaattgcgcgccacgatgatggatgtgtcgaagtctactctgagcgtgaatgaactctcaggagatgtggttgctgatggtcagcaatcccacacgctgacgcttactgcggtggatactgatggtaacccggtgacgggagaggccagccgcttgcgatttgttccgcaagacactaatggtgtcaccattggtacaatttcggagataaaaccaggcgtttacagcgctacggtttcttcgacccgtgccggaaacgttgttgtgcgtgtgtgcgtgctttcagcgagcagtatcagctgggcacattacaacaaacgctga

SEQ ID NO: 464186 - DNA, 2106 bp, Shigella boydii
gtgcgtgctttcagcgagcagtatcagctgggcacattacaacaaacgctgaagtttgttgccgggccgcttgatgcagcacattcgtccatcaccctgaatcctgataaaccggtggttgggggtacagttacggcaatctggacggtaaaagatgcctatgacaaccctgtgaccagcctcacgccggaagcgccgtcattagcgggtgccgctgctgtaggttctacggcatcgggctggacaaataatggtgatgggacgtggactgcgcagattactctcggctctacggcgggtgaattagaagttatgccgaagctaaatggacaggatgcggcagcaaatgcggcaaaagtaaccgtggtggctgatgcgttatcttcaaaccagtcgaaagtctctgtcgcagaagatcacgtaaaagccggcgaaagtacaaccgtgacgctggtggcgaaagatgcgcatggcaacgctatcagtagtctttcgttgtcggcaagtttgacggggaccgcctctaaaggggcgaccgtttccagttggaccgaaaaaggtgacggttcctatgttgctacgttaactacaggcggaaagacgggcgagcttcgtgtcatgccgctattcaacggccagccagcagccaccgaagccgcgcagttgacggtcatcgccggagagatatcatcagcgaactctacgcttgttgcggacaataaggctccgaccgtcaaaacgacgacggaactcaccttcaccgtgaaggatgcgtacaggaacccggtcaccgggatgaagccagatgcaccagtgtttagcggtgccgccaacacggggagtgagcgtccttcagcaggaaactggacagagaaaggtaatggggtctacgtgtcgaccttaacgctgggatctgccgcgggtcagttgtctgtgatgccgcgagtgaacggccaaaatgccgttgctcagccactggtgctgaatgttgcaggtgacgcatctaaggctgagattggtgatatgacagtgaaggttaataaccaactggctaatggacagtctgctaaccagataaccctgaccgtcgtggacagctatggtaacccgttgcaggggcaagaagttacgctgaatttaccgcagggtgtgaccagcaagacggggaatacagtaacaaccaatgcggcaggtaaagcggatattgagttgatatcaaccgttgcaggggaacttgaaatcgcggccgcggtgaaaaactctcagaagacggtcacggtgaaattcaacgcggatgccagcaccggtcaggcaaacctgcaggtagacaccgccgttcaaaaagtagcaaacggcaaagatgcctttacgctgacggcgaccgttgaggataaaaatggtaaccctgttccagggagcctggtgacctttaatctgccccggggtgtcaagccgcttacaggcgataatgtctgggtgaaagccaacgatgaggggaaagccgagttgcaggtggtttcagtgactgccggaacgtatgagatcacggcatcggcggggaatagccagccttcggatacgcagactataacgtttgtagccgataaggctaccgcaaccgtctccggtattgaggtgattggcaactatgcgctggcggacggcaaagccaaacaaacgtataaagttacggtgactgatgccaataacaatttggtgaaagatagcgacgtgacgctgactgccagcccggcttcgttaaacctggaaccgaatggcactgcgacaacgaatgagcaagggcaggctattttcaccgctaccactactgttgcggcgacatacacactcaaggcgcaagtgagtcagaccaacggtcaggtatcaacgaaaactgccgaatctaaattcgttgcggatgataaaaacgcggtactcaccgcatcatctgatatgcaatctctggtggcggatgggaaatcgactgcgaagctggaggtgacactgatgtcggcaaacaaccccgttggggggaatatgtgggtcgacattcagacgccgggtaagcgtcaacggagcaccgtattgacgcttatttattggtga

SEQ ID NO: 464187 - DNA, 126 bp, Shigella boydii
atgttagccgccgaactggtcaggatcgggaccgagacgcttgccctgatcgagttttgcaatttcgccgagttcgtctttgtcgagacggaaatcccagacatcaaagttttcggcaatacgtga

SEQ ID NO: 464188 - DNA, 234 bp, Shigella boydii
atgctgacacttgcccgccaacaacagcgacaaaatattcgctggttattatgcctgtcagttttgatgctgctggcgcttctcttaagcctttgcgccggtgaacaatggatctcgctaggtgactggtttactcctcgtggcgaactgttcgtctggcaaattcgcctgccacgtacgctggctgtattgctggttagtgcggcgctggcttgtaatgcaggcgttgtttga

SEQ ID NO: 464189 - DNA, 714 bp, Shigella boydii
atgaagatttttttggagaatctttatcattctgattgctatttcctgccgataagagataaccagcaagtccttgtcggcgttgagttaattacccatttctccagtgaagatggcacggtgcgtatcccgacgagtcgggttatagcgcaacttaccgaggagcaacattggcaattattttcagagcagttggaattactaaaatcatgccaacatttttttattcaacataaactctttgcctggcttaatttaacgccacaagtggctacattattattagagagggataattacgcaggcgaactattaaaatatccgtttattgaactgttgattaatgagaattacccgcatctcaatgaaggaaaagataatcgaggtcttttatccttatcgcaagtgtatccccttgtgttaggtaatttgggagcaggcaatagcacaatgaaagcggtttttgatggtcttttcacccgcgtcatgctggataaaagttttattcagcaacaaatcacgcaccgctccttcgaaccgtttattcgtgcgatccaggcgcaaatttccccttgttgcaattgcatcattgcgggaggcattgatacggcagaaatattggcacagattacccccttcgatttccatgctctccagggatgcctgtggcctgccgttcccataaatcagataacgacgttggttcagcgataa

SEQ ID NO: 464190 - DNA, 1266 bp, Shigella boydii
atgagaaaaatagtggccatggccgttatttgcctgacggctgcctctggccttacctctgcttatgcggcgcaactggctgacgatgaagcgggactacgcatcagactgaaaaacgaattgcgcagggcggataagcccagtgctggcgcgggaagagatatttacgcatgggtacagggaggattgctcgatttcaatagtggttattattccaatattattggcgttgaaggcggggcatattatgtttataaattaggtgctcgtgctgatatgagtacccggtggtatcttgatggtgataaaagttttggctttgccctgggggcagtaaaaataaaaccctgtgaaaatagcctgcttaaattaggtcgcttcgggacggattatagttatggtagcttaccttatcgtattccgttaatggctggcagttcgcaacgtacattaccgacagtttctgaaggagcattaggttattgggctttaacaccaaatattgatctgtggggaatgtggcgttcacgagtatttttatggactgattcaacaaccggtattcgtgatgaaggggtgtataacagccagacgggaaaatacgataaacatcgcgcacgttcttttttagccgccagttggcatgatgataccagtcgctattctctgggggcatcggtacagaaagatgtttccaatcagatacaaagtattctcgagaaaagcataccgctcgacccgaattatacgttgaaaggggagttgctcggcttttacgcgcagctcgaaggtttaagtcgtaataccagccagcccaatgaaacggcgttggttagtggacaattgacctggaatgcgccgtggggaagcgtatttggcagtagtggttatttgcgccatgcaatgaatggtgccgtggtggataccgacattggctatcccttttcattaagtcttgatcgtaaccgtgaaggaatgcagtcctggcaattgggcgtcaactatcgtttaacgccgcaatttacactgacatttgcaccgattgtgactcgcggctatgaatccagtaaacgagatgtgcggattgaaggcacgggtatcttaggtggtatgaactatcgggtcagcgaagggccgttacaagggatgaatttctttcttgctgccgataaagggcgggaaaagcgcgatggcagtacgctgggcgatcgcctgaattactgggatgtgaaaatgagtattcagtatgactttatgctgaagtaa

SEQ ID NO: 464191 - DNA, 468 bp, Shigella boydii
atgaaccgtgttctgtgcgtggtcatcattgccctgctggtggcctgtggtgcgcttagtctggggctgaatcattaccgtgttcacgccatcatctacaaagagcagcgcgataaaaaagccagtgagctggagctggcgaacgcgacaattactgatatgcagatacgccagcgtgatgtcgctgcacttgatgccagatactcgagggaattagccgatgcgagagctgaaaatgaaactctgcgtgctgatgttgccgctggtcgtaagcgcctgcggatcaacgccacctgctccggtaccgtgcgtgaagccaccggcacctccggcgtggataatgcaaccggcccccgactggcagacaccgctgaacgggattatttcatcctcagagaacggttgatgacaatgcagaagcagctggaaggggcacaggactatatccgcactcagtgcctgaactaa

SEQ ID NO: 464192 - DNA, 309 bp, Shigella boydii
gtgacaggcactgaacgtgacccgcaatgccgctcgcagcaaatcgccacgctggaagatgcggggatcgcggtagtgagttcgctgccggaagccaccttgctggcggcagcgttaatttatccgctctcgcctgccgcacagcaacatacaccgtcattactggaaaacgtcgccgtgattaacatcggattacgcagctttgcgctggagctacaaagcgccagcaaaccggttgtgcattaccaatggtcgccagtcgccggcggcaataaaaaactggctcgtttattagaacgtttgcaataa

SEQ ID NO: 464193 - DNA, 681 bp, Shigella boydii
atgctgatggcgcattacgctttgctggcagcaaaaaataatcctctggcgctgcggattaatggctggattaacatcgcttttggcgtcactggcattattgccacatttgtggtctccccgtggggaccaatgaacacgccggtgtggcaaaccttcgagagctataaagtcttttgtgcctggtcgattttttcgctatgggcatttttcggctggtacaccttaacaaacgtcgaaaagacctggtctttcgccgcgctttgcccgctggggctggcgttgctggtaggattttcaattcctgacagagtcatggaaggaaaacatccgcaattttttgtcgagatgacacaagaatcacttcaaccaagccgctatattcttactgatagcgtcggtgttgccgcaggtctggcatggagcctgcaacgcgatgacatcatcatgtatcgccagacaggtgagttgaaatacggccttaattatccggatgcgaaagggagatttgtcagcggtgatgagttcgcaaactggcttaatcaacatcgtcaggaggggattattacactcatgctttcggttgaccgcgatgaagatatcaacagtctcgccattccgcccgcagatgccatcgatcgtcaggagcgtctggtgctgattcagtatcgtcccaaatga

SEQ ID NO: 464194 - DNA, 153 bp, Shigella boydii
atgctgacgaaatatgcccttgcggcagtcatagtgctgtgtttaacggtgctgggatttacgcttctggtcggggattcgctgtgtgagttcaccgtaaaggaacgtaatattgagtttaaggctgttctcgcttacgaaccgaagaagtag

SEQ ID NO: 464195 - DNA, 483 bp, Shigella boydii
atgatccgggcattcgttaaagcgtactggaaacagttgtttatcgtgatgatgcttgctgctctggtgatcggctgcaggattgcctggaatgctcacggcgatcgacagtacgacgccgggtatgcgcaggcaaaggcagaccgcaaagccgaagatgagaaagctcgtcagcatgacgaacaggagaaagcgaccaatgaacgtgaagcgcagcagaggatcgaccaggcgcgtaatgatgctcttgatgctgccgctcgtgctggcaggttgcagcaacagctcgttgccatccgtgagcagctcaggcagtataacgccactgtcggcgctgggacgtcagccgcagacaccggagttttgcttgccgacgtgctcagcaaatctctcgagcgaaaccgacaactggcagagtacgctgaccgggccgccgaagccggacgagtctgtgaaaagcagtacgattcactgacccggtga

SEQ ID NO: 464196 - DNA, 630 bp, Shigella boydii
atggacattaaacaattccagcgtgcagctggtatcagtgaggtactggccacgcgctggtatctgcatatcaccgcagccatgaaagagtttggcatcgagaatcctctgcatcaggcgatgtttatcgcgcaggtggggcatgagtcaggcggattcacacggctgcaggagaacttcaactacagcgtgaacgggctggtaggattcgtccgcgccgggcgtctcactcagggtcaggccaacgagctgggccgccgtgctggtgagccatcgttaccgctggagcgccagcgtgcgatcgccaatctggtgtacggcaagcgcatggggaacaacgggccgaccgacggctggttctaccgcgggcgcggacttatccagatcaccggcctgaacaactaccgggactgcggcaacgggctcaaaattgagctggttagccagccggagctgctggcgcaggacgaatacgcggcccgcagcgcggcgtggttcttcgcaacaaaaggctgcatgaaatacaccggcgacctggtgcgcgtcacgcagatcatcaatggtgggcagaacggcatcgacgaccggtgcgcgcggtacatcactgccagtaaggtgctggcggtatga

SEQ ID NO: 464197 - DNA, 294 bp, Shigella boydii
atgaccagtcctgaactgcttctcatcctgaacgccgctatctgcggcggcattgcaatccgagtcctgctattccgccgtgacgggtcacgccatcgctggtggggtggatggctcgcctacctgctgatcgtcgtggctgccagcgtacctatccgaacgttctacgggtactacgtcagcgccgactggtcagaagtcatcatcaaagctgtgttcctggctgctctcatcaagacaaaagggaacgtggttcaaatcttcaagataacgaggtcccagcatggacattaa

SEQ ID NO: 464198 - DNA, 405 bp, Shigella boydii
atgtcgcacacgttaaccacggaatcgctgaatcaggggcttagcctgggtgcgctggcttcagttgtcgtcggtgtccctcccgaggtagcgttaggttcgcttgctggtgcggtaatttttgttacctcggcagtagagtatccgattaagcgtcggttactgctggcgttcctcagctacctatgcggagttctcttctataaagccacagcgacattgcttatcggaatagcgagctggatcccgaaaatcacacctgactctttcgagaagggcattgtgttttctgccggggcattcgtatcgtctatcgtcgctgtccgcattggcatctggctgtatcaccgttctgaaaatccgcgcgacctgatcccggggagaaaagacgatgaccagtcctga

SEQ ID NO: 464199 - DNA, 1860 bp, Shigella boydii
atggacttcaggaaggatatcaatggagtcagggctatagcagttcttgctgtagtcctgttccacttcaacagaggatgggtcccgagtggatttgttggcgtagatgtattctttgtaatttctggttttttgatgacgtcaataatatttggcggattagaaggaaataaattttctctgtggggcttttataaagcacgagccagaaggatagtgcctgcgcttgccgttatgctaatttgcgtaatggtatacggatggtacaacatgtacactcctgaatttaagacattggcgaagcacgctgcgtcaagccttctatttgtttcaaatatcgtctattggaaggagtcaagctactttgctcctggtgcagaagagaagtggttacttcatacttggtctctatctgtagaatggcaattctatattatatatcctttagccatttatattatcagaaaggctttcagtttaaaggtatctaggatattaattctgattgcaggcctattaagtttagcacttagcatttatgcatctaggattttagttagctcatcatatttcttgcttccaacaagggcatgggagatgattgctggcggcgtggtttatcttttcccgacatcaatatttaaacgaaaacctttcccatatatcgggattgctaccatattagtatcctgctttatttttagcgaggaatcgtactggcctagctacaatgcgctgctgcctatcatcggcacgatgatcatattgtggtcgtgttctgataacattatcttagattcatcttttgcgcaaaagattgggttgtattcatattcaatttatttgtggcactggccgatctatctatatatatataatacatatggtggtgtttctatattaacaacgctcattggaattgttgcgtcagtggcgatgggtatgttgtcatttaaatatatagaaagtgttttcaaaagtagaggcggcgttaaaaaggagtttctgtactttgcatcattagctttagctgttggtatatatatttctaatggcgctaacactgatatgcgaagtctcacaaaaactaccggtaatgaaactgtggtgcattacgatggatatcggtttgataataatgggatgtgggataaatgtaacagcagtgaaaaactggatcatatcgataaatcatgtgtcgatactgataaaaggggaggtgtcttcttatggggagactctcacgcgggagcactttctttagggataagatcacttctaaaagatggcgttccattctatcaacttgctgcttcaagttgtaaaccgagtctccataaattccctggagttataagtgccacaattggatgtaatctatccaatgaaaaagccattgaagatataaatattgttaaacctgatgttgtggtattagctcagagattccagcatgaagaaacagactggcaagatattgctgaaaaaatacacgcactgggtgttaaaaaagttatagtccttggtcctgttcctcagtggaaagggagcctgccgcttattgttgcgaaaaactataatcccaatgatatttacattgataacagatttttggataaacagattgtcgcgacaaataacaaaatgaagacgatatcaaaagacaatgaaggatatgattttgtcgacatacttgatggcttgtgtgcacgtgaaggtacagaactgaagtgtaggtcaagggtagatagtggctttacgcttatgtccatggattacggtcaccctactgatgaagggtcagtgttcatcggtaaaaacataattaaaagccacctgccagcaagcttaaccaagtaa

SEQ ID NO: 464200 - DNA, 2295 bp, Shigella boydii
atgacggtctcaaccgaagttgaccacaacgaatacaccggtaacggtgttacaacgacattcccttataccttcaggattttccagaaatctgatttagtagtgcaggttgttgacctgaacgagaacatcacagagctgattcttgatactgattacatagtcactggtgcgggaggctatagcggcggtaatataatactgtcgaaggcattggccaacggttatcagatctctatatcaagagagctaccggttacgcaggataccgatctgcgcaaccagggtaagttcttcgctgaggtgcatgaagacgcattcgataaactgacgatgctgatacagcaggttggcagcatgttccgcctggcgctgcgtaagccgtcgagtatcgccaactggtacgatgccctaaacaactacatcaggaatgtgcgcgatcctcgggaccctcaggacgcggcgaccaaaaattatgttgatggcgttgccagctctaaccttagccgcactctcagaactccagaaccaattccttcgttaccgaatgctgcgaccagggcgaacaaaattattgcgttcgacagcgcaggcaatccatatgtaacgatgccaccatctggatcggcaacagatgtttttgttgaactggcaaagccaaccgggccgacgcttattggtgtgcagcctcagggaaacctttctcaactgttgatctacgttactcccgagcagtttggggcaatcggggacggtaccgcccatcctttatctgagcgataccttacactgtccgctgcccaggccgtatacccgttcgtaacatcattaactcagaccatcgattgggcagcttgccaggcggctgagaactatgccagagggaagtgccaaatcaatgttaaaaaaaataagatgtatcactttgggagtactgattatttagaattcggacaaaaatcagcctggatcgcaccgcctctaggaggttttgactttaccactgggtttattagatctgtccctagcaattcttcgagctatcaattcgggcagctatgcattggcagagttatggattctgatgaagctggtagctctgactctgcatttagggatttgaccattaagggattaacctttaagtgggacaccgcaaggcatgttgcaagtaaaggacttggcaccattgctttacacctaaatatggctataaaagcaaatttggatgtgagcatgtttggtgctgaatatgcatgttttggatacagcgcgtggggaacgcaagggattattagatttgattcttgccacaagggcgtttactttgacgccgtaagcttatcaccggaaaaggacacggttggaggctcaactacatcacatcatattgaacttcaggcggatcataccccattccccatctatctgaagaactgtaattatgcaaaattccacggttggtttgaaggagcgcttgcgcagtacggcaactacgacagtgtaaatgaaacagcaatgggcattacgcttgatacgtgcagtaacgtaacatttgatatggggatagaagcgtgggaaggtgcccatattaattgcatcggtagcgttgaagcagaatttaagcttcattatctccaagactccactgatggtgtattaatcaaggggcttggaactcaaggcgttgctaatgtgatgagaactcttatgggtgctgccgatgagacagctattgcatcttcaaatcgaagcttaatatacgtcggtcagtttagtaacatatcggtaaaacactatgcgcctgttctttcaaagtatacagatagcacctttgcaccatacgtagttactgtagacccatcctcgaagatcacgttcgagcaatgcggaatgcatcttgggggtgcttcaagacttggcggagcatcaaccaaccttaagctggctccagcaaactatcagtgcattgaatctattggttgcatgtatatggaaagatacatgaaggccaatgagacgtacgactacatacgcaacggatatagcaggcataacgcatggcaaacaaaagttatcaatgctggcgatggcagggtgcaactcgacgccccaacaggatttagaatcgatgactacactgcgcatgtcgtggcaagctcgcaatcttcagctggatcaagcgctcagttagctgtggtatctgcaagcaatgctgcggttctactacagacgccgatatcagcatcaggagtaagtttgatgtataaactcacccttaaagtgatagcgtaa

SEQ ID NO: 464201 - DNA, 258 bp, Shigella boydii
atgcagcagtatcactatccactggaagacggatttaccgaaaggattcacacgccgggaggcgtcagatcactggtggagggatcgcacttgatgaaattactccgggagctcgataaggatggatttaatgtcgatggcccacttgccgaactgactgcactgattaactacgtcaccagctcacagatgtctatgtgggatctgcaaacacatctcgactattgtgccgaacaattacgaaaacaaactacataa

SEQ ID NO: 464202 - DNA, 297 bp, Shigella boydii
atgcaagctataggattcattgtttatatcgtcgttggtctttttcagttggcagcaattatggctgggcttgaatcatggtggggattgcactggataattgcagcccccatcgctttcatcgtgagctatattccatttgttggagcgattgttggtatggttggcgctgtggatgtatggcggtgggagtggtggcaggctggccttttcttctttggtgggatcatctttgctattgtctgcggtggaatgtcatcatttttcgaatggctatcattcagaaaaggaacgtga

SEQ ID NO: 464203 - DNA, 1845 bp, Shigella boydii
atggaaaaggttggggcggtatcaaaggataggtgggttagcgatgttataggtaagctggatcgcaaatattatacccaagccgatggacaactgatgaacgatgccgagttgtctgcatttcttggagaggcttataacacgatcgctactggtgggctgaataagcttactgataccggaatgcgaatttccggcgcacgtgctaaccgtggtaatgcatcacgacagatacatttcaaagatgcagattcctatctccaatatcaacaactttatggcgatcgctctctatgggaaatcatggtcggtcacctggaaggtatcagtaaagatattgctctggtggaaacatatggtccaaaccccgatcatgttttccgctcccttcttgatcaggttaaggcagaaacggcaacagctaacccgagtaaaaccggtaaagtcgagcggctggcgaacaacacagagaatctgtacaactttatttccggaaagacacagcctgtagcgaatccgcacatcgcgcgatggtctgacaatatccgcaactggctggttgccagcagactcggatccgcgttgctgtcatcgttctctgatcttggaaccatgtatctgtctgcgaaggtgaccaatcttccaatgaaccagttattccgcaaccagcttgaagctatggacccaacgaaccgtactgagcttgcgcgggcgcgccgcgctggtctggcgatggaatctctacttggcagcgttaaccgctgggcgatggataatatggggccgtctgtgtctcgttgggctgcaacggcggtaatgcgtgccagtgggcttacagcatggtcagatgcgcacaagcgcgcctatggcgtaaccatgatgggaagcctgggagaagtagtgtcacggacaccagaccttcatagcctcgatgattctgattttcgtatcctgaaaagcaaagggattactgacacagactggagcgtatggaagctggcgcaacaggaggactgggggaacggtaataatacgatgctgacaccggaaagcattatgcgtatccctgattcagcagttaaacatcttggtgagcctgagcgcgtgaaatttgaggcaatgcgtaaattgctcggtgccgtaactgaagaagttgatatggctgttattacaccgggagctcgtgagcaactgataaccggttctggtattcagcgtggaacatggaaaggtgaattaacgagaagtgttttcctgtttaaatcgttccctatctcggttgttatgcgtcactggtcacgcgctatgggtatgccgtctgctggtgggcgtgcggcatatattgcgacgtttattgccagtacgaccattcttggcgctttgtcgcagcaacttaacgaccttgcgtctggtcgtaatcctcgagagatgacaggagaagatgccgcaaaattctggcttggtgctctactgaaaggtggtggtcttggcctttacggtgactttttattgtcagatcacaccaggtacggaagcggagcgctggcgtcgatgcttggcccggtagctggtctggttgatgacgtggtgaagattgctcagggcataccgttaaatgctgtggaagggaagagtgagcagactggtggtgatctggtgaagctggggaaaggtttgatgcctggtgcgaatctctggtatttgaaggcggctctcgatcacatgatctttaaccagatgcaggagtatttttcaccaggctatttgcgtaaaatggagcaacgttcgaagaaagagtttaaccagacatactggtggcgacctcaggatgtcactccgcaataa

SEQ ID NO: 464204 - DNA, 1035 bp, Shigella boydii
atgaaagattatctacaaactgtgacgggccccgtcgcccgtgaagatatggggctaacacttcctcatgaacatctgttcaacgatctttcctctgttgtggatgctccttgctatcctttttcacaacggcttgttgataaaaaagtcacggcagaaatccagtgggcattaaaacacgatccttattgctgcgctgataatatggaccgcaaacctattgaagatgtgatcttcgaaattaataactttatctcgctcggtggtcgcaccattgttgatgccacagggtctgagtctatcggacgagatgcgcaggcattacgagaagtcgcattaaaaacaggtctgaatattgttgcttcctccggtccctacctggaaaaatttgaaagccagagaattcataaaacggttgatgaactggcgacaacgatcgataaagaattgaatcaagggattggcgatacggatattcgtgccggaatgatcggtgaaataggtgtttcaccgacatttaccgaagccgagcataacagcttgcgggctgcctcgctggcacagattaacaatcctcatgtggcgatgaatattcacatgccgggctggcttcgtcgcggtgatgaagtactcgacattgtgttaggtgaaatgggcgtctcgccaaataaagtctctctcgcacactcggatccgtcaggaaaagacgtggcgtatcagcggaaaatgcttgataaaggtgtctggctggaattcgacatgattggcctagacattaccttcccgaaagagggaatagcgccaggggtgcaggagactgccgatgccgtcgctcatctcattgagttgggatacgccgatcagcttgttctcagccacgatgtcttccttaaacaaatgtgggctaaaaatggcggtaatggctggggatttgttccagatgtttttctggcctatctggcggagcgcggcgtcgataaaacgatcctcaaaaaactctgtatcgataatcccggacgattattgaccgcataa

SEQ ID NO: 464205 - DNA, 264 bp, Shigella boydii
atgtatcttggcggcccgcttggactaatgtctatcggtttaatggccattttggtcagaggtctggggttactgatgctgggggttgcttcaacggcgggccagttactgggatcagtattgattgacgtattaattccatcgctgggcaatagcgtttatctggtcacgatcatcggaacactgtttgcactggtcggtgcaattgttaccactattccggaatacagaacctcgaaaacaatgaagaaaatggaggtataa

SEQ ID NO: 464206 - DNA, 609 bp, Shigella boydii
atgaaaaagaataagtactcaactcccttatggatgcttgccacgattcttgcgggtatgctctcccctatgcaatcagcggtgaatggtcaattaggtcactggttacaggatggtaatgcatgcgcagttatctcctttgccagtggtttagtcgtgatgttttttattattatggcgcgaaaagaaacccggcaacaatttgcggcaattccttctctgattaaaaaccgaaaagttcctctctggaactggtttgccggtctctgtggagcgatggtggtattttctgaaggcgcatcagccagcgcactcggggtcgcaacgtttcaaaccgcactgatctccgcgctattgctgtctggtttactttgcgatcgctttggtatcggtgtcgacgagaaaaaatactttaccccttatcgcatcatcggtgcattatttgcggttattgctacgatttttgttgtgtcacctcagtggcattctacctctttcatcttacttgccattcttccgttcttagctggtttgcttgcaggatggcagcccgctggaaatgcaaaagtagctgaagctacgggatccatgctggtttcaatcacctag

SEQ ID NO: 464207 - DNA, 759 bp, Shigella boydii
atgaataacaccaaaaaatcactaaaagtgctctttattggggaatcctggcatattcatatgattcattcaaaaggatatgacagttttacctcaagtaaatatgaagaaggtgcgacctggttactccagtgtctgaaaaatagtcaggtagatgtcacctatatgccagcacatacggtacaaattgccttccctgaagatgtggcacagttagaacaatatgatgccatcgttattagtgatattggtagtaatactttcctgctacaaaatgatactttttatcagcttcgcataaaaccaaacgctctcgaactgattaaagaatatgtgaataacggtggtgggttattgatgattggcggctatctctcattcatgggaattgaagcaaaagccaattataaaaatacagttctggctgatgtgctcccggttacgatgttagatggtgacgatcgtgtcgaaaaaccagagggtgttattgcacagccatcacaacctgaacatccagttattaaagggttctctgaatatccttttttcctaggttataaccgggcgatcgctaaagaaaatgctgaggtggtattaacaataaacaacgctccattactggtctttggtaactatcacaacgggaaaatagcctgctttatgagtgactgttcaccgcactggggtacacagcagtttatgtcctggccgttctataccgcgttgtgggtaaatatactgactcatattgcaagataa

SEQ ID NO: 464208 - DNA, 1215 bp, Shigella boydii
atgaaatttgaacgccatcatgaaatattgaaacgactcagtaaattcggttctgtaaaagtatccgatctgtccaatagcctcaatgtaacgaaagaaactattcgttcagatcttaatgaacttgccaggcttggctatctgactcgatgtcatggcggtgcttttatcgtcctagactcgcttgatactattgcgaaaaatgaaatcgcttatgcgcttgaaaattatgatacagcccagggaataaaaaaaggccactcaactatgaaaagtcaagtatgcgttattggttcgtttaatgttgatatcatcagttatttgccgaggcttcccactatcggagaatcgcttctggcaagtaattttatattttcaccggggggaaaaggctgtaaccaggcgctggcagcaagctttgccgatactgatgtttatttcataacaaaagtaggtacagatcactttagtgattatgcgatcaactttatgaattcgtctaagatttataaaagtataatttatcaaacgaaagaaacgcaaaccgaaactgccacgatccttgttaatgaaggtactggcgataatgttattgcgatctatcccggtgccaacatgacaatgtcgtccgatgaaataactattcagaaagaagcgattattaattctgatgtcatacttctgcagctcgaaacaaattataccgctctgcaacaagcgatcacattggcgcaaaaaaacagtatcccggtcattattaacccggcaccctataatgatatcgtcaacgaacttattcaggatgttgattatatcacccccaatgaaacagaagctggtttactgtccggcatagacgtacacgatcttgaatcagctaaacgagctgcagaagctatccacaataaaggggtaaaaaacacggttatcacgctcggtagcaagggctcgctcgcatttgatggcaaaaaattcattcattcgccagcgtttccagcggtcgttaaaaatacggcaggagccggggatgcgtttaacggctctctggcatcaggacttgcgaaaggaaaatcactggaatcagcactgtgttatgccagcgcctttgcatccctagcggtggagacaagcaatgcttccgacatgcctgaacatgaatctgtgatacatcgaattcagagtatacattatcagcaaactatttttacgcattaa

SEQ ID NO: 464209 - DNA, 1134 bp, Shigella boydii
atgcattcggaaaatattgcagcttacatcgggctggatgtacataaagaaacgttggcggttgctattgctgcacctgaacggcttggcgaagttcgttattatggtacgattaacaacgaagcccaggctgtacgtcgattatttcagaaattgcagggactttacggaaacattctttcctgctatgaggctggcccctgtggttttgggctatatcatcaactcacagcgatgaatataaaatgccaggttattgccccttcccggataccaaaatcaccgacagacagaatcaaaaatgatcatcgggacgcaatttctcttgccaggttactgcgggctggtgaacttacccctgtctggatccctgacctgactcatgaagctatgcgggatctaatcagagcccgtgcagcagctaaacgagacagcagagttgcccgacagcgaattctgagcatgctattgcgaacagacaaacgttatgcagggaagcactggaccggcaaacatcgaacctggttagccaatcaatcatttagtcagccatctcaacagattgcttttcaacactattgtcagagtctggagcagattgaagatcgcatacttcaactcgaccaggaaatatcccgcctgttacctgagtggtctctgtgcaatctggtctgccagttacaggcccttaaaggtgttggtcagctaaccgcaataaccctggttgctgaactgggtgaattttcacgattttccagtcccaaacaactcatggcttttctgggactggttccaggggaatattccagtggaaacagcattcgtcccaggggaataacaaaagttggaaacagcgaactgagacgtctgctttacgaagccgcctggtcttatcgtacacctgcaaaagttggtgcatggcttatatattaccgaccggattctgtaacacaatattccaaagatattgcatggaaagctcaacaacgattgtgttctcgttaccgaagtctgacagcaaaagggaaaaaatcacaagtagccattacggcggtggctcgtgagttgactggatttatgtgggatattgcacttgctgcccaatcatcattcagtcagcagaagcaaaattaa

SEQ ID NO: 464210 - DNA, 819 bp, Shigella boydii
atgaaaaagagcactctggcattagtggtgatgggcattgtggcatctgcatccgtacaggccgcagaaatatataacaaagacggtaataaactggatgtctatggcaaagttaaagccatgcattatatgagtgataacgacagtaaagatggcgaccagagttatatccgttttggttttaaaggcgaaacacaaattaacgatcaactgactggttatggtcgttgggaagcagagtttgccggtaataaagcagagagtgatactgcacagcaaaaaacgcgtctcgcttttgccgggttgaaatataaagatttgggttctttcgattatggtcgtaacctgggcgcgttgtatgacgtggaagcctggaccgatatgttcccggaatttggtggcgactcctcggcgcagaccggcaactttatgaccaaacgcgccagcgatctggcgacgtatcggaacaccgacttcttcggcgttatcgatggcctgaacttaaccctgcaatatcaagggaaaaacgaaaaccgcgacgttaaaaagcaaaacggcgatggcttcggcacgtcattgacatatgactttggcggcagcgatttcgccattagtggggcctataccaactcagatcgcaccaacgagcagaacctgcaaagccgtggcacaggcaagcgtgcagaagcatgggcaacaggtctgaaatacgatgccaataatatttatctggcaactggtaatgactccaacttattgatagtgttttatgttcagataatgcccgatgactttgtcatgcagctccaccgattttga

SEQ ID NO: 464211 - DNA, 1215 bp, Shigella boydii
gtgaaactcaatgcccgtcaaatagacacagccaagccaaaagagaaggcttacaagctggccgatggtggcggtttgtctctcttggtaaaacctaatggaggtaaatactggcgacttaaatatcgtgtagctggtaaagagaagctattggcactaggtgtgtatcctgaggttactctagccgatgctcgggcaaaacgtgaagatgcgaaaagaggtatcgctggtggtatcgatccgatggaagcgaaacgagaggaaaagattgcccgggaaacgcagttaaacaacaccttcaaagatattgcccttgagtggcacagcagcaaattaaaaaaatggtctgctggttatgcttcagacatcctcgaagccttcaacaaagatgtgttcccttacattggcaaaaaaccaatcgccgaaatcaaaccacttgaacttctgaatgtgctgcggcgcatcgaggggcgcggtgctacagaaaaagccaaaaaagtgaggcagcggtgcggggaagttttccgctatgcaatagtcactggtcgcgcagagtataaccctgcaccagaccttactagcgcgatgcaaggccatgaatctaatcattaccctttccttacagctaaagaattacctgattttttcaaggcattgtccagttactcaggaagcgcattggttgttatggcggctcgtctactggttatcaccggcttgcggactggcgaactacgtggcgcattatgggatgaaattgatttcaacaaggctatctgggagatacccgcttcacgtatgaaaatgcggcggcctcatattgtgccattgtctgatcaggctctttcgcttattgggaagattagagaaataacaggcaattaccctcttatgtttcccgggcgcaatgatccaaggaaaacaatgagtgaggccagcataaaccaagtgtttaagcgcattggctacgctggacgtgtaactggtcatgggttccggcacactatgagcacgattttgcatgagcagggctataacaccgcgtggatagaaacgcagctcgctcacgttgataagaactcaattcgtggcacatacaaccatgcgcaatatctggatggaaggcgggagatgcttcaatggtatgccgactatatggatgcgctggagaaggaggagaacgttgttcatggttcgtttgggaaacgagcttaa

SEQ ID NO: 464212 - DNA, 882 bp, Shigella boydii
atggtgagagccaaaaaacaagatttagcatggtttgatattagtaattatgaatttttaaatgatttaaccttgccggacttgattcaagaattagagtggcgcgattttttattgcgtcatgcaaaagatgacactgctatattcaaagaagagtacgatataaaatatgaaaggattttttcgggcgctcctaacctaaccattctcaatgaagaagaggaagaggtcgaagaatttattcgcaaagtaaatgatgaagccccatcattaagaaatgagtacgatgatcttccctcattatcttcagctatgggggttagtccagtaacattttcagagctggccatgtactctttctcatcgatagatcaaggcttttttaaaagagacgaagaggattgctacctcaaggcaaacgctatgcttgcgagtgttactggaaacctaagtaattgttcccctaacatcatactcgtttctatagatttagatgacgccacagatgacgaaattattaccagcctgactcaccttctacctctatggcgaaaagagttaaaagtaccagagagagagcatgtcgctcagaaaaggattggattaaagacccttcagaagttgatatctaatagagtgatacctattgttgatctgctgatttggggtgagaagtcaggtaaggaagtgagcaatccgatgatttctgccttggtttttagtgatgatccgaaagatacgcaggctattaaggaatcaataaagccttttgcacttgaatctataagcgagagatacacccgcttgcttcagctttatgtaaacaaagacagagaaatgagcttgataaaaatatctgatttaatgagtagagatttatag

SEQ ID NO: 464213 - DNA, 198 bp, Shigella boydii; identical to SEQ ID NO: 19300

SEQ ID NO: 464214 - DNA, 432 bp, Shigella boydii
atgaataagaaaaaccgcccattacaggcggctaattcagatattcgcgtatctgatgttacgccccttacaaaatcccttcaagcaccaaagcgcacaccgaaaaagcatcgtgccagagtctatatgctgcgtactggtatagagggatggacagaaaatgacattcttcgctactgccgtctgtcttctggtcgtaactatgcaacagagttagaacgccagcttggaatcactctggaacgtatcgacgaaaagaatcctgatggtatcggaacacaccttcgctaccgtttctcctgccgtggtgatgttctgaaagtgatcactcatattaaccatcttgcgaacataaatgatcacaacggactttctcagcaggaaattgccgacattctgaaactctacccggacgcgtttaacgccgcttaa

SEQ ID NO: 464215 - DNA, 180 bp, Shigella boydii
atgtctaagccaacaggaacaccacaaccacaaaaacgctacaaagatgcccacggagcactcgttactgtcgaaagcgtgtctcacaaccgagtgacgttttatcgcgacgggtatcaatcgccatgcgtacaaccgctggcgcgtttcatgaaggagttcgcggaggttaaccaatga

SEQ ID NO: 464216 - DNA, 345 bp, Shigella boydii
atgccagttttgcagtggggaatgttatgtgtgctatcacttctcctttctattggtttcctcgcggtacatctcccggcggcgctattacttgggccgatgatcgccgggatcatcttcagtatgcgcggaattactctgcaacttccccgctccgcttttctcgccgcgcaggccattcttggctgcatgattgcgcaaaacctcactggttcgattctcaccacgctggccgccaactggccgatcgtgcttgctattttactggtgacgctgctttccagcgccatcgtgggttggttattggtgcgctatagctcactgcctggaaataccggtgcctag

SEQ ID NO: 464217 - DNA, 300 bp, Shigella boydii; identical to SEQ ID NO: 460403

SEQ ID NO: 464218 - DNA, 1800 bp, Shigella boydii
ttggtaccagcccgttatatacacattcgtgaatgtttgtccggccagtttggttttggcgttgaacgcgatgccgtgtttggctttttatcgctgatcttctggctgctaatctttgtggtttccattaaatatctcaccttcgtgatgcgggcagataacgccggtgagggggggatcctgacgttgatgtcgcttgccgggcgtaatacgtcggcgcgaaccacatcaatgctggtgattatgggcctaatcggcggcagctttttctatggtgaagtcgtcataacacccgctatttcggtgatgtcagccattgaaggtctggaaatcgtcgccccgcagctggatacctggatagttcccctctcaattatcgttctcactttattatttatgattcaaaaacatggcacggctatggtcggtaagctgtttgcgccgatcatgctgacctggtttttgattctggcaggactggggttacgtagcattattgctaacccggaagtgctgcatgcgctgaatccaatgtgggcggtgcatttcttccttgaatacaaaacggtttcttttattgcattaggggcagtggtgttgtcgattacggggggcgaggcgctgtatgctgatatggggcactttggtaagttccctattcgcctggcgtggttcaccgtcgtattaccttccttgacccttaattacttcggtcagggagcgctgttgttaaagaacccggaagcgattaagaacccgttcttcctgttggcaccggactgggcgctgatcccgctgctgatcatcgccgcactggcgacggtaattgcctcgcaggcggttatctctggcgtcttctcattgacgcgtcaggcggtacgtctgggatatttgtcgccgatgcgcattattcacacctccgaaatggagtcagggcaaatctatattccgtttgtgaactggatgctctatgtcgcggtcgtgattgtgattgtcagctttgagcactccagcaacctggcggcggcgtacgggattgcggtgaccggaaccatggtgctgacgtctattctctcgactaccgtggcacgtcagaactggcactggaataagtattttgttgcgctgatcctgattgctttcctttgtgtcgatattccattgttcaccgctaacctcgataaactgctctccggcggttggttgccattgagcctcggtacggtgatgtttatcgtgatgaccacctggaagagcgagcgtttccgcttgctgcggcggatgcatgaacatggtaactctctggaagcgatgattgcttcgctggagaaatcaccgcctgttcgcgtgcccgggaccgcggtgtatatgtcgcgtgcaatcaacgtcattccctttgcgctgatgcataaccttaaacataacaaggtattgcatgagcgggtgattctgttaactctgcgtaccgaagacgcgccatatgtccataatgtccgtcgggtacagattgaacaactgtcgctcactttctggcgcgtggtggcaagttatggttggcgagaaacgccaaacgtggaagaagttttccaccgctgcggtctggaaggattaagttgccggatgatggaaacctccttctttatgtcgcatgagtcgttgatcctcggcaaacgcccgtggtatttgcgtctgcgcggcaagctgtacttgctgctgcaacgtaatgcgctgcgtgcaccagatcaatttgaaatcccgccaaacagggttatcgaactgggtactcaggtcgaaatctaa

SEQ ID NO: 464219 - DNA, 531 bp, Shigella boydii
atgtctttaaacgattctaaaatccgcaagttaaaatcttcttcccgtccggtaaaactctccgactctcacggtctgtatctgctcgtcaatccgggcggttcgcgcatctggtatctcaaatatcgtttcaacggaaaagaatccagagtcagtcttggcgcatacccgctggtctcactggcagaagccaggcaacagcgcgacggtatccgcaagttactggcgcagaatatcaacccggcgcagcagcgcatggcagagaaagccgcctgctcccctgaaaagtgctttaaagcggtggcgctggcctggcacaaaaccaacaaaaaatggtcggctgattatgccgcccgtattctcgccagtatggaaaaccatatcttcccggcggttggtcatttgcccgttgccaaacttaaaacgcaggatttcactgccctgctgagggttattgaggataagggctttctggaagtcgcgtcccgcacgcggcagcaactcagcaacatcatgcgctatgccgtatag

SEQ ID NO: 464220 - DNA, 639 bp, Shigella boydii
ttgtccgaactgcttggccgcatcggtgactatcagcagggccgggagttaacccggctggcggaggtgctgacactgcacctgttcatccgttccagcgaactgcgtttcgcccgctggagcgagatcgatttcaggcacaaaatctggaccatccccgccacccgcgaggccatcgacaaagttcggttttcggggcgtggcgcaaaaatgcgtactccgcatatcgtaccgctctcccgccaggcgattgcccttctgaaacagatacaggagctttccggccatctggatctggtgtttcccggcgatcataatccgtacaagccaatgagcgaaaacacaaccaaccgggcgctgcgcctgatggggtatgacacgaaaactgaaatctgcgggcatggactcagggcaatggcctgtagcgccctggtggagtcggacctgtggtcacgcgatacggtggagcggcaaatgagccaccaggagcgcaacagcgtgcgggcggcatatgtgcataaagcagagcatctggaggccagaaaggccatgatgcagtggtggtcggattatctggatgtgtgccgcgaggggtatgttgcgccgtacatttatgcccggcagcataaggcagcctga

SEQ ID NO: 464221 - DNA, 885 bp, Shigella boydii
atgagtaaattaagcagtgaaatgaaggcgctggcgaagaaagcgggcggcagcttcaaaacggtgaatgaccgtatccatattacaaaacggttcagtgaacatttacgggcgctgaatatccagatccagcgggtggagcagatcaaggttcgccatatcgaatgctacattgaggaacggctggagcaggatattggtttacgaacgctgcaaaacgatatggcggcactgcaggccgtgctgagacaggctggacgcaggcaggtggtggagcatccgcgtctgaccaataaggcattaggggtgtcaggcgcttcgcgcaacggcacgcgccgcgccatcacgccggaacattaccagcaggtgatggagaaagcccgcactgaggacgcagggctggcagcagcgctggagattgcgcggctgatggggctgcgttcgcaggaggcggtacagagttcacagtcgctgaaaacgtggctgaaagccattgagcgcggggaaaaccggctgaaagtggtgtttggcaccaaaggcgggcgtccccgttatacgacagtcctggatactggcgcagtcaggaaggctctggaaaagtccttactggtcgcggatcgacacaatggcaggctgatcgacaagcctgatctcaaaatggcgctggagagctggcacaaacaggtcattaaggtggggctgaagggggaattttcccctcactccctgcgctatgcctgggcgcaggacgcgatccgccattatctggcgcagggattcagcgaaaaggaatccctggcgctgacggcgacggatctgggtcatggcgacggtcgcggtcgctgggtgaaacaggtgtatggataccgctggagggaggaataa

SEQ ID NO: 464222 - DNA, 537 bp, Shigella boydii
atggcagggaagtttcgctgcattttgctgttgatagcagggctgtttgtatcatctctaagttatgcagaaaacccggagatcccttcttatgaagaagggatctcgctctttgatgttgaagccactctgcaaccggatggggtgctcgacatcaaagaaaatattcattttcaggcgcgaaatcagcagattaagcacggattttatcgtgatttaccacgactctggatgcagcctgatggggacgctgcactgctgaactatcatattgttggcgtcactcgtgatggtattcctgaaccctggcatcttgactggcatatcgggttaatgagtattgtcgtgggcgataaacaacgtttcttgcctcaaggcgactatcattatcaaattcattatcaggttaaaaatgctttcctgcgtgagggagattcagatctgttaatctggaacgtgactggtaaccactggccgtttgaaatctataagacccgattttcactcaagggtgatgctgccaacttactgatttag

SEQ ID NO: 464223 - DNA, 660 bp, Shigella boydii
atgagacaggaatgtatacaagcggttcagcaggcggcgcagcgcatgttaacggagcgagaaatacagaacattgaagaccgcatttatcgaaatatgcgctccattgctcgtgatgacccgatgtcgtggcgacagctttccgaatcagagcggctatatcgagcagcacaattggcatctgaagaattacagcgagaagcggcattaaagaaacgtcgtgtggctctcactatagccgcgcgtcagagattggataaatttatcaatagctatcaaggggctgatgggaaacttggcgctcttaaccgtactatagcttttaatgcagacggtaaatctaatttcctctctgttgaatccagaacaaaagccacccgtgattatgcattgagtcaattgcaggaggcattcgaagcagttgatcctcgcttttttggtctgtttgaagatgaagcgggcgtacgtgacctggtatatgaaatgcgggggcaaaatactggcaatgctaaagcaagaaaaggtgctaaggcgtggagagaagttacagagctgctgcgccgccggtttaatgatgctggtggggacattggctatctcgaaaactgggggatccctctggatttgcccctatatttccagacatctgttatcacttaa

SEQ ID NO: 464224 - DNA, 1803 bp, Shigella boydii
atgagttactttggccttaatccagtaaaccagaatcagcagcttgacgaagcagcatcaaatccagctggctttaacagcgatgttggttttttcgacaatgctgtaggagcggcattgtctggtttgtactccgggctggtggcaaagccagatcagttgctatgggtagggatggataaaatcgtatccccgattgctcagtttgttaacgaaaacacctcgctcaatgacacttcagtttcatacattgccgagcagagaaaactagcagagcagcaggttaagcggctgacgcctgatgccgcgacaaccggaaccgccgggcaggttctttatgggttgttcgatatgggcgggcaggctgttgtcggtacaacgctcggtggtccggtcggaggtgctgcggcggtaacttcgctacagggtttttctgagtttgaacgactgacagcgcagggggttgatttcaggacggcgcaggaagcgggattagtgcagggtattactgctggtgccggaacactgatccctatgagtctcgggttacgtgctggtggtgcgctagcggaaggtgtggcggctcagcttgcgcggacgggtgaaagttcagtgcgacgcgccgcggcaacagcagtacgtgcaacgccagatattgcctatgccgcaggtacaaatattgcgttcggtatggcacagcgcgggcttactgcaaaaacgcttcgtgatggtggctatagcgaaatggctaaccagtatgatgtgttggatcgacaggcaattgctattgatgctgttcttggggtggcttttggtggtgtcggcagatttattaactctcgcggcgagtctacaaacgcaccaaacttttcaccagttgatatcgatgctgcactggcggcgaatgccgctcatcatgctgaaattgatattgctcccggcgtgccgatcaatgtgctttcgcgcaattctcacattcaggctctgcgaaaagctatgtctgatgttagccaggggagacctgtagacgttgccagcattgttgagtctgcatctttcagtgaaattcctgggcgcaagaatctgctgtctcaggcagttattgaggctctgtcatctgtagatgatggagtaacggcgcgcgctatcgaaaatcggttgcttgaagaacaggctgcgcagcttttgccgcgtggcgatagacaggtttaccagtctgaaatcgctaatagccaacgaattatcgacaatctcactgaacagcgtgcacaaattcttgcagaagagccaaccggtagcggtaaagctttgtctcgtgctcgatcagataaacaggccagacttcgcgatattgatcaacgaatccggcaggcacaagaacgcctggaattttcccgtaacgtgttggcaccgcacgagcctggcggtcagttttttgaagctcgagcagaactggctcggagacagcagacagaaagtgaacttaatgctcaggctgtttcattctataaaacagcagaggtcaggacgccagacgaagtagctccttttgagcctgataaaatattgcaacaggcagaacaaaaaatgatgtcagatcaggcaggagatattgatctgcgcatagctgaagactcgctgcttgaatcacctgacatgataatcaccgtgctggatgatgatggtaatccacaatcgcgcagtgcgcgtgaagtactggatgaagcgaacagggaaagtgagcaggcaatacaggattccagcctgtttgatgtcgctgtggcgtgtttcttgagaggttaa

SEQ ID NO: 464225 - DNA, 2514 bp, Shigella boydii
atgccagtcgtaccaacagtatccggacgtcaggttgagagccgtggagttcagtcagcaggcttgcagacgttttctcagccaggtattggtgatgcttttgttcgggcagggacagaggcaattgatgtttttggtcaggcaaaacagcgtgcgaatgttgctatggctcaggatgcttctcttagcttaagccagataagcagcgatctgctgaataaccctgaaacaggtttgcttaacctgaaagggaaaaatgctattggaaaaggtcaggtgtatacgcagcagtttgatgcccaggtcgagcaactggctatgtcgctgccggatgaacaagctcgtaatgctttcatgcagcaggcgcagcagcagcgcattcagttcactacgcaggccgagcggcacgagatagggcaaattaatgcctacgaagaaggccagtttcaggcgacactgctgaacaatggtaaaaatgccgcagcattgtatggcgacaacgccgcatacgtattggctaacaagcaaactttccagcaaattgaggagtacggtgttgcgcatggctggagcgacgagcaaatacaggccaagaaaatcgagtttaaagagaaggttgctgatgccgcattgtcccagtggtcggcaaacaatgcgaccgcattcatccaaagtaatggcgagttaagtgatactgctgctggagctcgccgtgctgtagcagatagtgactcttccgagcgtgcccgtggcatacgcaacaataacccaggaaatctcgaatacagcaaaactaatccgtgggtaggccagaccggtgatgatggtcgatttgcgaaattcgaaacacctgaacacgggattcgtgcattagggcggaacctgatgtcgtatcagaggcagggtattgataccgtcagtgagataattaatcgctgggcaccgcctactgataaaaatgacactatgtcgtatatcaaagcagtgtgcgaacaacttggcgtttctgctgatgagcctctcgatgcatctaatcctgataccctgaaggcgctttgtgcagccattatccatcatgagaacggtagccagccatacagtgatcagcagttaactgctggtgtcagtgcagcacttggtttatcaacaattccaaccaacaccaaacgctataccggtaatgcagcattcgatgcggcatctcctgaggcgcaggcaagttttatgcgacaggcggatcaactgcgtcggcagcagcaggctgaatataaaacgatgattgacagccaggttcgcgatgcgacagctgcgtatatgcgtggcgttgaatttcctaacccacctggtgaggatgattttattgcagcttatggtgtcagagaaggaaacctgcgatataccgagtttaagaatacgcagatcgccggacagtatataggttctttccgcaacatgccgacaagcagcattacagcatatgttgagcaattacgcccggatactggtgagacaggggaggggtatgcggcacgcgcagctctttatgacaacgttgtttcggctgcaaatcaggtgataaagcagcggcaatcggatcctgtgcagttctctcttgccgccggacaggctaagcctatcgacatgagcaataaggataactttggacagagcgttgccttgcgtgccgctcaggtcagtgaccttgccaagtcatatggcactccactgacgttcttttccaaagacgaggccaatcagatcggtgttttctttcgtgatgcgcccgtttcccaacaggcagcatatctcgataccatcaggcaaagcactggcggtgggcaggtgtatatgtcagcactacagcagatcagtgccaacgctccatctgctgccgttgccgggatactgatggataagcctggtggtattttggcagaaaaaaactggtttaatccggatgtttccgtgtctcctgaaaccgctgcgcagacaattcttgctggcgcggcggctcgtaaaggtactgatgatgcgaaaggtattccgatgcctaaagatgctgatcttcgccttgagttttctgacatggtgaaggatgcatttgctggtgatgctcagggggcatcaatggcatacgagatcgcaaaggactattacgctggtgtgatggcgaaaaaaggcgtggtatcaggcgaaattgacaatgatatctggaaacaggctgttaacgtagctacaggtggcgtgcatgactataacggaatggggaatgttcttttgccgtggggaatgtctgcagagcaattcgataagcaggttaatcaggcttggaatgaacaagttgtcggcacagggataaaaacaccgcctggtcagtatggtttgcaaagttacggcgatagtcagtacctggtgaaacttggtactggttatctgctaaaagatgatggttctcccgttgttcttgatctgacacagaagcgtcagagattctccggagatattccgcaatga

SEQ ID NO: 464226 - DNA, 546 bp, Shigella boydii
atgtgcgatccggttattgctggtggcgcaatgctcgccatgagtggcattcaggcatacacccagtaccaacagggagagtatgcctcgaaggttgcagaagcgaacgcagatatagccacagctcaggcaaatgatgcaataaacagaggtaacgctgaagctgagcaacggcgcagagagacccgacagcggcttggtacacaggcggcgacaatgggggcgaccggcgctgatttatctaccggtaacgcgctggacatatttggcgacacagctcagtttggcgctcttgattctctgacgacggtgaataatgcgcaacgcgaggcttacggttatcaggtgcaggctgctaactataaagcagaagccagttcagcccgtaaacaggggaatgtgggagctgcaacaacattgctcactgcgcctctgaaggcatacggtgcgtaccagatgtttggtgggacgtggagtccgtttactcaaagcactcctgcgccaatcggggcagcagcaggaaccagattacccggaggattataa

SEQ ID NO: 464227 - DNA, 465 bp, Shigella boydii
atgatcgatgttcgaattattcccgccaccgaagagcatcttcagatgattttgccggatgttcgtcaggctgatattgacgaactgtatgcggtatcgctgatgactaccgaagatgcgctgcgtgttggtcttcgcactgcgactatggcctggtcagggttcgcgaacggagaactggtaaccatgtttggtgtatctccggcgtcaatgatcggtggcaatggtacaccctggctggtcggaaccagccgtattgaaaaatatcagaagacatttcttcgccactgccgacctgtattgcagcagatgctggcagtttatccgcgcctggaaaactacgtcgacgagcgaaaccatgttgccaaagcatggctgcactggcttggattcaggcttgaagaagccgcgccttatggtgctcttggtcttaatttccacagatttcacatggagagaaaataa

SEQ ID NO: 464228 - DNA, 2472 bp, Shigella boydii
atggctatcagttggacacagcccagctttgccggtggtgagattggaccgtcgttgtacggtcgtatcgacatggcgaagtaccaggtggcattgcgcaagtgcgataactttatcgtgcggcagtatggcggcgttgagaatcgacctggtacgcgttttgtcggtgccgccaaatacccaaatcggaaatgccgcctgatcccgttccagttctcaacggttcagacctatgctctggagttcggacaccagtacatgcgcgttatcaaagatggtgcgttggtgctgaacagcagcaatgttatttatgaaattgccacgccatatactgaagccgatctgttccgaattaaattcacgcaaagcgcagacgtgcttacgctggttcatccggcatacccgccgaaagagttgcgtcgctatgcgcatgacaactggcaactggttgatgtggtaacgaagaacgggccatttgaagatatcaatattgatgagtcagtgacggtttatgccagcgccagcaccgggacaattacgttaacggcaagcgcctctatttttggcgcggagcaggcaggcaaattgttctatctggaacagcctgcagtggattctgtgccggtatgggaaaccagtaagagtacgtcgattggcgatattcgccgtgcagacagtaactactatcgcgccgttacagcaggcaaaacaggtactttgcgcccttcgcatacagaaggcacatcatgggatggctggggcggatccggtgatgatgatactggcattgagtgggaatatctgcacagtggttttggcattgcccgtatcactgctgcaaatggaactactgcaactgccgaggtgatttcctatatcccttcgcaggtcgtgggcgaggataatgccagctataaatgggctaaatatgcctggaacagtgttaatggttatcctggcactgttgtttattatcaacaacgtctttacttcgccgcatcgactgcgttccctcagactatctgggccagccgtaccggggattataaggattttggcaaaagcaatcctacgcaggatgacgacagaattatctacacctatgccgggcgtcaggttaatgagatccgccacctgattgatgtcggttcgctggtggcactgacttccggaggtgagtacgtcatcaccggcgaccagaacaaagtgttaaccccatcatcatttgcattcagctctcagggatcaaatggctcgagcaatgtcccaccaattgccgtggcgaatattgctctgttcgtccaggagaaaggcagtgttgtccgtgatctggcctactcattcgatgttgacggctatcaggggaacgacctgaccatccttgccaatcatctttttcagaagcacagcattgttgactggtgcttctctattgtcccttactccagcgccttctgcattcgtgatgacggtaaattactggtgatgacctatctgcgtgatcaacaggtttttgcatgggcaccacagtccagtaccggaaaatatgaaagcacatgcagtatcagcgaaggcaatgaagatgcggtgtatttcgtcgttaaccgaaccgttaacaggcaaacagtgagatacatcgagcgactgtccagccgtttatttaccagcgatgaagatgctttctttgttgattctggccttagctatgatggaagaaatacgtctgacagaacgatgaccatcactggtggttctggtgaatgggattaccgcgcggaatatacaatcagtgtttctggtggtgcgtacttcaccagtagtgatgtcggtgcgcaactacagttcccttataccggaactgttcctgatactggcgatgaagtgtcaaaagaattacgttgcgacattatttctgtaaccagcaataccgcagtagtggttcgtgctaacaggaacgtcccgccatccctcaggaatgtggctaccacaaactggcagatggcgcgccggacatttggcggcttgtctcatcttgaaggccagaccgtaaacatcctctctgatgcgaacgtggaaccacaaaaagtggtttccggaggtgccgtcacgctggaatcaccgggggctgttgtgcacatcggcctgccaataactgctgaattcgaaacactggatatcaacattaacggacaggaaacgctgctggacaaaaaacaggcgatcccgtccgttactctggttgtgaatgccagtcgcggcatctgggcgactacgcccggcggtaaatggtacgaatatccacagcgtgaattcgagttctacgatgatcctgttgatgacgctaccggaaaagtagaagtgaaactggacagtaactggggcaaaaacggacgtgtaagaatccgtcagcttgacccgttgccgctgtctgttcttgccgttattcctcgtcttactgttgggggattctga

SEQ ID NO: 464229 - DNA, 606 bp, Shigella boydii
atggcctctgtagtagagatctgtaatcgtgcgctgtccaatattggcaacagccgcagcattaacagcctgaaggaagccagcaaggaagcgggggaatgttcgctgcactttgaggcctgccgtgatgctgttctttctgattttgactggaactttgctaccaaacgcgtggcgcttgcagatacgagcaatccaccgcctgactgggaatatgcgtaccagtacccgtccgattgtctgcgcattactgaaattatgcttcctggtgtacgcaatccaacagcagcaatgcgcgttcagtacgaagttggtgcagacaccaacggaacaggaaagttgatctacacagaccagccgcaggcatggctcaagtatgtctctcgcgtttcagatgtgaacatgtttgatgccatttttatggaagcgttggcctggcgtcttgcggcagctattaacatggcgctgactgggaatgcagacctcggtacgtttgccctcaatatgtacaatcgcgtgattcttagtgctggctcgcatagccagaatgaatcacaggaaccacagccaccggttgacgagtttaccattgcgaggttgtcctga

SEQ ID NO: 464230 - DNA, 324 bp, Shigella boydii
atggaactcgtaaacctcaaaaccggcactgacagctaccaggatgagagcggagaaaccagaactcgcgatgaatacccgtgggggctgtgcatcactcttaataacgacacattgaataagctgaaggcgcaacctcagggcgtcggaacagaagtgatgataactgcaaaggctgttattcgaggcctgtctgccagagaaactgacgatggtgttaatcgcagcgccgatctgcagatcactgatatggcgatcgctcctgtttccagggatgtagaaaaatcagcggctgaaactctgtacggtaacggaggtgagtga

SEQ ID NO: 464231 - DNA, 153 bp, Shigella boydii
atgagttctgataatgatatcgttttgactcataatctattcaccttatatatactggaggttttgaggatgatgattaattattatcgccagaacgaaatgtgcacgaaaaattgctataagaattgtgtcacttttatcattgtgatatga

SEQ ID NO: 464232 - DNA, 210 bp, Shigella boydii; identical to SEQ ID NO: 463045

SEQ ID NO: 464233 - DNA, 588 bp, Shigella boydii
atgaagaaacgtgtttatcttattgccgccgtagtgagtggcgctctggcggtatctggctgcacaactaacccttacaccggcgaacgcgaagcaggcaaatctgctatcggcgcaggtctggactctctcgtgggcgcagctctgggcggcggcgtgggttattacatggatgtgcaggaagcgaagctgcgtgacaaaatgcgcggcactggtgttagcgtaacccgcagcggggataacattatcctcaatatgccgaacaatgtgaccttcgacagcagcagcgcgaccctgaaaccggcaggcgctaacaccctgaccggcgtggcaatggtgctgaaagagtatccgaaaacggcggttaacgtgattggttataccgacagcacggggggtcacgacctgaacatgcgtctctcccagcagcgtgcggattccgttgccagcgcgttgatcacccagggcgtggacgccagccgcatccgtactcagggccttggcccggctaacccaatcgccagcaacagcaccgcagaaggtaaggcgcaaaaccgccgtgtagaaattaccttaagcccgctgtaa

SEQ ID NO: 464234 - DNA, 762 bp, Shigella boydii
atgtcgctcgtttgttctgttatatttattcatcatgccttcaacgctaacattttagataaagattacgccttctctgacggcgagatcctgatggtagataacgctgttcgtacgcattttgaaccttatgagcggcattttaaagagatcggatttactgaaaataccattaaaaaatatctacaatgcactaacatccagacagtgacggtgcctgttcctgcgaagtttttacgtgcttcaaatgtaccgactggattgcttaatgaaatgattgcttatctcaactcggaagaacgcaatcatcataatttttcagaacttttgcttttttcttgcctgtctatttttgccgcatgcaaaggtttcattacactattaactaacggtgtgctatccgtttccggaaaagtgagaaatattgtcaacatgaagctggcgcacccatggaagctgaaagatatttgtgactgcctgtatatcagtgaaagcctgttgaagaaaaaactaaagcaagagcaaacgacattctcacagattctattagatgccagaatgcagcacgcaaaaaatttgatacgcgtagaaggttcagtcaataaaattgccgaacaatgtggttatgccagtacttcttattttatttatgcgttccgcaaacatttcggcaacagtccgaagagagtttctaaggagtaccgttgtcaaagtcacacgggtatgaatacgggcaacacgatgagtgctttagctatttga

SEQ ID NO: 464235 - DNA, 474 bp, Shigella boydii
ttgtctggagattcagggggccagtctactctggtactggacgccaattattaccgtgatgccgagacgctggagaagagagtacgtttacagggaaaatgccagctagcagaattaccttctgccggggtgagttgggaaaccgatgataatggcttcgtgattaaagccagcagcaaacaaatgcagatggaatatcgctatgatgatcagggttatccactgggtaaaaccacgaaaagtaacgacaaaacattatctgtcagcgccacgccatcaacggacccgatcaaaaaattagattacacagcggttactttactgaataatcaacgagttggtaatgtaaaacagagctgtgaatatgacagtcacgccaatccggtggactgtcagctgatcattgttgatgaaggagtaaaacccgccgtcgaacgggtttacaccatcaaaaatacgatcgattattattaa

SEQ ID NO: 464236 - DNA, 3435 bp, Shigella boydii
atggatacccaacgattccaatcccaatttcattggcatttatcgtttaaattttctggcgcgatagcagcgtgcttgtctctgtctcttgtgggaacagggcttgctaatgctgatgattcgcttccttccagtaactatgcgccgcccgccgggggaacattctttttgcttgctgacagcagttttagcagcagtgaagaggcgaaagtgcgactggaagcgccggggcgtgattatcggcgctatcagatggaagagtacggcggcgtggacgttcgcctgtatcgtattcctgacccgatgacatttttgcgccagcagaaaaacctgcatcgcattgtggtgcaaccgcaatatctgggcgacgggctgaacaatacgctgacctggctgtgggataactggtacggcaaatctcgccgcgtaatgcagcgtactttctcttctcagtcacggcagaatgtgactcaggcattacccgaattacatctcggcaatgccattattaaaccttcccgttatgtacagaacaaccagttttccccgctgaaaaaatatcccttggtggaacagttccgttatccactatggcaggctaaaccggtcgagccgcagcaaggggtaaaactggaaggcgcatccagcaatttcatctcgccgcagccgggtaacatttatattcctctcggccaacaagagccgggactgtacctcgtcgaggcgatggttggtgggtatcgggcgacgacggtggtgtttgtttccgataccgtggctcttagcaaagtgtcaggcaacgagcttctggtgtggaccgcgggtaaaaaacagggtgaagcgaagcccggctcagagatcttgtggactgacggtcttggcgtgatgacccgcggtgtgaccgatgacagcggtaccttgcagttacaacatatatcgccagaacgttcatacattctgggtaaggatgctgaaggcggcgtttttgtctccgagaacttcttctacgaaagcgaaatctacaacacccgcttgtatatttttaccgatcgcccgctatatcgcgcaggcgatcgtgtcgatgttaaagtgatgggccgcgagttccacgatccgttgcattcatcccccatcgtcagcgccccggcgaagctttcggtgctggacgctaacggcagtctgttgcaaaccgtcgatgtcacgctggatgcgcgcaatggcgggcagggaagtttccgcctgccagaaaatgccgttgccggaggttatgagttacgtcttgcttaccgcaatcaggtctatagcagcagttttcgcgtggcaaactacatcaagccacatttcgagattggtttagctctcgacaaaaaagagttcaaaactggcgaagcggtcagcggcaaactgcaactgctctacccggatggcgagccggtaaaaaatgcccgcgtgcagttaagtttgcgcgctcagcaattatcaatggtcggtaacgatttgcgttatgccggacgtttccccgtgtcgctggaaggcagcgaaacggtgtccgacgccagcggtcatgtggcgttaaatctccccgccgccgataaaccgagccgttatttgttaaccgtctccgccagtgacggcgcggcgtatcgtgtcaccaccaccaaagagatcctcattgaacgcggtctggcgcattactcattaagtactgccgcacaatacagtaatagcggcgagtcggttgtgttccgttatgccgcgctggaatcttcaaaacaggttcctgttacgtatgaatggttgcgtctcgaagaccgcacgagccatagcggagagctaccgtcaggcggcaaatcctttaccgtcaatttcgctaaacctggcaactacaatctgacattacgcgataaagacggcttaattctcgctgggttaagttatgccgtcagcggtaagggcagcacggcgcatacgggtacggtagatatcgtggcggataaaacgctgtaccagccaggcgaaaccgcgaagatgctgattacctttccggagccaattgatgaagcattattgacgctggaacgcgatcgcgtggaacagcagtcgctgctttcgcatccggcaaactggctaacgctacaacgtttaaacgatacccagtatgaagcccgggttccagtgagcaattcctttgcgcctaacatcactttttcggtgctgtatacccgtaatggtcagtacagttttcagaacgccgggatcaaagttgccgttcctcagcttgatatccgggtgaaaacggacaaaacccattaccagcctggtgaactggtcaatgtcgaattaacctcgtcgctgaaaggtaaacctgtttctgcacagctaacggtaggcgtggtcgatgaaatgatctacgcgctgcaaccagaaatcgcgccgaatatcggcaaatttttctatccgctggggcgtaacaatgtgcgtaccagctccagtctgtcgtttatcagctacgaccaggcgctctccagcgagccggttgcgcctggcgcaactaaccgcagcgagcggcgagtaaaaatgcttgaacgtccacggcgtgaagaggtggataccgcggcatggatgccgtcactcacaaccgataaacaaggcaaagcgtatttcacgttcctgatgcctgattcgttaacccgctggcgtatcaccgcgcgtgggatgaacggcgacgggctggtcgggcaggggcgtgcttatctgcgttcggaaaaaaatctctacatgaagtggagtatgccaatggtgtatcgcgtgggcgacaaaccggcggcaggactgtttatcttcagtcagcaggataacgaaccggtggcgctggtgactaaatttgcaggcgctgagatgcgccagacgctgacgctgcacaaaggggcgaattatatttcgctggcgcagaatattcagcaatctggcttgttaagtgcagaactgcaacaaaatgggcaagtgcaggacagcattagcacaaaactgtcttttgtggacaacagcaggcccgttgaacagcagaaaaatgtcatgctcggcggtggcgagaacgcgctgatgttgcccgagcaggcgagtaatatccggctacaaagtagtgaaacgccgcaggagattttccgcaacaatcttgatgcgttagtcgatgaaccgtggggtggggtgatcaacaccggtagccgtctgatcccgctcagtctcgcctggcgttcgcttgccgatcatcaaagtgccgccgctaacgacattcgtcagatgattcaggataaccgtctgcggctgatgcaactggcggggcccggagcgcgctttacctggtggggtgaagatggcaatggtgacgccttccttacggcatgggcatggtacgccgactggcaggccagctag

SEQ ID NO: 464237 - DNA, 1650 bp, Shigella boydii
gtgaactggcgcagaatcgtctggctattggcgttggttactcagccaacgcttgcggaggagacgccgttacaactggcactgcgtggtgcgcagcacgatcaactgtatcagctgtcgtcatcaggcgtgaccacagtctcagcattacctgactcgctcaccacgccgttagggagtttgtggaaactgtatgtttacgcctggctggaggatacccatcaaccggagcagccctatcagtgtcgcggaaactccccggaagaggtttattgttgtcaggctggggagagcataacgcgcgataccgcgctggtacgttcctgtgggctctattttgcgccgcagcggttgcatattggcgcagatgtgtgggggcaatactggcaacagcgtcaggcgcctgcgtggttagcgtctcttactacgctgaagccagaaacctcggtaacggttaaatcgctgcttgattcattagcgacgttacctgcgcaaaacaaagctcaggaagtcttactggatgtggtgctggacgaggcgaaaatcggtgtcgcatccatgctcggtagtcgggtacgggtgaaaacctggagctggtttgccgatgataaacaggaaatccgtcagggtggttttgccggctggttaaccgatggtacaccgctgtgggttactggcagtggcaccagcaaaacggtactaacccgttatgcgacggtgcttaatcgggttttgccagtgccgacgcaggttgccagtgggcaatgtgtagaggtggagctgtttgcccgctatccgctgaagaaaatcacagcggaaaagagtacgacggcagtaaaacccggcgtacttaatgggcgctatcgtgtgacgtttactaatggtaaccacattacgtttgtcagccacggtgagacgaccttactgagcgaaaagggcaaactgaaattgcagtcgcatctcgatcgtgaagagtacgttgccagagttctggatcgcgaggcgaaaagtacgccccctgaggcagcgaaagccatgaccgtggcgattcgcacttttttacagcaaaacgccaatcgggaaggcgattgcctgaccatccccgacagcagcgccacgcagcgtgtttctgcttcgccagcgaccacgggggcgcgaacgatgaccgcctggacgcaggatctcatctatgcaggcgatccggttcattatcatggcagtcgagctaccgaagggacactttcctggcggcaagccacggcccaggcggggcagggagagcgttacgaccagatactcgcgtttgcttatccctacaacagccttagccgctggggagcgccacgctcaacctgccagttattacccaaagcgaaagcctggctggcgaaaaaaatgccgcagtggcggcgtatattacaaggcgagacggggtacaacgaaccagacgtgtttgcggtctgtcgtttagtctcaggtttcccctataccgatcggcagcagaaacggctgtttattcgtaacttctttacgcttcaggatcggctggatttaacccatgagtatctgcacctggcctttgatggttatcccaccgggcttgatgagaactatatcgaaacgctgacccgacaattattaatggactaa

SEQ ID NO: 464238 - DNA, 534 bp, Shigella boydii
atgaacgacaccgtactggacggtcgcgatgtaaccaaaaccaacaccaccgacgtagcgaccttcaagtctgttaactacggtcctctgggatacattcacaacggtaagattgactaccaacgtaccccggcacgtaagcacaccagcgatacgccattcgatgtctctaagctgaatgagctgccgaaagtcggcatcgtttataactacgctaacgcatccgatcttccggctaaagcactggtagatgcgggctatgatggcatcgttagcgctggtgtgggtaatggtaacctgtataaatccgtgttcgacaccctggcaaccgccgcgaaaaacggcactgcagtagtgcgttcttcccgcgtaccgacgggtgctaccactcaggatgctgaagtggatgatgcgaaatacggcttcgtcgcctctggcacgctgaacccgcaaaaagcgcgcgtcctgctgcagctggctctgacgcaaaccaaagatccgcagcagatccagcagatcttcaatcagtactaa

SEQ ID NO: 464239 - DNA, 393 bp, Shigella boydii
atgcgtgatattcagatggttctcgaacgctggggagcatgggcggcaaataatcatgagaatgttagttggtcgccaattgctgcggggtttaaaggcctcatcccctcaaaagtaaaatatcgaccgcaatgttgcgatgatgatggtcttatcattagttcagttatggcagttctcaagaaaaaggaaccatatcaataccaattactggaaatgtattatgtatatgggatcacattacgagcgttaggggcgaaaatggggatatcgcttaatcaagttgttattagattgcagaaagctgaagggtttgttgaagggtgtctggcaatgctcgaggtatctttagaaatggattgctatatgaatcacgaaaatgattcaagataa

SEQ ID NO: 464240 - DNA, 399 bp, Shigella boydii
atgagcatggagctgatggtgaaagcgatgaaaattcgtgtgggaaatccgttgcgaaaactggttctgattaagctggctgataatgccagcgatcagggcgagtgctggcccagctatcagcatattgctgatcagtgcgagattagcaaacgttctgtgatgaattatattacggctctttgtgaatctggactggtaaaaaaagtttcccggaaaggtgaaaaagggaactcgagcaatatttatcttcttcgtcttgatggtgcaaaagattcaccaggtggtagtgcaaataattcactacctagtgcagcaaattcaccaggtggtgtaggagttgcaccagggggtagtgcaggagattcacccagaaccagtcaaagaaccagtcaatga

SEQ ID NO: 464241 - DNA, 852 bp, Shigella boydii
atgatcatttcaagaccaaatattgattctgcaatttcgggacgttacactgtctctgcaccttataaagtgggtgccgggggtcgcagcccggaattgtcaacggcgatatatgacgcgccagcgtcttttttatcgtccgcgctcacgcacgccagaattatggtgggctgggcaggggagccgaaaggctcgccggtctccgttgacgccggtactgcgaaccctgttcagtctgccaccagtgagtttcgcagctccggtggtggaagttttccacagtcaacggaggctgccatcatggctacgatcccaaccctcactcaacctgaaattgccatcgttgatggtcaggctgttacttcatccctggctgttgccaacttcttctccaagcgtcatgacgatgtactgaaaaagatccgcacgcttgaatgctccgcatcattcactgcccgcaatttttcggtgagtgattacaccgattgcacaggccgcaaactaccttgctatcaaatcacccgtgatggcttcgcgttccttgctatgggctttactggcaaacgtgcagcccggttcaaagaggcatacatcaacgcctttaaccagatggagaagaatttatctggtgctgacgcggttgatatgtcagctgtcgcacgaaacgccagaggcgtatacctgcatttgcgtgaaatccatcaaatctggacaagccagctttatccaatgcttaaggccattgaatctccgctggctagcaaactgtacgaccgtgttggtgatgctgtttttggcgctgcacttgttgattccaggctgaatggttctgacaaggaggttcgcccatga

SEQ ID NO: 464242 - DNA, 708 bp, Shigella boydii
atgaacaccgcaatttttaacggcaaagcatccatgaccagcgttgagatcgcagagctggtgggtaaacgtcatgacaatgtgaaacgcactattgaaacattagccaaaggtggcgttgtccggtctcctcaaattgaggtttccgaaagaatcaataacttaggttttaaagttcaatatgagcattacctgtttgaaggagaacaaggtaagcgcgacagcatcattgtcgtcgcacagctctgtcctgaattcactgctcgcctggtagatcgctggcgcgaactggaagaacagatccgtaagccaatgagcgaaatcgaaatggttgccgcgatggctcttgaagcagttcgtcagcagaaacggatcactcaggtggaagaaaaagtcagccacgttgctgaaacagtcgagcaaattaaaaagggcactattcgtgagggctatgccggatatcgccaactgaaagcaaaaaccggtttgtcagatgataaatgccgcaatctggtgaacgcctatcagattcctacagacacccatgagttcatgacgccggacggattgttgtcacgtcgcgcaattgttgctgtggaaccgtttatggctgctttttatcgggttatggaggaagcagaaccgcgagggactcgctggtatcacccgaaaatggggttatttcaggttattggttggcagcggtga

SEQ ID NO: 464243 - DNA, 228 bp, Shigella boydii
atgattgccgccattgacatgggggattactaccgtgttccaccagacctgcgcgatcttaactatggaaaatacgtagaacaaggtgatagccgaatctcagcagtagaggattataactctcacaatacacagcgactggatgttgaagggatgaaaacgcttcttttgaaattaccttttattcgtgcactgcgtgcgggtgaacattacgatctggatgcctaa

SEQ ID NO: 464244 - DNA, 1104 bp, Shigella boydii
atgaaaatcctgattactggagctgatggttttattggacgtaacctgtgcttacgccttcaggaagcaggctactgtgaccttgttaagattgaccgcggttcaagtgcggctgatctggaaactggccttcaagatgctgattttgtctatcatctcgcaggtatcaatcgacctaaaaacgttgatgaatttgccgaggggaatagcaatctgactcaacagattgttgattgtcttttagccaagcataaaagcatacctattatgatcagttcttccattcaggctgaactggttaatgcttatggtcaaagtaaagctgcagcagaaaaacatattgaacgctatgcagctgaaagcggtgcagcttattttatttatcgttatccgaatgtttttggtaagtggtgtaagcctaattataattcgttcgtggcgaccttttgccataatattgccaacaatatcgatatcacgatcaatgactccttcgcgcctgttaatcttgtttatattgatgatgtctgttctgatgcgataaagctcttgtctggaaaggttgaaagcgggtacaaaactgttaagccagtatattcgacgacagtaggtgaggtggcggaattactttatcgcttcaaagaaagccgttccactcttgtcaccgaggctgtaggaacagggttcatccgcgcgctgtattcgacgtggttaagttatctcccagccgatatgtttgcgtattcagttccctcttacggagacgcccgaggggttttttgtgaaatgttaaaaaccccttcagcggggcagttttcattttttacagcgcatcccggcattacacgtgggggtcattatcatcacaccaaaaatgagaagttcctggtcattcgcggccaggcatgctttaggtttgaacatgtgattaccggtgagcgatatgagatgaatgtttcctcagatgagttcaaaatcgttgagacagtccccggctggacacatgatgttacaaatattggagcggatgaattgatagtcatgctgtgggcaaacgaaattttcagtcgcgatgagcctgatactattgcgagacctctgtaa

SEQ ID NO: 464245 - DNA, 1131 bp, Shigella boydii
atgaaaaaactaaaaattatgtctgttgttggtacgcgtcccgagattatccgtctgtcacgcgttctcgctaagcttgatgaacactgcgagcatattcttgtccatactggtcaaaactatgattatgagttaaacgaagtattctttaatgaccttggtgtacgaaaacccgattactttttaaatgctgctgggaaaaatgctgcagaaaccatcggtcaggttatcatcaaagttgatgaggtacttgaatccgaaaagcctgaagcaatgttggtgctgggtgatacaaactcctgtatttctgcaattccagccaaacgccgtaaagtgcctatcttccatatggaagctggcaatcgttgtttcgatcagcgcgtcccggaagagaccaatcggcgcattgtagaccataccgctgacatcaatatgacctacagcgatattgcacgtgaataccttcttgctgaaggcctcccagcggaccgaattattaaaaccggtagcccaatgtttgaggtacttacgtattatatgcctcaaatcgataattcggatgtactgtcgcgtctgaacctgcgttcaggcgaatttttcgtcgtcagcgcgcatcgtgaagagaatgttgattctcccaaacagctagtcaagcttgcgactattctcaatactattgctgaaaaatatgatttgccggttattgtatccactcatccgcggacacgtaatcgtattaacgagcaagggattgaattccatccaaatattaatctactgaaaccgttaggtttccatgattacaaccatttgcagaaaaattcacgtgctgtgctgtctgacagcggtacgataactgaagaatcttccattatgaatttcccggcggtaaatattcgggaagcacatgagcgtccagagggctttgaagaagcctctgtcatgatggtgggcctggattgtgaacgtgttctacaggcactggatattctggcaacacagccccgcggcgaaacccgtcttttacgacaagtaagtgactacagcatgcctaatgtgtcagataaagtcgtcagaatcgttcattcttatactgattatgtcaagcgagtcgtctggaaagaatactga

SEQ ID NO: 464246 - DNA, 1212 bp, Shigella boydii
atgaaacttgctttaatcatagatgattacctgcccaatagtacgcgagttggtgcaaaaatgtttcatgaattggctcaggaatttattcgccgtgggcatgatgttacggtaattacacctgacatctgtcttcaggatgatgtgtcctttagcaccttccagggggtcaagacatggcgtttcaaaagtgggcctctcaaggatgtgagcaaaattcaacgagccatcaatgaaacacttctatcctatcgtgcctggaattccattaaaagccagataaaaaaagagacttttgatggggtagtttattactcaccctccattttctgggggcacttagtcaagaaaattaaatctcgttgccagtgtccggcttacctgattttgagggatatgttcccgcaatgggtgatagacgctggcatgttaaaagccggttccctcatcgaacgctatttccgtgttttcgaaagatcatcttatcgccaggcaaaccgtatcgggctgatgtcagataagaatcttgaggtctttcgggttaacaacaaaggttatccttgtgaggttttgcgtaactgggcttctctcacgccgacggtaccaccccagggttatatcccattgcgtcagcgtcttggccttgatgataaagttattttcttctatggagggaatatcggtcatgcgcaggatatggggaatctgatgcgtcttgctcgaaaaatggctgagcatccgcaagcccattttttatttatcgggcagggggatgaagttgaattaatcaattctttggctgccgagtggtcattgcccaacttcacgtatttggcctctgtcaatcaggatgaatttaaatttatcctctcggaaatggatataggcttgttttcactttccgccagacattcttcgcataatttcccgggtaaattgctagggtatatggttcagtccttacctatactaggcagtgtgaatgctggtaacgatttgcttgatgtcgtcaatcaaaataatgccggattaattcatatcaatggtgaggatgacaagcttcatgagtccgcactgttaatgcttaaggatgttgctgcgcgacgtcaattcggcttaggcgcgaatgcattattgagagaacagttctccgttgagtctgcggcacagactatagaaatgaggttagaggcatgtaatgcgactcattga

SEQ ID NO: 464247 - DNA, 399 bp, Shigella boydii
atgcgactcattgatactcaccaacttgaagctttatacgaacaagccggaaaatctgcacgcttgcgcgctcatctcttattgcacaattcgcaccgagagaaagtgcaacgtctgctcattgccttggttcagggcagctatgtcgatccgcatttccatgaacttcctcatcaatgggagatgtttgtcgttatgcaggggcaggttcaagtctgtttgtacggcaaagatggcgaaatcattaatcaatttgtcgctggagagaatactgcaataagcgtagtcgagttttctccgggtgatatacacagtgtcgaatgtctctctccgagagcattaatgatggaagtgaaagaagggccttttgatccttcctttgccaaggcgttcatctaa

SEQ ID NO: 464248 - DNA, 1338 bp, Shigella boydii
atgccacttctcaatgatctgctcgatttcagtgaccatccgcttatgccaccgccctctgcacaactgtttgctgagcaccttcccgtcgagtggatacagcactgtctgacgctttctgcgcatgcgaccgttcgccgccgtcgtttaccgggggacatggttatctggatggtggtggccatggcctttttccgcaatgagccaattaccgatgtggttcgccgtctgaacctgagcgcggatggcgaagcggggatcaacctgctggcccgcagcgctgtcacccaggcgcgtcagcgcgtgggggccgccccggtggaatggctcttccaccagaccgcacagacatggggctcggaacgttacctgaaggatgactggcacggcctgcagctttttgccattgatggcgcacagttcaggacacctgatgaacctgagttgcgtgaatattatggctctgccaacacatccactgagcggcagagcgcctacccggtcatgcgtctggtggcgttgatgaatctgggaagccacattttgctgaatgccgtgaccgcgccttaccggcggagcgaaaccgtgctggctcactccatgctcgccactatcccggataactccattacgctgtttgacaagctcttttacagcgcagacctgctgctgacgctgaaccagcagggttgtaaccgccactggctactgcctgcgtggaagaatatcgcggcagaaacagaagaaagttacggtcccggagacaggcttctgaaactgaaggtgtcgctgcaggcgaggaaaaagaatcctgcactgccagagttctggtacgcccgggcggtgacttatgaggtgaacggtgtggagaaaacggtgctgacatcactcccggcagaccgctacaaagcaaaagaggtagcggaactttaccattcacgatgggaaatcgaagtcgggttcagaaacctgaaaagcagcccgctgaacaatgccctggtgctgagaagccgtaaggttgagctgctggaacaggaggtgtggggcatgttgctggcttacaacctgatacggtgtgaggcaacaaaagcggctgagaaacacaaaaaagcggcgtcagaaatcagctttaagttcgcgttccagtttatcgcgacagaaatgatagtgctgggaaatacggcatcaccggggaccatcccgaaacgactggagcatctgcggggtgctctggaagttgtgttcataacaaaacgcccccgaccatcaaggccgagggcagttaagatatcaaaaacccgttatccggtgaaacgcagcaccgctccgcttaagtga

SEQ ID NO: 464249 - DNA, 369 bp, Shigella boydii
atgggaaaacaggtaagtggattgagatgtggactgaactacagtccacatcaagatcgtgtccggttatgcagcaacaatgctgtcgatggccgctttcgcgtcagactgcgctttcgctgccatttccggaccgcatgcgatcccttcggcgaagacaaatttcacatcggtaatgccgataaagccgaggaacgtggacagatacggcgtcaccaggtccgttggtccatctttgtggatcccaccgcggctggtaataacgatggcttttttacccgttaccagaccttccggaccgttctaggtatagcggaaagtaacgcctgcgcgtgcaaccaggtcaaaatagtttttcaactgagttga

SEQ ID NO: 464250 - DNA, 1218 bp, Shigella boydii
atgatgtcgcgcctggaacatgtcgaagaagagaaaatcaattacgatttcttcctcaacctgccagaaatcgaccgtagcaaactggaacgtattgatattcgtacatcgcagctgattacaccgctgtttgaatattccggtgcttgctccggttgtggcgagacgccgtatattaaattgctgactcagctctatggcgaccggatgttgatcgctaacgccaccggctgttcttcaatttatggcggtaacctgccctctacaccgtataccaccgatgccaacggtcgtgggccggcatgggcgaactctctatttgaagataatgccgaatttggccttggtttccgcctgacggtcgatcaacaccgtgtccgcgtgctgcgtctgctggatcaatttgccgataaaatcccggcggaattactgacggcgttgaaatcagacgctacgccagaggttcgtcgagaacaggtcgcagctttacgccagcaactcaacgatgttaccgaagcacatgaactgctacgtgatgcagatgcactggtggaaaaatcaatctggctgattggtggtgatggctgggcttacgatatcggctttggcggtctggatcatgtattgagtttgacggaaaacgtcaacattctggtgctggatacgcaatgctattccaacaccggtggtcaggcgtcgaaagcgacaccgctgggtgcagtaactaaatttggcgagcacggcaaacgtaaagcgcgtaaagatcttggcgtcagtatgatgatgtacggtcatgtttatgtggcgcagatttctctcggcgcgcagctgaaccagacggtgaaagcgattcaggaagcggaagcgtatccgggaccatcgctgatcattgcttatagcccgtgtgaagagcatggttacgatctggcactcagccatgaccagatgcgccaactcacagctaccggcttctggccgctatatcgcttcgatcctcgtcgtgccgatgaaggcaaactgccgctggcgctggattcacgcccgccgtcagaagcactggaagaaacgttacttcacgagcaacgtttccgtcgtctgaattcgcagcagccagaagtggcagaacagttatggaaagatgctgcagctgatttgcaaaaacgctatgacttcctggcacaaatggccggaaaagcggaaaaaagcaacaccgattaa

SEQ ID NO: 464251 - DNA, 762 bp, Shigella boydii
atgattttaagtgcattttctctcgaaggtaaagtagcggtcgtcactggttgtgatactgggctgggccaggggatggcgttggggctggcgcaagcgggctgtgacattgttggcattaacatcgttgaaccgactgaaaccatcgagcaggtcacggcgctggggcgtcgttttttaagcctgaccgccgatctgcgaaagattgatggcattcctggactgctggatcgctcggtagctgaatttggtcatattgatatcctggtgaataacgccggattgattcgccgcgaagacgctctcgagttcagcgaaaaagactgggacgatgtcatgaacctgaatatcaagagcgtattcttcatgtctcaggcagcggcgaaacactttatcgcgcaaggcaatggcggcaagattatcaatatcgcgtcaatgctctccttccagggcgggatccgtgtgccttcttataccgcatcaaaaagcggcgtgatgggtgtgacgcgattgatggcgaacgaatgggctaaacacaacattaatgttaatgcgatagctccgggttacatggcgaccaacaatactcaacaactacgggcagatgaacaacgtagcgcggaaattctcgaccgcattccagctggtcgttggggactgccgagtgacctgatggggccgatagtgttccttgcctccagcgcttcagattatgtgaatggttataccattgccgtggatggcggttggctggcgcgttaa

SEQ ID NO: 464252 - DNA, 363 bp, Shigella boydii
gtgttgaccgcgggttatggtcgtcagtttttgaatggcccggtacacagtttccgctttgaattcggtccaggtgtgcgttacgacaaatataccgacaatgccagtgaaactcagccgctgggctatgcctccggggcttatgcatggcagttgactgacaacgctaaatttacgcagggtgtttcggtctttggcgcggaagacacaacgctgaactccgaaagcgcattaaatgttgctattaatgaacattttggactgaaggtggcttacaacgttacatggaactctgaacctccagagtctgcaccggaacataccgaccgtcggacaaccttatcgctgggctacagcatgtaa

SEQ ID NO: 464253 - DNA, 2298 bp, Shigella boydii
atggaagcgcgggaagcaaccgctacgggtgaatcatgcatgcgcgtcgatgccattgctaaggtcaccgggcgggcacgatatactgacgattatgttatggcgggcatgtgttatgcgaaatatgtacgtagccctatcgtacatggttatgccgtaagtattaatgatgaacaagccagaagtttgccgggcgtactggcgatttttacctgggaagatgtgcctgatattccattcgctacagctgggcatgcctggacacttgacgaaaacaagcgcgataccgccgatcgcgcactgctaactcgccatgttcgtcatcatggtgacgccgttgccatcgtcgtggcccgcgatgaactcacggcagaaaaagcggcgcaattggtcagcattgagtggcaagaattacccgttatcaccacgccagaagcggcgctggcagaagacgctgcaccaatccataacggtggcaatttactgaaacaaagcacgatgtcgacgggtaatgtccaacaaacaatcgatgccgccgactaccaggtacaggggcactatcagacccccgttattcaacattgtcacatggaaagcgtaacatcgctggcgtggatggaggatgactcgcgaattaccatcgtttccagcacccagatcccgcacattgttcgccgcgtggttggtcaggcgctggatattccctggtcatgcgtacgagtcatcaaaccatttgtcggtggcggttttggtaataaacaggatgtactggaagagccaatggcggcattcctgaccagcaagcttggcggcattccggtgaaagtttcccttagccgtgaagagtgtttcctcgcaacccgtacccgccacgcttttaccattgacgggcaaatgggcgtgaaccgcgacggaacattgaaaggttatagtctggatgttctgtctaacaccggcgcttatgcatctcacgggcactctatcgcttctgcgggggggaataaagtcgcttacctttatcctcgttgtgcctacgcttacagttcaaagacctgctataccaacctcccctcggctggtgcgatgcgtggttatggcgcgccacaagtcgtatttgccgttgagtctatgcttgatgacgccgcgacagcgttaggtattgatcctgttgaaattcgtttacgcaacgccgcccgcgaaggagatgctaatccgctcacgggcaaacgtatttacagcgcagggttgccggagtgtcttgaaaaaggccggaaaatctttgaatgggaaaaacgccgtgcagaatgccagaaccagcaagacaatttgcgccgcggcgttggcgtcgcctgttttagctacacctctaacacctggcctgtcggcgtagaaatagcaggcgcgcgccttctgatgaatcaggatggaaccatcaacgtgcaaagcggcgcgacggaaatcggtcagggtgccgacaccgtcttctcgcaaatggtggcagaaaccgtgggggttccggtcagcgacgttcgcgttatttcaactcaagataccgacgttacgccgttcgatcccggcacatttgcctcacaccagagctatgttgccgcgcctgcgctgcgcagtgcggcactattattaaaagagaaaatcatcgctcacgccgcagtcatgctacatcagtcagcgatgaatctgaccctgataaaaggccatatcgtgctggttgaacgaccggaagagccgttaatgtcgttaaaagatttggcgatggacgctttctaccaccctgaacgcggcgggcagctctctgctgaaagctccatcaaaaccaccactaacccaccggcgtttggctgtacctttgttgatctgacggtcgatattgcgcagtgcaaagtcaccatcaaccgcatcctcaacgttcatgactcagggcatattcttaatccactgctggcagaaggtcaggtacacggcggaatgggaatgggcattggctgggcgctatttgaagagatgatcatcgatgctaaaagcggcgtggtccgtaaccccaatctgctggattacaaaatgccgaccatgccggatctgccacaactggaaagcgcattcgtcgaaatcaatgagccgcaatccgcatacggacataagtcactgggtgagccaccaataattcctgttgccgctgctattcgtaacgcggtgaagatggctaccggtgttgcaatcaatacactgccgctgacgccaaaacggttatatgaagagttccatctggcaggattgatttga

SEQ ID NO: 464254 - DNA, 198 bp, Shigella boydii
atgcgcaaaagtttaatgctgttacttgcttcaacattgattatttctggatgtgcaacaaaaaaacaactcgttccaactggtggaagcaaatcagacggcacagttaggatgagttattcttacggtatgtttgaaagtcctgttgtagatccacaacaaggcatgaatgcagccaaagcgcgttgtgccgcttag

SEQ ID NO: 464255 - DNA, 756 bp, Shigella boydii
gtggggacgctgaataaaatttataaggcaatacctggctggtcaggtgtcactaacgcccgtgccggtgtgccgggcagcgatgaggaaacccgtgcggactttgaaaaccgccgacgtaattcagttgcccgtaatgcccggaatattctggaagccatccggggtgaaatactctccacggtagaaaacgtggtggatgtttacgtcacccataatccgaaaaaaacagaacaaaaagccggagtcagtcagtatccattaacacccggttcgctttatgttggcgtgtacggcggcagcccggcagatatcgcggcggccatctggcgtaaggctccgccgggtattgatatgaatggcaacacaacgttcactgttgcagataaggagtacgatccgccgtatcctgaatacgtaatcagctggcagacactcaaacccgtcagtctgcatgtcagtgtgacgctgaaaaaaagtgactacctgccttcagatattacccgacaggtacagcaatccgtgctggacgcatttaatggtacagatggtggtctgcgggcaagggttgcctctgttgtctctgccgggcgctactatgccggcatttacaaaaccgatccggaacatattgatattctgggccttactgtgagccgtgacggttcgtcatggacaacggctgtcactttcgggatagatgagattccggttctggatgtgtcggatatcagtgtgaaactccaggaggcataa

SEQ ID NO: 464256 - DNA, 453 bp, Shigella boydii
atgagtgaaaataaatctttttctaccgcagtgcccgctgtacagatttcggatagcgggctgaatgtgccggatgaagcggatattctgagcggcaggcttgctgatttttcggcggcgctgggcggggccatgagtaccagtctgagcagtccgcagggacaacttgcatccagcgaaagcgccattattgcggataaaaacgatcagttgctgtatatcgttaaccagatcaaccctgacttttccagtggtcgctttcaggatgcaataggcaggatttatttcctggagcgccgtggggccacaggtacgacagtaacagcgacctgtaccgggctggttggcacgctgatcccggcgggcagtatggggcaggatgaggccggttataagtatgtcagtcagacgtcactatcggcgcatcagggcaggttgatgcggtatttctga

SEQ ID NO: 464257 - DNA, 357 bp, Shigella boydii
atgcagtcacgatcacttcttcttgacgccgggacatgggatatcctgcttgatgataccggaaatcttgccattactgataatccccatgcggtagctcaggatgtggcgtgtgcgtgcagtacttttctgggggagtgctggtacgactcaacggctggcataccttactggccacgcatcctcggacactggcccggcacacaactggtgaatgccactctgcaacaggaagcacttaaactgccgaccgtgagcgccgctgtctgccaggtcacagctgatcaaacccggacagtaacaggtgtgctgcgtattacagataccaataatgacatttttacggtactgctatga

SEQ ID NO: 464258 - DNA, 678 bp, Shigella boydii
atggcacaaccactcagtaacccgacagacgtgaacagcgaaatcaatgcacaggactttatgctgcggcagtttctcggacgtcatgcgtttatcactctgggacgggtggtagccgtggaagagggatttattgaggcccgaccgatggtaatgggcgttgcagcagacggttccccggttgaacatgaggtgatttataacattcccgtatggcgactacaggggggcggtaatgcggtgattatcccgccacatgtgggggatatcggttttcttgccatctgcgatcgggatatcagtgcggtaaaagccacgcgtcaggctgcgatgccgggatcaaagcgtacccataattatgctgatgccatctggctgggtggcgtgctcaacggtgatcccgtccagtttgtggtatttgatgacaaccagatacggattgtatctccctggaaagtggagatatccgcgcctgagggggtgattaatgcgccgaaaagcttcaccgttaactcaccacaaattgcgctgaacggcgataccgccgtcagtaaggggcttgacgttaccgggcagtccaggctttccggcggttcgaacatcgggggtattgattttggaaaccacgttcacggcggcgttgagtccggcggctcaaccacgcagggatcccggtaa

SEQ ID NO: 464259 - DNA, 870 bp, Shigella boydii
atgagctacagacaacgtaaaataacggtggagttcactctttcagacggacgaacgtttggtaatggccagggcaatatgctgaccattaccgacgcaagctgttttgccagtattgccgtatatggaggggtggctggtacacaaatcacgctgtatatctggggaatgtcaccggcgcatatgacgaatttaagctggcgcggtgtgtggcgacaggagcagagtaccgcaaataaaatgcggctgtgggccgacgggcggcttatttttgaaggtgatattactgatgcatacgccgactacaaccaggcgccggatattccgctcattctgacaggacagattcattttaatctgcgtaatcagccggcggcagatttcagcgcaaagggcgatgttgcggttgcagatattatccgtgcgctggcgtcaactgtcgggcttggatttgaaaaccagggggtcagccgcagtctgtctgacccgcatttttccggtaatgttgtacaacaaatgctggatgtcgcttcagccgccgatattaacattgatctggggaatgtggagaaagtcaccatctggccgaaagggcagaaccggaatattccgccggtactgatttcgccggatcacggactgactggctatccggtttacaccatgaccggactcagcgccaccacgatattctgccccgatctctttactggcaggccagcgcatctggaatcgtcactgcctgatatgacgggcgattatacgatcacaggggtgatacacaccattacttcgcgaaccgtgggcggtccgtggagttccaactgtaccatgatgagggctgaagaaaatggcacaaccactcagtaa

SEQ ID NO: 464260 - DNA, 519 bp, Shigella boydii
atgggagcatatgactacacgctagtggaagataacaacgactggtatctgcgatcgcaagaagtaacgccgccatcgccacctgatccagacccggacccaacacccgatcctgacccaacacccgatccaatccccgcttaccagccggtgctgaatgccaaagttggcggttatctcaataacctgcgggcggcaaatcaggcgtttatgatggagcgacgcgatcacgctggtggcgatggtcagacgctgaatttacgtgttatcggcggacgttatcattacacggcggcagggcaactggctcagcaggaagacacttctacggtgcagcttagcggcggcttgtttagcgggcgctggggcacggatggcgagtggatgcttggggcggttggtggctacagtgataatcagggcgacagccgctcgaatatgaccggaactcgcgccgataaccagaaccacggttatgccgttgggctgacctcaagctggtatcagcacggtaattag

SEQ ID NO: 464261 - DNA, 1305 bp, Shigella boydii
atgagctttaacactatcattacctggaatgagtgtactgacgaacagcagcgcgagctgttgatgcgcccagccatcagcgcctccgaaagcatcacccgtaccgtgacggagatcctgaataacgtcaaaacccgtggcgatgacgcgctgcgggaatacagcgcgaagtttgataaaacggaagtcggtgcgttaaaggtaaccgggcaggagatcgccgaggcggaaagccgtcttggggacgagatcaaacaggcgatggccgtcgcggtgaaaaacatcgagaccttccacgtcgcgcagaaactgcagaccgttgatgtggaaacgctaccgggtgtgcgttgccagcaggtgacccgcccggtcgcctcggtgggcctctacatccctggcggctccgccccgcttttctcaaccgtattaatgttggccaccccggcgcgtattgccggttgccagaaagtggtgctctgctccccaccaccgattgccgatgaaattctctatgctgcaaaactctgcggcgtgcaggaagtgtttaaagtcggcggcgcgcaggcgatttctgccctcgcgtttggcacagaatctatcccgaaggtcgacaaaatttttggtccgggcaacgcctttgtcaccgaagccaagcgccaggtcagccagcgtcttgatggcgcggctattgatatgcccgcgggtccgtcggaagtgctggtgattgccgacagcggcgccacgccggattttgtggcgtctgacctgttatcccaggcggaacacggcccggattctcaggtgattttactgacgccagatgccgatatggccaaacgcgtgggtgaagccgtagagcgtcagcttgccgatttaccccgcgccgacacggcacgccaggcgttatccgccagccgcctgattgtggcgcgcgatcttgaccagtgcatcgctatctccaaccagtacggcccggagcacctgattattcagacccgcaacgcgcgcgacctggtcgacagcatcaccagtgcaggttcggttttcctcggcgactggtccccggagtccgcgggcgattacgcctccggcaccaaccacgttctgccgacgtatggttacacctcgacctgttccagcctgggtctggccgatttccagaaacgcatgaccgtgcaggaactctcccgtgaagggtttgcctcgctggcgtccaccatcgagacgctggccgccgccgagcgcctgaccgcccacaaaaacgccgttacgctgcgcgttgcagccctgaaggagcaagcatga

SEQ ID NO: 464262 - DNA, 1062 bp, Shigella boydii
atgaacattgaagaattagcgcgggaaaatgtccgtcgactgacgccttatcagtctgctcgtcgcctgggcggcaacggtgatgtctggctgaacgccaacgaattcccgacagcggtacagtttgagctatcacagcagacgctaaaccgttatccggagtgtcagccaaaagcagtgattgaaaactatgcgcaatatgcgggcgtgaagccggagcaggtgctggtcagccgcggtgcggatgaaggcattgagctgttgatccgcgcgttctgcgagccgggtaaagatgcggtgatgtattgccagcctacctacggcatgtacagcgtcagcgcggaaacctttggcgtggcgtgccgtaacgtgctctccatggagaactggcagctggacctgcagggaattgccgacaatctggacggcgtgaaggtgatctttgtctgtagccccaacaacccaaccgggcaaattatcaaccctcaggatatccgtaccctgctggagatgacccgcggcaaagcactggtggtcgccgacgaagcctatattgagttctgccctcaggcgacgctggccggctggctggaagagtacccacacctggtggtgctgcgtacgctgtcgaaagcctttgcgcttgcaggtctgcgctgcgggtttacgctggccaatacagcggtgatcgacctgctgctgaaagtgatcgccccctatccgctttctactcccgtggctgacattgccgctcaggccctgaccccgcaagggatcaatgcgatgcgtgagcgtgtggcgcaaatcctggaagaacgacagtacttggtgaccgccctgaaagcgctcccttgcgtagagcaggtgttcgactctgaaaccaactacctcctggttcgctttaccgcctccagtgccgtatttaaatctttatgggatcagggcattatcttacgtgatcaaaataaacaaccttctctgagcggctgcctgcgtattaccgtaggtacccatgcagagagccagcgcgtgattgacgcactgaaagcggagaaagtatga

SEQ ID NO: 464263 - DNA, 1068 bp, Shigella boydii
atgagccagaagatcctctttatcgaccgagacggcaccctgatttcggagccaccaaccgattttcaggtcgatcgtttcgacaaactggcttttgaaccagacgtgatcccggtgctgctgaaactgcagaaagccggatataagatggtgatgatcaccaaccaggacggtctgggtaccgacagcttcccgcaggccgactttgacggcccgcataatctgatgatgcaggtactcacctctcagggggtggtatttgatgaggtgctgatttgcccacatctgcctgccgatgcgtgcgactgccgcaagccgaaggtgaaactggtagagcgctatctgctggaagatgtcctggataaagctaacagctacgttattggcgatcgcgccaccgacattacgcttgccgaaaatatgggcatcaccgggctgcgctacaaccgcgacgatctcaactgggtaaagattggcgagcagctcaccaaacgtgaccgctactcgcacgtagaacgcaacaccaaagagacacagattgacgtgaaggtgtggctggatcgcgaaggcggcagcaagctccacaccggggtgggtttcttcgaccacatgctggatcagattgccacccacggcggcttccgcatggagattacggttaaaggcgatctctacattgacgaccaccacaccgttgaagacaccggtctggcgctgggcgaagcgctgaagctggccctgggcgacaaacgtggcatcaaccgttttggatttgttctgccaatggatgagtgcctggcgcgctgtgcgatggatatctctggtcgaccgcacctggaatataaagccgatttcacctaccagcgcgtgggcgatctcagcaccgaaatggtggagcacttcttccgttcattgtcctacaccatgggcctgacgctgcaccttaagaccaaaggcaagaacgaccaccaccgagtggagagcctgttcaaggcctttggccgtaccctgcgccaggcaattcgtgtggaaggtgacgccctgccctcatcaaaaggagtgctgtaa

SEQ ID NO: 464264 - DNA, 279 bp, Shigella boydii
gtggctagcctctccgaagcaactgctggtgcctttatggcaggtcggaccgatggggttagccagaaccagcagagtatcgttgtcgcaatccggcgtaatgctaaccacattcaggaaatggccggaggtttcccctttggtccacaggcgctgtttcgtgcgcgagaagaaggtcactttgccgctgtcgaccgttttcgccagcgcctcctggttcatgtatcccagcatcagcacttcaccggaaacggcatgctggacaaccacggggagtaa

SEQ ID NO: 464265 - DNA, 249 bp, Shigella boydii
atggtacatgaccgcatagcggaggaactagaggcaaaaggcttttaccggagggcggcggcacgatggggtgaagtcatgcaactggtggagacagacaaggaacggcatcaggttacgatgcgacggctggaatgttccaggaaggcacagaggccaccggagccgccaacggagaactatgcagacctgagaaatgcagtaaatcgcacttacgcagacatggggctgagcaaattagcagagtag

SEQ ID NO: 464266 - DNA, 207 bp, Shigella boydii; identical to SEQ ID NO: 10245

SEQ ID NO: 464267 - DNA, 1326 bp, Shigella boydii
atgaataaatatcaggcagttattattggttttggcaaggctggaaaaacattagccgtcacgctggcaaaagcaggttggcgagtggctctcatcgaacaatcaaatgcaatgtatggcgggacctgtattaatatcggctgcatcccaactaaaacattggttcatgacgcacagcagcacacagattttgtccgtgccatacagcgtaaaaatgaagtggttaattttttacgtaataagaattttcataatcttgcggatatgcctaatatcgacgtgatcgacggccaggcggagtttatcaataatcatagcctgcgtgttcatcggcctgagggaaatctggagattcatggcgagaaaatttttattaataccggtgcacaaaccgtggttccgccaattcctggaattaccaccacgccaggagtatatgacagcaccggattacttaatctaaaagaattgcctgggcatttaggtattttgggcggcggatatattggcgttgagttcgcctctatgttcgctaattttggcagcaaggtaaccattttagaagcagcttcgctgtttttgcctcgggaagatcgggatattgctgataatatcgcgacgattttacgcgatcagggcgtcgatattatcctcaatgcccatgtggagcgaatcagtcaccatgaaaatcaagtgcaagtgcatagcgagcacgcccaactggcggtggatgcactgttaatagcttccggtcgtcaaccggctaccgcttcgttacatccagaaaatgccggtatcgcagtaaacgagcgcggggcaattgtcgttgacaagcgattacataccaccgcagacaatatttgggcgatgggagatgttaccggcgggctgcaatttacttacatatcactggatgattaccgcattgtacgtgatgagttactgggtgaaggcaaacgtagtactgatgatcggaaaaatgtgccttattccgtatttatgacaccgcccctgtcaagggttggtatgacagaagaacaagccagagagagtggtgctgatattcaggtggtgacattgcctgtagctgcaattccgcgtgccagagtgatgaacgatacccgtggggtattaaaagcgattgttgataataaaacccaacgtatattaggggcatcactgctgtgtgttgactcccacgagatgattaatatagtgaaaatggtgatggatgccgggctgccttatagcatattacgcgatcagatatttactcatccgtcgatgagcgaatcactcaatgatctattttcattagtcaaataa

SEQ ID NO: 464268 - DNA, 801 bp, Shigella boydii
atgacaaataatgaaagcaaagggctgtttgaaggcttattagttatcgatatgacacatgtccttaatggacctttcggaactcaacttctttgtaatatgggcgcaagggtaattaaagttgagccgccgggtcatggtgatgatacccgcacatttggtccctatgtggatggacagtcactctattacagttttattaatcatggcaaagagagtgtggttcttgatttaaagaatgattacgataaaagtatatttataaatatgctcaaacaagctgatgtattagctgagaattttcgcccaggtacaatggaaaaactggggttttcatgggaaacgcttcaagaaatcaacccgcgcctcatatatgcttcatcgtcaggtttcggacataccggtccgctaaaagatgctcctgcctacgataccatcattcaggcaatgagcgggataatgatggaaacaggatatcctgatgctccgccagtgcgcgttggtacatctcttgcggatctatgcggcggtgtctatttattcagcggaatagtgagtgcactttatggccgcgaaaagagccagagaggggcgcatgtcgatatagcgatgtttgatgccacgctgagttttctggagcatggtctgatggcatatatcgcgacagggaagtcaccacaacgtctgggaaatcgccatccctacatggcaccttttgatgttttcaatactcaggataagccgattacgatttgttgtggtaatgacaagcttttttcggtaatgctgccaacttactga

SEQ ID NO: 464269 - DNA, 819 bp, Shigella boydii; identical to SEQ ID NO: 463221

SEQ ID NO: 464270 - DNA, 189 bp, Shigella boydii; identical to SEQ ID NO: 463227

SEQ ID NO: 464271 - DNA, 921 bp, Shigella boydii
ttgcagctaccgccacggggcgcgcgtctgacggttctcattggctggaaaggggaaccgctgacagaaaaaggcacttacattgttgatgaaatcgctcacgaaggaccgccggacaggctgactgtttcagccagaagcgcagattttcgggatgaatttaacgttaaacgtgaggtgtcctggcatgatgtgaccgttgagcgtgtggtatccgccatcgctcatcggtacggtctgaaaccgcaaatcagcgaaatgctgatggatatcgaaatcgaccacgccgaccagaccgaagaaagcgacatgtcctttcttacgcgcatggcggaaatgctgggagcaatcgccacggtaaaaagcggcaatctgttattcatcatgccaggtggtggcgtgaacgcacaggggcagccgttgccctcgttcgccattacacgcagcagcggcgatcgccatcagttccgcattgctgaccgcgaggcgtatacgggggtacgcgcctactggcttgatcttaattacgggaaaaagaaaaaagtcagcgtgaaacgccgcaaaccgccaaaacccaaaaaggagaaaagcagcagtcgggaaggcgactatatggaaggtgcggaaggcaacgtgtttgtgttacgcaagacttatcagaacgagcaggcagcaagacgcgcagcggcggcaaagtggcagcagctacaacgcggagccgcatcattctccatcacgctggcgcgtggtcgtgcagaactctatcccgaaatgcatggcacagtgacaggctttaaaagcgagattgattatcaggactggattattgcaaaagccgagcacaccattgataacagcggctttaccacgcagcttgaacttgaagcaaaaatcccggaatggatagcagaaacagaataa

SEQ ID NO: 464272 - DNA, 279 bp, Shigella boydii
ttgtctaattcgtcagattctgaccagacggttcaggctgtacgcttacatattaactatcgtcgcccagcggtattaagtgacctgttaactattaccagtcagttgcagcaattaaacggtaaaagcggcatcttaagccaggtcattacactggagccggaagggcaggtggtagcggatgcgcttattacgtttgtttgtattgatcttaaaacgcagaaagcattagctctggaaggggaattgcgcgaaaagctggagcagatggttaagtaa

SEQ ID NO: 464273 - DNA, 198 bp, Shigella boydii
atgaccgtcgaaacgcaacttaatcccacacagcctgtcaatcagcaaatttatcgtatccttcgtcgcgacattgtccattgcctgattgctccaggcacaccgttgtcggaaaaagaagtttctgttcgtttcaatgtgtcacaccagccggttcgtgaagcctttattaaactggcggaaaacggcctgatttaa

SEQ ID NO: 464274 - DNA, 1053 bp, Shigella boydii
atgatgaaagtattaattgttgaaagcgagtttctccatcaagacacctgggtcggtaacgccgttgagcgtctggcagatgctttaagccagcaaaatgttaccgtgattaaatccacctcctttgatgatggttttgccattctctcttcaaacgaagccattgactgcctgatgttcagctatcaaatggaacatccggacgaacatcaaaacgtcagacaattgatcggtaagcttcatgagcgccaacaaaacgtgccggtcttcctgttgggcgatcgggaaaaagccctcgccgcaatggatcgcgacctgctggagcttgtcgatgaattcgcctggattctggaagataccaccgactttatcgccggacgcgccgttgccgcgatgacccgctaccgccagcagctgttgccgccactgttcagcgcgctgatgaaatatagcgacatccatgaatattcctgggcagcgctaggccaccagggcggcgttggttttaccaaaacacccgccggacgtttctaccatgactactatggagaaaatctgttccgcaccgatatgggcatcgaacgaacttccctcggttctttgcttgaccatactggcgcatttggcgaaagcgaaaaatatgccgcacgcgtatttggtgccgatcgctcctggtcggtagtcgtcggtacttccggctctaaccgcaccatcatgcaggcttgcatgaccgataacgatgtcgtggtcgttgaccgtaactgccataaatccatcgaacaaggcttgatgctgacaggcgcgaaaccggtctacatggtgccaagccgcaaccgctacggcattatcgggccaatctatccgcaggaaatgcaacctgaaaccttgcagaagaaaatcagtgaaagcccgctgactaaagacaaagccgggcaaaaaccgtcttactgcgtggtgaccaactgcacctatgacggcgtgtgttataacgctaaagaagcgcaggatctgctggaaaaaacctccgatcgtctgcactttgacgaagcctag

SEQ ID NO: 464275 - DNA, 1239 bp, Shigella boydii
atgtttggtgagatcgacgtggaagggaaacgcacgtttacggaatttatccgtgaaggtgtgggcgttcatgcgtttaacggcgaaatctttgtgcagtcggtctgggatacggagagtacgcaactgtttcgtacgcgttttaaagccgtgagtccgaaacgggtggacacgccaggacacggtatcgggaaccgttttctgcgggctggtgtggaggttgatcgatatggccgtgccgttgcgtaccatatctgtgaggatgattttcctcgctccgggagtggacgatgggaacggatcccgcgtgaactacccaccgggcgtccggccatgctgcatattttcgagccggtggaggacgggcagacccgtggggctaatcagttttacagcgttatggaacggctgaagatgctggattccctgcaggcaacacagcttcagtcggccatagtgaaggcgatgtatgcagcgacgattgaaagtgaacttgataccgaaaaggcctttgaatatatcgccggtgcgccgcaggggcagaaggataatccgcttattaatattctggataagttctccagctggtatgacacgaatagcgtgacgctgggcggtgtcaaaattccgcaccttttccccggtgatgatctgaaacttcagaccgcgcaggattcagacaatggattttcggcgcttgaacaggcgctgctgcggtatatcgccgccggtcttggcgtttcctacgaacagttgtcccgtgattactcgaaggtcagttattcaagtgcccgcgcatccgccaatgagtcgtggcgctattttatggggcggcgaaaatttattgcgtcccggctggccacgcagatgttttcctgctggctggaagaggcacttcttcgggggattattcgtccgccacgggcacgttttgatttttatcaggcgcgatcagcctggtcacgggctgagtggattggagccggaagaatggccattgacgggctcaaggaggttcaggaatcagtgatgcgcattgaggccggactgagcacgtatgagaaagagctggcgctgatgggcgaggattatcaggacattttccgccagcaggtcagggaatctgcagagcgggaaaaagccggactctcacgtccggtgtggatagcgcaggcgtatcagcagcagatagcggagagtcgcaggccggaagaggagacaacaccacgtgagacgtaa

SEQ ID NO: 464276 - DNA, 258 bp, Shigella boydii
atgctgccgcagcatagcgatattgaaatagcctggtatgcttcgatacagcaggagccgaatggctggaagaccgtcaccacacagttctatatccaggaattcagtgagtatattgcgccactgcaggatgctgtagatctggaaatcgcaacggaggaagaaagatcgttgctggaggcatggaataaataccgggtattagtgagtcggattgatataaatacagccccggatatcgtatggcctgagctgtga

SEQ ID NO: 464277 - DNA, 474 bp, Shigella boydii
atgaacattgagttactgcaacagttgtgcgaagccagcgccgtcagcggcgatgaacaggaagttcgcgacattctgataaacacgctggaaccttgcgttaatgagatcacctttgatggtctgggcagctttgttgcccgtaaggggaataaaggtccaaaagttgccgttgtcgggcatatggatgaagtcggctttatggtcacccacatcgacgagagcggttttctgcgtttcaccaccattggtggctggtggaatcagtcgatgctcaaccaccgggtaaccatacgcacacacaagggagtgaaaatccctggtgtgattggttccgtcgcgcctcatgcgttaacggaaaagcaaaggcaacagccgctgtcatttgatgagatgttcattgatattggcgcaaacagtcgcgatgaggtggaaaaacgcggtgtggcgatgggcgattttattagcccgtaa

SEQ ID NO: 464278 - DNA, 819 bp, Shigella boydii
atgtgtcaggtatttggtgtatccaggagcggttattacaactgggtacagcatgaaccctcagacagaaaacaaagtgatgagcggctaaaactggagattaaggtggcacatatccgcactcgcgaaacatatggaacccggcggctccagacggagctggcagagaatggcatcatcgttggtcgtgaccgactggcacgtcttcgtaaggagctaaggctacgctgtaagcagaaacgcaagttcagagcgactacgaacccgaaccacaatctgccagttgcgccaaatctgctgaaccagacgttcgctcctacagcaccaaatcaggtctgggtggcggacctgacgtatgttgccacacaggagggatggttgtacctcgctggcatcaaagatgtttatacgtgcgaaattgtcggctacgccatgggagtgcgcatgacaaaagagctgacaggtaaagccctgtttatggcgctcaggagccagcgcccacctgccgggctaatccaccactctgatcgaggttcacagtactgcgcatacgattaccgggtcatacaggagcagtctggtctgaaaacatcaatgtcgcgtaaaggtcactgttacgacaacgctccgatggaaagcttctggggaacgctgaaaaatgagagcctgagccactatcgttttaataaccgggatgaagccatctcagtaatacgggaatacattgagattttctacaatcgtcagcgtcgtcactctcgtctggggaatatctccccggcagccttcagggaaaaatatcatcagatggctgcttaa

SEQ ID NO: 464279 - DNA, 387 bp, Shigella boydii
atggtaagcgatgatgttgccctggccatccaggaaaaatatggtttcccaccgctatataatgatttccgcaaatatctggctacgttgctggcaaataatggaatgcgtggtgtaagccggattcttctcaagctacctgtcgactatctcgtaaaatacacggaccttttcactcacatacacgccaatgctgaagatcttgtcaaatggctatggaaaacgaatcacccggatgcgattcaaattctgatcctcggtgtaaatggcaagaaaaagcacctggaatacttaagcaaagcctgccaaaaacatcccgctgcggctattgccgcttatgctactttgctggcaatacatgaaaataatgagtggcgtaaagggtga

SEQ ID NO: 464280 - DNA, 567 bp, Shigella boydii
atgtttaaaggacaaaaaacattggccgcactggccgtatctctgctgttcacagcacctgtttatgcggctgatgaaggatccggtgaaattcactttaaaggtgaagttattgaagcaccgtgtgaaatacatcaggatgatattgataaagaggttgaactcggtcaggtgaccaccagccacattaatcagtcacatcacagcgatgccgttgctgtcgacctgcgcttagtcaactgtgatctggaaaactccagcaacggttccggtggcaagatttctaaagttgcagtcacctttgatagctcagcgaaaactaccggcgcagatccgattctcaacaacaccagcacgggtgaagccaccggcgtcggcgtacgtttaatgaataaagatcaaagcaatatcgttttaggcaccgctactccagatatcgacctggctccgacctccagcgaacaaacgctgaatttctttgcctggatggaacaaattgatcaggctacacctgtaacgccaggcgcagttacggcgaatgcaacctacgtgctggattataaataa

SEQ ID NO: 464281 - DNA, 1356 bp, Shigella boydii
atgttttcagaagtcatgcgttatattctcgacctcggccctacggtgatgcttccgattgtcatcattattttttctaaaatattaggcatgaaggcaggcgattgctttaaagcgggtctgcatatcgggattggctttgttggcattggccttgtgattggcttaatgctggattccattggtccggcggcgaaagcgatggcggaaaatttcgacctgaatctgcatgtggtcgatgtcggctggccgggctcttcaccaatgacctgggcgtcgcaaattgcgctggtggcgattccgattgcgattctggttaacgtggcgatgttactgacccgtatgacgcgggtggtaaatattgatatctggaatatctggcatatgaccttcaccggcgcgttgctgcatctggcaaccggttcatggatgatagggatggcaggtgtggtaattcacgcggcgtttgtttataagctcggcgactggtttgcccgcgatacccgaaatttctttgagctggaaggtattgctattccgcacggtacgtcggcgtatatggggccgattgcggtgctggtcgatgctatcatcgagaaaatcccaggcgttaaccgaattaaatttagcgccgacgatattcagcgcaaatttggtccatttggcgagcctgtcaccgtgggttttgtgatggggctgattatcggcatcctcgcgggttacgatgtcaaaggtgtattgcagctggcggtaaaaacggcggcagtgatgctgctaatgccacgggtgattaaacccatcatggatggtttaacgcccatcgctaagcaggcccgtagtcgtttacaggcgaagttcggcggtcaggagttcctgattggcctggatcccgcattactgctggggcatacggcggtggtatcggcaagcctgatttttatcccgctcaccattttaattgctgtttgtgttccgggtaatcaggtgctgccgtttggcgatcttgccaccatcggcttctttgtggcgatggcagtcgccgtgcatcgtggaaatctgttccgcaccttaatctcgggtgtcatcatcatgagcatcactctgtggatcgcgacgcaaactattggtttgcacacccaactggcggctaatgctggggcgttaaaagccgggggtatggtggcttcaatggatcagggcggttctcccattacctggttactgattcaggttttctccccgcaaaatattcccggtttcattattatcggtgcaatttatctgaccggtattttcatgacctggcgtagagcgcgtggctttattaaacaagagaaagtcgttctcgcagaataa

SEQ ID NO: 464282 - DNA, 840 bp, Shigella boydii; identical to SEQ ID NO: 461112

SEQ ID NO: 464283 - DNA, 2988 bp, Shigella boydii
atggaccagatagccaacctggtcattgatttggggattgatgcggcagagtttaaaaatgaaattccccgtatcaaaaaccttctgaatggtgcagccggtgatgcagaacggtcttctgcccgtatgcagcgttttatggagcgtcagactcaggcggcccggcagacaatgcatgcggcttcttcggctgcaacagcagcatcagcccatgcgcagacggtggagaagaatgcacgggctcatgaacgcatggcccgtgaggtggaacaaacccgtctgcgcgtggatgccctgaatcagaaaatgcgcgaggaacaggcgcaggccagggcactggcggaggcgcaggataaagcggctgccgccttttatcgccagattgacagtgtgaaacaggccggtgcggggcttcaggaattacagcgtattcagcagcagatccgacaggccagaaacagtggcgggggtggtcagcaggattatctggcgctgatttcggagatcacggcgaaaacccgtgccctgacgcaggcagaggaacaggccacccggcagaaagcggcgtttatccgccagcttaaagagcaggcaacccgccagaatctgtcgtcttctgagttgcttcgcgccagggcggctcagctgggggtaagcagtgctggagaagtgtatatccgcaaaatggagcgggcaggaaaagccacacattcgctggggctgaaaagtgcggcagcccggcgggagctgggggtgttaatcagtcagatggcgcgcggcaattttggtgcgctgaggggatccgggataacgctggctaaccgtgccggatggacaggcgcactgatgtcgccgaaaggcatgatgactggcggcgttattggcggacttgtcgcggcggtcctgggtctgggtaaagcctggcatgacggccggaaggagggcgaggaatttaaccgtcagctggcgctgacgggacattatgccggtgtcactgtcgggcagttgtggaaactcagccgggccatatccgggaatggtatcacgcaacatgcggcagccggtgcgctggcacaggtggtgggcagtggggcatttcatggaaacgatattggtatggtggcgaaagctgccgcacagatggagcgatcggttggccagtcggtcagcgataccataaatcagtttaagcggctgaaggatgatcctgtaaatgccgcgaaggcgctggacaatgcgctgcattttttgactgccactcagcttgagcagatacgcgtccttggggagcaggggcggtccagtgatgcggcccggatcgccatgtctgcgctgggtagtacgctgcaaaccttgtctgactggtggaagcagttctgggatgcggccatgaatattggtcgtgaagactcgctggatgcgcagattgatgcgttacaggaaaaaattcagcgcgcgaaaaaatatccgtggacaaacgcctccacacaggtggagtacgatcagcagcgtcttaacgatcttcaggagaaaaaacgccggaaggatttgcaggatgcaaaagcgcaggcagaacggaattaccaggagcaacagaaacgccggaatgctgaaaatgccgtgctgaaccggatgaatgaaacggaagctgcacgacatcagcgggaaattgcgcgtattaatgccatgcagtacgccgaccaggctgtcagggatgcggcgatacagcgtgaaaatgaacgttacgaaaaagccattaagaaaaatacacgggcaacccgtaatgatgaggccacccggttattgctgcagtacagtcagcagcaggcacaggtggaagggcagattgctgctgccagacagtcagcaggcattgccactgaaaggatgactgaagcgcataaacagcttctggccctgcagcagcgcatcagcgacctggacgggaaaaagctgacggcagatgaaaagagtgtgctggcccgtaagaatgagctgattcaggcgctgacgctgctggatgtgaaacagcaggagctgcagaaacagacagcgcttaacgacctgagaaaaaaaacggttcagctgaccagccagctggcagacaaagaacgtgcactgcgtgagcagcacaatctggatattgccactgcaggtatgggggataagcagcggcagcgctaccaggcacagttgcgcatccggcaggaataccggcaacagttgcaacagcttgagaatgacagtcgccagaaaggcacttacgggacggaggactaccggagggctgaggaggtgctgaaggggagcctgaagcgacaactgaatgaaaacaaacgctactggcaggaactggaagtggcgcagggcgactggaaaaacggtgccatgcgggcgtttcagaattttacggcggatgcggataatgcggcgggaacggcagaacagatgtttacagtggcattcagcagtgccggtaatgcactggcgacattctgtaccaccggtaagctgaattttaaatccttcacctcttccctgttgtcagatatggccagaattatggcacagatggccatgatgcaggcggtaaagggcgtcggttctttattcggcttcacgactaatgctgatggcggtgtttaccagtctgctgatttgagtcgctacagtggcacggtggttaaccgtccgacgttttttgcttttgcaaaaggagcgggtgtgatgggggaagcgggacctgaagccattctgccactgcgtcgcggtgctgatggtaagctgggggttgtggcggatactggtggttcaggcatggtgatgtttgccccgcagtacaacatcgggatcaataacgacggcacgaacgggcagataggtccggcagcactgaaggtggtttatgacctcgggaaaaaagcggccgcggactttatgcaacagcaggcccgtgatggtggccggttaagtggagcataccggtaa

SEQ ID NO: 464284 - DNA, 1266 bp, Shigella boydii
gtgagttattccaaagactttgaccagctcaacagccgcgttacttttgctggatatcgcttctcggaagagaactttatgaccatgagcgagtatctggatgccagtgacagcggaatggtacgcacgggcaacgacaaagagatgtacaccgccacttataaccagaacttccgcgatgcgggtgtttcggtttatctcaactatacccgccatacctactgggatcgcgaggagcagataaactacaacatcatgctctcgcactatttcaatatgggcagtattcgtaatgtcagcatctcgatgactggctaccgttacgagtatgacaaccaggccgacaaaggcatgtacatttcgctcagtatgccgtggggcgacaacagtaccgttagctataacggtaactatggcagtgggacggacagcagtcaggtcggttatttcagccgtgtcgatgacgcgactcactatcagttgaacgtcggcaccagtgacaaacacaccagcgttgacggctattacagccatgatggttcgctggcgcaggttgacctcagtgcgaactaccatgaagggcaatacacctctgcgggcttgtcgttacagggcggcgcaacgcttactgcccacggtggcgcacttcaccgtacccagaatatgggcgggacacgcttgttgattgatgccgatggcgttgccgatgttccggtggaaggtaacggggctgctgtttataccaatatgtttggtaaagccgtcgtttctgacgtcaataactattaccgcaatcaggcgtatatcgacctcaacagattgcctgaaaacgctgaagcaacccagtcggtggtgcaagccacgctaactgaaggtgccattggctaccgtaaatttgctgtcattagcggacaaaaagcgatggcggtgctgcgcctgagcgacggcagccatcctccgtttggcgcagaagtaaaaaatgataacgagcagacagtgggccttgtcgatgatgacggcaatgtttatctggctggggtgaaacctggcgaacacatgagtgtgttctggagtggtgttgcgcattgcgatatcaacctgccggacccgctgcctgccgatctgtttaacggcttgttactgccatgccagcataaaggcaatgtagcacctatcacttcgccggcggtcaaaccggcgattcaggaacagacacagcgggtgacgccaacggaacctccgacttcaatttcagtaaaccagtaa

SEQ ID NO: 464285 - DNA, 1050 bp, Shigella boydii
gtggcgaaaaatctgcaatggagccacgatgctaaatgcctgaaatccggtcaactggaaggcatggaaattaaggctgatttaagccagtccgcattagtcatttcattgccacaggcttacctcgaatatacttatcccgactgggatctgccttcacgttgggatgacggcatctccgggatcgtcgcggactacagcatcaacgcacaaacccggcacgaagaaaatggcggtgatgatagtaacgagatcagcggcaacgggacggtcggggttaacctggggccgtggcgtatgcgtgctgactggcagactaactatcaacatactcgcagtaatgatgacgatgaattcagcggcgatgaaactcaaaaaaaatgggagtggagtcgctactatgcctggcgggcgttaccatcattaaaagccaaactggcgctgggcgaggattacctcagatccgatatttttgatggttttaactatgttggtggcagtgtcagtactgacgatcaaatgttgcctcccaatctgcgcggctacgcgccagacatttccggcgtggcacacaccacagcaaaagtgaccgtcagccagatggggcgtgtgatttacgaaacgcaggttccggctggaccgtttcgtattcaggatcttggtgattctgtctccggtacgttgcatattcgcattgaagaacagaacggccaggtgcaggaatatgacatcagcaccgcctcgatgccatacctcactcgtccaggtcagattcgctataagatcatgatgggccgtccgcaagagtggggacaccatgtcgagggtgaattttttctggtgctgaagcttcctgggggatcgctaacggctggtcgttatatggcggcgcactgggagatgaaaactatcagtctgcggcgcttggcgtcggtcgcgatttgtctacattcggcgcggtcgcgtttgatgttactcactcgcacaccaaactggataaagacaccgcttatggcaaaggttcgctggacggtaactccttccgtgtga

SEQ ID NO: 464286 - DNA, 138 bp, Shigella boydii
atgtcagatgtcccctgtaaaactatgttttcattgcgctctatgaagctgagtgagcgtaacgactggagctgcttctgcggtgctccggtggcgaacgtgagtaagcgtaaactgaccgccgtatgtagccattaa

SEQ ID NO: 464287 - DNA, 291 bp, Shigella boydii
gtgaacgctcactggagttcgaaaaagagtaattttctcaggaaaaacataaaattactgactaaatatttattttttgaatcgcagggcattccggataaggttgatatcgtgtcacggctgaagacctatggatacagtatttctggtgtggagacggatgacggatataaggcgcttgtccgcgcttttcagcttcatttccggcagaaaaattatgacggcataatggatgctgaaaccgctgccatcctgtatgcattgctggagaagtatttcccgggtaaataa

SEQ ID NO: 464288 - DNA, 252 bp, Shigella boydii
atggaacctgtttatgtgatacttaatgctcttctggattccgggcgatttacgcgtaaacttattctgttagggctgtcaggctcattttcctatatcttcggctcaattgttgcgacactgggaatgggacttgttgtcgattatctgggatggggggccacatttatcgtactgatactgtctgctgtttttgccatcattttcacactgatgagtcgtgaacgctcactggagttcgaaaaagagtaa

SEQ ID NO: 464289 - DNA, 285 bp, Shigella boydii
atgcaaatgaaaaacaataccgcacaagcaacaaaagtaattaccgcgcatgtgccattacctatggctgataaagtcgaccagatggccgccagactggaacgctcccggggctgggttatcaaacaggcgctttctgcatggcttgcccaagaggaggagcgtaatcgcctgacgctggaagccctggacgatgtgacatccggacaggttatcgaccatcaggctgtacaggcctgggcggacagcctcagtactgaccatccgttaccggtgccacgctga

SEQ ID NO: 464290 - DNA, 276 bp, Shigella boydii
atggaactgaagtggaccagtaaggcactttctgatttggcgcggttatatgattttctggtgctggccaataaacctgctgccgccagaacggtgcagtccctgacacaggcgccggtcattctgttaactcatccacgtatgggagaacagttgtttcagtttgaacccagggaggtcagacggatttttactggcgagtacgaaatccgttacgaacttacaggccagactatttatgtattgcgcctgtggcacacacgagagaacaggtag

SEQ ID NO: 464291 - DNA, 138 bp, Shigella boydii
atgaaattaatccacggtgcttatgaaaaagcggctccaataatcaaaattggtgagttcgcaatgtctggcaataacgtttctgatgggttatttgccagcccggagcgcgatattgccgccagtcacgagcggtaa

SEQ ID NO: 464292 - DNA, 183 bp, Shigella boydii
atggacaagcgcagaaccattgccttcaaactaaatccagatataaatcaaacagataaaattgtttgtgatacactggacagtatcccgcaaggggaacgcagccgccttaaccgggccgcactgacggcagatctggccttatacagacaagatccccggccccccatttcttttatgtga

SEQ ID NO: 464293 - DNA, 456 bp, Shigella boydii
atgcctgaatctataccggcaggttatgaagttctacaagaactggatgagttagattctttattaattatagatctcgggggcaccacattagatatttctcaggtaatggggaaattatcagggatcagtaaaatatacggagactcatctcttggtgtatctctggtcacatctgcagtaaaagataccctttctcttgcgagaacaaaaggaagtagctatcttgcggacgatataattattcacaaaaaagataacaactatctgaagcaacgaattaatgatgagaacaaaatatcaatagtcaccgaagcaatgaatgaagcacttcgtaaacttgagcaacgtgtattaaatacgctcaatgaattttctggttatacgcatgttatggttataggcggtggcgcagaattaatatgcgatacagtaaaaaaacacacagattcgtaa

SEQ ID NO: 464294 - DNA, 636 bp, Shigella boydii
atgccggcgcatatcctccctgaaagtgctgttgagtcgtcggtaattgcacaggttgtcatcagcaaatataccgaccatctgcccctgtatcgccagcagcacattttctcccgaatgggtgtggagctccccgtcagtacaatggcggatatggtcggtgttgccggagctgcactggccccgctggcgaaactgctacgccatgagcttctgacacgggatgttattcatgcagatgaaacgtccctgaggctccttgatacccggaaaggcggtaaatcctgctccggctggctgtgtgcttacgtcagcggtgaaagaagcggtccgccggtcgtctgttttgactcgcagaccggacgggccctcagataccctgagacctggctgcagtgctggtgtggcggtacgctggtgagtgacggatacagcgtgtacaaatctctggcggataatcaccccggcatcacatcagcctgttgctggagtcacgcagggcgcggcttcgcaaatctgtataaggccagcagggagccccgtgcaggcgtggagctgagaaaaatcgcgggtctttaccgcattgagaaactcatccgtgagcgccctgtggaaaaaatacggcagtggcgataa

SEQ ID NO: 464295 - DNA, 381 bp, Shigella boydii
gtgaatgacctgtttgcctggcttgaagagcaggagccgtgctgtccgcccgacgggccattaaataaggcgattaactatattctgaaccggcgcgatgaactgagctgcttcctgggtgacggagcggtgcccttggacaacaatatctgcgagcgtgccattcgcccggttgttatgggacggaaagcgtggctgttcgccggttcactgatggccggaaaccgggcggcacagataatgagccttctggaaacagcaaaacgtaatggtctggagccacatgcctggctgacggacgtcctgacgcgtctgccggaatggccggaggagcgactggcagagttgctgcctcttgagggatttaccttcaccgggtga

SEQ ID NO: 464296 - DNA, 204 bp, Shigella boydii
atgcaggatattcgcgaagaaagtctgagcgagtcggttaaatcagagcagtcaccgcgggtggtactctgggaaatcgacctgacggtacagggcggtgagcggtattttttctgtaatgagctgaatgaaaaaggggagccggtcacctggcaggggcgtaagtatgaggcatacccgattgacggcagcggcttgagatga

SEQ ID NO: 464297 - DNA, 315 bp, Shigella boydii
atgctgcaaacgctgaacgaagcctacaaagtgttgcaattacaaggctatcgcctctcggcatatgaagcgttttacctggccacgctcggcggagcgaaatctctgggccttgacgatttgattggcaactttttacctggcaaagaggctgatttcgtggtgatggaacccaccgccactccgctacagcagctgcgctatgacaactctgtttctttagtcgacaaattgttcgtgatgatgacgttgggcgatgaccgttcgagctaccgcacctacgttgatggtcgtctggtgtacgaacgcaactaa

SEQ ID NO: 464298 - DNA, 1368 bp, Shigella boydii
atgtctggagacatcctacaaacaccggacgcaccaaagccacagggcgcgctggataattattttaaaattaccgctcgtggcagtaccgttcgtcaggaagtactggctggcttaacgacctttctggccatggtttattccgttatcgtcgttccgggaatgctgggcaaagcaggttttcctcccgcagctgtgtttgttgccacctgtctggtcgcgggcttcggctcgttgctgatgggattatgggccaatttgccaatggcgattggttgcgcgatttccttgacggcgtttaccgcattcagtctggtactcgggcaacaaattagcgttcctgtcgcactgggcgcggtatttctgatgggcgtcatcttcaccgccatttccgtaaccggtgtgcgtacctggatcttacgtaatttgccgatgggtatcgctcatggtacaggtatcggtattggcctgtttctgctgctgattgctgctaacggtgtgggtatggttatcaaaaacccgattgaaggcttgccagtggcgctcggtgcgtttacctccttcccggtgatgatgagcttgctggggctggcggtcatcttcggtctggagaagtgtcgcgtacccggcgggatcttgttggtgattattgcaatttcgatcatcggcttaatctttgatccagcggtgaagtaccacggtctggtggcgatgccaagcctgactggcgaagatggtaagtctctgattttcagcctcgatattatgggtgcactccagccaactgtacttccgagtgtactggcattggtgatgaccgcagtgttcgacgctactggcaccatccgtgccgtcgccggtcaggcgaatttgttggataaagacaaccagatcatcaacggcggcaaagccctgaccagtgactcagtaagttcaatattctccggcctggtgggcgcagcgcccgcagcggtttatatcgaatcagcggcaggaaccgccgccgggggtaaaacagggttgaccgcaaccgtagtgggggcgttattcctgttaattctgtttttatcaccgctgtcatttttgatccctggttacgccactgcccccgctctgatgtacgtgggtttgctgatgttaagtaacgtctcgaagctggatttcaatgattttattgacgctatggctggcctggtgtgtgccgtgttcatcgttctgacttgtaatatcgttaccggtattatgctgggctttgtgacactggtcgtaggccgcgtctttgcacgcgaatggcaaaagctgaatattgatacagtgatcattactgctgcactggtcgcgttttacgcgggtggttgggcaatctaa

SEQ ID NO: 464299 - DNA, 489 bp, Shigella boydii
atgaaatcgttaattatcgttaatccggctgactgtattggctgccgtacttgtgaagtagcctgtgtggtcgctcacccttcagaacaggagttgaatgccgatgtctttttaccccggctgaaggtacagcgactggacagcatcagtgcgccggtgatgtgccatcagtgtgaaaacgccccttgtgttggcgcttgccccgtgggggcgctgacgatgggcgagcaggtggtgcagaccaattctgcccgttgtattggctgtcagagttgcgtcagtgcgtgcccgtttggaatgatcaccattcagtcgttgccgggggatacccggcaacaaatcgtgaaatgcgatctctgtgaacagcgggaagaggggccagcctgcgttgaatgttgcccgacacaggcgctgcagttgcttactgaaagagaactcaggcgagtcctccagcagcgtattgttgccagcggtgagaatcctctctga

SEQ ID NO: 464300 - DNA, 531 bp, Shigella boydii
atggattgtttgcggacttccatccgcctcaatgccgccagcgtgacctgcgcgtatcgtcgtgatgaagtcagtatgccgggctcgcgcaaagaggtggttaatgcgcgcgaggaaggtgtcgagtttcagttcaatgttcaaccgcaatatatcgcttgtgacgaagatgggcgtttaactgcggtgggcctgattcgtaccgccatgggtgagccggggccggatggtcgccgtcgtcctcgtccggttgcgggttcagagtttgaattgcccgccgatgttctcattatggcctttggtttccaggcgcatgccatgccgtggttgcagggcagcggaattaaactcgataaatggggcctgattcaaaccggtgacgtcgggtatttacctacccagacgcatctgaaaaaagtctttgctggtggggatgcagttcatggcgcggatctggttgtcactgcaatggccgcaggaaggcaggcggcgcgcgatatgttaactctgtttgatacgaaggcatcgtga

SEQ ID NO: 464301 - DNA, 1440 bp, Shigella boydii
atgcaaatgaataagtttatcgctgctgaagctgcggaatgtataggctgtcatgcttgtgaaattgcctgtgcggtggcacacaatcaagaaaactggccgctgagtcacagtgactttcgaccgcgtatccacgttgtagggaaaggccaggctgcgaatccggtggcctgccatcactgcaacaatgccccttgcgttacggcttgtccggttaatgctctgactttccagtccgatagcgtacaactggacgagaaaaaatgtattggttgtaaaagatgcgcaatcgcttgcccctttggcgtcgttgagatggtcgatacgattgcgcagaaatgcgacctttgtaaccagcgcagttccggcacgcaagcctgtattgaagtctgcccaacacaggcgttacgactgatggacgataaagggctacagcagataaaggtggcccgccagcgcaaaacggcagcaggaaaagcgtcatcagacgctcagccatctcgcagtgcagcgatgctccctgttaactcgcgtaaaggcgcagataaaatttcagcgagtgaacggaaaacccactttggcgaaatctattgcgggctggatccactgcaagcgacttatgagagtgaccgctgtgtttattgtgccgaaaaagctaactgcaactggcattgcccgctgcataacgctattccggattacatccgtctggtacaggaaggaaatattattgaagcggcagaactttgccaccagaccagttccttaccagaaatctgcggcagggtatgcccacaggaccgtctttgtgaaggagcatgtactttgaaagatcactctggcgcagtcactatcggtaatctggaacgctgcatcaccgatactgcgttggcgatgggctggcgtcccgatgtcagcaaagttgttccccgtagcgaaaaagtggcggtgattggcactgggccagcagggttagggtgtgctgatattctggcgcgcgcaggagttcaggttgatgtctttgatcgccatccagaaattggcggtatgctgacttttggcattcctcctttcaaactcgataaaacggtattaagccagcggcgagagatattcaccgcaatgggaatcgactttcatctcaactgtgaaattggccgcgatattacctttagcgatttaacttctgaatatgatgcagttttcatcggcgtggggacttacgggatgatgcgagcagatctgccgcatgaagatgcgcccggtgtcattcaggctctaccgttcctgactgcccatacccgccagctcatgggattgccggagtctgaagagtatccgctgacggacgtggaaggtaagcgagtcgtggtattggcggtggcgatacgacaatggattgtttgcggacttccatccgcctcaatgccgccagcgtga

SEQ ID NO: 464302 - DNA, 834 bp, Shigella boydii
atgaacaagtatatcaaacagtggtgctttgctgtgtttatgctctcgttaagtagtgtagcacttgcagctcctaaaggtatctgtacccctgataatggcgtatttcacagtacgcttgatttctcgggatatcttattaccgcgaacgaaaataaggttggaacgacatttaacaccactataactaatggatcctcatatcctggacgctgtcattgtgatactggtaacgtaggagaattcccctatatctattatacgtcaaaaataaaccaggcattaacttatgctggggttcactctaatattaattattataatcttaatccgaaccttgatgttgggattgctatagatattcttggggttgggtatgtgaatgcaccttttgaatatcatgctaacaacccgtctggtaatacaaagtacaattgcaaccgcattgaacctttaagtatatctaatggggctaaagcgatagtatatttttatatcaagaagacatttgcaggaaaattgattattcctgaaacaaagatagtgacattgtatggaacaattagccgtgacacccctgtggattactcacagccgatggctgatgtttatattcggggcgatattacagctccgcaaagttgcgaaataaataatttacagccagtttattttgattttaaagaaataccagctgcagatttttcatctgttgttggaagtgcggtaacaacacataaaattactaaaacggtcactattgagtgtgaaaacctggggatactgaataccgatgatatcagtacgtctttttatgctaccgaacccaggtga

SEQ ID NO: 464303 - DNA, 2085 bp, Shigella boydii
atggacgcgatggcttatgattacatcagccccacgcgttgggatgaggggattaacgcgctcaccatcaactacgatttttctggttcacatacactacgttcagattatggttcacaagagacagataccagttatctcaatctgcgcaatggactgaatattggaccgtggcggctacgtaattacagtactttaaacaccagcgatggccgtgcggaatacaactccattagtacctggatacagcgcgatattgccgcgttaagaagccagattatgattggtgatacgtggacggcgagcgatattttcgacagtacgcaaattcgcggcgcgcgtttgtatactgataacgatatgctacccgccagccagaatggctttgctcctgtggttcgtgggattgcaaagtccaacgccaccgtcatcattcggcagaatggctacgtgatttatcagtctgccgttccagaaggtgcttttgagatcaccgatctcaacaccgccagtacaggtggcgatttggacgtaaccatcaaagaagaagacggtagcgaacaacgattcacccaaccttatgcttcattggcgattcttaaacgtgaaggtcagacagatgttgatgtcagcgtgggtgaattgcgcgatgaagacggatttacaccggacgtccttcaggcgcaaatacttcatggtttttcccacgggatcactttatatggaggtatgcaggctgctgaaaattatggttctgcagctctgggtgtcggtaaagatcttggcgctttgggcgcaatttctttcgatgtgacacatgctcgtgcgaattttagccatgatgatacagaaacgggtcagtcatatcgctttctctattcaaaacgatttgacgacacagacactagcttgcgcctggttggctatcgttactccaccgagggctactataccctcaatgagtgggcatcgcggcgcaacagccctgaagacttttgggaaacaggtaaccgacgtagtcgcgtggagggaacgctaacgcagtcgttggggagagattatggcaatttatacctgacattaagccggcaacaatactggcataccgatgatgtcgaacgattaatgcaatttggctacagcagtagctggaagcgtctctcgtggaacgtctcctggagttattccaatactgccagacaggggacggggaacaaccatgccagtgataacaccagtgaacagatctacatgctctctttatctgttcctttatcgggctggtggggtaatagttacgccacctattctgtttcgcaaaacgataattccggtagctcacatcaactcggactcagcggtacggcgctggaaagaaataacctttcatggaatttaatgcagtcctataacagtcatgatgatgaggttggcggtaatatgtccctgacctatgatggctcttatggcacggtgaacggcagctataactacagccaaaattcccagaggctgaattatggtatcagagggggaattctggcacacagcgaaggggtaacgttaagtcaggagttaggtgaaactattgctcttgttaaagcacctggggccgccgggttagaaatagataatatgcgcggtgctgcgacggactggcgcggctatacggtcaagacacagctaaacccttatgatgaaaatcgggtagcaatcagcgataactatttctcgaagtcgaatatagaacttgataataccgtcgttacgatggttcccacgcgtggtgcagtggttaaagcggagtttgtgactcatgtgggttatcgcgttctcttcagagtgttaaatgcaaatggtaaaccggtaccttttggagccattgctgcgatacaagatgcaagtttggcagattcaggaattgtcggtgaccgtggcgaactttatctttctggtctaccagaaaaaggacaggttacgttatcctggggagaaaacgcctcaacaaaatgcatcttcaattattcactttcgacaccagaaagtgagagcggattaattgaacagggtgtgacatgtcattaa

SEQ ID NO: 464304 - DNA, 405 bp, Shigella boydii
atgatgacgaccagaatagtggttggcctcacggcagggacgtgtctgattttctcgcaaaacctgatggccgaggtcagtgtattcaatccggcgcttctggaaatcgaccatcaatccggagtcgatattcgccagtttaatcgggcaaacctgatgcccccaggtgtttatagcgttgatatttttatcaacggtaaaatgtttgaacgtcaggatgtgacatttgttcagaataatccagatgctgatctgcacgcttgctttattgccattaaaaaaacactgtcctcctttggcataaaagttgatgcgctaatgatgtggatgagacggtttgcctcgatcctgctccacgtattgaaggctcatcctggcagtttgacagtgataaattgcagctga

SEQ ID NO: 464305 - DNA, 597 bp, Shigella boydii
gtggtttacttaagtaataatgctgataaatctatttctgtatttagcaaagaagaaaaaataccttatatcatccaagcttgggtagatccatttaataaagaggataaaagaaaagcgccgtttaccgttattccgccagtatcacgattagaaccttcgcaagaaaaaatattacgcattattcacaccaaaggtgtgtcattgcctgatgatcgcgagtcagtcttctggctgaatattaaaaatattccgccatcagcgagcaacaaagcgacgaactcgctggaaatagcagtaaaaacgcgtatcaagctgttctggcgaccagcaaatatccgccttattcccgaagatgctgcgccgaaagtgaaatggcgccgggaagggcgaaatctgatagcagagaatcccaacccaattcatatcagtgtgatggatgtcatcgttgatggccatgatgtgcccctcaatatgatccgtccttttgaaacgctcacgttacctttacctgctaattctgcgggaggccaaatgacctggcgatttattaatgattacggcgcagtcagtgacccgataaaaatgacgctgtaa

SEQ ID NO: 464306 - DNA, 150 bp, Shigella boydii
atgcacattggacaggctcttgatctggtatcccgttacgattctctgcgtaacccactgacttctctgggggattacctcgaccccgaactcatctctcgttgccttgccgaatgtaagcgtaaactgaccgccgtatgtagccattaa

SEQ ID NO: 464307 - DNA, 234 bp, Shigella boydii
atggatattgctgttctggaaatcgcactggtatcgctggcagcagagccagccggtaaattgcatgaatacaaaccagtgggatatcagcgtctggtcgatgagttaaccatgctggtaaagcagttaacctggcaactgaggaaagcgaagccagactgcaaattaccggataaggcgatgagttatctggagcggaacggactgataagcgtggaggatattttacgatga

SEQ ID NO: 464308 - DNA, 981 bp, Shigella boydii
atgacgcagaacaacaatactccggttaatagcagtaatggtccggaacaaattgatttacttgatttagtgctacagctgtggcgtggaaagtgggtaattggcgcttttgttgctgtttttatcatcattgcgggtatttacatcaccgttgcaaaagaaaaatggacctcgtccgccatcatttcccagccggatgcggtgcagattgccacatacgcgaatgcactgaatatcctttatggtagtgctgctccttcaatgcaggatatccaaaaccgtgccattggtcgtttcaattcctcattttctgctttagctcaggcgcttgaaaatcaggaaatgccagaaaaactgaccatcgattctaccgttaaagggcaagcgttgccgttgagcgtcacgtatcaaggtgaatctgctgaagctgcgcagaagcagctggcgcaatacattcagcaagtagacgagcaaatggcgaaggaacttgcgctcgatcttaaagataacattaagcagcagattgccacgctaaatgactctcttgaaaaccaggagaaagttgctcaggagcaaaaagatctgcgtatccaacagatcactgaggcgcttaagaatgcggaagcggcgaaaattaccaccccgcagatccagcaaactcaggacgtgactcaggaaaccatgttcctgctgggaagcgaagcgctgaaatcgatgattgataacgaagcgtctcgtccactggtcttccctggtgcgtattatcagaccaaacaaaaattactggatattgagaagctaaacgttaagccggacactattcatgtctatcgttacgtcatgaagccggatcttcctatccgacgtgacagcccgaaaaaggccatcacgttaattctggcagtcttgctcggtgggattatcggttctggtgtggttctcggccgcaacgcgttgcgtaactacaaaccaaaagcctga

SEQ ID NO: 464309 - DNA, 996 bp, Shigella boydii
atggttacgggcgcggcaggatttatcggatcgcatgtcagcaaacgcttgctggatgccggacaccaggtagtcggtattgataatctgaacgactactacgacgtcaatctcaagctggcacgtctggatttactgaaatccgggaatttcaccttccacaagatggagttagccgatcgtgaagccatggcagcgctgtttgcctctgagaagtttgagcgcgtgatacatctggccgcacaagcaggtgtgcgctactcgctggaaaatccgcacgcgtatgcggatgctaacctggtcggtcaccttaacgtgctggaaggttgtcgccataacaaggtacagcacctgctgtatgcgtcatcaagttcagtttatggcctcaaccgtaagatgcccttctctactgacgacgcggtagaccacccggtgccactgtacgcggcgaccaaaaaagccaatgagctgatgtcgcatacttattcccatctgtataacctgccgaccactggtctgcgtttctttaccgtgtatggcccgtggggacgtccggacatggcgctgtttaagtttacaaaggcaatgatagaaggcaaaagcatcgatgtttacaactacggcaagatgaagcgtgacttcacttacattgatgacatcgctgaagccattattcgtttgcaggatgtcatacctcaggccgatgcagactggaccgtcgagaccggttccccggcaaccagctccgcgccttatcgggtttacaacattggtaacagctctccggtcgagcttatggattacattacggcgcttgaagaagctctcggcaaagaagcagagaaaaacatgatgccgattcaaccgggtgacgtgctggaaaccagcgcggacacgaaagcgttgtatgacgttattggttttaaaccgcagatttcagtcaaagacggggtgaaaaactttgtcgactggtatcgcgctttctacaaggtctga

SEQ ID NO: 464310 - DNA, 1167 bp, Shigella boydii
atgaaaataacaatctccggaacaggctatgttggactctcgaacggtattctgattgcccagaaccatgaagtggttgcgctggatatcgtgcagtccaaagtggatatgctcaaccagaagaaatcgccaattgttgacaaagaaatccaggattatcttactcacaaagaactgaatttccgcgctactacggataaagaagatgcctaccgcgatgcggattacgtcatcattgccactcctaccgactacgatccgaaaacgaattacttcaacacatccactgtagaagcggtcattaaagacgttatcgcaataaacccaaatgcggtgatgattatcaagtcaaccattccggtaggtttcactaaatccatcaaagaagagttgggcatcgataacgtcttcttctcgccagagttcctgcgcgagggcagggcgttatacgataacctgcatccttcccgtatcgtgattggtgagcgttctgaacgtgctgagcgctttgctgccctactgccggaaggagcaattaagaaagatattccggtactgtttaccgactccactgaagcggaggcgattaagcttttcgcaaatacctacctggcaatgcgtgtcgcttacttcaacgaactggacagctacgctgagagcctgggtttgaacacccgccagatcatcgaaggcgtttgtctcgatccgcgcattggtaaccactataacaacccgtcatttggctacggtggttactgcctgccaaaagataccaagcagctgctggccaactatcaggctgtgccaaacaacctgatttcagccattgtggatgccaatcgcacgcgtaaggatttcatttctgattccatcctcgcgcttcagccgaaagtggtgggcgtgtatcgtctgatcatgaagagcggttccgataacttccgtgcctcttccattcaggggatcatgaagcgtattaaagcgaagggtgtacaggtcattatttatgaacccgcaatgcaggaagatgagttcttccattcacgtgtgattcgcgatttgaatgcattcaagcaggaagcggacgtgattatctctaaccgcatggcggaagagttggcggatgtggcggataaagtctatacccgcgatctgttcggtagcgattga

SEQ ID NO: 464311 - DNA, 2103 bp, Shigella boydii
atggctaacggttggacaggtaatatattaagagtcaatctcacgacaggaaatattaccctcgaagattccagtaagtttaaaagttttgtcggtggcatgggcttcggctacaaaattatgtatgacgaagtaccgccaggcacgaaacctttcgatgaagcgaataaattagtctttgctaccggcccattaactggatctggtgccccctgtagttctcgcgtaaatatcacctcactttctacttttaccaaaggaaatttagttgtcgatgcccatatgggtggcttttttgcagcgcaaatgaaattcgctggatacgacgtcattattatcgaagggaaggcgaaatcaccggtatggctgaagattaaagatgacaaagttagcctggaaaaagccgatttcttatggggaaaagggacgcgcgcaacgacggaagaaatttgtcgattgaccagtccggaaacctgtgtggcggctattggtcaggctggggaaaaccttgttcctctctctggcatgttgaatagccgtaaccacagtggcggtgcgggaactggcgcaattatgggttcgaaaaacctgaaagcgattgcggttgaagggacgaaaggggtcaacattgccgatcgtcaggagatgaagcgtctcaacgattacatgatgactgaacttattggtgcgaataacaaccatgtcgtgccaagtacgccgcaatcgtgggcagagtattcagatcccaagtcacgttggacagcacgtaaagggctgttttggggcgcggctgaaggtggtccgattgaaacgggggaaattccgccaggcaatcagaacacggtcggctttcgtacctataaatccgtttttgacttaggtccggcggcagagaaatacacagtaaaaatgagtggctgccactcttgcccgatccgttgtatgacccaaatgaatattcctcgggtgaaagagtttggcgtgcccagcacaggtggtaacacttgtgtagccaactttgtccataccaccatcttcccgaatggtccgaaagattttgaagataaagacgatggccgtgtgattggtaacttggttggtctgaatttgttcgatgactacggcctatggtgtaactacgggcagttgcatcgcgactttacttattgttacagcaaaggggtgttcaagcgtgttctgcctgctgaagagtatgcggaaattcactgggatcaactggaagcgggtgacgttaatttcattaaagatttttactaccgtctggcgcatcgtgtgggtgagctgagtcacctggctgatggttcatatgccatcgcagaacgctggaatttgggtgaagagtactggggctacgcgaaaaataaactctggtcgccgtttggctatccggttcaccatgccaatgaagcgtcagcgcaggtcggttccattgttaactgtatgttcaaccgtgactgcatgacacatacccatatcaactttattggttccggcttgccattgaaactgcaacgtgaagtggcgaaagagctttttggttctgaagatgcctacgatgaaaccaaaaactacacgccaatcaatgacgcaaaaattaaatatgctaagtggtcgctgttgcgggtctgtttgcataacgccgtcaccctgtgtaactgggtctggccaatgaccgtttcgccgctgaaaagccgtaattaccggggcgatctggcgcttgaagccgaattcttcaaagcgatcaccggcgaagagatgactcaggaaaaattagatttagctgcagagcgtatctttacgttgcatcgtgcctacacggtaaaacttatgcaaaccaaagatatgcgtaatgaacacgatcttatctgttcctgggtattcgacaaggatccgcagatcccggtctttactgaaggtactgacaaaatggatcgtgacgatatgcatgcttcgctcacgatgttctacaaagaaatgggctgggacccacagcttggtagtcccacccgcgaaacattgcagcgtctggggctggaagatattgccgccgatctggcagcacacaatctactgcctgtgtaa

SEQ ID NO: 464312 - DNA, 246 bp, Shigella boydii
atgaaccatcgggatgaattgccgttagcgaaagtcagcgaagttgacgaggcgaagcggcaatggttacaggggatgcgtcaccccgttgatacggtaaccgaaccagaaccggctgaaatcctggcagagttcattcgccagcattctgcggctgggcagctggtggcgcgcgccgtgtttctctcgccaccctattcggttgcagaagaggagctgtcagttttgctggaaagcattaagtag

SEQ ID NO: 464313 - DNA, 192 bp, Shigella boydii
gtgactaaacaggaaaaaacagcccttaacatggcccgctttatcagaagccagacgctgacactgctggaaaaactgaatgaactggacgccgacgaccaggcggacatctgcgaagcccttcacgaccacgccgacgagctttaccgcagctgcctcgcacgcttcggggataacggtgaaaacctctga

SEQ ID NO: 464314 - DNA, 561 bp, Shigella boydii
atgagcaatcttttacaaatggggacagacttcgagaagaaactgaaagagcgtgccgtctctacagagaacatgctgaacagcgagttcaggaagctcgaagcgtctgtagacagggaactgaacttaaacgggcagaaaatcagagacgctatcagcgcacacacagcagcggtgaaagaacaactggagacgctgaactgtgccgtgaacgtgcagttcagcgccacagagaacgaactggcccggcggcaggaagagctgctctggaagctggtcaaagggcggatactgtacccgtcgctgacggcgctttgcgtcacgggcgggatttttctggcgtcatgggggctgattcagtggcaggaaagccggattgcggcgaacatcctggctatcagggaccaggaagagacgctggcgaaactccgggaaaaaacatggggtgtgacgtatcacgagggcaggaacgggaaatttctggtattgccgtccggggtgaagggggaaaacaactggacggtggtgaagaagaacgcagtaagactggtcagggagtaa

SEQ ID NO: 464315 - DNA, 234 bp, Shigella boydii
atgacagagctggaaatgcacttactgaacgccttagagcaattgcagcaggactatacgcagcggctgaaagactgggagagcgccttcacggatttgcagcatatgttcgagctgacacgacaggagaacgggcaactgagggaacagtgcgacgacttgagtcagcaggtgcagagattagccgggcaggtggaccgcttgagtcggttatttatcacgaacagcagataa

SEQ ID NO: 464316 - DNA, 222 bp, Shigella boydii
atggtaccggaacgcgttaaaaacgcatccgggcgcgattctggcgtgtcgtttttgttgctgtgttttgcctctttgccagatcgcgctcattcctcagcctcatcccgcgatgtctgcgtatgtcatcaactgaaaagatggaaaaaaaacagtgtcatgaggtttacgcaggcaaaaccagcgttattcacatggctgaatagctatgcatacggttaa

SEQ ID NO: 464317 - DNA, 765 bp, Shigella boydii
ttggatcgggtatttagattgatagtagaggaaatcaagtttgctgatccagactggagccaacgcatagccttagagagcctgaatgtcgattcctttgctcaagcctggtttgccgagcgcaaacaacgcgacccatttgactgggcagaaaaaaatctccaggaagtcgaacgcaataaacgagaaaaacatactgttccctggcgttatgtcattctgcgcctgcatgaagccgtacaggaaattgttccacatctgaatgaacacgaccataaacggttcagtaaaggccttgcccgggtttttatcgataattatgcggcaatcccttcagagtctattcgtcggctgctggccttacgtgaagcggggatcattcatattctcgccctcggtgaagactacgaaatggaaattaatgagtcgcgcaccgtcctgaaaacggaagacaacagctactcgtttgacgtttttattgatgcccgcggacagcgtccgcttaaagtgaaagatattcctttccctgggctacgcgagcaattacagaaaacaggggatgaaatccctgatgttggcgaagattatacgttacagcaacccgaagatattcgtggacgcgtagcgttcggcgcgttgccctggttgatgcacgaccagcctttcgttcagggacttacggcatgtgcagaaattggtgaggcgatggctcgggcggtcgtaaaacctgcatcccgtgcacgtcggcgtctttcgtttgattaa

SEQ ID NO: 464318 - DNA, 579 bp, Shigella boydii
ttggcagcattacctcaacaagctgcggcacagtgcgactggttgcatctgtttttagtcaaagaagattcttcacgcttcccctatgaagaccggctggatctggtgttaaaaggcaccgccgatattccacgcctgactgtgcatcgcggctccgaatacatcatctcccgcgctacgttcccttgctacttcattaaagaacagagcgtcattaaccattgttacaccgaaattgatctgaagattttccgtcagtacctcgctcccgcactgggtgtaactcaccgctttgtcggtactgaacccttttgtcgcgttaccgcccagtacaaccaggatatgcgctactggctgaaaacgccgactatctccgcaccgcccatcgaactggttgaaattgagcggctgcgttaccaggagatgccgatatccgcttcccgggtacgtcaactgctggcgaaaaacgatctcacggctatcgcgccgctggtccctgcagtcacgctgcattatttgcagaacctgcttgagcactcccgccaggacgcggcagctcgtcaaaagacccccgcatga

SEQ ID NO: 464319 - DNA, 426 bp, Shigella boydii
atggtagtgtccgctattgccagtacacctcaactggagggcagcagcggtaaagcgttgcgccagtgtattgcggcggtcaggcgtggcggcattgttagcgtaccgggcgtctacgctggatttattcacggtttcctgtttggtgacgcctttgataaagggttgacgtttaaaatgggacagacccacgttcacgcatggctgggagaattattaccgttaattgagaaaggattactgaaaccagaagaaattgttacccactatatgccgtttgaagaggccgcccggggatatgagattttcgaaaaacgtgaagaggagtgccgtaaggtgattctggtacccggtgcacaaagcgcagaggcggcgcagaaggcagtttcaggtctggtgaatgcgatgccggggggaacaatatga

SEQ ID NO: 464320 - DNA, 819 bp, Shigella boydii; identical to SEQ ID NO: 463221

SEQ ID NO: 464321 - DNA, 810 bp, Shigella boydii
atgatacatttggtaaataaattgataaattttggtttcactcgtaccgatgcacaggtttacatcagtcttttgaaaaacggtcgtagcagtggttacaagattgcaaaggaaatttcactttcacgttcgtctgtatactcatcaattgataatctttacaagaacggttatatctttcttgtcgatggtgaaaccaaagaatatgaagcaaaatctcctgaactcatactttcgcaaattgaaaaaagcactattgacaacataaaaatcttgaaaaaagaattatcacagatgatgtttcagaatgaacgtgaattcatttataatgtctctggttttgataatttacatcagaaagctaaagagatgctctcttctgcagagtatgaaatttacctcaacacggattttgatttacattttttgaaaaatgaaatttgtgaggctctaaatcgacattttcgagttattgttttttcatttaataaacttattactcctgacccacgcgtagaactatattaccgttttaaccatgaagaagaatattacccttctcatcgttttatgcttgttgttgatatgaagacagtaatggttttttcacaacgagctgaatcactggggttatactcgaataatcgcttgcttatcaatataattgccgaacatatccatagtgatatatatctaaccaagtatcagcaacaatatcctgatgccaatgcattaataaatactttgcatgaatctggcaatgatatggtgcaggatgaaaaacatttgagtgatagcaaaaactgttaa

SEQ ID NO: 464322 - DNA, 177 bp, Shigella boydii
atgaacggtcatataggagaactggataaattagttccccatcttattacggagcataaaatatatggaagagatcgtataactccactcactgtttctgctgaagatagcgttatcaaaaaacagaataatcccgatgatcacatgatgcaatattattggtgggatagtgggtaa

SEQ ID NO: 464323 - DNA, 297 bp, Shigella boydii
atgagcgcttacccgatttttgatcgtattgaagaaatggcatgggctcgtcactaccagcagatcgttcgtgaagaaaaagaaacggaactggcggacgacctggaaaaaggtctgcctcagcacctgtttgaatcgctctgcatcgaccatttgcaacgccacggtgccaataaacaggcaatcagccacgcatttgatgatgatgttgagtttcaggagcgcatggcagaacacatccggtacatggctgaaaccattgcccaccaccaggttgatattgatttggaggactaa

SEQ ID NO: 464324 - DNA, 1803 bp, Shigella boydii
atgaacaccgataaacaagtttacccactgtattacgaagcaaaaaatgacaaagtaagaaaacgtctcggtattaaaggcggtttttactgggctgaagcgaaaaaattatccattgccatctcccgtggtgctgttgcgattgacgatgctggatacgatgaagatgacttcaaaaaacctgttcgcgtcaatttgcccgttgttgatgacctcccaccagaaggcgtgtttgatacggaattctgcaaccgttacgaaaaaggcggggaagatggcatcacaatggtatttatcgcgccctcaccctctgcgcaggacaaaccagccagcactgacaataccaatgttaatggcgaagacatgacggagattgaggagaatatgctactcccgatttctggtcaggagctgcccattcgctggcttgctcaacacggcagcgaaaaaccggtaacgcacgtttcacgcgacgaactccaggcattacacattgcacgggctgaggaactaccagctgttactgccctggctgtttcgcataaaaccagcctgctcgacccgctggaaattcgcgatctccacaaactcgtgcgtgatactgacaaagttttccctaatcctggcaattcaaatctgggactgatgactgcttttttcgaagcatatctggatgccaactacaccgatcgcggtctgctgacaaaagagtggatgaaaggaaatcgtgtttcacgcatcacgcgcacggcttccggtgcgaatgctggcggcgggaacctcaccgatcgcggcgaaggtttcgtccacgatctgacgtcgctggcgcgcgacgtagccactggcgtactggcccgttcaatggacgtggatatttataaccttcatccggcacacgctaaacgcattgaggaaattatcgctgaaaataaaccacccttttctgttttccgcgacaaattcatcaccatgcctggcgggatggattattcccgcgccatcgtggttgcgtcagtgaaagaagcaccgattggtatcgaggtcatccccgcgcacgtcactgaatatctgaacaaggtactgactgaaaccgatcatgccaaccctgatccggaaatcgtggatattgcctgcggtcgctcctctgccccgatgccgcaacgtgtaacagaagaaggaaaacaggatgatgaagaaaaaccgcaaccatcttgcgcaatggcagatgaacaggcaacggctgaaacagtggaaccggatgcaactgaacatcatcaggacacgcagccgctggatgctcagtcacaggtaaatgctgttgatgcgaaatatcagaaactgcggacagaactccatgaagcccggaaaaacattccgcccaaaaatcctgtcgatgcagacaaattactggctgcctctcgcggagaatttgttgaagggattagcgacccgaatgattcgaaatggattcccggtcatcatatctcctcaaatgaagtcaaaaaaacggaaaatgaagtgcgacagactgaagataaacagcaccagaacagcgaaccggaggagggaacaccctgcaatcagactggcgaggataactgccctgactgtggcgcggtgatgggagacgcaacttatcaggaaacttttgacgaaaaaaaccagatgaagcacaggaagaagagccgaagaaaacggaaaaagctgatgatttgttgccggagaacgctggcagcgatcagcataatgatagcaataatgaaactggcgaagatgaactcaactggaaaaaacaggtgttga

SEQ ID NO: 464325 - DNA, 198 bp, Shigella boydii
atgattaccagttatgaagccactgttgtaactactgatgacattgttcacgaggttaatctggaaggaaagcgtattggctacgtgattaagacagaaaataaagaaaccccattcactgtggttgatatcgacggtccatcaggcaacgttaaaacacttaacgatggtgtaaaaaaatgtgtctggtgcacatag

SEQ ID NO: 464326 - DNA, 495 bp, Shigella boydii
atggtgtcgcactggttcagtgccagtcagtggcagctaccgaacgaaagcgattatctgaaattacagtcgctgtttgcccgggtggcagaagagaaacatcagcgcggtgaactggaaaagccccaccaccagctggtggatacgtatacgtcactgaaccggcagtatgtggagctgcagagtgaatataagcatctgcggcggtattttggtgtgacggcgcaggtgccgtacacggatgtgtggacacataaaccggtgcagttctatcccgggaaacatccgtgcgaaaaaccggcagaaatgctgcagcagataatcagcgcaagcagtcgtccgggtgacctggttgcagatttttttatggactcaggttcaacggtaaaagcggcactggcgctcgggcgtcgtgcgattggcgttgagctggagaccggacgttttgagcagacggttcgggaagtacaggatttagtcagccagaacggatga

SEQ ID NO: 464327 - DNA, 141 bp, Shigella boydii
atgcaatggcacatagcgccactctccagcccctctccggaggggctgtttatattgattttgtcagatgtgagtaaactccttatggactttgttgttttagtccataaggacatatttgcagagtgcaacggttattaa

SEQ ID NO: 464328 - DNA, 822 bp, Shigella boydii
ttgaatctcagtattccgttagaacgctggttaccgcgtagccgggtttcctatcagatgaccagccagaaagatcgcccaacccaacatgaaatgcgtcttgatggctcactgctggatgatggtcgcctgagctatagcctggaacaaagtctggatgacgataacaaccataacagtagcctgaacgccagttaccgttcaccttatggaaccttcagtgccggatacagttacggtaatgacagcagccaatacaattacggcgttaccggcggcgtggttatccatcctcatggcgtgacgctctcgcaatatctgggcaacgcttttgcgcttatcgatgctaacggggcttctggcgtgaggatacaaaactatccggggattgctactgatccctttggctatgcagtgattccttatctcacgacttatcaggaaaaccgtctctcggtagatactacgcagctgcccgataacgtcgatcttgaacaaacaacacagtttgtggtgcccaacagaggtgcaatggtagcggcgcgtttcaacgccaatatcggttatcgcgtacttgttacagtcagcgatcgcaacggtaaaccgttgccctttggcgctcttgccagcaacgatgatacggggcaacaaagtatcgtcgatgagggcggcatactatatctctctgggatatcgagtaaatcacaaagctggactgtacgctggggaaatcaggcagatcaacaatgtcagtttgcttttagtacaccggattcagaaccaacaacctctgtattacaaggcacagcgcagtgccattaa

SEQ ID NO: 464329 - DNA, 1536 bp, Shigella boydii
atgccacaacgacaccaccagggacataaacgcacaccgaaacagttggcgctcatcatcaaacgctgtttgccgatggtgctcactggcagcggcatgctttgcactaccgctaacgccgaagagtattatttcgaccccattatgctggaaactacaaaaagtggtatgcaaacaactgatctgtcacgtttttcaaaaaaatacgcacaactaccaggaacttatcaggttgatatctggctgaataaaaagaaggtttcacagaaaaaaattacatttaccgccaatgcagagcaacttctgcagccacagtttacggtagaacaactacgtgagctgggtattaaggtggatgaaatcccggcgctggctgaaaaagatgacgatagcgtgatcaactcgcttgaacaaatcattcccggtacagctgctgaatttgatttcaatcatcagcgacttaatttgagcattccccaaattgcactgtaccgtgatgcaagaggttacgtctccccttctcgttgggacgatggtataccaacgctgtttaccaactactcgtttacaggttctgataaccgttaccgccagggcaatcgtagccaacgacagtacctgaatatgcaaaatggtgctaattttggcccctggcgattacgtaactattctacgtggacacgcaacgatcaggcgtcaagctggaacactatcagtagttatttacaacgtgatatcaaggcgttgaagtctcagttgcttctgggagaaagcgccaccagcggcagtattttttccagctacacctttactggcgtgcaactcgcttccgacgataatatgttgccaaacagccagcgcggatttgccccaacggtacgcggtatcgcaaacagtagtgcaatcgtgactatcaggcaaaatggttatgtgatctatcaaagtaacgtgccagcgggtgcctttgaaattaacgatctctacccctcttccaacagcggcgatttagaagtcacgattgaagaaagtgacggtacacaacgtcgctttatccagccttattcttcattacccatgatgcagcgacctgggcatctaaaatatagcgcgaccgctggacgctatcgcgctgatgcaaacagtgatagcaaggaacccgaatttgctgaagccacggcaatatatggtttgaataatacttttacgctgtatggcggcctgctcggttctgaagattattatgcgctggggatcggtatcggcggcacacttggcgcactgggcgcgttgtcgatggatatcaacaggctgacacccaattcgataaccagcactcttttcatggctatcaatggcgtacgcagtacatcaaagatatcccggaaaccaacaccaatatcgctgttagctactatcgctataccaacgatggctattttagttttgatgaagccaatacccgcaattgggactataacagtcgccaaaaaagtgaaattcaattcaacatcagccagacaatatttgatggggtaa

SEQ ID NO: 464330 - DNA, 285 bp, Shigella boydii
atgagcagaaaaacccaacgttactctacggagtttaaagccgaagccgtcaaaacggttcctgaaaatcagctttcgatcagtgaaggcgcttcccgattatctgttcctgaaggcactttaggacaatgggttaccgctgcaagaaaagggctcaatacaccaggctcccgcacagtggctgagctggaatctgaagttatgcaactgcgtaaggcgttaaatgaagctcgccttgagcgagatatatgtaagcgtaaactgacagccgtatgtagccattaa

SEQ ID NO: 464331 - DNA, 1593 bp, Shigella boydii
ttgttagataataaagaatggcaggaaaaagcgagcgatttatgtttggaacttatcgatacgcaagatgatgatggctacattggaatttatgattcagcattaaaatttaactgtaaagcagaaaacggagagttctgggcacaagctactgccttgcgttttgtgcttggatgttatgagtccacccgtaatgagggtttattaacttctcttacccaagccgcacaatgtattatggctggctaccctaaagaaacgtcacatcctttcgttgtggaacgtggttttgctggacatagccacggattaacaataacagatgttttctaccgcctttatgaaataaccaataacattgaatatctctcatattgcttgtggctgtatgaagattattccgcaggatgcgtgtcggagcaagatctgcaatataaaaatgtcataaaccctggttaccttcttaaaggtcatggcgtacatacatatgagcatattagggcattagccatcgcagcgagccaacggccgcagtatcaaactgcattagatatttttttatcccagttgaaatattatcttacaccatctggcgctcccattggtgatgagtggattacaggacgcacagctaatgccacttatacaggctatgaatattgttctgttcatgaactatttagcacttatgttatgttaataaaactgaccactaatattggtctggccgatgatgctgagtggctattctataatgccagttttggcatgcagcatcccatacatcacgcgataatgtactgtaagactgataattgttatgaagcaaatgaaagaaaacatccggacagtaatcagtttaataccagatataaatactcccctactcatgaggaggctgctgtctgctgcgtaccgaatacagcaagaaccataccggcttttgtcgaaaatatgtttcaagaaaataacaatggttttactgcattattttatggtccgtgtgagttttatggcacatataataatgttgcaattaatattacacaattaactgaataccctcatgatttaagcgtaaaatgtctcattgagcctgagtcatctgttcgttttgctctcagtttccgttaccccgactgggcaaaaatgatgattattaatggtgttacttttactaaaaatgatactcaaaactcacttattattttagatagaacatggcaacatcatgatgtgattgacattaaatttatagctgatatacagtttaatactgacttatgtggtgacacttatatttccagaggtcccgttttatatgcaattgagcttgagagcgatattttaatcaaaaaaactctgctgaactggaaatattttgactcaggatacataccctgtagtagagctgatgaatctatccagttctcttataccgatatggaatctttttcatattcaacctcaccagagggcaagcaatacattgaagggtgtttttatttaaacaagactaaaatagtcagaaaacttataccatttggtcaaactattcttcgcaaagtaactttctccaatatagagagttaa

SEQ ID NO: 464332 - DNA, 690 bp, Shigella boydii
atggaccttaatgataatattattaaactgtcgaataaaataggtcagagagtttatactgttgtctctgaaatgtcgattgaagcatggataacaaaagaaccgcagtcttttgtttatcgccgtagcggcgcataccagaaacttaccgttggctcagactggggtcaactgtttgactgtgcctggatgcgagtttatggtaaacgtccagccgataaatttagacacaaattcgtcgctctcgttgatatcggtggcgaaggtcttgttgtggataagaatggttcacccatctgcggcatcacgaataaaacatcatcttatggcgtaccgccagataaaccgggtaaatgggtggttgatctttctctcgtttgtgaaaatgacgaggttgagttttggattgatgctgcctgcaacgatttatttggctatgttactaatggagggattattactgatgttcatatcgcgacatgtaatcaactactgaaatccctttattatgatattgaggtgcttttcgactggattaatgatggtcagaagtttgaatccatacatcctaaaggtatcaccccagaacaatttattgccaaaaaaagtgagtgtactgacgaaatcataagtactctcgaatatattgataatacgttaattacctttagcaatggaagaaataattaa

SEQ ID NO: 464333 - DNA, 738 bp, Shigella boydii
gtggcactacctttcgctgctgacgcttgtctggtcgcctcatcttttgaagcagacgcagatgatgccgatgacgccgctgaactggctgacgatgcggctgccgccttagaggaagcagcattgtctgctgaagtctttgcatttgtttcagaggtttttgctgcagaagcagacctcgctgctgcagtggcttgctcagtggctttgccagccttcgttgtggctgttgaagcggatgatgcggcgctttctgccgattttccggcggcgctagcactggctgaggcctgcccggcacttgttgacgcggcactggcagacgacgcagccgctgtttttgagcctgccgcagctgaggcgttctgtcccgctgctgtttcagaagacttagcgttcgtctcggacgtttttgccgccttcgcggaatttcctgccaccgttgccgaggaagctgcactactggcacttgatgatgcattcgtttctgaagatttcgctgcctcttttgaagccgccgcaccccgtgccgaggtggcagcttctgacgccttcgtggtcgctgtggatgcagaagtggctgccgatttttgtgatgctgcggcattcgtttctgacgttttcgcggcactggcgctggtagctgccgcgctttttgatgactctgcagcagcagcactttttgctgcttcacgggcctttgtcgatgccgttcctgcgctggaagacgctgactga

SEQ ID NO: 464334 - DNA, 783 bp, Shigella boydii
gtgatatcggaggaaccatcaaaagccacattgcttattttcctggcagtttttaattttgcagctgtagaagcattgccggatagttcaccagaaaggccaccgctgaatgtttgtcgattagtccaggtattcgctgtactgagtaacggtattttctccccgcttgtgccgagttctcgtaaaccgaggtattcgataacggcagcaacagtcgatttcgcaagaatatcccgcccgacttttgtcagggttgccaggctggcgacatcattccccgtaaaatacggaaacttgtctgccgcagtagtaagcccggccagcgccgtcagggtggcatctttcggttgcttacccgcaagcgcgttagtcatggtggtcgcaaaattcgggtcgtttcccagcgccgccgctaactcgttcagcgtattcagtgcgtcaggtgacgaatctacaagggcggcaatcgcagccataacgaaagccgtgcttgcgatttgggtattattcgttccctgtcgcgcagttggtgttgttggcgttccggtcagtgcaggactatttaagggcgctttcttgttcgtttcacccattaccgccttaaccgcttttggcgttgccgccagtgactcggaagtgctgttggtcgcactgctgagctgtactatcccctttttcgtcgtgctcgcatcctccagcgccacggcggatgcaatatcctctgcccgttttgctgctgtatcggcgcgcgttgccgcggattccgccgtacttttgctctga

SEQ ID NO: 464335 - DNA, 273 bp, Shigella boydii; identical to SEQ ID NO: 461110

SEQ ID NO: 464336 - DNA, 366 bp, Shigella boydii
atgccaattccactcagtaaagatgtacagataaatcccggtgtgctggctgtggcgggtaatgccgtcgatcttaacggcctgctgttgaccagtaatccgttacttccggtcggcactgtggttccgttttcctctccggatgatgtggccgcgtattttggtgcattatccgatgagtacgcacgcgctcagctttatttccagggcttcaaaaatgccaccaggacgccggggcaattgttgttttcccgtttcagtcctgccccatcggcggcctggttacgtagcggttcgtttaagggcgcgactgttgaacagctacaaaaactttccggcacgctgatgcgtaagcgtacagcctga

SEQ ID NO: 464337 - DNA, 546 bp, Shigella boydii
atgccttcaggtgtgaccctctccgttacggaaagcgctctttatcaggccctcggtgattatcaccgggggcttttttctgatgccgggattgaacgaacgcagcagaaccaggtcccgatgcctcaggggaatttcatcaccatgacgggcattgatgttaccggattatccactgcggtagtggcatattctgcgccagcgcaggctggtgagggctctcagcatatcacccgtaccacaaaatggcgttgccagcttgatttctacggccctcacgcggcagataacgctcaggtgctggcaacgcttttccggtctgaattttccgtacggcttttccggcagggcggtgggctgatttccccgctgtattgctcagagccctttaacaccacattccccaacggtcagcaacagtatgaaccgcgctggacgcttgatattcagatgcagattaaccctgtggtcacaacttccctgatgttttttgacaacgtgatcacccggacaacggaggctgataatgccaattccactcagtaa

SEQ ID NO: 464338 - DNA, 366 bp, Shigella boydii
atgaactttcacggtattgtttccggcgcagtacgtcgggtaaatccctttacagacgcgctggtttatcgttcccgcgggagtacacagcaggcagattattcccgcgtacctgagtatgaagatccggtttccgtcagggggcaaaagcaggctgtcacccaggctgatttacgtcatcttgataatcttaaccagcagggagttttcgccacattgtataccgatggtaactggtgcgggcttaaccgtgcccggcaacagggaggcgataaatttgttattggcgatgaaacgtggctggtgattgaggtactggaaatctggcctgactggacgagggttattgtatgccttcaggtgtga

SEQ ID NO: 464339 - DNA, 1035 bp, Shigella boydii
atgggtacggtgacgtttgactgtcggatgtttgtcagtctgtacccggagttttccacggtgacaccggagctactgacggcggtgtttaaccgggcgaccgcgttgtacctggataacacggacgacagtccggttaccgacctgaaggagcgggaacagcttctgttcctgctggttgcgcatctgtgcgcattgcgggggctgggaaacgggagagacgggcaggctggtctggtggggcgtatcaccagtgcgtcggaaggttctgtatcggtatcggtggataatagcggcagtaatgatgcgtcgtggtggtatctccagaccccctggggtgctgactactggcaggcgacagcgccataccgctcaatgcagtatcattccggggggggcaccttcgcgatatccggggcattattaccggggatacgggagggggcgtcgatggtaaataaagtcacaggtggcaaacagttccggcagaagctgaaacaggttgccgcgaacctttcattgggtaaaaaactcaaagtgggttttcttgagggagcaacttaccctgacggtacgtcagtggcttatattgccgcagttcaggagtttggtggaagagcggtcatacccgcccgtgagcagacgctccactttcgctataacgaaaaaacgggagaaaccgggcaccgctttgtcaaagccggtaaagggaattttgttcaggatgtggttattcctgagcacacggtcaccattcccccccgtccgttcttccgtaagatgatcgaacataaaagtcccgaatggggcgaaaaaatggcgaccttattacgggcgaatgattttgatactgcgaccgctctggtgtgtatgggagaacatatcaaagggcagttgcagatgtctgttcgcgactgggaaagtccgtccaacgctgcatccactgcccggcaaaagggttttaacaacccgcttattgaaaccggacatatgatggacagcgttgattattctgtagacgggggcaaaaaatga

SEQ ID NO: 464340 - DNA, 339 bp, Shigella boydii
atggtaacagtgggctgcaaactgccgaacggtctggtgctggaagtgggtcagaaacgggttcaggtggcaggctggcggaataacgcggttaaaattgtggggggctatggtctgacgcaggtcgataaggtgttttttgacgcctggctggcggagcacggacagcaaccttatgtgaaaaatggcgttatttttgcgcaggataaggcgaacagtgcagtctcgcaggctacggagcagaaagccgttaaatccggccttgaaccgctgccgcagaaaaatccggctccgggcgttaaccgcaatgatgaagtgatgggtaaacctcaggagtaa

SEQ ID NO: 464341 - DNA, 159 bp, Shigella boydii
atgtcggtgcatctttttgagttttttattgtaactcattttgagtctatgtcaagcggtgttgctcttttagagtctctttatgttcttgttgtggttcattttgagtttttattggtttctcattttgcgccacgaactgagacggatactacttaa

SEQ ID NO: 464342 - DNA, 981 bp, Shigella boydii
atgtcaggagaacacacgttaaaagcggtacgaggcagttttattgatgtcacccgtacggtagataacccggaagagattgcctctgcgctgcggtttattgaggatggtttattactcattaaacagggaaaagtggaatggtttggcgaatgggaagacggaaagcatcaaattcctgacactattcgcgtgcgcgactatcgcggcaaactgatagtaccgggctttgtcgatacacatatccattatccgcaaagtgaaatggtgggggcctatggtgaacaattgctggagtggttgaataaacacaccttccctactgaacgtcgttatgaggatttagagtacgcccgcgaaatgtcggcgttcttcatcaagcagcttttacgtaacggaaccaccacggcgctggtgtttggcactgttcatccgcaatccgttgatgcgctgtttgaagccgccagtcatatcaatatgcgtatgattgccggtaaggtgatgatggaccgcaacgcaccggattatctgctagacactgccgaaagcagctatcaccaaagcaaagaactgatcgaacgctggcacaaaaatggtcgtctgttgtatgcgattacgccacgcttcgcccctacctcatctcctgaacagatggcgatggcgcaacgcctgaaagaagaatatccggatacgtgggtacatacccatctctgtgaaaacaaagatgaaattgcctgggtgaaatcgctttatcctgaccatgatggttatctgggtgtttaccatcagtacggcctgaccggtaaaaactgtgtctttgctcactgcgtccatctcgaagaaaaagagtgggatcgtctcagcgaaaccaaatccagcattgctttctgtccgacctccaacctttacctcggcagcggcttattcaacttgaaaaaagcatggcagaagaaagttaaagtgggcatgggaacggattga

SEQ ID NO: 464343 - DNA, 1401 bp, Shigella boydii
atgtctgatataaaccatgcaggttctgaccttatatttgaactggaggatctccctccctttcatcaggctctcgttggtgccattacccatctgttggcaattttcgttccgatggtaacccccgcgttaatcgtgggtgcggccttacagctttccgctgaaacaactgcctatcttgtttcaatggcgatgatcgcctctggtattggtacctggttacaagtaaaccgctacggcatcgtcggttctggcctactctcaattcagtcagtcaatttttcatttgttacggtcatgattgcgctgggcagcagcatgaaaagcgacggttttcacgaagagttaatcatgtcgtcgcttcttggcgtctccttcgttggcgcatttctggttgtcggctcttcttttatcctgccctatttacgtcgggttattacgcctactgtcagcggtattgtggtactgatgatcggcttaagcctgattaaagtcggcattattgattttggtggaggatttgctgccaaaagcagcggtaccttcggcaattacgaacatctcggcgttggtttattggttttgattgtggtgatcggctttaactgctgtcgcagtccgttgctacgcatgggagggatcgctattgggctatgtgtcggctatatcgcatcgttatgcctgggcatggtggatttcagcagtatgcgcaatttgccgttaatcaccatcccacatccattcaaatacggctttagttttagcttccatcagttcctggtggttggcacgatttatctgcttagcgtgctggaagcagtcggcgatatcaccgccacggcaatggtttcccgccgccccattcagggggaagagtatcagtcccgactgaaaggcggcgtgctggcagatggtctggtttctgttatcgcctccgctgtcggttcattaccattaaccacgtttgcgcaaaataatggtgttattcagatgactggcgtcgcttcacgttatgtcgggcgaaccatcgcggtaatgctggttatcctcggcttatttccgatgattggcggcttcttcacgaccattccctcggcagttctgggaggcgcaatgacgttgatgttttccataattgcaatcgcagggattcgcatcatcatcaccaacggtttaaagcgccgtgaaacacttattgtcgccacttctttaggtttagggcttggcgtctcctacgatcccgaaatttttaaaatattgccagcctctatttatgtattagttgaaaaccctatttgtgctggcgggttaactgcgattttattaaatattatcctccctggtggctaccgacaggaaaacgttctgcctggtattacctcagcggaagagatggattaa

SEQ ID NO: 464344 - DNA, 819 bp, Shigella boydii
atgtgtcaggtatttggtgtatccaggagcggttattacaactgggtacagcatgaaccctcagacagaaaacaaagtgatgagcggctaaaactggagattaaggtggcacatatccgcactcgcgaaacatatggaacccggcggctccagacggagctggcagagaatggcatcatcgttggtcgtgaccgactggcacgtcttcgtaaggagctaaggctacgctgtaagcagaaacgcaagttcagagcgactacgaacccgaaccacaatctgccagttgcgccaaatctgctgaaccagacgttcgctcctacagcaccaaatcaggtctgggtggcggacctgacgtatgttgccactcaggagggatggttgtacctcgctggcatcaaagatgtttatacgtgcgaaattgtcggctacgccatgggagagcgcatgacaaaagagctgacaggtaaagccctgtttatggcgctcaggagccagcgcccacctgccgggctaatccaccactctgatcgaggttcacagtactgcgcatacgattaccgggtcatacaggagcagtctggtctgaaaacatcaatgtcgcgtaaaggtcactgttacgacaacgctccgatggaaagcttctggggaacgctgaaaaatgagagcctgagccactatcgttttaataaccgggatgaagccatctcagtaatacgggaatacattgagattttctacaatcgtcagcgtcgtcactctcgtctggggaatatctccccggcagccttcagggaaaaatatcatcagatgactgcttaa

SEQ ID NO: 464345 - DNA, 456 bp, Shigella boydii
atgaaaaacaaattgttatttatgatgttaacaatactgggtgcgcctgggattgcagccgcagcaggttatgatttagctaattcagaatataacttcgcggtaaatgaattgagtaagtctgcatttaatcaggcagccataattggtcaagctgggacgaataatagtgctcagttactgcagggaggctcaaaacttttggcggttgttgcgcaagaaggtagtagcaatcgggcaaagattgaccagacaggagattataaccttgcatatattgatcaggcgggcagtgccaacgatgccagtatttcgcaaggtgcttatggtaatactgcgatgattatccagaaaggttctggtaataaagcaaatattacacagtatggtactcaaaaaacggcaattgtagtgcagagacagtcgcaaatggctattcgcgtgacacaacgttaa

SEQ ID NO: 464346 - DNA, 318 bp, Shigella boydii
atgaaacttttaaaagtagcagcaattgcagcaatcgtattctccggtagcgctctggcaggtgttgttcctcagtacggcggcggcggtaatggtgcagatgttggtcagggctcagatgacagctcaatcgatctgacccaacgtggcttcggtaatagcgctactcttgatcagtggaacggcaaaaattctgaaatgacggttaaacagttcggtggtggcaacggtgctgcagttgaccagactgcatctaactcctccgtcaacgtgactcaggttggctttggtaacaacgcgaccgctcatcagtactaa

SEQ ID NO: 464347 - DNA, 936 bp, Shigella boydii
atgaaattgcaccatagaatgctccggcattttatcgccgcaagtgtcattgtgctgacatcttccttccttatttttgaacttgtcgccagcgacagagcaatgagtgcctatctgcgctatatcgtgcagaaagcagactcctcctttctttatgataagtatcagaatcagagtattgccgcgcatgtgatgcgcgctctcgctgctgagcagtcggaagtgtcgccagaacagcggcgcgccatctgcgaggcttttgagtctgccaataatacccatggcttaaacctgactgctcataaatacccgggcttacgcggcacactacaaaccgcatccactgactgcgacacaattgtggaagctgcagcactattacccgcttttgatcaggcagtggaaggcaaccgccaccaggatgattacggttcaggtcttgggatggccgaagagaaatttcactattatctcgatctcaatgaccgctatgtctatttttatgagccggttaatgttgaatactttgcgatgaataactggtccttcctgcagtcaggaagtattggtatcgatcgcaaagatattgaaaaggtatttaccgggcgtaccgtattgtcgagcatttaccaggatcagcgtactaaacagaacgtgatgagtttgctgacgccggtgtatgttgcagggcagctaaaagggattgtgctgctggatattaacaaaaacaatttgcggaatatcttttacactcatgaccgccctctcctctggcgttttctcaatgtcacgctaaccgataccgattcggggcgcgacattatcatcaaccagagcgaagataatctgttccagtatgtcagttacgtccatgacttaccgggcggcatgaggtgtactggcaatagcggacactaccatttgttctttttttaa

SEQ ID NO: 464348 - DNA, 1542 bp, Shigella boydii
atgagccatgccgatatgaacaactgctgcggctttaacgaggctgccgcagcgttctcatggaacagcccgaaaaaggccattaacccttatctggacccggcggaagttgcgccggtttctgcgctttcaaacctgatcactctgtacgctgccgataacgagcaggaacagttgcgccgcgaggcactgagtgatcaggtctgggagcgttattttttttatgaatcacgtgatcctgtccagcacgaaatggagcaggataagctcattagccgggcaaagctggcgcatgagcagcagcgttttaatccggatatggtcattctggcggacgtcaacgcccagccttcccatatcagcaagccgctgatgcaacgtattgaatacttcagcagcctgggcaggccaaaggcttattcccgctatttacgtgagacgattaagccatgtctggaacgactggagcatgtacgcgacagccagctatctgcatcttttcgttttatggcaagccatgtagggctggacggcctgctgattctgcctgaaatgagtcaggatcaggtgaaacgcctgtctacccttgtcgctgcgcatatgagcatgtgccttgatgcagcttgtggtgatttgtatgccaccgatgacgttaagccagaagaaatccgcaagacatgggaaaaggtggcagcggaaaccctgcgtctggatgtcatcccgcctgcgtttgagcaactccgtcggaaaagaaaccgccgtaaacccgtgccctatgaacttattccgggttcgctggcgcgtatgttgtgcgccgactggtggtaccggaaattatggaaaatgcgttgcgaatggcgggaagagcagttgcgtgctgtctgcctggtcagcaaaaaagcatctccctatgtcagctatgaagccgtgatgcataaacgtgagcagcgccgcaagtcattggagtttttccgttctcatgaactggtgaacgaagagggcgacacgctggatatggaagacgtggtaaacgccagcagcagcaacccggcgcaccgccgcaatgagatgatggccagtgttaaaggtctggagcttatcgcggaaatgcgcggtgactgcgccgttttctacaccattacctgtccgtcacgtttccattccacgctcaataacggcagaccaaacccaacctggacaaatgcgacggtaagacaaagcagcgattatctggtcggcatgtttgctgcatttcgtaaggcgatgcacaaagccgggttgcgctggtatggcgtgcgggtggctgagccgcatcatgacggtacagttcactggcacctgttgtgttttatgcgcaaaaaagaccgccgcgccattactgcattgttgcgtaagtttgccatccgtgaagaccgcgaggaactgggtaataacactggtccacgctttaaatatgagctgataaacccgcgcaaaggaacgccgacaagctacatcgcgaaatacatcagtaagaacattgacggtaagcgtacagcctga

SEQ ID NO: 464349 - DNA, 147 bp, Shigella boydii
atgtatcagaggttactgaaggttgacccgctgaagtgcgtgctgtgcgggagtcagatgcgttttacggggctgaagcagggctaccgtctggcagagcaggtcctgatgcatgagccgctggcccggatgcggtggtgcggctga

SEQ ID NO: 464350 - DNA, 315 bp, Shigella boydii
atggtcagaagccgtgaagagaatgaatttaaggactggttctccctctggggaccatggcatgctgtactgaagcgtacggaagctgaccgctgggcgcaggcagaagagcagaagtatgagatgctggagaatgagtactctcagagggtggctgaccggctgaaagcatcaggtctgagcggtgatacggatgcggagagggaagccggtgcacaggtgatgcgtgagactgaacagcagatttaccgtcagttgactgacgaggtactggccctgcgattgtctgaaaacggctcaaatcatatcgcataa

SEQ ID NO: 464351 - DNA, 1176 bp, Shigella boydii
gtgagtaataaaattctcaccaaccagaccaacctgacctcgacgttctataccggttctatcggtcatgatgtcagtaccggcgtggaatttacccgtgaaacgcagactaactacggcgttaatccggtgacgttacccgcggtaaatatttatcatcctgacagcagcattcatcccggcggcctgacgcgcaacggcgcaaacgccaatggtcagacggataccttcgcaatttacgcctttgatacgctgcaaatcacccgtgattttgagctgaacggcgggatccgtctggataattatcatactgaatatgacagtgccaccgcctgcggcggcagcggacgcggtgccatcacctgcccagctggtgtggcaaaaggttctccggtcaccaccgtcgacaccgccaagtcgggcaatctggtgaactggaaagccggggcgctgtatcacctgacggaaaacggtaatgtctatattaactatgccgtttcccagcagcctccgggcggcaacaacttcgcccttgcgcagtctggcagcggtaacagtgccaaccgcaccgattttaaaccgcaaaaagccaacaccagcgagattggcaccaaatggcaggttctggataaacgcctgttgctcaccgccgcactgttccgtactgatatcgaaaatgaagttgagcaaaatgatgacggaacttactcgcaatacggtaagaaacgtgtcgaaggctatgagatatccgtggccgggaatatcactcccgcgtggcaggtgattggcggctatacccagcaaaaagcaaccatcaaaaacggcaaagatgttgcccaggatggttcctcatcgctgccgtataccccggagcacgccttcaccttatggagccagtatcaggcaaccgatgatatctctgttggcgcgggcgcacgctatatcggcagtatgcataaaggttcagacggcgcggtgggaacgccagcgtttaccgaaggttactgggtcgccgatgccaaactggggtatcgggttaatcgcaatctcgacttccagctaaacgtttacaacctgtttgataccgattacgtcgcctcaatcaacaagagcggctaccgttatcacccgggcgagccaagaaccttcttgctcacagccaatatgcatttctga

SEQ ID NO: 464352 - DNA, 810 bp, Shigella boydii
gtgggtgcgttttttgcgggtgagaacggtaactccaccactggcgacgccatttatatgcgtggtgccgatacctctaacagtatttatattgatggcattcgcgatatcggcagcgcctcgcgcgacaccttcaataccgagcaggtcgaagtgattaaagggccgtccggcaccgactacgggcacagcgcaccgacgggctcgatcaatatgatcagcaaacagccgcgcaatgattccggcattgacgcctccgccagtattggcagcgcctggttccgccgcggcacgctggacgtcaatcaggtcattggtgataccaccgcggtgcgcctgaatgtaatgggcgaaaaaacgcacgatgccggacgcgacaaagtcaaaaatgagcgttacggcgtcgccccttctgtcgcttttggccttggtacagcgaatcgtttgtatcttaattatctgcatgtcacccagcacaacacgccagacggcggcattccgaccatcggtttgccgggctattctgccccatctgcgggaacggcggccctgaatcattccggaaaagttgatactcataacttttacggcacggattccgattacgacgattcgaccaccgacaccgccaccatgcgttttgagcacgacatcaacgataacaccaccattcgcaatactacccgttggtcgcgcgtaaagcaggattacctgatgacggcgattatgggcggggcgtcgaatattactcagcccaccagcgatgtgaatagctggacctggtcacgcacgcgaataccaaagatgtga

SEQ ID NO: 464353 - DNA, 801 bp, Shigella boydii; identical to SEQ ID NO: 461785

SEQ ID NO: 464354 - DNA, 765 bp, Shigella boydii
atgtcagtacccgttcaacatcctatgtatatcgatggacagtttgttacctggcgtggagacgcatggattgatgtggtaaaccctgctacagaggctgtcatttcccgcatacccgatggtcaggccgaggatgcccgtaaggcaatcgatgcagcagaacgtgcacaaccagaatgggaagcgttgcctgctattgaacgcgccagttggttgcgcaaaatctccgccgggatccgcgaacgcgccagtgaaatcagtgcgctgattgttgaagaagggggcaagatccagcagctggctgaagtcgaagtggcttttactgccgactatatcgattacatggcggagtgggcacggcgttacgagggcgagattattcaaagcgatcgtccaggagaaaatattcttttgtttaaacgtgcgcttggcgtgactaccggcattctgccgtggaacttcccgttcttcctcattgcccgcaaaatggctcccgctcttttgaccggtaataccatcgtcattaaacctagtgaatttacgccaaacaatgcgattgcattcgccaaaatcgtcgatgaaataggccttccgcgcggcgtgtttaaccttgtactggggcgtggtgaaaccgttgggcaagaactggcgggtaacccaaaggtcgcaatggtcagtatgacaggcagcgtctctgcaggtgagaagatcatggagactgcggcgaaaaacatcaccaaagtgtgtctggaattggggggttga

SEQ ID NO: 464355 - DNA, 249 bp, Shigella boydii
gtggaaatagacaacaacatcggtgaaaacgcgttacgatcggtggcggttggaagaaaaaattatctctttttcggctcagacaagggaggagaaagtgcggcgatcatctacagtctgctggtcacctgcaaacagaacgaagtggagccggaggactggttgcgcgaagtgatcgagaagctcaatgactggccgtcgaaccaagtgcatgaactgctgccctggaacttctcgtctgtaaaataa

SEQ ID NO: 464356 - DNA, 819 bp, Shigella boydii; identical to SEQ ID NO: 464278

SEQ ID NO: 464357 - DNA, 1545 bp, Shigella boydii
atggggaacggaccgggcgggctgacggagtaccagaacgtcttctataagcacgattgcattcagggtcattatgtctgggagtggtgcgaccacgggatccaggcacaggacgaccacggcaatgtctggtataaattcggcggcgactacggcgactatcccaacaactataacttctgtcttgatggtttgatctattccgatcagacgccgggaccgggcctgaaagagtacaaacaggttatcgcgccggtaaaaatccacgcgcgggatctgactcgcggcgagttgaaagtcgaaaataaactgtggtttaccacgcttgatgactacaccctgcacgcagaggtgcgcgccgaaggtgaaacgctcgcgacgcagcagattaaactgcgcgacgttgcgccgaacagcgaagcccccttgcagatcacgctgccgcagctggacgcccgcgaagcgttcctcaacattacggtgaccaaagattcccgcacccgctacagcgaagccgggcattctatcgccacttatcagttcccgctgaaggaaaacaccgcgcagccagtgcctttcgcaccaaataatgcgcgtccgctgacgctggaagacgatcgtttgagctgcaccgttcgcggctacaacttcgcgatcaccttctcaaaaatgagtggcaaaccgacatcctggcaggtaaatggcgagtcgctgctgacccgcgagccaaagatcaacttcttcaagccgatgatcgacaaccacaagcaggagtacgaagggttgtggcagccgaatcatttgcagatcatgcaggaacatctgcgcgactttgccgtagaacagagcgatggtgaagtgttgatcatcagccgcacagttattgcaccgccggtgtttgacttcgggatgcgctgtacctacatctggcgcatcgctgccgatggccaggttaacgtggcgctttccggcgagcgttacggcgactatccgcacatcattccgtgcatcggtttcaccatggggattaacggcgaatacgatcaggtggcgtattacggtcgtggaccgggcgaaaactacgccgacagccagcaggctaacatcatcgatatctggcgcagcaccgtcgatgccatgttcgagaactatcccttcccgcagaacaacggcaaccgtcagcatgtccgctggacggcactgactaaccgccacggcaacggtctgctggtggttccgcagcgcccaattaacttcagcgcctggcactatacccaagaaaacatccacgctgcccagcactgtaacgagctgcagcgcagtgatgacatcaccctgaacctcgaccaccagctacttggcctcggctccaactcctggggcagcgaggtgctggactcctggcgcgtctggttccgtgacttcagctacggctttacgttgctgccggtttctggcggagaagctaccgcgcaaagtctggcgtcgtatgagttcggcgcagggttcttttccacgaatttgcacagcgagaataagcaatga

SEQ ID NO: 464358 - DNA, 819 bp, Shigella boydii; identical to SEQ ID NO: 464278

SEQ ID NO: 464359 - DNA, 237 bp, Shigella boydii; identical to SEQ ID NO: 460863

SEQ ID NO: 464360 - DNA, 996 bp, Shigella boydii
atggattcagctattattaatttttctaacaagaacgatagcgtatcaaaagaaataaaagaagcaatagaaaacaactatataacatatcgtgagaagcaacgactcattggagtattatcaaaaatttgtaactccatcgaatacactaaaatcaagctgactttaacattggacgatctccaaacaaaaaaagaaaacttaagaaagttgcttcaagagcatattaacatgctaaagaaagatcttgatatgagacttcaggatgctgccatagatgtacatcgactagatagcactgcacgtaaaacatcagaacatcttcgtaaacgcatcaagaaaacgctccctctttcacttttcaaatctattgattttaagcaggctagcgattgtttcacaaaacataagatatctattaagatagataaagaaccgtatgccgaaggaatagaatccatcccttatatcaatgaaggtgatattcaagcagacttaattctcaaggacatccagagaataatactttcaaatttatttagcactggctgttcgcaacataccgtaatagaagatttcaatatgttgattgatcacataaaatcatctgctgacttggctggcaaactggttcttgtgatgagtaaagagatctttcagcaatataatcgtatgcttttcgataatcccaacctcagagaactaatgagaaaaaatgatgatggctctatgaacataactactgaatccggtacccgtaaggtttacttcttaccatttgttaatcaaccattttctcttgtggtaaaggataactacttcactaaattaattattagagaatatgataataataagttagtaaatgtcacttcagagaatatcaaaagtgactcagataaattcaagctaactcttaactatgagttgaatatagtatttgaaggaaacgctgatttaaaaatagctcactcgcaaagagtgacatcagaataa

SEQ ID NO: 464361 - DNA, 165 bp, Shigella boydii
atgaatagtttagcaaggcgtttacgtgactatgataaaacagacatggtgatgggcagagtttacagtaatgtttttgactgtggatttattgatatggaacaatcatggattcagctattattaatttttctaacaagaacgatagcgtatcaaaagaaataa

SEQ ID NO: 464362 - DNA, 171 bp, Shigella boydii
atgataacgctgccgaccggtaccagaatctggatcatcgctggcatcacagatatgcgttgtggcttcaatggcctggcttcgaaggtgcagaacacgctgaaagatgacccgttctccgggcatatcttcgtcttccggggccgcagtggcaaaatggtgaaaatgtaa

SEQ ID NO: 464363 - DNA, 318 bp, Shigella boydii
atggtcagaagccgtgaagagaatgaatttaaggactggttctccctctggggaccatggcatgctgtactgaagcgtacggaagctgaccgctgggcgcaggcagaagagcagaagtatgagatgctggagaatgagtactctcagagggtggctgaccggctgaaagcatcaggtctgagcggtgatacggatgcggagagggaagccggtgcacaggtgatgcgtgagactgaacagcagatttaccgtcagttgactgacgaggtactggccctgcgattgtctgaaaacggctcacgactgcaccattcataa

SEQ ID NO: 464364 - DNA, 438 bp, Shigella boydii
ttgtatataatttttttccaaaagaaacaatggaatgaaatagtcaataatttaaaaataaaggatgactcttatgctttagagttaggaattatattcctccctgagaaagtattctgctattacattcctctgtatatttatgtctcgttgtttaataagaatgatttttgggtttttgaatccgattttattcaacaatatttatgtcctgagtatcggaattacgatgattttttgattttttttttaatttttcagatatacaactatctattattgcacagtttatgtcttatgaatcagacgctggattcttttatgcaagtaaagcttgtatggatttttgggaagattattcacctctattacataagaaaatttaatcgtaaaaggtataaatggtttaataaaaaacttgtctactcgttggagtag

SEQ ID NO: 464365 - DNA, 768 bp, Shigella boydii
atgcaaagccagatggacccggtgtacacgccggcgcgaaaaatccacctgtaccactgcgaccatcgcggcctgccgctggcgctcatcagcacggaaggggcaacagcgtggtgcgcagaatatgatgaatggggcaacctgctgagtgatgagaacccgcatcatctgcagcagctcattcgcctgccgggtcagcagtatgatgaggagtccggcctgtattacaaccgccaccgctattatgacccgctgcaggggcgatatatcactcaggacccaattgggctgaaggggggatggaatttttatcagtatccgttgaatccgatctcagagatagacccacaagggttaaatccgttaattcttggtgttgtagcactgatgagttgcggtttgttttcatcaggtggtgttatccaaagtgggcaacaacgcagagatcaatatggacgtaaagttaatccagaagccgacaaattaacagatgaacataagtcaggtgtaaatcctggaggtaactgtagtccccagaacctgagtgacttacaaaatgaaaaaaacagattatgtaaccagtctagagcttgcgctcctcagatgctgagaaaagaaatattgagacggtacgagataaatttggcgtgcgcttcggtcagaaagcagattaataatcagtgctttggtggtggagataaggcccatatggaagaagagaataaagcatataaaacagcagctgattgcagtggcttaataaaatga

SEQ ID NO: 464366 - DNA, 486 bp, Shigella boydii
atggtgtcgcactggttcagtgccagtcagtggcagctaccgaacgaaagcgattatctgaaattacagtcgctgtttgcccgggtggcagaagagaaacatcagcggggagaactggaaaagtcccattaccaactggtcagcacatacagtgagctgagccggcagtatgtggagctgcagagtgaatataaaaatttgcggaggtatttcggtgtgacggtgcaggtgccgtacaccgatgtgtggacgtataaaccggtgcagtactatccagggaaacatccgtgcgaaaaaccggcagaaatgttgcagcagataatcaacgcgagcagtcgtccgggagaccaggttgcagatttttttatgggctcaggttcaacggtaaaagcggcactggcgctcgggcgtcgtgcgattggcgttgaactggagaccggacgttttgagcagacagtcagggaagttcaggatttaatcgtttga

SEQ ID NO: 464367 - DNA, 258 bp, Shigella boydii
atgattactcgtattcctcgtagttctttctctgcaaatattaataatacagcccagacaaatgaacaccaaaccctgagtgaattgttttataaagaactcgaggataaattttctggcaaggagctggcgacgcctctattaaaaagcttctcagagaactgtagacaaaatggtcgtcatatctttagtaacaaggattttgtcattaattttccaagtccgtcttacaagctgataagaaagaaattacgataa

SEQ ID NO: 464368 - DNA, 978 bp, Shigella boydii
atggaaattttacctcaacgctcagacactcttgataaacaagaattaaacctaaactcagttagaaaagaaaaagaattcccaagagttaaacttaatggtcaatgttattttccggggcgcccccaaaaccgtatagtatgccgacacattgctgcacaatatattaatgatatttatcagaatgttgattacaaaccccataaagatgattactcttcagctgaaaaatttctcacgcacttcaacaaaaaatgcaaaaaccagactttggagttggtttccagccgtcctgaggggcgttgcgttgctgcctgcggtgatttcgggctagttatgaaagcatattttgacaagatggaatcaaatggcatcagtgttatggcagccatattactggtggataaccatgctttgacggtccggctaagaataaagaacacaactgaaggatgtacccattacgtggtttcggtttatgatcctaatgtaactaacgataaaataagaattatgagcgaaagcaaagaggatattaaacactattctctgatggattttatgaatgtagattatagcctcctgaaatggtcaaatgatcatattattaaccaatctgttgcaataattccagcacttccgaaagaacagctattgatgttaaaaggatctgtggatgaaataacccctccgttatcacctgcaacgatgaatttgctaatggcaattggtcagaatcaccaacttacgcaactgatgattcaactccagaaaatgccagaactacatagaacagaaatgttgactgcctataatagtattaacctgacaggtttatatttggctataaattatggtaatgctgatatcgttgagactattttcaattcattgtcagaaacaggatatgaagggttactctcaaaaaaaaatctcatgcatattctggaggcaaaagataaaaatggtttttcttga

SEQ ID NO: 464369 - DNA, 480 bp, Shigella boydii
atggtagtgtccgctattgccagtacacctcaccgggtggcatggataaacccggaagagagtaaatcaaaccgcgcaattggcgttgcgctgaatgatactgcatgtcgcgtattgaaaaaacaaatcgggaatcatcaccgttgggtatttgtgtataaggaaagctgtaccaaaccagacggaacgaaagcgccaacagtcaggaagatgcggtatgacgcaaacacagcctggaaagcggcgctgagacgagcaggtattgatgatttcagatttcacgacttgagacacacctgggcaagttggctggttcaagccggagtcccgttatcagtgttacaggaaatgggaggctgggagtctatcgaaatggttcgtcgatatgctcacctcgcacctaatcaccttaccgaacacgcacggcatagactcgattctgaacccatcggtcccaaatttgtcccagtcaagaaataa

SEQ ID NO: 464370 - DNA, 318 bp, Shigella boydii
atggtcagaagccgtgaagagaatgaatttaaggactggttctccctctggggaccatggcatgctgtactgaagcgtacggaagctgaccgctgggcgcaggcagaagagcagaaatatgagatgctggagaatgagtaccctcagagggtggctgaccggctgaaagcatcaggtctgagcggtgatgcggatgcggagagggaagccggtgcacaggtgatgcgtgagactgaacagcagatttaccgtcagctgactgacgaggtactggccctgcgattgtctgaaaacggctcacaactgcaccattcataa

SEQ ID NO: 464371 - DNA, 129 bp, Shigella boydii
atgcttgacaacttaataggggcccccccccgtctgccgctgccatttttttgccgcatgattggcaagcttagccagcgttttggtctgggcgatccccacaccaacagtaagatgggtacgttgtag

SEQ ID NO: 464372 - DNA, 342 bp, Shigella boydii
atgtttgctctctgtgatgtaaacgcgttttatgccagctgtgagacggtgtttcgccctgatttatggggtaaaccggtggttgtgctatcgaataatgacggttgcgttatcgcccgaaacgctgaggcaaaggcgctgggtgttaaaatgggcgatccctggttcaaacaaaaagatctgtttcgtcgctgtggtgtggtttgctttagcagcaattatgagctttacgcagacatgagcaatcgggtgatgtcgacgctggaagaactatcgccccgcgtcgagatttacagtattgatgaggcattctgcgatctgacaggtgtgcgtaattgttga

SEQ ID NO: 464373 - DNA, 369 bp, Shigella boydii
atggcaacaaaagaagaaaatcagaaacgtcttcgtgaactggctggtctgctggggcgcgaggcggatatgtcggggagtgctgcggatatcgcacagcgtgtggcagagtgggaagaggagatttgcgcctcggaaaatgaaatcgcagatgttgatgataccgttcatgagcaggcatgcaggcacaccggtgaggatgacgttggtattctggaacgtatcaggcttctgaagtgtttttacctgtgcggtgttgacgatgaaacaggtgagcctgttgagcatgttgatgctggcagagtaattctgatgcccccctcagtggcaaaagacatggtcaggagcggaatggccgtttatgcgtga

SEQ ID NO: 464374 - DNA, 645 bp, Shigella boydii
atgcaggcggtgaatgccgtgctgtatggcaaatatacgatggaaggagaccagttcgagaaaattgaagtcgattttggccgatcgacgaagaataacatcatacaaggtagcggtaaggagtggtcaaaacaggatcgtgacacgttcgacccgacatatgatatcgaccttttctgtgatcaggccagtggtcttgtgaatattgccattatggacggtaccgtctggcgtctgctgaatggctttaagcttttccgcgaaaaaatggatacccgtcgcggttcaaattcacaactcgaaacggcagtgaaagatctgggcgcagtggtatcctccaaggggtattacggcgatctggccattgcggtagcgaaaacgtcttatgtggcagaggacggtaccgaaaaacgttatctgccggagggcacgctggtgctggggaatacggcagcagaggggattcgttgctatggagccattaaggatgcacaggcgttgtctgaaggagtggtggcttcttcccgttacccgaaacactggctgaccgtgggcgatccgtcctgtgaattcaccatgacgcagtccgcgccgctgatggtgctgccggatccggatgagtttgtggtggtacaggtgaaataa

SEQ ID NO: 464375 - DNA, 825 bp, Shigella boydii; identical to SEQ ID NO: 461141

SEQ ID NO: 464376 - DNA, 819 bp, Shigella boydii; identical to SEQ ID NO: 464278

SEQ ID NO: 464377 - DNA, 210 bp, Shigella boydii; identical to SEQ ID NO: 463045

SEQ ID NO: 464378 - DNA, 183 bp, Shigella boydii
atgagttttcagatgaagtttataaaatataaaataattccatggataaaattaatctttctgaaagattttttgaattatgtctttggagcggagtgcgtattatcaataatagaaaacatcttatcagcaatgaactttgtatctatatgggaattactcgttcacaatggtcaatattaa

SEQ ID NO: 464379 - DNA, 819 bp, Shigella boydii; identical to SEQ ID NO: 463221

SEQ ID NO: 464380 - DNA, 273 bp, Shigella boydii
atggacaataacaccatttctctacaggagttgctcgacagcatttccaagcttcgggaagacgtgaatacccttaccgtcgccttctcatatctggcattctcaattccaagggaacagatgcaatcaacgctggcatcaatccagtttgaatcatgcaatcccaaatggtctcaggaacaacaagactctttcaggcggcttgctgtattactggatgaaaaatatgctggtaaaattaccatttcggcggactcttcagagaacccgtaa

SEQ ID NO: 464381 - DNA, 345 bp, Shigella boydii
atgactcaaaactatgaactgattgtgaaagggatccgcaattttgagaataaagttacggtaactttagcgttacgggacaaaaaacgctttgacggtgaaatttttgacctggacatcgcgctggaccgtgttgaaggtgccgcgctggagttttatgaggcagcagccagaaggagcatcagacaggtcttcctggatgttgctgccgggttatgtgaaggggatgagcagtcgccggaaaagcgccccgtaattttagaggcgcaggatgtgttgataacctacagaggaaaactaccgggaataattacgggttctctgaagagtccgccgaaatggtaa

SEQ ID NO: 464382 - DNA, 216 bp, Shigella boydii
atgtaccagatggaaaaaatcacaacaggtgtgtcatacaccacgtcagcggtgggaacgggctactggttcctgcagttgctggacagggtttccccgtctctgtgggcggcaataggcgtactggggagtctgctgtttgggctgctgacatatctgactaacctgtatttcaaaatcagagaggaccgtcgtaaggctgcacggggagagtaa

SEQ ID NO: 464383 - DNA, 780 bp, Shigella boydii
atggctgaaagtactgtaacggcagacagcaaactgacaagtagtgatactcgtcgccgcatttgggcgattgtgggggcctcttcaggtaatctggtcgagtggttcgatttctatgtctactcgttctgttcactctacttcgcccacattttcttcccttccgggaacacgacgactcaactactacaaacagcaggtgtttttgctgcgggattcctgatgcgcccaataggcggttggctatttggccgcatagccgataaacatggtcgcaaaaaatcgatgctgttatcggtgtgtatgatgtgtttcggatcgctggttatcgcctgcctcccaggttatgaaactataggtacgtgggctccggcattattgcttctcgcgcgtttatttcagggattatccgttggcggagaatatggcaccagcgccacctatatgagtgaagttgccgttgaagggcgcaaaggtttttacgcatcatttcagtatgtgacgttgatcggcggacaactgctagccctactggttgtcgtggttttacaacacaccatggaagacgctgcactcagagagtggggatggcgtattcctttcgcgttaggagctgtgttagctgttgtggcgttgtggttacgtcgtcaattagatgaaacttcgcaacaagaaacgcgcgctttaaaagaagctggatctctgaaaggattatggcgcaatcgccgtgcattcatcatggttctcggttttaccgctgcgggctccctttgtttgtaa

SEQ ID NO: 464384 - DNA, 336 bp, Shigella boydii
atgattaatgccgttgagtacagattaccgttaggaaatatctctccagagaatcttgacgcgttgtcagagcttatcgttaagcattccgataaatttaataactatgtacttagttttatttctgatgatgatattcgatattcttacgattactacaattttgaaatcacagagatagatgaatatgggtttcactttatagcaccatatagctattatgaaggatgcgttgacaataacttctcaggagaggttgaaggttatgcagaatacgaaatcattgataatgaattagtctcctctcttgaggaactaccttgggatgtaaaataa

SEQ ID NO: 464385 - DNA, 651 bp, Shigella boydii
atgtttaatgaagtccatagtattcatggtcatacattattgttgatcactaaaccttctttgcaggcgacagctctcttgcagcaccttaaacaatcgctggcaattacaggaaaattacataatattcaacgttctctggacgatatctcttcaggctctattattcttctggatatgatggaagcagataaaaagcttatccattattggcaggatactttgagcaggaaaaacaacaatatcaaaatattgttgctaaatacgcctgaagattacccgtaccgcgacattgaaaactggcctcatatcaacggcgttttttattccatgaaggatcaagaacgtgttgtcaatgggttgcaaggcgtcctgcgcggcgaatgctactttacgcaaaagcttgccagctacttgattacgcattcaggtaactatcgttataacagcacggaatcagccctccttactcatcgggaaaaagagatcctgaataagctgcgtatcggcgcgtctaataacgagatcgctcgttcgttgttcatcagcgaaaatacggttaaaacgcatctttataatcttttcaagaagatagccgtaaaaaaccggacacaagcggtttcctgggcaaacgataacctcaggcgataa

SEQ ID NO: 464386 - DNA, 192 bp, Shigella boydii
atgtcgggtaacaacaacaccatcactgcggcggatgccattatcacgctgacagtgaataatctgtatccctccggcgtacgacttcagggatttgcaacagataacgtttatggcaccgatccactggtactggcggaaactgcccgcggtattgacggtaaactgtcggtaatgactccaacttactga

SEQ ID NO: 464387 - DNA, 1140 bp, Shigella boydii
atgctgagtattaacgggaaaagcgtcagcattgaagtgaattttaacggtgtcgccagcttcgccgctgctgcaacggcactacagacagcgctgaccgcagcagtggctacagtggtattcgataccacacagaatgcttttgtcattactgtcgccggggcgaaacccgggagtaccacgataacgttcggcagtggatcggcagcagaactcctgaagatgaccagtaacaccggtgcggtgatatcccggggcgcgcctgtatctgatgtccctgacacaatggcagccattaaggccgcttcccagcaatgggcgggtttttccacggtatctgaggtcactgacgagcaacacctggcgttttctgcatgggcaaacgggcagggcaagcgttactttaatgtggcatggacaaccagcggcaacgccagagtaaaaggcagtactgaacacatcgcttaccagataattgctgtcaataactacagctctgttgtacctgttttcgcgactgatggtaaccgggctgcagcggtactggggtatgcagcgtgccttgattttatccgaccagaggggcgtgtatcattcaagttccgcgagtatgaggggctggccgctgatgttaccagtggcagcgattatgatgcgctgatcgccgcaggttacaatttctacggaaaatatgcggaaaacagtgtggtggaagattactgggcggatggcactattaccggtgattttaaatggctggacagtttctgcgggcaaatctggctgaatgccagtttgcagggggcggtgatcgcattattcaagtcaaaccagacggtcccctacaacaatgaagggcgggcgctggttgcagcgtcaatgagtgacgttatccagcagtacaaacgctggggagggatccgtgaaggggtgacactgacggaggcgcagaagaaacagattaacaatgttgtggaggcagatgtttcttcaacgttgtttgccaccggctattacctgtatatcggcgatatgcttccctctttgcgggcaacccgtagcagtccgtcctgtacgctctggtactgtgacggcggtagtatccagaaacttgttattgcatccacggaggtccagtaa

SEQ ID NO: 464388 - DNA, 1275 bp, Shigella boydii
ttgcgacagtctcgtcatcgtcgcccgttaccggagcatctgccccgcgaaataaatcgcctggagccagaagaaagctgttgcccggagtgtggcggtgagctggattatctgggggaagtcagcgcagaacaactggaactggtgagcagcgctctgaaagtgatccgcacagaacgggtaaaaaaagcctgtacaaaatgtgactgcatcgttgaagcaccggcaccatcccgtccgatagagcgtggtatcgcgggcccggggttacttgcccgcgtgttaacgggaaaatactgcgaacacctgccactgtatcgtcagagtgaaatttttgcccgtcagggtgtcgaactgagccgtgcattactctccaactgggttgacgcgtgctgccagttaatgacgccgctgaatgatgctctgtaccgttatgtgatgaacagccgcaaagttcacactgatgacacaccagtaaaagtgctggcaccgggcaggaagaaggcgaaaacaggatatatctggacgtatgtccgggatgacaggaatgccggttcgccagagcctccggcggtctggttcgcctactcaccggaccatcagggtaaacatccggagcagcaccttagtcccttccggggtatcctgcaggcagatgcgtttaatggttacgatcggctgttcagtgccgaacgagaaggcggcgcgttgacggaagcaggatgctgggctcatgcgcggcgcaaagtccacgatgtatatatcagtaccaaaagcgcgacagcggaagaagccctgaaactaatcggtgagctgtacgccatcgagcacgaaatacgcgggttgccggtgtctgaacgcctggcggtcaggcaaatgcagagtaaaccgctactgacttccctgtataagctgatgcaggagaaagaacagacgttatcgaaaaaatgccgtctgagagatgcgttccggtatatcaggaagcactgggttgcgttgtgcaacttcagtgatgatggtctggctgaggcggataataatgccgcggaaagagcgcttcgtgcagtctgtctcggaaagaaaaactttatgttcttcggcagcgatcacggtggagagcgtggtgcgctactgtacgggctgatcggcacctgccgactgaacggtatcgatccggaagcgtatctgcgctatatcctgagcgtactgccggaatggccttccaaccgtgttgacgaactcctgccatggaacgtagcactcaccaataaataa

SEQ ID NO: 464389 - DNA, 468 bp, Shigella boydii
atgaaccgcgtactgtgcgtggtcatcattgccctgctggtggcctgtggtgcgcttagtctggggctgaatcattaccgtgataacgccataacctacaaagagcagcgcgataaaaaagtcagtgagctggagcaggcaaatgcaaccattactgatatgcagcagcgccagcgtgatgttgctgcacttgatgccagatactcgagggaattagccgatgcgagagctgaaaatgaaactctgcgcgctgacgttgccgctggtcgtaagcgcctgcggatcaacgccacctgccccggtaccgtgcgtgaagcccccaccacctccggcgtggataatgcaaccggcccccgactggcagacaccgctgaacgggattatttcactctcagagagcggttgatgctgatgcagaagcagctggaagtggcgcaggaatatatccgcactcagtgcctgaaataa

SEQ ID NO: 464390 - DNA, 138 bp, Shigella boydii; identical to SEQ ID NO: 16164

SEQ ID NO: 464391 - DNA, 819 bp, Shigella boydii; identical to SEQ ID NO: 463221

SEQ ID NO: 464392 - DNA, 282 bp, Shigella boydii
atgataagggacaggaaagctgaagagctggagtcaaaagggctataccggagagctgccgcacgatggatggaagtcatgctgttatgcaccgaggacgatgatcgggaatggataaagcgccgccgtgaaacgtgtctggagaacgtgaagcgcccgcccgtgaaggttgaggaatttggcgacctgcataaagctgttaccgaaacgcaacaccgcatggggatagcgcaaccgaacggtaacgccttccggttaaatggcggcaagaggcaaaggtag

SEQ ID NO: 464393 - DNA, 327 bp, Shigella boydii
atgaagctgggacagccggaaaagtctattgattcacgaatgcttgggctggtggagcgcatggaaaaagccgctgcgtcgcttattgccggaaagccgaacatcccaccaaagccatataacgaaacggcagttataaagatcattgccgataccatccaacagggatttgataatgggcgtgtgatagctgaacggatcaatgaagcaggctatcaaacaaaagctggtaaagcgtgggataaagatatttacagcgcgtggaagcgtcagggaagcaatgctgaaaatttaaaagcggtgattgattgtaaggtcagcgtataa

SEQ ID NO: 464394 - DNA, 267 bp, Shigella boydii
atgcttacacaaactatattcccttgccttccacaaaaacaagaaaatatcatccttgaagtgtcaaatcctgtattattatcttctactgttactacagatggatatactgttttcaataaaaaagcagctatacacgaattacaaatacctgctgccaaccggacgaaaacgttgaaattcactgctacagaaatgcaatggttgacaaagataaatgaagtaggaattgttgaaaaacaaagccaatggcattctaatatctga

SEQ ID NO: 464395 - DNA, 819 bp, Shigella boydii; identical to SEQ ID NO: 463221

SEQ ID NO: 464396 - DNA, 843 bp, Shigella boydii
gtgccacttcatcctggcacgacctcattggctgaaggtttaccttatgttggcctgaccgaacaggatgttcaggacgcccatgcgcgcttatcccgttttgcaccctatctggcaaaagcatttgctgaaactgctgccactggggggattattgaatcagaactggttgccattccagctatgcaaaaacggctggaaaaagaatatcagcaaccgatcagcgggcaactgttactgaaaaaagatagccatttgcccatttccagctccataaaagcacgcggcgggatttatgaagtcctggcacacgcagaaaaactggctctggaagcggggttgctgacgcttgatgatgactacagcaaactgctttctccggagtttaaacagttctttagccaatacagcattgctgtgggctcaaccggaaatctggggttatcaatcggcattatgagcgcccgcattggctttaaggtgacagttcatatgtctgctgatgcccgggcatggaaaaaagcgaaactgcgcagccatggcgttacggtcgtggaatatgagcaagattatggtgttgccgtcgaggaaggacgtaaagcagcgcagtctgacccgaactgtttctttattgatgacgaaaattcccgcacgttgttccttgggtattccgtcgctggccagcgtcttaaagcgcaatttgcccagcaaggccgtatcgtcgatgctgataaccctctgtttgtctatctgccgtgtggtgttggcggtggtcctggtggcgtcgcattcgggcttaaactggcgtttggcgatcatgttcactgcttttttgccgggtaa

SEQ ID NO: 464397 - DNA, 303 bp, Shigella boydii; identical to SEQ ID NO: 458125

SEQ ID NO: 464398 - DNA, 141 bp, Shigella boydii; identical to SEQ ID NO: 11535

SEQ ID NO: 464399 - DNA, 1113 bp, Shigella boydii
atgaattactctcacgataactggtcagcaattctggcccatattggtaagcccgaagaactggatacttcggcacgtaatgccggggctctaacccgccgccgcgaaattcgtgatgctgcaactctgctacgtctggggctggcttacggccccggggggatgtcattacgtgaagtcactgcatgggctcagctccatgacgttgcaacattatctgacgtggctctcctgaagcgactgcggaatgccgccgactggtttggcatacttgccgcacaaacacttgctgtacgcgccgcagttacgggttgtacaagcggaaagagattgcgtcttgtcgatggaacagcaatcagtgcgcccgggggcggcagcgctgaatggcgactacatatgggatatgatcctcatacctgtcagttcactgattttgagctaaccgacagcagagacgctgaacggctggaccgatttgcgcaaacggcagacgagatacgcattgctgaccggggattcggttcgcgtcccgaatgtatccgctcacttgcttttggagaagctgattatatcgtccgggttcactggcgaggattgcgctggttaactgcagaaggaatgcgctttgacatgatgggttttctgcgcgggctggattgcggtaagaacggtgaaaccactgtaatgataggcaattcaggtaataaaaaagccggagctccctttccggcacgtctcattgccgtatcacttcctcccgaaaaagcattaatcagtaaaacccgactgctcagcgagaatcgtcgaaaaggacgagtagttcaggcggaaacgctggaagcagcgggccatgtgctattgctaacatcattaccggaagatgaatattcagcagagcaagtggctgattgttaccgtctgcgatggcaaattgaactggcttttaagcggctcaaaagtttgctgcacctggatgctttgcgtgcaaaggaacctgaactcgcgaaagcgtggatatttgctaatctactcgccgcatttttaattgacgacataatccagccatcgctggatttcccccccagaagtgccggatccgaaaagaagaactaa

SEQ ID NO: 464400 - DNA, 210 bp, Shigella boydii
atgattaaacaggcgtggtgcagtgccctgggagtggataccggagatcataccacgctggcgcattttccggtcaggccggcggtgtggctggaacgcgatgatgacaccggctttcagcaggtgctggagcgtgctgactatctggcgaaggagagtaccaaagcttacggcaccggtgagcgcaactttggctgcagtcgtggctga

SEQ ID NO: 464401 - DNA, 384 bp, Shigella boydii
atgtacgcaaaatcttttctcgcacttgatggcaacggacgtctgatcggtgcccgtaccgcacagactgctccttatgcccactacacctgccacctttgcggcagtgcactcagataccacccgcaatacgacaccgaacggctctggtttgaacacactgacgacgggctgacggagcacgcgcagcaatgtccttatgtcaggccggaacgcagagaaatacggttgattaaacgtctgcagcaattcgtcccggatgccttacccgtggtgcgtaaagccagctggcactgcagacaatgtcaccacgattattatggggagcggtactgcacacactgccagaccgggcgcttcagtgaggagggggtagcagaatga

SEQ ID NO: 464402 - DNA, 234 bp, Shigella boydii
atgcagaagtatctggtaaatactgcgggaatgcatgccaacgtggcgagtggcattatgactgccgcattgtttgtattcatgcttattcaaccactcattggcgcgctgtcggataagataggtcgccgtacctcaatgttatgtttcggttcgctggcagccatttttaccgttcctattctctcagcattgcaaaacgtttcctcgccttatgaggtgtactggcaatag

SEQ ID NO: 464403 - DNA, 222 bp, Shigella boydii; identical to SEQ ID NO: 461465

SEQ ID NO: 464404 - DNA, 840 bp, Shigella boydii
atgacaattatcggtgatgaaattcctcttatatctgaaaaacagtcgctttcaaaggtgcttttaaatgatgagaataatgaactgagtgatggtacaaacttctgggataaaaatcgtcaattaaccacagatgaaatagcttgctatcttcagaagatcgccgctaatgcaaaaaatactcaagtcaattatcttactggtctctacgtcccctactccaccagaactcacctggaagacgctctcaatgaaaatattaagagcgatccatcatggccgaatgaagtccagttattccccataaatactggcggacactggatattagtttcgctacagaaaatagtaaataaaaaaaataataaactacaaataaaatgtgtcatattcaactcattgcgtgcactaggccatgataaagaaaattcacttaagcgtgtcattaatagttttaattctgaactcatgggagaaatgtcgaataataatataaaagttcatttaaatgaaccagagataatatttttacatgccgatcttcagcaatacttaagccaaagttgcggtgcgtttgtgtgcatggcagcccaagaagtgattgaacaaagggaaagcaattctgacagcgccccctatacgttattaaaaaactatgctgacagatttaaaaaatattcagcagaagagcagtacaaaattgattttcaacatcgactggtaaacaggaattgttatttagataaatatggcgatgcaggtaatgactccaacttactgatagtattttatgttcagataatgcccgatgaccttgtcatgcagctccaccgattttga

SEQ ID NO: 464405 - DNA, 672 bp, Shigella boydii
atgacctttggttggaaagtcaccttgttgtacgcgattatcgcaaccggcgtctccgttcttgccagtattatcctggattctctggggtttgaacgtcatatcattgccagtaaaagctcatcagcaaattgttgtgctccagcaaaaacttcgccgggaacgacatatacgcccataaaagtgagttgttgtagtccagcggctaaagccattgagaaccccgtagttacctgttgcagtaccaaagctgtagtaagtattaatcccataaaactagccaccaaagatgcgttgcaacagtttaaagatgtactgccatatcttttgttaggagtattaataggatcttttatttatggctttattccctcagcgtggattgccgctcatgcaggagcagataatcccttcgccatcccattaagcgccgttgtcggtattccgctgtatatccgggctgaggcagttatccctctggcatctgttctgatgacaaaaggaatgggtctgggagcattaatggcattaatcatcggcagtgccggcgcaagcctgacggaagtgatattacttaaatcaatgttcagaatgccgatgatagctgcattcctgacggttatattaggtatggctatcttgatgggctatttgactcaattgctattttaa

SEQ ID NO: 464406 - DNA, 468 bp, Shigella boydii
gtgttggtggcacaacccatcctctttttgctattgcccatcgtgctttttatccgtatggcgctcaatgcgctggatggcatgttggcgcgtgagtgcaatcagcaaacacgtctgggggcgattttgaatgaaactggcgatgttatttccgatattgcgctctatttaccgtttttatttttaccggaaagtaacgcatcactcgtaatactcatgttattttgcaccatattgactgagttttgcggtttactcgcgcagacgattaacggtattcgcagttatgccggtccattcggcaaaagcgatcgcgcgttaatatttggtctgtgggggctagccgttgccatttatccacagtggatgcaatggaataatcttttatggagcattgcttcaattctgcttctctggactgcgattaatcgttgtcggagtgtgctttttatgagtgctgaaagataa

SEQ ID NO: 464407 - DNA, 123 bp, Shigella boydii
atgtcagaagaaaataaagaaaatggatttaatcatgtcaaaacattcaccaaaattatatttattttttctgtattagtttttaatgataacgagggtgatgctgccaacttactgatttag

SEQ ID NO: 464408 - DNA, 819 bp, Shigella boydii
atgtgtcaggtatttggtgtatccaggagcggttattacaactgggtacagcatgaaccctcagacagaaaacaaagtgatgagcggctaaaactggagattaaggtggcacatatccgcactcgcgaaacatatggaacccggcggctccagacggagctggcagagaatggcatcatcgttggtcgtgaccgactggcacgtcttcgtaaggagctaaggctacgctgtaagcagaaacgcaagttcagagcgactacgaacccgaaccacaatctgccagttgcgccaaatctgctgaaccagacgttcgctcctacagcaccaaatcaggtctgggtggcggacctgacgtatgttgccacacaggagggatggttgtacctcgctggcatcaaagatgtttatacgtgcgaaattgtcggctacgccatgggagagcgcatgacaaaagagctgacaggtaaagccctgtttatggcgctcaggagccagcgcccacctgccgggctaatccaccactctgatcgaggttcacagtactgcgcatacgattaccgggtcatacaggagcagtctggtctgaaaacatcaatgtcgcgtaaaggtcactgttacggcaacgctccgatggaaagcttctggggaacgctgaaaaatgagagcctgagccactatcgttttaataaccgggatgaagccatctcagtaatacgggaatacattgagattttctacaatcgtcagcgtcgtcactctcgtctggggaatatctccccggcagccttcagggaaaaatatcatcagatggctgcttaa

SEQ ID NO: 464409 - DNA, 705 bp, Shigella boydii
atggaagcacagagcgacatttacgaccggacaaaaggccgtctggcgatacccggcgcattcggctttgggtgtgcttttctgcctgaagatgttatccgttttgacactaagagtgatttcctggcctgggtaaggaatgcgctgccaggtgaatattccgttgctggccgcctacgcatcatacccgacacacggtttgaaggggtgctcagcatccggtggactgatgcacgccctgagacaacagaaccgcggtacagagccaaatcccttactttttacggcattaacggccccatttatcacacccgctactgctactggcccatatccagactgactggctgggtgaaaataaatataaccacagaagatattatttacagaatcgtggcgagctctgtccgcaacagatggggagaccctgacattggcgggctgattattgctgcgtaccagggagaagctgacggtgataaagtcatcagacttgtcagggggcagtcatacagaggctcacgactgggaccggtggggatttcagtgcccagtactcccaccggaacgtatatagcatccccacaatttttcattacgggatgttcagagcattcattaccggggtcatattgcgccctgtccggggtgccggatgcacatgtctctggcgcaatgcccgggctttttattcgcacatcgtga

SEQ ID NO: 464410 - DNA, 1062 bp, Shigella boydii
atgcttccccgttttgccgatatctttcagcagggaaaccgctggcttaactggctggagaagcagccggaaggggcagtacgtccggtggtgattgagtcggtgaccaaaatcatggcgtgcgggaccacactgatggggtatacacagtggtgctgttcatcaccggactgttgccatacaaaaaaggtctgcttccggtgtaaaagccgctcctgcccgcactgcggggtgaaggctggcgcacagtggatacagtatctgctgagcctggtccccgactgcccatggcagcatattgtgttcacgttaccctgccagtactggtccctggtgttccacaaccggtggttgctggcagagatgagccgcattgcagcggatgtgatactggaaatctgccatcaggcagatgtggagccgaggatattcacggtgatccacacatgggggcgtgaccagcagtggcatccgcatatccatttatcgacaactgccggtggtgtgacgtcgggccacacctggaaaaatcttcatttttacgcccgtaaggtgatgagcatgtggcgctaccggataacacggttactgtcacggaaataccctgacctggtgatgccggatgcgctggcagcagaaggaagcagtaaacgggaatggaatcgcttcctggacacgcattaccgccgtggctggaatgtcaacgtatcccgggtgatggataatgccacccatgtggcggtgtactttggctcttacctgaaaaagccaccggtgccggtgagtcgtctggagcattatgccggtcaggatgaaatcggactgcgttacaacagtcaccgaacaaaacgggaagaatacctgttgatgagtggagatgagttcatggaaaggttctcctggcatgtggcggataaggggttccgtatggtgaggtactacggttttctgagtccggcgaaacggcggttactggaagaagtggtgtacatcataacggagacagtgagaaaaacggcgatgcaaatcacctggagagtaaggcagtatgactttccgtga

SEQ ID NO: 464411 - DNA, 261 bp, Shigella boydii
ttgcgagcgggtaatggataccttgccgtcacgcacagcaggccagataaactggccttcctccaggcgtctggtgaacaggcacagaccatcagcatcagcccacaggattttaatcatgtcaccccgtcggccacggaagatgaacaggtgaccggagaagggattatcattcagcacatgctgtacctgttcacccagcccgttgaaagacttacgcatatcggttatcccagcaacgagccagatgcgggtgcctga

SEQ ID NO: 464412 - DNA, 327 bp, Shigella boydii; identical to SEQ ID NO: 462700

SEQ ID NO: 464413 - DNA, 201 bp, Shigella boydii
gtgctgaccggtctgatatgcgtcacgttgcagaaccacagttttcatattgtcatacaacacttcgcgcggcacaccaccaaagaagcggaacgcattacgatggcaggtctccagcgtgtcataacgcatattgtcagtgaattcgatgtacaacattcggctgtatccgggaacagcaacgaacacgtgaagcggtga

SEQ ID NO: 464414 - DNA, 429 bp, Shigella boydii
gtgctgattgcagcaccaggcgcagagaatactcgtgtggcgaacagcaccgggctgaaaactgactggcgcggatataccgttgtcccctatgccacttcttatcgggaaaatcgaatcgcacttgatgcggcatcgttaaaacgtaacgtggatcttgaaaatgcagtagtcaacgtggttcccaccaaaggggcgttggttctggcggagttcaatacccatgcgggagcaagggtattaatgaaaacatcaaagcagggtataccgctgcgttttggcgcgatagcgacgctggacggcatacagactaatagcggcattattgatgatgatggctcgctctatatgtccggtttgcccgctcagggagcgataactgtacgctggggcgaagctcccgatcaaatttgtcatatcagttactag

SEQ ID NO: 464415 - DNA, 900 bp, Shigella boydii
atgcagcccaaaatttactggattgataacctgcgagggatagcgtgtttaatggtggtgatgattcacaccactacctggtatgtgaccaatgctcatagtgttagccccgtcacatgggatatcgccaatgttctgaattctgcctctcgtgtcagcgtgccgctatttttcatgatttccggctatctcttttttggcgaacgcagcgcccagccgcgccatttcttgcgtatcggcttatgtctgattttttatagcgcaatcgcactgctctacattgcgctgtttacctccatcaatatggagttagcgctgaaaaacctgctgcaaaagccagtgttttaccacttgtggtttttcttcgcgattgcggtgatttatctggtttcaccgctgattcaggtgaagaacgtcggcggaaaaatgttgctggtgctaatggcggtgattggcattatcgctaacccaaacacagtgccgcagaaaattgacggttttgaatggctgccaattaacttatatatcaatggcgatactttttaccacattctgtatggcatgttgggccgcgctatagggatgatggacacacagcataaagcactgtcgtgggtgagcgccgcgctgtttgcgacgggggtttttattatctctcgcgggacattatatgaattgcagtggcgcggaaattttgccgatacctggtatctttactgtgggccgatggtttttatctgcgcaatcgcgctattgactctggttaaaaacacgctggatacgcgtaccattcgcggacttggcttaatctcccgccattcattgggtatatacggattccacgccttgattatcgtaagcgtacagcctgaaccgtctggtcagaatctgacgaattag

SEQ ID NO: 464416 - DNA, 540 bp, Shigella boydii
ttgtcgggtggtgtatttaagatcgccaagcagagcaataaagcctggtccctgacgcgcccggtggatgacgcagtctccctgctgacacggggtggcagactgagctgtaagtttcgactgtcaggcgcactgaccaacaatcagttcggtctgggaatttatctgtataccgatgtagcgttacctgacgtcgtggcgatgaccgggactggtaacccgttcctgatgtcgttcttcacccagaccacagacggcaaacggaatctgatgcatcacaagaaagccggaaacacaaagttgggcgagttcgggaattacagtaacgactggcagacgctggagctggtgttcaccgccggcagtgccacggttactccgaaactgaatggagtggctggcccggcattccaggccataaaagacagtctggcagtgggactaaatgcactgacgctgacggatattaccaaaaatgcagcgtatggcgttgagatagaaagtctggtgctggagataaatgcaccggcatcatcataa

SEQ ID NO: 464417 - DNA, 216 bp, Shigella boydii; identical to SEQ ID NO: 21150

SEQ ID NO: 464418 - DNA, 306 bp, Shigella boydii
gtgagaaacagaacgcgcagctataccaccgacctgccccgtatagggttgccattccttgcgaacatgcgtagcaggctggcggatgctgaaccgggtacgcagctttatacccagaccgaaagcggaacgttgtatgccttccggcaagccgacagctacgccatgacaatcaacggcgtgacgcgggctattcgcaccacaaccacgaaggccgggtatggcgtccgggaatggtacgcttgcccccactgtaacttcactataaaagccagagtgccgacatactggacaggatgcgcatga

SEQ ID NO: 464419 - DNA, 807 bp, Shigella boydii
atggccacaggccagactcaacagcttattacattattcaaacagttgcccatactccctgaaaaagaaatcattgaaataataactgcgcagaatagcgttggtacacctgctttatttctggctatgatgaacggacatactgacaacgtaaaaatatttatgcaagaaattcagtcactgatatacaatcatatcattcatgaagataatctggttaaattactgcaaactaaaagtgctaacgaaacacctgggctctatatctccatgttgtatgggttcgatgaaacaatcgatatctttctgaatgcattaaccactccaatagcacaagagcttttaaacaaaaaaatagtgatggatattttagcaatgaaaacacgtgatggtgaactagggttgtttgctgcaatggaaaataatcaccctttgtgtgtcacacggttcctctctaaaattaatggcatcgcctttaaatacaagttgagcaaagctaacatcatggatttattaaaaggcgctacagcacatggaacccctgtattatacatcgccatgagcaagggtaatgaagacgtcgtgttatcttatatatcgacgctgaatatttttgcaaaaaaatattcttttagtcaacgtcagttattcacactgttggccgctaaaaatcatgacaacatgtcagctgttcatatagccattcatcataatcattataaaactgtagaaacatattatgctgctataaatgtaatcagccaaagcctgagttttagtgctgatgaactaaagacgtatttataa

SEQ ID NO: 464420 - DNA, 216 bp, Shigella boydii
atgaaagcattacattttggcgcaggtaatatcggtcgtggctttatcggtaaactgctggcagacgcgggtatccaactgacgtttgccgatgtcaatcaggtggtacttgatgccctgaatgcccgtcatagctatcaggttcatgtggttggtgaaaccgagcaggtagataccgtttccggcgtcaatgctgtcagcagcattggtgattag

SEQ ID NO: 464421 - DNA, 396 bp, Shigella boydii; identical to SEQ ID NO: 461287

SEQ ID NO: 464422 - DNA, 189 bp, Shigella boydii; identical to SEQ ID NO: 463227

SEQ ID NO: 464423 - DNA, 654 bp, Shigella boydii
atgtgtcaggtatttggtgtatccaggagcggttattacaactgggtacagcatgaaccctcagacagaaaacaaagtgatgagcggctaaaactggagattaaggtggcacatatccgcactcgcgaaacatatggaacccggcggctccagacggagctggcagagaatggcatcatcgttggtcgtgaccgactggcacgtcttcgtaaggagctaaggctacgctgtaagcagaaacgcaagttcagagcgactacgaacccgaaccacaatctgccagttgcgccaaatctgctgaaccagacgttcgctcctacagcaccaaatcaggtctgggtggcggacctgacgtatgttgccacacaggagggatggttgtacctcgctggcatcaaagatgtttatacgtgcgaaattgtcggctacgccatgggagagcgcatgacaaaagagctgacaggtaaagccctgtttatggcgctcaggagccagcgcccacctgccgggctaatccaccactctgatcgaggttcacagtactgcgcatacgattaccgggtcatacaggagcagtctggtctgaaaacatcaatgtcgcgtaaggtcactgttacgacaacgctccgatggaaagcttctggggaacgctga

SEQ ID NO: 464424 - DNA, 519 bp, Shigella boydii
atggaagggtttttttttgtccgaaatcaaaatataaaattcagtgataatgtgaactatcattatcgctttaacattaatagttgtgcaaaatttcttgctttttgggactatttcagtggtgctctagtagagcatagccatgctgaaaaatgtattcatttctatcatgagaatgatcttcgggatagttgtaataccgaatcgatgcttgataagttaatgttaagattcatcttttcatctgaccagaatgtaagtaatgcactggctatgatacgaatgactgagtcatatcatttggttctttatcttctgtttataaatgacgaaagagcggaagccatctcatcagatgagtcaatatacttgctattagccaagccagaatcaagctctgcatcagcagtctcatctccatcatctgaatttgtcattgcattcaacttatcaatgaatgcagagctaaaaactcctgtatttttaacatcaagcatacatcacctactttatagttag

SEQ ID NO: 464425 - DNA, 390 bp, Shigella boydii
ttggagtcattaccgcgtaatgattacgcaggtgtcgaaaaactcggatataaccgtgcgattaaccgtaaaaaatatcacagtaaagagataacccgagaactgaacgatgaagctacattaaggcatgcggtatatcatgagttgtcgcgtttaattacacttcgtcgcagccataacgagtttcatccggataataattttaccatcgatacgattaattcatccgtaatgcgtattcaaagaagtaacgctgatggtaattgtctgactggattgtttaatgtcagtaaaaatattcagcatgtaggtaatgactccaacttattgatagtgttttatgttcagataatgcccgatgactttgtcatgcagctccaccgattttga

SEQ ID NO: 464426 - DNA, 267 bp, Shigella boydii
atggcgacgctggggcgtcttatgagcttgctgtcaccctttgacgtggtgatatggatgacggatggctggccactgtatgaatcccgcctgaagggaaagctgcacgtaatcagcaagcgatatacgcagcgaattgagcggcataacctgaatctgaggcagcacctggcacggctgggacggaagtcgctgtcgttctcaaaatcggtggagctgcatgacaaagtcatcgggcattatctgaacataaaacactatcaataa

SEQ ID NO: 464427 - DNA, 789 bp, Shigella boydii
atgtgtcaggtatttggtgtatccaggagcggttattacaactgggtacagcatgaaccctcagacagaaaacaaagtgatgagcggctaaaactggagattaaggtggcacatatccgcactcgcgaaacatatggaacccggcggctccagacggagctggcagagaatggcatcatcgttggtcgtgaccgactggcacgtcttcgtaaggagctaaggctacgctgtaagcagaaacgcaagttcagagcgactacgaacccgaaccacaatctgccagttgcgccaaatctgctgaaccagacgttcgctcctacagcaccaaatcaggtctgggtggcggacctgacgtatgttgccacacaggagggatggttgtacctcgctggcatcaaagatgtttatacgtgcgaaattgtcggctacgccatgggagagcgcatgacaaaagagctgacaggtaaagccctgtttatggcgctcaggagccagcgcccacctgccgggctaatccaccactctgatcgaggttcacagtactgcgcatacgattaccgggtcatacaggagcagtctggtctgaaaacatcaatgtcgcgtaaaggtcactgttacgacaacgctccgatggaaagcttctggggaacgctgaaaaatgagagcctgagccactatcgttttaataaccgggatgaagccatctcagtaatacgggaatacattgagattttctacaatcgtcagcgtcgtcactctcgtctggggaatatctcccataagcgctaa

SEQ ID NO: 464428 - DNA, 375 bp, Shigella boydii
atgtcaactcaagcgggctctccttgtatctactacggtagcgaaataggaattgatggttttaaatcaatgacgcttgagaataatagaaaatgtatgatatgggatgaaaacaaacaagatcttgaattacggcaatttatacgttggttaatacgtctacgtaaaaaacatccacaatggtgtgaggcattaatacaatggaaagatgttgaacatcctacggtgatcgcttatcaacgcgataacatcactttcttcttaaataatagtggagatactgccaactttatttatgacggaagaagtatggagatctccggtttcagttatgaaattgaaggtttacctgctgctgatctttatgatttttaa

SEQ ID NO: 464429 - DNA, 150 bp, Shigella boydii
atgccactgctggataagctgcgtgagcagtacgggtcggaccgctatgcagcgaactgcatattgccccgtcaacgtattaccactgtcagcaacagcgacatcatccggataaacgcagtgcccgtgcgcagcgcgatgactggctga

SEQ ID NO: 464430 - DNA, 327 bp, Shigella boydii
atgactaaaaatactcgtttttcccccgaagtccgtcaacgggcagtccgtatggttctggaaagtcagggcgaatatgactcacaatgggcgacaatttgttccattgctccaaagattggctgtacgccggagactctgcgtgtctgggttcgccagcatgagcgggataccgggggcggtgatggagggctcaccaccgctgaacgtcagcgtctgaaagagctggagcgtgaaaatcgtgaactgcgccgcagtaacgatatccttcgccaggcttccgcttattttgcgaaggtggagttcgaccgcctctggaaaaaatga

SEQ ID NO: 464431 - DNA, 279 bp, Shigella boydii
atggtcagaagccgtgaagagaatgaatttaaggactggttctccctctggggaccatggcatgctgtactgaagcgtacggaagctgaccgctgggcgcaggcagaagagcagaagtatgagatgctggagaatgagtactctcagagggtggctgaccggctgaaagcatcaggtctgagcggtgatacggatgcggagagggaagccggtgcacaggtgatgcgtgagactgaacagcagatttaccgtcagttgactgacgaggtactggcctga

SEQ ID NO: 464432 - DNA, 291 bp, Shigella boydii
atgttacgcccaaaacgtcgccgctgggttaatgaaaagtacacgcgctgggttaagacacagccgtgtgcatgttgtggaaagcccgctgatgatccccaccacctgataggtcacggtcagggtggaatgggaacaaaagcgcatgacctttttgtgttgcctttgtgcagaaaacaccatgacgaactgcatgcggataccgtggcatttgaagagaagtatggctcccaactggagctgatatttcgttttatcgatcgcgcgctggcgataggtgtgctgtcctga

SEQ ID NO: 464433 - DNA, 198 bp, Shigella boydii
atgctgaaacagcaggatatgacagaaaccgccagagtggtgtttaatgaattaagcgtcaccgaaccggcgacagtcggggagattgcgcagaatacttacctttcacgcgaacgctgccagttaatactgacccagctggttatggcgggtctggcagactatcagttcggttgttacagacgccttccgcagtga

SEQ ID NO: 464434 - DNA, 780 bp, Shigella boydii
ttgacggacttcgggggaaaaacgagtatttttagtcatcctgtttacctctttctcaggaagtttagtctccaggattcccggggcggttcactgggacgttttggtaatgagatgagcggttggtttgacctgaccttaaatcagcgtgtttataatcaggacggtaaaacggcaaatgcggtcgttacctatgatggcaacgtgggtgagcagtataacgatgcctggtttggtgacagtgccaatgaaaatatcatgcagttcagcgatatttacctgacaacgcgaggttttttacccttcgcaccagaggcagacttctgggtcggcaaacataaactcccgcaatatgagatccagatgctggactggaaaaccttaaccacggatgtcgccgcgggtgtggggattgaaaactgggcacttggtgtagggctgtttgatatgtccttaagccgtgatgatgtcgatgtttactctcgtgatttttcgcgtaccagccagatgaataccaattctgtggatgttcgttatcgcaatatcccgttatgggatgatgcgacattatcattaatggctaaatattccgcacctaataaaacggatcaacaacaagataacgaaaatgacaacagttattttgaaatgaaagatagctggatgctgacttctgttttacggcaaaacctgcaacgcgatacgtttaatgaatttacgttacaggttgccaataattcctatgccagcagtggtgatgctgccaacttactgatttag

SEQ ID NO: 464435 - DNA, 726 bp, Shigella boydii
atgaagaaaaaatacgaactggttgttaaagggataaataattacccggataagattactgttactgtggcactggaaattggtgggtatccgtcactgttgttgccatatgtggcgattagtcttgaccgtactgaaggtgccacgctggagttttacgaagcggaggcgaaaaagcaggcgaagcagtttttcatggatgttgctgccgggttatgtgaagggaacgaaccgttgcaggaaaagcgccccatcattttagaggcgcaggatgtgttgataacctacagaggaaaactaccgggaataattacttgttctctgaagatgccgccgtcaacactgcggtcagaaaaagaggcgtcttgtctgcagtctgagtactccattacggttaaaagtgccggagaggaaggaaataaacgttattttattgcgtctgcacctgataaagatcaggaatgggagtgtaaccggccatcctttgttgtatacggagatggcgggaaaataaccatctcagaaaatgggaaattaacaccgccatcgcaccagcatagtgaggcgctcattgaatttgccattgattacctgaagaacaataaaaagcaggggctgatgaagtgcattggtcgttgcatgggatatctgcagatagctgctgagattgaagcgctggccagtggtgctgataaggatgcaatggtaatgactccaacttactga

SEQ ID NO: 464436 - DNA, 366 bp, Shigella boydii
atgctggcaaaagataggactaacctaaagattgaagaaatacggatgcataaacatcatgagattcacagggttaagcctcttatgccagctttatgtcgtatccgtcagggaaaaaaagttatcaattgggagacgcatagtctaactgttgataataatcagataatattatttccctgtggatatgaattttatattgcgaattacccagaagcaggtctttatcttgcagaaatgctttattatcccattgatctaattgaaaagttccaaaatctttatgcgataaccgatcaaattcgtaacacgacaggtttctgcttacctcagaatcccggtaatgctgccaacttactgatttag

SEQ ID NO: 464437 - DNA, 327 bp, Shigella boydii; identical to SEQ ID NO: 462700

SEQ ID NO: 464438 - DNA, 345 bp, Shigella boydii
atgaaggattttaagacggatatctatttcgtctcaacgtttaaaccatcaacaaagtcggtcgatttactcacagttgaaacctttgctggtacggtatgtgaatatgctgacatgccaaaagagtggacaacgacccgaggactttatgcctctttccgttatgaaggaaactgggaaaattatcctgactgggtgcgtaacatctatctgatagagttgcctgccagggggttagccagagtgaacggcagcgatattgagctcttttattacaatgaagatttcgtagaaaaggatggcaatgatggtaagcgtaaactgaccgccgtatgtagccattaa

SEQ ID NO: 464439 - DNA, 693 bp, Shigella boydii
atgaagttcattaaaggtgatgcaattgctggcatcattattatttttgtcaatttaataggaggtatttctgttggtatgagtcaacatggaatgtctctatctggtgcattatctacttataccatactaactattggtgacggattggtctctcagattcctgctctgttaatttctataagtgcaggatttatcgttacaagagttaatggtgatagcgataatatgggacgtaacataatgtcccagatatttgggaatccttttgttctcattgttacatcagctcttgccttggcgatagggatgttgccaggttttccgttttttgtttttttcctgatagcagttactttgacggctttattctattataaaaaggtcgtagaaaaagaaaaaagtctgtctgagtctgattctagtggctatactggtacatttgatattgataatagccatgactcatctttggcaatgatagaaaatctggatgctattagttcagaaaccgttcctttaattttattatttgccgaaaataagataagtgcaaatgatatggaaggtcttattgaaaggataagaagtcagttctttattgattatggtgtcaggcttccaactattttatatagaacaagcactgtctcttatacacatctgacgctgccgacgatctactctgtgtag

SEQ ID NO: 464440 - DNA, 525 bp, Shigella boydii
atggcagcgacgcacacactccctctggcgtcaccgggaatggcacgcatctgcctttacggggatttgcaacgatttggccgccgcatcgaccttcgtgtgaaaacgggggctgaagccatccgcgcactggccacacagctcccggcgtttcgtcagaaactgagtgacggctggtatcaggtgcgcattgccgggcgtgatgcaggtgaaaccgaattgtctgcccgtcttaatgagccgctggcaaatggtgcagtgatccacatagtaccgcgtctggtgggagctaaaagtggcggtgtgtttcaggcggtgctgggggcagctgttatggcggttgctatatggatgccggaggtaggaattatggcgagtaatctgctgttttctctcggtgccagtatgacgcttggcggtgttgcacagatgctggcaccgaaagccagaactccccgtacacagacaacggataacggcaaacagaacacctgtttctcctcactggataacatggttgcctag

SEQ ID NO: 464441 - DNA, 504 bp, Shigella boydii
atgcaacaagttaaggccacgggaagtccggttctggatgtggcgcataactttgttagcgcgtgtcaaatcggcgatcaacagggctggttgcatcgtaaaggtgccacgccggatgacaacggtctggtgattattcccggttcacgtggtgattactcctggattgtacagcctgttgcgaacgaaaaaacgctccactcgctggcgcatggggcagggcgtaaatgggggcgcaccgagtgtaaatggcgtctggcagcgaaatacacggtgacgcaactctcgcggactgaacttggcagtcggataatttgtcgcgataaacaactcatctttgaagaagcgccacaagcctataaatcggctgaaagcgtggtgcaatgtctggtgcaggccggtttaattattcctgtcgcgcggctgcgtccggtgctaacgctcaaaaacagtggtgaaccgccccgggaatcctggagactaaacttcctgagaaagaggtaa

SEQ ID NO: 464442 - DNA, 180 bp, Shigella boydii; identical to SEQ ID NO: 461173

SEQ ID NO: 464443 - DNA, 318 bp, Shigella boydii
atggtcagaagccgtgaagagaatgaatttacagactggttctccctctggggaccatggcatgctgtactgaagcgtacggaagctgaccgctgggcgctggcagaagagcagaaatatgagatgctggagaatgagtaccctcagagggtggctgaccggctgaaagcatcaggtctgagcggtgatgcggatgcggagagggaagccggtgcacaggtgatgcgtgagactgaacagcagatttaccgtcagctgactgacgaggtactggccctgcgattgtctgaaaacggctcacaactgcaccattcataa

SEQ ID NO: 464444 - DNA, 318 bp, Shigella boydii
atggtcagaagccgtgaagagaatgaatttacggactggttctccctctggggaccatggcatgctgtactgaagcgtacggaagctgaccgctgggcgctggcagaagagcagaaatatgagatgctggagaatgagtaccctcagagggtggctgaccggctgaaagcatcaggtctgagcggtgatgcggatgcggagagggaagccggtgcacaggtgatgcgtgagactgaacagcagatttaccgtcagctgactgacgaggtactggccctgcgattgcctgaaaacggctcacaactgcaccattcataa

SEQ ID NO: 464445 - DNA, 195 bp, Shigella boydii
atgctggagaatgagtactctcagagggtggctgaccggctgaaagcatcaggtctgagcggtgatgcggatgcggagagggaagccggtgcacaggtgatgcgtgagactgaacagcagatttaccgtcagctgactgacgaggtactggccctgcgattgcctgaaaacggctcacaactgcaccattcataa

SEQ ID NO: 464446 - DNA, 423 bp, Shigella boydii
atgctaccatctatttcaatcaacaataccagcgcaacttacccagaatccattaatgaaaataacaatgatgaagttaatggattagtacaagagctcaaaaacctttttaatggtaaggaaggaataagcacctgtattaaacatctacttgagcttataaaaaacgccatacgagtaaacgacgatccttatagatttaatattaataattcctcagttacttatattgatattggctccaatgatacagaccatattactattggtatcgacaaccaagaaccaatagaattacctgcgaactataaagacaaagaactcgtccgtactatcattaatgacaacatagttgagaagactcatgatatcaataacaaggaaatgatcttcagcgcattggtaatgactccaacttattga

SEQ ID NO: 464447 - DNA, 195 bp, Shigella boydii
atgctggagaatgagtaccctcagagggtggctgaccggctgaaagcatcaggtctgagcggtgatgcggatgcggagagggaagccggtgcacaggtgatgcgtgagactgaacagcagatttaccgtcagctgactgacgaggtactggccctgcgattgtctgaaaacggctcacaactgcaccattcataa

SEQ ID NO: 464448 - DNA, 318 bp, Shigella boydii
atgattaaaatggcggaacatctgaaaggttactggccgaatcaactgagtttctcagaatcatgcggaatggtgatgagaatgctgatgacattgcagggcgcttcaccgggacgtataccggagctgatgcgcgatcttgcaagtatgggacaacttgtgaaattaccgacgagaaggggaagggccttcccgagagtggtaaaggagaggccctggaaataccccacagccccgaaaaagagccagtcagttgctttactgactggcattaaggccgccggggacgtttttttaccaccgggagtttgggcataa

SEQ ID NO: 464449 - DNA, 657 bp, Shigella boydii
atgcctgcgatcaatgccaaacgtgtttaccggatcatgcgccagaatgcgctgttgcttgagcgaaagcctgctgtaccgccatcgaaacgggcacatacaggcagagtggccgtgaaagaaagcaatcagcgatggtgctctgacgggttcgagttctgctgtgataacggagagagactgcgtgtcacgttcgcgctggactgctgtgatcgtgaggcactgcactgggcggtgactaccggcggcttcaacagtgaaacagtacaggacgtcatgctgggagcggtggaacgccgcttcggcaacgatcttccgtcgtctccagtggagtggctgacggataatggttcatgctaccgggctaatgaaacacgccagttcgcccggatgttgggacttgaaccgaagaacacggcggtgcggagtccggagagtaacggaatagcagagagcttcgtgaaaacgataaagcgtgactacatcagtatcatgcccaaaccagacgggttaacggcagcaaagaaccttgcagaggcgttcgagcattataacgaatggcatccgcatagtgcgctgggttatcgctcgccacgggaatatctgcggcagcgggcttgtaatgggttaagtgataacagatgtctggaaatatag

SEQ ID NO: 464450 - DNA, 195 bp, Shigella boydii
atgctggagaatgagtactctcagagggtggctgaccggctgaaagcatcaggtctgagcggtgatacggatgcggagagggaagccggtgcacaggtgatgcgtgagactgaacagcagatttaccgtcagctgactgacgaggtactggccctgcgattgtctgaaaacggctcacaactgcaccattcataa

SEQ ID NO: 464451 - DNA, 192 bp, Shigella boydii
atgatcaaagcaaatgcctggtatctttataaagagtggattcgtagtgatgatgtttcacctatatttatagaaactgaagaaaagttaagaacctttaacactaataaattaacgcgaaacgataatatatttatcctgttctcctctgtcgatgatgggcctgttatggtggtaagctcccagcgctaa

SEQ ID NO: 464452 - DNA, 246 bp, Shigella boydii
atgaagaaaacatttagccattgtccttatataaaagatccaattatacgcagttatatccattctggtgaagataacaagttcgatgattttatgcgtcaacatcgattcagcaaggtggatttcgatacccaacagatgatccattttattaacaggtttaatatgaataaagggctgattgataaaaataacaattttttatccaacttatcgatcaggccttacgatcaacggatgatatga

SEQ ID NO: 464453 - DNA, 267 bp, Shigella boydii
atggcgacgctggggcgtcttatgagcttgctgtcaccctttgacgtggtgatatggatgacggatggctggccgctgtatgaatcccgcctgaagggaaagctgcacgtaatcagcaagcgatatacgcagcgaattgagcggcataacctgaatctgaggcagcacctggcacggctgggacggaagtcgctgtcgttctcaaaatcggtggagctgcatgacaaagtcatcgggcattatctgaacataaaacactatcaataa

SEQ ID NO: 464454 - DNA, 252 bp, Shigella boydii
atgttctccgagtttattttctgtgatgacgcgaaactcaacgaaatagaagagaatatctggattgcgcgtaatattcgccatgcaatggaaattggcgaactattcctcgtctatcaaccgatcgttgatattaacacccgcgccattctgggcgcggaggcgttgtgccgttgggtttctgcggagagggggatcatttcaccgctgaagttcattaccattgctgaagatattgaagtggcacactga

SEQ ID NO: 464455 - DNA, 501 bp, Shigella boydii
gtgaatgcgaactccgggacgctcaacaacgtcacgattaacgagaactgtcgggttctgggaaaattgtccgccaaccagattgaaggcgatctcgttaaaacagtgggcaaagctttcccccgggactcccgtgcaccggagcggtggccatcaggaaccattaccgtcagggtttatgacgatcagccgtttgaccggcagattgttattccggcggtggcattcagcggcgctaaacatgagaaagagcatactgatatttactcctcatgccgtctgatagtgcggaaaaacggtgctgaaatttataaccgtaccgcgctggataatacgctgatttacagtggtgttattgatatgcctgccggtcacggtcacatgacactggagttttcggtgtcagcatggctggtaaataactggtatcccacagcaagtatcagcgatttgctggttgtggtgatgaagaaagccactacaggcatcacgattagctga

SEQ ID NO: 464456 - DNA, 321 bp, Shigella boydii
atgtgtcaggtatttggtgtatccaggagcggttattacaactgggtacagcatgaaccctcagacagaaaacaaagtgatgagcggctaaaactggagattaaggtggcacatatccgcactcgcgaaacatatggaacccggcggctccagacggagctggcagagaatggcatcatcgttggtcgtgaccgactggcacgtcttcgtaaggagctaaggctacgctgtaagcagaaacgcaagttcagagcgactacgaacccgaaccacatgaggtgtactggcaatagcggacactaccatttgttctttttttaa

SEQ ID NO: 464457 - DNA, 447 bp, Shigella boydii
atgaacttcggcagccgctccgaaaaagtctcccgtcgtatcgcacagatggaagctgacctgaaggcacttcagaaagaaagtgatacccttaccggtcgggttgacgacccggccgtgcagcgcccgctgcgtcaaacccgcacccgcaaaccgttccccgaatcactcccccgcgatgaaaaacggctgctgccggcagcgtcatgctgcccggaatgtggaggctcactgagctatccgggtgaggatgccgccgaacagctggagttgatgcgcagcgtcttccgggttatccggactgtacgtgaaaagcatgcctgtactcagtgcgatgccatcgtgcaggcccccgcgccttcacggcccatcgagcggggtatcgcaggaccggggctgctggccataagcgctaacttaagggttgtggtattacgcctgatatga

SEQ ID NO: 464458 - DNA, 168 bp, Shigella boydii
atgccactgctggataagctgcgtaagctgtacggggtcggaccggtatgcagtgaactacatattgccccgtcaacgtattaccactgtcagcaacagcgacatcatccggataaacgcagtgcccgtgcgcagcgcgatgactggctgaatagactggccccctga

SEQ ID NO: 464459 - DNA, 327 bp, Shigella boydii
atgactaaaaatactcgtttttcccccgaagtccgtcagagggcggttcgtatggttctggaaagtcagggcgaatatgactcacagtgggcggcaatttgttccattgccccaaagattggctgtacaccggagactctgcgtgtctgggtacgccagcatgagcgggataccggaggcggtgatggcgggctcaccaccgctgaacgtcagcgtctgaaagagctggaacgtgaaaatcgtgaactgcgccgcagtaacgatatccttcgccaggcttccgcttattttgcgaaggcggagttcgaccgcctctggaaaaagtga

SEQ ID NO: 464460 - DNA, 279 bp, Shigella boydii; identical to SEQ ID NO: 463003

SEQ ID NO: 464461 - DNA, 288 bp, Shigella boydii
gtgttttttacctttgcactccccaaactcccgggcccagacgtaatgcagggttgtgggatgcacgcatttaccttcccgatgcttacgtttctggtaagcgtcgattcgggctttcagggcattgatgaagcgggatatcacagctgcgtccgttactgccggtacatccgggagacgcaggtcaacccgcaatgccgtcaggcggggatgaacattcagtgcgtgccgcaccgtctcacgaatacgttgctgccagaaggggttgtatttgtaggtcatggttaa

SEQ ID NO: 464462 - DNA, 153 bp, Shigella boydii
atgatcattgcctttattgataaagagatccaaagagacaaagagtcaaggtatattactaagaaatacgaagccaataacaaagctgaataccataataacagaaacaatgagagtgggtttgcctttaacattattgttgctatgagataa

SEQ ID NO: 464463 - DNA, 315 bp, Shigella boydii
atgtcggggagtgctgcggatattgctcaacgtgtgtctgagtgggaagaggagcttgctgtttccccggagggcattatgcactctgatgagagcggggctgatcaaaatcacacagacgatggtgagcagttgaacaacacggatgctacggatgatgttaaagcggtccgtgtgcggaaatgcctgcatgtgatggggtattgcccggagacaggccgtcccgttgaactgacgtaccggggcatgcgtgttatggtgccatcactactggcgacagccatgatacagcacggaacggctgagcatgcgtga

SEQ ID NO: 464464 - DNA, 429 bp, Shigella boydii
gtggcctgtggtgcgcttagtctggggctgaatcattaccgtgataacgccattacctacaaagcccagcgcgacaaaaatgtcagagaactgaagctggcgaacgcggcaattactgacatgcagatgcgtcagcgtgatgttgctgcgctcgatgcaaaatactcgagggaattagccgatgcgagagctgaaaatgaaactcttcgcgctgacgttgccgctggtcgtaagcgcctgcgtatcaacgccacctgtccaggtcccgtgcgtgaagccaccggcaccgcccgcgtggataatgcaaccggcccccgactggcagacaccgttacacgggattatttcaccctcagagagcggctgatgacgatgcagaagcaactggaaggggcgcaggaatatatccgtactcagtgcctgaactaa

SEQ ID NO: 464465 - DNA, 351 bp, Shigella boydii
atgccgatcatagcaccaatttcccgtgacgaacgacgcctgatgcagaaagccatccataaaacacacgataaaaattatgcccgcagactgactgccatgctgatgctgcaccggggcgaccgtgtcagcgacgttgccagaacgctctgctgcgcccgttcctctgttggacgctggattaactggttcacgcagtcgggtgttgagggactgaaatcattacctgccgggcgtgcccgtcgctggccgtttgagcatatctgcacactgttacgtgagctggtaaaacattctccggcaactttggctaccagcgttcacgctggagtacagaactgctggcaataa

SEQ ID NO: 464466 - DNA, 147 bp, Shigella boydii
atgaagaaaggcgtgatgtatgaaaaatcaggccatgtaatcacggggcttggtattatcggtgaagtcgatggtgatgatccggcagtattcagaccaatacaaaagttaattaacggaacatggtataacgtatcgcaggtataa

SEQ ID NO: 464467 - DNA, 396 bp, Shigella boydii
atggctggtcagttccatctggcagaccattttgacctgcgggtggagcgccgggttcccggcatgtgtctggcgggggaaggctgcatcgttctctggtgtatccggtgtgcgccagaacacaccatcgatggccagcagggtcaggccgcaccagtgcggatgcggcgtggcgttatgccagagctgcgctgttttcgtgaacacgcggcggacagcctcacttcccaggcgctggcgggcctgaataacggcactgggggcaacgaaggggcgattgcccggcagcatgatgtccaggcgattcacaatctggtgaagaggttctttacgctcaagcgccatgccaacaatacaccagaccatcatttcgaggggaagacggcgcttgcgtag

SEQ ID NO: 464468 - DNA, 255 bp, Shigella boydii
atggacgaacagtggggatacgtcggggctaaatcgcgccagcgctggctgttttacgcgtatgacaggctccggaagacggttgttgcgcacgtattcggtgaacgcactatggcgacgctggggcgtcttatgagcttgctgtcaccctttgacgtggtgatatggatgacggatggctggccactgtatgaatcccgcctgaagggaaatagactggcccccctgaatctccagacaaccagtatcacttaa

SEQ ID NO: 464469 - DNA, 168 bp, Shigella boydii
gtgccgctgatattacggcgcgagctgaccaggaaggctggaaccctgggttcacggaaaaaatggttggatgggcaaaaaaaaatggagtttggtgaacgcactgtaattaaaaatcctgaatacttttcaacatatatgcaggaagaactaaaagcactggtctga

SEQ ID NO: 464470 - DNA, 291 bp, Shigella boydii
gtggaaaaagcccgcccgatcctggctgcttcaccgcaggcgaatgccggaccatcactccgtgatcagatcatggcactggatgaggcaaaaggggctgaggcgcaggctgaacagctggctgcctgcccgggaatgaccttggagagcgcccgggctgtgctggctgcgggatcaggtaaggcagaaccggtctctgcatccacaaccgccctgtttgaacatttcatggcgaaccattcaccggctgcggtccagggggagcgtgtcacaggcgtcagaagacggtga

SEQ ID NO: 464471 - DNA, 324 bp, Shigella boydii
gtggaaaaagcccgcccgatcctggcggctgcacaactggcggatgccgggccctcacttcgtgatcagatcagggccctggatgaggcaaaaggggcagaagcgcaggctgaaaaactggcggcctgcccgggaatgaccgtggagaacgcctgggctgtgctggctgcgggatcaggtaaggccgaaccggtctctgcatccacaaccgccctgtttgaacatttcatggcgaatcattcaccggcagcggtgcggggtggcgtgtcacagacgtcagcagacggtgatgcggacgtgaaaatgctcatggccatgccatga

SEQ ID NO: 464472 - DNA, 243 bp, Shigella boydii
atgaaaaaacttatcgtttcaagtgtattggcattcataacattttctgcgcaggccgcagcatttcaggtcactagtaatgaaataaaaacaggagagcaacttacaacgtctcatgtattttctggatttgggtgtgaggggggtaatacatcgccctcattaacctggtctggtgctccagaaggcaccaaaagctttgtggatttgcccctatatttccagacatctgttatcacttaa

SEQ ID NO: 464473 - DNA, 228 bp, Shigella boydii
ttgaataaacgcgcattcttcggtgcttttttaaacttttggggatttaaattcctatcgatggacatgaatgcaggctatataagagcagcgcgcatccacttacccaatgcggttgagaaaatagccttcgatcgctttcatgtggcgaaacaaccgggtgaggtggtggataaaacccgccagaatgaaccgccccgggtttcctggagagtgttttatctgtga

SEQ ID NO: 464474 - DNA, 210 bp, Shigella boydii; identical to SEQ ID NO: 463045

SEQ ID NO: 464475 - DNA, 1107 bp, Shigella boydii
ttgaataagttcgtaaaaaaaatgaaaccatataaacttgcatcccacgctatatgggagagtgaaaataaagaaacaatattaaaattagattggaacgaatctactattgaaccgccagaaagagtaaaaaatgcattaatgaattcgttggtaaataatctaattaggtattatccagatgtgagcaataaagatttaataataaagatatcaaactatgtgggggtgccaaaggaatatatccagtatttttgtagttcagactcagcacacgagtctatcattcgtacattaattaatgaaaatgataaaatattgatgttagcacctacgtatgataatttcagaacaacaggtgaagctcaaggggcaacaatttgttattcaatttttgaagataattactattggtcattaaagaagtttgaaagcgatctcaataagtttcaacctcaaatggcctatttatgtaacccaaataatcctacaggtactcttattcctaaaggagatatacattatcttgtagaaaaatataaaggaatatattttattatcgatgaagcctattatgaatttgcaaaattaacgtgtgctgattttgtaaactcctttaataacataattattacgcgaacattttccaaagcattttcattggcagggatgcgaatgggatatataatagcgtcacaagatttgttaggtgcaataaataaagtcagaaatgcaaaaaatatacctcagctaagtcagattgccgctttgaatgcattagacgaagttgaatatatgaataattatgttaaggaagttaatcaggctaagcgttttttttatgataagttgaaaaatataaatataggtcaaaaaaatattgtatatggagaggggaactttttggttattgagtttaaatcgatgaatgataaaaaagcattcattgaacgtttaaaatctaatttaatatttgttcgtgatttatctcatatgaaagaggtcgagttatgtgtcagaattactattggaacgaaaaaacaaatgttgtatgtaatcagaattttagagcagatgtatgaagttaaaaaagatagcattatttga

SEQ ID NO: 464476 - DNA, 486 bp, Shigella boydii
gtgccgccaggttgcctgattgacgttaacggcgtgccgacgaccaatccggcggtaatgcaggagtcgccgttggggtcgctgttgacctttgccgaacataaaggctacgcccttgcagcgatgtgtgaaattcttggcggggcgctttctggcggtaaaacgacgcatcaggaaacgttacaaaccagtcccgatgccattcttaactgcatgaccactatcatcatcaacccggaactgttcggcgcgccggattgtagcgcgcagactgaagcctttgccgagtgggtgaaagcctcgccgcatgatgacgataagccgattttgctaccgggcgagtgggaagtgaacacgcgtcgcgaacggcaggagcaggggattccattggatgcgggaagctggcaggccatttgtgatgcggcgcggcagattggtatgtcggaagagacgttacaggctttctgtcagcagttagccagctaa

SEQ ID NO: 464477 - DNA, 1356 bp, Shigella boydii; identical to SEQ ID NO: 457882

SEQ ID NO: 464478 - DNA, 174 bp, Shigella boydii
atgcagcatttaaaaaatattactgcgggtaatcccaaaactgttgcccaatatcaactgacaaaaaattttgatgttatctggttatggtctgaagacggaaaaaactggtatgaggaagtaagtaattttcaggaagacacgataggtgatgctgccaacttactgatttag

SEQ ID NO: 464479 - DNA, 180 bp, Shigella boydii; identical to SEQ ID NO: 461689

SEQ ID NO: 464480 - DNA, 234 bp, Shigella boydii
atgtttatattttacgggggccaaattgctgacaaagtgcaatttgttcatgccggatgcggcgtgaacgccttatccggcctacaaaagcatgaaaattcaatatattgcaggagctgcgtaggcctgataagcgtagcgcatcaggcagtttggcgtttgtcatcagagccaaccacgtccgcggacgtggttgctattcagataacgtcgattttagcgaccgacgggtaa

SEQ ID NO: 464481 - DNA, 207 bp, Shigella boydii; identical to SEQ ID NO: 24440

SEQ ID NO: 464482 - DNA, 207 bp, Shigella boydii; identical to SEQ ID NO: 24440

SEQ ID NO: 464483 - DNA, 177 bp, Shigella boydii
atgttgaaccaacatatcggcgtcaggtgtttcgggcattaccgtgcaacaatctatgcgatggaatacaatgccatgcctgatattgcaaaattaagaatgaaaaccctgcattttagggaaagacatggaatcaatgcatccgcagaaaatttttgtgtatcaatacgcgtttaa

SEQ ID NO: 464484 - DNA, 1014 bp, Shigella boydii
atgactattttggttactggtggtgcaggttacattggttcacatactgtattatccttattatcatacggaaaaaatgtggtggtgttggataatctatcgaactcatcgtctaagtcgttagaaagggtcgaaaaaatttgtggacgtaggcctctattttatcatggtgatgtgcgtgataggaaaaaactcaaacatattttccagtatcatgatattacagatgttattcattttgcaggattaaaagccgtcgctgaatctgtttcaaatccattggaatattatgatcacaatgttaacggaactattgttttacttgaagaaatgatgcgcgctggcgttattagttttatttttagctcctccgcaacagtgtatggtaagcctgaaactattcctttgaaggaagatagtagcgttggcggaacaactaatccatatggcttttcaaaacttatagtagagagggttttgaaggatatagctttggctgagccaacaatgcgtattactattttgcgttatttcaatcctgtaggagcccactcttctggtctattaggtgaagatcctaatggtgttccaaataatttaatcccttatattactcaagtggctattggtaatctaaaatatttatcagtattcggaaatgattatcctacacctgatggaacaggcattagagattatattcatgttatggatttggctgaagggcacatagctgctttagaacaccgtaattttgggggaaattataaagtatataatcttggtacaggggttggttattcagttcttgatgtgataaatacctttaaacgttgtactggaattgatatcccttattgtttcaaacctcgtcgagttggtgatatagctgaatgttggtctgatccatctctagcatttttagaattagggtggtcttctcgatatgatttagatacaatgataattgattcttggcgttggcaaaaaaacaatcccaaaggatataaataa

SEQ ID NO: 464485 - DNA, 804 bp, Shigella boydii
atgagtaccgataaatatttagtttcagtcataacacccacatataattctgaaagaacgattagatgtacaattgattctgttctatctcaatcatataataatatagaaatgattattgtcgatgattgttcgttagataatacagtgtctatttgcagggaatatcaaaaaaaagattcaagagttgttctcatttcaaatgagaagaattatggggctggtatgtcaagaaatatagcgatcagtaaagctaaaggtcggtttatcgcttttttagatagtgatgatttttggcataaagagaaaataaaaaaacagatagactttatgctttcaaataattatgctttcacttatacctcatatcaaaaggttagttttagcgggaaacttttatcccaaattaatcctgtttctaaagttaattattctgaattattaaagactaatgtaataggttgcttgacagctgtatatgatacttcatctcttggtaaaatgtttatgccaacaatcaggaaaagacaggacatggcactatggctgagcattttagataaaattgattatgcatattgtttgaacgaaatactggcctactatcgagtaggcaccgatacactctcgtcaaataaattaaaaataatattttcacaatgggccttttacagaaaatatttaaagtttggtctgtttaaatctctttattatttctcccactatgctgttaatgctgttgccaaacatcatataaatccgctgtgtttgttttttaagcgccactttgcctcttggagataa

SEQ ID NO: 464486 - DNA, 1011 bp, Shigella boydii; identical to SEQ ID NO: 459042

SEQ ID NO: 464487 - DNA, 927 bp, Shigella boydii
ttgttactgattttgaacaacaaaccgggatggaaatatcagcccggtactaaaacgctcggcaaagtcgcgattattggcgcaggtcctgccggattgcaggccagtgtgacactgacaaaccagggttatgacgtcacgatttatgagaaagaagcgcaccccggtggctggttgcgtaacggtattccgcaattccggttaccgcaatcagtgctggatgcagagatcgcccgtattgaaaaaatgggcgtgaccattaagtgcaataacgaaatcggtaaaacactcaccctggagcaactgaaagcggaaaaccgcgcggtactggtcaccgtggggttatcaagcggttccgggctaccgctgtttgagcatagcgacgttgagattgccgtcgacttcctgcaacgtgtacgacaggcgcaaggcgatatcagcattccacaaagcgcattaattatcggtggcggtgatgtcgcgatggacgtagccagcacgctgaaagttctcggctgtcaggcggtaacttgcgtagcgcgtgaagagttagatgagtttccggcaagcgaaaaagagtttaccagcgcccaagagctgggcgtttcgatcatcgatggattcacgccagtagccgtggaaggcaataaagtcacgtttaagcatgtacggttaccgggcgaactgacgatggcggcagataaaattattctcgccgtcggtcagcatgccagactggatgcctttgcggagttagagccgcagcgtaacactatcaatacacaaaattaccagacccgcgatccgcaagtctttgctgcgggcgatattgttgagggtgacaaaaccgtggtctatgccgtgaaaaccgggaaagaagccgccgaggcgattcatcactatttagagggagcttgctcatgttaa

SEQ ID NO: 464488 - DNA, 222 bp, Shigella boydii; identical to SEQ ID NO: 459051

SEQ ID NO: 464489 - DNA, 195 bp, Shigella boydii
atgagccatgtctggggactgttttcccatcccgatcgtgaaatgcaggtgattaatcgcgaaaacgaaacgatttctcaccattacacccaccacgttttgctgatggcggcgattccggtgatttgcgccttcattggcactacacagattggctggaattttggcgatggcactatcctgaagttatcctag

SEQ ID NO: 464490 - DNA, 348 bp, Shigella boydii; identical to SEQ ID NO: 462825

SEQ ID NO: 464491 - DNA, 1533 bp, Shigella boydii; identical to SEQ ID NO: 459078

SEQ ID NO: 464492 - DNA, 645 bp, Shigella boydii
atgacggcgaaaacagcaccgaaagtcacgctgtgggagttcttccagcagttaggcaaaaccttcatgttacccgtggcattattgtcgttctgcggcattatgctcggcattggtagttctcttagcagccatgatgtcataaccctgatcccggtcctgggcaaccccgtgttgcaggctatctttacctggatgagtaagattggctcgtttgcttttagtttcctgcctgtcatgttctgtatcgccatcccgctgggcctggcacgcgaaaataaaggcgtagcggcattcgctggcttcgtcggttatgcggtaatgaacctcgcggtaaacttctggttgaccaataaaggcattctgccaaccacggatgccgcggttctgaaagccaataacatccagagcattcttgggatccagtcgatcgataccgggatcctcggtgcggtgatcgccggtattatcgtctggatgctgcatgagcgtttccataatatccgcctgccggatgcgctggcattcttcggcggtacgcgcttcgtaccaattatctcctcgctggtgatgggccttgtcggcctggtgattccattagtctggccgattttcgccatgggtattagcggcttggccatatga

SEQ ID NO: 464493 - DNA, 246 bp, Shigella boydii; identical to SEQ ID NO: 460696

SEQ ID NO: 464494 - DNA, 153 bp, Shigella boydii
atgaaagcattgacttatcacggcccacatcacgttcaggtagaaaatgttcccgatccgggcattgaacaggcagatgatattattctgcgtattacggcaacggcgatctgtggctctgatctccatctttatcgaggcaaaataccctag

SEQ ID NO: 464495 - DNA, 210 bp, Shigella boydii; identical to SEQ ID NO: 19699

SEQ ID NO: 464496 - DNA, 471 bp, Shigella boydii; identical to SEQ ID NO: 463364

SEQ ID NO: 464497 - DNA, 927 bp, Shigella boydii; identical to SEQ ID NO: 460216

SEQ ID NO: 464498 - DNA, 4944 bp, Shigella boydii
ttgctgtccgtcatcacccgtgtggaggcactggcctccacacgggtgatgacggacggacagtcagaaacggtgctgaccggtaatctggtgatggcactgtttaaccacgacaccagtcgcgatcaggaaccacagttacacacgcatgcggtggtgactaatgttacgcagcataacggcgaatggaagacactgagcagtgacaaagtggggaaaacggggttcattgagaatgtgtacgctaatcagattgcctttggcaggctctaccgggaaaaactgaaagagcaggttgaggcgctgggctatgaaactgaagtggtcggtaagcacggtatgtgggaaatgccgggtgtaccggtggaggccttttccggacgctcacagactatccgggaggccgtcggggaagacgcctcgctgaaatcccgggatgtggcggcgctggatacgcgtaaatccaaacagcacgtcgatcctgaagtcagaatggccgagtggatgcagacgctgaaggaaaccgggttcgacatccgggcatatcgtgacgcagcggaacaacgggcatatacccgcacgcagacacccggacccgcttcacaggacgggccggatgtgcagcaggcggtgacacaggccattgccggattaagtgaacgcaaagtgcagtttatgtatacggacctgctggccaggacggtcggcatactgccgccggaaaatggtgtgattgaacgggcacgcgccggtatcgatgaggccatcagccgtgagcagcttatccccctcgatcgtgagaaggggctgttcacgtccgggattcatatgctcgatgagctgtcagtccgggcactcagtcgtgacatcatgaaacagaaccgggtgaccgtacatccggagaaaagtgtcccccggacggccggttacagcgatgccgtcagtgttctggcacaggaccgtccgtcgctggccattgtgtccgggcagggcggtgcagccgggcatcgtgagcgggtggctgaactggtcatgatggcccgggagcaggggcgggaggtgcagattatcgctgctgaccgtcgctcgcagatgaacctgaagcaggatgaacggctgtccggtgaactgataaccggacgtcgtcagttgctggaaggcatggccttcacgccgggcagtaccgttatcgtcgaccagggcgaaaaactctccctgaaagagacgttaaccctgctggatggtgccgcacgtcataacgtacaggtcctgataactgacagcgggcagcgaaccggtacaggcagtgcactgatggccatgaaggatgccggggtgaacacatatcgctggcaggggggagaacagcgaccggccaccatcatcagtgaaccggaccgttatgtccgctatgcccggctggccggagattttgcggccagcgtgaaagccggagaagagagcgtggcacaggtcagcggagtacgggaacaggccatactgacacaggccattcgcagtgagctgaaaacacagggcgtgctcggacacccggaggtaaccatgaccgccctgtcaccggtctggctggacagccggagccgttatctgcgggatatgtaccgcccgggaatggtgatggagcagtggaacccggagacacgcagtcatgaccgctatgtgacagaacgtgtgacggcgcagagtcacagcctgaccctgcggaatgcgcagggcgaaacgcaggtggtgcgtatttcttccctggacagcagctggtcgctgttccggccggaaaaaatgccggtggcagacggtgagcgtctgagggtgacagggaaaattcccggactccgcgtctccggcggtgaccgcctgcaggtggcatccgtcagtgaagatgcgatgacggttgttgtgccgggacgggctgaaccggccaccctgcctgtgagcgattcaccgttcacggcactgaagctggagaacggctgggtggaaacgcccgggcattccgtcagcgacagtgcgacggtttttgcctccgtcacacagatggcaatggacaatgccaccctgaacggtctggcccgcagtggtcgtgatgtccggctgtattcctcactggatgaaacccgtactgcggaaaaacttgcccgccatccctcctttacggtggtttctgagcagataaaggcgcgtgccggtgagacattgctggaaaccgctatcagtctgcagaaagccgggcttcacacgccggcacagcaggccattcatctggcccttcctgtgctggaaagtaaaaacctggccttcagcatggtggacctgctgacagaggcgaagtcgtttgctgcagaaggaaccggttttgctgacctgggaggggaaatcaatgcgcagataaaacggggtgatttactgtatgtggatgtggcaaaaggctatggcacaggcctgctggtttcccgtgcgtcgtatgaggcagaaaagagcattcttcgccatattctcgaaggtaaggaagcggtcacgccgctgatggagagagtacctggcgaactcatggagaaactgacatcaggacagcgcgccgccacccgtatgatactggaaacgtccgaccgtttcacggtggtgcagggctatgccggtgtgggtaagaccacacagttccgggcggtgatgtcagccgtgaacatgctgccggagagtgaacgtccccgtgtcgtggggctggggcccacacaccgtgcggtcggggagatgcgcagcgccggcgtggatgcacagacactggcgtcctttctgcatgacacgcagctgcagcagcgcagcggagaaataccggatttcagcaacacgctgttcctgctcgatgagagctcaatggtgggcaataccgacatggcacgggcatatgccctgattgcggccggtggcggtcgggctgtggccagcggtgacacggaccagctgcaggccatcgcgcccggtcagcctttccgtctccagcagacgcgcagtgctgccgatgtggtcatcatgaaggagattgtgcgtcagacgccggaactgcgggaggcggtatacagcctgattaaccgggatgtggaaagggcgctgtccgggcttgagcgtgtgaaaccgtctcaggtgccacgtctggagggcgcatgggcaccggagcactccgtgacggagttcagtcacagccaggaagcgaaactggcagaagcgcagcagaaggcgatgctgaaaggcgaggcttttccggatgtccccatgacactgtatgcagccattgtccgcgactataccggcaggacaccggaagcacgggagcagacgctgattgtcacgcacctgaatgaggaccggcgcgtactgaacagcatgattcatgatgcacgggaaaaggccggagaactggggcaggtgcaggtcatggtgcctgtcctgaacacagcgaatatacgcgacggggagctgcgtcgtctctccacctgggagaataacccggatgcccttgccctggtggataatgtgtatcaccggattgccggtatcagcaaggatgacgggctgataaccctgcaggatgcggaaggtaacacgcggctgatttcgccccgggaggcggtggctgaaggcgtcacgctgtacaccccggacaccatccgggtggggaccggtgacaggatacgcttcacgaagagtgaccgggagcgcggttatgtggccaacagcgtctggacggtgacagcggtttccggtgacagtgtcacactttctgacggtcagcagacccgtgtgattcgccccggtcaggagcgggcagagcaacatattgacctggcctatgccatcaccgcccatggtgcacagggggcgagtgaaacctttgccatcgcgcttgaaggcacggaaggtaaccggaaactgatggccggctttgagtcagcctacgtggccctgtcgcgtatgaagcagcatgtgcaggtgtacaccgataaccgtcagggctggacggatgccatcaacaatgccgtacagaaaggaactgcccacgatgtgtttgagccgaaaccggaccgggaggtcatgaatgcagagcggctgttcagtacggcgcgggagctgcgggacgtggcggcaggccgtgccgttctccgtcaggcggggctggccgggggagacagtcctgcacggtttattgctccgggacgtaaatatccgcaaccgtatgtggcactgccggcgtttgaccgtaacggcaagtccgccggtatctggctgaacccgctgaccacggatgacggaaacgggctgcggggattcagcggtgaaggtcgggtaaaaggtagcggggatgcgcagttcgtggccctgcagggcagccgtaacggagaaagcctgctggctgataatatgcaggatggcgtccggattgcccgtgataatcctgacagtggtgtggtggtaagaatcgccggtgaaggccgtccgtggaatcccggtgccatcaccggtggccgcgtgtggggggatatcccggacaacagcgtccagccgggagccggaaatggcgaaccggtcacggcagaggtactggcacagcggcaggctgaagaggccatccgccgtgaaacggaacgtcgcgcagatgaaattgtccgtaaaatggcagagaacaaacctgacctgccggacggcaaaacagagcaggctgtcagggaaattgccgggcaggagcgtgaccgggctgccataactgaacgggaagccgcgctgccggagagtgtactgcgtgaaccacaacgggtgcgggaagcggtctgggaagttgcccgggaaaatttgctgcaggagcgtctgcagcagatggagcgggatatggttcgtgacctgcagaaagagaaaaccccgggcggagactga

SEQ ID NO: 464499 - DNA, 642 bp, Shigella boydii; identical to SEQ ID NO: 460406

SEQ ID NO: 464500 - DNA, 1119 bp, Shigella boydii
atggaagcattacttcagcttaaaggcatcgataaagccttcccgggcgtaaaagccctctcgggcgctgcgttaaatgtctatccgggccgcgtgatggcgctggtgggcgaaaacggcgcgggtaaatccaccatgatgaaagtgcttactggtatctatgctcgcgatgccggcacgcttttatggctggggaaagaaacgacatttaccgggccgaaatcttcccaggaagccgggattgggattatccatcaggaactgaacctgatcccgcagttgaccattgccgaaaacattttcctcggtcgtgagtttgttaatcgctttggcaaaattgactggaaaaccatgtatgccgaagcggataaattgctggctaaacttaacctgcgctttaaaagcgacaagctggtgggcgatctttccatcggtgaccagcaaatggttgaaattgccaaagtgctgagctttgagtcgaaagtcatcattatggatgaaccgaccgatgcgctgaccgataccgaaacagaatccctgttccgcgtcatccgcgaactaaaatcgcaaggccgcggtattgtctatatctcccaccgcatgaaagaaatcttcgagatttgcgatgccgttaccgtttttcgtgacgggcaatttattgctgagcgcgaagtggcatcactgaccgaagattcgctgattgagatgatggtgggtcgcaagctggaagatcaatatccacacctggacaaagcgccgggagatatccgcctgaaagtcgataatctctgcggacctggcgttaacgatgtctcttttactttacgcaaaggcgaaattcttggcgtctctggtttgatgggcgcaggtcgtaccgaactgatgaaagtgctctacggcgcactaccgcgcaccagcggttacgtcaccctggatgggcatgaagtcgttacccgttcaccgcaggatggcctggcaaacggcattgtgtatatctccgaagaccgtaaacgtgacggtttagtgttgggcatgtcagtaaaagagaacatgtcgctgacagcgctgcgctacttcagccgcgctggcggcagtttgaagcatgccgatgaacagtag

SEQ ID NO: 464501 - DNA, 1419 bp, Shigella boydii
atgtcgtcaaccctacgagaagccagtaaggacacgttgcaggccaaagataaaacttaccactactacagcctgccgcttgctgctaaatcactgggcgatatcacccgtctacccaagtcactcaaagttttgctcgaaaacctgctgcgctggcaggatggtaactcggttaccgaagaggatatccacgcgctggcaggatggctgaaaaatgcccatgctgaccgtgaaattgcctaccgcccggcaagggtgctgatgcaggactttaccggcgtacctgccgttgttgatctggcggcaatgcgcgaagcggttaaacgcctcggcggcgatactgcaaaggttaacccgctctcaccggtcgacctggtcattgaccactcagtgaccgtcgatcgttttggtgatgatgaggcatttgaagaaaacgtacgcctggaaatggagcgcaaccacgaacgttatgtgttcctgaaatggggaaagcaagcgttcagtcggtttagcgtcgtgccgccaggcacaggcatttgccatcaggttaacctcgaatatctcggcaaagcagtgtggagtgaattgcaggacggtgaatggattgcttatccggatacactcgttggtactgactcgcacaccactatgatcaacggccttggcgtgctggggtggggcgtgggtgggatcgaagcagaagccgcaatgttaggccagccggtttccatgcttatcccggacgtagtgggctttaaacttaccggtaaattacgtgaaggtattaccgccacagacctggttctcactgttacccaaatgctgcgcaaacatggcgtggtggggaaattcgtcgaattttatggtgatggtctggattcactaccgctggcggatcgcgccaccattgccaatatgtcgccagaatatggtgccacctgtggcttcttcccaatcgatgctgtaaccctcgattacatgcgtttaagcgggcgcagcgaagatcaggttgagttggtcgaaaaatatgccaaagcgcagggcatgtggcgtaacccgggcgatgaaccgatttttaccagtacgttagaactggatatgaatgacgttgaagcgagcctggcagggccaaaacgcccacaggatcgcgttgcactgcccgatgtaccaaaagcatttgccgccagtaacgaactggaagtgaatgccacgcataaagatcgccagccggtcgattatgttatgaacggacatcagtatcagttacctgatggcgctgtggtcattgctgcgataacctcgtgcaccaacacctctaacccaagtgtgctgatggccgcaggcttgctggcgaaaaaagccgtaactctgggccgctgcccgatcctatcgaaacggcaatcaaaaaaggcgatttaa

SEQ ID NO: 464502 - DNA, 369 bp, Shigella boydii; identical to SEQ ID NO: 460539

SEQ ID NO: 464503 - DNA, 492 bp, Shigella boydii; identical to SEQ ID NO: 461815

SEQ ID NO: 464504 - DNA, 213 bp, Shigella boydii; identical to SEQ ID NO: 462242

SEQ ID NO: 464505 - DNA, 135 bp, Shigella boydii
atgaacaactttaatctgcacaccccaacccgcattctgtttggtaaaggcgcaatcgctggtttacgcgaacaaattcctcacgatgctcgcgtattgattacctacggtggcggcagcgtgaaaaaaacgtaa

SEQ ID NO: 464506 - DNA, 804 bp, Shigella boydii; identical to SEQ ID NO: 460687

SEQ ID NO: 464507 - DNA, 492 bp, Shigella boydii; identical to SEQ ID NO: 460462

SEQ ID NO: 464508 - DNA, 213 bp, Shigella boydii; identical to SEQ ID NO: 462242

SEQ ID NO: 464509 - DNA, 294 bp, Shigella boydii; identical to SEQ ID NO: 25632

SEQ ID NO: 464510 - DNA, 1287 bp, Shigella boydii; identical to SEQ ID NO: 460896

SEQ ID NO: 464511 - DNA, 1167 bp, Shigella boydii; identical to SEQ ID NO: 460899

SEQ ID NO: 464512 - DNA, 327 bp, Shigella boydii
atgactaaaaatactcgtttttcccccgaagtccgtcaacgggcagtccgtatggttctggaaagtcagggcgaatatgactcacaatgggcgacaatttgttccattgctccaaagattggctgtatactggagactctgcgtgtctgggtacgccagcatgagcgggataccgggggcggtgatggagggctcaccaccgctgaacgtcagcgtctgaaagagctggagcgtgaaaatcgtgaactgcgccgcagtaacgatatccttcgccaggcttccgcttattttgcgaaggcggagttcgaccgcctctggaaaaaatga

SEQ ID NO: 464513 - DNA, 168 bp, Shigella boydii
atgcttgactctgtagcgggaaagcgtattatgtacaccccagagctgctgagaaaaaacgaagcggcactgctctttaacaatttatcagacaatctgtgtgggcactcgaagatacggattcttaacgtcgcaagacgaaaaatgaataccaagtctcaagagtga

SEQ ID NO: 464514 - DNA, 192 bp, Shigella boydii
atgttcacctcagaacaacacaggtgctccaatgaaaaaaaggaatttcagcgcagagtttatttacggggtgacgctttcattaacctgtacacgaacttctattccggcatcatgacaggcctgcagctactgcgccatttccagcggatcgccctcccggcgtaccaccccaccttctttattccataa

SEQ ID NO: 464515 - DNA, 423 bp, Shigella boydii
gtggtcacgccgggacagaatgaaaaatattatctggccggagcgctgcacagcgggacaggtaaagtcagctatgtgggcggcaacagcaaaagttcggcgctgttcatcagcctgctgaagcggcttaaagcgacataccgtcgggcgaaaaccatcacgctgatcgtggacaactacattatccacaaaagccgggaaacacagagctggctgaaggagaacccgaagttcagggtcatttatcagccggtttactcgccatgggtgaatcatgctgaacggctatggcaggcacttcacgacacaataacgcgtaatcatcagtgccgctcaatgtggcaactgttgaaaaaagttcgccattttatggaaaccgtcagcccattccccggaggcaaacatgggctggcaaaagtgtag

SEQ ID NO: 464516 - DNA, 273 bp, Shigella boydii
atgtcacacaacctggagcaccagaaagtccacaccagaatggtgaaagaggttctgaaagccgtcgccagagccaataatcacccttataagtccgtatttgcagactttatcaccggtcatccctcctgcacggtctgtttctgggaaaccttccacaaaatgtacccggattcaccgtacgaatacgtcacgttctgccatacctgccgtcgttttgatttatacgaaacagaagcggagatgaaggcggatgacccgaagttgtggtga

SEQ ID NO: 464517 - DNA, 591 bp, Shigella boydii
atgagcggaaaaccagcggcacgtcagggcgatgccacaatgaaaggtggcccgatagtccaggggtcggcaggcgtgagaattggtgcgccaaccggcgtggcctgctcagtgtgccccggcggattcacttccggcaacccggtgaatccgctgctcggtgcaaaagtacagcccggcgaaaccgatttcgcgctgcccggcccgttaccgttcgtgctctcccgcacctacagcagctaccggacgaaaacccctgcgcccgtcggtatcttcggtcctggctggaaagcaccctttgatatccgcttacagatacgcgataacgaactgatactcaatgataacggtggcagaagcattcattttgagcacctgtttcccggtgaggatggtttcagccgcagcgaattattctggctggtacgcggcggcgtggcgaaactgaatgaaagtcaccgtcttgccccactctggcaggctctgccggaagaactccgcctgagtccgcatatttatctggcgacgaacagtccgcaggggccgtggtgggtactcggctggagtgagcgggtgccgggggggggatga

SEQ ID NO: 464518 - DNA, 3576 bp, Shigella boydii; identical to SEQ ID NO: 460171

SEQ ID NO: 464519 - DNA, 267 bp, Shigella boydii; identical to SEQ ID NO: 460144

SEQ ID NO: 464520 - DNA, 375 bp, Shigella boydii
atgacgaaagagttgacgggtaaagccctgtttatggtgctcaggagccagcgcccacctgccgggctaatccatcacaccgatcgaggttcacagtactgcgcatacgattaccgggtcatacaggagcagtctggtctgaaaacatcaatgtcgcgtaaaggtaactgttacgacaacgctccgatggaaagcttctggggaacgctgaaaaatgaaagcctgagccactatcgttttaagagccgggatgaggccatctcagtaatacgggaatacattgagattttctacaatcgtcagcgtcgtcactctcgtctggggaatatctccccggcagccttcaggataaaatattatcagatgactgcttag

SEQ ID NO: 464521 - DNA, 300 bp, Shigella boydii; identical to SEQ ID NO: 461897

SEQ ID NO: 464522 - DNA, 246 bp, Shigella boydii; identical to SEQ ID NO: 460696

SEQ ID NO: 464523 - DNA, 726 bp, Shigella boydii
gtgctggtccctgtccgtggtggtaagcgacctgaagttgtgaccgctccgtctggcactgaaatcaccgttgagccgattgaacaggctatcctcgtgtctcaccagacaaagctttgggaccagaagtcgaccactggtttcactcaggggacgctccagcaggacgcactgaacatctgcgataacgtggttcgtaccattaactctaagatggttgacgtgctggagtcctcaaagctgctgaagaccgtagaacttccggccctgactggtagcctgaccgctaaggctgacgctatcatggatgccctgtacgagaacacggagtcttctttcggttctgaggtttctgactacggcatcatcgcccatgagtcacacctcaaggctctctcccgtctggctgctaagcagggcttcggtggtgaagacgctatcgtcgatatgctgggaacagacatcgcctattacaacggtgaagaccgtggcgtcttcatgatggctaagcgctttacggctctgagcttcggctgcttccgtcacgatggcgagaacgttacggtggtcctttcacgtgatggtgactcccagtctcacgaccttgagattctcggcaaggtgtttgttgtagctgaagctgctacgaccatcaagatgggtactggctcggctactgctgtcctgcctgtagtcaaacgcctgagcttcactaaagacagctag

SEQ ID NO: 464524 - DNA, 303 bp, Shigella boydii; identical to SEQ ID NO: 458125

SEQ ID NO: 464525 - DNA, 276 bp, Shigella boydii
atggcttccatttccatcagatgtccttcctgctccgctactgaaggcgtggtgcgtaacggcaaaagcactgccggacatcagcgctatctctgctctcattgccgtaaaacatggcaactacagttcacttacaccgcctctcagcccggtacgcaccagaaaatcattgatatggccatgaatggcgtcggatgtcgcgccagtgcacgcattatgggcgttggcctcaacacggttttacgtcacttaaaaaactcaggccgcagtcggtaa

SEQ ID NO: 464526 - DNA, 363 bp, Shigella boydii; identical to SEQ ID NO: 461509

SEQ ID NO: 464527 - DNA, 459 bp, Shigella boydii
atgctttccgcgtttaccgttattctgctggtggtctgtggtgcgctgtggctggcaacagaccattaccgtgataacgccatcacctacaaagcgcagcgcgataaaaaagccagagagctggagctggcaaacgcaaccattactgacatgcagcagcgccagcgtgatgttgctgcgcttgatgccagatactcaagggaattagccgatgcgagagctgaaaatgaaactctgcgtgctgatgttgccgctggtcgtaagcgcctgcggatcaacgccacctgctccggtaccgtgcgtgaagccaccggcacctccggaatggataatgcaaccggcccccgactggcagacaccgctgaacgggattatttcaccctcagagagcggttgatgacaatgcagaagcaactggaaggggcgcaggaatatatccgcactcagtgtattaactag

SEQ ID NO: 464528 - DNA, 534 bp, Shigella boydii; identical to SEQ ID NO: 461366

SEQ ID NO: 464529 - DNA, 918 bp, Shigella boydii
atgaatagaaaaaatctttccatgaaattgatgtatatattgtataatataaagtatttattgaaatgctttgtcgttctgattactccagatagcttgattataaaaaagcagtttcttgaatatcagggataccctctcggattgaacaatccgaagacattaaatcaaaagttacaatggttgaaactaaatgacagaacaccattacatacaatatgtgctgataaaattagagtgcgagaatatgtggaaaataggctgggaacgagagataatataattgatttgttaaaggtttatgataccccttttgatattacctttgagtctttaccacagggtaagtttgttataaaatcgaaccactattgtggcgattattttattgttagagacaagaatttattgaatattgatgaggttaagtggaaatttattagaacacttaattgtaatatttaccatcacggaagagaatggcaatataaaaatattgataggcgtataattgttgaaaggttattagaggatgaggcagggaaagttcctaatgatataaaaattcattgttttaatggagaaccgaaatttatttatgtgtcgttagatcgtgagggagggaattatcgttctatatatgatactagttggaatatgttagatttttgctgggcgagaaggggaaaagatctttcaaaatttaatgtgaagaatattagtaaaccaagtcagttagaaaacgctctaaatatatctaaaaaactaagtcaaggtttcaaatatcttagggttgatttatatcttgttcaagaaaaaatatatgtaggcgaattaacatttcatcaaggatcggggtatgataagataactccatttgaatgggatgaaaggctcggaaaggagttaaagctatga

SEQ ID NO: 464530 - DNA, 447 bp, Shigella boydii
atgagcatattctctagaattcaattaatatggtataaattatgttttatctgtgagtttggagtaaaacgttataagcaatcccatatttatggtccttataagatagtagaaccatcgaatcttaaattcggtaattccttttcaattaatgattttgtgtatataaatgctagtggaggagtcattttaggccataatgtagtactgtctgctggtagtaaaattctcagtacaggtttggtatttgaaaagaaaatctttaaatataaaaaagataaggtagtaataaaagataatgttcagttaggtgctggagcaattgttttaccgggagtggagatctgtagtaatattattgttggtgccggagcgatagttacaaaaaacttagaggaaccaggtgtatatgttgggcaaccggctagaaaaataaaagatgtctag

SEQ ID NO: 464531 - DNA, 1044 bp, Shigella boydii; identical to SEQ ID NO: 461498

SEQ ID NO: 464532 - DNA, 213 bp, Shigella boydii; identical to SEQ ID NO: 462242

SEQ ID NO: 464533 - DNA, 213 bp, Shigella boydii; identical to SEQ ID NO: 462242

SEQ ID NO: 464534 - DNA, 273 bp, Shigella boydii; identical to SEQ ID NO: 7046

SEQ ID NO: 464535 - DNA, 699 bp, Shigella boydii; identical to SEQ ID NO: 461501

SEQ ID NO: 464536 - DNA, 702 bp, Shigella boydii; identical to SEQ ID NO: 461999

SEQ ID NO: 464537 - DNA, 267 bp, Shigella boydii; identical to SEQ ID NO: 464426

SEQ ID NO: 464538 - DNA, 576 bp, Shigella boydii
gtgcatgtcgatgtcgataccggtgtcggcctggaatttatccagcgcatcgtgcagcggttgtgggaactcatagttaccggtgtaggtcacgccgaaagtcggcaccacaccgatggtgttttcgtcacaggcttcaatcatgcgtttcgggtccataaacaactgaccggggcgcatagggatctcacgcagctccacatcccagtagcgggcgaatttatgccagcagatttgtaccggaccgcacaccaggtttggtttatccgttggtttgcctgcagcttccatacgcttgcgccaacgccatttcatcgccatcccgccgagcatacaggcctcggaagaaccaatggtgttggtgccaacggcctgaccatttttcggcgcaggcgcatgccacagatcggcaaccatatttacgcaacgcaggtcgatggctgcggattgcggatattcttctttgtcgatccagtttttattgatcgacaaatccatcaatttatggacgttttcgtcgtcccaggtctggcagaaagtggccaggttctgacgagcgttgccatcaagatataa

SEQ ID NO: 464539 - DNA, 264 bp, Shigella boydii
atgtctgaggcaaagaactcaaatcttgcaccattcaggttattagtgaaactcacaaacggtgtcggggatgagtttccgttatattatgggaataacttaattgttctcggacggacgatagaaacacttgagtttggaaacgataatttcccagaaaatattattccagtaacagatagtaaatcggatggtataatttatttccaggcacaccagtattcatctcttggatttccatattaccactattcattagaatag

SEQ ID NO: 464540 - DNA, 543 bp, Shigella boydii
gtgaaagaaagcaatcagcgatggtgctctgacgggttcgagttctgctgtgataacggagagagactgcgtgtcacgttcgcgctggactgctgtgatcgtgaggcactgcactgggcggtgactaccggcggcttcaacagtgaaacagtacaggacgtcatgctgggagcggtggaacgccgcttcggcaacgatcttccgtcgtctccagtggagtggctgacggataatggttcatgctaccgggctaatgaaacacgccagttcgcccggatgttgggacttgaaccgaagaacacggcggtgcggagtccggagagtaacggaatagcagagagcttcgtgaaaacgataaagcgtgactacatcagtatcatgcccaaaccagacgggttaacggcagcaaagaaccttgcagaggcgttcgagcattataacgaatggcatccgcatagtgcgctgggttatcgctcgccacgggaatatctgcggcagcgggcttgtaatgggttaagtgataacagatgtctggaaatatag

SEQ ID NO: 464541 - DNA, 177 bp, Shigella boydii; identical to SEQ ID NO: 461613

SEQ ID NO: 464542 - DNA, 357 bp, Shigella boydii; identical to SEQ ID NO: 463396

SEQ ID NO: 464543 - DNA, 303 bp, Shigella boydii
atgagcagaaaaaaccaacgttactctaaagagttcaaagccgaagctgtcagaacggttcttgaaaatcaactttcgaacagtgaaggcgcttcccgattatcccttcctgaaggcactttaggacaatgggttaccgccgccagaaaagggctcggtactcctggttcccgcacggtggctgaactggaatctgaaattctgcaactgcgtaaggcgttaaatgaagctcgccttgagcgagatatattaaaaaaagcaacagcgtattttgcacaggagtcgctgaaaaatacgcgttaa

SEQ ID NO: 464544 - DNA, 303 bp, Shigella boydii; identical to SEQ ID NO: 458125

SEQ ID NO: 464545 - DNA, 450 bp, Shigella boydii
gtggcgaccgtcatcacttccggtcagcacgtcgtgcgttttccccttgttgtcagttacgcggagataatccccggagaaagtcgacacacggctgtaagccacacccgccatcgcatacgcgctgaaccattcattcacgcgtacagacggccccgccatcacgctgaaccagcggttacgcacggaatcttcatgccagcgggtatcgctgtagcgcgttttttgctcatcctcagcattggcataactgaaggacgtaatcagccccagcgcgtccgtaaactcataacggtatttcacgttaatcccgttcagatcatcactaccgggaacgttcgtcgaggcatggagataccccgcgctcagcgtggactgatgttctgctgcactcgctggcgtagcagcggcgacctgccagactactgcggacaaaataacagcacataa

SEQ ID NO: 464546 - DNA, 375 bp, Shigella boydii
ttgacggacttcgggggaaaaacgagtatttttagtcatcctgtttacctctttctcaggaagtttagtatccaggattcccggggcggttcagatagcctgaacgtgtactgtcgtaatggccaggtggaaatcgacaacaacatcggtgaaaacgcgctgcgatcggtggcggttggaagaaaaaattatctcttcttcggttctgacaacggtggagaaagcgcggcgattatctacagtctgctggtcacctgcaaactgaacggagtggagccggaggactggttgcgcgaagtgatcgtgaagctcaatgactggccgtcgaaccgagtgcatgaactgctgccctggaacttctcagctgtaaaataa

SEQ ID NO: 464547 - DNA, 690 bp, Shigella boydii
gtgcgtaaagtctggcgtcagttgttacgggaaggtatcagagtggccagatgcactgtggcacgtctcatggcggttatgggacttgccggtgttctccggggtaaaaaggtccgtacgaccatcagccggaaagccgttgccgcaggcgaccgcgtaaaccgtcagttcgtggcagaacgacctgaccagctgtgggtggctgattttacttacgtcagcacatggcagggcttcgtctatgtggcgttcatcattgatgtgtttgccggatacatcgtggggtggcgggtctcatcgtccatggaaacgacattcgtgctggatgctctggagcaggcgttatgggcccgtcgaccgtccggcacggtccatcacagtgataaaggttctcagtatgtatcgctggcctacacacagcggcttaaggaagccggattactggcatcaacaggaagtacaggcgactcgtatgacaacgcgatggcggagagcatcaatggtctttacaaagcggaggtaatacaccgtaagagctggaaaaaccgtgcagaagtggaactggccacactcacgtgggtggactggtataacaatcgacgattgctggaaaggctgggccatactcctccggcagaagcagaaaaagcttattatgcttccatcggaaacgatgatctggcagcctga

SEQ ID NO: 464548 - DNA, 153 bp, Shigella boydii
atgggacgctggcttgctggcaggctcatgaaagagctggggctggtcagctgtcagcagccgactcaccggtataaacgtggtggtcatgaacatgttgctatccctaactaccttgaaaggctgaaccgccccgggaatcctggagactaa

SEQ ID NO: 464549 - DNA, 279 bp, Shigella boydii; identical to SEQ ID NO: 463003

SEQ ID NO: 464550 - DNA, 279 bp, Shigella boydii; identical to SEQ ID NO: 463003

SEQ ID NO: 464551 - DNA, 303 bp, Shigella boydii; identical to SEQ ID NO: 461664

SEQ ID NO: 464552 - DNA, 378 bp, Shigella boydii; identical to SEQ ID NO: 462723

SEQ ID NO: 464553 - DNA, 189 bp, Shigella boydii; identical to SEQ ID NO: 462626

SEQ ID NO: 464554 - DNA, 246 bp, Shigella boydii
atgagcttgctgtcaccctttgacgtggtgatatggatgacggatggctggccactgtatgaatcccgcctgaagggaaagctgcacgtaatcagcaagcgatatacgcagcgaattgagcggcataacctgaatctgaggcagcacctggcacggctgggacggaagtcgctgtcgttctcaaaatcggtggagctgcatgacaaggtcatcgggcattatctgaacataaaacactatcagtaa

SEQ ID NO: 464555 - DNA, 246 bp, Shigella boydii
atgagcttgctgtcaccctttgacgtggtgatatggatgacggatggctggccactgtatgaatcccgcctgaagggaaagctgcacgtaatcagcaagcgttacactcagcgcattgagcgacataatctgaatctgagacaacatctggcaaggctgggacggaagtcactgtcgttctcaaaatcggtggagctgcatgacaaggtcatcgggcattatctgaacataaaacactatcagtaa

SEQ ID NO: 464556 - DNA, 807 bp, Shigella boydii
atgcagttcttccgcgtgcgtgaaacctccatgaaaatggccgagatcctcaccggtgcgcgtaaaacctacggcctgaacctgatcggcgggattcgtcgcgatctgttgaaagatgacatgatccagacccaccagctggcgcaacagatgcgtcgtgaagtgcaggagctggtggatgtgctgctgagcacaccgaacatggaacagcgcaccgtcggcattggtcgtctggacccggaaattgcccgcgatttcagtaacgttggcctgatggtccgcgccagcggacacgctcgcgatacccgcgctgatcacccgtttgttggttatggcctgctgccaatggaagtccacagcgagcagggctgcgacgttatttcgcgtctgaaagtgcgtatcaacgaagtctataccgcgctgaacatgatcgactacggtctggataacctgccgggtggcccgctgatggtggaaggctttacctacattccgcaccgtttcgcgctgggctttgccgaagcgccgcgcggtgatgatatccactggagcatgactggcgacaaccagaagctgtaccgctggcgctgccgtgccgcgacctacgcgaactggccgaccctgcgctacatgctgcgtggcaacactgtttccgatgcgccgctgattatcggtagcctggacccttgctactcctgtaccgaccgcatgactgtggtcgatgtacgtaagaagaagagcaaagtggtgccgtacaaagaactcgagcgctacagcattgagcgtaaaaactcgccgctgaaataa

SEQ ID NO: 464557 - DNA, 372 bp, Shigella boydii
atgaaactctcacgtatcagcgccatcaactggaacaagatatctgacgataaagatctggaggtgtggaatcgcctgaccagcaatttctggctaccagaaaaggtgccgctgtcgaacgatattcctgcctggcagacattaactgtcgtagaacaacaactgacgatgcgcgtttttactggcctgacgctgctcgacacgctgcaaaatgttatcggcgcgccttcgctgatgcccgatgcactcacgcctcatgaagaagcggtattatcgaatatcagctttatggaagcggttcatgcccgctcttacagttcgattttctcgacgctgtgtcagaccaaagatgtcgatgccgcctacgcctag

SEQ ID NO: 464558 - DNA, 210 bp, Shigella boydii
atgacggatggctggccactgtatgaatcccgcctgaagggaaagctgcacgtaatcagcaagcgatatacgcagcgaattgagcggcataacctgaatctgaggcagcacctggcacggctgggacggaagtcgctgtcgttctcaaaatcggtggagctgcatgacaaagtcatcgggcattatctgaacataaaacactatcaataa

SEQ ID NO: 464559 - DNA, 366 bp, Shigella boydii; identical to SEQ ID NO: 462994

SEQ ID NO: 464560 - DNA, 303 bp, Shigella boydii; identical to SEQ ID NO: 459543

SEQ ID NO: 464561 - DNA, 324 bp, Shigella boydii
atgagactcaggaaatacaataaaagtttgggatggttgtcattatttgcaggcactgtattgctcagtggctgtaattctgcgctgttagatcccaaaggacagattggtctggagcaacgttcactgatactgacggcatttggcctgatgttgattgtcgttattcccgcaatcttgatggctgttggtttcgcctggaagtatcgtgcgagcaataaagatgctaagtacagcccgaactggtcacactccaataaagtggaagctgtggtctggacggtacctatcttaatcatcatcttccttgcggtactgacctag

SEQ ID NO: 464562 - DNA, 297 bp, Shigella boydii
atggttattatcccgggaggcatcgctaagcagtgtcgccagtttgtcgctcagataagggcgcaaggcggtgatgtcgttgctgcggtgcaaaatgcggtagtcataaaattgctgggccacgttacccgggcctccttcaacgcaaggaccactgcgtgtgccgttatctttataagctggagtgactgtggtgcaggcactgaggagcagtgcgcaggggataagcattgtcaatttgctgtagcgcataatgatttccttataagcgatcgctctgaaagcgttctacgataa

SEQ ID NO: 464563 - DNA, 177 bp, Shigella boydii
atggcggaaataagtatgacgattttaagtattcgtcatactgattacctgttctggatcaatagatgggcagtcgggtgggcggatcagttaactgaatcgatccattgcacactgtcggcggtgagcgtaaagggggtgggggtgcagatcgcaaggcttaaattttctagctga

SEQ ID NO: 464564 - DNA, 534 bp, Shigella boydii
ttggagtcattacctgaaaaaggcgtgtttctcgccagtaataacgaaataattgccgaagaacatttcaccggcgaaattaaaaaagaagaagccaaaaaaggcactattgcctggtctattctctcttctcataatacgtccggaaatatggataaacttaaaattaagtttgattcattagcctctcacgatattacctttgttggtattgtacagaccgctaaagcgtccggaatggaacgtttcccgctgccgtatgtgctgaccaactgccataactcactctgcgccgtcggcggcaccattaacggtgatgaccatgtttttggtttatcggcagctcagcgttatggcggtatttttgtgcctccgcatattgcggtcatccatcaatatatgcgtgagatgatggcaggcgggggcaaaatgatcctcgggtcagacagccacacccgttacggtgcattagggacaatggcagtcggtgagggcggcggtgagttggtaaaacagctgcttaatgacacctag

SEQ ID NO: 464565 - DNA, 810 bp, Shigella boydii
gtgggtgcgttttttgcgggtgagaacggtaactccaccactggcgacgccatttatatgcgtggtgccgatacctctaacagtatttatattgatggcattcgcgatatcggcagcgcctcgcgcgacaccttcaataccgagcaggtcgaagtgattaaagggccgtccggcaccgactacgggcacagcgcaccgacgggctcgatcaatatgatcagcaaacagccgcgcaatgattccggcattgacgcctccgccagtattggcagcgcctggttccgccgcggcacgctggacgtcaatcaggtcattggtgataccaccgcggtgcgcctgaatgtaatgggcgaaaaaacgcacgatgccggacgcgacaaagtcaaaaatgagcgttacggcgtcgccccttctgtcgcttttggccttggtacagcgaatcgtttgtatcttaattatctgaatgtcacccagcacaacacgccagacggcggcattccgaccatcggtttgccgggctattctgccccatctgcgggaacggcggccctgaatcattccggaaaagttgatactcataacttttacggcacggattccgattacgacgattcgaccaccgacaccgccaccatgcgttttgagcacgacatcaacgataacaccaccattcgcaatactacccgttggtcgcgcgtaaagcaggattacctgatgacggcgattatgggcggggcgtcgaatattactcagcccaccagcgatgtgaatagctggacctggtcacgcacgcgaataccaaagatgtga

SEQ ID NO: 464566 - DNA, 273 bp, Shigella boydii; identical to SEQ ID NO: 464091

SEQ ID NO: 464567 - DNA, 225 bp, Shigella boydii; identical to SEQ ID NO: 133446

SEQ ID NO: 464568 - DNA, 291 bp, Shigella boydii; identical to SEQ ID NO: 464098

SEQ ID NO: 464569 - DNA, 852 bp, Shigella boydii; identical to SEQ ID NO: 464102

SEQ ID NO: 464570 - DNA, 795 bp, Shigella boydii; identical to SEQ ID NO: 458358

SEQ ID NO: 464571 - DNA, 438 bp, Shigella boydii
ttgattgctgccaaaggttcaccgattcagccaacgctggattcactgaaaggtaaacatgttggtgtgctgcaggggtcaacccaggaagcttacgctaacgagacctggcgtagcaaaggcgtggatgtggtggcctatgccaaccaggatttggtctattccgatctggctgcaggacgtctggatgctgcgttacaagatgaagttgctgccagcgaaggattcctcaagcaacctgctggtaaagatttcgcctttgctggctcatcagtaaaagacaaaaaatacttcggtgatggcaccggtgtagggctacgtaaagatgatgctgaactgacggctgccttcaataaggcgcttggcgagctgcgtcaggacggcacctacgacaagatggcgaaaaagtatttcgactttaatgtctacggtgactga

SEQ ID NO: 464572 - DNA, 435 bp, Shigella boydii
atgttcgctttactcctgctcacgccgctgcttttttcgctgctctgttttgcctgccggaaacgggggctctctgcgacttgtacggtgactgtattacatagcttagggatcacactgctgctgattctggcactctgggtggtccaaactgccgctgatgcaggagaaatattcgctgcgggactgtggcttcatattgatggtctgggcggtttgttcctcgccattcttggtgtgattggctttctcaccggtgtttactcgattggctacatgcgtcatgaagtggcacacggcgagctttcacccgttacactgtgcgattactacggtttcttccatctgtttttgttcaccatgctgctggttgttaccagcaataacctgattgtgatgtgggcggcgatcgaagccactagactggccccctga

SEQ ID NO: 464573 - DNA, 975 bp, Shigella boydii
gtgacgacggaaaccgatgtcgccagcctgaaaaatcatctcgccggagagccgttgggccacgaaacgaagctggcgcaaaaacgcgtcgagccagtggttccgcagtccaccgagcagggctggtatatcgacaaatcacgctttgatttccatatcgatccggtgctgaaccagtcggtcggtggcccggaaaacttttacatgtatcagctgggcgtgatgggaatggcagatttgtggctgacggaccatctgctgaccaccggcagcctgtttgcaaatcttgccaacaactacgacaagtttaactacaccaatccgccgcaggactcgcacttaccgcgcgttcgtacccatgtgcgcgagtatgtgcagaacgatgtctatgtgaataacctgcaagccaactacttccagcatctgggcaacggcttctacggtcaggtctatggaggttatctcgaaaccatgtttggcggtgagggggccgaagtgttgtatcgtccgctggacagtaactgggcgtttggtctggatgccaactacgttaaacagcgcgactggcgtagtgcaaaagatatgatgaaattcaccgactacagcgtgaaaaccggacatctgaccgcctactggacgccatctttcgcccaggacgtgttggtgaaagccagcgtcgggcagtatctggcaggggataaaggcggcacgctggagatcgccaaacgctttgacagcggcgtggtggtgggtggctatgccacgatcaccaacgttttgaaagaggagtacggcgaaggggacttcaccaaaggcgtgtatgtctcggtaccgttggatctcttctcgtctggcccgacacgcagccgtgcggcgattggctggacgccgctgacgcgtgacggtggtcagcaacttgggcgtaagttccagttgtatgacatgaccagcgaccgtagcgtcaatttccgctaa

SEQ ID NO: 464574 - DNA, 1230 bp, Shigella boydii
atgcgcagagcacttaacaaactgagtgatacacagctaaggaaaatcaacggcacacccgcccaaaaaacagcctttcttaatgacggtggaaacctgagcgtcaggcattcaaccagcggccttttaacctggtatttcacctacagggccggaacgggaaggggagcacgaccggaacggattaagctgggaaattatcctgatctgagtctgaaagctgccagggaaaaagcggcacagtgtcgcgcttggcttgctgaggggaaaaatccacgtcatgagatgaattacaccgtacagaaagcgttaaagcccgtaacggttggcgatgcgcttacctactggcttgagtcttacgtaaaggaaaaccgcgtggattatgccgccctgaaaaagcgccttaataatcacgtaatacagcacattggtgctatgccgctggataaatgcgagctacggcactggctggcctgttttgaccaggtggcaaagcgaacgcctgttactgccggattcttgctacagacgtgcaaacaggcgcttaagttctgccggaggcggcgctatgcaatcagcaacgttcttgatgatatgagtgtggcggacgttgggaaaaaaccggatataagcgagcgtgtcttaagcaccaaagaacttggcgaattattgcaggcactggacaaaaaaatattttccccttactacgtcgcactaatccgcctcctgattgttttcggatgccggacggtagaactgaggttatcggagatcagcgagtgggattttaccgaaatgctctggaccgtgccgaaagaacacagcaaaacgaaggtggcaatattccggcccataccggaagcaatactgccgttcgtcacgcagctggtggagcagaacaggcacacgggcttattgctgggggaagtgaaacaggaaacaagcgtgtcgcagtacggcagattagcgcacaggaggctaaaacaccctcactggtcactgcatgacatccggcgcacctttacaacgatgctgaacgatttaggcgtggatcctcacgtcgtggagcagcttacaggtcatcagatgccagggatgcaacgagtctataaccattcccgttatctggatgcgaaacgtgacgcgctggatatgtggacggagcggttagggatactggcgggaacacatgaaaacgtaaccacattgccaatagccagagaaatataa

SEQ ID NO: 464575 - DNA, 180 bp, Shigella boydii
atggcaacgggtccaaagaatgcaaaatcacaatctgtaactgcacgtattgcccatgaaattattgaaggcatggagaacgtgaaagaagaaggcgaaagcacgggacagtttataaacgcagccatgcgcggcgaaatcaaacgccgccagcgccgcaaggccaaagagcaggagtaa

SEQ ID NO: 464576 - DNA, 201 bp, Shigella boydii
atgagaaatcataccacacacccgaaagggcgggactcgcacaacctgaataaatacatctggcgttttatcgccctgagcacggcacaaccgcgcgtgattaccattgaggccaccagcgaacaggaagcacgccagcaatctccggctggctgcgtgatggtatttgctgcccgtattcgtcagggggtaggcttatga

SEQ ID NO: 464577 - DNA, 231 bp, Shigella boydii
atgagccaggaaatcacactacaacaggcagcagaacgcgcccaccaaatcgaagttatttgcgcactggcagaggattaccctagcatgatgaccgacagcgaatcaggggcaatcatcggcttacttaaacgccttagcggtgaggtctgcgtattcctgagcgatgaacaggaaagaagaacgcttatttctaacgaaaaaaaatgcggaggggtacatgtgcaataa

SEQ ID NO: 464578 - DNA, 222 bp, Shigella boydii; identical to SEQ ID NO: 10223

SEQ ID NO: 464579 - DNA, 1401 bp, Shigella boydii
atgaaaagcgcaccgaacttaaaaaaacagccttacgacaagatgaccgaagtcattatttttgcgggtagtgatgcttgggcacatgcgaaacagtggcaggaacaggacgggcgactggctggcgataatgtgcctcccgttgtgctggctgatgatcaactggatgaactggcagacctgagaatcatcgacgaggggcgctattgtgtccggctgtacaaggcaggccacatcaggccatcaaatattaatgccattgcgcacaagctggcggcggcgggtgtaactgatgcgaattattaccccgaagggatgcacagccatatgcgggagaactggcgcgaatacctggaacgggtgcgcgggaaagagccggcggaagaaaaaaaccaccagcgaaaaaccacgctaccgatgagcgttggatctaccggatacgacacgcaactggattacgtggttaaggggattattccggcggtatcgctatgcagcatatacggagctagcgggtcctataaatcattccttgccggatcgtgggcgtgccatgttgccactggtcgccagtggggaggccgcagggttgcacatggtgcggttctctatgtggttggtgaaggcggtataggtgttccgcgtcgtgtaaaagcctgggaggttgtgcacgatgagcaggtgaaaaatctgtatctggtaaaccgccccatctttccggctgccccgcttgatgttgatgaaatggttatcgctgcccgtcaggtggagcgggaaacgggtaaacctgtacgcatgattattctggatacgctggcgcgttgctttggtgggaatgatgaaaatgattcccgtgatatgggggcgtttatccgtggttgtgacgaactgaaacgacgcacaggggccacggtgctggtggttcaccattccggcaaggatgagacgaaaggcgcgcgcggttccagtgcatttcgtgcttcgctggatgctgaataccggatacgcagggaggacgcaggaagcgaagcgctggttatctcatgcaccaaaatgaaggacgcggaggaactcaaagaagccgcatatgacttacgcgtggtggagctttttaccgacgctgacggtgaattaatcacgtcgctggtggtggtggatgatccgcgccctcctgttgaactggagcgcatcgaggaggcagggaacaagacggaaaaccataccgcgctatgggggtgcatccgttcacgcacacagaacggcgacaagtgcacgatcccgctgttacgtgatgacatgaaaaagctggggtatgaaatgaaaaacttccggcgctggctgtacaagctggaaaaagatggggttattcgtatcgatggggatgatgtagcgccgctataa

SEQ ID NO: 464580 - DNA, 423 bp, Shigella boydii
atgacagcacagatagcagcttacgggcggctggtggacgacccgcaggtaaaacagaccagcaagggcacaccaatgacgctggcacgtatggcggtcccccttccgtgcagccaggcagatgacggaacggcgacgatgtggttatccgtcctggcatttggcagacaggccgaagcactggaaaggcaccgcaagggtgaactcctgagcgtggcgggtaacatgcagatcagccagtggactgggcagaacggagaaacgcggcagggctggcaggttatcgcagacagtgtaatcagtgcgcgaacggcgcgactgggcggcaaaaaaggtcaacagggccaggctactgacgcgctgaacagggcaaaacaacaggcggggaatgatgatccgtacggggataacataccgttttaa

SEQ ID NO: 464581 - DNA, 159 bp, Shigella boydii
gtggttaatgggggagttgcagatctgcaactcgaccatgaaactacggaaactacccgtagtttgggtagtaagagtaacacccagattttggggcttactcgtgatacccaaatttggggtatcggtggcaaccataacgactttcgttacggttga

SEQ ID NO: 464582 - DNA, 3642 bp, Shigella boydii
atgcgtattgtcatagatttacaaggcgcacagacggaaagccgctttcgtggcatcggtcgttatagtatcgcaatcgccagaggcataatcagaaataacagccggcatgagattttcatcgcgctatccgccatgctggatgagtcgattgcggatattaaggcgcaatttgccgatctcctgccggcagaaaatatagtcgtatggcatgccgtaggccctgttcgtgcgatggaccaaggtaatgaatggcgtcgggagagcgcagaactgattcgggaagcgtttcttgaatcattgtgtccagatgtcgttttcattacgagcttgtttgaaggtcatgtcgacgatgcggctacatcggtacacaaatttagtcgtcagtataaagtagccgtactgcaccacgatcttatccccctcgtgcaggcggaaacctatctgcaggacgatgtatacaaaccctactacttacagaaagttgagtggttaaaaaacgctgaccttttgttgactaactctgcttataccgcacaggaagcgatcgagcatctgcatttacagggcgatcatgtgcagaatattgcagccgcagtcgattctcagttttgtatggcggaggtgacagcgagcgaaaaagagaccgtccttggccattacggtattcagcgcgagttcatgttgtatgcgcctggaggatttgactcaaggaaaaactttaaacggttgattgaggcctatgccgggctcagtgatgccttacgtcgcagtcatcaactggttatcgtcagtaagctttccatcggtgatcgtcagtatctggaatcccttgcgtcaggtaatggtttacagcaaggcgaactggtactcactggttatgtgccggaagatgagctgatccagctctatcgcctatgtaagctgttcatctttgcttcactacatgaaggttttgggttgccggttctggaagcaatgtcgtgcggtgcgccggtgattggctcaaatgtcaccagtattcctgaagtcatcggtaatcctgaggcattattcgacccgtattctgtctcttccatgagggataagatcgcgcaatgtttgactgatgataccttcctcgcgcgtctgaaagaaatggcgcagcagcaagcgcgaaatttctcttgggataaagctgcggtgactgctctggaagctttcgaaaagatcgcggtagacgacaccggtactgcgcaggttttgcctgaagctttgattcagaaaatccttgctatctcacaagggcagccagatgaccgcgatctgcgcttgtgcgcaacggccattgattacaatctgaaaacggcagaactttatcaaatcgacgataaatcgctgaactggcgtgtggaaggcccattcgatagctcatatagtctggcgttggtcaaccgcgaatttgcccgggcactctcagccgatggtgtagaggttttattgcattccactgaaggaccaggtgattttgccccagatgcctcgtttatggcacagtcggaaaatagtgatcttctggcattttataatcaatgtcagacccgcaagagtaacgaaaagatagatattcttagcagaaatatctatccaccgcgggttaccaaaatggatgccaaagtaaaattccttcattgttatgcttgggaagaaacgggctttccgcaaccgtggatcaatgaatttaatcgggaacttgacggagtgctgtgtacttcggaacatgttcgtaaaatattgattgataacggactgaatgtgcccgcatttgttgttggcaatggctgtgaccattggctcaatatcccagccgagacgacaaaagatgtggatcacggaacattccgtttcctgcacgtctcttcttgtttcccacgcaaagggatacaggcaatgcttcaggcttgggggaaggcgttcactcgtcgtgacaatgttatcttaatcattaagacttttaacaatccgcacaatgaaattgacgcatggctggctcaggcccaggctcaattcatagactatcccaaagttgaagtgatcaaagaggatatgtcagccaccgagcttaaagggctttatgaaagctgtgatgttttggttgctccaggttgcgctgaaggctttggtttacctattgctgaagcaatgctgagtgggctaccggctatcgtcaccaattggagcgggcaacttgattttgttaattcacaaaattcatggctggttgactatcagttcactcgggtaaaaacgcactttggtctgttttcctcagccagggccagtgtggatattgacaacttaacagatgcattaaaagcggcagcctcaaccgataaatcagtgctgcgtgacatggccaatgctggtcgcgagcttcttctgcagcagtttacctggaaagcggtggctgatcgttcttgccaggcggtcaagactctgcgtgcgcatattgatattgcacagcatcgggcgcgcattggctggttgacgacctggaacacgaaatgtgggatcgcaacctattcccagcatctggtggaaagcgcacctcatggcgcggatgttgtttttgctccccaggtcagcgctggcgatcttgtgtgtgcagacgaagagtttgtacttcgcaactggattgtaggtaaagagagcaactatctggaaaacctccagccacacattgatgctctgagactcgatgtcattgtgatccaattcaactatggattctttaatcatcgagaactgtcggcgtttattcgtcgccagcatgacgccggtcgttcagttgttatgacgatgcactcaactgtggatccgctggaaaaagagccgagctggaatttccgtcttgctgaaatgaaagaggcgctggcactttgcgaccggttgttggtgcattcgattgccgatatgaaccgccttaaagatttaggcttaactgcgaatgttgctttattcccgcacggtgttatcaaatactccgcagcgagcgtcacacgtcaacagcagtctttaccgctaattgcgagctatggcttctgcttaccgcataagggcctgatggaactagtagaatccgtccatagactcaagcaagccggtaaaccggttcgtttacgactggtgaacgcagagtatcctgttggggagtcacgcgatctggtggcagagcttaaagctgctgctcagcggttaggtgttaccgatctgattgagatgcataatgatttcctacctgatgcggagagtctgcggttgctttcagaagccgatcttctgatttttgcttatcagaatactggggagtctgctagcggggcggtacgttatggtatggcgactcaaaaacctgttgcggtaacgcccctggcgatatttgatgatttggacgatgccgtctttaaatttgatggatgcagcgtcgatgatatcagtcaggggattgaccggatcctgaattccatccgtgaacagaactcttgggcaaccaggactcaacaacgtgccgatgcatggcgggaacaacatgattatcaagctgtttcacgccgtctggttaatatgtgtcaaggcttagctaaagctaaatattttaaataa

SEQ ID NO: 464583 - DNA, 1158 bp, Shigella boydii
gtgtcatttattatgaaaattatttttgctactgagccaattaaatatccattaacgggcatcggtcggtattccctggaactggttaagcggctggcggtcgcccgcgaaattgaagaattaaagctatttcacggtgcgtcgtttatcgaacagatccctttggtggagaataaaagcgataccaaagccagcaatcatggtcgtttgtcggcgtttctacgccgacagacgctgttgattgaggcttatcgcttgctgcatccgcggcgccaggcgtgggcattgcgcgactataaggattatatctaccatggccccaatttttatctgccgcataaactggaacgcgccgtgaccacgtttcatgacatatccatttttacctgcccggaatatcatccaaaagatcgggttcgctatatggagaagtccctgcatgagagtctggattcggcaaagctgatcctgaccgtttctgatttctcgcgcagtgaaattatccgcttgttcaactatccggcggagcggatcgtaaccaccaagctagcctgcagcagtgactatatcccacgcagcccggcagagtgtctgccggtactgcagaaatatcagctggcgtggcaggcctacgcgctatatatcggcactatggagccacgtaaaaatatccgaggcctgctgcatgcctatcagctgctaccgatggagatccgcatgcgctatccgctaatccttagcggctatcgcggctgggaagacgatgtgctgtggcagttagtcgagcgcggtactcgggaaggctggatccgttacctcggatatgttccggatgaagacctgccgtatctgtacgcagcggccagagtctttgtttatccctccttctacgagggattcggtttacctattcttgaagcgatgtcttgcggtgtgccggtagtatgctccaatgtcacctctttgcctgaggttgttggcgatgccggcctcgttgccgatcctaatgatatagacgcgattagcgcgcaaattttgcagagcctaaaggatgatagctggcgggaaatcgccaccgcgcgcggtcttgctcaggcgaaacagttttcgtgggagaactgtgcgacccagaccattaacgcctataaattactctaa

SEQ ID NO: 464584 - DNA, 522 bp, Shigella boydii
ttgagagttctacacgtctataagacttactatcccgatacctacggcggtattgagcaggtcatttatcagctaagtcagggctgcgcccgccggggaatcgcagccgatgttttcacttttagcccggacaaagatacaggtcctgtcgcttacgaagatcatcgggtcatttataataaacagctttttgaaattgcctccacgccgttttcgctgaaagcgttaaagcgttttaagctgattaaagatgactacgatatcatcaactaccattttccgtttccctttatggatatgctgcatctttcggcgcggcctgacgccaggactgtggtgacctatcactctgatatagtgaaacaaaaacggttaatgaagctgtaccagccgctgcaggagcgatttctcaggggcgtagattgcatcgttgcctcgtcgcccaattacgtggcttccagccagaccctgaaaaaatatctggataaaacggtggtgatcccgtttggtctggagcagtag

SEQ ID NO: 464585 - DNA, 591 bp, Shigella boydii
gtgcagcacgatccgcagagggtcgcgcactggcgggaaactgtcggcgataagttctttctcttcgtcggcactttccgctactacaaagggctgcatattctgatggatgccgctgaacgtagccgactgccagtggtggttgtagggggcgggccgctggaatcggaagtgcggcgtgaagcgcagcagcgcgggctgagcaatgtgatgtttaccggcatgctcaacgacgaagataagtacattctcttccagctctgccggggcgtggtattcccctcgcctctgcgctctgaggcgtttggcattacgttattggaaggcgcacgctttgcaaggccgctgatctcttgcgagatcggtacaggtacctctttcattaaccaggacaaagtgagtggttgcgtgattccgccgaatgatagccaggcgctggtggaggcgatgaatgagctctggaataacgaggaaacctccaaccgctatggcgaaaactcgcgtcgtcgttttgaagagatgtttactgccgaccatatgattgacgcctatgtcaatctctacactacattgctggaaagcaaatcctga

SEQ ID NO: 464586 - DNA, 807 bp, Shigella boydii
ttgtccgcacatggacacgaaccaacgatcaacctctatcgccgtgcgcgtgatctgaaaggcattaaaaagatcctgattgcctctggtgtgcgttatgacatcgccgtggaagatccgcgctatatcaaagaactggcgacccatcacgtcggcggttatctgaagattgccccggaacataccgaagaagggccgttatcgaagatgatgaagccgggcatgggcagctatgaccgctttaaagagctgttcgatacttactcaaaacaggcaggtaaagagcagtatctgatcccctatttcatctccgcgcaccccggtacgcgtgatgaagatatggtgaatctggcgctgtggctgaaaaagcatcgtttccgtctcgaccaggtacagaacttctacccatcgccgctggcgaactcaaccaccatgtattacaccgggaaaaactcgctggcgaagattggttataagagtgaagacgtcttcgtaccgaagggcgacaagcagcgtcgtttgcataaagcgttgttgcgttaccacgatccggcaaactggccgttaatccgccaggcgctggaagcgatgggtaaaaagcatctgattggtagccgtcgcgattgcttagtgcctgcgccaaccattgaagagatgcgtgaagctcgtcgccagaaccgcaatacccgtccggcgttgacgaaacatacgccgatggcgacccagcgtcagacgcctgctacggcaaaaaaaagcgtcgtctacgcaatctcgtccggtgaatgctggtgcgaagaaacggcctaa

SEQ ID NO: 464587 - DNA, 378 bp, Shigella boydii
atgagcgcgctcaactccctgccattaccggtggtcaggctgctggcgttctttcatgaagagttaagcgagcggcgacccggccgcgtgccgcagatcgtgcaactctgggtaggctgcctgctggtgattctgatctcgatgacttttgagatcccttttgtggcgttatcgctggcagtgctgttttacggtattcagtcgaacgcgttttacaccaaatttgtggcgatcttgtttgtggttgccacggtgctggagatcggcagcctgtttttgatctacaaatggtcatacggcgaaccgttgatccgattgatcatcgccgggccgatcctgatgggctgcatgtttttgatgcgcacccatcggctgtga

SEQ ID NO: 464588 - DNA, 1680 bp, Shigella boydii
atgagcaatgctattaacgaaattgataataccgatttagtgttcgttttcgggtacaacccggcggattcccacccaatcgtggcgaatcacgtaattaacgctaaacgtaacggggcgaaaattatcgtctgcgatccgcgcaaaattgaaaccgcgcgcattgctgacatgcacattgcactgaaaaacggctcgaacatcgcgctgttgaatgcgatgggccatgtcattattgaagaaaatctgtacgacaaagcgttcgtcgcttcccgtacagaaggctttgaagagtatcgtaaaatcgttgaaggctacacgccggagtcggttgaagatatcaccggcgtcagcgccagtgagattcgtcaggcggcacggatgtatgcccaggcgaaaagcgccgccatcctgtggggcatgggtgtaacccagttctaccagggcgtggaaaccgtgcgttctctgaccagcctcgcgatgctgaccggtaacctcggtaagccgcatgcgggtgtaaacccggttcgtggtcagaacaacgtgcagggtgcctgcgatatgggcgcgctgccggatacgtatccgggataccagtacgtgaaagatccggctaaccgcgagaaattcgccaaagcctggggcgtggaaagcctgcctgctcataccggctatcgcatcagcgagctgccgcaccgcgcagcgcatggcgaagtgcgtgccgcgtacattatgggcgaagatccgctgcaaactgatgcggagctgtcggcagtacgtaaagcctttgaagatctggaactggtcatcgttcaggacatctttatgaccaaaaccgcgtcggcggcggatgtcattttgccgtcaacgtcgtggggcgagcatgaaggcgtgtttactgcggctgaccgtggcttccagcgtttcttcaaagcagttgaaccgaaatgggatctgaaaacggactggcaaatcatcagtgaaatcgccacccgtatgggttatccgatgcactacaacaacacccaggagatctgggatgagttgcgtcatctgtgcccggatttctacggtgcgacttacgagaaaatgggcgaacagggcttcattcagtggccttgccgcgatacttcagatgccgatcaggggacttcttatctgtttaaagagaagtttgataccccgaacggtctggcgcagttcttcacctgcgactggatagcgccaatcgacaaactcaccgacgagtacccgatggtactgtcaacggtgcgtgaagttggtcactactcttgccgttcgatgaccggtaactgtgcggcactggcggcgctggctgatgaacctggctacgcacaaatcaataccgaagacgccaaacgtctgggtattgaagatgaggcattggtttgggtgcactcgcgtaaaggcaaaattatcacccgtgcgcaggtcagcgatcgtccgaacaaaggggcgatttacatgacctaccagtggtggattggtgcctgtaacgagctggttaccgaaaacttaagcccgattacgaaaacgccggaatacaaatactgcgccgtgcgcgtcgagccgatcgccgatcagcgcgccgccgagcagtacgtgattgacgagtacaacaagttgaaaactcgcctgcgcgaagcggcactggcgtaa

SEQ ID NO: 464589 - DNA, 582 bp, Shigella boydii
ttgctgaaaccgcaacggacagacggcggtcatcggctgttcaacgatgccgatattgaccggatccgcgagagcaaacgctggatcgacaacggcgtgcaggtcagcaaagttaaaatgctgctcagtaatgaaaatgttgatgtgcagaacggctggcgcgatcagcaagaaacattactgacttacttgcaaagcggcaatctgcatagcctgcgaacgtggatcaaagagcgcggtcaggattaccccgcccaggcgctgctggcgatcctcgacggcgtactgatcaactacatcgccatctgtctggcttcggcacgtaaaaaacagggtaaagatgcgctggtggttggctggaatattcacgataccacccgtctgtggctggagggctggattgccagtcaacaaggatggcgcattgatgtcctcgcccactcgctcaatcaactacgccctgaactgttcgaaggccgtacattgctggtgtggtgcggtgaaaatcgaacctccgcccaacaacagcaactcaccagttggcaagaacaaggctatgatattttcccactcggcatttaa

SEQ ID NO: 464590 - DNA, 348 bp, Shigella boydii
atgaacgaacatcatcaaccttttgaagaaatacggcattatggcactgaagggcaagaattttggtcagctagagaattggcaccgttactggattatcgggactggcgcaattttcaaaaggtactggcccgcgcgactcaagcgtgcgaagccagcaatcaagctgcatctgaccatttcgttgaaaccaccaaaatggttgtattaggttcaggggctcaacgagaacttgaagatgttcatctctcccgctatgcctgttacctagtagtacaaaacggcgaccctgcgaaaccggttattgcggcagggcaaacttattttgctatccagacccgacggtag

SEQ ID NO: 464591 - DNA, 1005 bp, Shigella boydii
atgaccctaccaaaaattaaacaggttcgcgcctggtttactggcggtgcgacagcagaaaaaggcgctggcggcggtgattataacgaccagggggcgaatcactggatagacgatcatattgccaccccgatgagtaaataccgcgattacgagcagtcacgccagtcatttggcattaacgttcttggcacgttggttgttgaagtcgaagcagaaaacggccagaccggattcgctgtttcgacagccggtgaaatgggctgttttatcgtcgaaaaacaccttaaccgtttcattgagggtaaatgtgtcagtgatatcaaactgatccacgatcaaatgctcaatgccaccctgtattactccggctctggtggcttggtgatgaatacgatttcctgtgtcgatctggctctgtgggatctgttcggcaaagtggtcgggcttccggtttataaacttttaggcggcgctgttcgtgatgagattcagttctacgccacaggtgcgcgtccggatctggcaaaagagatgggctttatcggtggcaaaatgccgacgcactgggggccacatgatggcgatgcggggatccgcaaagatgccgctatggtcgcggatatgcgtgaaaaatgcggtgaagatttctggttaatgctcgactgctggatgagtcaggacgtgaactatgcgaccaaactagcccacgcttgcgcgccctataacctgaaatggatcgaagagtgcctgccgccacagcagtatgaaggttatcgcgaactgaaacgcaacgcgccagtcggaatgatggtcaccagcggtgagcaccacggcacactgcaatcttttcgtacgctttcagaaaccggtatcgacattatgcagccggatgttggctggtgcggtggtttaccacgctggtggaaattgccgcaatcgccaaatccagggggcaactggtggtgccgcacggttcgtctgtttactctcaccatgcggtga

SEQ ID NO: 464592 - DNA, 255 bp, Shigella boydii
atggatgcgcggcgagggcgcatcttacagggacgttcccttgcgcccgacccggtagccgcaagggataagctgagggaatcgcgcagcggcgattttgttcgccagagcctgggggtgcagggggcggcggcgattggccgccccctgcgcgctccctgcgccagtgactttatatggcatagcacattaaaggagcgcaaccgttctcatattccaaatagttttgcccatatgttatctaatcagccttag

SEQ ID NO: 464593 - DNA, 273 bp, Shigella boydii
atgcaatacatcaagatccatgcgctggataacgtcgcggtcgctttagcggatttggctgaaggcacagaagtcagtgtcgataaccagactgttacgctgcgccaggatgttgctcgtggacataaatttgcgttaacggatatcgcaaaaggggccaatgtcatcaaatatggcctgccgattggttatgcattggcggatattgcggcgggggaacacgtccacgcccacaatacgcgcacgaatctgagcgatctggatcagtcctga

SEQ ID NO: 464594 - DNA, 525 bp, Shigella boydii
atgaaaataaagaacattctactcaccctttgcacctcacttctgcttaccaacgttgcggcacacgccaaagaagtcaaaataggtatggcgattgatgatctacgtcttgaacgctggcaaaaagatcgagatatttttgtgaaaaaggctgaatctctcggtgcgaaagtatttgtacagtctgcaaatggcaatggagaaacacaaatgtcgcagattgaaaacatgattaaccggggtgtcgatgttcttgtcattattccgtataacggccaggtattaagtaacgttgtaaaagaagccaaacaagaaggtattaaagtattagcttacgaccgtatgattaacgatgcggatatcgatttttatatttctttcgataacgaaaaagtcggtgaactgcaggcaaaagccctggtcgatattgttccgcaaggtaattacttcctgatgggcggctcgccggtagataacaacaccaagctgttccgcgccggacaaatgaaagtgttaaaaccttaa

SEQ ID NO: 464595 - DNA, 825 bp, Shigella boydii
atgcaaaacattacccagtcctggtttgtccagggaatgatcaaagccaccaccgatgcctggctgaaaggctgggacgaacgcaacggcggcaacctgacgctgcgcctagatgacgccgatatcgcgccttataaagacaacgtccatgcacaaccgcgctatatcccgctcagccagcccatgcctttactggcaaatacaccgtttattgtcaccggctccggcaaattcttccgtaacgtccagctcgatcctgcagctaacttaggcgtcgtaaaagtcgacagcgatggcgcgggctaccatattctctgggggttaaccaacgaagccgtcccgacatccgaactcccggcgcactttctctcccactgcgagcgcattaaagccaccaacggtaaagatcgggtgatcatgcactgccacgccaccaacctgatcgccctcacctatgtactggaaaacgacaccgcggtctttactcgccaactgtgggaaggcagcaccgagtgtctggtggtattcccggatggcgttggcattctgccgtggatggtgcccggcacggacgaaatcggccaggcgaccgcacaagagatgcaaaaacattcgctggtgttgtggcccttccacggcgtcttcggcagcgggtcgacgttggatgaaacattcggtttaatcgacaccgcagaaaaatcagcacaagtattagtgaaggtttattcgatgggcggcatgaaacagaccatcagccgtgaagagttgatagcgctcggcaagcgcttcggcgttacaccactagccagtgcgctggcgctgtaa

SEQ ID NO: 464596 - DNA, 1233 bp, Shigella boydii
atggccttcgtcagtctgaaaccgtgggaagagcgtaatggtgatgaaaacagtgcggaagcggtaatccatcgtgccaaaatggaattgggcaagatccgcgacggttttgtcattccattcaatatgccagccattgttgaactgggcacggcaacgggtttcgactttgagttaattgatcaggctgggctgggtcacgatgccctaacccaggcccgtaaccagttgcttggtatggcggcgcaacatcctgccagcttagtcagcgtgcgtcctaatggcctggaagacaccgcgcagtttaaactggaagttgaccaggaaaaggcgcaggcattaagtgtttcactttctgacatcaatcagaccatttcaacggcgttgggtgggacttatgttaacgacttcatcgaccgtggtcgcgtgaaaaaggtgtatgttcaggcggatgccaaattccgtatgctgccagaagatgtcgataaactttatgtccgcagcgccaacggcgaaatggtgccattctcggcctttaccacttcacattgggtgtatggctctccgcgactggaacgctacaacggtctgccgtcaatggagattcagggggaagccgcgccaggaaccagttccggcgatgccatggcgttgatggaaaaccttgcgtcaaaattacctgcgggcattggttatgactggacgggtatgtcgtatcaggaacgcttatcgggaaaccaggctcccgctctggtagcaatttcctttgtggttgttttcctgtgccttgctgcactctatgaaagctggtcaattcctgtctcggttatgttggtcgtgccgttagggattgtcggcgtgctgctggcggcgacactctttaatcaaaaaaatgacgtctactttatggtgggcttgctaacgacaattggcttgtcggccaaaaacgctattttgattgttgagttcgctaaagatctcatggagaaagagggtaaaggtgttgttgaagcgacactaatggcagtacgtatgcgtctgcgtcctatcctgatgacctctctcgcctttattctcggcgtattaccgctagctatcagtaacggtgcaggcagtggcgcgcagaacgcagtgggtattggggtaatgggcggaatggtctctgcaacgttgctggcaatcttcttcgtaccggtgttctttgtggtgatccgccgttgctttaaaggataa

SEQ ID NO: 464597 - DNA, 189 bp, Shigella boydii; identical to SEQ ID NO: 464175

SEQ ID NO: 464598 - DNA, 276 bp, Shigella boydii
atgcttcaaaatacccatgctaccgcccctggctttacagctaccagagcactgcatgcatgcctacgatgtgacgagcgttacccactcgccctaaacccgaaaaattcaaaagctaattgtcttaccaatccgctttggaaacaaggaaaatcctggaaaagtttgacgaaaatcctattgctaactcgttgttattctgattgtttatataaaacaacggcaggaatattcgcaacaaattactttcgccacgaatcttcactgccgttataa

SEQ ID NO: 464599 - DNA, 630 bp, Shigella boydii; identical to SEQ ID NO: 464125

SEQ ID NO: 464600 - DNA, 720 bp, Shigella boydii
gtgaattcactctataccgctgaaggtgtaatggataaacactctctgtggcagcgttatgtcccgctggtgcgtcacgaagcattgcgcctgcaggttcgactgcccgcgagcgtggaacttgacgatctgctacaggcgggcggcattgggttacttaatgccgtcgaacgctatgacgccctacaaggaacggcatttacaacttacgcagtgcagcgtatccgtggcgctatgctggatgaacttcgcagccgtgactgggtgccgcgcagcgtgcgacgcaacgcgcgtgaagtggcacaggcaatagggcaactggagcaggaacttggccgcaacgccacggaaactgaggtagcggaacgtttagggatcgatattgccgattatcgccaaatgttgctcgacaccaataacagccagcttttctcctacgatgagtggcgcgaagagcacggcgatagcatcgaactggttactgatgatcatcagcgagaaaacccgctacaacaactgctggacagtaatctgcgccagcgggtgatggaagctatcgaaacgttgccggagcgcgaaaaactggtattaaccctctattaccaggaagagctgaatctcaaagagattggcgcggtgctggaggtcggggaatcgcgggtcagtcagttacacagccaggccattaaacggttaagcactaaactgggtaagttataa

SEQ ID NO: 464601 - DNA, 159 bp, Shigella boydii
atgattatcgtttctgcagggtttttaatcggacgattagtgggtgaaatgaggggttatttgggggttaccggtaaattccatgcagaaaaaaccccgccggtggcggggaagcacgttgctgacaaattgcgctttatgttgccggatgcggcgtaa

SEQ ID NO: 464602 - DNA, 1083 bp, Shigella boydii
gtgaaaagtgtcaaaacggagctgaaacaggcactgttgagcggaatctcttttgccgtaccgttgattgtcgcggggggcacggtgctggcggtcgcggtattactgtcgcaaatcttcgggctacaagatctgtttaatgaagaaaactcctggctgtggatgtaccgcaagctgggcggcgggctgctcggaattttgatggtaccggtgctcgcggcctataccgcctattctctggcagataaaccggcgttagcgccaggctttgcggctggacttgccgccaacatgatcggctccgggtttctcggcgcggtcgttggcggattgatagccggttacttgatgcgctgggtgaaaaatcacttgcgtcttagcagtaaattcaatggattcctgactttttatctctacccggtgctcggtacgttgggagcgggcagtctgatgctgtttgtggtgggagaacctgtcgcatggatcaataactcgcttaccgcctggctgaacggtctgtcaggaagtaacgcgctgttgctgggtgccattttcggttttatgtgttcctttgaccttggagggccagtgaacaaagccgcttatgcattctgcctgggcgcaatggcgaacggcgtttacggcccgtatgccattttcgcctccgtcaaaatggtttcggcatttaccgtaaccgcttccacgatgctcgcaccgcgcctgtttaaagagtttgaaattgagaccgggaaatccacctggctgttagggctggcaggtattaccgaaggggcgatcccgatggcgattgaagatccgctgcgggttattggttcgtttgtgctgggctctatggtaacgggcgctattgtcggtgcgatgaatatcggcctttcgacacccggtgccggcattttctcgctctttttacttcatgataatggcgcgggcggtgttatggctgcaattggctggtttggtgcggcattggtgggggctgcaatctcgactgcaattctcctgatctggcggcgtcacgcggttaagcatggcaactatctgactgatggcgtaatgccataa

SEQ ID NO: 464603 - DNA, 447 bp, Shigella boydii
atgatacccgcttttaaggttctttcatggtcacagttaactttcattgcccccgttgccagtccgttcaggtttaccgtcacgggcagaacccaaaaggacatgatcgattccgttgccgtgactgtcaccgggtgtttcagctcacttactgttacgaggcccgtaaaccgggagttaaaaaccaaatcactgaaatggcttcaacggtgccggagttcgcgatactgcccgtacgctgaaaatcggcatcaataccgtcatacggacattaaaaagctcccgccccggcggataacatctgcgccagtcgctcacgctgatgttgcccttatctgtgaacttgatgggcagtggagcttcgttggcagcaaggcgcaacaacactgtcacgaacggtgcaatagtgatccacacccaacgcctgaaatcagatccagggggtaa

SEQ ID NO: 464604 - DNA, 1179 bp, Shigella boydii
atgtgcgtcgcaacaagggagccccccggatgcgacgggcagactttgaaaatgttcgaccagcaacgtgatggcaatctatacaagatctggaaccggctatgttcgggaacatggtttccgccaccagtgctggaaaaacggatcccgaagtcgaatggcaaggaacgcattctggggatcccaacagtatccgatcgaattgctcagggagcgataaaacttttcatggaagaaaagcttgacccgattttccatgctgattcatatggttaccgaccaggcaaatcagctcatgacgctctgaaacaatgtgccatccggtgctggcgttatagctggatactggaagtggacatcagtgcgtttttcgaccatgtgaaacatgatctggtgctcaaagctctggaacaccacgggatgcctaaatgggtcatcctgtactgtcgacgctggatggaagcgccaatgcagagttgtgaaaatggagaattaataacccgaacacgaggcactccgcagggcggggtcattagtccgctacttgctaacttgttccttcactatgcatttgatttgtggatggaaagagaatatcggggggtaccgtttgagaggtacgctgacgatattgtagtacattgttcacgaatgagtgatgcaacaaggctaaagaacaggttatcggagcgcttctcggaagtcgggctggtcctgaatgcagggaaaacgaatatcgcctacattgacacgtttaaaaggagaaacgtcgcaacgagtttcacctttctcggatatgacttcaaagtgcgtacgctgaagaatttcaaaggcgaacggtaccgaaaatgcatgccgggtgcgtcaaatgcagcaatgcgcaaaataacagaaacaatcaagaagtggcgtatacatcgctcaacagctgagagtttgctggattttgcgaggcgctacaatgcgatagtgagaggctggatcgagtactacggaaagttctggtccagaaatttcaactatcgactgtggagtgcaatgcagtcacgtctgctcaagtggatgcagtctaaatacagactttcgaaccggaaggctcagcgaaagctgacgctggtaaggaaggagtatccgaagctatttgttcactggtatttactacgtgcatcaaatgagtga

SEQ ID NO: 464605 - DNA, 159 bp, Shigella boydii
atggtgtctgcggaattcccaatggtgttaattagccagacactgtctggcgaatttcaacatgttgaaaaaagaggtaaaaaagcctcatttggcgtaagttttttgcagagaacccacgcttataccttagacttaaatcctttgatagtcgcttga

SEQ ID NO: 464606 - DNA, 549 bp, Shigella boydii
atgattacctatttattgcccgtgatgattggttctacaggtggtcatctggtcggcggtaaacgcggggcggtcatgggcggaataggtactattggtgtgatcgttggcgcagagatcccgatgttccttggctcaatgatcatggggccgctcggtgggttggtcataaaatatgtcgataaggcactggaaaaacgcatacctgccggttttgagatggttatcaataacttctcattaggtatcgcggggatgctcctttgtctgctggtttttgaagtgatcggcccggcggtgttaattgccaatactttcgtcaaagagtgtatcgaggcgctggtacatgcgggttatctgcctctgctgtcagtcatcaatgaaccggcgaaagtgcttttccttaataatgcgatcagggcgtctattatccgctgggaatgcaacaggcttcggttaacggtaaatccatcttctttatggtggcctctaacccaggtccgggcctggggctgctgctggcgtttaccttgtttggtaaagggatga

SEQ ID NO: 464607 - DNA, 225 bp, Shigella boydii; identical to SEQ ID NO: 133446

SEQ ID NO: 464608 - DNA, 312 bp, Shigella boydii
atgaatacacttgaacctgctgcccagtcgaaaccgctgggcggatttaagctgtggttgtcgcagctgcaaatgaagcatgggcgcaaactggtcattgcgttgccatatatctggttgatcttgctgtttctgctgccatttctgattgtctttaaaataagcctggcggagatggcgcgcgctattccaccttataccgaactgatggagtgggctgacgggcaactgtccatcactcttaatctcggtaattttctgcaactgaccgacgatccgctctatttcgatgcttatctccagtcgctatag

SEQ ID NO: 464609 - DNA, 750 bp, Shigella boydii
atgaccgccttaaataaaaaatggctttcgggtctggttgcgggtgctctgatggccgtctctgtcggcacgctcgcggctgaacaaaaaacactccacatttataactggtctgattatatcgcccctgacacggtggccaattttgaaaaagaaaccggtattaaagtcgtctacgatgttttcgactctaacgaagtactggaaggcaaattaatggcgggtagcaccggctttgacttggtggttccatctgccagctttcttgaacgccagttgactgcgggagttttccagccgctggacaaaagcaaattgccggagtggaagaatctcgacccggagctgctgaagctggtcgccaaacacgatcccgacaataaatttgctatgccctatatgtgggcgacgaccgggattggctataacgttgataaagttaaagctgtgctgggcgaaaacgcgcccgtcgatagctgggacttgatcctcaaacctgaaaatctggaaaaactgaaaagctgcggtgtctctttcctggatgcgccagaagaagtttttgctaccgtgttgaattatctcggcaaagatcccaacagcactaaagcggatgattacaccggaccggcaaccgatctgctgttaaagctgcgcccgaacattcgttatttccattcatctcaatacattaacgacctggcaaacggcgatatttgcgtcgctatcggctgggcaggtgatgtctggtag

SEQ ID NO: 464610 - DNA, 141 bp, Shigella boydii; identical to SEQ ID NO: 464176

SEQ ID NO: 464611 - DNA, 129 bp, Shigella boydii
atgaacaccacactgacacccgcagatctcgatccccgtcggcaggccatgctgctgtactttcagggataccgcgtagcccgcattgctgaaatgctgggcgagaaagttgcaaccgtttacagctga

SEQ ID NO: 464612 - DNA, 663 bp, Shigella boydii
atgcgtcgtttgttgtctgtcgcacctgtccttctctggctggttacgcccctcgccttcgcgcaactgccgggtatcaccagccagccgctgcctggcggtggacaaagctggtcgctcccggtgcagacgctggtgttcatcacctcgttgacgtttattccggcaattttactgatgatgaccagtttcacccgcatcatcattgtttttggtttattgcgtaacgcgctgggaacgccctccgcgccacctaaccaggtattgctggggctggcactatttttgaccttttttattatgtcaccggtgatcgacaaaatttatgtcgatgcgtaccagccattcagcgaagagaaaatatcaatgcaggaggcgctggaaaaaggggcgcagccgctacgtgagtttatgctgcgtcagacccgtgaggcagatttagggttgtttgccagactagcgaataccggcccgttgcagggacctgaagccgtgccgatgcgcattttgctcccggcctacgtgaccagcgagttgatggcattggggatgatgatggtcccccccgccaccattgctctgccctttaaactgatgctgtttgtactggtggatggctggcaattgctggtcggttcgctggcgcagagcttttacagctag

SEQ ID NO: 464613 - DNA, 1128 bp, Shigella boydii; identical to SEQ ID NO: 462307

SEQ ID NO: 464614 - DNA, 621 bp, Shigella boydii
atggaggtgtctgccgtcaccgtgcccgcgaatgcggaatgcaccatccggaccattaaatcttacgacagcccgttttctgccgcgtccggcaaccggaaaccggtggtgaaaatcgcatcttctgccggcgctgcggcacagtcaacaaccgtttttcataaggaaaagaccataatgaatattggcgaacagattaaaagttttgaaaacaagcgtgtagcgctggcagcctcccttgaggaggtcatgaccaaagccgcagaggaagggcgcacgctggatgtggaggaggaagagcattacgacaacaccgcagcggaaatccgtcaggtggatgcgcacctgaagcgcctgcgtgaactggaagccggtaaggccgccacggcgcagccggtgaaacaggccggtaacgggaatgtggccgcggtggcttctgcgccggtgatccgtgtggagcagaaactggataaggggattggcttcgcccgctttgccaaatcgctggctgcggctaaaggcgtccgatctgaagccctggaagtggcccgtcgtcagtatccggatgacagtcgtctgcatcatgtcctgaaatcggcagtgggcaggcagcctgtctga

SEQ ID NO: 464615 - DNA, 1356 bp, Shigella boydii
atggctggctaccctaaagaaacgtcacatcctttcgttgtggaacatggttttgctggacatagccacggattaacaataacagatgttttctaccgcctttatgaaataaccaataacattgaatatctctcatattgcttgtggctgtatgaagattattccgcaggatgcgtgtcggagcaagatctgcaatataaaaatgtcataaaccctggttaccttcttaaaggtcatggcgtacatacatatgagcatattagggcattagccatcgcagcgagccaacggccgcagtatcaaactgcattagatatttttttatcccagttgaaatattatcttacaccatctggcgctcccattggtgatgagtggattacaggacgcacagctaatgccacttatacaggctatgaatattgttctgttcatgaactatttagcacttatgttatgttaataaaactgaccactaatattggtctggccgatgatgctgagtggctattctataatgccagttttggcatgcagcatcccatacatcacgcgataatgtactgtaagactgataattgttatgaagcaaatgaaagaaaacatccggacagtaatcagtttaataccagatataaatactcccctactcatgaggaggctgctgtctgctgcgtaccgaatacagcaagaaccataccggcttttgtcgaaaatatgtttcaagaaaataacaatggttttactgcattattttatggtccgtgtgagttttatggcacatataataatgttgcaattaatattacacaattaactgaataccctcatgatttaagcgtaaaatgtctcattgagcctgagtcatctgttcgttttgctttcagtttccgttaccccgactgggcaaaaatgatgattattaatggtgttacttttactaaaaatgatactcaaaactcacttattattttagatagaacatggcaacatcatgatgtgattgacattaaatttatagctgatatacagtttaatactgacttatgtggtgacacttatatttccagaggtcccgttttatatgcaattgagcttgagagcgatattttaatcaaaaaaactctgctgaactggaaatattttgactcaggatacataccctgtagtagagctgatgaatctatccagttctcttataccgatatggaatctttttcatattcaacctcaccagagggcaagcaatacattgaagggtgtttttatttaaacaagactaaaatagtcagaaaacttataccatttggtcaaactattcttcgcaaagtaactttctccaatatagagagttaa

SEQ ID NO: 464616 - DNA, 888 bp, Shigella boydii
gtgcttatcttattaggttacctggttgttctcggtacagttttcggcggttatttgatgaccggtggaagccttggagcactctatcaacccgctgaactggtgattattgccggtgcagggattgggtcgtttatcgtcggcaataatggcaaagcgattaaaggcacgctgaaagcgctgccgttgctgtttcgtcgctccaaatacaccaaagcaatgtatatggatctgctggctctgctttatcggttgatggcgaaatcgcggcagatggggatgttttcgctggaacgtgatattgaaaatccccgtgagagcgagatcttcgccagctacccacgcatcctcgcggatagcgtcatgcttgattttatcgtcgattatctgcgcctgattatcagcggtcacatgaacaccttcgaaatcgaagccctgatggatgaagagattgagacgcacgaaagcgaggcagaagtcccggcgaacagtctggcgctggtcggggactcacttccggcgtttggtattgttgcggctgtaatgggggtcgttcacgcgttaggttcagccgatcgtcctgccgccgagctgggggcgcttatcgcacatgcgatggtggggactttcctcggtattttattggcttacggatttatttccccactagcgagtgttttacgtcagaaaagcgccgaaaccagcaaaatgatgcagtgcgtcaaagtcactctgctttctaatctgaacggttacgcaccgcctatcgccgttgagtttggtcgcaaaacgctctattccagcgaacgtccgtcgtttattgaactggaagagcatgtgcgtgcggtgaaaaatccgcaacaacagacgacaaccgaggaagcatga

SEQ ID NO: 464617 - DNA, 927 bp, Shigella boydii
atgaagaatcaaacgcatccgattattgtcgtcaaacgacgcaaagccaaaagccacggggcagcacatggatcgtggaagattgcttatgccgattttatgactgcgatgatggccttttttctggtgatgtggctgatctccatctccagcccaaaagagctgattcagattgcggagtacttccggactccactggcgactgcggttacgggcggcgatcgcatttctaatagtgaaagcccaattcccggcggtggtgatgattacacccaaagccagggggaagtgaataagcagccgaacatcgaagagctgaaaaaacgcatggagcaaagtcgattgcggaaattgcggggtgatctcgaccagttgatagagtccgatccgaaactgcgggcgttacgtccccatctcaaaatcgatctggtccaagaaggtctacgtattcagatcatcgatagccagaatcgcccgatgtttagaaccggcagtgccgatgtcgaaccctatatgcgcgacattctgcgtgccatcgcgcctgtactgaacggtattcccaaccgtattagcctttcaggtcataccgatgatttcccctacgccagtggtgagaaaggttacagcaactgggagctttctgccgatcgggccaatgcatcccgccgcgaactgatggtcggagggttggatagcggcaaagtgttacgtgtcgtcggcatggcggcaacgatgcgcttaagcgatcgcggacctgatgatgccgtcaaccgtcgcatcagcctgctggtactgaacaaacaagccgaacaggccattttgcatgaaaacgccgaaagccagaatgagccagtaagcgccctggaaaaacctgaggttgcaccacaggtcagtgttcccacaatgccatcagccgaaccgaggtga

SEQ ID NO: 464618 - DNA, 1416 bp, Shigella boydii
atgattaaccgtatccgcgtagtcacgctgttggtaatggtgttgggggtatttgcactgttacagcttatttccggcagtctgtttttttcttcccttcaccatagccagaagagctttgtggtttccaatcaattgcgggaacagcagggcgagctgacgtcaacctgggatttaatgctgcaaacgcgcattaacctgagtcgttcagcggtgcggatgatgatggattcctccaatcaacaaagtaacgccaaagttgaattgctcgatagcgccaggaaaacattggcgcaggcagcgacgcattataaaaaattcaaaagcatggcaccgttacctgaaatggtcgctaccagtcgtaatattgatgaaaaatataaaaactataaaaactattacacagcgttaactgaactgattgattatctagattatggcaatactggagcttatttcgctcagccaacccagggaatgcaaaacattgacgggcgcagtgaaatgggcgacctggcgcagagcgtttcacatatgcaacgctctttgactgacaccgtcactcatgtccgcgaaggttcagatgccatctatgccggtacccgtgaaattgcggcgggcaacaccgatctttcctcccgtactgaacagcaggcatccgcgctggaagaaactgccgccagcatggagcagctcaccgcgacagtgaagcaaaacgccgataacgcccgccaggcctcgcaactggcgcaaagtgcctccgacaccgcccagcacggcggcaaagtggtggatggcgtagtgaaaacgatgcatgagatcgccgatagttcgaagaaaattgccgacattatcagcgttatcgacggtattgccttccagactaatatcctcgcgctgaatgccgcggttgaagccgcgcgtgcggatgaacagggccgtggttttgccgtggtggcgggtgaagtgcgtaatcttgccagtcgcagcgtccaggcggcaaaagagatcaaagccctcattgaagactccgtcgcacgcgttgataccggttcggtgctggtcgaaagcgccggggaaacaatgaacaatatcgtcaatgctgtcactcgcgtgactgacattatgggcgagattgcatcggcatcggatgaacagagccgtggcatcgttcaagtcgcattggcggtttcggaaatggatcgcgtcacgcaacagaacgcatcgctggtgcaggaatcagctgccgccgccgctgcgctggaagaacaggcgagtcgtttaacgcaagcggtttccgcgttccgtctggcagccagcccactcaccaataaaccgcaaacaccatcccgtcctgccagtgagcaaccaccggcacagccacgactgcgaattgctgaacaagatccaaactag

SEQ ID NO: 464619 - DNA, 723 bp, Shigella boydii
atgtttgatcgtattcgaatttcgaccacgctgtttttaattttgattctctgcgggatcttgcagattggcagtaacggcatgtctttttgggcatttcgcgacgatttgcaacgactgaatcaggtcgagcagagcaatcagcaacgtgcggcattagcgcaaactcgggcgataatgttacaggccagtaccgcgctgaacaaagcgggcactctgacggcacttagctatccggcggatgacattaaaacgttgatgacgacggcgcgcgccagtctgacgcaatccaccacgctgtttaaaagttttatggcgatgactgcgggcaacgagcacgtcagggcattgcaaaaagagacggagaaaagttttgcccgctggcacaacgatctcgaacatcaggcgacctggcttgaaagtaatcaactttcggatttcctcactgcgccggtgcagggatcacagaatgcgtttgacgttaactttgaggcctggcagctggagatcaaccatgtgctggaagccgccagtgcgcaaagtcagcgtaactatcagatttcggcgctggtgtttatcagcatgattattgttgcggcaatctacatcagcagtgcgctgtggtggacgcgcaagatgattgttcaaccactggccattattggtagccatttttgccagcctgaagaccatgcagcaggctttgcgtgggacggtgagtga

SEQ ID NO: 464620 - DNA, 840 bp, Shigella boydii
atgcagcaggctttgcgtgggacggtgagtgatgtgcgtaagggaagccatgagatgcacattgggatcgcggagattgtcgcaggcaataacgatctctcaagtcgtaccgaacagcaggcggcatcgctggcacaaacggccgccagtatggagcaattaaccgccacggtagggcaaaacgccgataacgcacgacaggcgtcggaactggcaaaaaatgccgcgacaacggcgcaggcgggcggtgttcaggtcagtaccatgactcacaccatgcaggagatcgccaccagctcgcaaaaaattggcgacattatcagcgttatcgacggaattgctttccagaccaatattctggccctgaatgcggcagtggaagcggctcgcgccggagagcaggggcgtggttttgcggtagtggcaggtgaagtgcgcaatcttgccagccgtagcgcgcaggcagcaaaagagatcaaagggctgatcgaagagtcagtcaatcgtgtccagcagggttcgaaactggtgaataacgccgccgcgaccatgaccgatattgtcagttcgctgacccgcgtgaacgacattatgggagaaattgcttcggcgtcggaagaacaacggcgggggattgagcaggttgcacaggctgtcagccagatggatcaggtgactcagcagaacgcctcgctggtagaagaagcagcggtggcaacggaacaactggcgaatcaggccgaccatctttcgtcgcgtgtggcggtatttacccttgaagaacatgaagtagcacgacatgagtcggcgcagttacaaattgcgccagtggtatcctga

SEQ ID NO: 464621 - DNA, 195 bp, Shigella boydii
atgagcaaaatcagggtgttatctgtcgatgattcggcactgatgcgccagatcatgacagaaatcatcaacagccatagcgacatggaaatggtggcgaccgcgcctgatccgctggtcgcgcgtgacttgattaagaaattcatagactggccccctgaatctccagacaaccagtatcacttaaataagtga

SEQ ID NO: 464622 - DNA, 918 bp, Shigella boydii
gtgctgccgcgccgtggggctgtcattacgctggcgctgggctggaagggacagccgcttttcccgaaaggggcattcacggtggacgagattgaacacactggcgcaccggatcgcctgactatccgggcgcgaagtgctgattttcgtgaaacgctgaatacccgccgtgaaaagtcgtggcacaagaccaccgttggggaagtggtgaaggaaatagctgcgcggcacaaactgaagatggcattgggtgaagacttgtcggataaactcgtggagcatatagaccagactaatgagagtgacggcagttttttgatgcggctggcgcgccagtacggtgctattgcgtcggtgaaaaatggcaatctgttattcatccggcaggggcagggtaaaagcgccagcggtaaaccactaccggtgatcactatcacacgcaaggacggcgacagtcaccgctttaccctggcagatcgcggagcttacacgggcgtcattgccagctggttgcatacccgcgaacccgcgaagaaagaaagcaccacggtgaagcgtaagcgcaggactaagaagcagaagaaagagccggaagcgaagcagggcgattacctggtgggtacggatgaaaacgtgctggtacttaatcgcacttatgccaaccggagcaacgccgaacgggcagcgaaaatgcagtgggaacgcctgcaacgcggcgttgcatcattctcgctacaactggcggaagggcgggcagatctctacacagaaatgcctgtgaaggtcagtggctttaaacagccgatagatgatgtggaatggaccattacgactctgacgcatactgtcagcccggataacggttttacgaccagtctggagcttgaagtgaggattgatgatttcgaaatggaatga

SEQ ID NO: 464623 - DNA, 336 bp, Shigella boydii
atggtaaatgaattttatggggcagagtttttgcggggaagtattttgttggtaaaaatattatcaacttcatctgagcgagaattattctactatttcccgagctgcattcattttttgtattttttatttttagaaaataacagttctcaaagcttaattacctcactattaattgtatttcaaactaacaatcgcactccattttctctttttaaaaaaataaacattgttaaaataaatatttatttcgttatcttaaatgctatttctacatcactcgtccttataatcaaattattcttattcatagctatttttgcaggtttaaaatag

SEQ ID NO: 464624 - DNA, 345 bp, Shigella boydii
atgccagttttgcagtggggaatgttatgtgtgctatcacttctcctttctattggtttcctcgcggtacatcttccggcggcgctattacttgggccgatgatcgccgggatcatcttcagtatgcgcggaattactctgcaacttccccgctccgcttttctcgccgcgcaggccattcttggctgcatgattgcgcaaaacctcactggttcgattctcaccacgctggccgccaactggccgatcgtgcttgctattttactggtgacgctgctttccagcgccatcgtgggttggttattggtgcgctatagctcactgcctggaaataccggtgcctag

SEQ ID NO: 464625 - DNA, 1311 bp, Shigella boydii
gtgccacttcacgaatggctggagctggaaggcgcgaaagatcttgatgacgcactctctctgctgaccattctttaccaccacgtaccgtcggtcacatcgatgccggtctacctggggcaactggatgcgttgttgcaaccgtatgttagacttctaacacaagacgagatcgatgttcgaataaaacgtttctggcgttacctcgacagaaccctgccaggcgcctttatgcacgccaatatcggcccgtctgattcgcccattacccgcgcgatcttacgtgcagacgcagagttgaagcaggtttcaccgaacctgacctttatctacgatcctgaaatcacccctgatgacctgctgctggaagtggcgaagaacatctgtgaatgtagcaaaccgcacatcgccaacggtccggtgcatgataaaattttcacaaaagggggctacgggattgtgagctgttacaactcactgccgctggcgggtggtggcagcacgctggtacgccttaacctgaaagccattgccgagcgcagcgaatcgctggatgacttctttacgcgcactctaccgcactactgcccgcagcagatcgccatcatcgatgcgcggtgtgaattcctctatcaacaatcacacttctttgagaatagcttcctggtgaaagaagggctgattaaccctgaacgttttgtgccaatgtttggcatgtatgggctggcggaagcggttaacttgctgtgtgagaaagaagggattgccgcgcgctacggtaaagaagccgccgcaaatgaagtgggttatcgcatcagcgcgcaactggcggagtttgtcgccaatacccccgtgaaatatggctggcaaaaacgcgccatgttacacgcacagtcggggatcagttccgatatcggcaccacgccgggcgcgcgtttgccgtatggcgatgagccagatccgatcatccatctgcaaactgtcgccccgcatcatgcttattattattccggcatcagcgacattctgacgctcgacgaaaccatcaaacgtaatccgcaggcgctggtacagctttgcctcggtgcctttaaagccggaatgcgtgaatttaccgccaatgtcagcggtaacgatctggttcgcgttaccggttatatggtgcgtttgccggatttagaaaaatatcgcgccgaaggttcacgcaccaacaccacctggctgggcgaagaagccacacgcaacactcgtattctggaacgccagccgcgcgtgataagccatgaacagcagatgcgctttagtcagtaa

SEQ ID NO: 464626 - DNA, 1308 bp, Shigella boydii
atgaaacgtgtttctcaaatgaccgcgctggcaatggctttagggctggcttgcgcttcttcgtgggccgctgaactggcgaagcctcttacacttgaccagcttcaacaacaaaatggcaaagcgatagatactcgccccagcgcgttttataacggctggccacaaaccttaaatggcccttctggtcatgaacctgccgccttaaacctctctgccagctggctcgacaaaatgagcaccgaacagctcaacgcgtggatcaagcaacataacctgaaagccgatgccccggtggcgctgtacggtaatgacaaagatgtcgacgccgtcaaaacgcgactgcaaaaagcaggttttacgcatatctccattctgagtgacgcgctaagcgaaccttcccgtctacaaaaactgccgcactttgagcagctggtttatccgcaatggctgcacgacctgcaacaaggtaaagaggttacggcgaaacctgccggtgactggaaagtcattgaagcggcctggggcgctcctaagctttaccttatcagccatattcccggtgctgactacatcgataccaacgaagtggaaagcgaaccgctgtggaacaaagtttctgatgaacaactaaaagcgatgctggcaaaacacggcattcgccatgacaccacggtcattctgtacgggcgtgacgtatacgctggagcgcgtgtggcgcaaattatgctctacgcaggcgtgaaagatgtgcgtctgctggatggcggctggcaaacctggtccgacgcgggactgcctgttgagcgaggaacgccaccgaaagtgaaagcggaaccggatttcggcgtgaagatcccggcacaaccgcagttgatgctcgatatggaacaggcccgtggactgctgcatcgccaggatgcatcgctggtgagcattcgttcgtggccagaatttatcggtacgaccagcggttacagctatattaaaccaaaaggtgaaatagccggagcacgttggggacacgctggtagcgactcgacgcatatggaagattttcataacccggatggcaccatgcgcagcgccgatgatattaccgctatgtggaaagcgtggaatatcaaaccagagcagcaagtttcattctactgcggcaccggctggcgcgcgtccgaaacctttatgtacgcacgcgccatgggttggaagaatgtttccgtgtatgacggcggctggtacgaatggagcagcgatccaaaaaatccggtagcaaccggtgaacgcggcccggacagtagcaaataa

SEQ ID NO: 464627 - DNA, 276 bp, Shigella boydii
atgaaaacccattacgctataaacctgaagattgttcgtctcgcggatgccgcagacgcggtgaagcgcattcagaccgaagctgctgccggtcgtaaaacgggcggctcggtggatctgctctgggtgaacggcgaaaacttccgcaccttaaaagaggccaatttattacaaacgggctgggcggagactctgcccaactggcgctatgtcgacacacagctgccggtgcgggaagatttttcagtgccgacacaaggtgcggaatcgccctag

SEQ ID NO: 464628 - DNA, 204 bp, Shigella boydii
atgaaactggccctgacgctggaagccgacagcgttaacgtgcaggcgctgaacatggggcgcattgtcgttgacgtcgatggtgttaatctcgctgaactgattaacaaggtcgctgaaaacggtgattcactccgcgtggtggatgaacgtgactctaccgaaacaccggcaacttatgccagccctcaccagttgctgtaa

SEQ ID NO: 464629 - DNA, 240 bp, Shigella boydii
atgatttcagcgaaacaaattaataacctgatatcgcaagagaagtttgatgttgatgcggcaatgaagaaagtgtctgaactggaaacgctggtggcgcaggccaaagaagcggataaaggcggcatgaatttctcgtttattaattcggcaggccagtatcaactcgaggctaaaaaatacgttcgccgcatcagagataaagtcccgtactctgaggtaatgactccaacttactga

SEQ ID NO: 464630 - DNA, 225 bp, Shigella boydii; identical to SEQ ID NO: 462228

SEQ ID NO: 464631 - DNA, 1020 bp, Shigella boydii
atgagcgccgcgcttcaatacttcgaagaaaatttaccccaccgtccctatcacacggatgatctcgctttcggccttcgtatctccggcaaagggcgcgcgcttcttgcacggtatatccagcagaaccagcctcatgcacagttctggctggtttttgacgttgaccgcgagggggctgctattgactggagcgaccggaacgctcccgcgccgaacatcaccgttaaaaatcctgtgaacggacacgctcacctgctctacgcactcaacatcgctgtgagaaccgcgcctgatgcctcggttaaggcgctgaaatatgccgcagcggttgaacgttcgctgtgtgagaaactttgtgcggatgtgaactacagcggcctgatttgcaaaaatccgttccacctggaatggctggtgatggagtggcgcgaggaagcctataccctcgatgaactggctgattatctcgatttgagcgcctcagagcgtcgtagcatcgataaacattacgggatggggcgaaactgccacctgttcgaaatgacgcgcaaatgggcttacagggcgattcgtcagggctggccagcgttctcacagtggcttgaagcggtgatccagcgtgtcgaaatgtacaatgcatcgcttcccgttccgctttcactggctgaatgtcgggctattggcaagagcattgcgaaatacacgcacaggaacttcacgccggaaactttcgcacagtatgtggctgatacgcacacgccagaaattcaggcagcacgcggtcgcaagggcgggaaggccaattcgtcagaaaatcagtcggacaaagggaaaaaaagcgccgctgttcggtggacagctaacgacgacaaacgtcgtagggcgcttgatatgtatatcttgggagcgtcaacggaagatattgcagtggcggttggtgttagcagccggactattcgacgctggatggataattctggagaatggctaactaagaaacaaataattaaattttag

SEQ ID NO: 464632 - DNA, 1119 bp, Shigella boydii
atgaatcttaacttcaaatatgcttttccattattgtcgtcattttttatttcaggatgtgactctgacggaataagcaaagtaaagtctttcgtatattacgacattgacgactcaatgactgttggcaaagccttcgacacaaggagtgattgcatcaatggcacatggagtgaaaaagaggatgatcgaagcagaatcatcgttacatatacctgtgatattagtgaaagtggcctaaaaataataaattcagccattatgcaagaacctgaaaataatgctgaacattctataacacaaaataacaacagcataaaatcaaccaatgaatcactagaggaatacaaacagaaaacgcctcttgttgaaaaaacaaaagaggtcgtaatagatcacataagaaagctaaacagtgcctttaatgaagatccaatcatatatagcaaactcacaattagaccttatctagacagcatgctatatctaagggattataatgacaatgcactaaatgaaatttgtggtggacaccaatacattcaatatgccgacagttacagctggcgtgatgtaagtgaagattatgcaaaagaatcatgcaaaaagaacatatatcaagtatatcaatcatttaagaaaaatgcatcaccattaataactaaaaacttccccggtttctacgaacaggttcccccctgtgagaacgcagatgaatgcataaaaaatacaaatagttactttgatgataactttctcaacatctacaaaagaagccaagatagagcacctcaaacaatatctgatttaaaaaagcacaatatagaaacaagtgaaaaactaaatgaatgcagaaaaaaattaaatgtctcagatgtcaaactaacctactactggtttgtaacagacaccggaggagttgattatttagatggggcgttgacatataactttcagggaaagaatagagtcgaaagttttcacaaacaactattgcaatatgcatacattaactacaacgaaaatcaaatacctcgagactttgtaacatcaataaaaaatagcatttattataaggggttctacacctataaaatcgaagattgcaccaagttttaa

SEQ ID NO: 464633 - DNA, 789 bp, Shigella boydii
atgctgagcgggaactcaagaccgaaggcagttgagcctgttcgttcagcccgttcaccggagttattgcttcagtaccgcaaggttatgaaaacggtcattcagggagaagcaaggcttgctcgtttaggggatgccaatcccaatgcgctcaaagaacataagctgcttcagaatgcgaaagcaaaaaaagactctctttccgaatggagcaggcgaatatatgaaggggcacggtatttagacaaattggggcgtaatgtcgtttccgcacaaagggagctgcgggagctacaggaacaacgcaatgctttgaatgggattcgtggcttgtttcggggggctgacaaaagggagattgatgcacgtattctggagcaaaaaagtgtgctggaaaccgctgaacatgaaaggaatgaattcaggaacaagctacagcaagccggatccgagtgggacaaagaaaacgctgcttttaagcgtaccgagggatataagtacgttggggagctggacaggtacagagaacgtgagattctggctgcggcatctttagagaataccaggcaaaaggttgccgaagaagtatccgttgcccgtagccagatgttatctctggagccagaactcagtatgtctggagatgaaaaagctcaaatgcgacatgagttactggcagaaatggcgcaggaacggcagcaacaggaggaaaaagcactgcgtatacagcgatcttgggccagagatgcatcccgtagtaacgaacgtgatcaagatatggaacgttga

SEQ ID NO: 464634 - DNA, 744 bp, Shigella boydii
atggcaagctaccattgcaccgtcaaatctggagcaaaaggcagtgccttaaaacatgctgattacatttccagatccggcgaatataagagctacaaatcgcgggaggatatggaattttcgtcatccggtaacatgccgtcatgggcgaagaaaaatcccgcagagctatggaaatccgcagatgaatttgaacgaaaaaacgggactgcataccgtgaaattgagatcgcgttaccgcgtgaactgacacgtgaacaacggatagaacttgttgaagatttcgtgcaaaaggaacttggcgatcgccatgcctaccagtacgcgatccacaatccaccaagtgcaatcgacggaaaggaacagccacacgcgcatatcatgttttgcgagcggattaatgatggtattgaacgcgatccgcagcaattttttaaacgtgccaacagcaaatcaccagaacggggaggcgcaaaaaaagcgagtattccccagacagccggagagcgaaaagccgcccttgttgcgctgcgttcccgctgggcagatgtgcagaatgagcaccttgcgcgatacggtcacgagtcgcgcgtagatcatcgttctctgaaagaacagggtatcaatcgcacgccggaagttcatcttggccccgttcaggccgccagtctcaatggtgagcagattgctgcaatccaggagcggaggaatgctgagcgggaactcaagaccgaaggcagttga

SEQ ID NO: 464635 - DNA, 1206 bp, Shigella boydii
atgggttcgtcgttttatcgttcatttgaagaacgacacagaggttcggttgaagaaatcaagcgccgcttgagtttttatttaccttttcttgcaggtctgaaggacatttatcctgatggcgtgattgcggatattggttgcggacgtggcgaatggttggagatcctgactgaaaatggcattgcgaacatcggcgtcgatctcgatgatggcatgctggcgcgcgccagggaggccggactgaatgtgcagaaaatggattgtctgcagtttctgcaaagtcaggcggatcagagcctgatagcgttgaccggttttcatattgctgagcatttgccttttgaggtcctgcagcagctcgtcatgcataccctacgggtgctgaaaccaggtggtttgctgatcctcgaaacgccgaacccggagaatgttagcgtcggcacctgttcattttatatggatccaacgcataatcatcctctgccaccgccactgcttgagtttttacctattcattatggttttaacagagcaattaccgttcgtctgcaggaaaaagaggttcttcaatctccggatgcagccgttaatttggtcgatgtactcaaaggggtgagccccgactacagcatcattgctcagaaagcagcgccaacagatattcttgaacgctttgacaccctgtttacccagcagtatggtctgacgctggatgctctgagcaaccgttacgatgcgattttgcgccaacagttttcgtccgttgtctcacggctggagacgttgaaccaaacctatatgcaacagataagccaaatgtcagagactattcagactttgcaaggtgaggttgacgatctgagtcatgtcatcgatcagaaccatcagcttcatcagcaaatggcggatttacataacagtcgttcatggcgtattactcaaccactacgctggttgtctttgcaacgtcaattattacgtcaggaaggggctaaagtgcgagcccgtagggctgcgaaaaaaatattgcgcaaagggatggcgctctcgctggtctttttccatcgttaccctaagtctaaggtttatctgtttaaggttctgagaaaaactggctgctatacattgctacaacgtttgttccaacgcgtaatgctggtgctggatttgcccctatatttccagacatctgttatcacttaa

SEQ ID NO: 464636 - DNA, 1215 bp, Shigella boydii
atgagttatatcagagtaaataatgtcggtaaggcgtatcgccagtatcactcaaagaccgggagactgatcgaatggttatcccctctgaataccaaacgccataacttgaaatggatcctccgcgagattaatttcgaagtcgctccgggcgaggctgtcggtattatcggtatcaacggtgcaggcaagagtaccctgcttaaactcataaccgggacgtccaggccgacgactggagaaattgaaatctccggacgtgtcgctgcattactcgaattggggatggggtttcattctgatttcactggccggcagaatgtttatatgtctgggcaactgttggggttatcgtcagagaaaataactgaactgatgccgcaaattgaagagtttgctgagattggggactatatcgatcagcctgtgcgcgtctactccagtgggatgcaagttcgattagcttttagtgtagcgacggctatccgtcctgatgtgctaattatcgatgaggcattatctgttggggatgcatatttccagcataaaagctttgagcgtattcgaaaatttcgtcaggaagggaccacgctgttgctggtatcccatgataaacaagcgatccaaagcatttgcgaccgggccattttattgaataaaggccaaattgaaatggaaggtgaacctgaagcagtgatggattattacaatgcgcttctggccgataaacaaaatcagtccattaaacaagttgagcataatggtaaaacgcaaactgtttcaggcactggtgaggtgactatctctgaggttcatcttctcgatgaacagggcaatgtgactgaatttgtttcggtagggcatcgtgtcagcttgcaggtcaacgttgaggtcaaggacgatattcctgagcttgttgtcggatatatgattaaggatcgacttggacagccgattttcgggaccaatacgtaccatctcaatcagacactcacctccctgaaaaaaggagaaaagcgttcgttcttattttctttcgatgcgagattgggggttggctcctattctgtcgctgtcgcgttgcatacttccagtacgcacctcggcaaaaactatgaatggcgcgatctggccgtggtattcaacgtcgttaacacggaacaacaagagtttgtcggcgtgtcctggttgccgcctgaactggagatttcttaa

SEQ ID NO: 464637 - DNA, 795 bp, Shigella boydii
gtgagagatttactaacgacgatttatcgttatcggggatttatctggagcagtgttaaacgtgattttcaggcgcgctatcaaactagtatgctgggcgcactatggctcgttttacaaccgctctctatgattctggtctataccctggttttttccgaggtgatgaaggcaagaatgcccgataataccgggtcgtttgcctatagtatttatctctgttccggggtactgacctggggattatttactgagatgctggataaaggtcagagcgtatttattaacaatgctaatctgatcaagaaactcagttttccgaaaatctgtctgccgatcatcgtgacgttatcggcggtgctaaatttcgcgattattttcagtctgtttctaatttttatcattgtcaccggtaacttccccggctggctctttctctcggtgataccggtcctgcttttgcaaatcctgtttgccggtgggctggggatgatccttggtgtcatgaacgtctttttcagggatgtggggcaactggttggcgttgcgctgcaattctggttttggttcacacccattgtttatgtactgaattcattacctgcatgggcaaaaaatctgatgatgtataacccgatgactcggatcatgcaatcttatcagtccatcttcgcctatcatctggcccccaactggtattcgctatggccagtattggctctcgccattattttctgtgtcatcggtttcaggatgttccgcaagcatgcggcggatatggtggatgaattataa

SEQ ID NO: 464638 - DNA, 1377 bp, Shigella boydii
atgacacagttaacttgttttaaggcttatgacatccgtggtgaactgggtgaggaactgaacgaggacatcgcctaccgtatcggtcgcgcctacggcgaatttctgaaacccgggaagatagtggtggggggcgatgtgcgcctcacaagcgagtcgctgaagctggcgctggcccgcgggttaatggacgccggtaccgacgtgctggacatcggcctgagcggtaccgaagagatttactttgccaccttccaccttggggtagatggtggcatcgaggtgaccgcgagccacaatcctatgaactacaacggcatgaagctggtgcgcgagaatgcgaagcccatcagcggcgacaccggcctgcgggatatccagcgcctggcggaggaaaaccagttcccgccagtggacccggcgcgtcgcgggaccctgagcaagatatcggtactgaaggagtatgttgaccatctgatgagctacgtggacttctcgaacttcacccgtccactgaagttggtggtgaactccggaaacggggctgcggggcacgtgattgatgaggtggagaaacgcttcgcggcggctggggtgccggtaacctttatcaaggtgcatcaccagccggatggccatttccctaacggtatcccgaatccgctgctgccggagtgccgccaggataccgccgacgcggtgcgcgagcatcaggccgacatggggattgcctttgacggcgacttcgatcgctgcttcctgttcgatgacgaagcttcgtttatcgaggggtattacattgtcggcctgctggctgaggcgttcctgcagaagcagccgggagcgaaaatcattcacgacccgcgcttgacgtggaacacggtagacatcgtgacccgcaacggcggccagccggtgatgtcgaagacggggcatgcgttcatcaaggagcggatgcgtcaggaagacgctatctacggcggggagatgagtgcgcaccattacttccgcgatttcgcctactgcgatagcgggatgatcccgtggctgctggtggcggagctgctgtgtctgaagaacagctcgctgaaatcgctggtggcggaccgccagagggcgttccctgcgtcgggagagatcaaccgcaagctaaggaatgcggctgaggcgatcgcccgcatccgggcgcagtatgagccggcggctgcacacatcgacacaacggacgggatcagtattgaataccctgaatggcgctttaacctgcgcacgtctaacaccgagccggtggtgcgtctgaacgttgagtccagagctgatgtggcgcttatgaatgaaaaaacgaccgagctgttacacctgttaagcggggaataa

SEQ ID NO: 464639 - DNA, 1416 bp, Shigella boydii
atgttacttcctgtaattatggctggtggtaccggcagtcgtctctggccgatgtcacgcgagctttatccgaaacagttcctccgcctgttcgggcagaactccatgctgcaggaaaccatcacccgactctcgggtcttgaaatccatgaaccgatggtcatctgtaacgaagagcatcgcttcctggtggctgaacagctgcgccagctaaataagctgtcgaataacattatactggagccggtcgggcgcaacaccgcgccggccatcgccctggcggcccttcaggccacccgctacggtgacgacccgctgatgctggtccttgccgccgaccatatcatcaataaccagtcggccttccacgacgctatccgggttgccgagcagtatgctgataaaggtcatctggtcaccttcggtatcgtgccgaatgccccggaaactggctacggttacattcagcgcggcgtggcgctcaccgacagtgcccattccgcgtaccaggtggcccgctttgtggagaagcctgatcgcgagcgcgccgaggcttacctctcctccggggagtactactggaacagcggcatgtttatgttccgcgccaagaaatacctcatcgagctggccaaataccgtccggatatcctggaaacctgccaggctgcggtgaatgccgccgataatggcagcgatttcatcaatatcccacatgatattttctgcgagtgcccggatgagtccgtggactacgccgttatggagaaaaccgctgatgcggtggtggtcggtctcgatgctgactggagcgacgttggctcctggtccgcactatgggaggtcagcccgaaagacgagcagggcaacgtccttagtggcgacgcgtgggtacacaacagcgaaaactgctacatcaacagcgacgagaagctagtggcggccattggcgtagagaatctggtgattgtcagcactaaggacgccgtgctggtgatgaatcgcgagcgttcccaggacgtgaagaaggcggtcgagttcctcaagcagaaccagcgcagcgagtacaagcgccaccgtgagatttaccgcccctggggccgttgcgacgtagtggtccagaccccgcgcttcaacgtcaaccgcatcacggtgaaaccaggcggtgccttctcgatgcagatgcaccaccatcgcgccgagcattgggttattctcgccggcaccggtcaggtgacggtcaacggtaagcagttcctgctgtccgagaaccagtccacctttattccgattggcgccgagcactgcctggaaaaccctggctgtattccgctggaagtgctggagatccagtcgggggcgtaccttggcgaggacgacattattcgtattaaagaccagtatggtcgttgctaa

SEQ ID NO: 464640 - DNA, 543 bp, Shigella boydii
atgattttggtgacggggggcgcacggagcgggaagagtcgccatgcagaggcgcttattggggactcttcacaggttctgtatatcgccacctcacaaatccttgatgatgagatggctgcacggatagaacatcatcggcaaggccgcccggcgcactggcacacagtggagcgctggcaacatcttgatgaattaattcatgcagacattaacccgcatgaggctgtattgctggaatgcgttaccaccatggtgactaatctgttgtttgattatggcggcgataaagaccctgatgaatgggattatcaggcgatggaacaggcgattaatgctgagattcagtcgttgattgctgcctgccaacgttgccccgcaaaggttgtattagtgactaacgaagtgggaatggggattgtgccggagagtcgtctggcacgacattttcgtgatattgccgggcgggtaaatcagcagctggccgctgcggcaaatgaagtatggctggtggtttcgggtattggagtaaaaatcaaatga

SEQ ID NO: 464641 - DNA, 327 bp, Shigella boydii
atgagcggtaagcgttatcccgaagagtttaaaactgaagcagtcaaacaggttgttgatcgcggttattctgttgccagcgttgcaacacgtctcgatatcaccacccacagcctttatgcctggataaagaagtacggtccggattcttccactaataaagaacagtcagatgctcaggccgagatccgccgtctccagaaagagctgaaacgggttaccgacgaacgggacatattaaaaaaagccgctgtaaattcaattggtcaacgcaacagttatgtgaaaacatggggttgcggaggttttttgaatgagacgaactga

SEQ ID NO: 464642 - DNA, 810 bp, Shigella boydii
atgatacatttggtaaataaattgataaattttggtttcactcgtaccgatgcacaggtttacatcagtcttttgaaaaacggtcgtagcagtggttacaagattgcaaaggaaatttcactttcacgttcgtctgtatactcatcaattgataatctttacaagaacggttatatctttcttgtcgatggtgaaaccaaagaatatgaagcaaaatctcctgaactcatactttcgcaaattgaaaaaagcactattgacaacataaaaatcttgaaaaaagaattatcacagatgatgtttcagaatgaacgtgaattcatttataatgtctctggttttgataatttacatcagaaagctaaagagatgctctcttctgcagagtatgaaatttacctcaacacggattttgatttacattttttgaaaaatgaaatttgtgaggctctaaatcgacatgttcgagttattgttttttcatttaataaacttattactcctgacccacgcgtagaactatattaccgttttaaccatgaagaagaatattacccttctcatcgttttatgcttgttgttgatatgaagacagtaatggttttttcacaacgagctgaatcactggggttatactcgaataatcgcttgcttatcaatataattgccgaacatatccatagtgatatatatctaaccaagtatcagcaacaatatcctgatgccaatgcattaataaatactttgcatgaatctggcaatgatatggtgcaggatgaaaaacatttgagtgatagcaaaaactgttaa

SEQ ID NO: 464643 - DNA, 231 bp, Shigella boydii
gtgacgggtgacaccgaagtttttaaacagcatgtcgccaggaaaaatgttagcagcggcaagctggcgaatagcgttaccgtattcttcaatggcgtcgcgcaactgctgaccttccacttgttccagccagatattgagcggcaccatccgccgctcgatatagagatggcgaattacaatctgctcaccaagatcggtgattttttccgctgcttcctggagcagtaa

SEQ ID NO: 464644 - DNA, 195 bp, Shigella boydii
atgagcagaaaaaaccaacgttactctaaagagttcaaagccgaagctgtcagaacggttcttgaaaatcaactttcgatcagtgaaggcgcttcccgattatcccttcctgaaggcactttaggacaatgggttaccgccgccagaaaagggctcggtactcctggttcccgggtgatgctgccaacttactga

SEQ ID NO: 464645 - DNA, 276 bp, Shigella boydii; identical to SEQ ID NO: 458859

SEQ ID NO: 464646 - DNA, 1167 bp, Shigella boydii
atgaaaatcaccatttccggtactggctatgtaggcttgtcaaacgggcttctaatcgcacaaaatcatgaggttgtggcattagatattttaccgtcacgcgttgctatgctgaatgatcggatatctcctattgttgataaggaaattcagcagtttttgcaatcagataaaatacactttaatgccacattagataaaaatgaagcctaccggggggctgattatgtcatcatcgccactccaaccgactatgatcctaaaactaattatttcaatacatccagtgtagaatcagtaattaaagacgtagttgagataaatccttatgcggttatggtcatcaaatcaacggttcccgttggttttaccgcagcgatgcataagaaatatcgtactgaaaatattatattctcacccgaatttctccgtgaaggtaaagccctttacgataaccttcatccgtcacgtattgtcatcggtgagcgttcagaacgcgcagaacgtttcgctgcgttattacaggaaggggcaattaagcaaaatatcccaaccctgtttaccgactctactgaagcagaagcgattaaactatttgcaaatacctacctggcgatgcgcgtggcgtactttaacgaattggatagctatgcagaaagtttaggtctgaatactcgccagattatcgaaggcgtttgtctcgatccgcgtattggcaaccattacaacaatccgtcgtttggttatggtggttattgtctgccgaaagataccaagcagttactggcgaactaccagtctgtgccgaataacctgatctcggcaatcgtagacgctaaccgcacgcgtaaagattttattgccgatgccattttgtcacgcaagccgcaagtggtgggtatttatcgtctgattatgaagagcggttcagataacttccgtgcgtcttccattcaggggattatgaaacgtatcaaagcgaaaggcgttgaagttatcatttacgagccggtgatgaaagaagactcattcttcaactctcgcctggaacgtgatctcgcgaccttcaaacaacaagccgacgttattatctccaaccgtatggcagaagagcttaaggatgtggcagacaaagtctacacacgagatctctttggcagtgactaa

SEQ ID NO: 464647 - DNA, 933 bp, Shigella boydii
atgattaataattgggttgcattgatggattcacttaaaaatagccattcggaaattgctaatttaataggtgaagctagaatagcttttatagatattccgatgtatttcaatgttggtgatttattgatatattttggtacggaggcatttataaaagaatataacttaaatgttatttatcgcacaggcatgaatgttgacttaaaaaaactaaaggatgtagatgttattttgtttcaaggtggaggcaattttggtgatttatatccacatcatcaacaattacgagagaaaataacattaaaattcccgaataaaaaaataatatgtttgcctcaaacgttacattttaataatgaagaagagctagagcgatctgctaaaatatttaagaaacactcagattttcatctctatgtaagagatcaggaaagcctcactattggttatcagtttacggataatataaaacttatacctgatatggcgcatagcttgcatccgctcatagacattaatgagtgtgatataaacagagaaagttaccgtattctccatatggttcgttctgataaagaagcaaattcaaataatgctaataatatgctaagtaagcggagctttgattgggcgaatatcataagcccaagtatgtatttgatgggtagaagcataatcattttggataagttgcgctatagtaatagtatgaagttttgggataaaatagctagcgacatggtgtttaaatcaattaattattttatgtcccataatgaagtttactccgacagactgcatggtatcattttggcagctttattagggaaaaaaataagatgctttgataataattataaaaaaaatagtcgttatatttcttgctggctaaaggaatatccaagcttaaaaaatgctagtgatttttaa

SEQ ID NO: 464648 - DNA, 1281 bp, Shigella boydii
atgtttcaaaatggcgtcaatatatctttttattctttcattgcaaaggctacggtatttctatgtggacctttaacattacttctgatctctcataaattaagtactgaagagatcgctttttattataccttcttcaatttaatcgcgttacaacaacttgttgaactaggtttaggttttactctaaaacagtgtatatcacatgcttataaaattgaaaatgatgtatggttatatgattcgaagaaaatagttaaatcatatatacaatttggtttgtactggtttattggggtgtcgtgtattattatatttgtcattggaccattgggattaatctactatggtgattatgaaggtagtattaagtggcagggggcttggttaggaactataggtgttcttgcatttagtataatactggttccaatacaaattgctattgaagcaacacaaaatcaaattgcaatatatcgttgtcaagttatatattctctcacaaatagtttatctctttgggtattcatttataatgactttaagttatattccattcctctaagtatgcttatagcaaacatatttttgttgattgcactaaaaaatcattatataaaactttataataaattagcctttgttaaagaaatggataaattctggaccatcttttctaaactttggcctttattttctagagtagcaatagtatggggtgttggttttctattgtggaatgggtttaatttaatctcattcaaaattttttcgcctgaagaggctgggagaattatctttagtattacgttagctcgtgccggatttactatagcagagtcaattattagcgcacaaactactgttgtttcaaatatgatttctaaaggagaaaatactgaagctgctaagtattatcgaaaatatcaactgatttcctttgctgttttaattatagggtacggcttttattatgttgtgaagtgttttttttctgatttttacttgtttgacaaattaatgccaaactcatttataacaagtgtatttgttttttttgtattgttgcttatcttgacaacaaagtgcaattttattcgttgttataaaattgaacctttcgttaaggtttctgtttggcatggtctaggtgtgccaatgagttttcttttatcatcgctttatttcccgatgtatttatatccttgttcctttgttctgtttatatcaataatttggtctcagttaatttctaagcgcatactttcaaaaatagggtaa

SEQ ID NO: 464649 - DNA, 546 bp, Shigella boydii
ttgcttttttttggtaggattcatcactacaaagggctggatattcttattgatgcatttgaaaaactgaacaaaaaaaataacaggtatagtctttctatctacggtagtgggaatatctctccatatcaaaagaaaattctagaactaagcaatattacagtgcataatcgttggatcgatgatgtagaaattccttcaatcatctctagccatgatgtctgtgttattccttatcgggatgcaagtcagtcaggagtaattcctacggtaatgacttgtggtgtgcctcttgttgtgaccccggttgctgggcttaaagagcaggttgttcacttacaaacagcaatatttgcggaagaggtttcttctgattccgttgcaagagcaatagattcattggttaaggatatatctttgtatgaaaagatatcaaagaatgctctactatacgctcaggaagagatgggatgggaaaaaaccgcatatcgttctgtggaagctcttatctcaattactcataattctaaaaagtataatcaatga

SEQ ID NO: 464650 - DNA, 180 bp, Shigella boydii
gtgaaaacactaataagaaaattctcccgtacggccatcacggtcgtattagtcattctggccttcatcgcaatttttaatgcctgggtctattacaccgaatccccctggacgcgtgacgcgcgctttagcgctgacgtcattgcgatcgcgccggacgtttctggactcattacctag

SEQ ID NO: 464651 - DNA, 228 bp, Shigella boydii
gtggaagcgctgaaaaatatcaccgatgtcgtacatgatgtgcgttccaaccgcaatttttcccgacgagtttctgaagaacgtatcgctgagtttcaccgcttcgctctcgacttcaacagtctgctggatgaaatggaagagtggcagcttcgtttacaggccaaaaatgcgcagcttctgcgtaccgcgctacatgacccattaaccgcgcgcagcgtttcgtag

SEQ ID NO: 464652 - DNA, 225 bp, Shigella boydii
atgtcgcgtaaaggtaactgttacgacaacgctccgatggaaagcttctggggaacgctgaaaaatgagagcctgagccactatcgttttaataaccgggatgaagccatctcagtaatacgggaatacattgagattttctacaatcgtcagcgtcgtcactctcgtctggggaatatctccccggcagccttcagggaaaaatataatcagatggctgcttaa

SEQ ID NO: 464653 - DNA, 774 bp, Shigella boydii
atgatttactctaaccaaatcaaatatagtggcaaagatggcatctatttccacttaagagataatgtagatgccttcttaaccttatcagcaactgagaacatggaatttgatagccctatgcaggtaactacacaaaacatgcaatcagggcaaaccgtcacagataacgtgcaaagagcacccagaacaatcactattagtggtgtcgtggtagttggctatgaaggaagcttattattaactcgtcagggtcaattagtagagaacttcatcgacactcttgaaagctggcgtgaccagaaacagattatttcggtcatctgtaaggacggaattaaaattgatgattccattattacaagctttaaagcctctaaagatgttggtatttcaaatggtctaagagtccagctaacttttcaggaaattaacttcaaagccattgtagggcaaactgatgtttcagcagctactggcaaaactgctaccacgaatgacggtggtgctaccagtaaaaagaatgcgggtaacgtgactactgaacgcaataacgcacctatgttgctgtgtcaggaactgtacagctactcagcatctgagctatctgatgaagcgttaaaagcccgtagtaattgctctaaaaatgtcacggtgaaagatggtgtaagcaccttctcagatgccgctaatgcgcaagcttcaaaagtgcttaagtcgggtaatgctttacggaagtttagtgtgaatccgaataagaagggcacttattga

SEQ ID NO: 464654 - DNA, 420 bp, Shigella boydii
atgattgtcggtatggcaactgatgtgattaactccattgttaaacagttctatgaacgtcagatgagtaagtcagataatccaattgacaaagttgtaaggtcaaaggtggaacccacagaccaagcattgactggtgacatgaactctttagctgctgttttatgggctatggttcagggcaaatcaaaggatgttccacagttttcacctgaagcattaaataatctgaaaggtcgagtggaaacattcacacaagatttaaaggttatcaagccgtcagtaaacattcagcctcagacaatcaatatcacaactcagacggtacttgatggaaaggttattgatgaaagaaccacatctcatattaatcgtatgcaggaagataccttgattagctcagcttacccagaggaataa

SEQ ID NO: 464655 - DNA, 420 bp, Shigella boydii
atggtacgattcattccattcttcgttctttctgagcattgcgttcaggatagtcagcagcttgcgtatacaggcaaccagcgccacttttttgggttttcctgcggcaagcagtcgcatgtaaaacacctttattaccgggttaaagcgggttgcgacaagcgctgccatgtacagggctgttcgcacaccagccctgccgccaaagatggttcgtcgccctctcatcgtgcccgagtcccggtttactggaaccataccgacaagcgcactgatttcacgcctggagaggttaccctgttcgggtacttccgccagcagcgcagcagccgtcatggtgccaacacctttaatattgctcagtcgcttagcaagctctttgaagtggctatggatatggctgttcatgtcagcatctag

SEQ ID NO: 464656 - DNA, 480 bp, Shigella boydii
atgagtcagccaggttcactttgtgtgggtatcgatgtttcgaaagcgatactggatattgccgccagcagcgctattgaacaattttctgtcggcaatgacagtgatggctttgaggccatcattgctgagttgagaatgtacgccattgcgctggttttaatgaaagccactggaggacttgaaaccgccatagtctgtgcgcttcaggcagaaggttttgagcttgccgtggttaaccccagacaagctcgtgactttgcccgcaccatgggatacctcgcgaaaactgatagtattgatgccagagtgctttaccagatggctgaggttctcaaccggcatccggagcgggaacgctttatcagagcactgccggatactgaatgtcaggttctcactgcaatggtagttcgtaggcggcagttgattacgatgctggttgccgagagaaaccggttgcaccctgctcatccatag

SEQ ID NO: 464657 - DNA, 351 bp, Shigella boydii
atgagcagaaaaacccaacgttactctaaagagttcaaagccgaagctgtcagaacggttcttgaaaatcaactttcgatcagtgaaggcgcttcccgattatctcttcctgaaggcactttaggacaatgggttaccgccgccagaaaagggctcggtactcctggttcccgcacggtggctgaactggaatctgaaattctgcaactgcgtaaggcgttaaatgaagctcgccttgagcgagatatattaaaaaaagccgctgtagattcaatctgtcaatgcaacacccctttcaattatctctttcggtgttttgaacttcagtgtctttctcggtctgttgtttag

SEQ ID NO: 464658 - DNA, 807 bp, Shigella boydii
atggcgaaaaggccaaaaccgtgcttactggatcaaaatttaccattgcgaaagcttgttctggaaaagctggagatgaaatggtctccagagcaaatatcaggatggttaaggcgaacaaaaccacgtcaaaaaacgctgcgaatatcacctgagacaatttataaaacgctgtactttcgtagccgtgaagcgctacaccacctgaatatacagcatctgcgacggtcgcatagccttcgccatggcaggcgtcatacccgcaaaggcgaaagaggtacgattaacatagtgaacggaacaccaattcacgaacgttcccgaaatatcgataacagacgctctctggggcattgggagggcgatttagtctcaggtacaaaaaactctcatatagccacacttgtagaccgaaaatcacgttatacgatcatcctcagactcaggggcaaagattctgtctcagtaaatcaggctcttaccgacaaattcctgagtttaccgtcagaactcagaaaatcactgacatgggacagaggaatggaactggccagacatctagaatttactgtcagcaccggcgttaaagtttacttctgcgatcctcagagtccttggcagcggggaacaaatgagaacacaaatgggctaattcggcagtactttcctaaaaagacatgtcttgcccaatatactcaacatgaactagatctggttgctgctcagctaaacaacagaccgagaaagacactgaagttcaaaacaccgaaagagataattgaaaggggtgttgcattgacagattga

SEQ ID NO: 464659 - DNA, 948 bp, Shigella boydii
atgacaacaatgaatcctttccttgtgcaaagcacactaccgtatctggctccccattttgatcaaattgccaatcatcactatcgcccggcattcgatgagggaatgcagcaaaagcgggcagaaattgctgccatcgcgcttaacccgcaaacgcctgatttcaacaatactattctggcactggaacaaagcggagaattacttacccgcgttaccagcgtcttttttgcgataactgcggcgcataccaatgatgaattacagcgtcttgatgaacagttttccgctgaactggcggaactggctaatgatatctatctgaacggtgaattattcgcgcgggtagatgctgtctggcagcgccgtgaatccctggggcttgatagtgaatccatccgcctggtggaggtgattcatcaacgttttgtccttgccggagccaaacttgcgcaagctgataaagcaaaattaaaagtactgaatacagaagctgcgaccctgaccagccagtttaaccagcgattactggcagcaaataaatccggcggtctggttgtgaacgatatcgcgcagctggcaggaatgagtgagcaagagattgcgctggcggcagaggcggctcgcgagaaaggtctggataacaaatggctgattccgctgctgaataccacccaacaaccggcgcttgccgagatgcgcgatcgtgcgacgcgtgaaaaactgtttattgcgggctggacgcgagcggaaaaaaatgatgccaatgatacccgcgctatcattcaacgtctggtaggattcgcgcacagcaggcgaaactgcttggttttcctcattatgccgcatggaaaatcgccgatcagatggcaaaaacgccagaagcagcactcaactttatgcgggaaattgttccagcggcgcgtcaacgtgctagcgatgaattag

SEQ ID NO: 464660 - DNA, 1056 bp, Shigella boydii
atgaaaaagagcactctggcattagtggtgatgggcattgtggcatctgcatccgtacaggccgcagaaatatataacaaagacggtaataaactggatgtctatggcaaagttaaagccatgcattatatgagtgataacgacagtaaagatggcgaccagagttatatccgttttggttttaaaggcgaaacacaaattaacgatcaactgactggttatggtcgttgggaagcagagtttgccggtaataaagcagagagtgatactgcacagcaaaaaacgcgtctcgcttttgccgggttgaaatataaagatttgggttctttcgattatggtcgtaacctgggcgcgttgtatgacgtggaagcctggaccgatatgttcccggaatttggtggcgactcctcggcgcagaccggcaactttatgaccaaacgcgccagcggtctggcgacgtatcggaacaccgacttcttcggcgttatcgatggcctgaacttaaccctgcaatatcaagggaaaaacgaaaaccgcgacgttaaaaagcaaaacggcgatggcttcggcacgtcattgacatatgactttggcggcagcgatttcgccattagtggggcctataccaactcagatcgcaccaacgagcagaacctgcaaagccgtggcacaggcaagcgtgcagaagcatgggcaacaggtctgaaatacgatgccaataatatttatctggcaactttctattctgaaactcgcaaaatgacgccaataactggcggctttgccaataagacacagaactttgaagcggtcgctcaataccagtttgactttggtctgcgtccatcgctgggttatgtcttatcgaaagggaaagatattgagggcatcggtggtgaagatctggttaattatatcgacgtcggtgctacgtattatttcaacaaaaatatgtcagcatttgttgattataaaatcaaccaactggatagcgataacaaattgaatattaataatgatgatattgtcgcgattgggatgacgtatcagttttaa

SEQ ID NO: 464661 - DNA, 189 bp, Shigella boydii
atggcaaagattgatgtggtttgtccccgttactctgaaactcagggggtatccggaacggccattccagttcagggggggctgctctatcgctgtaagcagtgcctgaagaccttccagctcgactaccgctacaacggggcgaaacccatcaaactttccaactattatcacattgagccatactga

SEQ ID NO: 464662 - DNA, 306 bp, Shigella boydii
atggctgtgccaaaacatcttcgcttttttacgctgtttgtggatggtgaaaacgaagtgggtaatgtgacgtccgtcactctgcctaagctgacgcgcaacaccgacagctaccggggtggtgaagtggctaaactggaagaagaactgggttatcacgatggttttctcgacaccgctgaacacttttacctgtttgtgattcaggggccgaaatccttagcgactgagctgcgccttagttacaacatcctatatgcctttatcattaacaggtgccacatgcagcgcctgttaatgttgtaa

SEQ ID NO: 464663 - DNA, 990 bp, Shigella boydii
gtgagagcactactgccccctgaaattgccccgcgtatggggatcgtattgttcagaccaggttcagagctgatgcccctgtttatgcaggggcgtgtcctgctggagcctgagccggaacgttattcatctttcgccagtggtgctgttccggcggcatcacaaccgctggcggatgatcctgacgttcgggccgtgttccgcaatgaggcagtgatccgtcgtgctggtggcgtggaatgtcttgaaagctggttacttcgtgaaaaaggctgccagtggcctcattccgactggcacagcgagaacatgacaacaatgcgacacgcgccgggcgcaatccgtctgtgctggcactgcgataaccagctgcgcgatcagttcacggaacggctggaatcaatggcaacggataactgtgcccgctgggtgttgtctgttgtgcgtcgggatctcggttttgatgatagtcacgttgtgacaatgccggaactgtgctggtggctgattcgtaatgacctggcggatgccttaccggaaagtgcagcccgtaaggcactgagattaccgaagcctgttgtgccgtctgtcacccgggaaagtgaccttgtgccttcggttcctgccaccagcatcatccaggataaggtgaaaaaggtgctggcgctgaaagtggatccggagtcgccggagtcttttatgttacgcccaaaacgtcgccgctgggttaatgaaaagtacacacgctgggttaagacacagccgtgtgcatgttgtggaaagcctgctgatgatcccctccacctgataggccacggtcaggggggaatgggtacaaaagcgcatgacctctttgtgttgcctttgtgcagaaagcatcacgacgagctgcatgcggataccgtggcatttgaagagaagtatggttcccagctggagctgatatttcgttttatcgatcgtgcgctggcaataggcgtactggcgtaa

SEQ ID NO: 464664 - DNA, 363 bp, Shigella boydii
atgaaagcggcacgccagcaagcgatagtcgacctgctgctgaaccataccagcctgaccacggaagctctctctgaacagctaaaggtcagtaaagaaaccattcgtcgcgatctcaatgaattacagacgcagggtaaaattctgcgcaatcatggacgcgctaaatatatccaccgtcaaaatcaagacagtggcgatccctttcacatcaggctgaaaagccattatgcgcataaagcagatatcgcgcgcgaggcgctcgcgtggattgaagaagggatggtgatagccttagacgccagttcaacttgctggtatctggatttgcccctatatttccagacatctgttatcacttaa

SEQ ID NO: 464665 - DNA, 267 bp, Shigella boydii
atggtgagatacttcgggttccttgccaaccgggtgtgtggagagaagctgccgcaggtgtaccgtgctctggggatggataaaccggaaccagtggcgaaagtgtgctatgcacaaatggtgaaacagttcctgagtcgtgacccgttcgaatgcgtgctgtgtggcggccggatggtataccgccgggccatcgcgggactgaatgtggaggggctgaagaaaaacgcgcgggatatcagtctgctgaggtatatgccggcctga

SEQ ID NO: 464666 - DNA, 291 bp, Shigella boydii
ttgctgtacagcattgttcctaccatccgcgtacctaaccgcgacgcgattgtcggcgcgtttgtcgccgcactcctgttcgaagcaggaaagaaaggtttcgcgctttatatcaccatgttcccgtcatatcagctcatttacggtgtgctggcggtgatccccattctctttgtttgggtctactggacatggtgtatcgtcttgcttggcgcggaaattactgtcactctcggggaataccgcaaactaaaacaagcagctgaacaagaagaagacgacgaaccatga

SEQ ID NO: 464667 - DNA, 195 bp, Shigella boydii
atgcggtggatcctgttcatcctcttctgcctgctgggcgcacctgcccacgcggtatccatacccggcgttacaaccacaacgacaacggactcaacgactgaaccggccccggaaccggatatcgaacaaaaaaagcggcctatggcgcactggcggatgtgctggataacgacacctcgcgtaaagaattga

SEQ ID NO: 464668 - DNA, 357 bp, Shigella boydii
atgggaaaaggtggcggtaaggcacacactcctcgtgaggcgaaggataatctcaaatccacgcagatgatgagtgtgattgatgcgataggtgagggaccgatagaaggtccggtgaagggactgcagagtattctggtgaacaaaaccccactgacggacacggacggcaatcccgtgatacacggtgtgacggcggtctggcgcgccggggagcaggagcagacaccaccggaaggctttgagtcctccggctctgaaaccggactgggcgtggaagtgacgaaggcaaaaccggtgacgcgcaccattacgtccgcgaacattgaccgcctgcgggttaccttcggggtgtag

SEQ ID NO: 464669 - DNA, 738 bp, Shigella boydii
gtggcactacctttcgctgctgacgcttgtctggtcgcctcatcttttgaagcagacgcagatgatgccgatgacgccgctgaactggctgacgatgcggctgccgccttagaggaagcagcattgtctgctgaagtctttgcatttgtttcagaggtttttgctgcagaagcagacctcgctgctgcagtggcttgctcagtggctttgccagccttcgttgtggctgttgaagcggatgatgcggcgctttctgccgattttccggcggcgctagcactggctgaggcctgcccggcacttgttgacgcggcactggcagacgacgcagccgctgtttttgagcctgccgcagctgaggcgctctgtcccactgctgtttcagaagacttagcgttcgtctcggacgtttttgccgccttcgcggaatttcctgccaccgttgccgaggaagctgcactactggcacttgatgatgcattcgtttctgaagatttcgctgcctcttttgaagccgccgcaccccgtgccgaggtggcagcttctgacgccttcgtggtcgctgtggatgcagaagtggctgccgatttttgtgatgctgcggcattcgtttctgacgttttcgcggcactggcgctggtagctgccgcgctttttgatgactctgcagcagcagcactttttgctgcttcacgggcctttgtcgatgccgttcctgcgctggaagacgctgactga

SEQ ID NO: 464670 - DNA, 921 bp, Shigella boydii
atgaaagcatcagaggcagctggtagtgcgacggcggcagctcagagcaaaagtacggcggaatccgcggcaacgcgcgccgagacagcagcaaaacgggcagaggatattgcatccgccgtggcgctggaggatgcgagcacgacgaaaaaggggatagtacagctcagcagtgcgaccaacagcacttccgagtcactggcggcaacgccaaaagcggttaaggtggtaatgggtgaaacgaacaagaaagcgcccttaaatagtcctgcactgaccggaacgccaacaacaccaactgcgcgacagggaacgaataatacccaaatcgcaagcacggctttcgttatggctgcgattgccgcccttgtagattcgtcacctgacgcactgaatacgctgaacgagttagcggcggcgctgggaaacgacccgaattttgcgaccaccatgactaacgcgcttgcgggtaagcaaccgaaagatgccaccctgacggcgctggccgggcttactactgcggcagacaagtttccgtattttacggggaatgatgtcgccagcctggcaaccctgacaaaagtcgggcgggatattcttgcgaaatcgactgttgctgccgttatcgaatacctcggtttacgagaactcggcacaagcggggagaaaataccgttactcagtacagcgaatacctggactaatcgacaaacattcagcggtggcctttctggtgaactatccggcaatgcttctacagctgcaaaattaaaaactgccaggaaaataagcaatgtggcttttgatggttcctccgatatcacattaaaagcaagtcatgttggtgcgtttgccttagggaaaacaggaagcaccgttgcgaatgataaagcagttggggtaatgctgccaacttactga

SEQ ID NO: 464671 - DNA, 276 bp, Shigella boydii
gtggcttctgtttctatcagctgtccctcctgttcagctactgacggggtggtgcgtaacggcaaaagcactgccggacatcagcgctatctctgctctcactgccgtaaaacatggcaactgcagttcacttacaccgcttctcagcccggtacgcaccagaaaatcattgatatggccatgaatggcgtcggatgtcgcgccagtgcacgcattatgggcgttggcctcaacacggttttacgtcacttaaaaaactcaggccgcagtcggtaa

SEQ ID NO: 464672 - DNA, 834 bp, Shigella boydii
atggaaaaccgccgccatcgcctgaactgggagatgagccgggacaggtgtttacgacttggcaatccggtgccggagtataaaccaaagcttgcaagcaaaggaacgaagacgaggcatctggcaatacttcgcgccattctcaatatggctgttgaatggggatggcttgacagggcgcccaaaatatcaacaccacgcgttaagaatggacgaatcagatggcttacagaggaggaatcgaagcgcctgtttgcagaaattgctcctcatttcttccctgtggtcatgtttgcaatcacgacaggccttcgccgttccaacgttacagaccttgagtggtcacaggtcgatctggataagaaaatggcatggatgcaccctgatgaaacaaaagctggcaatgcgatcggagttcctcttaacgaaaccgcatgccagatattaagaaaacagcagggtctccataagagatgggtgtttgtccacaccaaacctgcctaccgaagcgacggaacaaaaacagcagcggtaaggaagatgagaaccgacagcaacaaggcatggaagggagcgttaaagcgggcaggcattagcaacttccgcttccatgacctgaggcatacttgggcaagctggctggttcagtccggtgtctctcttcttgcacttaaagagatgggaggatgggaaactctcgaaatggttcaaagatacgcccacctttcagccgggcatctcaccgagcacgcgagcaaaatcgatgcgattataagtcgcaatggcacaaatacggcacaagaggagaacgtggtgtatttaaatatggggtaa

SEQ ID NO: 464673 - DNA, 453 bp, Shigella boydii; identical to SEQ ID NO: 464256

SEQ ID NO: 464674 - DNA, 756 bp, Shigella boydii; identical to SEQ ID NO: 464255

SEQ ID NO: 464675 - DNA, 384 bp, Shigella boydii
atgaaaggactgttcagaattgtggatatgaagcggtggtatctgtgtccgcaggtacgggtcgcggatatcgtccagctgaacgggaatatccggccacgatcacgccagtggtggcagttattcaggatggtgtctcagtggcatgttgatgtggttatcgttgagctgcgttcgttcagtattgttgcagcagtagagctggatgatgccagccatttacgaccggaacgcagacgccgggatattcttctggaagaggttctgaggcaggctggtattccgttgctcagaagccacgatgccagaaaactgctgcagatgaccggagaatggctgaatacaacaggggctgatcagcagtcaccggaacatcgtagctga

SEQ ID NO: 464676 - DNA, 225 bp, Shigella boydii; identical to SEQ ID NO: 133446

SEQ ID NO: 464677 - DNA, 324 bp, Shigella boydii
atggttattggcagtggtatgtacgaattgggtatgtatggttcagtgatgaccttgctggtgctggaagtcttccatcaattaaccttccgcctgatgaacaaaaattaccatttacagctgacattagtgaacggtaatacggtatcaatgctcaactggtttaagcagcaaaaaataaaaacggatttagtttcgttgcaggaaaatgaagatcatgaagtggtcgccattgatatccagcttcatgccacaacgtcgatagaagatctgttgcgattattaaaaggtatggcaggggtgaaaggcgtttcaattagctaa

SEQ ID NO: 464678 - DNA, 462 bp, Shigella boydii
atggcatcccacatcgatttgaatgccttccctgttttatccgcccaggtctccagtgttcccatgttttctttcaggcgacgggtctgctcatcaaagcctttcgtggcgatatcgttcgccgcctgcaatgccccggcctcgtctccggaacgctgcagctgtgcaacatacgcaatctgctctgccgtcacgttacggaactggcgcgccatcgccatcagtcccgacgtcgggtcagtggtcagcttcccgaaggcttcagcgactttatccacctccacaccggatgcagacgcaaaacgcgcgacactctggttgatggcatcaaactgttcaccaccacgcacaccggcattcaccagggctgccagtgactctctcacctggttaaacgtcagccctgctgcctgcccggctcttgagagagtcagcatacgatcggcagtcagtccggactga

SEQ ID NO: 464679 - DNA, 2265 bp, Shigella boydii
atggatgaccagttaaaacaaagcgcacttgatttccatgaatttccagttccagggaaaatccaggtttctccaaccaagcctctggcaacgcagcgcgatctggcgctggcctactcaccaggcgttgccgcaccttgtcttgaaatcgaaaaagacccgttaaaagcctacaaatataccgcgcgcggtaacctggtggcggtgatctctaacggtacggcggtgctggggttaggcaacattggcgcgctggctggcaaaccggtgatggaaggcaagggcgttctgtttaagaaattcgccgggattgatgtatttgacattgaagttgatgaactcgacccggacaaatttattgaagttgtcgctgcgctcgaaccgaccttcggcggaatcaacctcgaagacattaaagcgccagaatgtttctatattgaacagaaactgcgcgagcggatgaatattccggtattccacgacgatcagcacggcacggcaatcatcagcactgccgccatcctcaacggcttgcgcgtggtggagaaaaacatctccgacgtgcggatggtggtttccggcgcgggtgccgcagcaatcgcctgtatgaacctgctggtagcgctgggtctgcaaaaacataacatcgtggtttgcgattcaaaaggcgttatctatcagggccgtgagccaaacatggcggaaaccaaagccgcatatgcggtggtggatgacggcaaacgtaccctcgatgatgtgattgaaggcgcggatattttcctcggatgttccggcccgaaagtgctgacccaggaaatggtgaagaaaatggctcgtgcgccaatgatcctggcgctggcgaacccggaaccggaaattctgccgccgctggcgaaagaagtgcgtccggatgccatcatttgcaccggtcgttctgactatccgaaccaggtgaacaacgtcctgtgcttcccgttcatcttccgtggcgcgctggacgttggcgcaaccgccatcaacgaagagatgaaactggcggcggtacgtgcgattgcagaactcgcccatgcggaacagagcgaagtggtggcttcagcgtatggcgatcaggatctgagctttggtccggaatacatcattccaaaaccgtttgatccgcgcttgatcgttaagatcgctcctgcggtcgctaaagccgcgatggagtcgggcgtggcgacgcgtccgattgctgatttcgacgtctacatcgacaagctgactgagttcgtttacaaaaccaacctgtttatgaagccgattttctcccaggctcgcaaagcgccgaagcgcgttgttctgccagaaggggaagaggcgcgcgttctgcatgccactcaggaactggtaacgctgggactggcgaaaccgatccttatcggtcgtccgaacgtgatcgaaatgcgcattcagaaactgggcttgcagatcaaagcgggcgttgattttgagatcgtcaataacgaatccgatccgcgctttaaagagtactggaccgaatacttccagatcatgaagcgtcgcggtgtcactcaggaacaggcgcagcgggcgctgatcagtaacccgacagtgatcggcgcgatcatggttcagcgtggggaagccgatgcaatgatctgcggtacggtgggcgattatcatgaacattttagcgtggtgaaaaatgtctttggttatcgcgatggcgttcacaccgcaggtgcaatgaacgcgctgctgctgccgagtggtaacacctttattgccgatacctacgtcaatgacgaaccagacgcagaagagctggcggagatcaccttgatggcggcagaaactgtccgtcgttttggtattgagccgcgcgttgctctgttgtcgcactccaactttggttcttctgactgcccgtcgtcgagcaaaatgcgtcaggcgctggaactggtcagggatcgtgcgccagatctgatgattgatggtgaaatgcacggcgatgcagcgctggtggaagcgattcgcaacgaccgtatgccggacagccctttgaaaggttctgccaatattctggtgatgccgaacatggaagctgcccgcattagttacaacttactgcgcgtttccagctcggaaggtgtgactgtcggtccggtgctgatgggcgtggcgaaaccggttcacgtgttaacgccgatcgcatcggtgcgtcgtatcgtcaacatggtggcgctggccgtggttgaagcgtaa

SEQ ID NO: 464680 - DNA, 573 bp, Shigella boydii
ttgtccagatacggtacgcgcttcgagtttaataatgaaaagcaagttatattttccagtgatgtcaatagcgaagatactttcgttattttagagggcgttatctctctgcgtagagaagaaaacgtacttatcggtattacccaggcttcttatattatggggctggctgatggtttaatgaaaaacgatataccatacaaattaatatcagaaggaaattgtacgggatatcatctaccagccaaacaaaccattacgcttattgaacaaaatcaactctggcgagacgctttttactggttagcctggcaaaatagaattctggaattacgcgacgtgcagctcattgggcataattcctacgaacaaatccgcgcaacattattatcaatgattgactggaatgaagaattgcgatcacgtattggtgtgatgaattatatccatcaacgtacacgcatatcgcgttctgtcgtcgcagaagttctcgctgctttgcgtaaaggcggctatatcgaaatgaataaaggcaaactggtcgctatcaaccgtttgccttcagagtattaa

SEQ ID NO: 464681 - DNA, 276 bp, Shigella boydii; identical to SEQ ID NO: 464671

SEQ ID NO: 464682 - DNA, 363 bp, Shigella boydii
gtgagtaataaaaacgccaatgtaaggaaatcgcaggaaataacattctgcttgctggcaggtatcctgatgttcatggcaatgatggttgccggacgcgctgaagcgggagtggccttaggtgcgactcgcgtaatttatccggcagggcaaaaacaagtgcaacttgccgtgacaaataatgatgaaaatagtacctatttaattcaatcatggatggaaaatgccgatggtgtaaaggatggtcgttttatcgtgacgcctcctctgtttgcgatgaagggaaaaaagagaataccttgcgtattcttgatgcaacaaataaccaattgccacaggaccgggaaagtttattctggatga

SEQ ID NO: 464683 - DNA, 276 bp, Shigella boydii; identical to SEQ ID NO: 458859

SEQ ID NO: 464684 - DNA, 723 bp, Shigella boydii
atgattagaggtcaaggcaaaggcaagaagccaacctcacgacaaccaagttctattgatatcctcaaagggatatgcaagtgcgcagaatgtggttctacactgcgtcagcgtaataccaagaagacaccagaaggacgctaccctagaggctatcttgaatgtcgtaatcgtcaacttggacgttgtaattctaaggcatttaaccgttcattgattgaagatatactcattcaaaaggtgttccccacacttcagtatctgagccttaaaagtaatggtgacaatatttctgttaccacgcttaaagcagatatcacatcactagaaaaagggattaataacctaattagccttgcagaaagaggattgggtgaccttgacacattagcccaaagaataacaaacaaccgtgttgaacttgaatctaagaagaaggatttaagacaggctgaagctatccagtcattaaggtcagacaatgatatccaagacagtgaccggaaaactgtagagggacgtatcaaactacaacttgccataaagtcattcgtcaaagagataatttttgactactacaagcaagaaataacgatacgcttattgaatggtaaatctttctctggtatttcagttgcacgagaaaacaaagactttgaccatagttcagtgtttgaagtgcttcaaaagtcattgttagacattgatgaagtacacctgtaa

SEQ ID NO: 464685 - DNA, 570 bp, Shigella boydii
atgcgtacattcctttatgctcgtgtatcagttgatgacctcaccacacagaaccaagtagacgctgttaaacgtgctggttatgaagtcagaccttcacgagtaattgaggaagttattagtggggctacaccagctatggacagaccacaatttgtaaagctggtggataagctggaagaaggtgattgtcttgtagtgaccaagattgaccgcttaggaagggataacattgacgtacagaagaccgtcacaatgttacttggtatgggtgttaagctggtctgtctagatttgcctgtaaaagacctttcaagtgctgaaggtaaacttattcttcaactattcagtacctttgcagagtttgaacttaaccgcatcagagagcgaaccagagagggcttagaacgagctaaagcacaaggtaaggtgttgggtcgtcctgtagctaaaaacactacagaggccgttttagagcataaggcaaagggattgtcacaaagtcaggttgcaaagcttctgaatctctctgtgagaacggttagccgtcactggacaaagacactgtaa

SEQ ID NO: 464686 - DNA, 189 bp, Shigella boydii
atgtctaaatataacccaaatcagttttataaatttgatgtgcgaatctctcaactttcagaagaaattaacgcagcagcaagattgatttatatggtcatggtccatagctgtgacttctatgaagagaaatacaaatcatattcaccaagtattgaagtggtcaacaaaaactggccaccgagttag

SEQ ID NO: 464687 - DNA, 150 bp, Shigella boydii
atgccactgctggataagctgcgtaagctgtacgggtcggaccggtatgcagtgaactacatattgccccgtcaacgtattaccactgtcagcaacagcgacatcatccggataaacgcagtgcccgtgcgcagcgcgatgactggctga

SEQ ID NO: 464688 - DNA, 423 bp, Shigella boydii
atgaacattaccccgtttccgacgctttcgccggcaactatagatgccataaatgttatcggacagtggctggcgcaggatgatttctccggtgaggtgccgtatcaggccgattgcgtgatccttgcaggcaatgcggttatgccgactatcgacgcggcatgtaagattgctcgcgatcagcaaattcctttactgattagtggtggtatcggtcactcgacaacttttttgtatagcgccatcgcacagcatccgcactacaacactatccgcaccactggcagagcagaagcgacctcctggcggatatcgctcatcagttctggcacattccgcatgaaaaaatctggattgaagaccagtcaacaaactgcggtgaaaacgcacgctttagcatcgcgctatttaatcaggccgtag

SEQ ID NO: 464689 - DNA, 168 bp, Shigella boydii
atgactaaaaatacacgtttttcccccgaagtccgtcaacgggcagttcgtatggttctggaaagtcagggcgaatatgactcacaatgggcggcaatttttagccatgaaaacgtaatcaactcggtgaaccaattcaaaaaatatactttatacctgcggaagtga

SEQ ID NO: 464690 - DNA, 1584 bp, Shigella boydii
atgttcacgccagtgctgctgtttcccttcgccgggattgtggtgggtcttgccatcttgctgcaaaacccgatgtttgtcggggaatcactgaccgatccgaacagtttattcgcgcaaatcgtacacattattgaagagggcggttggacggtattccgtaatatgccgctgatttttgctgtcggtttacccattggccttgctaagcaagcgcaggggcgtgcttgtctggcggtgatggtgagtttcctgacttggaactatttcatcaacgcgatgggaatgacctggggaagctacttcggcgtcgatttcactcaggacgcggtggcaggtagcggtctgacaatgatggccgggattaaaaccctcgataccagcattatcggcgcaattatcatttccggcattgtgacggcgctgcataaccgtctgttcgataaagaactgccggtttttctcggcattttccaggggacgtcttatgtggtgattatcgccttcctggtgatgatcccctgtgcctggctgacgttgctcggctggccaaaagtacaaatggggattgaatctctgcaagcgttcctgcgttcggcgggtgcgcttggggtgtgggtttacaccttcctcgaacgtattctgatcccaaccggtttacaccacttcatctacggacagtttatctttggtccggcagctgttgaaggcggcattcagatgtactgggcgcagcatctgcaagagttcagtctgagcgccgagccgctgaaatcgttgttcccggaaggcggttttgccctgcacggtaactcaaaaatctttggtgccgtgggcatttctttagcgatgtacttcactgccgcaccggaaaatcgggtaaaagtggcgggcttgctgattcccgcaaccttaaccgccatgctggtgggaattaccgaaccgctggaatttaccttcctgttcatttcaccgttgctgtttgcggtacacgccgtgctggcggcctcaatgtcgaccgtgatgtatctctttggtgtggtgggcaacatgggcggaggtctgattgaccaggttttaccgcaaaactggatcccgatgttcagcaaccacgcggatatgatgctgacccaaatcgccattgggttgtgctttaccctgctgtacttcgtggttttccgcacactgattctgcaattcaacatgtgcacgccgggacgtgaagatgcggaagtgaaactctactcaaaagccgaatacaaagcctcgcgaggccaaaccaccgctgcagagccaaaaaaagagctggatcaggctgccggtatcctgcaagccctgggcggggtcggcaatatctccagcattaacaattgcgcgacgcgtttacgtattgcactgcatgacatgtcacaaacgctggatgacgaagtctttaaaaagctgggagcgcacggcgtcttccgtagtggcgatgccattcaggtgatcattggtctgcatgtatcccagctgcgtgaacagctcgatagcttaattaattctcatcaatcagcagaaaatgttgccattacggaggcagtataa

SEQ ID NO: 464691 - DNA, 807 bp, Shigella boydii
atgtttccacaatgcaaattttcccgcgagtttctacatcctcgctactggctcacatggtttgggcttggtgtactctggctttgggtacagcttccttatcctgttctctgctttctcggcacgcgtattggcgcaatggcgcgaccattcctgaaacgtcgtgaatctatcgcccgtaaaaacctggaactttgtttcccgcagcattctgcggaagaacgcgagaagatgattgccgaaaactttcgttcactcggcatggcgctggtagaaaccggcatggcatggttctggcccgacagtcgcgtacgtaaatggtttgatgttgaagggttggataaccttaaacgcgcacaaatgcaaaatcgcggcgtaatggttgtcggcgtccattttatgtcgctggaactgggcggccgcgtgatgggactgtgccagccaatgatggctacctatcgtccacataataatcagctgatggaatgggtgcagacccgtgggcgcatgcgctctaacaaagcgatgatcggcagaaataatctgcgcggcattgtcggtgcactggagaaaggtgaagcggtatggtttgctcccgatcaggattatggtcgtaaaggcagctccttcgcgccgttctttgcggtggaaaatgtcgccacaaccaatggcacctatgttctctcccgtctctctggcgcagccatgttgaccgtaacgatggtaagaaaagcggattacagcggatatcgtttgttcatcaccccagagattgaagtggtcaacaaaaactggccaccgagttag

SEQ ID NO: 464692 - DNA, 225 bp, Shigella boydii; identical to SEQ ID NO: 133446

SEQ ID NO: 464693 - DNA, 600 bp, Shigella boydii
atgtcgactattcatcccttacagaccgatgcattaatacgggagttacaagaaaaaggcatcagtatgatggacgctcccgtgggcagaacgtccgtgaatgcgattgatggcacattgctgattttagcgggtggcactgatgagcagattgcacgtgcacgcccgattcttatgtgcatgggtaatgagctggtcgaggctggcggcccaggaatggggatccgcgtgaagctaattaacaactatatgagcattgcgcttaatgcgctgtcctccgaggccgctgtgttatgtgagtcactgggattaaatcttgatgtcgcaattaaggtgatgagtggtacggcagcagggaaaggacattttacgaccacctggcctggcaaagtgctgaaaggcgatctttcacccgccttcatggtggatctggcgttgaaagatctgcgtattgcagttgacgtcgctcgggagacgggggcaccgctcaatatggggattgcagcagaaagttattacgctgcagcaagtcaagacggcaaagggcggcaggactggagtgccctgctaaatcaggttcgccagcaggctggtctttaa

SEQ ID NO: 464694 - DNA, 267 bp, Shigella boydii
atggtgaggtacttcgggttccttgccaaccgggtgtgtggagagaagctgccgcaggtgtaccgtgctctggggatggataaaccggaaccagtggcgaaagtgtgctatgcaaaaatggtgaaacagttcctgagtcgtgacccgttcgaatgcgtgctgtgtggcggccggatggtataccgccgggccatcgcgggactgaatgtggaggggctgaagaaaaacgcgcgggatatcagtctgctgaggtatatgccggcctga

SEQ ID NO: 464695 - DNA, 285 bp, Shigella boydii; identical to SEQ ID NO: 464330

SEQ ID NO: 464696 - DNA, 150 bp, Shigella boydii; identical to SEQ ID NO: 464429

SEQ ID NO: 464697 - DNA, 468 bp, Shigella boydii
atgaaccgcgtactgtgcgtggtcatcattgccctgctggtggcctgtggtgcgcttagtctggggctgaatcattaccgtgataacgccattacctacaaagcccagcgcgacaaaaatgtcagagaactgaagctggcgaacgcggcaattactgacatgcagatgcgtcagcgtgatgttgctgcgctcgatgcaaaatactcgagggaattagccgatgcgagagctgaaaatgaaactcttcgcgctgacgttgccgctggtcgtaagcgcctgcgtatcaacgccacctgtccaggtcccgtgcgtgaagccaccggcaccgcccgcgtggataatgcaaccggcccccgactggcagacaccgttacacgggattatttcaccctcagagagcggctgatgacgatgcagaagcaactggaaggggcgcaggaatatatccgtactcagtgcctgaaataa

SEQ ID NO: 464698 - DNA, 225 bp, Shigella boydii; identical to SEQ ID NO: 133446

SEQ ID NO: 464699 - DNA, 225 bp, Shigella boydii; identical to SEQ ID NO: 133446

SEQ ID NO: 464700 - DNA, 321 bp, Shigella boydii
atggacttcctggagcatctgcttcatgaagaaaaactggcacgtcatcaacgtaaacaggcgatgtatacccgaatggcagccttcccggcggtgaaaacgttcgaagagtatgacttcacattcgccaccagagcaccgcagaagcaactccagtcgttacgctcactcagcttcatagaacgtaatgaaaatatcgtattactagggccatcaggtgtggggaaaacccatctggcaatagcgatgggctatgaagcatttaaaattttttatgatataagtaaaatttctttggagttataccataatattcattaa

SEQ ID NO: 464701 - DNA, 1986 bp, Shigella boydii
atgagttttaacgcaaaggatataacccagggcggtcagattacgtccatgcgtatccgcatgttcagccagatcgccaatattatgctttactgcctgtttatttttttctggatactcgttggtctggttttatgggtaaaaataagctggcagacgtttgtgaatggctgtatttactggtggtgtaccacgctggaaggcatgcgggatttaatcaagtctcagccggtatatgagattcagtattacggcaaaaccttccggatgaacgctgctcaggtactgcatgataaatatatgatctggtgcggtgagcagttatggtctgcattcgttctggccacagttgtggcactggttatttgcctgattaccttctttgttgtctcctggattctggggcatcagggtaaacaacagagcgaaaatgaagtcacaggtggtcgtcaactgacagacaatccgaaagacgttgcccggatgctgaaaaaagacggcagggactccgatatccggattggcgatctgccgattatccgggattccgaaatccagaacttctgtctgcacggcacggtcggggccggtaagtcggaggttatccgtcgtctggccaactacgcccgtcagcgtggtgatatggtggtgatttatgaccgttcaggggaatttgttaaaagttactatgatccctccatcgataagatcctgaatccgctggatgcacgctgtgccgcctgggatttgtggaaggagtgcctgacacagccggattttgataataccgcaaatactctgatcccgatgggcacaaaagaggacccgttctggcagggttcaggacgtaccatttttgcggaagcggcgtatctgatgcgtaatgaccccaaccgcagctacagcaaactggtggacacactgctttccatcaaaattgaaaaactgcgtacctacctgcgtaattcaccggcggccaacctggtggaagagaaaatcgagaaaacggccatatccatccgtgctgtgctgaccaactatgtgaaagccatccgttacctgcaggggattgagcataacggtgagcccttcaccatccgtgactggatgcgtggtgtccgggaggatcagaaaaacggctggctgtttatctcgtcgaatgccgacactcatgcctccctgaagccggtgatctccatgtggctgtccattgccattcgtggtctgctggcaatgggagaaaaccgtaatcgtcgtgtgtggttcttctgtgatgagttacccacattatacaaactgccggacctggtggagatcctgccggaagcccgtaagttcggtggctgttatgtgtttggtatccagtcctatgcccagctggaagatatctacggtgagaaagcggctgccacgctgtttgacgtcatgaacacccgtgcctttttccgttctcccagccataagattgcggagttcgctgccggtgaaattggtgagaaagagcacctgaaagccagcgaacagtattcctacggtgctgatccggtacgtgacggggtatcgaccggtaaggatatggagcgccagacgctggtcagttattccgacattcagtccctgccggatctgacctgctatgtcaccctgcccggaccgtatccggcagtcaaactctcactgaaatatcaggaacgaccgaaggtcgctccggagtttattccgcgtgacatcaacccggaaatggagaaccgtctgagtgccgtacttgccgcaagggaagcagaaggtcgtcagatggccagcctcttcgaaccggatgtcccggaggttgtttccggagaagacgtgactcaggctgaacagccgcaacagccgcaacagccgcaacagccgcaacagccgcaacagccggtgtctcctgtcatcaacgataagaagtcagattcaggtgtgaatgttccggcagggggtagactggccccctga

SEQ ID NO: 464702 - DNA, 276 bp, Shigella boydii; identical to SEQ ID NO: 458859

SEQ ID NO: 464703 - DNA, 378 bp, Shigella boydii
atgacaaggtcatcgggcaatatcggagcggcaggttctgtcagctatatgtttgacaatacgggtgtgattgtatttaaaggaacagaccctgaccatatttttgaaattttacttgaagctgaagttgatgttcgtgatgtgactgaagaagaaggtaacattgttatttatactgaacctactgaccttcataaaggaatcgcggctctaaaagcagctggaatcactgagttctcaacaacagaattagaaatgattgctcaatctgaagttgagctttccccagaagatttagaaatctttgaagggcttgttgatgcccttgaagatgacgacgatgttcaaaaagtttatcataacgtcgcaaatctctaa

SEQ ID NO: 464704 - DNA, 405 bp, Shigella boydii
gtggcggcagccgcaggttatgcccgcgcagcagaacaggccaaaaatgacattgatgctgcgctgaccggcactctgaaaatggctaaccatctgtcagaaatcgcagcagcaggcgaaaaggcacaacagaagtcccgggataatctggggctgaaaagtgcggccacgatggaagcacagagcgacatttacgaccggacaaaaggccgtctggcgatacccggcgcattcggctttgggtgtgcttttctgcctgaagatgttatccgttttgacactaagagtgatttcctggcctgggtaaggaatgcgctgccaggtgaatattccgttgctggcccctacgacatcatcatacccgacacacggtttgaaggggatgctcagcatccggtggactga

SEQ ID NO: 464705 - DNA, 801 bp, Shigella boydii
gtgacagaaccgttaaccgaaacccctgaactatccgcgaaatatgcctggttttttgatctcgatggaacgctggcggaaatcaaaccgcatcccgatcaggtcgtcgtgcctgacaatattctgcaaggactacagctactggcaaccgcaagtgatggtgcattggcattgatatcagggcgctcaatggtggagcttgacgcactggcaaaaccttatcgcttcccgttagcgggcgtgcatggggcggagcgccgtgacatcaatggtaaaacgcatatcgttcatctgccggatgcgattgcgcgtgatattagcgtgcaactgcatacagttatcgctcagtatcccggcgcggagctggaggcgaaagggatggcttttgcgctgcattatcgtcaggctccgcagcatgaagacgcattaatgacattagcgcaacgtattactcagatctggccacaaatggcgttacagcagggaaagtgtgttgtcgagatcaaaccgagaggtaccagtaaaggtgaggcaattgcagcttttatgcaggaagctccctttatcgggcgaacgcccgtatttctgggcgatgatttaaccgatgaatctggcttcgcagtcgttaaccgactgggcggaatgtcagtaaaaattggcacaggtgcaactcaggcatcatggcgactggcgggtgtgccggatgtctggagcaggcttgaaatgataaccaccgcattacaacaaaaaagagaaaataacaggagtgatgactatgagtcgtttagtcgtagtatctaa

SEQ ID NO: 464706 - DNA, 897 bp, Shigella boydii
atgagtcgtttagtcgtagtatctaaccggattgcaccaccagacgagcacgccgccagtgccggtggccttgccgttggcatactgggggcactgaaagccgcaggcggactgtggtttggctggagtggtgaaacagggaatgaggatcagccgctaaaaaaggtgaaaaaaggtaacattacgtgggcctcttttaacctcagcgaacaggaccttgacgaatactacaaccaattctccaatgccgttctctggcccgcttttcattatcggctcgatctgatgcaatttcagcgtcctgccggggacggctatctacgcgtaaatgcgttgctggcagataaattactgccgctgttgcaagacgatgacattatctggatccacgattatcacctgttgccctttgcgcatgaattacgcaaacgtggggtgaataatcgcattggtttctttctgcatattcctttcccgacaccggaaatcttcaacgcgctgccgacatatgacaccttgcttgaacagctttgtgattatgatttgctgggtttccagacagaaaacgatcgtctggcgttcctggattgtctttctaacctgacccgcgtcacgacacgtagcgcaaaaagccatacagcctggggcaaagcatttcgaacagaagtctacccgatcggcattgaaccgaaagaaatagccaaacaggctgccgggccactgccgccaaaactggcgcaacttaaagcggaactgaaaaacgtacaaaatatcttttctgtcgaacggctggattattccaaaggtttgccagagcgttttctcgccaatgaagcgttgctggaaaaatatccgcagcatcatggtaaaattcgttatactgaagtggcacactga

SEQ ID NO: 464707 - DNA, 282 bp, Shigella boydii
atgaataaaataaagaattaccggtggcatatgattgccctcgtatgctttatcactgtaatcaattatctggacagaacggcgttaggtattgcggctccaacgattatggagacaaccggaataactaaagagcaatattcatggattgtcagtgcattccagttggcctatacattagggcaaccggtaatgggattctttattgataccgtgggtctgaagttaagttttgcgatatgtgccgcaatttggggcctggcgacaatggccatgcactaa

SEQ ID NO: 464708 - DNA, 1038 bp, Shigella boydii
atgtgccgcaatttggggcctggcgacaatggccatgcactaaccggaacgtggtctggtctggcatttatgcgcgccctgatgggtttcagcgaagcgtcggcaattccggcgggtgtaaaaaccgcatcaacatggttcccggcaaaagagcgtggcgtggcgacaggtgttttcaatatgggcacctcactcggcgcgatgcttgctccaccgttgattgcctggtgcattatgtttcatagctggcaatttgcgtttattgtttcaggtagtcttgctttgctcgcggctttattttggttcttttgttataaagatccgaaagatgccaaacgcctttctgatgaagagcgccactatattgaatcagggcaagaacagcatcttaaaacagataagaaagaaaaaacgtcaatcaagcatatcctcagccaacgtaatttctgggggattggcatcgcgcgttttctcgcagacccggcatggggaaccattaacttctgggtgccgattttcttcgtcgaaacgctgcattttagcctgaaagaaattgccatgttcgtctggctgcctttcctgctgggcgatctcggctgtttagccagtggttttgtcgcgaagttcttccacgatcgcggcgtgagtttaattaactcacgaagaattaccttcactattgcagccgtcattatgatgacgattggcctggtgagtattgtcgaaaatccctacattgccgtattactgattagtattggcgcgttctcgcatcaatgtctttctactgtagcagcaactctgggtggcgatctgttcaaaaaagacgaagtagctaccgcagtgggtatggcaggagcctgtgcgtggagcggtcagttgattttcaacctgttcatcggggcattcgttcacattatcggcttcgcgccgttctttattgccctggctttctttgacattattggtgctattgcgttgtggacgcttatcaaagttaaagatgaagaaccacaagtacagttagctacccactaa

SEQ ID NO: 464709 - DNA, 600 bp, Shigella boydii
atggctccggaggactggctgcaggcagagatgcagggtgagattgtggcactggtccacagtcatcccggtggtctgccctggctgagtgaggctgaccggcggctgcaggtgcagagtgatttgccgtggtggctggtctgccggggggcgattcacaagttccgctgtgtgccgcatctcaccgggcggcgctttgagcacggggtgacggactgttacacgctgttccgggatgcttatcatctggcggggattgagatgccggattttcatcgcggggatgactggtggcgtcacggtcagaatctctatctggataatctggaggccacagggctgtatcaggtgccgttgtcagcggcgcagccgggcgatgtgctgctgtgctgttttggttcatcggtgccgaatcatgccgccatttactgtggtgacggcgagctgctgcaccatattcctgaacaactgagcaaacgagagaggtacaccgacaaatggcagcgacgcacacactccctctggcgtcaccaggcatggcacgcatctgcctttacggggatttacaacgatttggtcgccgcatcgaccttcgtgtga

SEQ ID NO: 464710 - DNA, 276 bp, Shigella boydii; identical to SEQ ID NO: 458859

SEQ ID NO: 464711 - DNA, 276 bp, Shigella boydii
gtggcttctgtttctatcagctgtccctcctgttcagctactgacggggtggtgcgtaacggcaaaagcactgccggacatcagcgctatctcagctctcactgccgtaaaacatggcaactgcagttcacttacaccgcttctcaacccggtacgcaccagaaaattattgatatggccatgaatggcgttggatgccgggcaactgcacgcattatgggcgttagcctcaacacgattttacgtcacttaaaaaactcaggccgcagtcggtaa

SEQ ID NO: 464712 - DNA, 189 bp, Shigella boydii
atggaaagcttctggggaacgctgaaaaatgagagcctgagccactatcgttttaataaccgggatgaagccatctcagtaatacgggaatacattgagattttctacaatcgtcagcgtcgtcactctcgtctggggaatatctccccggcagccttcagggaaaaatatcatcagatgactgcttaa

SEQ ID NO: 464713 - DNA, 438 bp, Shigella boydii
atgatcgatatcatcaaagaagcctttaatatcgacttccaccacccagtcaaacttccagcagcgtttcctcgcctgcgcaatcgcctggtgtgcggatttacccggtcgataaccatacgagtctgcatggaacaggggttccagtaccggctcgtttataagcttcccatacctgtcgtttacttacaggaaatggctttgccgattttacagcagtcctcccatcggcattgtcgcccgtggttgccgccgcaccatcagcacaatggggcaagccctttgctccggacccattacggtccttcaccgctactacggtttactccgtccctgtaccatttttcagcgttccccagaagctttccatcggagcgttgtcgtaacagtgacctttacgcgacattgatgttttcagaccagactgctcctgtatga

SEQ ID NO: 464714 - DNA, 327 bp, Shigella boydii
atgactaaaaatactcgtttttcccccgaagtccgtcaacgggcagtccgtatggttctggaaagtcagggcgaatatgactcacaatgggcgacaatttgttccattgctccaaagattggctgtacgccggagactctgcgtgtctgggttcgccagcatgagcgggataccgggggcggtgatggagggctcaccaccgctgaacgtcagcgtctgaaagagctggagcgtgaaaatcgtgaactgcgccgcagtaacgatatccttcgccaggcttccgcttattttgcgaaggcgaagttcgaccgcctctggaaaaaatga

SEQ ID NO: 464715 - DNA, 468 bp, Shigella boydii; identical to SEQ ID NO: 464697

SEQ ID NO: 464716 - DNA, 327 bp, Shigella boydii
atgactaaaaatactcgtttttcccccgaagtccgtcaacgggcagtccgtatggttctggaaagtcagggcgaatatgactcacaatgggcgacaatttgttccattgctccaaagattggctgtacgccggagactctgcgtgtctgggtacgccagcatgagcgggataccggaggcggtgatggcgggctcaccaccgctgaacgtcagcgtctgaaagagctggagcgtgaaaatcgtgaactgcgccgcagtaacgatatccttcgccaggcttccgcttattttgcgaaggcggagttcgaccgcctctggaaaaaatga

SEQ ID NO: 464717 - DNA, 150 bp, Shigella boydii; identical to SEQ ID NO: 464429

SEQ ID NO: 464718 - DNA, 693 bp, Shigella boydii
atgaccctgtcttttgttacccgctggcgcgatgaattgccagaaacctatacagcactttcccctacgcctttaaataatgcccggctgatttggcataataccgaactggctaacacgctgagtattccatcgtcgctgtttaaaaatggcgcaggtgtctggggcggcgaagccctactgcctggtatgtcaccactggcgcaggtttacagtggtcatcagttcggcgtctgggcgggccaactgggtgatgggcgcggcattttactcggcgaacaactgcttgctgatggcactacaatggactggcatctgaaaggtgctggcctgacgccttattcgcgaatgggtgatggacgggcggttttacgttcgacgatacgagaaagtctcgccagtgaggcgatgcattatctgggcattccgacgacccgcgcgttaagtatcgtcaccagcgattcgccagtgtatcgggaaacggcggagctaggcgcgatgctgatgcgtgtggcaccaagtcatctgcgctttggtcatttcgaacatttttactaccgccgcgagtcggaaaaggttcgtcagttagctgactttgctattcgtcattactggtcacatcttgaagatgatgaggacaaataccgtctctggtttagcgatgttgtcgcacgtactagactggccccctga

SEQ ID NO: 464719 - DNA, 537 bp, Shigella boydii; identical to SEQ ID NO: 18455

SEQ ID NO: 464720 - DNA, 129 bp, Shigella boydii
gtgtttgattttagcaaactgattcgggagatggctgaaaaattatccacctggaagttcattcttatctggctggtgtttgtgattatggcctccggttatttcatcggtcagatacgctggtggtga

SEQ ID NO: 464721 - DNA, 468 bp, Shigella boydii; identical to SEQ ID NO: 464389

SEQ ID NO: 464722 - DNA, 546 bp, Shigella boydii
atgttgcatttaaaaaatattactgcgggtaatccgaaaactgcggaacaataccagatgacaaaaaaatatgatattacctggcttttttcggaggacgacaaaaactggtatgaagaactgaagaatttcgccagcgacacaattaaaatagcttacaccggagacgggcgcgtggtgtgggtcggtaaggatgtgacaggcattgaaccccgtaacgccagtgttattgaagttcctgatattaccgccaaccgccgcattaccgcgccgggttactggttttaccgcaatgatgaatttgtccttgactacagactcaaagcggaagatgagcgtgatgcccttctggctcaggtcagtgcccggacaggggaatgggaagaagacctgttgctggggttaatcagcgacgaagataaagaaaagctgaaagcctgtcgtatttacgcgaaatcgctgcaggcgatggatttcagcaccatcacagataaagccacatataacgccatcaactggccggagcgtcccgatgccgcagcttaa

SEQ ID NO: 464723 - DNA, 225 bp, Shigella boydii
atgtcgcgtaaaggtaactgttacgacaacgctccgatggaaagcttctggggaacgctgaaaaatgagagcctgagccactatcgttttaataaccgggatgaagccatctcagtaatacgggaatacattgagattttctacaatcgtcagcgtcgtcactctcgtctggggaatatctccccggcagccttcagggaaaagtatcatcagatggctgcttaa

SEQ ID NO: 464724 - DNA, 225 bp, Shigella boydii; identical to SEQ ID NO: 133446

SEQ ID NO: 464725 - DNA, 654 bp, Shigella boydii
gtgctagaaagcgttgcgataacccaaactgacgccgatcatgccgatgccgttgtgcgctttcgtatctttaaagatgataaagaaaagaccacgcagacactgaaaatggtggcggaaaatggtcgttgggtcattgacgatattgtcagcaatcatggtagcgtcttacaagcagttaatagcgagaatgaaaaaacgctggccgctttagcttcgttgcaaaaagaacagccggaagcctttgttgccgaactctttgaacatattgctgattatagctggccgtggacgtgggtggtttccgactcttaccgccaggcggttaatgccttctataaaaccaccttcaagacggccaataatcccgatgaagatatgcaaatagaacggcaatttatttacgacaatccgatctgttttggcgaagagtcgctattttcacgcgttgatgaaattcgagtcctggagaaaaccgccgattccgcccgcattcatgttcgttttacgctgaccaatggcaacaacgaagagcaagaactggttttacagcggcgcgaaggcaagtgggaaatcgctgattttatccgcccgaacagcggcagcctacttaagcagattgaggcaaaaactgccgccagattaaagcaatga

SEQ ID NO: 464726 - DNA, 351 bp, Shigella boydii; identical to SEQ ID NO: 464002

SEQ ID NO: 464727 - DNA, 189 bp, Shigella boydii; identical to SEQ ID NO: 463227

SEQ ID NO: 464728 - DNA, 426 bp, Shigella boydii
gtgaaaacgggggctgaagccatccgcgcactggccacacagctcccggcgtttcgtcagaaactgagtgacggctggtatcaggtgcgcattgccgggcgtgatgcaggtgaaaccgaattgtctgcccgtcttaatgagccgctggcaaatggtgcagtgatccacatagtaccgcgtctggtgggagctaaaagtggcggtgtgtttcaggcggtgctgggggcagctgttatggcggttgctatatggatgccgggggtaggaattatggcgagtaatctgctgttttctctcggtgccagtatgacgcttggcggtgttgcacagatgctggcaccgaaagccagaactccccgtacacagacaacggataacggcaaacagaacacctgtttctcctcactggataacatggttgcctag

SEQ ID NO: 464729 - DNA, 600 bp, Shigella boydii
atggctccggaggactggctgcgggcacaaatgcagggtgagattgtggcactggtccacagtcatcccggtggtctgccctggctgagtgaggctgaccggcggctgcaggtgcagagtgatttgccgtggtggctggtctgccggggggcgattcacaagttccgctgtgtgccgcatctcactgggcggcgctttgagcacggggtgacggactgttacacgctgttccgggatgcttatcatctggcggggattgagatgccggattttcatcgcggggatgactggtggcgtcacggtcagaatctctatctggataatctggaggccacagggctgtatcaggtgccgttgtcatcagcacaaccgggcgatgtgctgctgtgctgttttggttcatcggtgccgaatcatgccgccatttactgcggcgacggtgagctgctgcaccatattcctgaacaactgagtaaacgagagaggtataccgacaaatggcagcgacgcacacactccctctggcgtcaccgggaatggcacgcatctgcctttacggggatttgcaacgatttggccgccgcatcgaccttcgtgtga

SEQ ID NO: 464730 - DNA, 150 bp, Shigella boydii; identical to SEQ ID NO: 464429

SEQ ID NO: 464731 - DNA, 381 bp, Shigella boydii; identical to SEQ ID NO: 463673

SEQ ID NO: 464732 - DNA, 288 bp, Shigella boydii
atgggcgcgagcttccgtcgcaccgaacaaatcctcgccttaaccggctgcgatcgactgactatcgcaccgaatttgctgaaggagctgcaggaaaaagtttcgccagtggtacgtaaattaatcccaccttctcagacgttcccacgcccagctcccatgagcgaagcggagttccgttgggagcacaatcaggatgcgatggcggtagaaaaactgtctgaaggcattcgtctgttcgccgttgatcaacgcaaactggaagatcttcttgccgccaaactataa

SEQ ID NO: 464733 - DNA, 546 bp, Shigella boydii; identical to SEQ ID NO: 464722

SEQ ID NO: 464734 - DNA, 525 bp, Shigella boydii
gtggcacaggtttcacagtggaagcgttatgattcccggacacctgttaatctggcgacgcgtatggcgctcgatgcttttaacgtcgcactggcaaaagatctacgtgttaatattcgtgaacaggcatctggagcatacagcgtttcttctcgcctctcggttgatcctcaggccaaagatatcagtcatttgctggcttttacttgtcaaccagaacgacatgatgaactgttaacgttagcgaatgaagtgatggttaagcgtctggctaaagggatcagtgagcaagaactgaatgaataccagcaaaacgttcagcgcagcctcgatatccaacagcgtagcgttcaacaattagcgaacactattgtaaatagtcttattcaatatgacgatcctgcagcatggactgagcaggagcgattgttgaaacaaatgacggtagagaatgttaacactgccgttaaacaatatctttctcatccggtaaatacttataccggagtatttttgccaaaataa

SEQ ID NO: 464735 - DNA, 240 bp, Shigella boydii
atgcgcggctatgccaccggcggttatgtcggtggcaccggaagtccggcgcaaatgcggcgttcagagggtatcagatttgagcagaacaacaacgtggtgattcagaacgacggtacgaatggtctgccaggtccacagatgctgaaggcagtgtatgacatggcccgcaagggtgcccgtgatgaaattcaggcacagatgcgcgatggtggtctgttctccggaggtggacgatga

SEQ ID NO: 464736 - DNA, 645 bp, Shigella boydii
atgcaggcggtgaatgccgtgctgtatggcaaatatacgatggaaggagaccagttcgagaaaattgaagtcgattttggccgatcgacgaagaataacatcatacaaggtagcggtaaggagtggtcaaaacaggatcgtgacacgttcgacccgacatatgatatcgaccttttctgtgatcaggccagtggtcttgtgaatattgccattatggacggtaccgtctggcgtctgctgaatggctttaagcttttccgcgaaaaaatggatacccgtcgcggttcaaattcacaactcgaaacggcagtgaaagatctgggcgcagtggtatccttcaaggggtattacggcgatctggccattgcggtagcgaaaacgtcttatgtggcagaggacggtaccgaaaaacgttatctgccggagggcacgctggtgctggggaatacggcagcagaggggattcgttgctatggagccattaaggatgcacaggcgttgtctgaaggagtggtggcttcttcccgttacccgaaacactggctgaccgtgggcgatccgtcctgtgaattcaccatgacgcagtccgcgccgctgatggtgctgccggatccggatgagtttgtggtggtacaggtgaaataa

SEQ ID NO: 464737 - DNA, 780 bp, Shigella boydii; identical to SEQ ID NO: 464383

SEQ ID NO: 464738 - DNA, 348 bp, Shigella boydii
atgactaaaaatactcgtttttcccccgaagtccgtcaacgggcagtccgtatggttctggaaaatcagggcgaatatgactcacaatgggcgacaatttgttccattgctccaaagattggctgtacgccggagactctgcgtgtctgggtacgccagcatgagcgggataccggaggcggtgatggcgggctcaccaccgctgaacgtcagcgtctgaaagagctggagcgtgaaaatcgtgaaccacggcagcctgacggctgcaaattgaaaaccgcccctgttcgtcctgttgttgccgcacgctccgcagaatatgtatgctctgaggacctgttttattaa

SEQ ID NO: 464739 - DNA, 189 bp, Shigella boydii; identical to SEQ ID NO: 461987

SEQ ID NO: 464740 - DNA, 225 bp, Shigella boydii; identical to SEQ ID NO: 133446

SEQ ID NO: 464741 - DNA, 726 bp, Shigella boydii; identical to SEQ ID NO: 464435

SEQ ID NO: 464742 - DNA, 216 bp, Shigella boydii; identical to SEQ ID NO: 21150

SEQ ID NO: 464743 - DNA, 162 bp, Shigella boydii
atgaaatttctggaatgtgctgtccgggatgtgatttatgggaccaatgtccgtattgtcaaaccggtcaacatttatgaatgtgaactcagggacaacgtgtttgtcggccctgaactgccccgggaatcctggagactaaacttcctgagaaagaggtaa

SEQ ID NO: 464744 - DNA, 156 bp, Shigella boydii
atgatgatcgatagtgatgcgaataagtgttcgattcagatgcgattatgcaatatgattttatgtgtgttgcttaattatcatatttcttgcccgttccccgccgcgcagatccggtttccggctgaagtggatacagacctgatttgtttctga

SEQ ID NO: 464745 - DNA, 720 bp, Shigella boydii
gtgtgccacttcactgcgtcaacgaccaaggcccgaacatcgtttggtattttaggtgctatcagcctctcacatctgctgaacgacatgatccaatcgctgattctggcgatttatcctctgcttcagtcagaattttctctgacatttatgcagattggcatgataaccctcaccttccagctcgcctcttcgctactgcaaccagtggtcggctactggaccgataaatatccgatgccgtggtcgttgccaattggcatgtgctttaccttaagtggtctggtgctgcttgcgctggcgggcagttttggcgcagttctgctggcggcggcgcttgtcggtaccggttcatcggtctttcatccggaatcttctcgcgtagcccgtatggcttccggcgggcggcatggcctggcgcaatctatctttcaggtcggcggcaactttggcagttccctgggacccttgctgacggcggtgattatcgcgccttatggcaaaggcaacgttgcctggtttgtgcttgcggcactgctggcgatcgtggtgttggcgcaaattagccgttggtactcggcacagcaccgaatgaataaaggaaaacccaaagcgacgataatcaatccactgccgcgcaacaaagtggtactggcagtcagcattctgttaatcctcattttctcgaaatatttctatatggcgagcatcagcagctag

SEQ ID NO: 464746 - DNA, 591 bp, Shigella boydii
atgggagaaggaagttgtcctgcagctcagtttcggattaattataaaaatggcggtattttttatcgttcagcccgtgatggttatggttttgaagccgactggtccgaattttacaccaccaccagaaaaccttcagcaggagatgttggtgcactgccgttatctggtggtcaactgaatggtgcactgggtatcggaacagccagtgctcttggcggtaattcgattgtattgggtgataatgatacgggctttaaacaaaatggcgatggtaatctggatgtttatgctaataacgtccatgttatgcgctttgtctccggaagcattcaaagtaataaaaccataaatattacgggacgtgttaatccctcggattacggtaactttgattcccgctatgtgagagatgtcagacttggcacacgagttgttcagaccatgaagaaaggcgtgatgtatgaaaaatcaggccatgtaatcacggggcttggtattatcggtgaagtcgatggtgatgatccggcagtattcagaccaatacaaaagttaattaacggaacatggtataacgtatcgcaggtataa

SEQ ID NO: 464747 - DNA, 123 bp, Shigella boydii
atgcagcatttaaaaaacattgtcgcaggtaatccaaaaaccgttgaactgaggtgtactggcaatagcggacactaccatttgttcttttttaagcagccatctgatgatatttttccctga

SEQ ID NO: 464748 - DNA, 276 bp, Shigella boydii; identical to SEQ ID NO: 458859

SEQ ID NO: 464749 - DNA, 648 bp, Shigella boydii
atggaaaactttaaacatctccctgaaccgttccgcattcgtgttattgagccagtaaaacgtactactcgcgcttatcgtgaagaagcaattattaaatccggtatgaacccgttcctgctggatcgcgaagatgtgtttatcgatttactgaccgacagcggcaccggggcggtaacccaaagtatgcaggcagcgatgatgcgcggcgacgaagcctacagcggcagccgcagctactatgcgttagccgagtcagtgaaaaatatctttggttatcaatatactattccgactcaccagggccgtggcgcagagcaaatctatattccggtactgattaaaaaacgcgagcaggaaaaaggcctggatcgcagcaaaatggtggcattctctaactatttctttgataccacgcagggccatagccagattaacggctgtaccgtgcgtaacgtctatatcaaagaagccttcgatacgggcgtgcgttacgactttaaaggcaactttgacctcgaaggattagaacgcggtattgaagaagttggcccgaataacgtgccgtatatcgttgcaaccatcaccagtaactctgcaggtggtcagccggtttcactggcaaacttaaaaggtaaggcagtatga

SEQ ID NO: 464750 - DNA, 756 bp, Shigella boydii
gtgatccacggtattgctcgtggtactgcacaggtcactattaaacaaaatgggtatgacatttataatagtacggtgccaccggggccttttaccatcaacgatatctatgccgcaggtaatagtggtgacttgcaggtaacgatcaaagaggctgacggcagcacgcagatttttaccgtaccctattcgtcagtcccgcttttgcaacgtgaagggcatactcgttattccattacggcaggagaataccgtagtggaaatacgcagcaggaaaaaccccgctttttccaaagtacattactccacggccttccggctggctggacaatatatggtggaacgcaactggcggatcgttatcgtgcttttaatttcggtatcgggaaaaacatggggacactgggcgctctgtctgtggatatgacgcaggctaattccacacttcccgatgacagtcagcatgacggacaatcggtgcgttttctctataacaaatcgctcaatgagtcaggcacgaatattcagttagtgggttaccgttattcgaccagcggatattttaatttcgctgatacaacatacagtcgaatgaatggctacaacatcgaaacacaggatggagttattcaggttaagccgaaattcaccgactattacaacctcgcttataacaaacgcgggaaattacagctcaccgttactcagcaactcgggcgcacatcaacactgtatttgagtggtagccatcggtaa

SEQ ID NO: 464751 - DNA, 399 bp, Shigella boydii
atgtcaccgaggccacgaaaaaacagcactgacgtagccggtctttacgaaaagtttgatcgcagaactggcagagtttactaccagtataaaaatcctgtgactggaaaatttcacggactcggaacagacaaaggtaaggcagaaaaaatcgcttccacagccaatcagcgaatagctgcagcagaagctgaatatttcatgcgcaaaattgatgaaagtccgtcagcaacaaaacgtcggggtatcagattaaaggcatgggttgatcgatatctgaaaatacaggacacgcgactgaaaaatggagatattgcagctacaactcacaaagaaaaaactcgaatggctgcatacctggtttcccgtctgggaaaccacccattgaaagaactgtag

SEQ ID NO: 464752 - DNA, 726 bp, Shigella boydii
atgcaaagccagatggacccggtgtacacgccggcgcgaaaaatccacctgtaccactgcgaccatcgcggcctgccgctggcgctcatcagcacggaaggggcaacagcgtggtgcgcagaatatgatgaatggggcaacctgctgagtgatgagaacccgcatcatctgcagcagctcattcgcctgccgggtcagcagtatgatgaggagtccggcctgtattacaaccgccaccgctattatgacccgctgcaggggcggtatatcactcaggatccgattgggctgaaggggggatggattttttatcagtatccgttgaatccggtcataaatgtagatccgcaaggtttggttgatataaatttataccccgaaagtgatcttatccattctgtagctgatgagattaatatcccaggcgttttcacaatcggggggcatggtacccccacatctattgaatccgcaacgcgcagtatcatgacagctaaagatctagcatatctaattaaatttgatgggaattataaagatgggatgacagtttggttattttcttgtaatacaagtaaaggacaaaattcatttgctagccaattagctaaagagttacatacaaatgtaataggacctgacacgctatggacgtggtgggggcgaggaactaatggtaagttaaaaatggatacagtgctaacagcaccaacgaaccttaggtaa

SEQ ID NO: 464753 - DNA, 261 bp, Shigella boydii; identical to SEQ ID NO: 464178

SEQ ID NO: 464754 - DNA, 507 bp, Shigella boydii
atgccattctatttcaggaaggagtgtccgttaaactcaggctacctcaataatcctgctctggatatggctggcgcattgactacggtaaaacgccagcatcgccccgctcttgatctttctcgcctgcctgaacttttgtcgcgtattggcagttacaaagggcaacctgtcacccagcttgccgttatgctgaatttactggtttttattcgttccagtgaactcagatacgcccgctggtctgaaattgatattgacaatgccatgtggactattccagccgaacgcgaacccctgccaggcgtaaaattctcacaccggggctccaagatgcgaacaccacatcttgtgccactcagcaaacaggctgtagccatactgacagaactacagacatgggctggtgaaaatggtctgatctttacgggagcacatgacccgcgtaaaccaatcagtgaaaatgtaatgaacgcatctcacacaattaaacacggagcagtatga

SEQ ID NO: 464755 - DNA, 369 bp, Shigella boydii
atgctgcctgtcggcttaagcatctggctggcccatcagcaggtagatacatcgtttattgaagagctggatacctattcctcccgcgtcgctattcgggccaataaggtggcgacacaagggaaagatgcgctgcaagagctggaaagatggcaaggcgctgcctgtagcgaagcccatctcatggaaatgcgtcgggtatcttacagttatcgctatattcaggaagtggtttatatcgataacaacgttccccagtgttcgtctctggagcatgaaagtccgcccgataccttccccgagccaggtaaaatttcgaaagatggttatcgtgtctggttaacatcgcataacgatttaggcatttga

SEQ ID NO: 464756 - DNA, 534 bp, Shigella boydii
atgaacaccaaaatcaaatacggcctgtcggctgccgttctggcgctgattgccgctggtgcgcctgcgcctgacattctcgaccagtttctggatgaaaaggaaggtaaccacaccacggcataccgtgatggcgcgggtatctggaccatctgccgcggtgccatcctggtggatggcaaacctgtcgttccgggcatgaagttgtcgaaggaaaaatgcgaccgggttaacgccattgagcgtgataaggcgctggcatgggtggagaaaaacatcagagtgccattgagcgaaccccagaaagcggggatcgcgtcattctgtccgtacaacattggtcccggtaagtgtttcccgtcgacgttttataaacgaattaatgcaggtgatcgcaggggagcgtgtgaggcgattcgctggtggattaaggacggtggcagagactgccgtattcgttcaaacaactgctacggtcaggtatcccgtcgtgaccaggagagcgcgctggcgtgctggggtatcgacagataa

SEQ ID NO: 464757 - DNA, 225 bp, Shigella boydii; identical to SEQ ID NO: 133446

SEQ ID NO: 464758 - DNA, 192 bp, Shigella boydii
atgtcaaaaccccgatggaccattgaacagaaaaggcagcacgttgctgcctggcgcgccagtggtcttacacgtcagcaatactgtgaactcaacgatattcccttcacatcacttcgcgaatggccgcaggatgtcgcaaaagctgaacgccgggcaaatgaaccgaccgttcttcccgttcatatgtaa

SEQ ID NO: 464759 - DNA, 492 bp, Shigella boydii
atgcccccgttttttactgaaccggaaagaaatatggcaaagaaagacgagaatctgaaacgtctgaaagagctgtcagaattgctggggcgtgagcctgatatgtcgggaagcgcggcagatatcgcacagcgtgtggcagagctggaagaggagcttggtggtgtggatggcactgacaaccaggcaagtgtgcttaccgggcaggaaaataacggggaggcagttccgccggagaggatgattcagaatacggatgaggacgactggcaggctgttctgcatattgccgttttcgtccgtgcacaggcgccggattctgagctggatacgtggatggagaacaccatatttccggccatgaaggatattccggtgctttccggactcatcgacaccatgatcccactcggttttaactatcaacgtgataatgagatggccacctgggcgatggcggaaatcacgtaccagatcacgtacacgaattaa

SEQ ID NO: 464760 - DNA, 303 bp, Shigella boydii
atgaaaaaaagaaattttagcgcagagtttaaacgcgaatccgctcaactggttgttgaccagaaatacacggtggcagatgccgccaaagctatggatgttggcctttccacaatgacaagatgggtcaaacaactgcgtgatgagcgtcagggcaaaacaccaaaggcctctccgataacaccagaacaaatcgaaatacgtaagctgaggaaaaagctacaacgcattgaaatggagaatgaaatattaaaaaaggctaccgcgctcttgatgtcagactccctgaacagttctcgataa

SEQ ID NO: 464761 - DNA, 378 bp, Shigella boydii
gtgaaaacggaagccaaaagtaatgaggttacagccattccagagttgcttaacctactggatttaaagaaaagtttgataaccattgatgctatgggctgtcagaaagatatcgcttctaaaattaaagataaaaaggcagattatcttctggcagtaaaaggcaatcaggggaaattacatcatgcattcgaagaaaaattccctgtaaaaatgttctctaattataaaggcgattcatttgatactcaggagataagccatggaagaaaagaaacacgtttacatattatcagtaacgtaacgcctgaattttgtgattttgaatttgaatggaagggattaaaaaagctttgtgtggcattgtcattcaggtaa

SEQ ID NO: 464762 - DNA, 225 bp, Shigella boydii; identical to SEQ ID NO: 133446

SEQ ID NO: 464763 - DNA, 450 bp, Shigella boydii
atgctcgatattccagaaatgcgtgacgccctccactttgttcttgagttaacggatatctatatgcccagcgagggcgaagtgttgctcttgtcgccacattcgacgccggagcgtgcaatcgcaggttttcttgaagaaggtgttaaagaggtgattgtgaagcgcggcaatcaaggtgccagttactactccgcgaatgagcagtttcatgttgagagctatccggtggaagaagttgacccgaccggtgcgggagactgctttggtggcgcgtggattgcctgccgccagctagggtttgacgtccatcgagcgctgcaatatgccaatgcctgcggtgcgctggcggtaaccagacgtggcccaatggagggaacgtctcgccttgcggaaatcgaagcgttcatccagcgccatgacatgtccattcaggaagcagcacaatga

SEQ ID NO: 464764 - DNA, 417 bp, Shigella boydii
atgcggatgaatatgtctgactttgccactttctttgccgtggcccgtaatcaaagctttcgtgcagcgggcgatgagttaggcttatcctcgtccgccattagccatagtattaaaacactggaacaacgtcttaaaattcgcttattcaatcggacaacccgaagcgtatcgttaacggaagcgggttctaatctctatgaacgattgcgcccagctttcgacgaaattcagatcatgttagatgagatgaatgattttcgtctgacaccgacaggaacgctcaaaatcaatgccgcccgggtagctgcacgtatatttttaatgcctttactgggtaatgactccaacttattgatagtgttttatgttcagataatgcccgatgactttgtcatgcagctccaccgattttga

SEQ ID NO: 464765 - DNA, 279 bp, Shigella boydii
atggcggacctgtacagtcatcgctgggaaatcgaactgggatacagggagataaaacagacgatgcaactgagcaggctgacgctgagaagtaaaaagccggagcttgtggagcaagagctgtggggtgtcttactggcttataatctggtgagatatcagatgattaaaatggcggaacatctgaaaggttactggccaaatcaactgagtttctcagaatcatgcggaatggtgatgagaatgctgatgacattgcagggcgctgaggtagcctga

SEQ ID NO: 464766 - DNA, 276 bp, Shigella boydii
gtggcttctgtttctatcagctgtccctcctgttcagctactgacggggtggtgcgtaacggcaaaagcactgccggatatcagcgctatctctgctctcactgccgtaaaacatggcaactgcagttcacttacaccgcttctcaacccggtacgcaccagaaaattattgatatggccatgaatggcgttggatgccgggcaactgcacgcattatgggcgttagcctcaacacgattttacgtcacttaaaaaactcaggccgcagtcggtaa

SEQ ID NO: 464767 - DNA, 357 bp, Shigella boydii
atggttaaactggcttcacaaccaggagcctctgttgcccgtattgcccgggaacacgatatcaatgataacctgctgttcaaatggctcaggctctggcagaacgaagggcgcatatcgcggcgtcttccggtaacaacctcttctgacactggcgttgaattattacctgtggagataacgccggatgagccgaaagaaccggtggctgctcttactccgtctttatctactcagactacagttagtgccagctcctgcaaggtggagttccgtcacggtaacatgacgctggaaaatccttcaccagagctgctcactgtgttgatccgtgaactgaccgggtggggacgatga

SEQ ID NO: 464768 - DNA, 570 bp, Shigella boydii
atgaataataatgctctcagaaatattgatatagataggctttcatcagttacttattttagtgcggcacataatcaactagagtttgtgcaattagaatcttgcgaatggctgcaatacctgaatctcagccataatcaattaactgatattgttgcaggtaataaaaatgaactcttactgctggatctatcccataataaactaacaagtttacacaatgacttatttcccaacttgaatacgttacttattaacaacaatttgctttctgaaattaaaatattctatagcaacttctgcaatgttcagacattaaacgctgctaacaaccagttgaaatatataaatcttgatttcctgacttatcttccatctatcaaaagtttaagactggacaataataaaataacccacattaatactaataatacatccgatattggaactttattccccataataaaacagagcaaaaacttaaattttttaaatgtttctgggaagaacaattgccctactatgcagctcatgttatttaatttgttttccccagcacttaagcggtaa

SEQ ID NO: 464769 - DNA, 216 bp, Shigella boydii; identical to SEQ ID NO: 464382

SEQ ID NO: 464770 - DNA, 402 bp, Shigella boydii
atgcaacacaactcatatcgccgttggataaccctcgcgataattagttttagcggcggcgttagttttgacctggcttatttacgttatatttatcaaattcccatggcgaaatttatgggattcagcaataccgagataggtttaataatgagtacctttggtattgcggctattattctttatgcccccagcggcgttattgccgataaattttcacaccgcaaaatgattacttccgcgatgatcattaccggattactgggtctgttaatggcaacgtatccaccgctgtgggtaatgctctgtattcaggtcgccggtaatgctgccaacttactgatagtgttttatgttcagataatgcccgatgactttgtcatgcagctccaccgattttga

SEQ ID NO: 464771 - DNA, 378 bp, Shigella boydii
atggaattattatccacgcaacatataagcttactggatagaataaaaggtaatagcgtaacattattctgcgagctgatattaaatttcagaaatgaaatagagcgtagacaattaagcacaaacaccatgaaaagacacaaccagaggttgaaaatcataagtgaatactttggtggtgttccggttaaaaatataggcataagggaggtgtacagctttcttgaaatcagagcagctggaagtaaatttgctattgctaaccagtacagggcgcttttatcagtgaagtggcacactgaatttggccacctgaacagaggtgatatgctcacctcagaacaacacaggtgctccaatgaaaaaaagaaattttag

SEQ ID NO: 464772 - DNA, 312 bp, Shigella boydii
atgctggggcgtcgtccgaacagcatactcaaagccggtcagcatcgttatcagcgggcatttatccagcgattaaataatgggcgctggcatgttatgcaacgtcttccccaggccagatatgaggagggcaatgacgacaagggaaggaaaaagcgtaatcgccttcccattcaggtggtgaaaatcccgatggcggccccactgaaacaggcatttgatgagaatgttgaccgtatccggcgtgaacgcctgcccggagaactggcatccgcgctgaaacaacaactgaggattgcgataaaacgatga

SEQ ID NO: 464773 - DNA, 270 bp, Shigella boydii
atgctggggcgtcgcccgaacagcatacttaaagccggtcagcatcggtatcagcgggcatttattcagcgattaaaaaatggtcgctggcatgtcatgcagcgtgtggccgggaaaaaccgttaccccattgatgtggtgaaaatcccgatggcggccccactgaaacaggcatttgatgagaatgttgaccgtatccggcgtgaacgcctgcctaaagaactggcatacgcgctgaaacaacaactgaggattgcaataaaacgatga

SEQ ID NO: 464774 - DNA, 225 bp, Shigella boydii; identical to SEQ ID NO: 133446

SEQ ID NO: 464775 - DNA, 534 bp, Shigella boydii
atgctcaaacaagctgatgtattagctgagaattttcgcccaggtacaatggaaaaactggggttttcatgggaaacgcttcaagaaatcaacccgcgcctcatatatgcttcatcgtcaggtttcggacataccggtccgctaaaagatgctcctgcctacgataccatcattcaggcaatgagcgggataatgatggaaacaggatatcctgatgctccgccagtgcgcgttggtacatctcttgcggatctatgcggcggtgtctatttattcagcggaatagtgagtgcactttatggccgcgaaaagagccagagaggggcgcatgtcgatatagcgatgtttgatgccacgctgagttttctggagcatggtctgatggcatatatcgcgacagggaagtcaccacaacgtctgggaaatcgccatccctacatggcaccttttgatgttttcaatactcaggataagccgattacgatttgttgtggtaatgacaagcttttttcggtaatgctgccaacttactga

SEQ ID NO: 464776 - DNA, 597 bp, Shigella boydii
atgccattctatttcaggaaggagtgtccgttaaactcaggctacctcacttataatgctccgcacctgccaaatgataatcctgcaccggatcaatatcagaagcaatttaataccggtagtcaaacagcagataactactacgcttccgtttattctgttgatcagggtgtaaaacgcattctcgaacaactgaagaaaaacggacagtatgataatactattattctctttacctccgataatggtgcggttatcgatggtcctctgccgctgaacggggcgcaaaaaggctataagagtcagacctatcctggcggtactcacaccccaatgtttatgtggtggaaaggaaaacttcaacccggtaattatgacaagctgatttccgcaatggatttctacccgacagctcttgatgcagccgatatcagcattccaaaagaccttaagctggatggcgtttccttgctgccctggttgcaagataagaaacaaggcgagccacataaaaatctgacctggataacctcttattctcactggtttgacgaggaaaatattccattctgggataattaccacaaatttgggtaa

SEQ ID NO: 464777 - DNA, 225 bp, Shigella boydii
atgtcgcgtaaaggtaactgttacgacaacgctccgatggaaagcttctggggaacgctgaaaaatgagagcctgagccactatcgttttaataaccgggatgaagccatctcagtaatacgggaatacattgagattttctacaatcgtcagcgtcgtcactctcgtctggggaatatatccccggcagccttcagggaaaaatatcatcagatggctgcttaa

SEQ ID NO: 464778 - DNA, 276 bp, Shigella boydii; identical to SEQ ID NO: 458859

SEQ ID NO: 464779 - DNA, 537 bp, Shigella boydii
atggcaactaaaggattggttggactggagcgtgtagatctcatccgaggggttgtatttgaaaatggatattatgattggggatgtgttgttaatgatgttttgccaaatatatgcaaaggcaatgcgcgcattcctatttttcacttcttaaatcacgctaaattaattaatcctgatgggagtataattaatgaaacagaactctcaggtggcgttttatcacgattaaatatcactcctattagttttcagtctcaaagatgggataaacgacgctctgaaaccgttcctgaggtcaaggtgggggtcaatgagttatatcttgcttatgatttcactttctttttaagaatgatgccttatatggagcctggattaatcaagcgcgatatgggagagcttctcaaaatattgaaaaaacatatagatgaagctatgaatactcaggtattgtcaagtaatttttgcaaattagtgtgtatttatgctgtctcttatacacatctgacgctgccgacgaatagagaggtgtag

SEQ ID NO: 464780 - DNA, 225 bp, Shigella boydii; identical to SEQ ID NO: 133446

SEQ ID NO: 464781 - DNA, 291 bp, Shigella boydii
gtggaaaaagcccgcccgatcctggctgcttcaccgcaggcgaatgccggaccatcactccgtgatcagatcatggcactggatgaggcaaaaggggctgaggcgcaggctgaacagctggctgcctgcccgggaatgaccgtggagagcgcccgggctgtgctggctgcgggatcaggtaaggcagaaccggtctctgcatccacaaccgccctgtttgaacatttcatggcgaaccattcaccggctgcggtccagggggagcgtgtcacaggcgtcagaagacggtga

SEQ ID NO: 464782 - DNA, 225 bp, Shigella boydii; identical to SEQ ID NO: 133446

SEQ ID NO: 464783 - DNA, 267 bp, Shigella boydii; identical to SEQ ID NO: 464665

SEQ ID NO: 464784 - DNA, 483 bp, Shigella boydii
atgttctatttcccgttcatcttcttcgatcttttcttcggcgcgggccagtgcagagcgcaggaaggcctccgtctcttcaaccagactcagttgctggtctttctgacggagctggcattccagttctgcaatgcgaatgaggtatttttgattcatggccgtttttataatccggccatgacatttttacaacattgtcagtgcgttaaggcgggatgtttttggctgacgccagtccagcttatcgaggagcattgccagttgcgagcgggtaatggataccttgccgtcacgcacagcaggccagataaactggccttcctccaggcgtctggtgaacaggcacagaccatcagcatcagcccacaggattttaatcatgtcaccccgtcggccacggaagatgaacaggtgaccggagaagggattatcattcagcacatgctgtacctgttcacccagcccgttgaaagactttga

SEQ ID NO: 464785 - DNA, 381 bp, Shigella boydii
gtgggttacccccaaacgaatcggaaaatcgatactggaaaaactctaactcggtggccagtttttgttgaccacttcattcttaacctgggaggtgaacacctcggcatcgatacctcacgggataacagtgaattatttgccaacgacggtacaccgacatggctaaaagaaaagcgtgcaaaagaaatcgcacttgatgaaattatcgagttgctcaacaagcaccatgggggcaccagtaacgacgccaaacgcgcaaaagctgatttgctggaaaaaacattcacctcccgctcatgggaaagaatcaaaggtatggactggccgacaatcaaagctggtcgtaatgcactatggattgaactggaaggcgggtga

SEQ ID NO: 464786 - DNA, 189 bp, Shigella boydii; identical to SEQ ID NO: 463227

SEQ ID NO: 464787 - DNA, 363 bp, Shigella boydii
gtgtttaattctgacaacctgagactcgacggaaaatgcgccatcatcacaggtgcgggtgcaggtattggtaaagaaatcgccattacattcgcgacagctggcgcatctgtggtggtcagtgatattaacgccgacgcagctaaccatgttgtagacgaaattcaacaactgggggggcaggcatttgcctgccgttgtgatattacttccgaacaggaactctctgcactggcagactttgctatcagtaagctgggtaaagttgatattctggttaacggtaatgctgccaacttactgatagtgttttatgttcagataatgcccgatgaccttgtcatgcagctccaccgattttga

SEQ ID NO: 464788 - DNA, 318 bp, Shigella boydii
atggatccattaggattatatgaatttaaatcaaaaaatatagatgatattggaatatttgcattggcaatgtgtaatggagaatcaattaacgagaataaagaatatggtggactaatatgtaagaagcaaggtgaatatttccccatgaatccgataagttcaaatgataatgatagtgtagacttgcgaaatataaaatgccctgaaggttcagagagagtaggcgattatcacactcacggtttttactctgacgataaaggaaataaagtaacaaaagaaaatgatgtttatgatagtctaaatttttggtaa

SEQ ID NO: 464789 - DNA, 327 bp, Shigella boydii
atgactaaaaatactcgtttttcccccgaagtccgtcaacgggcagtccgtatggttctggaaaatcagggcgaatatgactcacaatgggcgacaatttgttccattgctccaaagattggctgtacgccggagactctgcgtgtctgggttcgccagcatgagcgggataccggaggcggtgatggcgggctcaccaccgctgaacgtcagcgtctgagagagctggaacgtgaaaatcgtgaactgcgccgcagtaacgatatccttcgccaggcttccgcttattttgcgaaggtggagttcgaccgcctctggaaaaaatga

SEQ ID NO: 464790 - DNA, 150 bp, Shigella boydii; identical to SEQ ID NO: 464429

SEQ ID NO: 464791 - DNA, 255 bp, Shigella boydii
gtgctgaatgataatcccttctccggtcacctgttcatcttccgtggccgacggggtgacatgattaaaatcctgtgggctgatgctgatggtctgtgcctgttcaccagacgcctggaggaaggccagtttatctggcctgctgtgcgtgacggcaaggtatccattacccgctcgcaactggcaatgctcctcgataagctggactggcgtcagccaaaaacatcccgccttaacgcactgacaatgttgtaa

SEQ ID NO: 464792 - DNA, 216 bp, Shigella boydii; identical to SEQ ID NO: 7765

SEQ ID NO: 464793 - DNA, 162 bp, Shigella boydii
gtgtgccacttcaggctcggtactcctggttcccgcacggtggctgaactggaatctgaaattctgcaactgcgtaaggcgggtaatgactccaacttattgatagtgttttatgttcagataatgcccgatgactttgtcatgcagctccaccgattttga

SEQ ID NO: 464794 - DNA, 267 bp, Shigella boydii
atggcgacgctggggcgtcttatgagcttgctgtcaccctttgacgtggtgatatggatgacggatggctggccgctgtatgaatcacgcctgaagggaaagctgcacgttatcagcaagcgttacactcagcgcattgagcgacataatctgaatctgagacaacatctggcaaggctgggacggaagtcactgtcgttctcaaaatcggtggagctgcatgacaaggtcatcgggcattatctgaacataaaacactatcagtaa

SEQ ID NO: 464795 - DNA, 168 bp, Shigella boydii
atgaaaataatacttctgtttttagcagccctggcaagttttaccgtacacgcgcagcctccttcacagaccgtagaacaaacagtccggcagatttatcagaactataaatcagatgccagtacgccttatttcggtgaaaccggggtaatgactccaacttattga

SEQ ID NO: 464796 - DNA, 225 bp, Shigella boydii; identical to SEQ ID NO: 133446

SEQ ID NO: 464797 - DNA, 213 bp, Shigella boydii
ttgattcggccagtaacggcgtctggtgaacaggcacagaccatcagcatcagcccacaggattttaatcatgtcaccccgtcggccacggaagatgaacaggtgaccggagaagggattatcattcagcacatgctgtacctgttcacccagcccgttgaaagacttacgcatatcggttatcccagcaacgagccagatgcgggtgcctga

SEQ ID NO: 464798 - DNA, 264 bp, Shigella boydii
atggcggatctgtacagtcatcgctgggaaattgaactgggatacagggagataaaacagacgatgcaactgagcaggctgacgctgagaagtaaaaagccggagcttgtggagcaagagctgtggggtgtcttactagcttataatctggtgagatatcagatgattaaaatggcggaacatctgaaaggttactggccgaatcaactgagtttctcagaatcatgcggaatggtgggtaatgctgccaacttactgatttag

SEQ ID NO: 464799 - DNA, 177 bp, Shigella boydii
atggtgggccagaacaaagccatgccgatgattattcttgtatgcgctttattgacctatggaggcgtatcattgtttgtggtggcgtttgccaatctgttctttacttggctgattccacatatttacggtgatcagtttatgataaatctgccggggctgaaaaaaccgctgtaa

SEQ ID NO: 464800 - DNA, 327 bp, Shigella boydii
atgaatacacttgaacctgctgcccagtcgaaaccgccgggcggatttaagctgtggttgtcgcagctgcaaatgaagcatgggcgcaaactggtcattgcgttgccatatatctggttgatcttgctgtttctgctgccatttctgattgtctttaaaataagcctggcggagatggcgcgcgctattccaccttataccgaactgatggagtgggctgacgggcaactgtccatcactcttaatctcggtaattttctgcaactgaccgacgatccgctctatttcgatgcttatctccagtcgctacaggtggctgcgatttag

SEQ ID NO: 464801 - DNA, 1182 bp, Shigella boydii
gtgagtttcgttgacctgcatttgagcgaagtggcgcaaatggtcaattacggtttcttcggcgacattgatgttgccgtcattgaagcatcggcactggcaccggatggtcgagtctggttaaccagcgggatcggtaatgcgccgacctggctgctgcgagcgaagaaagtgatcattgaacttaatcactatcacgatccgcgcgttgcagtactggcagatattgtgattcctggcgcgccaccgcggcgcaatagcgtgtcgatcttccatgcaatggatcgcgtcggtacccgctatgtgcaaatcgatccgaaaaagattgtcgccgtcgtggaaaccaacttgcccgacgccggtaatatgctggataagcaaaatcccatgtgccagcagattgccgataacgtggtcacgttcttattgcaggaaatggcgcatgggcgtattccgccggaatttctgccgctgcaaagtggcgtgggcaatatcaataatgcggtaatggcgcgtctgggggaaaacccggaaattcctccgttcatgatgtattcggaagtgctacaggaatcggtggtgcatttactggaaaccgacaaaatcagcggggccagcgcctccagcctgacaatctcggccgattccctgcgcaagatttacgacaatatggattactttgccagccgcattgtgttgcgtccgcaggagatttccaataacccggaaatcatccgtcgtctgggcgtcatcgctctgaacgtcggcctggagtttgatatttacgggcatgcaaattcaacgcacgtagccggggtcgatctgatgaacggcatcggtggcagcggtgattttgaacgcaacgcgtatctgtcgatctttatggctccgtcgattgctaaagaaggcaagatctcaaccgtcgtgccaatgtgcagccatgttgatcacagcgaacacagcgtcaaagtgatcatcaccgaacaagggatcgccgatctgcgcggtctttccccgcttcaacgcgcccgcactatcattgataattgtgcacatcctatgtatcgggattatctgcatcgctatctggaaaatgcgcccggcggacatattcaccacgatcttagccacgtcttcgacttacaccgtaatttaattgcaaccggctcgatgcagggttaa

SEQ ID NO: 464802 - DNA, 381 bp, Shigella boydii
atgaataagtttatcgctgctgaagctgcggaatgtataggctgtcatgcttgtgaaattgcctgtgcggtggcacacaatcaagaaaactggccgctgagtcacagtgactttcgaccgcgtatccacgttgtagggaaaggccaggctgcgaatccggtggcctgccatcactgcaacaatgccccttgcgttacggcttgtccggttaatgctctgactttccagtccgatagcgtacaactggacgagaaaaaatgtattggttgtaaaagatgcgcaatcgcttgcccctttggcgtcgttgagatggtcgatacgattgcgcagaaatgcgacctttgtaaccagcgcagttccggcacgcaagcctgtatttaa

SEQ ID NO: 464803 - DNA, 1026 bp, Shigella boydii
atggacgataaagggctacagcagataaaggtggcccgccagcgcaaaacggcagcaggaaaagcgtcatcagacgctcagccatctcgcagtgcagcgatgctccctgttaactcgcgtaaaggcgcagataaaatttcagcgagtgaacggaaaacccactttggcgaaatctattgcgggctggatccactgcaagcgacttatgagagtgaccgctgtgtttattgtgccgaaaaagctaactgcaactggcattgcccgctgcataacgctattccggattacatccgtctggtacaggaaggaaatattattgaagcggcagaactttgccaccagaccagttccttaccagaaatctgcggcagggtatgcccacaggaccgtctttgtgaaggagcatgtactttgaaagatcactctggcgcagtcactatcggtaatctggaacgctacatcaccgatactgcgctggcgatgggctggcgtcccgatgtcagcaaagttgttccccgtagcgaaaaagtggcggtgattggcactgggccagcagggttagggtgtgctgatattctggcgcgcgcaggagttcaggttgatgtctttgatcgccatccagaaattggcggtatgctgacttttggcattcctcctttcaaactcgataaaacggtattaagccagcggcgagagatattcaccgcaatgggaatcgactttcatctcaactgtgaaattggccgcgatattacctttagcgatttaacttctgaatatgatgcagttttcatcggcgtggggacttacgggatgatgcgagcagatctgccgcatgaagatgcgcccggtgtcattcaggctctaccgttcctgactgcccatacccgccagctcatgggattgccggagtctgaagagtatccgctgacggacgtggaaggtaagcgagtcgtggtattggcggtggcgatacgacaatggattgtttgcggacttccatccgcctcaatgccgccagcgtga

SEQ ID NO: 464804 - DNA, 2883 bp, Shigella boydii
atgatcatccactttactttaaatggcgcgcctcaggagctaaccgttaatccaggcgaaaacgtgcaaaagctgttgtttaacatgggaatgcactctgtacgcaacagtgatgatggcttcgggtttgctggttctgacgcaataatctttaacggtaatatcgttaacgcgtccttgcttattgccgcacagttagagaaggcagatattcgtaccgcagaatctctgggcaaatggaacgagttaagtctggttcaacaggcaatggttgatgttggcgtggtgcagtctggttataacgatccagctgcagctctgattatcaccgatcttctcgatcgcatcgccgcacctacccgcgaagagatcgacgacgcgctttctggtttgttcagccgcgatgctggctggcagcaatactatcaggtcattgaactggcggttgcacgtaaaaataatccgcaggccaccattgatatcgctccgactttccgtgacgacctagaagtcattggtaagcattatcctaaaactgatgccgcgaaaatggtgcaggcgaaaccctgctatgttgaagaccgcgtaacggctgacgcctgcgtcattaaaatgttacgtagcccacacgctcacgcactgattactcatctggatgtcagcaaagctgaagccttaccgggcgtcgttcacgttattactcacctgaattgcccggatatctactataccccgggtggtcagagcgcaccggaaccatcaccgcttgaccgccgtatgttcggcaagaaaatgcgtcacgtcggcgatcgtgttgctgcggtcgtcgcagaaagtgaagaaattgcgctcgaagcactgaagctcatcgacgttgaatatgaagtgcttaagccggtaatgtcgatcgacgaagcaatggcggaagatgcgcctgtcgtgcacgatgaaccggtggtgtatgttgctggtgcgccagatactctggaagacgataacagccatacagcccagcgcggcgagcatatgatcatcaacttcccgatcggttctcgccctcgcaaaaatatcgccgccagtattcatggtcatattggcgatatggacaaaggctttgccgatgccgatgccgatgccgatgtgatcattgagcgaacctataactcaacgcaggcacagcagtgcccgactgaaacacatatctgctttacccggatggacggcgatcgtctggttatccacgcctccacccaggtaccatggcacttacgccgccaggtcgcgcgcctcgtgggcatgaaacagcataaagttcatgtcattaaagagcgagttggcggcggttttggttccaaacaggacatcctgctggaagaagtgtgcgcctgggcaacctgcgtgaccgggcgtccggtactgttccgctacacccgtgaagaagagtttattgctaacacctctcgtcacgtcgcgaaagtcaccgtcaaactgggagcgaaaaaagatggtcgcctgacggcagtgaagatggatttccgcgccaacactggcccttacggcaaccactcactcaccgtaccgtgtaacggaccggcgctgtcgctgccgttatatccgtgcgataacgtcgatttccaggtcaccacctactacagcaacatttgcccaaatggtgcttatcagggttatggcgcaccgaaaggtaacttcgctatcaccatggcattagcggaactggctgaacagttacagatcgaccaactggaaattatcgaacgtaaccgggtacacgaagggcaagagctgaaaattctcggtgcaatcggtgaaggtaaagcgccgacctccgttccttccgccgccagctgtgcactggaagagatcctgcgtcaggggcgcgagatgatccaatggtcgtcaccgaaaccgcaaaatggtgactggcacatcggtcgcggcgtcgccattatcatgcagaaatcgggtatcccggatatcgatcaggctaactgcatgatcaaactggaatcggacggcacctttatcgttcattctggcggtgcggatattggtactggtctggatactgtagtgacgaaactggcagcagaagtgctgcactgcccaccgcaggacgtgcatgttatctccggtgataccgatcatgcgttgtttgataaaggcgcatatgcctcgtccggtacttgcttctcgggtaacgcggcgcgtttggcagcggaaaatctacgggagaaaattctgttccacggcgcgcaaatgttgggtgagccagtggcagatgttcaactagcaacgccgggcgtcgtgcgcggcaagaaaggcgaagtcagcttcggggatattgctcataaaggcgaaaccggcaccggctttggttcactggtgggaactggcagttatatcacgcctgatttcgccttcccgtatggcgcaaacttcgctgaagttgccgtcaacacgcgtacgggtgaaatccgcctggataaattctacgccttgctggactgcggtacaccggtcaacccggaattagcattgggacaaatctacggtgctaccctgcgagctatcggccacagtatgagcgaagagatcatttatgacgccgaaggtcacccgttaacgcgtgatttacgcagctacggcgcaccgaaaattggtgacattccgcgtgatttccgcgcagtgctggtgccgagcgacgataaagtcggcccgttcggggcgaaatcgatctcggaaatcggtgtaaatggcgcagctccggcgattgctaccgcaattcacgatgcatgcggcatctggttacgcgaatggcatttcacaccggagagaatactcaccgcgctggaaaagatataa

SEQ ID NO: 464805 - DNA, 780 bp, Shigella boydii
atgattgaacaatttttcaggcccgactctgtcgaacaggcgctggaactgaagcgccgctaccaggatgaagccgtctggttcgccgggggcagcaaactcaatgctacaccaacccgtaccgataaaaagattgccatttccttacaggatctggaactggactgggttgactgggataacggtgcactgcggattggcgcaatgtctcgcttgcagccactgcgtgatgcgcgatttattcctgcagcgctgcgtgaagccctcggttttgtttactcacgccatgttcgtaatcagtcgaccattggtggtgaaatcgccgcccggcaggaagagtcggtgctgcttcccgtcctgttggcactggatgctgaactggtttttggcaacggcgaaacgctgtcaatcgaggactacccggcctgcccatgcgatcgcctgctaaccgaaattatcattaaagatccgtatcgcacctgtgcgacccgcaaaattagccgttctcaggcaggtttaaccgtcgtgacggcagccgttgcaatgacagaccacgacggtatgcgaattgcgctggatggcgtcgccagtaaagcactgcgtctgcatgatgtcgaaaaacaaaatctggaaggcaatgcacttgaacaggctgtcgccaacgccattttcccgcaggaagatttgcggggcagcgtggcctataaacgctatatcacgggagttctggtagccgacctgtatgccgactgccaacaggctgaggaggaagccgtatga

SEQ ID NO: 464806 - DNA, 1335 bp, Shigella boydii
atgttgattctgaagaatgtcaccgcagtgcagttacacccggcgaaagtgcaggaaggcgttgatatcgctatcgctatcgaaaatgacgtgattgtcgctatcggcgatgccctgacgcaacgctaccccgatgccagctacaaagagatgcatggtcggattgtgatgccgggaattgtctgctcgcacaaccatttttactcggggctttcccgcggaattatggcaaacatcgccccctgcccggatttcatctcaacgctgaaaaatctctggtggcggctcgatcgcgcccttgatgaagagtcgctctattacagcggactgatttgttccctggaagcgattaagagcggatgtacatcggttatcgatcaccatgcctctccggcgtatatcggcgggtcgctctccacattgcgcgacgcatttttaaaagttggcctgcgcgcaatgacctgttttgaaactactgaccgtaacaacggcatcaaagagttgcaggaaggtgtagaagaaaacatccgtttcgcccgtttgattgatgaggcgaagaaagcgacaagcgagccgtatctggtggaagcacatatcggtgctcacgcgccgtttaccgtgccggatgccggtctggagatgctgcgtgaagccgtgaaagccacaggccgtggtttgcatattcacgctgcggaagacctttacgacgtttcctacagtcaccactggtacggcaaagacctgctggcacgactggcgcaattcgatctcatcgacagcaaaacgctggtcgctcatgggctgtacttgtcgaaagatgacatcgccctactcaatcagcgcgatgcgttcctggtgcataacgcccgttcaaacatgaacaaccatgtcggctacaaccatcaccttagcgacatccgcaacctggcattgggaacggacggcattggttcggacatgtttgaagagatgaaatttgccttctttaaacatcgcgatacgggtggtccgctgtggcctgacagttttgccaaagccctgactaacggtaacgaactgatgagccgcaactttggcgcgaaatttggacttctggaagccggttacaaagctgatttaaccatttgcgattacaactcaccgacgccgctgctggcagacaatatcgccgggcatatcgctttcggtatgggctcaggcagcgttcacagcgtgatggtcaatggtgtgatggtctatgaagaccgtcagtttaacttcgattgcgattccatttatgcacaagccagaaaagccgctgccagtatgtggcgtcggatggatgcgctggcataa

SEQ ID NO: 464807 - DNA, 2655 bp, Shigella boydii
atgagcgtcggttacaacctcgaaggtattaagcaaccgccaatgcaacagttcatcgacaatatgatggacgcatctgaccatccgaaattcgcgcaatatcgcgatacgctgaataaattactccaggatgacgcatttttagcccgccacggattgcaggaaaaacgcgaaagcttgcaagccttacccgctcgcatccccaccagtatggtgcagggcgtcaccctctccaccatgcacggctgtcctccgcatgaaatcgaagccatttgccgctacatgctggaagaaaaagggctcaacacctttgtgaaactcaacccgacattactggggtacgcgcgtgttcgtgagatcctcgatatctgcggtttcggttacataggcttaaaagaagagtcatttgatcacgacctcaagctgacgcaagcgctggaaatgctggaacgcctgatggcactggcaaaagaaaaatcactcggctttggcgtaaaactgacgaacactctcggcaccatcaacaataaaggcgcactgcctggtgaagagatgtatatgtcaggccgtgcgctgttcccgctctccatcaatgttgcagcagttctctctcgcgcctttgacggcaaactgctcatttcttattccggtggtgccagtcagctgactatccgcgatatttttgatactggtattcgccctattactatggcaaccgatctgctgaaacctggcggctatctgcgcttaagtgcctgcatgcgcgagctggaaggctccgacgcctggggacttgaccatgttgacgtcgaacgactgaaccgactggcagcagacgcgttaaccatggaatacacccagaaacactggaagccagaagagcgtattgaagtggcagaagacctgccgctgaccgattgctacgttgccccctgtgttactgcctgcgctatcaagcaagatattccggaatacatccgtctgcttggcgaacaccgctatgccgacgcgctggaactcatctaccaacgcaacgctctgcccgccattaccggtcatatttgcgatcaccagtgccaatacaactgtacccgcctggattacgacagtgcgctgaatatccgcgaactgaaaaaagtcgcgctggaaaaaggttgggatgaatataagcaacgctggcacaaaccagccggttctggttcacgccatccggttgccgtgattggtgcaggtccggcgggtctggcagcaggttacttccttgccagagcgggccatccggttacgctgtttgaacgcgaagccaatgcgggcggcgtggtgaaaaatatcattcctcagttccgtattcctgcagagttaattcagcacgatatcgattttgttgccgctcacggcgtgaaatttgagtatggctgctcacccgatttgaccgttgaacagttaaaaaatcagggcttccactatgttctgattgccaccggcactgataaaaatagcggtgtgaaactggcgggcgacaaccaaaatgtctggaaatcactccccttcctgcgtgaatacaacaagggtacagcgctcaagctgggcaaacatgtggtcgttgtcggggcgggtaacaccgcaatggactgcgctcgtgcggcgttacgcgttccaggcgtagaaaaagcaacgatcgtttaccgtcgttcactgcaagagatgcccgcatggcgcgaagagtatgaagaagcgttgcacgacggcgtggagttccgtttcctgaataatccggaatgtttcgatgctgatggcaccttaaccttgcgcgttatgtcgcttggcgaacccgatgagaaaggtcgtcgccgtccggttgaaaccaacgaaatagtaacactgcatgtagacagtctgatcaccgccatcggtgaacagcaggatactgaagccctgaatgcgatgggcgtaccgctggacaaaaacggctggccagacgtcgaccataatggcgaaactcgtctgactgacgtctttatgatcggcgacgtacagcgcggaccatcctccattgtcgctgctgtcggaaccgcgcgtcgggcgaccgatgccatccttagtcgggaaaatatccgttcccaccagaacaataaatactggaacaacgtcaatccggcggaaatctatcaacgtaaaggcgatatctctatcacgctgatgaacagtgacgatcgtgatgcgtttgtcgcgcaggaagctgctcgctgccttgaatgtaactacgtttgcagcaagtgcgtggatgtctgcccgaaccgcgccaacgtctccattgcagtccctggcttccagaatagattccagacgctgcacctcgacgcttactgtaacgaatgcggcaactgcgctcagttctgtccgtggaactgtaaaccatacaaagacaaaatcaccgtcttcagcctggcgcaagactttgataacagcagcaacccaggcttccttgtggaagattgccgggtacgagtacgtctgaataaccaaagctgggtgttaaacatcgacagcgaaggtcagtttaacaacgtaccaccggagctgaacgatatgtgccgcatcatcagccatgtccaccagcatcatcattatctgctgggccgcgtggaggtgtaa

SEQ ID NO: 464808 - DNA, 279 bp, Shigella boydii
atgaaaacatgttggcaaatcctcgaaattgaaagcacgacgcaaatagacattatccgccaggcttatcttgctcgcttaccgttatgtcatcccgaaaccgatccgcagggggttaaagcattacgccaggcctatgaagaggcgctgcgactggcggtaaatcctgtcgaggaagcagatgatgaagaaaaagatgccgccgctgaacatgaaatactgcgtgcattcaggacattactggattcagaaagtgatcgttttcatccctccgcctag

SEQ ID NO: 464809 - DNA, 810 bp, Shigella boydii
atggctgcgcaagggttcttactgattgccacgtttttactggtattaatggtgctggcgcgtcctttaggcagcgggctggcgcggctgattaatgacattcctcttccaggtacagcgggcgttgaacgtatactctttcgtttacctggcgtctctgaccatgagatgaactggaagcaatatctttgtgccattctcggcctgaacatgctggggctggcggtgctgttttttatgttgctcggtcagcactatctgccgcttaatccacagcagttgccggggctgtcgtgggatctggcgctgaataccgccgtcagctttgtcacgaataccaactggcaatcttatagcggtgaaaccacgttgagctatttcagccagatggcaggcttaacggtacaaaactttctttctgccgccagcgggattgcggtgatttttgccttcatccgtgcgtttactcgccagagcatgagcacactcgggaatgcctgggtcgatctgctacgcatcacgttatgggtgctagtccctgtggcgttgttgatcgcactgttttttattcaacaaggtgcgctgcaaaactttctgccctatcaggcagtgaataccgttgaaggagcgcaacagctgttacccatgggaccagtagcttctcaggaagcgatcaagatgctcggtactaacggcggtggcttctttaatgccaactcgtcgcatccgtttgaaaacccaaccgcactgaccaacttcgtgcagatgctggcatcccaacagctctgtgctttgcctttggtgaagtga

SEQ ID NO: 464810 - DNA, 204 bp, Shigella boydii
atgaaagctcgtaacatcaatgatatcgtcaaaagtgcatcccgcagctgccagggtcgcatgcaaattatcaaaggccagtctgacttgttgctgaaaatcgggttctggtgttccgtcctctcgacttcctacttgcccggaaacaaacagcaaatcgccggaacgaatagccgcagaataacgatgctcagcatacagtga

SEQ ID NO: 464811 - DNA, 924 bp, Shigella boydii
atgagtgttttatatccgttaattcaggcgctggtgttatttgccgttgcgccgctgctctccggtattacccgcgtggcgcgcgcccgtctgcataaccgtcgcgggccgggcgtgttgcaggagtatcgcgacattatcaaactgctgggccgccagagcgttggcccggatgcctctggctgggtgttccgcctgacgccgtatgtgatggtgggcgtcatgctgactatcgctactgcgctgccggtggtgaccgtcggttctccgctgccgcaactgggcgatttgatcaccttactgtatctcttcgccatcgcgcgtttcttctttgccatttccggtctggataccggtagcccgtttaccgctatcggtgcgagccgtgaagcgatgcttggcgtgctggtcgaaccgatgttgctgcttggtctgtgggttgccgcacaggttgccggttccaccaacatcagcaacattaccgacaccgtttatcactggccgttgagccaaagcatcccgctggtgctggcgctctgcgcctgtgcgttcgccacttttatcgaaatgggcaaactgccgttcgacctggcggaagccgagcaggagttgcaggaaggtccgctctctgagtatagcggcagcggctttggcgtcatgaaatggggtatcagcctgaaacagctggtggtgttgcagatgttcgtcggggtgtttattccgtggggacaaatggaaaccttcaccgccggtggactgctgctggcgctggtgattgccatcgtaaaactggtggtcggcgtcctggttatcgcgctgttcgaaaacagcatggcccgtctgcgtcttgatattactccgcgcattacctgggctgggtttggctttgcatttttagcgttcgtctccttgctggcggcgtga

SEQ ID NO: 464812 - DNA, 768 bp, Shigella boydii
atgagcaatttattaggcccccgtgacgccaacggcattccggtcccgatgacggtggatgaatccatcgccagcatgaaggcgtcgttactgaaaaaaatcaaacgttctgcctatgtttaccgcgtggactgcggcggctgcaacggctgcgaaatcgaaattttcgccactttatcgccgctgtttgatgcagaacgcttcggcattaaagtcgttccttcaccgcgtcatgcggatattttactgtttaccggcgcggtcacccgtgcaatgcgatcccctgcgctgcgtgcgtggcagtccgcgccggacccgaaaatttgtatctcctacggtgcctgcggtaacagcggcgggatcttccacgatctctactgcgtgtggggcggtacggataaaattgtccctgtggatgtttatatccctggctgcccgccaacgcctgccgccacgctgtacggctttgcaatggcgctcggcctgctggagcagaaaattcacgcccgtgggccgggtgaactggatgaacaaccggcggagatcctgcatggcgatatggtgcagcagctgcgcgtgaaagtggatcgcgaagcacgccgcctggcgggttatcgttacggtcgtcagattgccgatgacttcctgacacagttagggcagggcgaagaacaggttgcacgctggctggaagcggaaaacgatccgcgtctgaacgagattgtcagccatctgaatcatgttgtagaagaggtgcgtatccgatga

SEQ ID NO: 464813 - DNA, 924 bp, Shigella boydii
atgtaccccaatacgcggttcgataaaccaggtaaatcgccgtttatggatatggatctggtgccgaaatatgccgatgaagagagttctgcgtctggtgtgcgcattgacccgactcagacgcagaatctgggggtgaaaacggctaccgtcacgcgcggaccgctgacttttgcccagagtttcccggcgaatgtcagttacaacgagtatcagtatgccattgtgcaggctcgcgctgccgggtttatcgacaaggtgtatccgcttaccgtgggcgataaagtacaaaagggcacaccgcttctcgacctgaccattcctgactgggtggaagcgcagagtgagtatttactgctgcgcgaaaccggcggtacggcgacccagactgaaggcattcttgagcggctgcgactggcgggaatgccggaggcggatattcgccgcctgatcgccacgcaaaaaatccagactcgctttacgctcaaagcgcccattgatggcgtgatcaccgcgtttgatctgcgcgcgggaatgaatatcgccaaagataacgtggtagcgaaaattcagggtatggacccggtgtgggtcactgctgcgatcccggagtctatcgcctggctggtgaaagatgcctcgcagtttacgctcaccgttccggcacgaccggataaaacactcaccatccgcaaatggacgctgctacccggcgtggatgccgcgacccgcacgctgcagctgcgtctggaagtcgacaacgccgacgaggcgctaaaaccgggcatgaacgcctggttgcaactcaataccgccagcgaaccgatgctgctcattccgtcacaagggctgattgattccgaagccaatatttctggcgcactggagcggatgcgctctgaaagtgctacccatgcgcattga

SEQ ID NO: 464814 - DNA, 138 bp, Shigella boydii
atgctgtcgcgtcggggtcatcggttaagtcgttttcgtaaaaataaacgccgcctgcgcgagcgtttgcgtcagcgtattttttcagagataaagtggtgccggaagcaatggaaaaaccaagagtactcgtactga

SEQ ID NO: 464815 - DNA, 534 bp, Shigella boydii
ttggattcattacctgaaaaaggcgtgtttctcgccagtaataacgaaataattgccgaagaacatttcaccggcgaaattaaaaaagaagaagccaaaaaaggcactattgcctggtctattctctcttctcataatacgtccggaaatatggataaacttaaaattaagtttgattcattagcctctcacgatattacctttgttggtattgtacagaccgctaaagcgtccggaatggaacgtttcccgctgccgtatgtgctgaccaactgccataactcactctgcgccgtcggcggcaccattaacggtgatgaccatgtttttggtttatcggcagctcagcgttatggcggtatttttgtgcctccgcatattgcggtcatccatcaatatatgcgtgagatgatggcaggcgggggcaaaatgatcctcgggtcagacagccacacccgttacggtgcattagggacaatggcagtcggtgagggcggcggtgagttggtaaaacagctgcttaatgacacctag

SEQ ID NO: 464816 - DNA, 810 bp, Shigella boydii; identical to SEQ ID NO: 464352

SEQ ID NO: 464817 - DNA, 534 bp, Shigella boydii
atggttgaagatcgccagtttcgcagcgatctcttttatcgcctgaatgtcttcccattggaattgccgccgctacgcgaccgtccggaagatatccctcttttagcaaaacatttcacgcaaaaaatggcgcgccatatgaatcgcgcaattgacgccatcccgaccgaggcgctacgccagttgatgtcgtgggactggccgggcaacgtgcacgagctggaaaacgtgattgagcgagcggtactgctgactcgcggtaacagtctgaatttacatcttaatgtccgacaaagccgtttactgccgacgctaaatgaagattcagcgcttcgcagttcaatggcgcagttgctgcacccgacgacgccagagaatgacgaagaagaacgtcagcgcattgttcaggtattgcgagaaaccaatggcattgttgccgggccccgtggcgcggcgacacgattagggatgaagcgcaccacgctgctgtcacgaatgcagcgtctggggatctcggttcgcgaggtgttgtaa

SEQ ID NO: 464818 - DNA, 3282 bp, Shigella boydii
atgactccagtaaaagtgtggcaagagcgcgttgagatcccgacctatgaaaccgggccgcaggatatacatcccatgttcctggaaaatcgcgtttatcagggatcgtccggcgcggtttatccctacggcgtgaccgatacgctgagcgagcagaaaaccctgaaatcctggcaggcggtgtggctggaaaacgactacatcaaagtgatgatcctgccggaactgggcggtcgggtgcatcgcgcgtgggataaagtgaaacagcgcgattttgtttatcacaatgaagtcattaaacctgcgctggtggggctgctggggccgtggatttccggtgggattgagtttaactggccgcaacatcatcgcccgaccacctttatgcccgttgatttcaccctcgaagcccatgaagacggtgcacagacggtgtgggtaggcgaaacggagccgatgcatggtttacaggtgatgacaggtttcaccctgcgccctgaccgggcggcgctggaaatcgccagccgcgtctataacggtaacgccacgccgcgtcatttcttgtggtgggccaacccggcagtgaaagggggggaagggcatcagagcgttttcccaccggatgtgactgcggtgtttgatcacggcaaacgggccgtctccgctttccccatcgccaccggcacttactacaaagtggactactccgccggagtggacatttctcgctataaaaatgtgcctgttccaacctcatatatggccgaaaaatcgcagtacgattttgtcggcgcgtggtgtcacgatgaagatggcggtttgctgcacgttgccaaccaccatattgcgccaggtaaaaaacagtggagttggggacacagtgaatttggccaggcgtgggataagagtctgaccgacaataacggcccgtatatcgaactgatgaccggtatttttgccgataaccagcccgattttacctggcttgatgcttacgaagagaagcgttttgagcagtatttcctgccttatcattctttgggcatggtgcaaaatgcctcccgcgatgcggtgataaaactccagcgtagtaagcgggggattgagtgggggctgtatgccatctctccgttgaacggataccgcctggcgatccgcgaaatcggcaaatgcaacgcgttacttgatgatgccgtggcactgatgcctgcgaccgccatccagggcgtgttgcacggtatcaatcctgaaaggctgaccattgagctctccgatgccgacggcaatattgtactgagttatcaggaacatcagccgcaagagttgccgttgctggacgtcgccaaagcgccactggcagcacaagacattaccagtacagatgaagcctggtttatcggtcagcatctggagcaatatcatcacgccagccgttcaccgttcgattactacctgcgcggcgtggcgctggatccgctggattaccgctgtaacctggcgctggcgatgctggaatataaccgcgccgatttcccgcaagcggtggcgtatgccactcaggctctgaaacgcgcacatgcgctgaacaaaaatccgcagtgcggacaggcgagtttgattcgcgccagtgcttacgaacgtcagggacaatatcaacaagccgaagaggatttctggcgtgcggtctggagcggcaacagcaaagccggtggctattatggcctggcacgactggcggcgcgtaatggtaacttcgacgctggtctggatttttgccaacaaagtcttcgcgcctgcccaaccaatcaggaagtgctttgcctgcataatctgctgctggtgttaagtggtcgtcaggacaacgcgcgtgtgcagcgcgagaaactgctgcgcgattatccgctgaacgccactctgtggtggctgaactggttcgatggtcgtagcgaatcagctctcgcgcagtggcgcggtctgtgtcagggacgtgacgttaacgccctgatgaccgccgggcaactgattaactggggaatgcccaccctggcggcagagatgctgaacgcactggactgccagcgcacgctgccgctttacctgcaagccagcttgctgccgaaagccgaacgtggcgaactggtcgcaaaagccattgatgtcttcccgcagtttgtccgtttcccgaatacgctggaagaagtggcggcgctggagagtattgaagagtgctggtttgctcgccatttactggcctgcttctactacaacaaacgtagctacaacaaagccattgccttttggcaacgttgcgtagagatgtcgccggagtttgccgacggctggcgcgggttagcgatccatgcgtggaataagcaacacgattatgagctggccgcgcgttatcttgataatgcttatcagcttgcgccgcaggatgcacgtctgcttttcgaacgggatttgcttgataagttaagtggagccacaccggagaaacgactggcgcgtctggaaaataatctggaaattgcgctgaaacgcgacgacatgaccgcagaactgctcaatttgtggcatctcacgggtcaggcagacaaagcggcggacattctcgccacgcgtaaattccacccgtgggaaggcggggaagggaaggtcaccagtcagtttatcctcaaccagttattacgcgcctggcagcatcttgatgccagagagccgcagcaggccagcgaactgcttcatgccgcgctgcattatccggagaatttaagcgaaggccgtttaccggggcaaactgataacgacatctggttctggcaggcgatatgcgccaacgcgcagggcgatgaaactgaagcgatgcgttgtttacgtctggcggcgaccggcgatcgcaccattaacatccacagttattacaacgatcagccggttgattatctcttctggcaaggaatggcgctgcgactgctgggtgaacagcaaaccgcacagcaactgtttagtgaaatgaaacagtgggcgcaagagatggcgaaaaccagtattgaggcggatttctttgctgtttcacaacctgacctgttatcgctgtatggcgatttacaacagcagcataaagaaaaatgcctgatggtggcgatgctggcgtccgcgggactcggggaggttgcgcaatatgagtctgctcgcgctgaattgacggcgattaatccggcctggccgaaagcggcattattcaccactgtgatgccttttatttttaactacgttcactaa

SEQ ID NO: 464819 - DNA, 291 bp, Shigella boydii; identical to SEQ ID NO: 464098

SEQ ID NO: 464820 - DNA, 1428 bp, Shigella boydii
atgaacaccgcacttgcacaacaaatcgccaatgaaggcggcgtcgaagcctggatgattgcgcaacaacataaaagcctgctgcgttttctgacctgtggtagcgtcgatgacggcaaaagtaccctgattggtcgcctgctgcacgatacccgccaaatctacgaagatcagctctcatcgctgcataacgacagtaagcgtcacggcacccagggcgaaaagctggatctggcactgctggtggacggcctgcaagctgagcgcgaacagggcatcaccattgacgtggcttaccgttatttctctaccgagaagcgtaaatttattatcgccgacaccccagggcacgagcagtacactcgcaatatggcgactggcgcatcgacatgtgaactggcgatcttactgatcgatgcccgtaaaggcgtgctcgatcaaacccgtcgtcacagttttatctccacactgttggggatcaaacatctggtcgtggcgatcaacaaaatggatctggtggattacagtgaagagacgttcacccgtattcgtgaagattatttgacctttgccgggcagctgccgggtaatctggatatccgctttgtgccgctctctgcactggaaggcgacaacgtggcatcgcaaagtgaaagtatgtcgtggtacagcggtccgacactgctcgaagtgctggaaaccgtggagatccagcgagtggtggatgcccagccaatgcgcttcccggtgcagtacgttaatcgcccgaatctcgattttcgtggctacgccggaacgctggcatccggtcgcgtggaagtcgggcaacgtgtcaaagcgctgccctctggtgtggaatcaaacgtcgcgcggatcgtgacttttgatggtgatcgcgaagaagcctttgccggagaagcgatcaccctggtgctgacggatgagatcgacatcagccgtggcgatctgctgctggcggcagacgaagcgttaccggcggtgcagagcgcgtcggtggatgtggtatggatggcggaacagccgctttccccgggccagagttacgacatcaaaattgccggtaagaagacgcgcgcgcgtgttgatggcattcgctatcaggttgatattaataaccttacccagcgtgaagttgaaaacctgccactgaatgggatcggcctcgtggatctcacttttgacgagccgctggtgttagatcgttatcaacaaaatccggtgacgggtgggctgatttttatcgatcgcctgagcaacgtgactgttggtgccggtatggtgcatgagccgaaaaacgaggccgccgttgcgtcatctgaattcagtgcattcgaactggaattgaatgccctggttcgtcgccactttccgcactggggcgcgcgcgatttgctgggggataaataa

SEQ ID NO: 464821 - DNA, 579 bp, Shigella boydii
atgtgcctgcggcacccagccgtgcagcggaataatcccggcgagcaggccaaagccaatcacaccgagcagccagatatcggaaccgagcggcagctgttgcatacgcatatccagcaggcgcagatccagcgtgccataacgctgccacagcagccagcaagcaatcgccagcagcagagtgccaagacgccccagcgcaaaccacagtttgccctctttgctgttgctggtgaggaacaccgcacacaaggccatgacttcggccattaccacgaacatgccgaggttgctggcgatgacggcgcagacggcggcagccatcaacatattgatctgcaagccgttgcacttcacctgcgcgtggcgatgccagtcaatgttgtagaggctgacaaacagaccgcacagaccgagcgtaatcagccaaatcgcgttaagcggggagatttgcacatcgtagcttaccagcgacagcgcaccgctcacgccaaccgcgccagtcagcacagtgaagcccgcggctgccgtatacaggctaccaaccgcgccgccaattccggctatccagccacttag

SEQ ID NO: 464822 - DNA, 525 bp, Shigella boydii
gtggacaacaccaccaaatgttccgtgtttcggacattccagggctggacagcgctctctgatatgctgcctggtcaggggttgctgcacgttgtgcccattcctgaagccatggcgtacgtactgttacgtccgctgcttgatgatgtgccggaggatgaactgtgcggcgtagcgcccggaagagtgttgccggtatcagagcaatggcatccactgttaattgaggcgttaaccagcattccaaaactcgaggccggagactccgtctggtggcactgcgacgtcatccattccgttgcccccgttgaaaatcaacagggttggggcaacgtgatgtacattcctgcggcaccgatgtgcgagaaaaatcttgcctacgcgcacaaggtgaaggccgcactggaaaaaggcgcatcgccgggcgacttcccgcgcgaggactatgaaacaaactgggaaggacgctttacgcttgccgacctcaacattcacggtaagcgagcgttgggcatggatgtttga

SEQ ID NO: 464823 - DNA, 2619 bp, Shigella boydii
atgagtatcctgacccggtggttgcttatcccgccggtcaacgcgcggcttatcgggcgttatcgcgattatcgtcgtcacggtgcgtcggctttcagcgcgacgctcggctgtttctggatgatcctggcctggatttttattccgctggagcacccgcgctggcagcgtattcgcgcagaacataaaaacctgtatccgcatatcaacgcctcgcgtccgcgtccgctggacccggtccgttatttcattcaaacatgctggttactgatcggtacatcgcgcaaagaaacgccgaaaccgcgcaggcgggcattttcaggtctgcagaatattcgtggacgttaccatcaatggatgaacgagctgcctgagcgcgttagtcataaaacacagcatcttgatgagaaaaaagagctcggtcatttgagtgccggggcgcggcggttgatcctcggtatcatcgtcaccttctcgctgattctggcgttaatctgcgttactcaaccgtttaacccgctggcgcagtttatcttcctgatgctgctgtggggtgtagcgctgatcgtacggcggatgccggggcgcttctcggcgctaatgttgattgtgctgtcgctgaccgtttcttgccgttatatctggtggcgttacacctctacgctgaactgggacgatccggtcagcctggtgtgcgggcttattctgctcttcgctgaaacgtacgcgtggattgtgctggtgctcggctacttccaggtcgtatggccgctgaatcgtcagccggtgccattgccgaaagatatgtcgctgtggccgtcggtggatatctttgtcccgacttacaacgaagatctcaacgtggtgaaaaataccatttacgcctcgctgggtatcgactggccgaaagacaaactgaacatctggatcctcgatgacggcggcagggaagagtttcgccagtttgcgcaaaacgtgggggtgaaatatatcgcccgcaccactcatgaacatgcgaaagcgggcaacatcaacaatgcgctgaaatatgccaaaggcgagttcgtatcgattttcgactgcgaccacgtaccaacgcgatcgttcctgcaaatgaccatgggctggttcctgaaagagaaacagctggcgatgatgcagacgccgcaccacttcttctcgccggacccgtttgaacgcaacctggggcgttttcgtaaaacgccgaacgaaggcacgctgttctatggtctggtgcaggatggcaacgatatgtgggacgccactttcttctgcggttcctgtgcagtaattcgtcgcaaaccattggatgaaattggcggtattgctgtcgaaacggtaaccgaagatgcgcacacgtctctgcgcctgcaccgtcgtggctacacctctgcatatatgcgtattccgcaggcggcggggctggcgaccgaaagtctgtcggcgcatatcggtcagcgtattcgctgggcacgcgggatggtgcaaatcttccgtctcgataacccgcttaccggtaaagggctgaaattcgcccagcggctgtgctacgtcaacgccatgttccacttcttgtcgggcattccacgactgatcttcctgactgcgccgctggcgttcctgctgcttcatgcctacatcatctatgcgccagcgttgatgatcgccctgttcgtgctgccgcatatgatccatgccagcctgaccaactcgaagatccagggcaaatatcgccactctttctggagtgaaatctacgaaacggtgctggcgtggtatatcgcaccaccgacgctggtggcgctgattaacccgcacaaaggcaaatttaacgtcaccgccaaaggtggactggtggaagaagagtacgtcgactgggtgatctcgcggccctacatcttccttgttctgctcaacctggtgggtgttgcggtcggcatctggcgctacttctatggcccgccaaccgagatgctcaccgtggtcgtcagtatggtgtgggtgttctacaacctgattgttcttggcggcgcagttgcggtatcggtagaaagcaaacaggtacgccgatcgcaccgcgtggagatgacgatgcccgcggcaattgcccgcgaagatggtcacctcttttcgtgtaccgttcaggatttctccgacggtggtttggggatcaagatcaacggtcaggcgcagattctggaagggcagaaagtgaatctgttgcttaaacgcggtcagcaggaatacgtcttcccgacccaggtggcgcgcgtgatgggtaatgaagttgggctgaaattaatgccgctcaccacccagcaacatatcgattttgtgcagtgtacgtttgcccgtgcggatacatgggcgctctggcaggacagctacccggaagataagccgctggaaagtctgctggatattctgaagctcggcttccgtggctaccgccatctggcggagtttgcgccttcttcggtgaagggcatattccgtgtgctgacttctctggtttcctgggttgtatcgtttattctgcgccgcccggagcggagcgaaacggcacaaccatcggatcaggctttggctcaacaatga

SEQ ID NO: 464824 - DNA, 231 bp, Shigella boydii
atgccagtcagtaaagcaactgtctggctctttttcggggctgtggggtatttccagggcctctcctttaccactctcgggaaggcccttccccttctcgtcggtaatttcacaagttgtcccatacttgcaagatcgcgcatcagctccggtatacgtcccggtgaagcgccctgcaatgtcatcagcattctcatcaccattccgcatgattctgagaaactcagttga

SEQ ID NO: 464825 - DNA, 219 bp, Shigella boydii
atggcaggcgcgggccaggtgggcgcggcgctggcactctactggcggtcgcaaccgcacagtgcgctacgcagtcaggtacgcggggcgattattcccggcctgctgggcgttggtgaaccgctgatttacggtgtcaccctgccccgcatgaagccgtttgtcaccgcctgtttaggcggtgcggcgggcggtttgtttatcggcctgatagcctag

SEQ ID NO: 464826 - DNA, 267 bp, Shigella boydii
gtgagcatggatataagcgatttttatcagacattttttgatgaagcggacgaactgttggctgatatggagcagcatctgctggttttgcagccggaagcgccagatgccgaacaattgaatgccatctttcgggctgcccactcgatcaaaggaggggcaggaacttttggcttcagcgttttgcaggaaaccacgcatctgatggaaaacctgctcgatgaagccagacgaggtgagatgcaactcaacaccgacattaactga

SEQ ID NO: 464827 - DNA, 840 bp, Shigella boydii
atgcagcaggctttgcgtgggacggtgagtgatgtgcgtaagggaagccatgagatgcacattgggatcgcggagattgtcgcaggcaataacgatctctcaagtcgtaccgaacagcaggcggcatcgctggcacaaacggccgccagtatggagcaattaaccgccacggtagggcaaaacgccgataacgcacgacaggcgtcggaactggcaaaaaatgccgcgacaacggcgcaggcgggcggtgttcaggtcagtaccatgactcacaccatgcaggagatcgccaccagctcgcaaaaaattggcgacattatcagcgttatcgacggaattgctttccagaccaatattctggccctgaatgcggcagtggaagcggctcgcgccggagagcaggggcgtggttttgcggtagtggcaggggaagtgcgcaatcttgccagccgtagcgcgcaggcagcaaaagagatcaaagggctgatcgaagagtcagtcaatcgtgtccagcagggttcgaaactggtgaataacgccgccgcgaccatgaccgatattgtcagttcggtgacccgcgtgaacgacattatgggagaaattgcttcggcgtcggaagaacaacggcgggggattgagcaggttgcacaggctgtcagccagatggatcaggtgactcagcagaacgcctcgctggtagaagaagcagcggtggcaacggaacaactggcgaatcaggccgaccatctttcgtcgcgtgtggcggtatttacccttgaagaacatgaagtagcacgacatgagtcggcgcagttacaaattgcgccagtggtatcctga

SEQ ID NO: 464828 - DNA, 246 bp, Shigella boydii
gtggcggcagaaattggcgtgccgttacaggcagatatgttcagcaacggcggcacggacggcggagcggtgcacttaaccggcaccggcgtgcctacagtggtgatggggccagcaacccgccacggacattgcgccgcatcgattgccgattgccgtgacattttgcagatgcagcagcttttatctgcccttattaaacgtcttacgcgtgagacggttgttcaactgacggatttcagatga

SEQ ID NO: 464829 - DNA, 447 bp, Shigella boydii; identical to SEQ ID NO: 464165

SEQ ID NO: 464830 - DNA, 825 bp, Shigella boydii
atgcaaaacattacccagtcctggtttgtccagggaatgatcaaagccaccaccgatgcctggctgaaaggctgggacgaacgcaacggcggcaacctgacgctgcgcctagatgacgccgatatcgcgccttataaagacaacgtccatgcacaaccgcgctatatcccgctcagccagcccatgcctttactggcaaatacaccgtttattgtcaccggctccggcaaattcttccgtaacgtccagctcgatcctgcagctaacttaggcgtcgtaaaagtcgacagcgatggcgcgggctaccatattctctgggggttaaccaacgaagccatcccgacatccgaactcccggcgcactttctctcccactgcgagcgcattaaagccaccaacggtaaagatcgggtgatcatgcactgccacgccaccaacctgatcgccctcacctatgtactggaaaacgacaccgcggtctttactcgccaactgtgggaaggcagcaccgagtgtctggtggtattcccggatggcgttggcattctgccgtggatggtgcccggcacggacgaaatcggccaggcgaccgcacaagagatgcaaaaacattcgctggtgttgtggcccttccacggcgtcttcggcagcgggtcgacgttggatgaaacattcggtttaatcgacaccgcagaaaaatcagcacaagtattagtgaaggtttattcgatgggcggcatgaaacagaccatcagccgtgaagagttgatagcgctcggcaagcgcttcggcgttacaccactagccagtgcgctggcgctgtaa

SEQ ID NO: 464831 - DNA, 468 bp, Shigella boydii
gtgagcgcgtttgatctggcctttttgagcaatcgtgggctttatattccgtcaccgcagctgggagacggatttattgcgtttatcctggctgttgttatggctatagtcctttctgttgggctattccgctttaataaaacataccagataaagaccagacaactgcgccgcacctggccgttcgccgcagtgttgatcatcggtttgcctttactggcgcaatggctttttggcgcagcactacactgggatgtcccagccctacgaggctttaacttccgcggcggaatggttttaattcctgaactggcagccttaacgctggcactttcggtttatacctctgcatttatcgccgagattatccgcgctgggagccaggcagtgccttatggtcaacatgaagcggctcggtcactggggttacgctacgccaggtcattattccccaggcactgcgagtga

SEQ ID NO: 464832 - DNA, 162 bp, Shigella boydii; identical to SEQ ID NO: 24533

SEQ ID NO: 464833 - DNA, 459 bp, Shigella boydii
atgaaaatatactggacaagaaaacgtattcctgaactttcagcacttccaccttcattaagaaagaaaaattttactgacgcatataatgcagcatcttctcatatcgaatactggataggtgctggcgtctcatttatctcgatgatgattttatccagagtatatgactttcttttacccgcccaagatactttcccgggtgatatcatcagaagtttatgtgttgtgtgtccatccatattaatctggtttcagttttcggtatatgtcatgaggaaatattacagacatattctggtgcgaggaaaagaaaccgaaaccatttcagaaaggttgatacgtgaggctgatacacgagaatatgaactatggcgtccggtccgtcgctttttctccattgttttcctcattgttctattaggttgcattcattcactgataacaactataaaataa

SEQ ID NO: 464834 - DNA, 510 bp, Shigella boydii
gtgcaaataaccgaagccttaatttcagagccgggggaaatccggcgttttgttcagcaggcggtggaccactggccaaatctgttggcatttcacttcacgctctattcggcagaaggaatctatggtcaacagattcagacattttgtagttcctttcaccgacgggtacacgaacgtattacggagcataatcacacggtcagcccatcagcgccggtggtattacgctggttgcgggaacaacatgaaggagcacagatacgatgtctgttgctgctcagccagacgagtatttgccatccgcgagtcggcgtcatggctgatgaagaatgtgcgcaactggtggatttactgcaacagacctggtcggtgataagtgctggcggacaatgccgggtggaaagatgttttcgggttgcccggcctggttcatcagggcaatacgtggcgttaaaaacggctgttcagtcctttatgtcgcaggttattgcaacaatcatccggtga

SEQ ID NO: 464835 - DNA, 1047 bp, Shigella boydii
atgtctgctttattatcgcctttatctcttcaggcagcgaatgtccggcgtagcggagatgaagcatttatcattcagcagcagcgtcaggaagcccttgagcaacaactgacgccttcagcccctgatgttcgcctttctgcacctggctcttttgcccataagattaattttcctgttgaaacgccctgttttcagattaaacagacggaactgaagggggctgatgcgttaccacactggctgcctttacaaaaaatcgccaacggggcggtcgggcattgcctgggggcgaaaggaattaatctgctgatgagtacattgcagaaccgtctggtcgatcatggttatgtcaccacccgtgttctggcaccttcgcaggatttaaaaagcggtatcctccggctggtcattattcccggtgttgtgcgacatgtgcgtctgacaccggacagtgatgactatattcagttgtattcctcattcccggcacacgaaggttctctgctggatttacgggacattgagcaggggctggatttaggtaacagccggatacagggacaacatactgagctgaatgcaaccagtggaaatctgtctacacagaatgcgcaactgagtgccggtacgctttccgcccggactgccgggcagttcagcagtaatggcggtacgataaatgccgacacactgcagatatcggcacaaagcctgtcaaatcgtaaaggcagtctgattcagacgggaacaggggatttttcgctgagtctgccgggaagcgtggataaccgggaagggctgcttgcggcaaatggcgcggtgcgtctggatgcactgagccttgataatcgcaaggggaaagtgcaggcggagcagtcaccctcccttcagaaatccccgcccacgtttctgaaaccgtttgtggctggtgtctgtgcggcattgctggcggtcagcgtggctattccgggatggcagtttctgacacagccatcaccggaggagcagcattttacctgggggaatggttgtaaaaagcagtga

SEQ ID NO: 464836 - DNA, 2682 bp, Shigella boydii
atggtcacgatttgtgttgacggtgaaaataagactcataaaattaccgactggacgctgtgggctggaaatgacgacagagaggttatgctgacctgtcattttcgcagcgggagaaaatatactcgtccgctttctgtatgtcagataacgccaactgtaaatttgcgaaatgttttcctcgaaaggaaagggaacgctgtaacatcccgggctgaactggttattatatatggtgataaatatgctgctgtttattaccgcgagggtgaacgaccctacatcatgaaaacgaccggccttgactttcaacagtgttcagcatttacagagcatgccgtgtttaattacttgtgtagggtggctaatgaacgtattttttatgcccgtggtaataacagaaatatcgatgagaatatccttaggcagataaagaaaatagttcctcatccggataccgccttgcatgcatactgttcaggacagagtaaaaaacgtgattcgccatggggtttgatttttccgtttggtcttaatgaaagtcagttgctggctgtcaaacgggcattttcctcacagatttcagttattgaaggaccacctggaacaggtaaaacacagactatactcaatattgttgctaatatattaattcagaataaaacagtggcaattttgtccaataataactcagctgtcagtaatgtttatgaaaagatggacaaacagcaactgggatatgtgatggcacgactggggagtacggagaacaggcaacagtttttttcaacgtcgatttcgcgttctgaggaagtcttacctgactcaccgtctgcaaatgcgattgatgatgtacttcaacaagtgaaaaaacacctgaatgccattaaccaggtcgcttcgttaaaagcagaaattaatgagctgaatattgagtataaatacctgcagcaatggcagagtcagaatcttcgaccggaggagcttttttctcacaaataccgattttcctcacaaaaaacaaccgacctgatggcttatattcattacctttctgacaggcggattggattcagaaacagaattgatttgttgttaaacttcatgatactgaaagtcaaaccattgatgattccggagagaaggctggcgctatttacttctcttcagctttcttattatgaaaaaaatatccgggaaaaacaaatttctctgaatgaatatgaggaagtatttaaaaaatctgattttaaaattttactggggcgcctgacatcatggtctatgctttatttaaagcaacatctgcgaagaaatgtttcaacaagaagttcattctcggcagagacatacagggatgaatttgaccgttttataaagcgttttccgattattggtagcagtacgcattcgattattaactctatcggcaagggggcccttcttgattatgttattattgatgaagcctcgcagcaggatattgttccgggcattctgggactgggatgtgcccgtaatgtaatcgttgtaggggatcgtaagcaacttccacatgttcctgtattactcccgaacagcccatctccaccggcagaatactataattgtgagaaatatagtctacttgattcggtttgtatgttgttcaggaacatggtgccagtaacccttcttaaagagcattatcgttgtcatcctaaaatcattcaattttgtaataagcagttttatgataatgctctgataccgttaacggttgattccggtgaagcctcattatctctggtcatcacggcaaaaggaaaccatacccgtaatttttcaaatctcagggagcttgaatctctggaaggtcattactgggatgaagaaagtagcaggggatacattgccccatataatgcacaggttaatctggctgaaaaagtgctgcctgctgattttgtgaaatcgacggtgcataaatttcagggacgggagtgcgatgaaattgtgttttccactgtgctggataagaagcgcagcagccagcacagtcggaacatcgcgtttgttgataatcctgaactggtgaatgtcgctgtttcaagggcccgaaataaatttacgctggtgactggtaatgatgtatttgaacgccacgctggacatattgcggcgctgattcgttacatcaaatactacgctgatgacggagagattttcgagagcccggtcatatcagcatttgatttgctgtacagtgagtatgacaaatcactggaacgactgaatagtagattgaattcaaatgattcacactttaagtcagaacagattgtggcctgcctgttgcgggatatcctgtcgcaggatagttatcggagtatgatgtttcattcacaaatagcgctgaatcagttggtgttgctggagcggggggattttacacaccgtgaacagttattcatgcgtaaccgggccagttgtgactttgttgtttactataaggtcgggaagactccattaggggttattgaagtggatggaggttatcatctgaccagtgttcaggctgaacgtgatgaacttaaaaacagtatactgaagaaatgcggcctgccattgctaagattacgtactatagacagtgatatagaagggaagttgggagcgtttctgtcaggcctgacaggctaa

SEQ ID NO: 464837 - DNA, 1233 bp, Shigella boydii
atgagtgatacgcttttaaccgaaaaaatccttaccggagaaaatgttttgcgtgccgcaatcgcccgcattgagtggatttttgaaacatttccgtcggtatgtctgtctttttcaggtggaaaggattccaccgtgcttttccatcttgtggcagaggtggcccgcaggagaaaacgtcatttctctgttctgttcattgactgggaggcccagtatcggtgcaccattgaacatattcagaagatgcgggaaatgtaccatgatgtgacggaaaccttttactgggtggcacttcccctgaccacggtaaacggcgtctcgcagtttcagccggagtggatatgctgggagccaggagtgacctgggttcgccagccaccggaagaggccattacggatatgacatattttccctttttccggtatgccatgacgtttgaagaatttgttccggcattttcttcctggtttgccggtaaccggtgtggagtggcagtgctgaccggtgttcgtgcggatgaatccctcaatcgctttatggggctggtgtctcagcgcaaactgagatatgccgatgataagccctggaccacggcatcgcctgaagggttttattacaccatgtatccgttgtatgactggaaagcccgcgatatctggatatataacgccagagcttgtgccatttacaatcctctgtatgacctgatgtaccgtgccgacgtgccgttacgcaacatgcgtgtctgtgaaccttttggtcctgaacaacgtaaggggctgtggctttaccatattctggagccggaaacctgggccaggatgtgtgagcgggtgtcaggcgctgccagcggggcgctttatgccaatgaaagcggtgcctattttgccctgcgtaaacgtatatcaaaaccagcccatcatacctggcgcagctatgcgatgttcctgctggatgtgatgccggaaagaacggcagaacattaccgtaataaaattgctgtctacctgcgctggtatcagacgcggggcttcccggatgacatcccggatgaacaggagaatgacctggggagccgggatattccgtcctggcggcgtatctgtaagacacttataaagaatgatttctggtgccggaccctctccttcagtccgaacaaaccccggcactatgaacgttatctgcagcgtatgaaagaaaggaggaaggaatgggggattctgtga

SEQ ID NO: 464838 - DNA, 639 bp, Shigella boydii; identical to SEQ ID NO: 23835

SEQ ID NO: 464839 - DNA, 645 bp, Shigella boydii
atgatgaagcaaggaatggcaaacagtatatcaatgacatggcaacttttatgcgatgaacatggttttacccgggagcactacaatcagctgaagaagttcagcccggaaacattacgtgaaattattgctgaaatagccagctgtcatccatcaaccagtgtattgctcaggaataagtggctgacaccgccggaggatattctggagcagattacccgtgaatacgaacgaagaatacaaaactgtccaccgttcaggagcgagaaggaagcggaatcctggttaaatgaactatcttttgctgtgattgctccgctataccgtgttgcccccgaacaaacagaacaggttgagtcctttgttctgcagcttattgccgagcaggagcgggtttgggagcttattttaaccaatgatggttattcatggcattgcgcactttatgatatattatttcatctggttttacgaaatatggaagaccagcctgaacatcagaaacagcgaataacaaaaatattttatgagcccgatgcaagactggttgcagaagagattaaattccggattcaatctctgtatgatgatgaacaaaagagagctttaagtgaactggtaaatgattttacttcaaaagaataa

SEQ ID NO: 464840 - DNA, 426 bp, Shigella boydii; identical to SEQ ID NO: 81702

SEQ ID NO: 464841 - DNA, 183 bp, Shigella boydii; identical to SEQ ID NO: 81703

SEQ ID NO: 464842 - DNA, 2385 bp, Shigella boydii
atgcacgaaaagaacatcgccctgctttgtgatgaagccgaccgacttttgcaactgaacattaatctgctccggcaaatggttgatgaaccggatgtgttatctgacagtaagaacgaaaacagactgctttttgataaacagaaagcactgaaaagaattgaggagctggagggcgaacaaatcaaaaccgcccgcagggagatggtgctggctgttgtcggcacgatgaaagcaggtaaatcaactaccatcaacgccattgtggggcaggaaattctgcctaaccgtaaccgccccatgacctctgtaccgacgctcatccgccacgttcccggaaaaactgagccggtcctccatctggaacatattcagcccgtccgcaatttattaagcacactgcaacaaaaactcgacaccccggcaggacagcaagtcgcacagaccctgcagcaaaccggggatacctgcgaactgctggatattctggcaaatgatggctggctcaaaaatgaataccacggggaagacgaaatctttaccggactggcatcgttaaacgatctggttcgccttgctgcggcaatggggagtgagtttccttttgatgaatacgcagaagtgcagaaactgccggtgatcgacgtggaattcagccatctggtggggatggatgcatgccagggaacactcacactgctggatacccccggccctaatgaggccggacaaccgcagatggaagtgatgatgcgggatcaactgcagaaagcctctgcggtgctggcggtgatggattacacccagatgaactcaaaagcggatgaagacgtccgtaaagagcttaatgccattgctgacgtatcagccggccgcctgtttgtgctggtcaataaatttgatgagaaagaccgcaatggcgatggggcagatgccgtacgccagaaagttccggcaatgctgaacagcgatgtgctgcccgcctcccgcgtttatccaggctcatcacgtcaggcgtacctggctaaccgtgcgcttcatgagttacggaaaaacagaacccttcctgttgatgaagcctgggtcgatgattttgtcagggaagccttcggtcgcatgaaaaaagaatacgtctgtaaagacagtgaaatggcaaccgaaggggcgacagacctgtgggaaggctcacttatcgatcaactgataacggaagtcatacagagctcccattccagagcggcggcactggcggttgattctgccgccgcaaaactgatgcagaatgcggaaaatgtcagcgaatatctgtcattacgccatcaggggctacagcaaagcattcagtcactgcagtcgcatatcaccagcctgcttgcggatatccgggaaatcgcggactgtcaggagcaggtgaccgctgatgtcagaatggccatggaggagatcgatgccagaacccgggaattactgacgggggtctgcacctcactggaagaggagctgaatgactatttcagaagcggtaaacgcaaagaacagcaaatgctggaggaagaaaattcagcgcagccccgggagagaaacgcattcgctttctttcacgatattttcggaaccggaaatcagcatgacaggatgcgggactttgatccggacagccccgaaataaaattcagtgatcgcagggaagcccttgaactgatgacgcaaatcgaatcgaccgtgaccagcctgcaccgtgaggctgaagcacagttccgtcctgaactggaaaaaatcgtcaggggtattgaaacaggttttcgtggtacggccctgtacgccacagaaaatattgccggacgcatcaatgcccgtctggaggatgaaggtttcactgtaaaaatcagttttccggcagtcagccagttacagacccggctcgcagtaaaaacaaatctgagcgcgcttatggaggaaagaacggagacagtaacccgtcgctgtcgacaggatggtgtctggggtacgctttgtcgatgggcaaacaccagtgactggggctggaaagagtacagtgtggatgtgagccgcagcgtgatcaatatcaacaaggtcagagaggaagtgatgtcactgacccgggcatatttcggggagctgcaggcatccattgagcaggatattaaccagcccgtccgccaggaaatcgatgcctttttctgtacattcagggagaaagttgaacagctgcgtaacacgctgattcagagctctgaagatcataaacgcgatcagcaggcgcaggaacggctgaccgggcgtcttcaggcgttaaatgaaagggttcctgagctcattactgacagtaaggcgttaagggaagaactggagacaatgctgtga

SEQ ID NO: 464843 - DNA, 1434 bp, Shigella boydii
atgatggatcagaataatattggtagcggttcaaccgttgctgagctgatgcagagtgccagtatttcgctgaaacaggcggaaaaaaactgggcggattacgaagcgttgccgcgtgacccgcgtcagagcaccgccgcagcggcagagatcaaacgtaattacgatatttatcacaatgcgctggcggagctgatccaactgttaggtgcaggcaaaatcaacgagttctttgatcagccgacccagggatatcaggacggtttcgagaagcagtatgtggcttacatggagcaaaacgatcggctctatgatatcgccgtcagcgataacaatgcctcctacagccaggcgatgtggattctggtgggcgtgatgatcgtcgtactggcggtcatcttcgccgtctggttcggtattaaagcctcgctggtagcgccaatgaatcgcctgattgacagcattcgtcatattgcaggcggcgatctggtgaaaccgattgaggtggatggctctaatgagatggggcaactggcagagagtttgcgccatatgcagggagagctgatgcgtaccgtcggtgatgtgcgcaacggggccaatgccatctatagcggtgccagcgaaatcgccaccggcaataacgatctctcttcgcgcaccgagcaacaggccgcttcgctggaagagacggcagccagcatggagcaactgaccgcaacggtgaagcagaacgccgaaaatgcgcgccaggccagccatctggcgttaagtgcttctgaaacggcgcaacgcggcggcaaagtggtagataacgtggtgcagactatgcgcgatatctccaccagttcgcagaaaatcgccgatattatcagcgtaattgacggcattgccttccagaccaatattctggctttgaacgcggcggttgaggctgcgcgtgcgggtgagcaagggcgcggttttgcggtggtcgcgggagaagtgcgtaatctggctcagcgcagcgcccaggcggctcgtgaaattaaaagcctgattgaagactcggtggggaaagtggatgttggctctacgctggtcgaaagcgccggggaaacaatggcggagattgtcagcgccgtgacccgcgtgacggacattatgggcgaaattgcttctgcttctgatgagcagagccgtggtatcgatcaggttggcttagcggttgctgagatggaccgggtaactcaacagaacgcagcgctggtggaagagtctgccgctgccgccgccgcgctggaagagcaggccagtcgcctgaccgaagcagtggcagtgttccggattcagcaacagcagcgtgaaacatcggctgtggtaaaaaccgtgacgccagctgcgccgcgtaaaatggccgtggcagatagcgaggagaactgggaaacattttaa

SEQ ID NO: 464844 - DNA, 174 bp, Shigella boydii
atgttctccaataccgaggagctgttgccggttatctcgtttaacgccaaaacgtcaaccgacgagcagaagaaacacgacgactttgtcgaccgtatgatggaaaaaggctacacccgtaaacaggtgcgtttactgtgcgaatggtatttgcgcgtacgtaaatcgtcttaa

SEQ ID NO: 464845 - DNA, 267 bp, Shigella boydii
atggcgacgctggggcgtcttatgagcttgctgtcaccctttgaagtggggatatggatgacggatggctggccactgtatgaatcccgcctgaagggaaagctgcacgtaatcagcaagcgatatacgcagcgaattgagcggcataacctgaatctgaggcagcacctggcacggctgggacggaagtcgctgtcgttctcaaaatcggtggagctgcatgacaaagtcatcgggcattatctgaacataaaacactatcaataa

SEQ ID NO: 464846 - DNA, 276 bp, Shigella boydii
gtggcttctgtttctatcagctgtccctcctgttcagctactgacggggtggtgcgtaacggcaaaagcactgccggacatcagcgctatctctgctctcactgccgtaaaacatggcaactgcagttcacttacaccgcttctcaacccggtacgcaccagaaaattattgatatggccatgaatggcgttggatgccgggcaactgcacgcattatgggcgttagcctcaacacggttttacgtcacttaaaaaactcaggccgcagtcggtaa

SEQ ID NO: 464847 - DNA, 267 bp, Shigella boydii; identical to SEQ ID NO: 464845

SEQ ID NO: 464848 - DNA, 267 bp, Shigella boydii
atggcgacgctggggcgtcttatgagcttgctgtcaccctttgaagtggtgatatggatgacggatggctggccactgtatgaatcccgcctgaagggaaagctgcacgtaatcagcaagcgatatacgcagcgaattgagcggcataacctgaatctgaggcagcacctggcacggctgggacggaagtcgctgtcgttctcaaaatcggtggagctgcatgacaaagtcatcgggcattatctgaacataaaacactatcaataa

SEQ ID NO: 464849 - DNA, 1110 bp, Shigella boydii
gtgaaatatgattatataattataggtagtggtctttttgggagtgtgtttgcacatgaattagggaaaatgaaaaaaaaggtcaaggttattgagcgtcgtgatcatgttggtggtaatgtatattgtgagaatattgaaggaattaatgttcataaatatggcgcacatatatttcatactaacgataaagaaatatgggattatgtaaatcaatttgtagagtttaatagatatacaaattcaccattagctttttcaaaaggtaaaatttataatttaccttttaacatgaatacctttaatcaactctggggggctattactcctcaacatgcgaaagaaattattaaaaagcaaagcggtgaaataagtggaaataaaccaaggaatcttgaagagcaagctatttctttggtgggacgagatatttataattgtttgattaaggagtacactgagaaacaatggggacgaccttgcactgaattgccatcatttattataaaacgactccctgttaggtttacatacgataataactattttaatgaccagtatcaaggaataccagtcggtggttacaataaattaatcgatgcattattaaatggtattgaagttcaaacatgcactgactattttgaagagaagaaatattgggattctattgcaaagaaaattatttatacagggcctattgataagttttattgctataaatttggagctttggattatcgatcattaaaatttgagcatgaattactgaatgtcgataattttcaagggaatgctgttgtaaattatatagacaaaaaattcccattcactcgtataatagaacataaattttttgaatttggtgaacagcataatactctcattactcgagagtacccaaaagaattcgaagaaggcgatgagtattactatcctgtcaatgatgaaaaaaatatgcaaatctataaaatgtattataatctttctaaacaggaaagtaatgtgatttttggtggacgtcttgcggaatataaatattatgacatgcatcaagttatcaaatcagctttaaatgcattccgaaaagaggtacgtttaggtgaataa

SEQ ID NO: 464850 - DNA, 915 bp, Shigella boydii
gtgaataaagaagtaatcgcagttattgtaacctataatagaaaagcattattgctgaaagttatagatgctgttattaaccaaagttatccactaaaaaaaatattgataatagataataatagtactgatggtacggagatgtttatttcaaataggctctctgacgtggtgaagtataaaaatacgggggataatttagggggggctggcgggttttatagaggattcatagaggcggaaaaatatggctatgattatctttggttaatggacgatgattttatgcctacagtgaattgtcttgaaatattaatatcaaataaccctgatggtattgtccaacctgttagatataacttggatgaaacttgtgcagagctttctccattaacttatgatttatctaacccatttaagttaaaccctaaaggtacaccattaaaaaattacttaaatacaattggtaataaatctgcgaaggtagatattgaagctattccatttgaaggtccattgatttcacgaaaggttgttgaaaaaataggctatccagagcctaagttttttattttttgtgatgacattgaatacgctattaaagctaaaagaaaggggattcccatccagtgcaatcttaaagccaaggcataccgccttttggtcaacaatcaaggtaatgatcttctttcctggaaaggatattttatgcttcgaaatcttttctacctgcataaaacgtatgggaccaatttccttgttagacaaaaacctatcgtattgggattaggatatgcattgtcgtgtgtattgaaatgcaatttttctcaacttcccgttatatggcgtgctttttgggattcatctacgttaagaaataccgaaaaattcaggcccgaaatgagaagtaaataa

SEQ ID NO: 464851 - DNA, 267 bp, Shigella boydii; identical to SEQ ID NO: 464848

SEQ ID NO: 464852 - DNA, 189 bp, Shigella boydii; identical to SEQ ID NO: 464175

SEQ ID NO: 464853 - DNA, 1029 bp, Shigella boydii
atgggattgtttacgacccgccagttactcagttataccgaacaaaaagttaaattccgtgcgctgtttctggagctgtttttccgccgtacggtgaatttccacaccgaagaggtgatgctggacaaaattaccggaaaaacgccggtggcggcctatgtctccccgatcgttgaaggaaaagtgctgcgccatcgtggtggtgaaacccgcgtgttgcgtccgggctacgtcaagcccaaacacgaatttaattaccagcaggcggttgagcgccttcctggtgaagatccggctcagctgaacgacccggcctaccgtcgtctgcgtatcattaccgataacctcaaacaggaagagcacgctattgtgcaggtggaagaaatgcaggcggtgaatgccgtgctgtatggcaaatatacgatggaaggagaccagttcgagaaaattgaagtcgattttggccgatcgacgaagaataacatcatacaaggtagcggtaaggagtggtcaaaacaggatcgtgacacgttcgacccgacatatgatatcgaccttttctgtgatcaggccagtggtcttgtgaatattgccattatggacggtaccgtctggcgtctgctgaatggctttaagcttttccgcgaaaaaatggatacccgtcgcggttcaaattcacaactcgaaacggcagtgaaagatctgggcgcagtggtatccttcaaggggtattacggcgatctggtcattgcggtagcgaaaacgtcttatgtggcagaggacggtaccgaaaaacgttatctgccggagggcacgctggtgctggggaatacggcagcagaggggattcgttgctatggagccattaaggatgcacaggcgttgtctgaaggagtggtggcttcttcccgttacccgaaacactggctgaccgtgggcgatccgtcctgtgaattcaccatgacgcagtccgcgccgctgatggtgctgccggatccggatgagtttgtggtggtacaggtgaaataa

SEQ ID NO: 464854 - DNA, 288 bp, Shigella boydii
atggggctctgtgcgcagttcacctcgggggcacagtgtggcagcgaagttcagggggtttttgacgatccggagtcgctgggttttgccggtggcgggggccgtattgaaggaagcagcccgtcattatttgtgcggacggatacggttcgtgccgtgcggcgtggtgacacgctgaccattaacggcgagatgttctgggtggatcgtatttctccggatgacgggggcagctgttatctctggctcaaccgtggtcaaccacccgcagttaaccggcgacgataa

SEQ ID NO: 464855 - DNA, 213 bp, Shigella boydii; identical to SEQ ID NO: 462242

SEQ ID NO: 464856 - DNA, 993 bp, Shigella boydii
atgcagagcgataaagtgctcaatttgccggcaggctactttggtattgtgttggggacgatagggatgggatttgcctggcgctatgccagccaggtttggcaggtcagccactggttaggggatgggctggtgattctggcgatgatcatctggggattattaactagcgcatttattacccgactcatacgctttccgcatagcgtgctggcggaagttcgccatccagtgctgagcagttttgtgagtttgtttccggcaacgacgatgctggtggcgattggttttgttccgtggtttcgcccactggcggtgtgcctgttcagttttggtgtcgtggttcagttggcttatgccgcctggcaaactgcgggattatggcgcggatctcaccctgaagaagctaccatgcctggactgtatctgccgacagttgccaacaactttatcagcgcaatggcctgtggtgcgttgggctacaccgacgccggtctggtgtttttaggcgcaggcgttttctcatggctaagccttgaaccggtgatcttgcagcgtctgcgcagttcgggagaattacccacggcactgcggacatcactcggcattcagctcgctcctgcgctggtggcctgtagtgcctggttgagcgtcaacggcggcgagggtgatacgctggcgaaaatgctttttggttatggactgctgcaactgctgtttatgctacgtctgatgccatggtatctctcccagccatttaatgcttcattctggagtttctcgttcggcgtatctgcactggcaaccaccggtttgcatctggggagtggcagcgaaaatggatttttccatacgctggcggtaccgctgtttatctttaccaattttattattgcaatactgctcatccgtacttttgcgcttctgatgcagggaaaattgttagtcagaaccgagcgcgctgttttaatgaaagcagaggacaaagaatga

SEQ ID NO: 464857 - DNA, 243 bp, Shigella boydii
atggatggtcctgatggtggtgcgtatcctgtaaacattaacggaacgacctgggtagaaggtggcggttgtaaagcccacgcctgcggctgggactatatcgtaacactctataacccaaaaacgcataaagtcgttggttactattacaacatcgaccctggttacctgatttggtttggtgaaactggcgttcacgaattcgcgtacctggtcagggactacgtaaacaaaacaaattaa

SEQ ID NO: 464858 - DNA, 174 bp, Shigella boydii; identical to SEQ ID NO: 30365

SEQ ID NO: 464859 - DNA, 297 bp, Shigella boydii; identical to SEQ ID NO: 461859

SEQ ID NO: 464860 - DNA, 177 bp, Shigella boydii
atggaaattgcatcgaataaaggcgtcattgcagacgcttcgaccccggcgggtcgtgctggaatgagtgagagcgagtggcgagaagcgatcaaattcgacagtactgacaccggctgggtgattatgagtatcgggatggcgattgtgtttttctcccggtgcaggtcggtttga

SEQ ID NO: 464861 - DNA, 414 bp, Shigella boydii; identical to SEQ ID NO: 461228

SEQ ID NO: 464862 - DNA, 267 bp, Shigella boydii; identical to SEQ ID NO: 464848

SEQ ID NO: 464863 - DNA, 309 bp, Shigella boydii; identical to SEQ ID NO: 464192

SEQ ID NO: 464864 - DNA, 1479 bp, Shigella boydii
atgcccgatacgttggtgattatcttttttgttgctattttaaccagccttgccacctgggtagttccggtggggatgtttgacagtcaggaagtgcagtatcaggttgatggtcaaacaaaaacacgcaaagtcgtagatccacactcatttcgcattctgactaacgaagcaggcgaacctgagtatcaccgcgtacagctgttcacgacgggcgatgaacgcccgggcctgatgaacttcccgtttgaaggattaacctcaggatcgaaatacgggacagctgttggcatcatcatgtttatgctggtgattggcggcgcgtttggcattgtgatgcgtacaggaaccattgataacggtatcctggcgcttattcgccatacccgcgggaatgaaattctctttattcctgcgctgtttattctgttttcacttggcggcgcggtatttggtatgggagaagaggccgtcgcctttgccattatcatcgcaccgctaatggtccggctgggctatgacagtattaccaccgtcctggtgacctatattgccacgcaaatcggttttgccagttcgtggatgaacccgttttgtgtggtcgttgctcaggggattgccggcgttccggtgctttctggctccgggttgcgcatcgtggtgtgggttatcgccactatgattggcctgatctttaccatggtgtacgcctcacgagtgaaaaagaatcctcttctgtcacgcgtgcatgagtccgaccgcttctttcgtgaaaagcaggcggatgttgaacaacgtccgtttacctttggtgactggctggtattgattgtcctgaccgccgtaatggtctgggtgatttggggcgtgatcgttaatgcctggtttattccagaaattgccagccagttcttcaccatgggtctggtgattggcatcatcggcgttgttttccgccttaacggcatgacggttaataccatggcttcatcctttaccgaaggggcgcgaatgatgatcgcccctgccctgctggtgggtttcgccaaagggattttgctgctggtcggtaatggtgaagcgggtgatgccagcgtgttaaataccatcctcaacagcattgccaatgccattagcggtctggacaacgcggtcgcggcctggtttatgttgctcttccaggcggtatttaatttcttcgtgacgtccggttctggtcaggcggcgttaaccatgccgttactggcaccgcttggcgatctggtcggtgttaaccgtcaggttaccgtgctggcattccagtttggtgatggcttcagtcacatcatttacccaacctcagcttcgttaatggcaactctcggtgtgtgcagggcggacttccgtaactggctgaaggtgggcgcgaccctacttggactgctgtttattatgtccagcgtcgtagtgatcggcgctcagttgatgggctaccactaa

SEQ ID NO: 464865 - DNA, 1515 bp, Shigella boydii
atgtcacgtaacaaaataatcataaagaatactatgtttttggcaacaagaactttagtttctttaagtgtttcattttacacaacaagaatagttatacaacagttgggggcggcagactatggcttatttaatatcatttatggagttgtaacattttttacattcgtagtcaccgcgatgaatgattctgtacagcgttatattgcaataggtgttggttcacaaaaaatatcggttattagagatgctgtaaaaaatagtatgtttatatttgttatatctgctttcatattggcagtatgtcttcttttggcaaggggggtgatcatacataatattttaaatatacctaaagattctattgaaaatgcaagtgtgttatatttggttgcagtattttcaataaccatacttataattcagacgccacttaatgcgatggtgttagcatacgagaaaatgtcattttacgcatacatgatgatatttgaaatggtagctaaaatgagtatggctttgttactaactttactggaaaaagataaggtcattgtatattcaatacttttaggttctatttctttttttaacttgttggtttatttatgctactgcttgatatgttttaaaaaatcaatgtttggtgggagaataaaatttagagtgctgaaagaaatttcaactttttcattttggaatatatttggtaatttctcttacatgtgcagagttcagggagtgaacattgtaattaatattttttacgctatagccgtgaatgcagcatatgcgatttcgattactgttttaaatgcaattaatacacttacgcaatcattaattacagcattaaggcctcaaatatttaaatcatatggcgaatgtgatttaaaaagatataatcatctagttctctttggttcaaaatatacattttcaatattgtttctgttaagtagccctgtaattctatgtgcggatgagttgttaaagatatggcttgatattgtaccagattatacagttgaatttgtgaggttggtcattgttgtggcttttattgatagtttttcatatagcatgattgctggtattcaggctacgggtaggattaaaacatatcaactagttgttagtttaattgtcctaattaatttgccgttaacctttattttgtttaaggcaggaaataatgttttaagtatgttttatccatttattgttactgccattatcaatcaaggtttaaggttgtattttatctatatcaatgcaggttttgattataagaagtatttcactgttgtgatctatccttgcttgttagctgtatgcttatcgttagtgacagatatttcaattaaaaaaatgcttccatttaacagtattattgatgttttaattgtgtgtatttttattttttcattcaatacaataattttctattgggttgtagtttctaaaaaggaaaaaaaatggttattagaaaccctgaaaagaaaagtgaaataa

SEQ ID NO: 464866 - DNA, 426 bp, Shigella boydii
atgatacctgtatggagcacggcctgcccggactgggcagagcgcctgaaaaaggggctgtcgattattccggctccgatttatccggaccaggccgcacatgccctggcgatttttaaacaactgcggattgtggatgcaccgggtagcccgacgttcggggagtcctgtgcacagtgggtgtttgacctggtggcggctctgtttggctcctacgatgcgcagaccggtgtccgccatatcaaggaagtgttcattctgatacccaaaaaaaaacagcaagtccacactggccgccgggatcatgatgacggcgctgttactgaactggcggcaggcggcgggttacacgattctggccccgactgtggaggtggcagccaacgccttcaatcctgccagggatatggtacgacgggacgatga

SEQ ID NO: 464867 - DNA, 747 bp, Shigella boydii
atgtccaaaaatgaccgaatggtgggcatcagccgcagaacactcgttaaatcaacagcgataggttctctggcgctggctgcaggcggtttttctttaccgttcaccctgcgcagtgcagcggcaacggtacaacaggccagcgaaaaagtgatctggggtgcctgttccgtcaactgtggtagccgctgtgcacttcgtctacatgttaaagataatgaagtgacctgggtggaaactgacaataccggcagcgacgagtacggcaaccatcaggtacgcgcctgtttgcgcggtcgctccatccgccggcgtattaatcatcccgatcgcttgaattacccaatgaaacgcgtgggtaaacgcggtgaaggcaaattcgaacggattagctgggatgaagccctggatactatcgccagtagcctgaaaaaaaccgtcgaacaatatggcaatgaggctgtatatattcagtactcttcggggattgttggcggcaatatgacccgctcttcgccatcagcctcggcggtcaaacgcctgatgaactgctacggcggttcactcaatcagtatggctcctacagcaccgcgcaaatctcctgtgccatgccctacacctacggcagtaatgatggcaacagcaccacggatattgaaaacagcaagctggtcgtgaagatgaatggcttcctattcgcccgggcaccgatgccgcgctggttgcgggtattgcctgggtattga

SEQ ID NO: 464868 - DNA, 525 bp, Shigella boydii
atgcacgttacagccaagccctccagttttcaatgtaatctcaaatgtgattactgtttttaccttgaaaaagagtcgcagtttactcatgaaaaatggatggatgacagcactctgaaagagttcatcaaacaatatatcgcagcgtctggcaatcaggtctattttacctggcaaggcggtgaatccactctggctggcctggattttttccgtaaagttattcactatcaacaacgctatgcaggccaaaaacgtatttttaatgcattacaaacgaatggcattttattgaataatgaatggtgttcctttctcaaagaacatgaatttctggttggtatctcgatcgatggcccccaggagttacatgaccgttacagacgcagtaattcaggtaacggtacttttgcaaaagtgatagcagccatcgagcgtctgaaatcatatcaagttgagtttaatacgttaccgtcattaataacgttaatgtccattaccctcttgaggtttatcattttttaa

SEQ ID NO: 464869 - DNA, 1005 bp, Shigella boydii
atgcagcgtgggcgtttttgcctgacaggtggttttcgcgatatgtatatcgcgaaaaataatcgcatgttttacgccttgctgattgcaatttcggtacaaagcgtgggggtttttgcgttaattcaggcgggcctactgacttacgaagccggggcgttcccgtggcttggtactgttataggtgggtatcttttcgggctgggaattgttctggcgggtggatgtgccaccgggacctggtatcgcgcgggtgagggattgatcggcagttggatcgcgcttttcacttatatggtgatgagtgcggtgatgcgttctccacacgccagtggtttaaatcaaaccttgcagcactacactactgaacataactctattgctgatacttttaatttgtctgtgtggccgttggttgccgttttgctggtgataacgctctgggtggtgatgaaagagttgaagaagccaaaactcaaagtcgcgaccttaccgccgcgccgaaccgggatcgctcatattctgtttgaaaaacgctggcatccctttgtcactgctgtactcatcggtttgattgcgcttttagcctggcccctgagtgaagcaaccggacgcatgtttgggttaggaatcactcccccaacggccaatattctgcaatttctggtcgcgggtgacgtgaaatacattaactggggcgttttcctggtgttagggatcttcgtggggtcatttattgcagccaaagcgagccgtgagttccgcgttcgcgctgctgatgcacaaacaacattacgtagcgggttaggtggtgtactgatgggcttcggtgccagcattgcaggtggttgctctatcggtaatggactggtcatgactgcaatgatgacctggcagggctggattggccttgtatttatgattctcggagtctggactgcgtcctggcttgtgtatgttcgaccgcagcgtaaggcacgactggcaactgctgcggcaaattaa

SEQ ID NO: 464870 - DNA, 480 bp, Shigella boydii; identical to SEQ ID NO: 463183

SEQ ID NO: 464871 - DNA, 267 bp, Shigella boydii; identical to SEQ ID NO: 464848

SEQ ID NO: 464872 - DNA, 240 bp, Shigella boydii; identical to SEQ ID NO: 464629

SEQ ID NO: 464873 - DNA, 360 bp, Shigella boydii
atggctatccctgcatttggtttaggtactttccgtctgaaagacgacgttgttatttcatctgtgaaaacggcgcttgaacttggttatcgcgcaattgataccgcacaaatctatgataacgaagccgcagtaggtcaggcgattgcagaaagtggcgtgccacgtcatgaactctacatcaccactaaaatctggattgaaaatctcagcaaagacaaattgatcccaagtctgaaagagagcctgcaaaaattgcgtaccgattatgttgatctgacgctaatccactggccgtcaccaaacgatgaagtctctgttgaagagtttatgcaggcgctgctggaagccaaaaaataa

SEQ ID NO: 464874 - DNA, 489 bp, Shigella boydii
atgaccgcctggacgcaggatctcatctatgcaggcgatccggttcattatcatggcagtcgagctaccgaagggacactttcctggcggcaagccacggcccaggcggggcagggagagcgttacgaccagatactcgcgtttgcttatcccgacaacagccttagccgctggggagcgccacgctcaacctgccagttattacccaaagcgaaagcctggctggcgaaaaaaatgccgcagtggcggcgtatattacaaggcgagacggggtacaacgaaccagacgtgtttgcggtctgtcgtttagtctcaggtttcccctataccgatcggcagcagaaacggctgtttattcgtaacttctttacgcttcaggatcggctggatttaacccatgagtatctgcacctggcctttgatggttatcccaccgggcttgatgagaactatatcgaaacgctgacccgacaattattaatggactaa

SEQ ID NO: 464875 - DNA, 252 bp, Shigella boydii
atgtatatttgcacgctttgctgttttgccgaggaggttaaaggtgattattctcattacaggacctttttatttgatattggtaatcaatataaggttaaacttacacaaagcggaaaaaaagagttctctttaacattagaatttaacgatactataattgaatctcagaaagtcacaggcaataaggcaaagcatattcttgaggatatagaaatattctatcgtaacaaacccgatacttattattaa

SEQ ID NO: 464876 - DNA, 246 bp, Shigella boydii; identical to SEQ ID NO: 460696

SEQ ID NO: 464877 - DNA, 384 bp, Shigella boydii
gtgctggcttctccggcctttaaggttaaattgtatgtgccgctggcacgtcctgcgctggcgttatggcatcgtctgcgtggtctgttttttattaattcctatgtgaaaggacgctatttgacccacgatcggcaacgggtggcgagtttcaataatgatccgctgatcacacgggcgattgccgtcaatatcttgctcgatctctataaaacgtctgaacgtattattagagatgcggcggcgattacgctccccacgcaacttctgatatcaggcgatgactatgtggtgcatcgccaaccgcagattgatttttatcagagattacgtagccctctgaaagagctgcatctgctgccaggcttttatcacgacacgtag

SEQ ID NO: 464878 - DNA, 936 bp, Shigella boydii
atgcaaagctttattagtcgtttatatgctaacaaatcgcaaaaatttgattatcagcatgaagactgcacaggaccatcagcggatcaatggcggctactttctggtggacccgtgccattatcgccggttgatttagcgtatcgctttatgcgaaaggcgatgaaattgttcgggacgcactctgcgggcctgcatctcggaatgagcaccggctttgattcaggcagttcgctggattatgtctatcaaaatcaaccgcaaggtagtaacgcattcgggcgcttaatcgacaaaatctacctgaacagtgttggctggcgcggtattcgccagcgcaaaacccatttacaaatactgattaaacaagccgttgccgatctccacgccaaaggtttagccgtccgcgtggttgacattgccgcagggcatgggcgctatgtactggatgcgctggcaaacgagcctgccgtaagcgatattttgttacgtgattacagcgagttaaatgttgcacaggggcaagagatgattgcccaacggggaatgtctgggcgggtgcgttttgaacagggcgatgcgtttaacccggaggaactcagcgcgttaacaccgcggcctacgctggcaattgtctctggactgtatgagctttttcccgaaaatgagcaggtaaaaaactcactcgcaggtcttgccaatgccatcgaaccggtcggcattctcatctacaccgggcagccgtggcaccctcaactggagatgattgccggggtgttaaccagtcataaagatggtaaaccgtgggtaatgcgcgtgcgttcgcaaggggagatggattcactcgtgcgtgatgccggatttgataaatgcacacaacggattgatgagtggggtatttttacggtttcgatggcggtgcgtcgtgataactga

SEQ ID NO: 464879 - DNA, 348 bp, Shigella boydii
ttgtttgttgaatggaaacctgaacttgaagaggctgatattagtgattctgtgattcataaaaaaatcccggtaaaatatgttcaggcaccatcctataaagaaatatttgaggtgctgagtgaaactaaaaaaaggattccagcacatttattccgaatgataaaagatgaactttatgagttggtcttaactgatgatccgaaaggaaaattatatgtgagggattcagagaaaattgaagaaggggtcagtacaactgagtttgttgtgggatatggtgctatttcgatggtaaaaaatcggaatcgatggcaactaaaggattggttggactggagcgtgtag

SEQ ID NO: 464880 - DNA, 519 bp, Shigella boydii
atggcaactaaaggattggttggactggagcgtgtagatctcatccgaggggttgtatttgaaaatggatattatgattggggatgtgttgttaatgatgttttgccaaatatatgcaaaggcaatgcgcgcattcctatttttcacttcttaaatcacgctaaattaattaatcctgatgggagtataattaatgaaacagaactctcaggtggcgttttatcacgattaaatatcactcctattagttttcagtctcaaggatgggataaacgacgctctgaaaccgttcctgaggtcaaggtgggggtcaatgagttatatcttgcttatgatttcactttctttttaagaatgatgccttatatggagcctggattaatcaagcgcgatatgggagagcttctcaaaatattgaaaaaacatatagatgaagctatgaatactcaggtattgtcaagtaatttttgcaaattagtgtgtatttatgattatatcaaaaatagtcacaggtattaa

SEQ ID NO: 464881 - DNA, 369 bp, Shigella boydii
gtggctgatttcgataatctgtttgatgccgcgcttgatctcgcagacagggccattattcgcaatatgggcattactgcagtcattacatcaggccagttaaaaggacaccggatttccggcgtttttgacgatcctgaaagtatttctctggtagccggcggtgtgcgtattgaagactctttaccatccctgtttgtgaaaacggcagatattttacagctgtgtcgcaatgattcgctgatgattggccgggagtctttcagcgtggatcgtattactcctgatgacggcggatgtagttatatccggttgcggcgtgaaggagcaggaaacgtaagggcagggggatattatgagggtgcttga

SEQ ID NO: 464882 - DNA, 417 bp, Shigella boydii
atgcccccgttttttactgaaccggaaagaaatatggcaaagaaagacgagaatctgaaacgtctgaaagagctgtcagaattgctggggcgtgagcctgatatgtcgggaagcgcggcagatatcgcacagcgtgtggcagagctggaagaggagcttggtggtgtggatggcactgacaaccaggcaagtgtgcttaccgggcaggaaaataacggggaggcagttccgccggagaggatgattcagaatacggatgagctggtcagggtggtggcacggacgacgctgcatattgacgcgcttcacgccacacaggataagccagtgaaactggttctgccggaaacggtgtttcgcgtgcctgccggcatggccaccagtctggtaaaagatgacctggtaaaaatgcagtag

SEQ ID NO: 464883 - DNA, 480 bp, Shigella boydii
gtggcggacctgacgtatgttgccacacaggagggatggttgtacctcgctggcatcaaagatgtttatacgtgcgaaattgtcggctacgccatgggagagcgcatgacaaaagagctgacaggtaaagccctgtttatggcgctcaggagccagcgcccacctgccgggctaatccaccactctgatcgaggttcacagtactgcgcatacgattaccgggtcatacaggagcagtttggtctgaaaacatcaatgtcgcgtaaaggtaactgttacgacaacgctccgatggaaagcttctggggaacgctgaaaaatgagagcctgagccactatcgttttaataaccgggatgaagccatctcagtaatacgggaatacattgagattttctacaatcgtcagcgtcgtcactctcgtctggggaatatctccccggcagccttcagggaaaaatatcatcagatggctgcttaa

SEQ ID NO: 464884 - DNA, 867 bp, Shigella boydii
atgaagtatgtctttattgaaaaacatcaggctgagttcagcatcaaagcaatgtgccgcgtgctccgggtggcccgcagcggctggtatacgtggtgtcagcggcggacaaggataagcacgcgtcagcagttccgccaacactgcgacagcgttgtcctcgcggcttttacccggtcaaaacagcgttacggtgccccacgcctgacggatgaactgcgtgctcagggttacccctttaacgtaaaaaccgtggcggcaagcctgcgccgtcagggactgagggcaaaggcctcccggaagttcagcccggtcagctaccgcgcacacggcctgcctgtatcagaaaatctgttggagcaggatttttacaccagtggcccgaaccagaagtgggcaggagacatcacgtacttacgtacagatgaaggctggctgtatctggcagtggtcattgacctgtggtcacgtgccgttattggctggtcaatgtcgccacgcatgacggcgcaactggcctgcgatgccctgcagatggcgctatggcggcgtacgaggccccggaacgttatcgttcacacggaccgtggaggccagtactgttcagcagattatcaggcgcaactgaagcggcataatctgcgtggaagtatgagcgcaaaaggttgctgctacgataatgcctgcgtggaaagcttctttcattcgctgaaagtggaatgtatccatggagaacactttatcagccgggaaataatgcgggcaacggtgtttaattatatcgaatgtgattacaatcggtggcggcggcacagttggtgtggcggcctcagtccggaacaatttgaaaacaagaacctcgcttag

SEQ ID NO: 464885 - DNA, 300 bp, Shigella boydii; identical to SEQ ID NO: 84330

SEQ ID NO: 464886 - DNA, 294 bp, Shigella boydii; identical to SEQ ID NO: 16023

SEQ ID NO: 464887 - DNA, 480 bp, Shigella boydii; identical to SEQ ID NO: 463183

SEQ ID NO: 464888 - DNA, 327 bp, Shigella boydii; identical to SEQ ID NO: 464714

SEQ ID NO: 464889 - DNA, 645 bp, Shigella boydii
atgacattaacaagacgtgaatttattaaacacagcggtattgccgctggagcgctggtggtgacatcggcagcaccgctccccgcatgggcagaagagaagggcggtaaaatcctcaccgcgggacgttggggagcgatgaacgtagaagtgaaggacggcaagattgtttcttcaacaggcgcgctggcgaaaaccataccgaattccttacagtctacggcggcggatcaggtacacaccacgacgcgtattcagcatccgatggtgagaaaaagctatctcgataatccactgcaaccgacgaaaggtcgtggtgaagatacctatgtacaggtgagctgggaacaagcattaaaactgattcatgagcaacacgatcgcattcgcaaagctaacggaccatcggctatttttgccggatcatacggctggcgctcttctggcgtgttgcataaagcgcaaaccttactgcaacgttatatgaacctggcgggcggttattccgggcatagcggcgattattcaaccggggcggcacaggtgatcatgccgcatgtggtcggttctgtagaggtgtatgaacagcagacctcctggccgctgattctggaaaacagccaggttgtggtgcgtgggggatga

SEQ ID NO: 464890 - DNA, 921 bp, Shigella boydii
atgtcttcggatgctgatgctcacaaagtgggcttaatccccgtcaccctgatggtgtcggggaatattatggggtcaggtgtttttctgttacctgcaaacctggcctccactggcgggattgccatttatggatggttggtgacgattatcggtgcactggggctctcgatggtatacgccaaaatgtcgttcctcgacccaagtcctggtggttcttacgcttacgcccgccgctgctttggcccgtttctcggttatcaaaccaacgtcctctactggctggcctgctggatcggcaatatcgccatggtggtcattggcgtaggatatttaagttacttcttcccgattctgaaagatccattggtattaaccatcacctgcgtcgtggtgctgtggatcttcgtcctgctgaacattgtcggtccgaaaatgatcacccgtgtgcaggcagttgccaccgtgctggcgctgatccccatcgtcgggattgccgtatttggctggttctggttccgtggtgaaacctatatggcggcatggaacgtcagcggcctgggcaccttcggtgcaattcaaagtacccttaacgttacgctgtggtcgttcatcggtgtggaaagtgcctccgttgccgcaggtgtggtgaaaaacccgaaacgcaatgtccctatcgccaccattggtggggtattgattgccgccgtttgctatgtactttctaccaccgcgattatggggatgatccctaatgccgcactgcgcgtttctgcttcgccattcggtgatgccgcacggatggcgttgggtgacaccgccggggccattgtttccttctgcgcagctgcgggttgcttaggttcacttgggcggctggacgttgctggcgggtcaaacggcgaaagccgctgccgatga

SEQ ID NO: 464891 - DNA, 480 bp, Shigella boydii; identical to SEQ ID NO: 463183

SEQ ID NO: 464892 - DNA, 480 bp, Shigella boydii; identical to SEQ ID NO: 463183

SEQ ID NO: 464893 - DNA, 246 bp, Shigella boydii; identical to SEQ ID NO: 460696

SEQ ID NO: 464894 - DNA, 1320 bp, Shigella boydii
atgaaagtgacattaacgttcaacgaacaacgtcgtgcggcgtatcgtcagcaagggttatggggcgatgcttcactggccgattactggcagcagaccgctcgtgcgatgccagacaaaattgccgtggtcgacaatcatggtgcaacgtacacctatagcgcgctcgatcacgccgcgagctgtctggcaaactggatgttagcgaagggtattgaatcaggcgatcgcatcgcatttcaactgcctggctggtgtgaatttaccgttatctatcttgcctgcctgaaaatcggtgcggtttccgtgccgctgttgccttcctggcgggaagcagaactggtgtcggtgctcaataagtgtcaggcaaaaatgttctttgcaccgacgttgtttaaacaaacacgtccggtagatttaatcctgccgctgcaaaatcagcttccacaactacaacaaattgtcggcgtggacaaactggctcccgccacctcttccctctcattaagtccgattatcgccgacaatacctcactgaccacggcgataacgacccacggcgatgaattagctgcggtgctgtttacctccggaactgagggtctgccaaagggcgtgatgctaacgcataacaatattctcgccagtgagcgggcttattgcgcgcgactgaatctgacctggcaggatgtctttatgatgcctgcgccacttggtcacgcaacgggctttctgcatggcgtaagggcaccattcttaattggcgctcgcagcgtgttgttagatattttcactcctgatgcgtgtctcgcgctgcttgagcagcagcgttgcacctgtatgctaggcgcaacgccgtttgtctatgatcttttgaatgtactagagaaacaacccgcggacctttcagcgctgcgtttctttctttgcggcggtaccacaatccccaaaaaagtggcacgtgaatgccagcagcgcggcattaaattattaagtgtttatggttccacagaaagttcgccgcatgcggtggtgaatctcgatgatcctttgtcgcgctttatgcacaccgatggttacgctgccgcaggtgtagagattaaagtggtcgatgacgcacgcaagaccttaccgccaggttgcgaaggtgaagaagcctcgcgtggccccaatgtgtttatggggtattttgatgaacctgaattaaccgcccgtgcgctggacgaagaaggctggtattgcagcggcgatctctgccgtatggatgaggctggctatataaaaattaccggacgcaaggtgatgctgccaacttactga

SEQ ID NO: 464895 - DNA, 480 bp, Shigella boydii
gtggcggacctgacgtatgttgccactcaggagggatggttgtacctcgctggcatcaaagatgtttatacgtgcgaaattgtcggctacgccatgggagagcgcatgacaaaagagctgacaggtaaagccctgtttatggcgctcaggagccagcgcccacctgccgggctaatccaccactctgatcgaggttcacagtactgcgcatacgattaccgggtcatacaggagcagtctggtctgaaaacatcaatgtcgcgtaaaggtcactgttacgacaacgctccgatggaaagcttctggggaacgctgaaaaatgagagcctgagccactatcgttttaataaccgggatgaagccatctcagtaatacgggaatacattgagattttctacaatcgtcagcgtcgtcactctcgtctggggaatatctccccggcagccttcagggaaaagtatcatcagatggctgcttaa

SEQ ID NO: 464896 - DNA, 480 bp, Shigella boydii
gtggcggacctgacgtatgttgccactcaggagggatggttgtacctcgctggcatcaaagatgtttatacgtgcgaaattgtcggctacgccatgggagagcgcatgacaaaagagctgacaggtaaagccctgtttatggcgctcaggagccagcgcccacctgccgggctaatccaccactctgatcgaggttcacagtactgcgcatacgattaccgggtcatacaggagcagtctggtctgaaaacatcaatgtcgcgtaaaggtcactgttacgacaacgctccgatggaaagcttctggggaacgctgaaaaatgagagcctgagccactatcgttttaataaccgggatgaagccatctcagtaatacgggaatacattgagattttctacaatcgtcagcgtcgtcactctcgtctggggaatatctccccggcagccttcagggaaaaatatcatcagatggctgcttaa

SEQ ID NO: 464897 - DNA, 837 bp, Shigella boydii
atggactccacgctcatctccactcgtcccgatgaaaggacggtttcgttaagtcgcgcccgacgagctgcgttaggcagtttcgctggtgccgtcgtcgactggtatgattttttactctatggcatcaccgccgcactggtgtttaatcgcgagtttttcccgcaagtaagcccggcgatgggaacgctcgccgcatttgctacctttggcgtcggattccttttccgtccgctcggcggtgtcattttcggtcactttggcgaccgactgggacgtaagcgcatgttaatgctgactgtctggatgatgggcatcgcgacagccttgattggtattcttccttcattctcgaccattgggtggtgggcacctattttactggtgacgctgcgtgccattcagggatttgccgtcggcggcgaatggggaggcgcggcgttgctttccgttgaaagtgcaccgaaaaataaaaaagccttttacagtagcggtgtacaagttggctacggtgtaggtttactgctttcaaccggactggtttcattgatcagtatgatgacgactgacgaacagtttttaagttggggctggcgtattcctttcctgtttagcatcgtactggtactgggagcattgtgggtgcgcaatggcatggaggagtccgcggaattcgaacaacagcaacataatcaagctgccgcgaaaaaacgcatcccggttatcgaagcgctgttacgacatccaggtgctttcctgaagattattgcgctacggctgtgcgagttgctgacgatgtacatcgttaccgcctttgcacttaattattcaacctag

SEQ ID NO: 464898 - DNA, 477 bp, Shigella boydii
atggggttaccgcgcgaacttttccttaatattggtttgctggtaggtggattaagctgcctgacaattccctgttttgcctggcttgccgatcgttttggtcgccgcagggtttatatcacaggtgcgttaatcggaacgttgagcgcatttcctttctttatggcgcttgaagcacaatctattttctggatagttttcttctccataatgctggcaaacattgcgcatgacatggtggtgtgtgtgcaacaaccgatgtttaccgaaatgtttggtgccagttatcgctatagtggcgctggagtcggttatcaggttgccagtgtggttggcggaggatttacaccttttattgccgctgcactcatcacttactttgccgggaactggcatagcgtcgccatgtatctgctggctggatgtctgatttctgcaataaccgctttgttgatgaaagacagtcaacgcgcttga

SEQ ID NO: 464899 - DNA, 3162 bp, Shigella boydii
atgggcagtgaatattaccggaccctgcagaatggcggacgtcatgccgctgctgccgcacgggaacagcgccgcgcccttgcagaactgaacagtcagttgacggaaattcgcggttctgctgtcggaatggctggcgcatttgccggtgcctttgccaccggacacctgatttcgctggccgatgagtggggttccgtgaaggcccgtctgaaacaggcatctcagtcatcggatgaattctcgtcatcacagaaagtgctgatggatatcagtcagcgaacaggtaccgcgttttcggataatgcggccctgtttgcccgttcggctgcctcgatgcgtgaatatggttacagtgctgatgatgtgctgaaggtgacggaggccatttcgacaggactgaaactgtcaggggctggagttgcggaatccggttcggtgatcacccagttcagccaggcactggcacagggtgtactgcgtggcgaagaatttaatgctgttaacgaaaatggcgaccgggtgatccgcgcgcttgctgcggggatgggtgtggcccgtaaagatctgaaggcaatggcggatgacggaaaactgacagcggataaagtggtccctgtgttaatcagccagctggggatattacgtgatgaatatgcggccatgccggaaacggtttccggtagtatcacgaaggtggaaaacgcctttatggcctgggtgggcgaagtgaatgaggcctgcggggtgacaaaaacgctctccggcgtgctgaacggtgttgccggacagattgataatgtggcaacagctgtgggggcgctggttgccgtcggggttgcccggtactttggcaatatggcctccggagcgatgtctgccacggcaggacttgtgacggctgcacgtaatgaagttgcactggcggaagcacagttcaggggaacgcagattgccacggcgcgggcaagggcagccgtgtaccgtgctcagcaggccgtggcggcagcccgcgggacggagatgcagattgctgcagaggcccgtctggcggccacacaggaacgcctgaacagaaatattgctgccagaagcgccgcccagaatgcgctgaacagtacaacggcggtgggctcacgtctgatgagcggtgcgctggggctggttggtggcgtacccggactggtgatgctgggggctgcagcattgtacacgctgtaccagaatcaggagcaggcctgggagtctgcgcgccagtatgcactgacgatagatgaaatcgcgcataaaacgccgtcaatgtctttgcctgaagcctcagataatgaaggacgaacacgggcggcgctgacagagcagaaccggctgattgatgaacaggctagtcgggtgaaatccctgcaggaaaaaatcgcaggatatcagtatgttctggcgaacccgggctggatgaccggtgacggattcatgataaaccatctgacctcggtgaagaccgtaacggaagggcttgctcaggcaacagagcagcttgccgttgagcagtcccgtctggcactgatgcaggaaaaagcgcagtccattcaggatgtgcttgccgggctggaagaccgtcgtgtggcgttaattcgtcagcaggcggcagagcagaataaggtgtaccagtccatgctggttatgaacggtcagcatacggaattcaaccgtctgctggggctgggtaatgaactgcttcagcagcggcagggactggtgaatgtgccgttacggctgccacaggccactctggatgataaacagcagagtgccctgacaaaaacagagcgtgagctggccctgtccagactgaaaggggaagaaaaagagcgtgtccgactggggtatgcggcggatgacctcggttttgtgggtgatccgtatcaggaggcgagacaacgttatatcagtaatgccctggaagcctggcgcaataacgaggcgaataaacccaaatcccggggtggaaaatcagagacggaaaaagcggaagacagtttttcccggctgctgaagcagcagaaagagcaactggcactggcggggcagaatacagagctggcgaagctgaaataccagactgcgcagggcgaactgaaaaccctgacggagatgcagaagcaggaactgctgcgcaatgcggccctgattgaccagcaaaaaatccgggagcagttgcggtcccgggaagagaccctgaagaatgataatgtggctgcgcgtgcatcaaatgaagcggaactgctggggtacgggcagggagagcggctccgtgaacgcatgcgggagttgcagcagatccgcgacagtttccgccagaaggatgcggaccttcagtctcagtatcagaccggggatatcagtgaggatttttacagacaggctctggcacagaacgcgcagtatctgagtgaacgtctgaaagagcaggaagccttttatgccgaatcggatgtgcagcgtgcggactggcagaaagggctgcaggagggattcagtaactgggtggataatgcgtccgattacgcctcacaggcagcacagcttgcgacggagggtatctcagggatggtgaataacatcacggagatgctgaacggaaataaagtggaatggcgcagctgggcctcatcagtgctgcaggaaatatcaaaagttcttatgaatgccgcgattgtcaacgggatcaagacggcggcaaacagtatgtccggagcgggaggatttatcggcagtattggtagctggctgggcggtgcggtggccaatgcaaaaggcggtgtgtatacctcggcaaacctgagtgcgtacagcaacagtattgtggatacgcccacgtactttgcctttgcaaaaggggcgggactgatgggggaggccggtcctgaagccattatgcccctgacccgggcggcggatggctcgctgggtgtgcgagcggtgggcagtatgaacggcagtgcaggtctggtgtattccccggtctaccatatcgccattcagaatgacgggactaatggccagatagggccggaagctgcgggcagccttgtgcaactgattgaccagcgggtgcaggcggtgatgctgtccatgcgacgtgacggaggaatgctgagtggctga

SEQ ID NO: 464900 - DNA, 264 bp, Shigella boydii
atgagcagaaaaaaccaacgttactctaaagagttcaaagccgaagctgtcagaacggttcttgaaaatcaactttcgatcagtgaaggcgcttcccgattatcccttcctgaaggcactttaggacaatgggttaccgccgccagaaaagggctcggtactcctggttcccgcacggtggctgaactggaatctgaaattctgcaactgcgtaaggcgttaaatgaagctcgccttggtgatgctgccaacttactgatttag

SEQ ID NO: 464901 - DNA, 267 bp, Shigella boydii
atggcgacgctggggcgtcttatgagcttgctgtcaccctttgacgtggtgatatggatgacggatggctggccactgtatgaatcccgcctgaagggaaagctgcacgtaatcagcaagcgatatacgcagcgaattgagcggcataacctgaatctgaggcagcacctggcaaggctgggacggaagtcgctgtcgttctcaaaatcggtggagctgcatgacaaagtcatcgggcattatctgaacataaaacactatcaataa

SEQ ID NO: 464902 - DNA, 363 bp, Shigella boydii
ttggagtcattacccggacgcaaaaaagatattattgtccgcggcggcgaaaatattagcagccgtgaagtggaagatattttattgcagcatcctaaaattcacgatgcctgtgtggttgcaatgcccgatgaacgtttaggtgaacgatcatgcgcttatgtcgtgctgaaagcgccgcatcattcattatcactggaagaggtggtggctttttttagccgtaaacgggtcgcaaaatataaatatcctgaacatatcgtggtaatcgaaaaactaccgcgcactgcctcaggtaaaatacaaaagtttttgttaagaaaagatattatgcggcgattaacgcaggatgtctgtgaatag

SEQ ID NO: 464903 - DNA, 822 bp, Shigella boydii; identical to SEQ ID NO: 464328

SEQ ID NO: 464904 - DNA, 276 bp, Shigella boydii
gtggcttctgtttctatcagctgtccctcctgttcagctactgacggggtggtacgtaacggcaaaagcactgccggacatcagcgctatctctgctctcactgccgtaaaacatggcaactgcagttcacttacaccgcttctcaacccggtacgcaccagaaaattattgatatggccatgaatggcgttggatgccgggcaactgcacgcattatgggcgttagcctcaacacgattttacgtcacttaaaaaactcaggccgcagtcggtaa

SEQ ID NO: 464905 - DNA, 585 bp, Shigella boydii; identical to SEQ ID NO: 5290

SEQ ID NO: 464906 - DNA, 480 bp, Shigella boydii
gtggcgaacctgacgtatgttgccacacaggagggatggttgtacctcgctggcatcaaagatgtttatacgtgcgaaattgtcggctacgccatgggagagcgcatgacaaaagagctgacaggtaaagccctgtttatggcgctcaggagccagcgcccacctgccgggctaatccaccactctgatcgaggttcacagtactgcgcatacgattaccgggtcatacaggagcagtctggtctgaaaacatcaatgtcgcgtaaaggtcactgttacgacaacgctccgatggaaagcttctggggaacgctgaaaaatgagagcctgagccactatcgttttaataaccgggatgaagccatctcagtaatacgggaatacattgagattttctacaatcgtcagcgtcgtcactctcgtctggggaatatctccccggcagccttcagggaaaaatatcatcagatggctgcttaa

SEQ ID NO: 464907 - DNA, 213 bp, Shigella boydii
gtgtatgatggtgtttttgaggtgctccagtggcttctgtttctatcagctgtccctcctgttcagctactgacggggtggtgcgtaacggcaaaagcactgccggacatcagcgctatctctgctctcactgccgtaaaacatggcaactgcagttcacttacaccgcttctcaacccggtacgcaccagaaaattattgatatggccatga

SEQ ID NO: 464908 - DNA, 456 bp, Shigella boydii
atgggtacggtgacgtttgactgtcggatgtttgtcagtctgtacccggagttttccacggtgacaccggagctactgacggcggtgtttaaccgggcgaccgcgttgtacctggataacacggacgacagtccggttaccgacctgaaggagcgggaacagcttctgttcctgctggttgcgcatctgtgcgcattgcgggggctgggaaacgggagagacgggcaggctggtctggtggggcgtatcaccagtgcgtcggaaggttctgtatcggtatcggtggataatagcggcagtaatgatgcgtcgtggtggtatctccagaccccctggggtgctgactactggcaggcgacagcgccataccgctcaatgcagtatcattccgggggggcaccttcgcgatatccggggcattattaccggggatacgggagggggcgtcgatggtaa

SEQ ID NO: 464909 - DNA, 546 bp, Shigella boydii
gtgaatacccgtgccattctggatatgacgtcccagtttgatttttatcacggtggtggtctggatgtttgttatttgagttttgctgaagtcgaccagcacggtaacgtcggcgtgcataaattcaatggcaaaatcatgggtaccggtggatttattgatatcagtgccacctcgaagaaaattattttctgcggcacgttaaccgcgggcagtttaaaaacagaaattgccgatggcaaattaaatatcgtccaggaaggacgggtgaagaaatttattcaggaactaccggaaattacttttagcggaaaaatcgcgctcgaacgggaactggatgttcgttacatcaccgaacgtgctgtattcacgctgaaagaagacggcctgcatttaatcgaaatcgcccctggcgtcgatttacaaaaagatattctcgacaaaatggatttcaccccagtgatttcgccagaactcaaactgatggacgaaagattatttatcgatgcggcgatgggttttgtcctgcctgaagcggctcattaa

SEQ ID NO: 464910 - DNA, 687 bp, Shigella boydii
ttgcagtttcatataaattctcccgatataaataacgaaaaagccgttctgcttgccagggatgaaacactcggcaattgccttaatttgacggaaattatccctcaggcttctgttcgttatgacgttaacgagcaacgtctggatatagacgttcctcaggcatgggtaatgaaaaattaccaaaactatgttgatccatcgttatgggaaaatggcattaatgcggccatgttgtcatacaacctcaacggatatcatagtgaaactcctggtcgaagaaatgacagcatttatgctgcttttaacggtgggatgaatttaggtgcatggcgactgcgtgcctcaggcaactacaactggatgaccgattctggcagtaattatgattttaagaatcggtatatacagcgtgatatcgcctcgctgcgttctcaactcattcttggtgagtcttatacaacgggcgaaacctttgattctgtcagtatccgcggcattcgtttatacagcgacagccgcatgttgcctccgacattagcgagttttgcgcctatcattcatggcgttgctaataccaacgccaaagtcactatgaagtggcacactgaatttggccacctgaacagaggtgatatgctcacctcagaacaacacaggtgctccaatgaaaaaaagaaattttag

SEQ ID NO: 464911 - DNA, 303 bp, Shigella boydii; identical to SEQ ID NO: 461506

SEQ ID NO: 464912 - DNA, 480 bp, Shigella boydii
gtggcggacctgacgtatgttgccacacaggagggatggttgtacctcgctggcatcaaagatgtttatacgtgcgaaattgtcggctacgccatgggagagcgcatgacaaaagagctgacaggtaaagccctgtttatggcgctcaggagccagcgcccacctgccgggctaatccaccactctgatcgaggttcacagtactgcgcatacgattaccgggtcatacaggagcagtctggtctgaaaacatcaatgtcgcgtaaaggtcactgttacggcaacgctccgatggaaagcttctggggaacgctgaaaaatgagagcctgagccactatcgttttaataaccgggatgaagccatctcagtaatacgggaatacattgagattttctacaatcgtcagcgtcgtcactctcgtctggggaatatctccccggcagccttcagggaaaaatatcatcagatggctgcttaa

SEQ ID NO: 464913 - DNA, 480 bp, Shigella boydii
gtggcggacctgacgtatgttgccactcaggagggatggttgtacctcgctggcatcaaagatgtttatacgtgcgaaattgtcggctacgccatgggagagcgcatgacaaaagagctgacaggtaaagccctgtttatggcgctcaggagccagcgcccacctgccgggctaatccaccactctgatcgaggttcacagtactgcgcatacgattaccgggtcatacaggagcagtctggtctgaaaacatcaatgtcgcgtaaaggtcactgttacgacaacgctccgatggaaagcttctggggaacgctgaaaaatgagagcctgagccactatcgttttaataaccgggatgaagccatctcagtaatacgggaatacattgagattttctacaatcgtcagcgtcgtcactctcgtctggggaatatctccccggcagccttcagggaaaaatatcatcagatgactgcttaa

SEQ ID NO: 464914 - DNA, 276 bp, Shigella boydii; identical to SEQ ID NO: 461438

SEQ ID NO: 464915 - DNA, 327 bp, Shigella boydii
atgactaaaaatactcgtttttcccccgaagtccgtcaacgggcagtccgtatggttctggaaagtcagggcgaatatgactcacaatgggcgacaatttgttccattgctccaaagattggctgtacgccggagactctgcgtgtctgggttcgccagcatgagcgggataccggaggcggtgatggcgggctcaccaccgctgaacgtcagcgtctgaaagagctggaacgtgaaaatcgtgaactgcgccgcagtaacgatatccttcgccaggcttccgcttattttgcgaaggcggagttcgaccgcctctggaaaaagtga

SEQ ID NO: 464916 - DNA, 1137 bp, Shigella boydii
atgaaagttgcaatattaactcaaccattacatacgaattatggtggcacattacaagcctatgcattacaaaaagtcttgattaatttgggacatgaaccagagactattaattataggtcgaaaattaagaggccactatttatccgtgttgtgttgtcaaaaattaaaaggatagtattatgccgaaaaatcacatttgattttacaacacaagatagaattaatattaggacgcatcatcaatctttcattgatacaagattaaactattcagaggagattaacggtactgaggggttgagagattatattttaaaaaataattacggtgctgtaataataggtagtgatcagacatggagaccaatatattcgcctagaatagattcattttttctcgattttttaagtgatgtaaacgatataaaaaaaatggcatatgcagcatcttttggtactgataaatgggagttcacggagtcacaaactaatttatttaaattgttactttcaaaatttgactatgtttcagttagagagtcctcaggagtcaaattatgtagtgaaaaatttggtttgaaagcagagttggttttagatccgacattgctattgacattcgaagattatactcatttattagacaatgactatattaatcttcataagggaaaggtgtttagttatgtacttgatgagaattacgacaaaaaaaactttatagacacagtagcaagtactctccgcacaacgtcattttatacttaccctaaaaaaatcactaaagatgaatatgtgattagaaattattccgagtatgaatatccgccaatagaatattggatttcttcgtttaaggccgctgaatttattgtaacagattcatttcatggaacagtattttctattatttttaacaaacccttcatcgccattgcaaatgaagagagaggaaaggctagatttacgtcactattggaaatgtttggtcttgaaagacgacttgtgagtaatttagatgatgttgatttaaagcttgtaaatgaaaaaattaactatggccccataaatgaaaaaattgcttattttagagaagagtgccttaaaaagttgcagttaatgctaataaaataa

SEQ ID NO: 464917 - DNA, 213 bp, Shigella boydii; identical to SEQ ID NO: 462242

SEQ ID NO: 464918 - DNA, 387 bp, Shigella boydii
ttgtatataatttttttccaaaagaaacaatggaatgaaataatcaataatttaaaaataaaggatgactcttatgctttagagttaggaattatattcctccctgagaaagtattctgctattacatccctctgtatatttatgtctcgttgtttaataagaatgatttttgggtttttgaatccgattttattcaacaatatttatgtcctgagtatcgggattacgatgattttttgatttttgtttttaatttttcagatatacaactatctattattgcacagtttatgtcttatgaatcagacgctggattcttttatgcaagtaaagcttgtatggatttttgggaagattattcacctctattacataagaaaatttaa

SEQ ID NO: 464919 - DNA, 156 bp, Shigella boydii
atgaaaaaaataattttctctaacgagagtgcagtctatgatgaacttatgattcatttcccatgccagccattacctcatatttcaaatgatattatagggctggaggaactggatattgtatataatttttttccaaaagaaacaatggaatga

SEQ ID NO: 464920 - DNA, 150 bp, Shigella boydii; identical to SEQ ID NO: 462641

SEQ ID NO: 464921 - DNA, 276 bp, Shigella boydii; identical to SEQ ID NO: 458859

SEQ ID NO: 464922 - DNA, 249 bp, Shigella boydii; identical to SEQ ID NO: 461310

SEQ ID NO: 464923 - DNA, 684 bp, Shigella boydii
gtgaatatttatcgactctcttttgtatcctgcctggtcgtggcgatgccttgcgcattggcggtcgaattcaaccttaatgttctcgataaatcgatgcgcgaccgcattgatatttcattattaaaggaaaaaggagtcattgctcccggtgtgtattttgttagcgttgcggtaaataataaccaaatcagtaacgggcaaaagattaactggcacaaaaatgacgataaaaccattccgtgcatcaatgatttactggtcgataaatttggcttaaaacctgaagtccgtcagtcgttaccattgataaatcagtgcgtcgattttagctcccgatctgaaatgctcttcaatttcgatcaagccaatcagcaactgaatattagtattccgcaagcctggctggcgtggcactcagaaaactggaccccaccctccacatggaaagaaggtgtcgccggtgtcctgatggattacaacttgtttgccagcagctaccgcccacaggatggcagcagcagcactaatcttaacgcctatggaacagccggaatcaacacgggggcatggcgcttacgcagtgattatcagttgaatcagactgatagcgatgataaccatgaacagtcaggcgaaatatcacgtacctatctttttcgcccgttaccgcaattagggtaa

SEQ ID NO: 464924 - DNA, 213 bp, Shigella boydii; identical to SEQ ID NO: 9293

SEQ ID NO: 464925 - DNA, 480 bp, Shigella boydii; identical to SEQ ID NO: 463183

SEQ ID NO: 464926 - DNA, 252 bp, Shigella boydii
atgaaaaaaagaaattttagcgcagagtttaaacgcgaatccgctcaactggttgttgaccagaaatacacggtggcagatgccgccaaagctatggatgttggcctttccacaatgacaagatgggtcaaacaactgcgtgatgagcgtcagggcaaaacaccaaaagcctctccgataacaccagaacaaatcgaaatacgtaagctgaggaaaaagctacaacgcattgaatggagaatgaaatattaa

SEQ ID NO: 464927 - DNA, 252 bp, Shigella boydii; identical to SEQ ID NO: 464926

SEQ ID NO: 464928 - DNA, 480 bp, Shigella boydii; identical to SEQ ID NO: 464906

SEQ ID NO: 464929 - DNA, 480 bp, Shigella boydii; identical to SEQ ID NO: 463183

SEQ ID NO: 464930 - DNA, 327 bp, Shigella boydii; identical to SEQ ID NO: 462700

SEQ ID NO: 464931 - DNA, 240 bp, Shigella boydii; identical to SEQ ID NO: 463853

SEQ ID NO: 464932 - DNA, 378 bp, Shigella boydii
atggatacccgtcgcggttcaaattcacaactcgaaacggcagtgaaagatctgggcgcagtggtatccttcaaggggtattacggcgatctggtcattgcggtagcgaaaacgtcttatgtggcagaggacggtaccgaaaaacgttatctgccggagggcacgctggtgctggggaatacggcagcagaggggattcgttgctatggagccattaaggatgcacaggcgttgtctgaaggagtggtggcttcttcccgttacccgaaacactggctgaccgtgggcgatccgtcctgtgaattcaccatgacgcagtccgcgccgctgatggtgctgccggatccggatgagtttgtggtggtacaggtgaaataa

SEQ ID NO: 464933 - DNA, 354 bp, Shigella boydii
atgcgtgattttgagaattcctttgatgctgcccttgccagggtggacagaacgattgttgaagtgatggggctctgtgcgcagttcacctcgggggcacagtgtggcagcgaagttcagggggtttttgacgatccggagtcgctggggtttgccggtagcggggtccgtattgaaggaagcagcccgtcattatttgtgcggacggatacggttcgtgccgtgcggcgtggtgacacgctgaccattaatggtgagacattctgggtggatcgtgtttctccggatgacgggggtagctgttatctctggctcaaccgtgggcaaccacccgcagttaaccggcgacgataa

SEQ ID NO: 464934 - DNA, 480 bp, Shigella boydii
gtggcggacctgacgtatgttgccacacaggagggatggttgtacctcgctggcatcaaagatgtttatacgtgcgaaattgtcggctacgccatgggagagcgcatgacaaaagagctgacaggtaaagccctgtttatggcgctcaggagccagcgcccacctgccgggctaatccaccactctgatcgaggttcacagtactgcgcatacgattaccgggtcatacaggagcagtctggtctgaaaacatcaatgtcgcgtaaaggtaactgttacgacaacgctccgatggaaagcttctggggaacgctgaaaaatgagagcctgagccactatcgttttaataaccgggatgaagccatctcagtaatacgggaatacattgagattttctacaatcgtcagcgtcgtcactctcgtctggggaatatctccccggcagccttcagggaaaaatatcatcagatggctgcttaa

SEQ ID NO: 464935 - DNA, 366 bp, Shigella boydii
atgaggcgcttcgcaggcgcatgtcgtttcgttttcaatcgtgctctggcacgtcagaatgagaatcatgaggccggtaataaatacatcccttacgggaaaatggcttcctggctggttgagtggaaaaatgccactgaaacgcaatggcttaaagatgccccgtcacagccattgcaacagtcactgaaagaccttgagcgggcttacaaaaacttcttccagaatcgggctgcttttccccgattcaaaaagcggggacagaatgatgtattccgctacccgcagggcgttaagctcgatcaggaaaacagccgtatttttctgccgaaactgggctggatgcgctaccggaacagccgttag

SEQ ID NO: 464936 - DNA, 150 bp, Shigella boydii
atggccgccattgaaccggacgaacggattggttattcagccagcagcctggcagggcagccgtataaaggccgcaatggtcgtgtggaaggaacatctggaccacacaaggtagcgtgtaacgttattttgtgtgaaaatctcttgtga

SEQ ID NO: 464937 - DNA, 276 bp, Shigella boydii
gtgaccttagcattgctgtcgttaggcgcactggcaacgactaatccctggctgtctttagggttattgggatcaattattttcttccattcagcgggtcctggtgggctgggcatgaccattgccacactctcttatcttcccgctattcgccctactggggtcggatttgcccgcgctattatgcgcacaggggcaattgcaggactcattttctggccgatgctgtggggtgcgttgaaaacggaagcgttttactggttggcaatcgggtaa

SEQ ID NO: 464938 - DNA, 327 bp, Shigella boydii; identical to SEQ ID NO: 464915

SEQ ID NO: 464939 - DNA, 666 bp, Shigella boydii
atgagcggttggtttgacctgaccttaaatcagcgtgtttataatcaggacggtaaaacggcaaatgcggtcgttacctatgatggcaacgtgggtgagcagtataacgatgcctggtttggtgacagtgccaatgaaaatatcatgcagttcagcgatatttacctgacaacgcgaggttttttacccttcgcaccagaggcagacttctgggtcggcaaacataaactcccgcaatatgagatccagatgctggactggaaaaccttaaccacggatgtcgccgcgggtgtggggattgaaaactgggcacttggtgtagggctgtttgatatgtccttaagccgtgatgatgtcgatgtttactctcgtgatttttcgcgtaccagccagatgaataccaattctgtggatgttcgttatcgcaatatcccgttatgggatgatgcgacattatcattaatggctaaatattccgcacctaataaaacggatcaacaacaagataacgaaaatgacaacagttattttgaaatgaaagatagctggatgctgacttctgttttacggcaaaacctgcaacgcgatacgtttaatgaatttacgttacaggttgccaataattcctatgccagcagtggtgatgctgccaacttactgatttag

SEQ ID NO: 464940 - DNA, 480 bp, Shigella boydii
gtggcggacctgacgtatgttgccactcaggagggatggttgtacctcgctggcatcaaagatgtttatacgtgcgaaattgtcggctacgccatgggagagcgcatgacaaaagagctgacaggtaaagccctgtttatggcgctcaggagccagcgcccacctgccgggctaatccaccactctgatcgaggttcacagtactgcgcatacgattaccgggtcatacaggagcagtctggtctgaaaacatcaatgtcgcgtaaaggtcactgttacgacaacgctccgatggaaagcttctggggaacgctgaaaaatgagagcctgagccactatcgttttaataaccgggatgaagccatctcagtaatacgggaatacattgagattttctacaatcgtcagcgtcgtcactctcgtctggggaatatctccccggcagccttcagggaaaaatataatcagatggctgcttaa

SEQ ID NO: 464941 - DNA, 582 bp, Shigella boydii
atgctggaaaaatctctggcaacacttttcgtgttgttaattttagcaacgctgataaaccgttttctgctatggcggttaccggagagaaaagggggtgaggttacattacgtattcgtacctggtggggcatcgtcatttgtttttcactggtgatttcaggtccacgctggatgacgttggcgttttttgcgctgataagttttctggcattgaaagaatattgtatgcttatatccgtacattttccgcggtggttatattgggttattcctcttaactatttgcttatcggttttaattgctttgagctgtttctgttattaatacctttggctgggtttctgatattagccacctggcgagtttttgtgggtgacccctccggttttctgcataccgtgagcgccattttttggggctggataatgaccgttttcgccttgagtcatgccgcctggttattaatgttgccatccatgaatatccagggcggggccttactggtgttatttcttttggcattaaccgcgtcaaacgatattgcacagtatttatgggtaatgctgccaacttactga

SEQ ID NO: 464942 - DNA, 780 bp, Shigella boydii
atggctgaaagtactgtaacggcagacagcaaactgacaagtagtgatactcgtcgccgcatttgggcgattgtgggggcctcttcaggtaatctggtcgagtggttcgatttctatgtctactcgttctgttcactctacttcgcccacattttcttcccttccgggaacacgacgactcaactactacaaacagcaggtgtttttgctgcgggattcctgatgcgcccaataggcggttggctatttggccgcatagccgataaacatggtcgcaaaaaatcgatgctgttatcggtgtgtatgatgtgtttcggatcgctggttatcgcctgcctccctggttatgaaactataggtacgtgggctccggcattattgcttctcgcgcgtttatttcagggattatccgttggcggagaatatggcaccagcgccacctatatgagtgaagttgccgttgaagggcgcaaaggtttttacgcatcatttcagtatgtgacgttgatcggcggacaactgctagccctactggttgtcgtggttttacaacacaccatggaagacgctgcactcagagagtggggatggcgtattcctttcgcgttaggagctgtgttagctgttgtggcgttgtggttacgtcgtcaattagatgaaacttcgcaacaagaaacgcgcgctttaaaagaagctggatctctgaaaggattatggcgcaatcgccgtgcattcatcatggttctcggttttaccgctgcgggctccctttgtttgtaa

SEQ ID NO: 464943 - DNA, 504 bp, Shigella boydii
atgttagcgcttaacgtcaatattcctttcagccactggctgcgttctgacagtaaatctcagtggcgacatgccagtgccagctacagcatgtcacacgatctcaacggtcggatgaccaatctggctggtgtatacggtacgttgctggaagacaacaacctcagctatagcgtgcaaaccggctatgccgggggaggcgatggtaatagcggaagtacaggctacgccacgctgaattatcgcggtggttacggcaatgccaatatcggttacagccatagcgatgatattaagcagctctattacggagtcagcggtggggtactggctcatgccaatggcgtaacgctggggcagccgttaaacgatacggtggtacttgttaaagcgcctggcgcaaaagatgcaaaagtcgaaaaccagacgggggtgcgtaccgactggcgcggttatgccgtgctgccttatgccaccgaatatcgggaaaacagagtggggtaa

SEQ ID NO: 464944 - DNA, 645 bp, Shigella boydii
gtggatgccattattatctctccggtcgattcgaaaggcgtccaggcggcgataattaaagccgataaggccggtattcccgttatcaccgtcgacgtcgctgcggaaggcgttccggtcgtatcgcatgttgcgaccgataactatgcgggaggcgttgaagcaggcaagttaatgggcaaacttttgaatggtaaaggtactgtagccattatttcttatccggcactacaatcggtggttgcgcgcgttgatggttttaagaaagggttaagcgatacaccggatattaaaattgttgctgaacagcctagtattacgcgggctgaagcgttaacgactgcgcaaaacattatgcaggcaaatgccaacctgaatggtctgtttggctttggtgatgatgcggcgctggcagcggttatcgcagcaaaatctgcgcataacgacaacatcaaaatcattggttttgacggcatgaaagaagcgcgtgatgccgttgacagtgaaaaaacgtttgcggccgtgattcggcaatatcccgatcaaatgggtgctaaagccattgatgccgctgttgatcacctcaatggtaaaccggtagaaaaaatgatcccggtacaacccggcgtttatacaggtaaatag

SEQ ID NO: 464945 - DNA, 1131 bp, Shigella boydii
gtgagcagcgctctgaaagtgatccgcacagaacgggtaaaaaaagcctgtacaaaatgtgactgcatcgttgaagcaccggcaccatcccgtccgatagagcgtggtatcgcgggcccggggttacttgcccgcgtgttaacgggaaaatactgcgaacacctgccactgtatcgtcagagtgaaatttttgcccgtcagggtgtcgaactgagccgtgcattactctccaactgggttgacgcgtgctgccagttaatgacgccgctgaatgatgctctgtaccgttatgtgatgaacagccgcaaagttcacactgatgacacaccagtaaaagtgctggcaccgggcaggaagaaggcgaaaacaggatatatctggacgtatgtccgggatgacaggaatgccggttcgccagagcctccggcggtctggttcgcctactcaccggaccatcagggtaaacatccggagcagcaccttagtcccttccggggtatcctgcaggcagatgcgtttaatggttacgatcggctgttcagtgccgaacgagaaggcggcgcgttgacggaagcaggatgctgggctcatgcgcggcgcaaagtccacgatgtatatatcagtaccaaaagcgcgacagcggaagaagccctgaaactaatcggtgagctgtacgccatcgagcacgaaatacgcgggttgccggtgtctgaacgcctggcggtcaggcaaatgcagagtaaaccgctactgacttccctgtataagctgatgcaggagaaagaacacacgttatcgaaaaaatgccgtctgagagatgcgttccggtatatcaggaagcactgggttgcgttgtgcaacttcagtgatgatggtctggctgaggcggataataatgccgcggaaagagcgcttcgtgcagtctgtctcggaaagaaaaactttatgttcttcggcagcgatcacggtggagagcgtggtgcgctactgtacgggctgatcggcacctgccgactgaacggtatcgatccggaagcgtatctgcgctatatcctgagcgtactgccggaatggccttccaaccgtgttgacgaactcctgccatggaacgtagcactcaccaataaataa

SEQ ID NO: 464946 - DNA, 441 bp, Shigella boydii
ttgtacctcgctggcatcaaagatgtttatacgtgcgaaattgtcggctacgccatgggagagcgcatgacaaaagagctgacaggtaaagccctgtttatggcgctcaggagccagcgcccacctgccgggctaatccaccactctgatcgaggttcacagtactgcgcatacgattaccgggtcatacaggagcagtctggtctgaaaacatcaatgtcgcgtaaaggtcactgttacggcaacgctccgatggaaagcttctggggaacgctgaaaaatgagagcctgagccactatcgttttaataaccgggatgaagccatctcagtaatacgggaatacattgagattttctacaatcgtcagcgtcgtcactctcgtctggggaatatctccccggcagccttcagggaaaaatatcatcagatggctgcttaa

SEQ ID NO: 464947 - DNA, 480 bp, Shigella boydii; identical to SEQ ID NO: 463183

SEQ ID NO: 464948 - DNA, 267 bp, Shigella boydii; identical to SEQ ID NO: 464426

SEQ ID NO: 464949 - DNA, 141 bp, Shigella boydii
atgcgactcacaggagaaatcatgaaaataataacctgctttaagctggtgcctgaagaacaggacattgttgtcactccagaatacaccctgaatttcgacaatgccgacgccggtgatgctgccaacttactgatttag

SEQ ID NO: 464950 - DNA, 726 bp, Shigella boydii
atgaagaaaaaatacgaactggttgttaaagggataaataattacccggataagattactgttactgtggcactggaaattggtgggtatccgtcactgttgttgccatatgtggcgattagtcttgaccgtactgaaggtgccaagctggagttttacgaagcggaggcgaaaaagcaggcgaagcagtttttcatggatgttgctgccgggttatgtgaagggaacgaaccgttgcaggaaaagcgccccatcattttagaggcgcaggatgtgttgataacctacagaggaaaactaccgggaataattacttgttctctgaagatgccgccgtcaacactgcggtcagaaaaagaggcgtcttgtctgcagtctgagtactccattacggttaaaagtgccggagaggaaggaaataaacgttattttattgcgtctgcacctgataaagatcaggaatgggagtgtaaccggccatcctttgttgtatacggagatggcgggaaaataaccatctcagaaaatgggaaattaacaccgccatcgcaccagcatagtgaggcgctcattgaatttgccattgattacctgaagaacaataaaaagcaggggctgatgaagtgcattggtcgttgcatgggatatctgcagatagctgctgagattgaagcgctggccagtggtgctgataaggatgcaatggtaatgactccaacttactga

SEQ ID NO: 464951 - DNA, 216 bp, Shigella boydii; identical to SEQ ID NO: 7765

SEQ ID NO: 464952 - DNA, 213 bp, Shigella boydii; identical to SEQ ID NO: 462242

SEQ ID NO: 464953 - DNA, 687 bp, Shigella boydii
atgattgcatctcttttctctgctaacggtgtcgcggcggccattgatttatgccagggatatgatatcaaagcgagttgtcacgccagcaggcaaagcctttcaggcattacgcaggactggagtgtcgccgatgggcaatggctggttttttcggatatgaccaataacgccagcggaggagccgtatttttgcaacaaggagcggaattttcactattaccagaaaatgaaactggaatgactctgtttgccaataacaccgttacaggagaatataataacggcggggccatatttgctaaagaaaactcaacgctgaatcttactgatgttattttttctggtaacgtcgcaggcggctatggtggcgcaatctattcttctggtactaatgatactggtgccgtcgatttacgtgtcactaacgccatgtttcgcaataatatcgctaatgatggcaaaggtggcgcaatttataccattaataatgacgtctatttaagtgatgttatttttgataacaaccaggcatatacatcaacaagttacagtgatggcgatggcggtgcaatcgatgttaccgataataatagcgacagcaagcatccttcaggttatacgataataaataacactgcctttacaaataacactgccggtaatgctgccaacttactgatttag

SEQ ID NO: 464954 - DNA, 411 bp, Shigella boydii
gtgataacagatgtctggaaatataggggcaaatccactaacgcgcttgtctattctcacggcgaagatgtttatagttatgaaagtggtgctcatagtgattttgacagtattcgcactgtaataagaccggcctggatctggaatacatggaatcagacggggcttgaattaggctggtttaagcaacagaacaaaactcagcagggtgtaacactaaatgaatcggcttataaaacgacactctggcatgcattgaaagtgggtgaaagcattttaggttcacgaccagaaattcgcttctatggaacgtatatcaatattctggataacgaattatcgaattttaagtttaatgagaacagcaaagacgagtttatggccggcatccaggcggaagtctggtggtaa

SEQ ID NO: 464955 - DNA, 480 bp, Shigella boydii
gtggcggacctgacgtatgttgccacacaggagggatggttgtacctcgctggcatcaaagatgtttatacgtgcgaaattgtcggctacgccatgggagagcgcatgacaaaagagctgacaggtaaagccctgtttatggcgctcaggagccagcgcccacctgccgggctaatccaccactctgatcgaggttcacagtactgcgcatacgattaccgggtcatacaggagcagtctggtctgaaaacatcaatgtcgcgtaaaggtcactgttacgacaacgctccgatggaaagcttctggggaacgctgaaaaatgagagcctgagccactatcgttttaataaccgggatgaagccatctcagtaatacgggaatacattgagattttctacaatcgtcagcgtcgtcactctcgtctggggaatatctccccggcagccttcagggaaaaatataatcagatggctgcttaa

SEQ ID NO: 464956 - DNA, 180 bp, Shigella boydii
atgaaccgattctcaaaaactcaaatttatttacattggataacgctgcttttcgttgcaataacctatgccgcgatggaactccgtggctggtggatttgcccctatatttccagacatctgttatcacttaacccattacaagcccgctgccgcagatattcccgtggcgagcgataa

SEQ ID NO: 464957 - DNA, 480 bp, Shigella boydii; identical to SEQ ID NO: 464912

SEQ ID NO: 464958 - DNA, 480 bp, Shigella boydii; identical to SEQ ID NO: 463183

SEQ ID NO: 464959 - DNA, 288 bp, Shigella boydii
atgtctggaaatataggggcaaatccagcgcgcccgtgggtagattctggcaaagtgcaattaagaacattgttggttggggttatcaagccagaaagcccggcgacagcagcggcaattcttgcctccaaagatcccgcaaaaacctggcaacaatataaagcctctggtggcaagcttaagctaaacgtgcctgcaaacgtaagtacagagcaaatgaaagtgttaagtgacaatgagaaactgatggacgatctgggggcaaatgtcacgccggctatctattaa

SEQ ID NO: 464960 - DNA, 267 bp, Shigella boydii
atggaagaaaaatataaccggagtagtgggcaatgctgccaacttactgatttagtgtatgatggtgattttaaggtgcttgcgtggcttccatttccatcagatgtccttcctgctccgctactgaaggcgtggtgcgtaacggcaaaagcactgccggacatcagcgctatctctgctctcattgccgtaaaacatggcaactacagttcacttacaccgcctctcagcccggtacgcaccagaaaatcattgatatggccatga

SEQ ID NO: 464961 - DNA, 234 bp, Shigella boydii; identical to SEQ ID NO: 464402

SEQ ID NO: 464962 - DNA, 480 bp, Shigella boydii; identical to SEQ ID NO: 464896

SEQ ID NO: 464963 - DNA, 246 bp, Shigella boydii; identical to SEQ ID NO: 460696

SEQ ID NO: 464964 - DNA, 417 bp, Shigella boydii
atgcctgaccattctctttttcgattacggattcttccgtggtgcattgcgctggcaatgtcagggagttatagcagtgtctgggctgaagacgacattcagtttgattcccgttttctggaattaaaaggcgacacaaaaattgatctgaagcgtttttccagccagggatatgttgagcccggaaaatacaatttacaggttcaactaaataaacagccattggcggaagagtacgatatttactggtatgctggtgaagatgacgcgagcaaaagctatgcttgtctgacaccggaactggtagcgcagtttggtttaaaagaagacgtggcgggtaatgactccaacttactgatagtgttttatgttcagataatgcccgatgaccttgtcatgcagctccaccgattttga

SEQ ID NO: 464965 - DNA, 297 bp, Shigella boydii
atgcgtaagtctttcaacgggctgggtgaacaggtacagcatgtgctgaatgataatcccttctccggtcacctgttcatcttccgtggccgacggggtgacatgattaaaatcctgtgggctgatgctgatggtctgtgcctgttcaccagacgcctggaggaaggccagtttatctggcctgctgtgcgtgacggcaaggtatccattacccgctcgcaactggcaatgctcctcgataagctggactggcgtcagccaaaaacatcccgccttaacgcactgacaatgttgtaa

SEQ ID NO: 464966 - DNA, 492 bp, Shigella boydii
atgaatcaaaaatacctcattcgcattgcagaactggaatgccagctccgtcagaaagaccagcaactgagtctggttgaagagacggaggccttcctgcgctctgcactggcccgcgccgaagaaaagatcgaagaagatgaacgggaaatagaacatctgcgggctcagatagaaaaactgcgccggatgctgttcggtacccgttctgaaaaactgcgtcgtgaagttgaacaggctgaggccctgctgaaacaacgcgaacaggacagtgatcgttacagtgggcgggaagacgatccgcaggttccccgccagttgcgacagtctctgaaccgccccgggtttcctggagagtgttttatctgtgaactcaggctgccagatcatcgtttccgatggaagcataataagctttttctgcttctgccggaggagtatggcccagcctttccagcaatcgtcgattattataccagtccacccacgtga

SEQ ID NO: 464967 - DNA, 318 bp, Shigella boydii
atgaaaaaaagaaattttagcgcagagtttaaacgcgaatccgctcaactggttgttgaccagaaatacacggtggcagatgccgccaaagctatggatgttggcctttccacaatgacaggatgggtcaaacaactgcgtgatgagcgtcagggcaaaacaccaaaagcctctccgataacaccagaacaaatcgaaatacgtaagctgaggaaaaagctacaacgcattgaaatggagaatgaaatattaaaaaaggctaccgcgctcttgatgtctgaaccgccccgggtttcctggagagtgttttatctgtga

SEQ ID NO: 464968 - DNA, 480 bp, Shigella boydii; identical to SEQ ID NO: 464934

SEQ ID NO: 464969 - DNA, 378 bp, Shigella boydii
atggaattattatccacgcaacatataagcttactggatagaataaaaggtaatagcgtaacattattctgcgagctgatattaaatttcagaaatgaaatagagcgtagacaattaagcacaaacaccatgaaaagacacaaccagaggttgaaaatcataagtgaatactttggtggtgttccggttaaaaatataggcataagggaggtgtacagctttcttgaaatcagagcagctggtagtaaatttgctattgctaaccagtacagggcgcttttatcagtgaagtggcacactgaatttggccacctgaacagaggtgatatgctcacctcagaacaacacaggtgctccaatgaaaaaaagaaattttag

SEQ ID NO: 464970 - DNA, 726 bp, Shigella boydii; identical to SEQ ID NO: 464752

SEQ ID NO: 464971 - DNA, 267 bp, Shigella boydii; identical to SEQ ID NO: 464848

SEQ ID NO: 464972 - DNA, 192 bp, Shigella boydii
atggttgcgccgtccagcggttctcccgtgggcgttttaatcacacctttaagctgcggcatcgggacgctccggccagttgatggcgttatatgtggctttatctgtgatggtgctgaaatccatcgcctgcagcgatttcgcgtaaatacgacaggctttcagcttttctttatcttcgtcgctgattaa

SEQ ID NO: 464973 - DNA, 243 bp, Shigella boydii
atgaacatcagtcaggctatgattataccacttttcccggtttatgatgaaaaaaaacatctactgactattgaaattcggccaccaatggatgcttgcattgccagcgcggacaataaaacgattgcccgacaaatgaacaaaacagtggaaattttggtggggccacatccggaacagtatgtctgggttttaaaattgttaaaaacacgcaaatcaaacgaagcggacccgtacccttga

SEQ ID NO: 464974 - DNA, 246 bp, Shigella boydii
ttgcatgatcgcgggcgttccggcgcatgggcatttctgatgattgtggcgtggatgctgctggcgggtaactgggcgattttaccgggtgtctggcaatgggcggtggggtgttttgtcccgacgttgattctggtgatgatgcttatcgatcttggtgcgtttgttggcacacaaggcgaaaataaatatggtaaagatactcaggatgtgaagtataaagccgacaataaatcaagtaattaa

SEQ ID NO: 464975 - DNA, 426 bp, Shigella boydii
gtgaattttgtagagcagtcactgattgtagacatggattctgagaaaccgagctgtaatgcttatgagtttggttttgtgttatctaaattaattgcaattaagatgattagaacttcagatgtaatttttatgaagaaactggaatcctcaagcttgctaaaagatggcagtttaagtgcagagcagctattgctaactttattatatatttttcaatatccaagtgaaagtgagcaaattcttacttctgttatagacgtatcacgagccagtcatgaggattctgtagtgtatcaaacatatctatcttctgttaatgaaagtcctcatgatatatttaaaagtgaaagtgaaagagaaattgcgatcaatattctacgagagcttgtcacaagtgcatacaagaaagagctttctagataa

SEQ ID NO: 464976 - DNA, 195 bp, Shigella boydii
atgcagtcattgtacgactggatacagttgcagaggaaaacgctgtcgaaacatgcggagatggcgaaggcgttcgactatatcctgaatcactggaatgcgctgaacgagttctgtcgtgacggctgggtggaaatagacaacaacatcggtgaaaacggtaagcgtaaactgaccgccgtatgtagccattaa

SEQ ID NO: 464977 - DNA, 327 bp, Shigella boydii; identical to SEQ ID NO: 464915

SEQ ID NO: 464978 - DNA, 393 bp, Shigella boydii; identical to SEQ ID NO: 464239

SEQ ID NO: 464979 - DNA, 369 bp, Shigella boydii; identical to SEQ ID NO: 464755

SEQ ID NO: 464980 - DNA, 189 bp, Shigella boydii; identical to SEQ ID NO: 462047

SEQ ID NO: 464981 - DNA, 396 bp, Shigella boydii
atggctggtcagttccatctggcagaccattttgacctgcgggtagagcgccgggttcccggcatgtgtctggcgggggaaggctgcatcgttctctggtgtatccggtgtgcgccagaacacaccatcgatggccagcagggtcaggccgcaccagtgcggatgcggcgtggcgttatgccagagctgcgctgttttcgtgaacacgcggcggacagcctcacttcccaggcgctggcgggcctgaataacggcactgggggcaacgaaggggcgattgcccggcagcatgatgtccaggcgattcacaatctggtgaagaggttctttacgctcaagcgccatgccaacaatacaccagaccatcatttcgaggggaagacggcgcttgcgtag

SEQ ID NO: 464982 - DNA, 615 bp, Shigella boydii
gtgttcctgaaacgcctgacggctcccaccattaccagcggcggtgatcctccggcattttccctgacaccggacgggcggctgacggcgaaaaatgccgatattagcggtaacgtgaatgcgaactccgggacgctcaacaacgtcacgattaacgagaactgtcgggttctgggaaaactgtccgccaaccagattgaaggcgatctcgttaaaacagtgggcaaagctttcccccgggactcccgtgcaccggagcggtggccatcaggaaccattaccgtcagggtttatgacgatcagccgtttgaccggcagattgttattccggcggtggcattcagtggcgctaaacatgagaaagagcatactgatatttactcctcatgccgtctgatagtgcggaaaaacggtgctgaaatttataaccgtaccgcgctggataatacgctgatttacagtggtgttattgatatgcctgccggtcacggtcacatgacactggagttttcggtgtcagcatggctggtaaataactggtatcccacagcaagtatcagcgatttgctggttgtggtgatgaagaaagccactacaggcatcacgattagctga

SEQ ID NO: 464983 - DNA, 225 bp, Shigella boydii
ttgctgcacgcttacaactgttacgacaacgctccgatggaaagcttctggggaacgctgaaaaatgagagcctgagccactatcgttttaataaccgggatgaagccatctcagtaatacgggaatacattgagattttctacaatcgtcagcgtcgtcactctcgtctggggaatatctccccggcagccttcagggaaaaatatcatcagatggctgcttaa

SEQ ID NO: 464984 - DNA, 297 bp, Shigella boydii; identical to SEQ ID NO: 464965

SEQ ID NO: 464985 - DNA, 165 bp, Shigella boydii
atgaatcaaaaatacctcattcgcattgcagaactggaatgccagctccgtcagaaagaccagcaactgagtctggttgaagagacggaggccttcctgcgctctgcactggcccgcgccgaagaaaagatcgaagaagatgaacgggaaatagaacatctgtaa

SEQ ID NO: 464986 - DNA, 288 bp, Shigella boydii
atggggctctgtgcgcagttcacctcgggggcacagtgtggcagcgaagttcagggggtttttgacgatccggagtcgctggggtttgccggtagcggggtccgtattgaaggaagcagcccgtcattatttgtgcggacggatacggttcgtgccgtgcggcgtggtgacacgctgaccattaatggtgagacattctgggtggatcgtgtttctccggatgacgggggtagctgttatctctggctcaaccgtgggcaaccacccgcagttaaccggcgacgataa

SEQ ID NO: 464987 - DNA, 276 bp, Shigella boydii; identical to SEQ ID NO: 464846

SEQ ID NO: 464988 - DNA, 378 bp, Shigella boydii
atggatacccgtcgcggttcaaattcacaactcgaaacggcagtgaaagatctgggcgcagtggtatccttcaaggggtattacggcgatctggccattgtggtggcgaaaacgtcttatgtggcagaggacggtaccgaaaaacgttatctgccggagggcacactggtcctggggaatacggcagcagagggcattcgttgctatggtgccattcaggatgcgcaggcgttgtccgaaggtgtggtggcctcttcccgttatccgaaacactggctgactgtgggcgatccggcccgtgaattcaccatgacgcagtccgcaccgctgatggtgctgccggatccggatgagtttgtggtggtacaggtgaaataa

SEQ ID NO: 464989 - DNA, 396 bp, Shigella boydii; identical to SEQ ID NO: 464467

SEQ ID NO: 464990 - DNA, 381 bp, Shigella boydii; identical to SEQ ID NO: 463673

SEQ ID NO: 464991 - DNA, 420 bp, Shigella boydii
atggaacagaaagcattatctgcagaaccccgcagatcattttcaaatgagtttaaacttcaaatggttaaactggcttcacaaccaggagcctctgttgcccgtattgcccgggaacacgatatcaatgataacctgctgttcaaatggctcaggctctggcagaacgaagggcgcatatcgcggcgtcttccggtaacaacctcttctgacactggcgttgaattattacctgtggagataacgccggatgagccgaaagaaccggtggctgctcttactccgtctttatctactcagactacagttagtgccagctcctgcaaggtggagttccgtcacggtaacatgacgctggaaaatccttcaccagagctgctcacagtgttgatccgtgaactgaccgggtggggacgatga

SEQ ID NO: 464992 - DNA, 243 bp, Shigella boydii
atgaacatcagtcaggctatgattataccgcttttcccggtttatgatgaaaaaaaacatttcctgactattgaagttcggccaccaatggatgcatgcattgccagcgcggacaataaaatgattgcccgacaaatgaacaaaacagtggaaattttggtggggtcacatccggaacagtatatctgggttttaaaattgttaaaaacgcgcaaatcaaacgaagcggacccgtacccttga

SEQ ID NO: 464993 - DNA, 327 bp, Shigella boydii; identical to SEQ ID NO: 464915

SEQ ID NO: 464994 - DNA, 318 bp, Shigella boydii
atggatccattaggattatatgaatttaaatcaaaaaatatagatgatattggaatatttgcattggcaatgtgtaatggagaatcaattaacgagaataaagaatatggtggactaatatgtaagaagcaaggtgaatatttccccatgaatccgataagttcaaatgataatgatagtgtagacttgcgaaatataaaatgccctgaaggttcagagagagtaggcgattatcacactcacggtttttactctgacgataaagggaataaagtaacaaaagaaaatgatgtttatgatagtctaaatttttggtaa

SEQ ID NO: 464995 - DNA, 327 bp, Shigella boydii
atgacgacgttaactcaatgccagcagcaggtgctggatatgctgatttcttaccagaaagaacgtggcttcccgccaaccaatcaggaggtggcaaccatgctgggataccgttcagtgaatgcagcggtggagcatcttagagcactggagaaaaaaggcgtcatcacgataaagcgtggtgtggcccgtggtatcactcttcataccgcggtgaaggacgacgacagcgaggcggtcgggattatccgctcactgcttgccggtgaggaaaacgccaagctgcgtgcagcccactggttacatgagaggggcctgaaagtatga

SEQ ID NO: 464996 - DNA, 330 bp, Shigella boydii
atgtttgacaatacgggtgtgattgtatttaaaggaacagaccctgaccatatttttgaaattttacttgaagctgaagttgatgttcgtgatgtgactgaagaagaaggtaacattgttatttatactgaacctactgaccttcataaaggaatcgcggctctaaaagcagctggaatcactgagttctcaacaacagaattagaaatgattgctcaatctgaagttgagctttccccagaagatttagaaatctttgaagggcttgttgatgcccttgaagatgacgacgatgttcaaaaagtttatcataacgtcgcaaatctctaa

SEQ ID NO: 464997 - DNA, 255 bp, Shigella boydii; identical to SEQ ID NO: 464791

SEQ ID NO: 464998 - DNA, 381 bp, Shigella boydii
gtgggttacccccaaacgaatcggaaaatcgatactggaaaaactctaactcggtggccagtttttgttgaccacttcattcttaacctgggaggtgaacacctcggcatcgatacctcacgggataacagtgaattatttgccaacgacggtacaccgacatggctaaaagaaaagcgtgcaaaagaaatcgcacttgatgaaattatcgagttgctcaacaagcaccatgggggcaccagtaacgacgccaaacgcgcaaaagctgatttgctggaaaaaacattcacctcccgctcatgggaaagaatcaaaggtatggactggccgacaatcaaagctggtcgtaatgcactatggattgaactggaaggcgggtaa

SEQ ID NO: 464999 - DNA, 297 bp, Shigella boydii
atgcgtaagtctttcaacgggctgggtgaacaggtacagcatgtgctgaatgataatcccttctccggtcacctgttcatcttccgtggccgacggggtgacatgattaaaatcctgtgggctgatgctgatggtctgtgcctgttcaccagacgcctggaggaaagccagtttatctggcctgctgtgcgtgacggcaaggtatccattacccgctcgcaactggcaatgctcctcgataagctggactggcgtcagccaaaaacatcccgccttaacgcactgacaatgttgtaa

SEQ ID NO: 465000 - DNA, 327 bp, Shigella boydii
atgactaaaaatactcgtttttcccccgaagtccgtcaacgggcagtccgtatggttctggaaagtcagggcgaatatgactcacaatgggcgacaatttgttccattgctccaaagattggctgtacaccggagactctgcgtgtctgggtacgccagcatgagcgggataccggaggcggtgatggcgggctcaccaccgctgaacgtcagcgtctgaaagagctggaacgtgaaaatcgtgaactgcgccgcagtaacgatatccttcgccaggcttccgcttattttgcgaaggcggagttcgaccgcctctggaaaaagtga

SEQ ID NO: 465001 - DNA, 219 bp, Shigella boydii
atgactaaaaatactcgtttttcccccgaagtccgtcaacgggcagtccgtatggttctggaaagtcagggcgaatatgactcacaatgggcgacaatttgttccattgctccaaagattggctgtacgccggagactctgcgtgtctgggtacgccagcatgagcgggataccgggggcggtgaggtgggctcaccaccgctgaacgtcagcgtctga

SEQ ID NO: 465002 - DNA, 309 bp, Shigella boydii; identical to SEQ ID NO: 463017

SEQ ID NO: 465003 - DNA, 390 bp, Shigella boydii
ttgttctataagttgctcagcaagctcattttcgctgttcttcatcgtgccgaaggctgcagccgtcagcagatggctggtcagttccatctggcagaccattttgacctgcgggtagagcgccgggttcccggcatgtgtctggcgggggaaggctgcatcgttctctggtgtatccggtgtgcgccagaacacaccatcgatggccagcagggtcaggccgcaccagtgcggatgcggcgtggcgttatgccagagctgcgctgttttcgtgaacacgcggcggacagcctcacttcccaggcgctggcgggcctgaataacggcactgggggcaacgaagggggtaagcgtcaacggagcaccgtattgacgcttatttattggtga

SEQ ID NO: 465004 - DNA, 267 bp, Shigella boydii; identical to SEQ ID NO: 464845

SEQ ID NO: 465005 - DNA, 255 bp, Shigella boydii; identical to SEQ ID NO: 7767

SEQ ID NO: 465006 - DNA, 219 bp, Shigella boydii
atgactaaaaatactcgtttttcccccgaagtccgtcaacgggcagtccgtatggttctggaaagtcagggcgaatatgactcacaatgggcgacaatttgttccattgctccaaagattggctgtatactggagactctgcgtgtctgggtacgccagcatgagcgggataccgggggcggtgaggtgggctcaccaccgctgaacgtcagcgtctga

SEQ ID NO: 465007 - DNA, 210 bp, Shigella boydii; identical to SEQ ID NO: 9340

SEQ ID NO: 465008 - DNA, 309 bp, Shigella boydii
gtgatcagccgctggcgcatcgagcagtgcagcgaactgagcgcggtgagtgcctcctttgtactgtccacgccgacggaaacggatggcgctgtttttccgggacgtatcatgctggccaacacctgcacctggacctatcgcggtgatgagtgcggttatcacggtccggcagtcgcggatgaatatgaccagccgacgtccgatatcacgaaggataaatgcagcaaatgcctgagcggctgtaagtttcgcaataacgtcggcaactttggcggcttcctttccattaacaaactttcgcagtaa

SEQ ID NO: 465009 - DNA, 267 bp, Shigella boydii; identical to SEQ ID NO: 464426

SEQ ID NO: 465010 - DNA, 231 bp, Shigella boydii
gtggcagatgccgccaaagctatggatgttggcctttccacaatgacaagatgggtcaaacaactgcgtgatgagagtcagggcaaaacaccaaaagcctctccgataacaccagaacaaatcgaaatacgtaagctgaggaaaaagctacaacgcattgaaatggagaatgaaatattaaaaaaggctaccgcgctcttgatgtcagactccctgaacagttctcgataa

SEQ ID NO: 465011 - DNA, 189 bp, Shigella boydii; identical to SEQ ID NO: 463227

SEQ ID NO: 465012 - DNA, 435 bp, Shigella boydii; identical to SEQ ID NO: 8272

SEQ ID NO: 465013 - DNA, 267 bp, Shigella boydii; identical to SEQ ID NO: 8271

SEQ ID NO: 465014 - DNA, 390 bp, Shigella boydii; identical to SEQ ID NO: 8270

SEQ ID NO: 465015 - DNA, 927 bp, Shigella boydii
gtgagtaagaagaaaaacaccacaacgcccacgccgcatgatgccgcgttccggtcgttcctggcgaatcccgacgtcgccagagattttctggaactgcatcttccggcggagtaccggcagttgtgcgacctgtccacgctgaagctggaacccgccacctttgttgagccggacctgcatcagtacgccagcgatatcctctggagtgtgaaaaccaccgggggtgaagacggctatgtttatacgctcatcgagcaccagagcaccgaaaatctgtacatgccttttcgcatgttacgttacagtgtggcggcgatgcagagacatctggagcagcacaaaacgttgccactggtgattcctgtgctgttctatcatggtgagcgcagcccgtacccgtacagcatgaactggctggactgttttgagaatccggcacttgcggctaaaatatacacaaagccgtttccgctggttgatatcactgtcgttgatgacaatgaaatcatgaaccatcgccggatggccgcactgacgctgctgatgaagcatatccgccatcgtgacatgatggagctgctggacaaactcccgcaggtcatggtggaaatttcagacgagcaggtgcgtgttctgattcattacatcgttaacgcaggggactctgtatcaccggaatttatgcgggcgctggctgagcgtctgccgcagcatgaggataaactgatgactatcgcagaacgtcttgagcaaaaaggtcgccaggaaggcaggatggaaggacgcatggaaggacgcatggaaggagcgcttgaaaaagccctggctattgcgtgccagcttcagaaaatggggatgacgccggagcagattaagcaggctaccggactttccgatgatgaactgaagaaaatcactcactga

SEQ ID NO: 465016 - DNA, 195 bp, Shigella boydii
atgacgattgcagaacgtcttatacagaaaggtttcgacgaaggttttaaagaaggttttaagaaaggtgcgcttgaagtggcgcgggaagcagcctgccgactgcgggatatgggctggacgccggaacggattcaggaggcaaccggactttccggtgaagaactgaaaaagctgtttcctgatgagcagtag

SEQ ID NO: 465017 - DNA, 252 bp, Shigella boydii
atgactggctgggaactgcgaatctggcgaaaaagcatgctatggtcacgcgaaaaagcggccagagaatttggcgtgacgcagagaacatggcacgcctgggaaaatgcggaacaggtggacgtcaccgtctggaggaccacccaggcactttcagtccgtgacctgctgcctcacatgcaggggatgcgcaaggcagatatcatcaggcgtctggaaaatgaactgggggaaacggcagggaatgtgtga

SEQ ID NO: 465018 - DNA, 849 bp, Shigella boydii
atgaatcagactttacccactgctgacctgaatactgccggcacgacagatgttattccgtctgtggctatcgaccgcatcatcgcgcagcgtaacgaaggtattgcactattcatgcaggcgatggaatgcctggcgacagcgcgcaggattctgctcgatgcttccggtgacatttttctctacgggtttgaagactgcgtgactgactccgttcgatgcatggataaaccggaagaagcaaataagaatatcactcgtcttgccgaccggaaaatctgggatcgcctgatgacggatactggcatgtacaccttcatgagttcatgccagcgtgatgagtggaacagccagctgatgagcgacacctgtcctgaaatcaccctggacaatgtactggcaacattccgccatctgaatgccagcaagatgcagacatttgaacagggactgattgatgtctaccggaaattgtcatgggattacagaaccaataatccctgccgtctgggtaagaaaatcattattgaaaacctgctgtaccgctggagtaacgggcgtgtgacgctggactgcagcggacgggaggcactggatgacctggtacgtccgttttatctgctggaggcgcgcaacgttcctgacttccggagcagcatcggggcgcagtatggtgaatttctcgggaacggcgacaatgtcggtaagctgttagaaggggaatattttacggtgcgtggctaccagaaagggaccgtacacattgtctttaagcgtcctgaccttgttgaaaaactgaatgatattattgcacggcattatcctggtgcattgccgccacgagtctga

SEQ ID NO: 465019 - DNA, 336 bp, Shigella boydii
atggcttctaaaaaattttactcagatgatgacatccagctggcaaaagctgccttatcggaattgccggacctcaccgctcaacggaaaacattgcgtgattttcttgatgccattcgtgatgacatcattgtcctggtaaggacaaagggttatacactggcagatgttcgtgacacgctcaaaaatgcagggtatgaagtaggagagaaggcacttcgtgacattattcgggaagcagaatcgaaaaaactatcccgccgttcttcctctaaaacagcacctaaaaagacagattcaggcagtaaagatggcatcgatatgaacaacaattga

SEQ ID NO: 465020 - DNA, 333 bp, Shigella boydii; identical to SEQ ID NO: 9373

SEQ ID NO: 465021 - DNA, 2721 bp, Shigella boydii; identical to SEQ ID NO: 9372

SEQ ID NO: 465022 - DNA, 435 bp, Shigella boydii; identical to SEQ ID NO: 10324

SEQ ID NO: 465023 - DNA, 3006 bp, Shigella boydii; identical to SEQ ID NO: 10984

SEQ ID NO: 465024 - DNA, 558 bp, Shigella boydii; identical to SEQ ID NO: 7707

SEQ ID NO: 465025 - DNA, 861 bp, Shigella boydii; identical to SEQ ID NO: 5314

SEQ ID NO: 465026 - DNA, 543 bp, Shigella boydii; identical to SEQ ID NO: 437149

SEQ ID NO: 465027 - DNA, 363 bp, Shigella boydii; identical to SEQ ID NO: 39670

SEQ ID NO: 465028 - DNA, 237 bp, Shigella boydii; identical to SEQ ID NO: 10330

SEQ ID NO: 465029 - DNA, 708 bp, Shigella boydii; identical to SEQ ID NO: 10331

SEQ ID NO: 465030 - DNA, 1269 bp, Shigella boydii; identical to SEQ ID NO: 80762

SEQ ID NO: 465031 - DNA, 705 bp, Shigella boydii; identical to SEQ ID NO: 10437

SEQ ID NO: 465032 - DNA, 906 bp, Shigella boydii; identical to SEQ ID NO: 6034

SEQ ID NO: 465033 - DNA, 1239 bp, Shigella boydii; identical to SEQ ID NO: 6033

SEQ ID NO: 465034 - DNA, 585 bp, Shigella boydii; identical to SEQ ID NO: 6032

SEQ ID NO: 465035 - DNA, 765 bp, Shigella boydii; identical to SEQ ID NO: 6031

SEQ ID NO: 465036 - DNA, 306 bp, Shigella boydii; identical to SEQ ID NO: 6030

SEQ ID NO: 465037 - DNA, 1206 bp, Shigella boydii; identical to SEQ ID NO: 6029

SEQ ID NO: 465038 - DNA, 204 bp, Shigella boydii; identical to SEQ ID NO: 6028

SEQ ID NO: 465039 - DNA, 840 bp, Shigella boydii; identical to SEQ ID NO: 6027

SEQ ID NO: 465040 - DNA, 348 bp, Shigella boydii; identical to SEQ ID NO: 6026

SEQ ID NO: 465041 - DNA, 780 bp, Shigella boydii; identical to SEQ ID NO: 15299

SEQ ID NO: 465042 - DNA, 498 bp, Shigella boydii; identical to SEQ ID NO: 15298

SEQ ID NO: 465043 - DNA, 2301 bp, Shigella boydii
atgagccagcaccacgttaatcctgacctcatacaccgcacggcctggggaaacccgttgtggaatgcactgcataacctgaacatcactggtctgtgtctggccggcagtatcattacggcgctgatatggccactggcccttcctgtctgcctgctgttcaccctggtcacctccgtgatattcatgctgcaacgctggcgatgccccctgcgtatgcccatgacactcagccttgatgacccctcccaggacagaaaggtcaggagaagcctcttcagcttctggcccaccctgtttcagtatgaagcggatgaaacattccccgcccgggggattttttatgtcggttaccgccgtatcaacgatatcggtcgtgagctctggctgagcatggatgacctcacccggcatgtcatgttttttgccaccaccggtggcggtaaaacagaaaccacctttgcctggctgctcaacccgctctgctggggaagaggctttacctttgttgacggaaaggcacagaacgataccacgaggacaatctggtatctctcccgacgttttggcagggaggatgatatcgaagtcatcaacttcatgaacggcggaaaatcccgcagtgaaatcattcagagcggcgaaaaatcccgcccacagtcaaacacctggaacccgttcgcattcagcacagaagccttcaccgccgaaaccatgcagtccatgctaccccagaacgttcaggggggagaatggcagtcacgggcgatagccatgaacaaggccctggtctttggcacaaaattctggtgcgtccgggaaggtaaaaccatgtccctgcagatgttacgggaacatatgacgctggaagggatggcaaaactctattgccgtggccttgatgaccagtggccggaagaagctatcgcaccactgcgaaactacctgcaggatgtcccgggattcgatatgtcactggtgagaacgccgtcagcctggactgaggagccccgtaaacagcatgcttatctctccggtcagttctcggaaacgttcacaacctttgccgaaaccttcggggacgtctttgcggcagatgccggcgacatcgatattcgcgacagtattcacagcgaccgcattctgattgtgatgatccctgcactggacacatcggctcataccacgtcggcactcggtcgtatgttcgtcacccagcagagcatgctcctcgcccgtgacctgggctaccggctggaaggcacagatgcacagaccctggaagtcaaaaaatacaaaggcagcttcccctatatctgtatccttgacgaagtcggtgcctactacacagaccgcattgctgtggaggccacccaggtacgttcactggagttttccctgataatgacggcgcaggatcaggagcgaattgaagggcagacctccgccaccaacaccgccacactgatgcagaacgccggcaccaaattcgccggacgcattgtcagtgacgacaaaacggcaagaacggtgaaaaatgccgccggtgaagaggcacgggccagaatgggcagcctgcagcgccacgatggtgtgatgggtgagtcctgggtggacggtaaccagatcaccatccagatggaaagcaaaatcgacgtgcaggatttgatcagactgaatgccggtgagttctttaccgttttccagggggatgtggtgccgtcagcctctgtatatattccggacagcgagaaaagttgcgacagtgatccggtggtcatcaaccgctatatttccgttgaagccccccggctggagcgtctccgccgtctcgtccccagaacagtgcagcgcaggctccccacaccggagcatgtcagcagcatcatcggtgtactgacagcaaaaccatcccgtaaacgtcgtaaaaaccgtacagagccttaccgtatcattgatacattccagcgccagttggcaacagcgcagacatcactggatctgcttccgcaatatgatacagatatcgaatcccgggcaaacgaactgtggaaaaaggctgtgcacactatcaataacacaaccagggaagaacgccgggtatgttatatcacactgaatcgtccggaagaggaacactccggtcctgaagatataccttcagtgaaggtgattctgaataccctgctccccctggagatactgttaccggtcgctgaaaataataaatcgcagacaataaataatgatcatccccagaaatcatgtggagcacaaccaacaactgacgaaaaatactga

SEQ ID NO: 465044 - DNA, 1125 bp, Shigella boydii
atgaccatccactacactgcaacactgaataataaacacctgtccctgaccgccctgtaccctgacggtaatcgggaagtgattgccatcctgccagtcacagaactgggcgcactgattaaccgtaataacaggctgatgcacctgtccttcagttccccttttcgcgaaataaccgaaacggtgcttgttgataccgttgatgcagaacgtcccggacatcacatcggcagaatgctctcagcgattgatgcctgcctggaggccgaatatgccggaaaaggaaaacatccctcccggaaaaatggcttctggcggacactgatgtgtggctttatcgccggaattgctctgccggcgacagttgcaggttaccactggatgaaggcagagcccccttccacgctggcttaccctacatctcaggaatggagagctgaaccagtaaccgacacagagacaccacgcccacatacggaacatcatgttaacagcatcccggcccgcccggctcccacacagcaggaaccttcttctgcccccgccccgacggcagtgacggaagaacaacacgttcaggccgctgaggcccgccgtaatctggccacagtacttaaacgcaacgcagaccgggggatgttcaccattaacctgtccactggtcatgaacgcacgctgtacgccttccttgaccccgcatgcatcaactgccgtctgctggaacccgcgcttaagcaactggcccgggaattcagcgtggtgatttatccggtctccgtgattggcggggagtccagtacaaagcggactgctccgctgctgtgtgaaccggactcacaaaaacgggcgaccggatggcatcagctgtattccgctgacagtggtatggcccccaccggcgatgcaccggccgcacaggatggacagtgtctgaccgccgcacgtgctgccatcgatgtcaataaccaggctttccgccagttcggttttggcggaaccccctgggtgttatcagataccggctggcacctgccgtccggcatcctgaaagacgccacttccgttcgcctcttcctgaaagcaacagatagcgaggagtatcacaatgagccagcaccacgttaa

SEQ ID NO: 465045 - DNA, 1299 bp, Shigella boydii
gtgtcttaccaacagacgtctgccgccgaagatccaatggctatatggtatatcgtcggtgccatatgcctgctctttgcgattatcatctggcgctttttacctgaaatcgtcttcgcctcctgcctgatcctgcacacactgtggggcatgattgactgggggccctttcacaactttgccgccccccgttacaacctgctggccatcactgctaacaacgcggcaaccatcactttcagccagtggctggatgttatgtcccggacagtggggatcctctggttgattctgcttcccatgacattcggctttctgtggatgtggtttcaccatccggcccagccccgttttacccgcaggccactgaatatccacacactgccccatattttttcagctctgtcaccggcgatcgcccccgttctggctgatggagacaacaacagactcttccacggacaaaaacgtcccgagcgccgtgtcgcactaacccccgaagcctttgtggagcagaacaaccttatccgcaacatgcagctcgatgttgcgtccacacgccagtgcttcatggcgcaactggggcaaccactgaccagctggaaagacatggccccacatgaaaaagcgctctttgccatctttggcctgcagttcttcctcggtgaccggaaagcagcggtagccctgatgaacaacctcaatctctcctgcaggctcaaaagtaaacgggaccaggggcgtttcagcacgccggtgtattcactggccagaaacgcctttatccgggtcatcaaaacagaaggcgcacaacagtggctcaggcagcaccgttacgttcgcagcggtctggtctggctttacgcacatgatttgcgcctgacgcctccgaactggctgtggctcaagggcgttgaccggacgctcttctatgcccttcaccgggcaaacaccacaaaaggcttcatcgaaggggccggcgtggtggccgttgcccgggcagaaaatgaagccagccgtctcggcctcccctgcccggaaccctgtgtggaagaggccattgaagggcttcgacgggacatgctggggctgggcctgatatgggacgaacctcagccagatcgcgatcgtaaacgtcagatcaggacccgctggtcactcacggatgacgtgataccccgccgccatgataacgacgaagacactgacactggtgaaaccaccgaaaccaccgaaaccaccgaaaccaccgaaaccaccgaaaaacagcatcccgccgacaaggaaaaagaacaatga

SEQ ID NO: 465046 - DNA, 252 bp, Shigella boydii
atgaacaggttgcaagtcctggccaaaacatcaggtggtgctggttttggtgctctggccggagaagaactgtctataactgacactatagaaaacgtggcgacaggcaatgtaagggcaaaccacggtgttctttctccattgatggagaagcggatgattaacctgttaatcatcgttctcagggcggttgttgctgtggctaacgcagtgatagctctcctggaactgatccgggaactggttgactga

SEQ ID NO: 465047 - DNA, 177 bp, Shigella boydii; identical to SEQ ID NO: 8256

SEQ ID NO: 465048 - DNA, 468 bp, Shigella boydii; identical to SEQ ID NO: 8255

SEQ ID NO: 465049 - DNA, 681 bp, Shigella boydii; identical to SEQ ID NO: 8254

SEQ ID NO: 465050 - DNA, 252 bp, Shigella boydii; identical to SEQ ID NO: 8253

SEQ ID NO: 465051 - DNA, 216 bp, Shigella boydii; identical to SEQ ID NO: 8252

SEQ ID NO: 465052 - DNA, 369 bp, Shigella boydii; identical to SEQ ID NO: 236404

SEQ ID NO: 465053 - DNA, 243 bp, Shigella boydii; identical to SEQ ID NO: 236403

SEQ ID NO: 465054 - DNA, 153 bp, Shigella boydii; identical to SEQ ID NO: 33539

SEQ ID NO: 465055 - DNA, 651 bp, Shigella boydii
atgaacaaaacaaaaagcagatatccttcctggtgggcatattatcacttggcccgcaacgcttatttcttattaggaataccgtgtttacttttatactcagccgcttatacatcagatttattagatgataatctaagacattcaataagtctttttattctggcatatggatgttattttcttcttttcattcctccgctctggttatatctgagaaccagagcgaagaaaaagaaagtccagcaggttgttcagcagataaaagaaagcagtccctttgcgccgaccagcgattacgagcaactgtcattctcaaagagttgttatttcgggatcgacattaaaaacggcaccatgctgtatgtgcgcatttatccgaacaatgtgatggatgtgattggtctggatattcacaactttacccgcacggttgctgaggacggcaagctggaaatccacaccacctatgtgagtctgccgatgattcctcttgagatctccggcatctcagcaaggacgctggccaacaccatgcacaccatggctgcacgtggatatgagtacaaggaacgtttcccacagatgatccggtatcgggttaaagagtgggaaaaagttgccggtgttcctgttgcagaagtattttga

SEQ ID NO: 465056 - DNA, 2166 bp, Shigella boydii
gtgaaaatcatacccagagcactgagtgcaggtctggcgctggctgccgtacctgcacaggctttcgtcacctatcaggacattgtgagtgccgccaccaatccggatgacctgtcgcgccaggcactggtcaccatttttggtgatgtggtcacaaatcccctgacagccagcagcaacaccatcattggcaacctgttcatggtgtttaacgcaattatcgccacgatggggatagtctggtttctgtttattggtatccgtcatgctgtccgcacgggacaccagggcagtgtctttaacaacggacgggacgtcgtcggcatactcagtgtcgtgagtggatttttgatgattgtgcccaccgcttccggctggagtctggcgcaactggtcatgctgtggggcgcatccatcatgggcatcggttccgccaatatcatggttcagacagcggcagaaaacattgctgaaggctattcaatgaccgtacagccagttcatgtctccacccgcacggcagcacggggaattctggagatggaactgtgcaaacacgccatgaatacgggcctcaatgactttaaccgtaccgcacgttcatccacgccgcccatgagcgaatcctcacggacagagaatggcagatataccgtcaccgtctcaaatggcagcgccacctgcgggagtgtgagtctctccgtgaaaggaaacggcagtaacaagcagtccgcgctggcccattttttcaatcccttcattgaaacggaatatcagggggttctgacggcacagcgctccgccatggataccatgctccgtgacctggacagcgcggcgcaggaatttgtgtcggcataccggacccggcgcgacacgggtaacggcaacctgccggatattgaaagccgtattcagaaggcagccaaccggtatgaagaaacggtgcagaaggcgttgccaacagataacgcagaaactgagcgcagggagcagctgaaatcctacctgaccacctacggctgggttgccctgggcgcctggtaccagacctttgccaccgccaaccagcgactggctgaactggccgaccgtgctcctacagtgagtggcgtctcgtcactgggcgaagccggggatacggaattcctgaaggaagtcaagggggcttaccaggcacagctacagaactcagcgtatactcctgcactgggaacaaccacctctgccagtgaataccacgcatctaatactcaaaatcctcaatcagccctgttagagttcatagggccagggttaactcgattttcaaataaagtagcaaccatacattcaggaacaggaacaacgagtcagcaggcaaatcctctgctgaagatgaaggacattggtgattacaccatggtcacaaccgaaaccatctgggcgggttataccaccgtcagggtgctttctactgccggcagcaactccgtttttggccgactggtcaatgccgtcagcggcttatctgatgcagcaaaggcttttctggaagcctccgcaccaccactctacttcctgctgtttttgctgttctgtgccggtttttcgttatctatttacctgccgtttatcccgtttatcttctggatgaccggcatcggcaactggatagtcagcgtactgattggatgtgctgctggccccctgtgggccgccacccatctgggaacaagtcaggacaggggaagccgggccgcttacggttacatctacctgatagacagcatgatcagaccgctgctgatggtattcgggttcttttttgcatcggtcgccatcgtggccggcggcacaatactgaatgcgctgtttgctgctgcgctgatgaatgtccagataaactctgttacgggcgtgttcagcatggcgggatttttgatgatttatgcccgagcctgtaccacgctggttgcggccatttttgcacttcaggcttatctgcctgaccatgtaattaattttctgggcgggcgtgacggtgttaatatgctgggaaatatggtttcttcagtcaaagatattattgccggaggtaataccaatatgcgcagaacacctggcgttcgggaagatagactgaaaaatattaatagagatgataaagacggaataaaacaataa

SEQ ID NO: 465057 - DNA, 570 bp, Shigella boydii; identical to SEQ ID NO: 8306

SEQ ID NO: 465058 - DNA, 1206 bp, Shigella boydii
atgcaaagacaatctgcaaccacactgcttgcactccttgtaggctgtgcggttatccctgccacccatgcctactctgtgaatgttgtgtccagtcagccggtcacccgacagatcatgccggagctggccaccatacagggcatcatggaggaaatggtccgtatgcagacggccaccggcacagccatcacccagaactcagaaaaactggccaccgtcattgcccaggacggccaggccacccgtcagcagatgatattcagtaatgaaacacaccgcctcgaggaggccaggaaaagcttcagcgtgccggactccatctgcagtgaatccgcgtccggcattgcagcagaaagccgccgggcagcagcgtctgcagcggcacgtctgagtcaggggggaggggtcagcagtaaacccatccgggaacgtctctcccgggctgcggactccccggtccgcgaggcgtatgacagtgccggcatccacgccggttactgcacggaagcggagtatgcccgctttggcggaactgatgtctgccctgccgtgggcgatctgccgggcggagacagccaggtacgatcgctctatcagggcgcaggcacagcagataccccggccgctctcacctgggatcagaaacagattgatgctgcgacggcttatatgaaaaacaccgccagaccgtcagcgggtcgtgccccggggaaaggagaagtgggcacacagaccgggcgcacgtatgtgggcctgcagaatgaatacaacggcatcatcgatgccgcctctcatccgcagctgtcactgattgctgacagtacccctaatgaagccacccgtggggcactgactgaagccctgcagtcaccgtcagctgcggcatattttgaccggaccgcatcatcagaagcccgcacccgtggccacatgagccagcgggagtttgaggcctttgaagccggcagacggtatgccaacaccgactggcagcaggatctgcagggcatggaaggcgataaccttctccgtgagctgctgcgcaccaccgccctgctgaactggcagatgaacgatctgaaagagcagattcgtcagggtaacgttatcgccgggcagcaacttgcgctggccgcacggcagtattacggacagcgccttggcgaactgtcacaggccatgggccaggggagcgtaagatga

SEQ ID NO: 465059 - DNA, 621 bp, Shigella boydii; identical to SEQ ID NO: 8308

SEQ ID NO: 465060 - DNA, 3045 bp, Shigella boydii
atgaatatcaaccgcattatttttgccattgaagactgtatcagtaccctgtcacggtattccgtttccgcattcttccccgattactgtgatctgcacaccgtcatcggtctggaccagcaggaccgcgaacgccgcccctggctaaaagccccctacattgccaccacaaaacaggggtattacctttccgtctttgaaatcagcggtgccctgaaagaaatggatgaaaacccggaccagacggcccccgggacactggagtcactgattgcagcactggctgagcgaatgaacacggcctggaaaaattccggccacaaaatcagttttgttttcgaacgcgatccggagcgtggaagggatgaaatcgaagccatgctcttaccccagcgaaaatccatcgcacgcacggggatcctgcttcaggacgtcctggatgaaaaagtcaccacactcaccccctggcttgtccgggagcgctgctggctgaccgtctggagctctgaagaactgctgagccggaccgatcgcaaggaccatcagacccgtgtcaggaaactagctgaacacgctccgccagcccgttttgcgcaggatccctggcgctggacactttccgccctcaaaatacggcatgacgccttactggacacgctggagcaggccctgacacatgattctgatggcctgctgattcgcctgatggatatccatgaagtgggacgggaaatccgccgccagctggagcgcaacagtacaccggcagtatggcagcctcatctgcctgaagatgcccgtcctgccggctggcgacagggcggggatacctctgtattccacgcaccgtcgctgaatctgcagttattcaccacacagcctgaaacacacggcagcctgattcaggccggtgagctctggcacggtatggtcgccattaccctgccccctcagaatctgcggacattcaaccagctggtcagggatgtgccccgtgcaatcccctggcgtatccggatggatctgatgcccgacggcatgaaggcgctgggggtcaagaaaaccctgctgacctacagcagctttattcctcctctccggcccatgtatgactcggtaatgatgctgaatgacatcaacaagcatgatccggtctgtatcatgaccattgttgccaccacatggggaaacagccgggaagtctgtacccgtaaccaggctctcctgaaatctgcgctggaaggctggggggtatgcggcaccaccacaaccttcggtgatccgagacgtgcctgggtgaacacggttctggcagcctcccacagctccggcccgatccccctttacccgcccctttcacacgccctttccctgtttcccctgaacagggcaggctctgtctggcggggacagggaaatctgatgatgcacaccgaagacggctctgcatgggaggtggcgctggcgtcatcacaacagaacaagcacacggagctgacacccggcgcacccggtctgggcaaatcggtactcatcaacgcactgtcggagatccagatagcctcagcccagaagaatctccctttcattgcctatatcgacaagggattcagtgcacagggactggtacagcttatccgtgacagcctgcctgagcagagaaaggacgaagccgtggggatcattctgagtaatgacccggaccacacccgcaacctgtttgatgtgatgtacggggccagaaaacccgtcacaccggaaaagaacttcatggtctccgtcctctgtgcattgtgtgtggataccggcaccggtcagccctgtaatcccggcgacacccggcaaatcatcagcagcctggtggacctggccttccgggaatatggcgagaataaccccagactttaccgcgcaggtacggaacccctggtggatctcgccctggaagagagcggcatcgctgaacaacatgatgccggatggtggaatgccgccacctggtttgaaatcagggacatgctgcatattgcagggaatatccccgccgcccagcgggcacactaccaggccatgcccctgctggctgaaatgtccgccctgctgggacagccgtccatccgggatgtgttcggcaccgttcagcgtgataactcggaagagcggttgctggactacatccgccgtgccctcgatcagggacacagtgactacccgatgatgtccggctgtacccggtttatgctcagccccgacacccgcgtggtcgccgttgatctgaacaatgtggccggggacaagacacctgccggacgtctgcgcaccggtatcatgtatctgctggccgggcagatcgccggcggggattttgtcctgccgcagtatcaggaggaaatacggaaaaatctcgacccacgctaccatgaggtgattttccgccgcattgaacagcttgatcaggaggtcaagaccaaagtctatgacgaactgcacaatgcaaaagggatcaacttcatctgggaagccctggacacccaggagctggagcagcgtaagttcgggatacgcacggtgctgagcacccagctgctgcagcattatcctccggccgtgctcaaatccgccaacaccctgtggctgctgcgttaccgccctgacgaaattccgttcctgcgggataactttggcgtcccggaagtcacactgcggcgcttcctgaaaatgccggaaggggccgcaccggacggcagcggtgtcccggtactggctgtgttccgtgtaaaaaacggcacgctggcccggatcctgaaattcaccctcggtccactggagctgtgggcactgaactcctctcctaaagacagcgccctgcgacgtgcgctgacgcaggaggtggggtcactgcgggcacgccagatcctggccgaacactttccccggggttcagccacctcactgatagaacaccgcgcccgcacacatgacagtgaaaacgtcatccatgagctggcagcagaactcatccgtaagcagggatataacctctga

SEQ ID NO: 465061 - DNA, 546 bp, Shigella boydii
gtgaaggctgaaaataaaatattaaatctttttcatgcgacaacaatgagcagaggcctgcaaataataaaagatgggaaaataagaactgatgctccttctgttatatgctggtcgttagagacgacaccaggatggatttatttatcggatcaacttgataatgcggtgcattgggggaataaaatagcatacctttcaaaagatgaattatttttctatattttcagagttcaggttcaggaagaaaattgttatcctgatacagatgatttgcaatatgtgtcgtggttatctcctgaggaggcagaaaacacagacctgtatacatgtctttctctttgccattcctgccgaactgacaaagaactgtatacaggttgtgaaatatcagattatgcagtccttcctgcaacaacactgtatactgacaattcaggacatcctcaatatgatattgttaatacgcttaaaaaacatataggcaaagatgagtataatcagtatgaatcacttcgtcagcgtattgaatgggtttgtttataa

SEQ ID NO: 465062 - DNA, 381 bp, Shigella boydii; identical to SEQ ID NO: 244905

SEQ ID NO: 465063 - DNA, 360 bp, Shigella boydii; identical to SEQ ID NO: 14013

SEQ ID NO: 465064 - DNA, 627 bp, Shigella boydii
atggctgacacctgccgggatacggtcgtcctgctggaaaaaaacctcacccgggtgatgcgcctgaaaaaacgtccggtaccggaaaacgctgacgaaaaaaagaaacacacccgaaccctgcaggatgcggagcggtccctggcacaggcccgcctgtcggccaggagactggccctgcgtcatgtggaaaagtcgcaaatcgtcacaacggatgcactcagcgaaaatgaaagtgacctgctgcagccggaaggcccgccctttcatctctgtgccttctgccatgcctggcactgtctgaacggctatgctgccgcacagggagtgatggtctggctccccgatttgcatccggcctcggtggttgccctcaatgcgcgggcactgcaggagattttcagcgataaccgtcagcgggtcaggcagggacgggcagtcctgaatgccctggtacagaaccgtctggccgttgaggagaaattccgcacctggcgtccggcggattttgctgatgccctgcgccgctggccgccggcacagcgtaaaacgttgagggagaaaatggacggggtggcgctcattctgctgccggattcgtttcctgacaaaaagtacgtcatgtga

SEQ ID NO: 465065 - DNA, 252 bp, Shigella boydii; identical to SEQ ID NO: 8244

SEQ ID NO: 465066 - DNA, 399 bp, Shigella boydii; identical to SEQ ID NO: 8243

SEQ ID NO: 465067 - DNA, 531 bp, Shigella boydii; identical to SEQ ID NO: 8242

SEQ ID NO: 465068 - DNA, 714 bp, Shigella boydii; identical to SEQ ID NO: 8241

SEQ ID NO: 465069 - DNA, 1332 bp, Shigella boydii
atgagcgaagaacaggacacagccgcaaaatccggcaaaaagctgtcagccctgctggttatggggggcgtgattattatcgggggcggatacctgctgctcacctggctgtcccccgaaaacgctgcatcgctctcgtcagtcaatatcaacagcacaacgtccggcggcggacggaacgtgatggagacacagcactaccgggatttactgcgggctgacaatgaacgtggtgctgcagaagcgttacgtaataacgagacgtttatcgccagtctgccccggggactggataccgataccggaaacgatcagaaaagagataatccccccgatgatcagtcaggcacttccgggcaaaacgcatcccctcctcaggaagatcagacggcccgggaaaaacggcgtgaggcattacagaaactgcttgcccgtatcaacacacagcatcaggatgcccggccaccggtagtggcagcagccatgtggagcaccaccggcgcgcccgggacagcccctcatgcgtcaccgtccggtaccgttacatcacagcatccccgtctgcaggagacgagtctggcaacaccggctacacgtcaggggatccagctgataccggcactgacccgcgtaccggcttacatcgacaccgcagtggactctgacaatgcggtctcccgcgtggtggcctccgtacctgccgggccatgggccggagccgttctctacagccaggacgccagactcgcaggtcagggaatggatatccactttgaccggatgatgtggcggggcatgtttctgaaggtcaatgcatatgccctgaatgaacgaacaggaatgtcaaccgtggccagcgacgtgaaccaccgctggtttaagcacatcgttctgccgtccgtacttggcggggtgggcaatgtcggaagtctttacaaagacgccaacacacagatccttcagggaaactacggcagtattaccggcagggtgggaatgcctgatggagaggcgctggccggcgtcattgcaggtggcatggccgaacggggcagccagctgctgacccgccaggcagagagcgaaccttaccgtcaggtgacagtatcacggggcgaggtcgtctccattctgtttgttgagccggtcatgagcaacgatatcagtacgccgtcctccggcactgccccttctgagtccccctcctccggacgtccgctcacccaggcggaggcagagcaccaggcctctgacaggatccgggcggcggtcctccgtaaacagaatgaaatgcagcaacgctacggcatacaacaggaaagttatccatga

SEQ ID NO: 465070 - DNA, 975 bp, Shigella boydii; identical to SEQ ID NO: 8239

SEQ ID NO: 465071 - DNA, 696 bp, Shigella boydii
atgagcgaagcacaacccacctcccctgtctcaccggaagcggataacagcggagatatttataaccccgtgctcagaaccatcgcacagtcagaacaacgggccgcgctggtacccggtctggtcagggcgttgctgtgcagcggcgcagcactctgcatcagcctggtggctaatggcatacagtactggcatgccaccggcgtgacgcgcgaatactttgccactgacaatggccgactggtccgtctggcaccaaccagccagccggcctggagtcagagcgacgtcatgaactttggcagcatgacgctgagcgaagccttcaatctcgattttgtccactaccgaaaacaaatcacgacacaggccccccgcttttccgaagccggctttgccggctatgtgaatgcccttcaggcctcgaacattctcgacactattaaaaaggagaaatttaacctcacaaccactatcggggcaggtaccctggtcaaccagggacagatggagaacggtgtctggttctggaaattccagtatccggtcaggatgcgcctggtcggtcagaccagcacccgccccgaacaggccttcacctttgaaatcactgtccggcgcgttgacccccgcatcaaacccggcggcatggaaatcagccagatggtttcccgtaacgccgcagcaggaatctga

SEQ ID NO: 465072 - DNA, 351 bp, Shigella boydii; identical to SEQ ID NO: 8237

SEQ ID NO: 465073 - DNA, 4062 bp, Shigella boydii
atgaagtccagatatcgaacctggcttgctgtcccgcctgaggagacagaagccgtaaaaaatgcagttcccccgttaaatggccgcaaagctgtcgcatgggatccagaaaaaaagctctggtatgcccgggcgggtaccgaactttcactgctggagcgctggttaccccggccacaggaactgtcgatggatgccggcgatccggtcactgaatttgctcaggtcctggaaaacgccgggctggttattcagggattgccacagatggacggagccatacacagagtggccacccgggatgacaaaaaaggggccaaaagtggcgcatacagggcctatcttgatggtcgtcccgccggctggtaccgcgactaccggagcgccgatgacagtcccacaaactgggtattttccggcggagaacaacacgatcctctggccagactgcatctgcgggcattcgctcagcaacagcgcgatgataacgctcgtaaactgcagcaacagtataacaaacaggccggctatgcccgctcctatattaacgggttgccacaggcaacagcacatgaatacctgacgcgcaagggcatccgggccgcgcctggcgtgcggctgaacaataaaaatgagctggttattcccttcagcaacggccggggagaaatacgttcgtaccagcgtattccggtcaccggcgggaaggatgcccgcattctgaaagactccgagaaaaccggcaactggttcaccttcggaaccccggaaaatggccgccccctgttatttgcggaaggttacgctactgccgcctccctgcacgaagcaaccggccttccggttctgatgacagttgatgccagcaatatgattgccgtggcagaaaatgcccgccaaatctggactgacagcccctttgtcttctgtgccgacaacgatcatcaacgggaaattaacaaaggggtttttagtgcaacaaaggccgcagaagtcacgaatggcgaagtcattattccggcctttacggaggcggaaaaagcacagggactgaccgatttcaatgacctggacgccagccggggacgggacaactttcagaatgccatgaatgcacagttaaaacatatcggtatccccacacccaacagtgacactgccgaccatcgtgaggctgtcgtgatcgacaacctgatattcacaccggtaaaagatgagaagccacaaatgtcccctgaaaacagacagagcacagccccggaaacggagctggcgacacaggatacgccttatgacacccactccgacgatacagaaaaccaggcatatgaagatgactatgccgcctatgcatccctgcaatcagtaactgcggagacgttatccccggataaaccactggagaatattgcgtctgccgctgataccggcacagagaatacctctgtgcctaccgctggcgaccaggaagacctcaatacagacgccacaggtacagacaccgctcacaacagcgacacagcagaaacaggaacgcttcctgaacctgccgggatgcagtccgtgcagcaggcaaccactgaaccgaccgcagaagataaaccacacgagaacgttgtttccgctgccgataccagagaagaaaatgcctctgtggctaccgctgataccggtgaagaaaatgcctctgccaccaccgctgacaaccagagcacgcaggcagaagaacatccccggagtaaagacacaccggaaacctccctctccgacgcggccgggacacagcacaccaccacaacgcagtctgaagaacaagtgcaggtttccatggccagcgctgacgactggagcgcatttgcggaagatctcaacgctgacactccgggggcccccactgttcacaacaccgacaacgcggagacaaacacagtttctgaaccggccgggatgcggccagttcagcaggtgaccactgaactgacggcagaagataaagcacaggaaaagagcgttgcgtctgccgctgagaccggcgcagagcactcctctgacatcaccgatgacaacaggaacgcacccgctgaggagctcaatgccgatgccacggttgctgttcacaacaccggcacaacagaaacagcctcaccttctgaacctgcagaaactcagccagtccggcaggccaccgctgaaccgacggctgaagataaactgcaggaagagcgtcttgtttccgccactgagaccagcacagcgaatgaagcagcccgccctgaaacgccatcgcttttcagccgtcttcgccgttttctgaccggtgggaaatcacgcacctcagaaccttccgttattcaggagaaaaagcccacggaggctgaaacagcaacagaggaggtcgcaccaccatcaccaccggaaaccagcccggaagacacatcgtcagcggaaccggacacgattatctttgcaccccgccgtcccgacagtccgcagcggcacaacctggacgagatccttaaaaatcttacacacaaagagtttcccgacaggactgcgctctacagcgttgacggtgaacccgccttcctggacagactctactgtctcgaaatggtggatggcgccagcgcggatgacaaaaaggtcctggctgcccttgctgtggccaccaacttctatggcggcgttatcgagctgaccggcagtgatgcctttaagcaaaaagccatgcagctgattgtcgaatacgacatcaaggttcgcatgaaactcccggcccagcgggcagcactggaaaaactccgcaaggaaaaagagatggcgcatgatgccattgtcacccacagacccacgccggaactcaaccgccagtcaccggaagagacaacaatggcccaaccggccccccctgtgtcaccgaaggcagaggctgaacaaacagcaggcagtacggctgaaacaccgcatccggaagcgccggtcacggcaaaagctgaagccccccgggccgacagaccggaacaccccgccgccccgtcgtctgcgccagaaaaagcccctgtcagtgcacagccgcagcaacccgacacaccggtggaagagccgcccggcaagctcagccccggtgaaagtgtgactgccgtcctgacaaactacggagaaaaagagtatgcgcccggaaaagggcgctgcttttttgtggagctcaccaaccgcagtggcaaacgggaatactggggaaacggcctggaagaactggtcaaaaaccatcagaagggtgaccccgtcacactgacactgcaggcgagagaaacattccggctgtccggtgaaacgcgggatcgtatccgtaatatctgggccataaccccggtcagtaacggcattaccgttaataatgaccaacctcatgcgggtcagcataccctggagtttccgatggcaacattcagccaggtgatgttacagatgcaacaacactggccacagataatgcaggaagttcgctcccccaaaaatcctcccaataatctgtacattggtgaagacaggcaacctgcatcagcacctcaggatcaatcaatgcgactccccctcgctggtaatgcccccaatgaactgataccagccatcgcctctgccgataaggacaatcgtcagttgaatcttctgctggtccacagcgcagatgatcatctgcagggcgtggtccgcctgaacggcaccctttacccggcactggccaccccgtcagctgacaaccgtcagctggttatcaatgccctgacggataacggtctgcagtttgccggttacggtgaagctgttaaccatgatgagaataatcatcagcgtccgtccccacaaataatgcagtttcacctgaagcaacaggactccccgttgtttgccgccatccacaaaccggaagagcaaccggacaagcttttccgctctctgggttttgagcagacctggaaagagtggtctgacagccaaaaggcggaggacaggcaggaaaaaactctgcaacaggcacaatcccacagccccggccgatga

SEQ ID NO: 465074 - DNA, 291 bp, Shigella boydii; identical to SEQ ID NO: 8235

SEQ ID NO: 465075 - DNA, 1149 bp, Shigella boydii
atgaaattacccgatgagttcggcacattccctttcgcccgtttcacggccgaagagtttcgctatttttttgcctggtgtgcccgacaccgcgtcagtgatatcgatctgacaggcggctcaccggtatctgtcagtcgctttggacggcgggtacgttcgtccgcacatcctctgccgtcctccatcatgatggcgctgagtgatgaattgtttggacgggaagtccttccccgggtgctgtccggtcatcccgtggaccgtaccattcaggtcagcggtgatgcctccggtcgctacggtctgcaacgagggcagcgtgttcgcctgcgctgtcatctgattcagggaacatcagcaacagaagaaaaagtaatctccgtcaccatgcgggtgatcccgtccgatattccggacatcctcaccatgaatattgaaccggacctgctggatgccatgctccggaaaaccggtctgggtttcatctgcggagagaccggctccggtaaatccacactggcagcggcactgtaccgctacattcagacgcatttccccgaccgcaaaacggtgacctatgaagatccggtggaatacattctggggggagagaatgaccttctgccaccccatcaggccgaaatcgggcgtgatgtggaaagttttgcggcaggacttcgctctgccgttcgccgtaacccggacatcatcggtatcggtgaaatcagggattatgaaacggcagatgcagccgtccaggcaggtaacaccggtcacttctgcatcggcaccatgcacaccaaatcacccggtgaaacctttgcccggctgctggggttatttccaccggaaatcagggattcaatggcagccgccaccctttccctggtgcagttcattctggtgcaggtcctggtcagaacaaatgacggtggcagacaggccgtccgggaatacatcgtcataactgacgaactgcgtgatacgctctcccggcagtcccatgcgacatgggggcattacattgatgaaatcattcgcaaggaaaaacggcggatacgggatcaggttctgaccatgtatcagacgggcagcattgaggcatcagaagctgcgctcttcatcccggccggagaattccccaaatga

SEQ ID NO: 465076 - DNA, 837 bp, Shigella boydii; identical to SEQ ID NO: 399281

SEQ ID NO: 465077 - DNA, 459 bp, Shigella boydii; identical to SEQ ID NO: 8232

SEQ ID NO: 465078 - DNA, 1203 bp, Shigella boydii; identical to SEQ ID NO: 8231

SEQ ID NO: 465079 - DNA, 822 bp, Shigella boydii; identical to SEQ ID NO: 8230

SEQ ID NO: 465080 - DNA, 1362 bp, Shigella boydii
atgcaaaaagacaacgataaaggttttgcacttcttgaaattctgggaggactggttgtcatcagcctgctcatgccgctgttctggtcttacattgaagactacctgaatgaaatgcgcaaccagagcgccgcatttcatgcagatgcctacaatactgcagccaggacctacatcgccgataacaatgcccgcctgcatagcggaacgcttcctgccaccttcacggcggatgagttaatccggaaaggatatctgaagggtcttaaccgctcgccctttgggcagagttataccaccggcatccgtcgtaacacgagtaccggtcgtctggaggccctgacctgctccaccggaggggagaatatcaaagacgatgccctgcgcagtatcgccagcctgctccccggtctgggcggatttataggaaaaaatggcacagcaaccggtgtttttggtggatggacagataaacccggcgactatggactcagctgcaatggcgggcacatcgccatcgtaatgatgggtgatgacctgcaggaaagcgatcgcctgtatcgctttcaggtaccgggacgaccggagctgaaccagatgaacacggccatcaatatgggagggaacaacctgaacaatgcaggaaacgtcaatggacaaagtgcaacactgaaaggtgatgttacaagcgaaaacggctggttaatcaccaaaaatgataaaggctggaagaacatcacctatggtggcggttttacgatgacagacagccagtggatacgcgcagtcggtggtaaaggaattataacctcaggggaaatcaaaggaggaaaagtcagtggggggacagtccggtctgacggtcgcctttccacaggtgagtatttacagctggataaaacagccgtagcaaatacaaagtgttcaccagatggacttgtaggccgcgacagcaaaggggcaatactttcgtgccaatccggtgtgtgggttggctttgaatcctaccctgtgggaagccctatcccgtggccatctgccactcctccacaaggctatctgttgatgaacggccagtcgttttcctgttcccggtatcctcagcttgcccgtgcttatcctagctgtaagttacccgatctgcgcggtgtttttatccgtggctgggataacgggaagggacttgatggtgatcggaacagacagctcctgagttatcaggccgatcaatcaggcgtctatcacgaacgtggcggatggctgaaagggcatcatagtggtatgccatactgggcacaggggagtaccacagaaatgcgtcccaaaaacattgcattcaactacattgttaaagccagctag

SEQ ID NO: 465081 - DNA, 627 bp, Shigella boydii; identical to SEQ ID NO: 236377

SEQ ID NO: 465082 - DNA, 486 bp, Shigella boydii; identical to SEQ ID NO: 8227

SEQ ID NO: 465083 - DNA, 537 bp, Shigella boydii; identical to SEQ ID NO: 8226

SEQ ID NO: 465084 - DNA, 1095 bp, Shigella boydii
atgaaaattctggaaagactcaacaatacggaactggatctgtccggccttaaccgctggctgggcaaaaagacgttcaggcggactacgttttacgagtcccttgcaggcatgatccgggacggcacaccggttatgcgggcactggagttcatctgcgatgtggaaacggattttggtaaaaagaaagggcagtccggcctgtattttctggcgacagactgtatcgccagcatacgcagcagtggtcagctctctccggccctgaaggactgggtacccaaagatgaaattgccctgatccgtaacggtgaagaacgaggtgatatcgctgaagccatgtttcaggtcgtcaaaacggcaaaaggacgacaggagatgattagcagtctggtgagtgtctgcctctatccgctcatcctgctgacactctgtgtggtgaatatgtataacgttcatacccgggttattccgatgatcagcgcctttgcaccggaagaacgctggtcagtacagatggtcattctggccaaatcctccggactggttatcggttatggtttgtggctgctggcaggactgctgctgctggcaattctcatcaggatgtcattcagtctgtataccggtccccgacgacggtatcttgatcgcatcccgccatggtccctgtatcagactttccatggcgtgaattacctttttaatatttcatccatgctgcagataaatattcctttatctcatgcccttaccagaatagaaaaacatgcagaacataaccgatggttaaaatcacgaataagtgctatcagaaaaaatgtcttatccggtcagtcactggcactggccatgaaaaactgtggttatgactttccgtcaaaatcctgtgtgaataatcttcttttaaattcagaaagggaggacagtgttgccagtatggcgctttatgcagaccgctggctggaagaagcaaaaaagaatgtcagaaaaagcggcattattattactgctatatcaggtctgctggtatttctcttcatcatcaatatggtcagtgccatttacggcatcagtgacatgctgaagcagtaa

SEQ ID NO: 465085 - DNA, 1509 bp, Shigella boydii
atgctggcacctgcagaccagccacctgatgacattctggaatacgtggttgttgatacagataaaacaggacaaattcatgtcagagtggtggaaggaaaaaaacaccttcgtgccgtccaggattatctgacccgcctgtgctcccgctatccgggtaaagtatccccgtttgagttcaccacacttgatgtgatcgcccgactcaggcaggagacggtcatttccggggtggaaaacggaattaaccccgtacagcaaaaaatgctcgggtatatcagccatgcggccaccctcagcgcctcagatcttcacatcacgccggggcgtgacagtacggatttcacgtatctggaggcccgtgtccacggagagctggagctgctcgatatcgtcagaaaagatgaggggctggaattactgggggccacctattccggaatgactgacgtcataaagggaacacagtttgatcccggtgtcccccaggatgcccgtctggctgaaagattcctgaaactggccggactgtttggtgcgcgctactcccactatccgtgtgtgggcggactctatgccgtactgcgtctgatcaaggatgacagtcagcatataccgacattcagtatgctggggtatcaccctgagcaggagcgcgctgtccgaaggatgctgcagcgaccggagggcatcgtgatcctctctggccccaccggttccggaaaatccaccacgctgaggacggcttctgccgcctatctggaacagtatggcttcaacgataccggagggatcctgctcccccggcgacgtctgttcacaatagaatcaccaccagaggggcgtatccccggtgcaattcagacggccgttatggataccgctcagggctgggtcgattctgttaagtccgccctgcgccttgatcctgacgctatcctgaacggggagatacgtgaccatgcctccgccatcacggcgataaaagccgccatgaccggtcacctgatgctgaccacccttcatgctaacgacccgataaatattcttgagcgtctggaaatggagggcgttcaggcaaggatgattgcagatccgcagttatttatcggcctgctcagccagcgtctggttcaggtgatatgtccccactgccgcctcccctggcatgaggtggagagctcccggacggatgaagaacgacgcctggtggaaaacttctgccagcccgatgccgtgtatattcgtaaccataacggctgcccacactgctggcgtggagtgaacggccggaccgtcattgcagaagtgatttccccggatgcgaagtttttccagatttaccgggaaaaaggccggattgaggcaaaaacctactggcaccgggagctcggcggtatgacacgaaatcagcacctgctgggcaaaatcaacagtggtcaggtcgatccgctggctgcgcattacatatcccctgtagacgaggacagctatacgctgctgcactga

SEQ ID NO: 465086 - DNA, 459 bp, Shigella boydii; identical to SEQ ID NO: 8223

SEQ ID NO: 465087 - DNA, 1296 bp, Shigella boydii
gtgacggatatttcaccgacagagcgacaggtgtttccgctgacggcaggacggaatgtatttcttgccggaatggactggaaaacactgcccgcaagccataaaaacccccggacgtttgcccgcagtctgggggcagtacgctatatttcctgtgagtatctcagtacggaagataccgatcgtcacatcatggttgcagccgtcagccagaatacactccccaaaggcagccgcaggtatttctctctcgccatgcttatcctgcccctgctcgagccaggaggatacgctatcgttgaactgtcacaggcaaacgatacagaactttatggttttgtttctgctgttgacggcatcctggtcagtgacctggtgggaacccgggaggaaatcagggaggcccgggaaatattcctcaccattaacagcgcgcctgaacacggctggacatgttatgaaccgccctcgtttaacgggcctgacggcagaggtcccctgccactggaaaccctgacaggtgcagggaaatatccggcagaagcacgccttcaccccgtatcccgtgggccacagcttattccggtattactcatactctcccttctgggtactgcatggtatggctggcagtactatgaacgcctgaaggcagaaaaagcagcacttgctgaagcggcacaaaaagccgcagaggaacggatcacaccaccgtggctgagtatgccggaaaccggagattttatccggggatgcagtgacgtatggtcacgcctgccggtgtcggtcgccggctggcgatattcactcgccgagtgtgctgccaccgggaacagcggcaatctgcgtgcatcatatacaaacatcgccgggacgacagtgaccgcattcagccagcgggtcagggaaattttcagcatccggccgtttatggttatgccggacgggaatagcggtggttttgccctgccggtcaccttcagtatgcctgaaactcccgttgccgttgaggcattaccggaaaacaccctcctgcaggaacggctgaccacactcgcccggtcgatgcagctgaaaatggactggcaggaagtcagcaacagcttcaccgatgaagacggaaataccatccagcccccctggaaggagtatgacctgcagatactgacgacacttccggcgcaccaggtggcagagcatttcagtgaaccctccgtccgttttatctccgtaacaaggcaactggaagagggtcgtttccgttatcaattcacaggtaaatattatgtccagtaa

SEQ ID NO: 465088 - DNA, 1620 bp, Shigella boydii
atgaacaaaaaacttcttgctattatgattgcagccactctgctgcagggctgtaccagtttccgacaggcagagaacaccagaaaagacgccgttgctgaacaacaacgggcccgggaaatgatcgctgagctgcgaaaccggacaccggttgtaaaggaatccccacgtcagtggatcaatccccgtccggtcacggataaaaaccccggtaatgcggtgcccggctgtccgattatcattaacacccggcagagcatcacccttcagcaggtggcccagcggatctcggaaaactgtcatattcctgtaaggatcacccctgatgtacaggcgtatctgagcgtgaccacctccggcagtacgcagcaaatccagggcacagtaccaccgccggataccggcggtatggttccactggccgccataggcagttctgacacgacacttccccgcctgcagggaaatacggcgtcacttcctgaactgaaggcttcaggactgacatcactgctgaatgcggtcgcttcccgtctcgggatttcctggcgttatgatggttcacatatcacgttctattatcttgatacccggaccttcccggtgacctatatggacagccaggttgcctataatgccaccgtggtcagcggtaccatgtcatcaaatggctcatcaggtggaacagcatcggatgccatttccggtgatgccagtaatacccagaccaccaccgtggatatgaaatctgcgctgtatcaggatgtgaaaaatgctgtctcatcaatgctgacgccggggattggtcgcatgttcatgtcgacgggctttatcaccgtcacggacaccccacaggtactggaaacggtccggacgttcattgaaaaacgcaatgaagaaatgaagcgccaggtggtgctgaatgtggaaattctgagtatccggaaaacccgtaatgagcaggcaggtatcgactggaacgcagtcttcagcgacagaacgctgggactgagcctcggcagcacattcaccagtgcagccagcgataccgtcactggtggtgtttccattgtgaacgggaaactcaccggttcaaaagccttcctgaaagcactctcttcccagggagatgtcagtgtggtaacccggaattccgccgtgaccaaaaacctgaccccggtaccgatgcagattgccaatcagcagagctacattgagagtgtgacgacggataccaccgccaatgtcggctcatccacctccctgaatgcggccaccatcaccaccggttttaatatgacccttctgccgttcattctcccggactcacagacactgcagctgctctattccatgagtctctccgacaaaccggttattgagaattacgagagtggtggaagcaaagcccagctgccgaatgtggatctgaaaaccatcaaccagacagtggacctgaaatccgggcagacagtcattatcagtggcttccagcagtcagggcgtcgcagtggaaaacagggtgtcggcacaccgggattcttcggtcttggcggtgggatcaacagtgaaaacgacgacaccattctcgtggtgctgatcacgcccaatatcatctga

SEQ ID NO: 465089 - DNA, 438 bp, Shigella boydii
atgggatgggttacgggtttcattatggtcattatggccattggtaatttctggttccacagtcacctcagccgtactgtgcaccatcagcagaccgctgaaatcacacagcaggctgcagactttattcgttatatgaatgccatcaacgattacctgtatcagcaccctgaacgacgtgctaccggtggtcagctcacgtcagcacagctcggtctgcccgccacgaaaaacgtcagccacctcatcagtcagcagcgcgtttttgtctgggcaaaagaaaaacccggccttatgggtgccctcctggaacaaagtggtgattcggccctgcttgccagagtggaaaacggtcgcctcctggacacccgtgggcggcgtatttccatcacgctccctgctgtgatccccgatcaggtcatcatctggatgaattag

SEQ ID NO: 465090 - DNA, 1071 bp, Shigella boydii
atgaaaaagaaatcacttacactccttctgccgtcattactcagcggctgtacggcatttaatgccacgcctgttcctgacaccacgcctccggctctggtgttcgtcgacggacaaattcgcgaaagcgctgccattatcgcccatacgcaaaaacgtctgcttccgccaccggtgacccgccctgtgacgccgccccgcccgacaacaacagcgacgcccacaaccgcagtcagcagccagagtaccgcactgcctccccgtccgctccttcaggccacacagctgcccgcactggttatgaccggtaaacccggtcagtcatccgtcgtttatttacgtgaggcacatcagcgctccgtcagtgactggatacgccagttgctaccacccggctggcagttccggcaacagaacgctgccataccggcactgaacaaacgcctccccgtctggtccgttaatgaccagtggcaccgggcactgaatgcgctgctggccggccagcagctttacggacatatggactggaacaggaaaatactgactgtcacgacctctgcaacaccgccggtcgacgtcacggcaccgcagggttcacagaaagctgctgatacaccgcgtaatccgttcaggggcagcaccgcaacgccggcaggcccgacaccagtgacacctgccgtcagcgtttcccgggctcagaccaccaccgggacatccggaactccagagagcagaacaaccacgccagccccggtggccacgaaaccggtagtgccaccacagcagaaggtcataccgccacggcagtggaaaatggaaaaggggaccaccctgaaagacggactggcccgctggacatcatccgaaaaatgcccgcacggcacatggacactgcgctgggaaacacctgtcaactacagcatcgatgcccctctggttttcaccggcagtttccgccaggcgctggagcagctctttgcactctataccccggctgaaaaaccgctgtatgcccggaccagcactgcacaatgcctgctccgtgtgacagaccgcccgcaggaataa

SEQ ID NO: 465091 - DNA, 321 bp, Shigella boydii; identical to SEQ ID NO: 9361

SEQ ID NO: 465092 - DNA, 243 bp, Shigella boydii; identical to SEQ ID NO: 236367

SEQ ID NO: 465093 - DNA, 144 bp, Shigella boydii; identical to SEQ ID NO: 244907

SEQ ID NO: 465094 - DNA, 663 bp, Shigella boydii
atgaccattcaatccccggaaaaccctgtcattcagttactggagaatatgcttgaagcgctctccacctccccggacagcatcaacaatgaacgacgtcgccggcgcttcctgctgaactggcttgattccgcccgacagatgagtgagttcagggggatgcctgaagagttcaccgccctgcgcaaactgctggccaccaatacggacataccggtagagaacacgctgaaatcactgctggaaagtggccacaacgcagcactgtatgacctgtaccgcttccgagcagcgcttgccacgtgcaggagtctgggatggcagattggcacgtgcgcatggaatgaccagttactgagtgagacactttcccgcgcacagaccgggaaacgtcatatcctgcagctgaacagcaccggggacaccttttccaccacgggcagaatgatcagaccggtggcattttcattaatccatccggccaccatcaacacgtctgaggttgaagagatattccgggatgaaggttttatgctcgcacacgggcgcgaatgcagtctgaacggcagcggcagaaatatgctgtcacgcattcttcatgtgggccattcaggtttagcggaagaggaatggggcatggacaacagtctgcttttacactga

SEQ ID NO: 465095 - DNA, 576 bp, Shigella boydii
atgtattcgccgttcacaacaacatcgaagccccctgcggggatcgattttcgcggagcgttccggattttgaatatctgtgaattacatcaacgcaactggtatctggcacagtacatccctaccggcaaaaaccgcgaacatctcttttcctggctttccgaacaacacgtccttccctggacacccctgatactgaaaaaggtccgccgcacggataaagtctgtggttaccgtcgacatatacacgccgtgtttcccggttactttttcctgaaagcagaccccgaaagccacagcttcactcaccttcgccgtcacagtgcctttctggacttcgtgaaaatggccggtgaaatcaaaaccgtcagggaggatatcgttcagtctttgatgaaagtgtacccggatcctgcgctcaatccggcagccagggaggagctggatgctgcctccaccctctggctgacaaaagcgcgttaccagtacctcctccggcttgatgcccagcctctgccggagtcgaggatcgccctgctcctgcacctggtatctgatgacggagcgttgacatga

SEQ ID NO: 465096 - DNA, 1077 bp, Shigella boydii
gtgtataaatacacggcacaatcgctccgccataagcgacagcttgtggcaggtctgaagaatacttcatataacgcagtacactggagtcagttagcacccgaagagcagatccgtttctgggaagactatgaagcgggaagggcgaccactttcctggttgaaccggaaaggaagcgcacgaagcgccgtcgcggtgagcactccaccaaacccaaatgcgaaaatccgtcctggtatcgtccggagcgctataaggcgctgagcgggcagctcgggcacgcctacaaccgtctggtgaaaaaggacccggtgaccggcgagcagagcctgcgcatgcacatgtctctgcatcctttttacgtgcagaaacgaacgtatgctggtcgcaaatatgctttccgtccggaaaaacaacgcctcctcgataccatctggccggttctggtcagcttcagtgatgcggtcacacataccgtaggcatgagtgtttcccgtctggccagagaaatcagcccgaaagacagcaaggggaaggttattccggaactggaagtgacggtctcccgcctttcccgtttgctggccgaacaggtacgttttggtgtgctgggtgtttcagaggaaaccctgtgggaccgtgaaacccgccagcgtctgccacgttacgtctggataacaccggcaggctggcagatgctgggcgtcgacatggtgaaacttcacgaacagcagcagaagcggttgcgtgaaagtgaaatccgccagcaactcatccgggaaggcgtactgcgtgaggatgaagatatctccgtacatgcggccagaaaacgctggtatctgcagcgcagccaggatgcactgaaacaccgtcgtgcaaaagcggcagccagtaagcgcgccagacgtctgaagaaactgcctgccgaccagcagattcatgagatggcagagtatctcaggaagcgtctgccgccggatgaagcctatttttgttccgatgaccatctgaagcgactggccatcagggagttgcgtcagcttgaactgacgctggctgcgccaccgccgcactag

SEQ ID NO: 465097 - DNA, 279 bp, Shigella boydii
atgaaaaacaataccgcacaggcaacaaaagtaattaccgcgcatgtgccattacctatggctgataaagtcgaccagatggccgccagactggaacgctcccggggctggattatcaaacaggcgctttctgcatggcttgctcaggaggaggagcgtaatcgcctgacgctggaagccctggacgatgtgacatccggacaggttatcgaccatcaggctgtacaggcctgggcggacagcctcagtactgacaatccgttaccggtgccacgctga

SEQ ID NO: 465098 - DNA, 276 bp, Shigella boydii; identical to SEQ ID NO: 236360

SEQ ID NO: 465099 - DNA, 282 bp, Shigella boydii
atgaattacgatgaaataacgaaaattaccgctgaacgtattagcgactacatgaccgaagcagtgaatacagactctatagccgttgcggaaatgtttcataacgctgcctggggagtgcgaacattgtggtttgaactcgtcacaaaaatagatatagatatacataaaaagaacaggtatgcgagttatgatcttagaaggaaaatcgaaatgcagcatgaagagtttcagaaaatgacagagcgcgagcaagtgcctttattgaaatcgccagaataa

SEQ ID NO: 465100 - DNA, 267 bp, Shigella boydii; identical to SEQ ID NO: 80745

SEQ ID NO: 465101 - DNA, 603 bp, Shigella boydii
atgggaaaaaatcaggaagaaaggaaaactcccgtcattgtggtgaaaaaacgtcgtactttttcgccaccgtccttatccgaaaaaacagatattatcgcacctgtatttactgaacagacggcagaatcagcccccgccggaataaattcatctgccgtcgaaacacatatccccgaagcgccagccaggaagaagaaaaagaaaagacaccgttttccacgtccctcccactggacccgtgagtatactcacgagtgcgtggaaaaaataaaggccctgtttcctcatcttcgtgctgaaggtggtggatttattcccctgaaaattggcataagcaatgatatttcggcatttctggcagaacacccggagacagaactgaccatggacgaatggctctgtgcagtgtcctgcatcacatcccgccgcgtatatctgcagcggacagctgtcgccggcgtcccacgttatggcctggatggtcaccccaaagggcaggtctcagactctgaagcacagagtgccggtcgcagactggcgacattagaacaaaagtggctcaggacgcaggcacagcaggagaatatttctgggcaataa

SEQ ID NO: 465102 - DNA, 1347 bp, Shigella boydii
atgccaatgatacttgtaaagaagaatccccggggcaaagtgattcgggagcttagcagtgaggaagagactgcagtaaagacggtctgtggactgaaaaggccagcaaccatggcacaacataacctggccaatgatcttctccggaaaatgcgtgagtatgatgcatggttacagtgtgactgtattccgggagattcgccggccatgaattttgctgctcttaaaaacaatacgggtactctttatctgtccagttttaatcatgagcatgcacctgaatgccccatgtatcgtcagttatccggaaatgaagaggaaacatccttcggagcaagccggcatcccgttagcacccgtataaattacagaaactttttaccacctgatgacagtaattctgttatcagactgcaggcccgctctgcttaccataatggtgagcgctcctccgttcgcaagaaacgtccgcgccttggccgtttactcctgtcgcttattgaagatgcagggctgaataaactggattccctggctaatccccgtatccggactaattatcgtgagtgtcttgatgccatacggcaggttacactacagcaggagtatattcggggaagagccttatctgaaattatccatttccggccaggaatgtctgaaaggtctcaggagcggttaatggaaacgctggagaattcagaacgacactggcctgccagaagaaagcatatgttctttcagatttttatggcgcagcacatctgtcgtgatgctgtggaaattcactgggcgaacggtaatattcaggtcatcagacctgtgcgggggatcagtattaatggtgaagcgcagggcggaatacgtcccccttactgggttattcttgctttttgccggagtgccgatggcagaatcatctgcagtgaagggtatgctcatgctctttatcaactgacatgtccggtgcctgtggacagcaaactggaacgaaacacgctcactgctcttctgaatgtggccagctggcttaaaagaaagccaggtacgccggaattaagtctggaaaggcccctgtttgatacagaagtttatgttaatggtgaaaagaaatatgtactgccggatttcattgtcacagcaagggctcctgacggaaagacggccagagtggtcatcgaaacgatgggatatgaagacagtgattactgcgcgagaaaatccaggcagcataccggcatgaagcagattggtgttctgcataccgatccaccgaaatggctggataacgatcatcccccttttaagaaacatatgtacggtgtttttatgcatctcaggtactga

SEQ ID NO: 465103 - DNA, 1272 bp, Shigella boydii; identical to SEQ ID NO: 14939

SEQ ID NO: 465104 - DNA, 438 bp, Shigella boydii; identical to SEQ ID NO: 381165

SEQ ID NO: 465105 - DNA, 249 bp, Shigella boydii; identical to SEQ ID NO: 381166

SEQ ID NO: 465106 - DNA, 927 bp, Shigella boydii
atgccaaactggtgctcaaatcgtatgtatttttctggtgaaccggcacagatcgctgagattaaacgactggccagcggtgcagttacaccgctttatcgccgcgccacaaatgaaggtattcagctgtttctggccggaagtgccggacttctgcagatcactgaaaatatccgctctgagcagtgccccggagtgacggctgccggacgtggtgctgtatcaccggaaaatatcgcgttcacccgctggctgacacacctgcagaacggtgtactgctggatgagcaaaactgcctgatgctgcatgaactctggctgcagagcggtactggacagcgtcgctgggaagagttaccggatgatgtcagggaaactatcactgtgcatttcaccgcaaaaagaggtgactggtgtgacatctggggtaacgaggatgtatcggtgtggtggaaccgtctgtgtgacaacgtactgccggaaaaaaccatgccgtttgacctgctgacggttttgccgacccgcctggatattgaagtgaatggctttaacggcggtgttctgaacggtgttccttctgcatatcactggtatacagaacggtatggcgtgaagtggccttgtgggtatgacctgaatatcagcagtcagggggaaaacttcattcaggtagatttcgacacgccgtggtgtcagccggaaagcgacgttgttgcagaattaagccgccgtttcggctgcacgctggagcactggtacgccgaacagggctgcaatttctgtggctggcagttgtatgagcgcggagagctcgttgatgtgctgtggggggaactggaatggtcttccccgacagatgatgatgagctgccggaagtcaccggacctgcgtggataatcgacaatgtggcgcattatggcggatga

SEQ ID NO: 465107 - DNA, 684 bp, Shigella boydii; identical to SEQ ID NO: 24309

SEQ ID NO: 465108 - DNA, 222 bp, Shigella boydii
atgaactatgccggacacgaaaaacttcgcgccgaagtggcggaggtggccaatgccatgtgtgaccttcgggccaggctgaacgatatggagcatcgctgtcgctttgattccgatgtgcttgttgaacgcctgacacgtcagacgctgtatcgcgccaatcgcctgttcatggaggcgtataccgaaattctggaactggattcctgcttcaaagattga

SEQ ID NO: 465109 - DNA, 435 bp, Shigella boydii; identical to SEQ ID NO: 24300

SEQ ID NO: 465110 - DNA, 771 bp, Shigella boydii
atgaatgaaacgctgaatgcactgatttatcgccacgccagcaacctgttgctggcgcagggctggccggaagaaacggatgttgaccagcgtaacccgaagtatccgggctggatcagcatttacgtgcggctggatacgccccggctggcgacgttacttatcaaccgtcacggcggcgtactgccgccgctcctggcctctgccattcagaaactgaccggaaccggggcggaacttgttctgtccggcagtcagtggcagtcgctgccggtacttccggcagacggaacgcaggtgtctttcccgtatgccggagaatggctgaccgaagacgaaatcagggcagttcttgatgcggtgcacgatgcggtacgaagcatctgttaccaggtggcagaagatgcgcggcgtatccgtgcggcgctgaccaccaccggtcagacgttgctgacccgccagacgcgccgctttcgcctggtggtgaaggaaagcgatcacccctgctggctcgatgaagacgacgaaaacctgcccgtggtgctcgatgccatcctgaaccggggcgctcgtttttcgtcggtggaaatgtatctggtcagcgattgtattgagcatatcctgtccagtgggctggcctgcgatgtgctgcgtataccggatgaaccgccccgccgctggtttgaccgtggtgttctgcgggaggtggtccgggaagcccgggccgaaatccgcagcatggcggatgccctggcgaaaatccggaaatga

SEQ ID NO: 465111 - DNA, 426 bp, Shigella boydii
atgcaatatgcgaaacctgtcactctgaatgttgaagagtgcgaccgtctgttttttctgccttacctgtttggccaggattttctgtatgccgaagcgtctgtatacgcgctggcgaaaaaaatgatgccggaatatgaaggcggattctggcacttcatccgcctgccggacggtggcggttacatgatgccggatggcgaccgtttccacatggtgaacggtgcaaactggtttgaccgtaccgtgagtgctgatgccgcaggcatcatccttacctcccttgtgattaaccgccagttgtggctgtaccacgacagcggggatgcagggttgacacacctgtacaggattcgtgatgcgcagttgtggagccacatcgaatttcaccccgaatgcaacgcgatttacgcggcacttgactga

SEQ ID NO: 465112 - DNA, 423 bp, Shigella boydii; identical to SEQ ID NO: 8282

SEQ ID NO: 465113 - DNA, 192 bp, Shigella boydii; identical to SEQ ID NO: 8281

SEQ ID NO: 465114 - DNA, 528 bp, Shigella boydii
atgagtgcacgtggtatcaacaaggtcatcctcgtcgggcgtctgggaaaagatccggaagtccgttacatcccaaacgggggcgcagtggcaaacctgcaggtggccacgtcagaaagctggcgtgacaaacagacgggggaggtgcgggagcagacggaatggcaccgcgtggtgctgttcggcaagctcgcggaagtggcaggtgaatatctgcgcaagggtgcgcaggtctacatcgaaggtcagcttcgcacccgtagctgggaagataacggtatcacccgttacgtcactgaaattcttgttaagaccacgggcaccgtgcagatgctgggacgtgcaccacagcagaacgctcaggcgcaaccgaagcctcagcagaatgggcagccacagagtgctgacgcgacgaaaaaaggtggcgcgaaaacgaaaggccgtggacgtaaggccgcgcagccagagcctcagccgcaaccgccggagggggaggattacgggttttcagacgacatcccgttctga

SEQ ID NO: 465115 - DNA, 234 bp, Shigella boydii; identical to SEQ ID NO: 8278

SEQ ID NO: 465116 - DNA, 1959 bp, Shigella boydii
atgcctgtaacgaagtgtgaaccagaaaccacccgcaaagcaagccgtaaatctgtaaaaacgcaggaaactgcactgtctgccctgctggcgcagacggaggaagtgagcgtgccgctggattcactgattaaatcaccgctgaatgtgcgcacggtgccgtattctgcggagtccgtcagtgaactggctgattccattaagggagtcggcctgctgcagaatctggttgttcatgccctgccaggtgaccgttacggtgtcgccgcaggtggtcgccgactggcagcactcaacatgctggcagagcgtgacatcattcaggctgactggcctgtccgtgtgaaggtcattccgcaggagctggcgactgccgcatcgatgaccgagaacggtcatcgtcgggatatgcaccctgccgaacagattgccggattccgcgcaatggcgcaggaaggcaaaacgccagcacaaatcggtgatttgctgggctattcaccccgccatgtccagcgaatactgaaactggctgaccttgcgcctgtcatcctcgatgcgctggcagaagaccgcatcaccaccgaacactgtcaggcgctggcgctggagaacgacaccgcgcgtcaggtgcaggtgtttgaagccgcctgtcagtcgggatggggcggtaaaccggaagtacagaccattcgtcgtctggtgaccgaaagtgaagtggcggtggcggggaacagtaaattccgcttcgtgggggctgatgccttctcgccagacgaactgcgcaccgatttgttcagcgatgacggggacggttatgtcgaccgcgtggcgctcgatgctgccctgctggaaaaactccaggctgtcgcagagttccttcgggaagccgagggctggggatggtgcgccggacgcatggagcctgtcggtgaatgccgtgaagatgcccgggcataccgcaacctgccggagccggaagcggtgctgacggaggcggaagacgaacgcctgaacgaactgatggcacgttacgacgcgctggaaaaccagtgtgaggaatctgacctgctggcagcagaaatgaagctgattgactgcatggcgaaggtcagggcgtggacgccggagatgcgtgccggaagtggcgtggtggtgtcctggcgttacggtaatgtgtgtatccagcgtggtgtgcagttgcgcagtgaggatgatgtggctgacgacgctgaccgcacggaacaggtgcaggagaaagcgtcagtggaggaaatcagcctgccgttgctgacgaaaatgtcctcagagcgcacgctggcagtccaggcggaactcatgcagcagccggacaaatctctggcactgctggcatggacgctctgcctgaatgtgtttggcagcggagcgtacagtaaaccagcacaaatcagcctggaatgtaaacattattcgctgaccagcgatgcgccgtcagggaaggaaggtgccgcattcctggcgctgatggcagaaaaagcacgtttggtcgccctgctgccggagggatggtcacgggacatgacgacgttcctgtcactcagccaggaggtgctgttatccctgctcagtttctgtaccgcgtgcagtcttaacggtgtccagacccgcgagtgtggtcacacgtcacgcagtccgcttgactcgctggaaagcgccatcggctttcacatgcgtgactggtggcagccgacaaaagcaaacttcttcggacacctgaaaaagccgcagattatcgcagccctgaatgaggcagggctgtccggtgccgcacgggacgcggagaagatgaagaaaggcgatgcggctgaacatgcagagttccatatgaaagacaaccgctgggtgcctggctggatgtgttcaccacgtccacagacggatgccactgaacgcgccgataacctggctgatgccgcctga

SEQ ID NO: 465117 - DNA, 438 bp, Shigella boydii
atgatgaataccgaactgacactgaatgccctgcagtccatgaatgcccaggaatatgaagaaatccgtgctgcgggaagcgatatgcgccgtaatctcactcacgaggtgatgcgtgaagtggacgcaccggctaactggatgatgaacggagagtatggcagcgagttcgggggctttttccccgtccaggttcgtttcacgccagcccacgaacgtttccacctggcattatgttcgccgggagacgtctctcagctctggatgctggttctggtgaatggtggtggacagcctttcgccgtcgttcaggtgcaacatatcttcacgcctgtcgcgatcagtcacacgctggcgcttgccgcgacactggatgcgcagggatatagtgttaacgacatcatccatatcctgatggcagaaggaggtcaggcatga

SEQ ID NO: 465118 - DNA, 720 bp, Shigella boydii
atgagcgcacgttcacgggcactgatccccctcagcgcagaacaacaggccgccatgcaggcggtggctgtcacagaacaacgtcgtcgtcagggacgcacactttcagcatggccttatgccaccgctttctttcgctgcctgaatggcagtcgccggatttcgctgaccgatctccgcttttttgcccctgcgctgacgaaggaggaatttcatggcaaccgtctcctgtggctggctgccgtggataaactgattgaaagttttggggaagtctgtgttcttcccctgccatccgatgcggggcaccgtctgttcccgtccgtgccttttcgtgaaggtgagcgtcgtcgtcagaaaaccacgctgacagagcagaaatacagccgccagcgggaacgtgaggcagaacgacgggaactggaataccagacatgttttgctcaggcgcagattgaccttgcgtttcatactcccgccacggtcggaagctggttgtcccgctggtctggtgttgttgaggagcatgatctggaaacgattttctgggggtggtgcgggcgttttccatcactgtcatcatttgaccggtttttctggcaggaggaatcactctggcggctgatttttgaagccggtgaggccggtcgtggtgccccggtacaggtacgtgcacttgagcagtggatgatcccgaacaagctggagaacgtaatatga

SEQ ID NO: 465119 - DNA, 597 bp, Shigella boydii; identical to SEQ ID NO: 8274

SEQ ID NO: 465120 - DNA, 501 bp, Shigella boydii
atgtctgttgttgcacctgctgtatacgttggaacctggcacaaatacaactgtggaagcatcgccggacgctggtttgacctgaccacgtttgatgatgagcgcgactttttcgccgcctgccgtgcccttcaccaggatgaagccgatcctgaactgatgtttcaggattatgagggattcccggggaatatggcctctgaatgccatatcaactgggactgggttgaaggcttccgccaggcacgggatgaaggctgcgaagaggcttatcgtctctgggtggaggataccggtgagacggattttgacaccttccgcgatgcctggtggggcgaggctgacagtgaggaggcttttgcggttgagttcgccagtgataccggcctgctggctgacgtgccggagacggtggcgctctattttgactatgaggcgtatgcgcgggatttattcctggactccttcacctttattgacggtcatgtgttccgtcggtga

SEQ ID NO: 465121 - DNA, 462 bp, Shigella boydii
atgggcgaaagccccttctgccgtccacttcttcggggtttctccccgcagtggacctttccgatggggcagcgacagccacggcacggggcagttgtccgggggcagacgcaaaagtttttgacgcttgcggcaaaaagttttgtggctggtacatctctcccctggacggctgaaacgtgttgtggccgcttcagcccccggaaagtccacagcggggaaacaggccgcagggggggcggcggaagggcagacaactgcgccatcaggcgcagtttccttacacaccgtcaggtgtgcagggagcgcaggtcacggcgcgacagaggcggcgcgaccggaacggtcgctgcaagcctggtttttcagacatcggaccgtagcggcagcccgaaaccgcgccagcgggttcggcggagactggcgggtgcgccagcagctgcctgtcggagtcgggcctga

SEQ ID NO: 465122 - DNA, 1086 bp, Shigella boydii
atgacattactcgcttcgctgcgcgactggcttaaggagcaacaactggatgcagtgcttctctcctcacggcagaacaaacagccgcatctggggatctccaccggatcaggctatgtggttattagccgtgaaagtgcgcacattctggtagattcgagctatttcgttgaggtggaagcccgtgcgcaaggctaccagctgcatttgcttgacgcgacgaacacgcttaccactatcgtcaatcaaatcattgccgatgagcagttgcaaacgctcggttttgaaggccagcaggtgagttgggaaaccgcgcaccgctggaagtctgaactcaatgcgaaactggttagcgccacgccggatgtgctgcggcaaatcaaaacgccagaggaggtggagataatccgcctcgcctgtgggattgccgatcgcggagcggagcatattcgccgctttattcaggcggggatgagcgagcgcgagatagccgctgaactggagtggtttatgcgccagcagggcgcagaaaaagcctcttttgacaccattgtcgccagcggctggcgcggggtgctgccgcacggcaaagccagcgacaagattgttgcagcgggcgagtttgtcactctcgattttggtgcgctgtatcagggctactgctctgatatgacgcgcaccttgctggtgaatggcgaaggggtgagcgccgaatctcacccgctgtttgacgtctatcagattgtcctgcaggcacagctcgcggcaatctctgcaattcgccccggcgtgcgctgccagcagattgacgacgccgcgcgccgggtcattaccgaggctggatttggcgactatttcggtcataacactggtcacgctatcggcattgaagtccatgaagatccgcgtttttcaccgcgggacaccacgacgctacagccaggcatgttgctgaccgtggagccggggatttatttgccagggcaagggggcgtgcgcatcgaagatgttgtgctggttaccccgcaaggcgcagaagtgctctacgccatgccgaaaacagtgttgctcacgggagaggcataa

SEQ ID NO: 465123 - DNA, 252 bp, Shigella boydii
atggtacatgaccgcatagcggaggaactggaggcgaaaggcttttaccggagggcggcggcgcgatggggtgaagtcatgcagctggtggagacagacaaggaacggcatcacatcacgatgcgacggctggaatgttcaaggaaggcacagagggcaccggagccgccggataatttcggagacctgaaaaaggcagtcgatcgcacttatgccgaaatgggtatagatggtgctagactggccccctga

SEQ ID NO: 465124 - DNA, 528 bp, Shigella boydii
atgatatttaaccgtaataaaaaacgagatgaacaacataattctgctgttgttttgccatcaactgaaaacgtattctctgattttattaagaataatccagctttgataaccaatgcttttacagctattggggaggttgattgttttactaaagtacccttactctcaaataaggaatcagagtttttaggcattctttcacgtaatattatacctgattattccgtttttcccaaaatacggctcattgaatttgttcgtcctcatggtagcgaggaagctgtaaaagatttaatccgtgaagtgcagaatataacctgtgattttgtcctgaaatcatatgatgaaacagtcctggctgttatccagtttggtgaaaccgcaaccgtcagacagcaaaagaaaaaactgattatccagcgtgtgtgtgctatgacaggaatttcttttttcgaatttaaaaacactgtcgatatgatgggaagcgaagacttttgtcagttcctgcgggatgatgaggagtaa

SEQ ID NO: 465125 - DNA, 852 bp, Shigella boydii
atgagccttatcgatttaagtttatcaggattatcagaaccaggaacaaaacttattgaaaaaataagtgatgctattggtgtgctttatgaacctacaagaatcaggaaaaaagcgaaggctgaagctgaagctaaacgcacagagctaatttctaggttagagcttgagggaatagaaaaacggacagttgagcgttttctcaaacgtgaaacgaaacgacaggaaaacattgaaaatataacaatgcaagcagcacaaagtctatctgagagtgataatgtttctgatattgacgaagattggatagaggctttcttcagggagtgtgaggatattagtgacgaacaaatgcaaatgctttggggaagaattttatccgaagaagcaaagtcaaaaggttcgtttagtcgtagaaccttaaaactattatccactataagcaaagaagaagcgaaccttattacttattttggaaagtttgtttggcaggcaaacaaactcactccaattttatttaccgatgagaatggagatactgaaggtataactttcgataaactttcggttttagactccttaggcgttattcaacaaggcattggttatagtttaacctttaaaagtaaaaacggtcgtatcgattattacggaacggttttttcagttgagtttcaaagcgatgattcatcaacctggaaactaccaataggaacggctttacttacgcctatcggtcaagaattgatgaaaatatgcggttccactccagatattgcgtatttaaataaattcctcaacaaaataaatgttgaaggaagccaggtaaaactatcaattattaatatgtaa

SEQ ID NO: 465126 - DNA, 270 bp, Shigella boydii
atggcaaagctggaactaccagaactagaacaaaaccaggaagtgaacgccacaaaatttgttcaggacgcaggaaaacgccccacagagaacaaaacaaaactggcttcattccgcataccgaatgaattgcttgaattcattgataacgaatcaaaaagactgcatcgtcccaagacaaaaataatcaaagcagcattactggcttatcaggatctggacgaaaacgaactcattaatttgtggttccgagctgacagaaatgattaa

SEQ ID NO: 465127 - DNA, 648 bp, Shigella boydii
atgattatcgtaatcggtggtgataaaggcggtacaggtaaatcacatctggcaaccaacttaactgtttgcctctcacaacagggaaagagaacagggcttgttgaaacagacctgaatggctcgaccaaaaaatggaataaacgcagagaacaggccggattaccgcccgtcgcattaaatgaagcctatggcgacatcagtgccaaaataacaaaaatggcggatgtagcagaaatcctcattatagatactgccggatatgacagcacggagttcagaactgcactaaaagttgcagacattgtgattgtcccgatcgacccgcttgcccaggtggaagcagacagtcttcagactgtgacaaaaattgtcagggatgcgcaaaaaataaatcccaggctggctgcacatgtgctcctgtataaatgccagccaaatacgttcagtgaacaacaagaattaagagactctctcaacagccatgattactggcttaaaccaatgaaaagcacggtttcttttctccgggcctttgtaagagcaatgaatcagggaatgggggttcacgagttaaaaagtaatgttagcggtgccagccaggcaaaagcacaaatcgaactcttgctgaaagaactggaactgtaa

SEQ ID NO: 465128 - DNA, 180 bp, Shigella boydii
atggattttatgagcattttggggcgctgtttacttcttcctttccctgttgcgatgtttgtcggttgcctgtttcctggcatcgatgatcgcttatccggaatgcttatgagtgttgctgtgggatgtttatcgtggtatgtcaccagaccgaagaaccgacagacaaaggccgcgtaa

SEQ ID NO: 465129 - DNA, 465 bp, Shigella boydii
atgagcgaactgactaaagaagatgaatacggcattatcagccgtactatgatgaatattcgttcattgcgtgtttttgcccgtgagattgattttgagcagttgctcgaaatgcaggaaaagctcaacgttgttattgaagaacgtcgtgaagatgctgaacgtgaagcggctgaacgccaggaacttgaagccaaacgtcagcaggccattgaatacatcatatctttaggtcttgatcccgaatcactccttgctcctgtaacagcagatacagtaaaaaccaggcggaaagccaaaggcggagtaagaaaggctaaataccgctttaaggatgaaaatggcgagatcagagaatggtctggtaatggcaagcgtccgcttgctttacagaagctgcttgatgaggggcatttcatggaagatttcctcattgagaaaactaagccggaacaggcagaataa

SEQ ID NO: 465130 - DNA, 2154 bp, Shigella boydii
atgagactttttatcgcagaaaaacccgcagtagcaaatgatattgttaaggcacttggtggcaattttacccgccatgatggctggtttgaaagtgataacgccattgtgactaactgttttggtcatattatcgaatcacaaccgccggaaaactataatcctgaatacaaagcctggaaggttgaaacgcttcctttacgtctttatcccgtgaagtatcagcctgttgaaagtgcagcaaaacaggttaaaacgattctcgaacttatcagacgtggagacgtgactgaaattgttcacgctggcgatcctgatgatgagggacagctacttgttgatgaagtcctggaatatgcaggaaacacaaaacccgtaaagcgcgttctgattaacgacaacacgcttccggcagtgaaaaaggcactggcaaatcttaaagataatcgtgatttcaaagggctttaccttaaggcgctggcgcgttcagttgccgatgccgtctatggcttctccatgacgcgtgcttacaccattcctgcaaaagccagaggatatcagggcgttctgtctgtcgggcgcgtccagactcccgttcttggcctgattgtgaatcgtacccgtgctaaccagaaccataaatccagtttttactacaccatgaccggagtctttcagcgtggtgctgatgttatcagggcgaactggaagccaggggaatttgctccgctgacagaccgtaaattacttgataaagcgtgggcagacggaacggctgcatcccttgcaggaaaaccggctacagttgaagcagcagcaactgatgataaaaaaacggctgcgccgttgccgtttaatctggtcagactccagcaatacatgaacaagaagtttaaaatgacggcacaaaaaacgctggatattacgcaacaactacgcgaaaaatataaagcaattacgtataaccgctctgactgctcatatctttcagatgaacaattcagcgaagcgccgcaggttatcgatgccctgaaatcagtctttcctcagtcgctggatattgattctgcacgtaaaagcaaagcgtttaacagtgcaaaggtgactgcgcatactgcgataatcccgaccgccagtgtgcctgatgttaacgcactcagcaccgacgagcgcaatgtttacctggcgatcgtacaacactatcttgttcagttcatgcctgaaaaagcataccaggaagtatcggttgccattcagtgtggtgatgagtcgttctatgcccgtgccagaaaaacaactgacagcggatttgaggcgtttcttggcgcggaaaccacagacgaaggtgaatcagaagataatgatgattccgcttttgaactgctctgtaaaattcgcacaggagaaacactgacgacaaaagaagttattgttaatgagaagaaaacaacaccgccgccgttattcaccgaagcctccttgcttgctgcgcttgttcgtgtcgcggattttgtcactgatccaacaattaaaaaattgttgaaggataaggataaagacaaaaaagatgaacatggtggcattggtacgccagctacccgcgcagccattctggaaacgctgaagaaaagaaactatatcacgctggaaaaagggaaacttattcctactgataccggatatgcgcttattgatgccctgcctggtatagcggttaatcctgatatgacagcattatggtctgaaaagcaggctgccatagaaaatggcgacctgacggttgaacagtttattaatgatctgtacggtgaactgacaggcatgatttctgatgttgacctgggcgagatgaagattgaacccgctgcgccagcagggcagtttcaacgcctggactctccctgcccttcctgtggtaaacatattgttatcaggccgaaaggttatttctgtaccggatgtgaatttaaaatctggagtgagttttctggtaagaaaatcacccaggcacaggccgaaaaactggttaaatcagggaaaaccgatttgattaagggatttaaaaagaaaagtggtggaacgtatgatacagttcttgtccttgaggataagaaaacagggaagctgggttttccggcaagggctaagaagtga

SEQ ID NO: 465131 - DNA, 573 bp, Shigella boydii
atgcaatatgcattgtttgatggatttgaacgaaagtttttgctggatgctcttgaattcggtgttctgaaggactggaaagaaaatccggtaaaagaacttcctgatattgatgaatctgctcatcccttccatatctgttatggtggatatttattaaacccttgtgtttcagattcagatattagcagaaaaataaaagaccaggcaggattctggctggcagctattgatgatacccgcatggattgtcattcaatagcttattatgatattcacacactccctctgatttcgtgtggtcatcaaaagatagttccttttgccgcgttaataaaagctgatgaatgcatcatttcaaaaattgcttcgtattctggttttgctgtaacagcctttttgagaattaaagagtgggatattgcaactaatatacttaaccgcgagggaatttttgcctttaatggctgtgagcgcagattcagagtagtaagtaaagataactggcaacatacagtatcggaagaacgcgctattcgttgtgccaaaagattaattcaatgtaaaggataa

SEQ ID NO: 465132 - DNA, 330 bp, Shigella boydii; identical to SEQ ID NO: 400958

SEQ ID NO: 465133 - DNA, 753 bp, Shigella boydii; identical to SEQ ID NO: 400959

SEQ ID NO: 465134 - DNA, 249 bp, Shigella boydii; identical to SEQ ID NO: 41214

SEQ ID NO: 465135 - DNA, 327 bp, Shigella boydii; identical to SEQ ID NO: 400961

SEQ ID NO: 465136 - DNA, 489 bp, Shigella boydii
atgaaattgacaaaatacgttttcttttttgtcaccattttttccggtgcgttgtgtgcggctgaaatccaggggaaagttattcgcgttctcgatggcgacaccatagaagttaaaacactacccgcaaaaattgttgtgtatgaagttccgattcgagtccgattgataaatatcgatgcccctgaaaagaaacaaccttttggacgctggtcaacaaatcaacttaaaaccctgctcgcaggccaatccgttaccgtctcttatacgcaaacagaccgctacggacgcattatcggtcgtgtgttcacgacgaacggcacagatgccagccgctttatggttcagtctggtgctgcatgggtatatgaacgttacaacgcggatgagtcattaccggctctgcaacgggaagcgcaggaacaaaaacgaggtttatgggctgacagtaatccggtttcaccgtgggaatggcgacataaaaattaa

SEQ ID NO: 465137 - DNA, 318 bp, Shigella boydii; identical to SEQ ID NO: 400962

SEQ ID NO: 465138 - DNA, 258 bp, Shigella boydii; identical to SEQ ID NO: 400963

SEQ ID NO: 465139 - DNA, 306 bp, Shigella boydii
atgactggaaaaaatagagtggttttacctgtctttctggcgttaggattaatatcaacaaatgctaatgcatctgacccttgcgcttcggtactttgcttatatggaaaagcagtcgggcaaggtggagggagtgagtgcagaagtgctgaaaaggatttttttaatattctgaaaaagaaaaaaggaagcattcgctggagtaaaacttttgatgcccgtaaagcatttctgaatcagtgttcaacggctgatccggctgctatctcaaaaattatgagtaagttcggtaagattaaggggtag

SEQ ID NO: 465140 - DNA, 420 bp, Shigella boydii
atgaagaagttagtgtttttattgatttctatccttgctggttgttcatcaccgccagagccaacacccgcgcagtttgaaaaggcgaatgaagtgatcaatccctcattgccgtatgtccccgattttcacggcgtcataaagtcagaagttagcggtaaaggatgggtttatgagatcacttccttatccggagtacaggccagaacgccgacgttttattacgctctggctcatgcggacaggattgtagtgacaacacatgatgctgggctgtggtttcaaatcagagatctgttgaagatggaaggggcaacagcagtcgtggaatggcgaaacgagaaaagttttttacctgaacagggaaaaatagttttcattaaagcacaaaacgaggtgaaaaatgactggaaaaaatag

SEQ ID NO: 465141 - DNA, 1863 bp, Shigella boydii
gtgaaaacttttaataagtcgcaatctgtttttatattcgctgttatgcttgttgcggcatggtttgcaggttcatttattttctttgtgctttacttcagccagataaagaatctgaaaccattgaaggctgtgttcagatccattgatgcgtacaggatggatatttttacagacagccttactttatctgttgtgactacggatatcagagttttagcctttgttgcacttggagcaggatttgtcgtgtctcttatcatccctgttgcggcgttgataaaactgaacgagaagaaagaaaatattttcggtgatgcgcgatttgcgacaattaatgatattcgtgagtctaacagtttcacgcttgacggtgacgaaaaagacgggattatcgttggtataaaagacaagaaaatcatacgctatgtgggagccgcattcagtgcgatgggagccggaacaagggctggtaaaggtgctggtatagtcatcactaatcttatgaagtactggtggagtgttattattctcgatccaaaaagggagtgctttaatatcaccagtcttatcaggaaggtgattttaggtcatgaggtttataaatttgatccctttagtccggtaacgcaccgttttaaccctttgtattatgtcagtatgggaacgagtgaaggttttaatcagcttgaaaatctagcgttgattatttacccctataagacagatggtgcggatgctggtagctatcttaataagacggcgggtggtgtttttaaatcttatgctgtcgctttatggtttatgattaagaatgatagggctggactaaaaacgcttgatattgagcctgtcttctcaatgtctaaaattaatcagctttttgagcgtgcagaacccgaacatcttctttcattcatgaatgatattcgttcagaattaagggggaaagacaaaacgcttgctgatattggtgtcgctggccttaaggcattcattgagatggaggataaaacaaaagcacaactcaaaagcaattttcttaatggattatcaccgtttgctaaccccaatgtggcaaatgctactgatggaaatgattttgatttgcggcaggtgcggaaaaagcggatgacaatttatttctgtatttctggtgataatgccaggttggctgaaaaaataacaaatattttctttcagcttgctatacaggtgaatcttgaaaagatgccaacggatgatccggaaataaagcatgactgcctttttctactggatgaattcccgtcaattggtgctgtagattacatcaagagtaaatctggtctcattgctggttacaagctgaaattgttgattgtttaccaggtcggctctcagcttgaggaaatctacagttatgcaggcagtaaaacattactggcaagtgcaccctgcaaaattgtttattccgcttctgatgttaaagatgcgcgggagttatcagaagcgatggggacacgaacagtaactatcggttcgaaaagcaaaagtcgtagtcgtggaggaacatcgagatctgaatcagaaagccttattgagcgtccattggtaacaacaaatgaactacttacactgaaatttagtgaagaaatcctggcaatgaagggagaaaacccgattcgttgtgaaaaggcattttactatctcaatgagtatttctttggtgactttgtgaaggttgctccggaacttgcaaacattttccccaggaagaaaggaaagctggttatgcctccacagaaagtatttgaaaatgaaatcgtcgcaaaagggtatctggtagtaaaagatgttcctgatctcgataaagcggcataa

SEQ ID NO: 465142 - DNA, 1029 bp, Shigella boydii
atgagtggcgttattcctgtcagcattagcaataaatcgctcgatttttataaaaatcaagtattccagtcttttcttgatattgaagggctaacagaaattgctgtcaaccgtcctggtgaaatctggacggaaattaatggtgactggatattccataataatgacagtgtgacctttgatttttgtaaacgtttttctcagacgctggcatcatttcggggagatgaaatcggcgataccaagccattactttcagcaacactggaatcaggagaacgtgtacaggtcgtttttcctcctgcatgtgagagaaatactatttcaatcactatacgtaaaccatcgacacggcagataacgcataaagaatatgtggcgaacggtttttatgattatgtccagtcaggaaagaaacacaggacatatgatgatgagcttcttgatttattcagagcgagaaatatcgctgcttttatggagcttgccgtagcagcagggaaaaccattgtatttgccggagcaacgggttctggtaaaacaacctatatgaagagtcttatcgatttcataccattgaatacgcggctgattacgattgaagatgcagaggaaatcaaattttttattcataaaaattatgtgcatcttttttacccttcggaatccggcagtgattctggctctatcataacagcagcgaaattaatcaaatcctgtttgagaatgaaacctgacagaattttactggcggaaattaaaggtggcgatgcctgggattttgtgaaagttgctggttctggtcacagtggaagcatgacgtccattcatgcggcctcggcaaaagatgccatcattcagatggtgacaaaatgttatcagaacagagaatgtcagaatcttccttttgatgttcttcgtaaaatcattatggacagtattgatattgttgttcatgtaggcagggatggtgttgtcaggcatatgagcgacatctattacaaaggggctgaatgtgaaaacttttaa

SEQ ID NO: 465143 - DNA, 1110 bp, Shigella boydii
atgactgatatgaaaaaaacagatgatttagttgatgatgcgaatcagtcaaagctggaaagtaaacccgttcatgatatcggtgatatcaggaacaaaaataatcgtatgcgttctggctttctgtttggtctgatggctgtattagttattggtatttttgcgctgaaaacatataaaaattattttgcagatgaccagcagaaagcatcagaatcaacaggcgataccagcatttctcaggtaagtaaaatccgtactggtcttggtcagaattttgaccctgttgagaacaaagcaattatcaatccaggcgctactggttctggtaatactgtttctgacggtcataaagaagtgccacaggaggggttcaggaaatatttgtcaatacctgttgctggtcagggagggagtcagactggcgcgagtggcagcagcaggacatcagagccacaggaagaaaggaaagaatcaaaagaaaatgtgcctggtaaatcaggaatgaaagtgactgcgattaatctcgatcctgatctctatattgaggaaaacaggcttataccgtgtgctttaaccacacgctttgtttctgatgttgcaggtcgtatcagttgtgtttttacagaagatgtatggagtgctaatcaccacacaaaattactggaacagggaactaaggcttttggtcgttaccagaccggaacgctgaatcatggacagggcagaatgtttgttatgtgggagcagttgcggacgcctgataataaacgaatcgatatggtaaatacagcagcggctggtcccctgggagaagcgggcattgatggatggatcgattctcacttctgggagcgttttggtggttctcttatgctcagtatggttcaggatgtagcggctgcggcggcggataatgcacctggtaaagatcgtaatgtggattataccgaaaactcacgacaggcaatggctgaaatggctaaagtcgcacttgagaattcgataaatattcctccaacaatgtataaaaaccagggtgacataatcactattatggtcggggaagacattgatttttctgatatctatgagttaaaggtaaaatag

SEQ ID NO: 465144 - DNA, 906 bp, Shigella boydii
atgaagaaattatttattgctacatgtttattgcttcctgggcttgtgtattcagcagcgactccgttaccttctggatttgatgcaaggatgcagactgtgagttataacggtgcgaatacgaccgttatccggtcaaagacaggatttctcacatcagttgtttttgatgaaggtgaggctgttatcagtgcaaaggctggttttcctgccggatgggaaatcacaactgatgataatgttgtttacatcaatccgcgtcccgttgttcaggaacaggaaggcgatgaaggcgaaaaactgaaaaaggttttccagccaacagaaaaggaatgggatacgaatctttttgtcagaacaacaaagcggatttacagtctggatctaatccttctgtcagaagaaaaacaagcgcaacctgcttatgttgtacaattccgctatccatcagaaatagcgaaaaagaatgcagaagaagtaaggctggcaaaagaaaaacaggaaaaactcagacagaagaaactgatttctgaaagttttgaaaaagccgatgcgcctaaaaactggaattatttcatgcgagtcaatgaaaaatatgacagtcgtcgtatcgcccctgattttgcttatgataatggcatatttacctttttaggttttaactcagggaaagtattcccagctccatttgctgtaagagatggtcaggaacagacacttgcttttaatgtggaaacaaaaggcaagtataaaattatggttatccacaacgttaatgataaatttgttttacgctatggaaacagcgttgttggtgttgtgaataaatctttcggaaaagtattaaccgaccagaggaatacatcttctcctgcggtagaacgtgttgaggtgaataatgactga

SEQ ID NO: 465145 - DNA, 687 bp, Shigella boydii
atgagtgaaaaaatcgaaaagaagattgagacagctaaatccttcgaaagacaactctatgcagaaaatgaacggtctaagaaaaatgcatggcgtgttgcagtggcagcatcattactgtccttatgtcttggggctgcaatttgtgttcttgtgccattaaaagaaaaagagcttgctattgtggctgttggcgaaaaaacaggccgtacagaactgattactcaggttaaacaggaaaagatcctgcaatctgaagcactagggcggtattttgtaaacacgtatattaccttacgtgaaggttataattatccgtctcttcagtatgattatgagactgtacagctatatagctcgaatacagtaaaggacgattatcttcgtctgtataacagcgatatggctcctgataaaatttatcataataatggttcttacgttgcggttgaggtcatctccaatattatttctgacgcaaccgcgccagataaactggcctctgtgcgctttaaaaaaacgacgagaaacttcacgaccggacaggtttcagtttcatactggacggctcgtgtgacatatcgttttgaaccagaaaagtcggttaaaagttccagtcgtgagcttaatcctctcggttttactgtaaccagttaccagacagatcgggaagccaggggggaatga

SEQ ID NO: 465146 - DNA, 204 bp, Shigella boydii; identical to SEQ ID NO: 80389

SEQ ID NO: 465147 - DNA, 180 bp, Shigella boydii
atgaatataatgaaacgttttttttatgtgatgtctctgaactggatactgacgtttgttgataaacatatcacctccggatggagcaggaagagaaagctaataacccagcttattattttaatcacgggaattaccttatttaaggtcttaggtggaatcagtcagagctggttgtga

SEQ ID NO: 465148 - DNA, 1095 bp, Shigella boydii
atggctcaggggtttttcgttaaatataattctaccgttatggattcggtagataaaatcagctccagttatcaaacacaatttgctaatgatatcatgtcgttagcgacggtatcggttacgttatatgtactatggaaaggatatcaaatacttgccagtaaaactcagacgcccttgcaggatttagtatgggatctatcaaaatttgcaatcataatcatgtttataactaatgcggatgggtatttaactgcggctactgatgcgttgcaaggcatgaaagatggtttttctggaggggtgagtgtctggcaaactttagataacttatggaaaagtacgcaaaatcttggtgcggaaatatactctttagataaatcaacatatgttaaagatcaaggtgtagttggacagtttttaatatggactggctcgcttattttaatggctgttagtgtggttgtttttttaacagcagatgtaacgatgaaactcctgattattacagcaccgatatttatcttttgtctcatgtttggttttattcggagcatgtttaataattggttacaatcgttattctccagtattctgacagttctatttgccagtttagtgattcggatagcaatggattttcaagggatgatcctttcccatgctattcgtgctgcacaaacagggaatgtaaatcttgtatctacaggtgctatgggctttatggctgggtttttgggggctttattggttcttatagctaaaggttttgctgtccagttagcaggtgcaggtgttgaaggtgctgttcagggcgcagccatgatggggctgggtgctgctggtatggctactggtaagtctctgatgcttggcggtcgtgctggtttaggttttggcttagggatggccggaagaacgggcatgaattctttatcagggaaagcagggaatctgatggggcgtggtgcgcgaacagccgctgaatgggcgggtgaaaagggatatcaggcgctggctccgacaggtgctttggggatgaaggcgagaagacttgcatccctggaaaaagcacgagcgaggaatgccgcatga

SEQ ID NO: 465149 - DNA, 717 bp, Shigella boydii
atgaaacgtgtaaaaacatttatgctgatatcattattgacggcttcattttatagtagcgcaggaattccggttgctattgatgccagtccggaatgggctgttgaagccgcaagatggacagaacgactcaaacaatggtccgaaactgcgcaacattatcagagtcagattcaggcatataaagaccagttagccacggcaacaggtataaggaatattgcggcattcacaaatgaactaagtaatctacaatcagaactgacaaatatttataagcaggggaacagttatatttctgattttaccagtaatcccgaaggtgcattgagcagccaggctaaaaatctgttcagcaagtatggagccttcgatatgtgtaatacgggctatgaacgtaatgataatctctgtaaagcacggattgtgtcaacggctgccagtattgaacagggaaatgagatcaataagcagttatcaaatgcaatgtctcagattcagagtttaagtagccgaattgaggcttcaaaggatatcaaagaatcccaggatttggctaacgcattacaggcgcagtcgttaaaaatgcaggcgataaaaatgcagtatgatgtctggaataataaaaataaagcagatcatgagatgttgatcacacaagaacaagaggcctttattaaacagcagaaagaagctgaaccattaacttttgattaa

SEQ ID NO: 465150 - DNA, 2748 bp, Shigella boydii
atgtctacactttataaagcgatgacacgccctgctatgtatgtgggtgttcctgtcgtccctcttactgtggttgcaggggcgttatttctggcgggggtttatatcagcaagttgatctggctggctattcctgtcgcagtttttattctcagaatgataactaagcaggacgaccacatttttaatctttactttcttaagctgaaaatgctcggaaactcagtgtgtaatcgtttttttggcgcacgagcgttcctctccggacaatatgaagctgttgaaattgatgagtttgttaatgccatgaaactgaatgagagaatcactactggtaaatatataccctattcaagccatgttgataaaaatattgtcaaaacaaagaacggtgattatgtagcgacatggcaactgatggggattaactttgagtcaatctctgcggagatgttagaaactattgactcacaggttgccactcttgttcgttcattttccggactgcccgtttcattttataaccattcatgcagggcgagtttttatgatgcctttaccacaaaatcaggtaataaatatgctgatataatatcagattgttattatggttcgatgaagaaaaataaattcaaggggaacactctttactttacgctgatctacagaccagacgggcgtgtagaaaaactggaaaaacgcaaaaaaagtattaaagaaaagaaagatgatattcacattcatgtgaagagaatgaatgaaatgattaatacattctctggcgctcttgagaaatttacctgtaaacttcttggtatgtatgaggagaacggaaaggtattttcttctcaactgtcattctataattatcttctgacagggaagttgcaaaaaatcagagtcactgattctccggtgtataacgttcttggtggagtggatgtgttttttaatcatgataccggacagatatgccgcattgatggaaataaattctttcgttctattgaaattaaagatttctgtagtgagactgcatccggtgtttttgatgtgctccagtattctgatgctgactatattattacgcattcatatacatccatgagcaaatcagaagcattgagtaccattaaacgtgcggaaaaacagttaaagagtacagaagatgatgcggttactcaattgcaggaactggaaaaggcaaaaaatgatattgtgtccggtgatatatcctttggttactaccatttcacgctaatggtaatggcggacagtatcagggagcttgacgaatctgtaagtaaaattacggcagactttactgacctgggcattattccggcattgtcaaccatgtcactgccagcggcatattttgcccagcttccggcggtttttcatttaaggccgcgtttatctccggtatcgaatgtaaattttgtcgaactggcatcattccataatttctaccaggggaaacgcgataaaaactgctggacagaagcggttgctattctcaaaacaccaagcaaacaggcgtattatctgaatttacataactcagtactgtttaaagatgaaacaggtgaaaagaatcttgctaatactaaagttataggaacggcgggttcaggtaagacaatgtttctgtcatatcttgcctgttcattacagaaatacaataaccccgaaacttttgctgattctgcaaaaaataagaagttaacatgtgtctttcttgataaggacagaggggctgaattatgtatccgaatgcttggtggggaatattacaccgtaaaaagcggtgagccgacaggatggaatccttttgctctggaggcaacaaaacgtaaccgtatttttgtcaagcaactgatggagattctgtgtaccagaaatggtgaaagattatcgacaagagaaagattgcttattagcgaaagtgttgatgctgtgatggattttcctcctggcgaaatgcgggaatatggcattaccagaatgcttgagcatcttatgcagagagatgctcgggatgagcaggagaacgggattatccttcgtttgtcccaatgggctaatggtcaggctcatggctgggtttttgataatgctaaagacacattcaatattcagcatgtcaataattttggcattgatggcaccgagtttcttgatgatccgatggtatgtgcaccaattactttctatctgctgtatcgcattacgcagcttcttgacggtcggcgtcttgttatcttcctggatgagttctggaaatggctacaggatgaagcattcagcgactttgtctataacaagctgaaaacaattcgtaagctgaacgggctggttattccggcaactcagtctccggatgaaatactgaagaataagatttcacgggctgtggttgaagtatgcagcaccagtatttatctggctaaccctgatgccgattacaatgattatgtggaagggcttaagctgacaccagaagaatttaatattattaaaaatcttgatccaatgtcgagacagttcctgattaaaaaaagcagtcttaaaaagggggatggtaaatcattttcagcacttgcgacactcgatttatcgggacttggtggatatctgaaaatattgtctgccagtgcagataatctggaaatttttgaaagtatttatcatgaaggaatggagcctgatgactgggttcctgaatatctcgaacgggcaatctga

SEQ ID NO: 465151 - DNA, 327 bp, Shigella boydii
atgtcatttaagaaatcagtatgtaatcgtatcagttcatctgtcactgctgtaatgcagcgtaaaaataaggtagttatggcagtcgccggggcaacagttgcatcaccggcctttgcggatggattttcaaaagcggaaacgctgctggaaaaggttaaaacagggcttagtggcctttcactggtgacggtgactattgcctgtctgtgggtcggctacaaggttctgtttggtggaagcacgattcgtgaatgctcacctatcattatcggggcaattgttatcgccagtgcggctgaagttgcatcaatgatggtcaactaa

SEQ ID NO: 465152 - DNA, 621 bp, Shigella boydii
atggcgtctttattcccagccttgttgctgtgtgcggcgtcagttcatccggatacgataaatgatattgcacgggtcgagagtggcttcaatccttatgctgtggctgaaattattcctgaaagggaacgcggtagctatggcaaaagtgttatcagtcatatgcccaaaagtaaggaggaagctcttacagttatcagagaaattgaaaacagaaaaagacgttattctgtcggattgatgcagattaccaatagtaatttttctttttattccacgtccgcagaaaaactccttgatccgtgtgaaaacttgtctgttttcgaaaaaattatcgtggattgttataaacgagggaggagcctggagaatgcgcttagttgttactatacaggaaattttagtaacggtaagcgaaaagaaaaagaatttaataatacaagttatgttgagcgaattggttatacagggaacgaaaaaaaatatgttgtaccaagtacaagaagcaacgggggagaacagcgaaaaaatcgttcacacaatgcgtcagttatctggcccgaaaccattctgaaatctgcttttgttgataactcacatccaacaaaagttattaattaa

SEQ ID NO: 465153 - DNA, 177 bp, Shigella boydii
atgaaggagaaaccagataagtcatcggaaaaaggggtttatgtcacaataaaactcgatccaaggttgaatgcatttatcgaagagaaaacgaaaacatctttgcttagtaagaggaagcaaattatttacttattaatgcagagtatgcgtattgatggatatatggagcgttag

SEQ ID NO: 465154 - DNA, 216 bp, Shigella boydii; identical to SEQ ID NO: 12971

SEQ ID NO: 465155 - DNA, 294 bp, Shigella boydii
atgactgagcatgatgctatctgcatttctgcacttcatcaaatttttagtgatgaagaacatttgagtgagcaacaaaaagacattattctgatgtacgcttatggctataccctgaatgaaattgctgatttcaaaggactaaagccttcaactgtcagaaaatatcttgattctgtaagagctgaactgggaggtgtctcgttggcagggatcagaacactggtactcattcggactaatgcccttctcgtgtcaagtctttccaggatcagtgagagggggaatttatga

SEQ ID NO: 465156 - DNA, 1230 bp, Shigella boydii
atgggtgtgtatgtagaacaggaataccgtattaaacgcgctaaagggacagggcgtgatccgaaatctcctaagttatcaggaagacatatacatgccagtaaatcggcttttaatcataaagtcagacatggcgcagacaagaaagcatatacctggacgccaacaaaagaagtcacttttaaaatcactggttcagggaaaacagccgcaggtatcaaaaacggtattgattacattacccgtaatggtgaacttgaggcttactgttatgatggaaaaggttcagagcaaacagggaaaggagaagactttaacagggagtttacttcaactttatctaaaggaaatgattactccaggacatatcgtggagaaaacatcgatcatgtgaaaaacatggtcttttcaccaccaccagaagctggagtaagcagggaagacgctctgaaagctacggtagaatttcttaaagagacttatccaaaccatgctttcgttgccgtataccatgatgataaagaagatcatcctcatgtacatgttaatattaaacttcgtgatgaagaaacaggaagaagattaagacttactaaatctgaaaccaggaagttcagaaacggttttcatagaaaactgaaaggtatgggatatgatgttaccgctacctggaaaaaagatcccgaacgtaaacgggagattgagcgattacaggctgaaaatccgaaaagactccggaatgtttacaaggtggtggattttggggagacttcatatcagaataaggcaggggaaaaacgaacacctttcctcacttatgaaactttaaaaggtggaaaacaggttacgatttggggtaaagacctgaaaaatcatttcgagtctgaaaagctccagccaggaacgcttatcaaagtaaaaaaactggctcctacgcttgtacgtagtccgatgtttaatgatgatggaactgttgcaggctacagggaaacgcatcgcaataactggcagattgaaaatattgcccttgagcggaacagagaacgtcaggttcatgagcgtgaaaccaggcagccggaagagagcgacgttaaaaagcagctatccagaaaacatgagcaaggtcacaatatcgggtttgctcttgaacacgggttcacaaaggattcagaagaacataaaaaactaagaatacagcaagagaggaactggaaaggcctgggattttaa

SEQ ID NO: 465157 - DNA, 405 bp, Shigella boydii
atgaaagttcttgatgtaccaacaaagccagtatctattcctgttaagaatgaggctgcaaaaccagtttttacttatctctaccctcatgaaatagaacttgttaaacgtaatgctgcccttcacggcatgagcatgagcagagaaattgctattcgtgtgcgtcagtctttgttaaagaatgaagtctgtctttaccctgatgaagttaaggaacttaaaaaactatcaactgctgtagatcgtgttggtcgcaacattcattttatcataaaaggtgaaagattctgtacggttaacgatcctgatttcagaaaagacgttattgaagtgattgaactgtgtaagcaaattgattcaaaacttgaaacgttaaccaagagtgttgttaaccgatttgggtga

SEQ ID NO: 465158 - DNA, 348 bp, Shigella boydii; identical to SEQ ID NO: 19716

SEQ ID NO: 465159 - DNA, 249 bp, Shigella boydii; identical to SEQ ID NO: 102264

SEQ ID NO: 465160 - DNA, 351 bp, Shigella boydii
atgaaaacgttaaaacaagccgcaatgcagtttgcatctgatctgcgtaataatcgctgttttaaagctgcttataatgatgctctgttagagcttgatcgggaagatttaaacgccattgtacaatgcacatttctttttgagccaaaacgaacattagccgaacttgataaattaattaaaaagatagaagtagaagaagattatgagttttgtgtatcccttgataaaggtaaaggattacacgaagtcagaacatttaaaagtgagcgtgaggcgttggatgcttatcgcattttgactctttacggatacacagtagctatagaaaagaaggagggtaatgactga

SEQ ID NO: 465161 - DNA, 300 bp, Shigella boydii
atgaaatgctcatctgtttttacttcaaccactaatcatgttttcacattcgaacgagtaacgctttgcactattatccttatgcataaggatacgggacaacagtatgttgtcatatttactgataacaataaaattcgtgactataaaaccggaattgttcctcagtttggcgaacttaagcagagtgatgttgatttagtccttttctacagggacggatatgaaaaatattttgattcgttaaaagatggcgatgaatgcttgagttttaaagattttattgagtgcctttgttaa

SEQ ID NO: 465162 - DNA, 228 bp, Shigella boydii
atgaaacccgataatacacctgaaaatgtaaaaaaattacgtttaaaagcaggattaacacaaaaggaatgcagtcatatttatggtgttgggctaagaacatggcagaaaaaagaggaagttaatactcaaaacagtcaaagtctgtcactggttgagtttgagtttcttttgttacttgcaggagaacatcctgaatacgtgctctgcaaaagggagtcaaaataa

SEQ ID NO: 465163 - DNA, 252 bp, Shigella boydii
atgagaaaaaataaaggtgatgtgacttattttcttgaaaaagaaggtgacaattacaggcttacaaaaaggataaaagccagaacaaatgttaaaatcgggaacaaaactacgaaaattacattgtatgatgccgtactgaatgagaatgaattacaacatattgattttacgtgttccggattaagggaagacgatgaggcgcctgttaagaatttaattaaggagtttatgttaaatgaaacccgataa

SEQ ID NO: 465164 - DNA, 543 bp, Shigella boydii; identical to SEQ ID NO: 102259

SEQ ID NO: 465165 - DNA, 516 bp, Shigella boydii; identical to SEQ ID NO: 12409

SEQ ID NO: 465166 - DNA, 147 bp, Shigella boydii; identical to SEQ ID NO: 34127

SEQ ID NO: 465167 - DNA, 126 bp, Shigella boydii; identical to SEQ ID NO: 403771

SEQ ID NO: 465168 - DNA, 873 bp, Shigella boydii
atgagaatgacgacaaataagacttccctttctcgcttaacaaaagtgagacatcgaaatgaattgaattcaacgctgtcaacattgcctatggctgctaaaaaagtcttatttttagccatgtgccagataaactctaaaaatgaattcgatgatgatcacatattttatgtgacagttgccgattacattaaatgggttcaggttaagcctgatgcggcttatcttgctttgagggatggctctaatatattagatacgacgcttcttaagctgaaacatgatgaaatattagaactgagtagtgatttgggatttaagttcactaaaagtaatgtacctgattcaatgaatttgagtctgactgttttttctacttattacaggaatgaaggtagagtggggatcaagtttacaaaagaagcgaaaagatttttatgtaaacttattggtgaagaaaaacgttatacaacgcaagttttattatctgttgttcgactgacaagtgttaatgctgcatcactatatcaactcattcgtaaaatatatagtaataattctcgcgcgaatagttttgaaatgacaatagatgaacttaaagatgaattgaatctttatacaataggggcggggggggggaaggattataagtatccagattatcctgcttttaaaagagatgttcttaataaatcagtaaaagaaatcatgaaacatacggaagtaaagaacttaagtttcgtagtttcagaaaaaattgggagaaaagtttataaattaaagttctcttatacaattggttatgagggcgatactagggaagactcagagtttactaatatgtttgataaaatgtacccacctgaaaattga

SEQ ID NO: 465169 - DNA, 405 bp, Shigella boydii
atgaaggataatatcgtagattttcaaagaatcagggacagcatgaatgatcattcaaccgatgttgcaaatgatgccgtttattctgacaaaaagaaaatatccaggttcttttatctgctgacacctgtcagataccttctggctgcttccctttatctggttgttgttattccattggggattcttgcgggatttcgtttcttgttgcagtttttaggcggtatcgcagtgatgggtttaactatcgcctggtatatgggtgcagatgtcagtagttacgttgttcttgctgcatggatcgccttaactgtttgtggttgcgcagagcagatttttgaatggtggatcgaaagccgttttgcgttccgtctttttggtatcgggagaacgccggaagaatga

SEQ ID NO: 465170 - DNA, 642 bp, Shigella boydii
ttgctggccgctattgcttatcaggaatcgcactgggatgcacaggccacttcaccgacgggtgtgcgcggcatgatgatgttaaccaaaaataccgcgcaaagcctcggcattacggatcgtaccgatgccgaacagagcatcagcggtggcgtgcgttatttgcaggatatgatgagtaaagtgccggaaagtgtgccggagaacgagcggatctggtttgccctcgctgcgtacaatatgggctatgcgcatatgctggatgcccgcgccctgacggcaaaaaccaaagggaatcctgacagttgggctgacgtaaaacagcgtctgcctttacttagccagaaaccctattacagcaagctgacttacggctacgctcgtggacatgaagcctacgcttatgtcgaaaatattcgtaagtatcaaattagcctggtgggttatctgcaagagaaagagaagcaggctacagaagcggcgatgcaactggcgcaggattatccggcggtatcgcctacggagttgggcaaagagaaatttccttttctctcgtttctttcccagtcgtcatcaaactatttgacccattctccctctctgctgttttccaggaaagggagtgaagagaaacaaaattaa

SEQ ID NO: 465171 - DNA, 180 bp, Shigella boydii
atggtggtgggggaaggattactcagcgctgcgcgcttcgcccttcgggtcgttgcctgcggcaacgctctctcgctggcgctcaagtcgaaccttggtcgaagcttctcatccttccccgcttgggcagaatatttaattgcggattcgtttgagagtttacggacttttgaaaagtga

SEQ ID NO: 465172 - DNA, 303 bp, Shigella boydii; identical to SEQ ID NO: 459543

SEQ ID NO: 465173 - DNA, 372 bp, Shigella boydii; identical to SEQ ID NO: 462525

SEQ ID NO: 465174 - DNA, 309 bp, Shigella boydii; identical to SEQ ID NO: 463480

SEQ ID NO: 465175 - DNA, 372 bp, Shigella boydii; identical to SEQ ID NO: 462525

SEQ ID NO: 465176 - DNA, 447 bp, Shigella boydii; identical to SEQ ID NO: 462775

SEQ ID NO: 465177 - DNA, 378 bp, Shigella boydii
gtgaaaacactaataagaaaattctcccgtacggccatcacggtcgtattagtcattctggccttcatcgcaatttttaatgcctgggtctattacaccgaatccccctggacgcgtgacgcgcgctttagcgctgacgtcattgcgatcgcgccggacgtttctggactcattacccaggtgaatgttcatgataaccagctggtgaaaaaaggacagatactgttcaccatcgaccagccgcgctatcaaaaggcgcttgaggaagcgcaagccgatgttgcttattatcaggtactggcacaggagaaacgccaggaggccggacgtcgtaaccgtctcggtgtgcaggcgatgtctcgcgaagagatcgactag

SEQ ID NO: 465178 - DNA, 210 bp, Shigella boydii; identical to SEQ ID NO: 9340

SEQ ID NO: 465179 - DNA, 447 bp, Shigella boydii; identical to SEQ ID NO: 462775

SEQ ID NO: 465180 - DNA, 297 bp, Shigella boydii; identical to SEQ ID NO: 463086

SEQ ID NO: 465181 - DNA, 198 bp, Shigella boydii
atggcgcatttcaatccggacatcgccaaagagaatatccgcgcggtcttctcctggcagatccagcctggcgaccgcgtgcgtccgcaggatgtgggctttgtccccgacctgatagcgtggaaccttagccccgagcgtggtggcgatggcggcaactggaacgaacgtaataccaaacccagccttgccgcctga

SEQ ID NO: 465182 - DNA, 420 bp, Shigella boydii; identical to SEQ ID NO: 463084

SEQ ID NO: 465183 - DNA, 210 bp, Shigella boydii; identical to SEQ ID NO: 9340

SEQ ID NO: 465184 - DNA, 996 bp, Shigella boydii; identical to SEQ ID NO: 462278

SEQ ID NO: 465185 - DNA, 261 bp, Shigella boydii; identical to SEQ ID NO: 461695

SEQ ID NO: 465186 - DNA, 948 bp, Shigella boydii
atggaaaacagtgacgatatccgtttgattgtgaagattgcccaactctattacgaacaggatatgacgcaggcgcaaatcgcgcgcgaactgggtatttaccgcaccaccatcagccgcttgcttaaacgaggccgcgatcagggaattgtcaccatcgccatcaactatgactacaacgaaaatctctggctggagcagcaactgaagcaaaagtttggcctgaaagacgttgtggtggtgtcgggaaatgatgaggatgaagagactcaactggcgatgatggggttacacggcgcgcaactgctggatcgcttgctggagcctggcgatattgtcggtttttcctggggtcgcgcggtgagcgcactggttgaaaacttgccgcaggcggggcaatcgcggcagttaatctgcgtaccaattattggcggaccgtccggtaaactcgaaagccgctatcatgtaaacacattaacctacagcgcggcagcgaagctgaaaggggaatcgcatctcgcggattttccggctctgctggataacccattaattcgtaatgggatcatgcagtctcagcactttaaaaccatctctgcctactgggataatctggatgtcgccctggtgggaattggctcaccggccattcgcgacggcgctaactggcatgcgttttatggtggtgaagagagtgacgacctgaatgcccgccaggttgctggcgatatttgctcgcgcttttttgatattcacggcgcaatggttgaaacgaatatgagcgaaaaaacactctctatcgaaatgaataaattaaagcaggcacgatattccattggcattgccatgagtgaagaaaaatacagcggaattgttggtgcactgcgtggaaaatatattaattgtctggtaacgaatagcagcacagctgaactattactgaaataa

SEQ ID NO: 465187 - DNA, 129 bp, Shigella boydii
atgacacaacaaggggatgctgtagccggggagctggcgacagaaaaagtgggcattaaagggtatctggctttttttctcaccataatctttttttccggtgtttttcagctggtggcgcgtttttga

SEQ ID NO: 465188 - DNA, 1173 bp, Shigella boydii
atgccttcgtcctcgcatcccgtagaacgcttttctttcagcaccgcgcttttcgggatgctggttctgaccctaggtatgggattaggtcgcttcctttatacgcctatgttgcccgtcattatggcggaaggggcgttttcatttagccagctctcgtggattgccagcggcaactatgcggggtatctggctggcagtctgctattttcgtttggcgcatttcaccagccgtcgcgcctacgcccatttctgttggtttctgccctggcgagagggttgttgatcctcgcaatggcatggttgccgccatttattctggtgttattgattcgcttcctggcgggtgtcgccagcgccggtatgctgatttttggttcgacgctgattatgcagcacacgcgccatccttttgtgctggcagctttgttttctggcgttggcattgcactgggcaacgaatatgttctggcaggcctgcattttgccttctcctcgcaaacgttatggcaaggcgccggggcgctttctggcatgatgctgattgcacttacgcttttaatgccctcgaaaaaacacgccatcgcaccaatgccattggcaaaaacagagcaacagataatgagctggtggttactggctattctgtacggccttgcgggatttggttatatcatcgtcgcgacttacctgccgctcatggcgaaagatgcaggctcaccattgttaaccgcccatctctggacgttagtcggcttatcaattgtgccaggctgctttggctggctatgggcagcaaaacgttggggggctttgccttgcctgacggcgaatttgctggtgcaggctatcagtgtgctgcttactctcgccagcgactctcctctcttgcttatcattagtagtatcggttttggcggtacctttatgggcacgacatctctggtgatgactatcgcccgccaactgagcgttccgggaaatctcaatcttttaggctttgtgacgctcatttacggcattggacaaatcctcggcccggcgctgaccagtatgctcggcaatggaacatcggcgcttgccggcgccactctctgcggcgcggcggcgttgtttattgctgcgcttatcagcacagtacaattatttaagctgcaagtggtcacttcatga

SEQ ID NO: 465189 - DNA, 405 bp, Shigella boydii; identical to SEQ ID NO: 144319

SEQ ID NO: 465190 - DNA, 663 bp, Shigella boydii
atgaaaaaattaatcacccttcccttattgatatcaatgaccggtttgttatttgcaaatcagtcactggcgattacgcaatcacagatgcagatgagagcgactgctacatgtgattcttacgcaagtatgtccagaattgccagtccaggcgtggtttatgaagtgtgtctgaatggagctaaagaatcgatgcagggtcgaaactcagcatgcgaaagcaaaatacgacaattcaataaacaggcggatacattgcatggaatggaacgcgctgagtatattgaaatttctcaggcatatcgcatgggttgcaatgttggaaagcaaacacccaagataaatagtgaaaacaagcaagcaatagcgaaacccttatcacaaaaggaaatagaggaaaggcaagaaatacaaaattatagcatggaaattcgtaatgcatttagccaaatcaggagtggcgcacctgacttaacaggacaaaagtgctctattaaagtatggttctctcaaagtggtaatgtgttgtcaataaaagtagagtccggtgataatgatgcatgctcttatgttttaaagagaacccaaaaaatcaagctcagtgcaatgaatgatagccagtacaaagtgtttagaaatacacctattgattttagtttttaa

SEQ ID NO: 465191 - DNA, 948 bp, Shigella boydii
atgccccgctacaaaaaaggtatccgtaataattgctttcatcaaaattatactcatgacgtattgttccccggcgcaacattcagaacccgacataatggagaatgcgccattcttggccgctctgatgataaatcaaggcgaggctattatgtcgtggaattcaaagacagtggcatcatcaaggaagcctatggctcgcatattaaaactggttctgtatcagacgaagcttttccatcatcggaggaagaacgacgaaagttactgatgacaccaaaatattacggcgtcggatatattggtaatggatgtcattcaactattgaaaacacccgaacacaccaaagaacgagagcattcatactctggcataacatgctggcaaggtgctacatgacaaccaaagggaagctgtattttaaaggctacaaaggtgtcactgtatgcgagcgatggcataactttcagaacttctgcaatgaccttccaaaattgcatggctacaacaaatggaaggataatccgggagagtatgagctcgataaggattactcacatcgccggatttattctgctgacacggtggcatttatcagcacagaagaaaatgccaaggaagctggattacgacgcgttgccatgaagattccttccgggcattatcatgaaataaataaaattcgagatgagatattaatggaggctgaagatgaattaaaaaacaatcaaattaattatgaagttgttcttgacgggaatatgaaagtaatcctgtgtgaaactccttatggcacagtgttgttctggcctctcacaaaaaagattcagcgtaattgctacatgattgatggtgatgtacaggtttatgtttattacctgcgctggctcatacttcagtgggaaaacagaaatcccgacataaactgtattgctacaacctgttga

SEQ ID NO: 465192 - DNA, 447 bp, Shigella boydii; identical to SEQ ID NO: 462775

SEQ ID NO: 465193 - DNA, 210 bp, Shigella boydii; identical to SEQ ID NO: 463045

SEQ ID NO: 465194 - DNA, 465 bp, Shigella boydii
atgttgctgattaaatcgcttgagctggtggtgaactttgagctggcgtgggaccctgaagttcatgtacatcgcatcggccgtacagctcgtgcaggaaatagcggtctggcgatcagtttctgtgctccggaagaagcacagcgggccaatatcatttctgacatgttgcagataaaacttaactggcaaacgccgccagctaatagttccattgtgccgctggaagcagaaatggcaacgttgtgtatcgatggcgggaaaaaagccaaaatgcgcccgggtgatgtattaggtgcactgacaggagatatcgggcttgatggcgcagatattggcaaaatcgccgtgcatccggcgcatgtctatgtcgcggtccgtcaggctgttgctcataaagcatggaaacagttacagggcgggaagattaaaggaaaaacgtgccgggtgcggttattaaaataa

SEQ ID NO: 465195 - DNA, 447 bp, Shigella boydii
gtggcgttcattattgatgtgtttgccggatacatcgtggggtggcgggtctcatcgtccatggaaacgacattcgtgctggatgctctggagcaggcgttatgggcccgtcgaccgtccggcacggtccatcacagtgataaaggttctcagtatgtatcgctggcctacacacagcggcttaaggaagccggattactggcatcaacaggaagtacaggcgactcgtatgacaacgcgatggcggagagcatcaatggtctttacaaagcggaggtaatacaccgtaagagctggaaaaaccgtgcagaagtggaactggccacactcacgtgggtggactggtataataatcgacgattgctggaaaggctgggccacatccctccggtagaagcagaaaaagcttattatgcttccatcggaaacgatgatctggcagcctga

SEQ ID NO: 465196 - DNA, 210 bp, Shigella boydii; identical to SEQ ID NO: 463498

SEQ ID NO: 465197 - DNA, 435 bp, Shigella boydii
atgaaacttaacgacagtaacttattccgccagcaggcgttgattaacggggaatggctggacgccaacaatggcgggatcatcgacgtcaccaatccggcgaacggcgacaagctgggtagcgtgccgaaaatgggcgctgatgaaacccgcgccgctatcgacgccgccaaccgcgccctgcccgccaggcgtgcgctcaccgccaaagaacgcgccaacattctgcgcaactggttcaatttgatgatggagcatcaggacgatttagcgcgcctgatgaccctcgaacagggcaaaccactggccgaagcgaaaggcgaaatcagctacgctgcctcttttattgagtggtttgccgaagaaggcaaacgtatttatggcgataccattcccggtcatcaggccgataagcgcctgattgttatcaagtag

SEQ ID NO: 465198 - DNA, 207 bp, Shigella boydii; identical to SEQ ID NO: 462460

SEQ ID NO: 465199 - DNA, 1239 bp, Shigella boydii
atgacatttatcggcccttccccctctgttcaggacaaatcagccagcactgataataccaacatcaacggcgaagacatgactgagattgaggagagcatgcttctacctgtctccggtcaggaactgcccattcgttggcttgctcaacacggcagcgaaaaaccagtaacgcacgtttcacgcgacgaactccaggcattacacattgcacgggctgaagaactaccggctgttactgccctggctatttcgcataaaaccagtctgctcgactcgctggagattcgcgacctccacaaactggttcgtgacactgacaaagttttccctaatcctggtaattcagacctgggactaataactgcttttttcgaagcatacttggacgctgactacactgatcggggcctgctgacaaaagagtggatgaaaggaaatcgtgtttcacgcatcacccgcacggcttccggtgctaatgctggtggtgggaacaaaaccgatcgcaatccgaatttagtacacaccctcgacacactggatgtggagattgcagcagccacacttccgatggattttaatatttatgaaattccgggcagcgtttatcgtcgcgcaaaagaagtagtcctgaaaaaagaaagtccgttcaaagaatggtccgcagcacttcgtgcacccccgggtattctggactattcccgcgccgctatttttgcacttatccgaagcgcacaccctgaattttatcactacccgggacgccttcaggggtatatcaacgcctatttgacggaaactgatcacgagaaccccagcaaggaaactctcacagctacccggcatacgccggaaaaagatatcctggaagaaattaaccgcgaggtggttactgagcgtgaaacagaagaagaaaaaccacaaccatctgacgcaatggcaggtgaacaggcaacaactgaaacaatggaaccggatacaactgaacattgccagaacgcgcagtcgctggatgctcagtcgcaggtgagttccgctaaccaagtaaaagtcaccgctgacgaagtaaacaaaattatgcaggcagccaatatcagccagcctgacgccgataagttacttgctgtatcgcgtggtgaatttgttgaggggattagcgaccctaatgatccgaaatgggtcaaggggatccagactcgcgattctgtgagccagaaacgaaacaatccgaaccagtag

SEQ ID NO: 465200 - DNA, 768 bp, Shigella boydii
atggacgacgcaacataccagaaaacattcgatgaagagaatcaggttgaagttcaggaaaatgatccggaggaaatggaaggcgctgaacatccacacaaggagaatgctggcagcgctcaggaccacgccagcgatagtaaaactggcgagacggcagatcccttaattacggtgaatggtcatcacgaaatcacatccaccagcaggacgtgtgaccatctaatgatcgaccttgaaaccatgggaaaaaatcctgatgccccgatcatctcaataggtgcaatatttttcgatccgcaaaccggagatatgggacccgaatttagtaagactatcgatctggaaactgctggcggagtcattgatcgggacaccattaaatggtggcttaagcaatcacgcgaagcgcaatctgccattatgaccgatgaaatcccgttagatgatgcactgttacaattgcgggaatttatcgacgaaaactccggtgaattttttgttcaggtctggggaaatggagccaacttcgacaacacgattttgcgccgttcatacgaacggcaggggatcccctgcccgtggcgttactacaacgatcgcgatgtacgcacaatcgttgagctggggaaagccatagacttcgatgccagaacggctattccattcgaaggtgagcgccataatgcacttgatgacgctcgttaccaggcaaaatacgtttcagctatctggcaaaaactgatcccgagtcaggctgatttttaa

SEQ ID NO: 465201 - DNA, 2169 bp, Shigella boydii
gtggatgagacgactctaacagcaacagtgaaagatccttttgataacgcagtaaaagatctacaggttaccttcagtaccaagccggcagatactcaacttagtcagagcacaagcaatactaacgacagtggtgttgctgaagttacccttaagggcacggttttgggcgttcatacagtcgaagccacacttcctaacggcaacggctatacaacgacagtcaatattgcgcccgataccagcaacgcgcaggttacgctgaacatccctgctcaacaggtggtgacgaataacagtgacagcgtgcagcttacggcgatggtgaaagatccgtcgaatcatccggtggcggggataacggtcaacttcaccatgccacaggacgttgcggcaaactttaccctcgaaaataacggcattgccatcacccaagccaatggggaagcgcatgtcacgctgaaaggtaaaaaagcgggtacgcatacggttaccgcaacgctgggtaataacaataccagtgattcgcagccggtaacgtttgtggcggacaaaacctcggctcaggttgtcctgcagatgtcaaaagatgagatcacaggtaatggcgtcgataacgcaacgctaactgcaacggttaaagatcagttcgacaatggggtgaataatcttccggtaacattcagctcagcctcttcaggactcaccctgaccccgggagtaagtaataccaatgagtctggcatcgcgcaggccactctcgcaggcgttgcctttggtgagaagacggttactgcatcactggctaataatggtgccagcgacaacaaaactgtgcattttattggcgacacagcggcggcaaaaattatcgagttgacgcctgtcccagacagcataatcgccggtaccccgcagaacagctccggcagcgtcatcaccgccacagtcgttgataataatggctttccggtgaaaggtgtgactgtgaacttcaccagcaacgcagcgacagccgaaatgacgaacggcggtcaagccgtgacgaacgaacagggtaaggctaccgtcacttataccaatacccgctcctcgatagaatcaggagcgagaccggataccgttgaggccagtctggaaaatggtagctccacgcttagcacatcaattaatgtcaacgctgatgcgtctacggcacatctcaccttgctacaggcactttttgatacagtctccgcaggcgagacaaccagtctgtatattgaggtgaaggataattacggcaacggtgtcccccagcaggaggtaaccctcagcgtttcaccaagtgaaggcgtgacccccagtaataacgctatatatactaccaaccacgacggcaatttttacgcaagctttaccgctacaaaagccggggtttatcaattgacggcaaccctcgaaaatggcgattcgatgcaacaaacagtgacctatgtgccgaacgtcgcgaatgctgaaatcacgctggcagcctcgaaggatccggtgattgccgacaataacgatctcacgacactaacagcaacagtcgctgatacagagggcaatgcgatagccaacactgaggtaacatttactctgccggaagatgtgaaggcgaacttcacgctgagcgatggcggtaaagcgattactgatgctgaaggcaaagcgaaagtcacgctgaaaggtacaaaagcaggcgctcatactgttacagcatcgatgactggcggtaagagtgagcagttggtggtgaactttattgcggatacgctcactgcgcaggttaatcttaacgttaccgaggacaattttatcgctaataacgtcgggatgaccaggctgcaggcaacagtgactgatggaaacggcaacccgttagccaatgaggcggtgacattcacgctaccggcagatgtgagcgcaagctttactctcggacaaggcggttccgccattactgatatcaacggcaaggctgaagtgaaccgccccgggtttcctggagagtgttttatctgtgaactcaggctgccagatcatcgtttccgatggaagcataataagctttttctgcttctgccggagggatgtggcccagcctttccagcaatcgtcgattattataccagtccacccacgtga

SEQ ID NO: 465202 - DNA, 447 bp, Shigella boydii; identical to SEQ ID NO: 462775

SEQ ID NO: 465203 - DNA, 318 bp, Shigella boydii
atgtccggcagtgcttttgccgttacgcaccacgccttcagtagcggagcaggaaggacatctgatggaaatggaagccacgcaagcaccttaaaatcaccatcatacactaaatcagtaagttggcagcattaccctatccgccacagtttatcgcctgaaatgcagaataaagccttagaaaaagcgggattgccatttacctatatggcctttgaagtggataacgatagttttcccggagcaattgaaggattaaaagctctaaaaatgcgcggaactggtgtatcaatgccgaacaaacaactggcttgttaa

SEQ ID NO: 465204 - DNA, 447 bp, Shigella boydii; identical to SEQ ID NO: 462775

SEQ ID NO: 465205 - DNA, 2307 bp, Shigella boydii
atgcgcctgcttggaccaaacagtctgggtttactggctccctggcaaggtctgaatgccagcttttcgcctgtgccgattaaacgcggcaagctggcgtttatttcgcaatcggctgccgtctccaacaccatcctcgactgggcgcaacagcgtaagatgggcttttcctactttattgcgctcggcgacagcctggatatcgacgttgatgaattgcttgactatctggcacgcgacagtaaaaccagcgccatcctgctctatctcgaacagttaagcgacgcgcgacgctttgtttcggcggcccgtagtgcctcgcgtaataaaccgattctggtgattaaaagcggacgtagcccggcggcacagcgactgctcaacaccacggcaggaatggacccggcatgggatgcggctattcagcgtgccggtttgttgcgggtacaggacacccacgagctgttttcggcggtggaaacccttagccatatgcgcccgctacgtggcgaccggctgatgattatcagcaacggtgctgcgcctgccgcgctggcgctggatgccttatggtcacgcaatggcaagctggcaacgctaagcgaagaaacctgccagaaactgcgcgatgcactgccagaacatgtggcaatatctaacccgctcgatctacgcgatgacgccagcagtgagcactatattaaaacgctggatattctgctccacagccaggattttgacgcgctgatggttattcattcgcccagcgccgctgctcccgcaacagaaagcgcgcaagtattaattgaagcggtaaagcatcatccccgcagcaaatatgtctctttgctgacgaactggtgcggcgagcactcctcgcaagaggcacgacgtttattcagcgaagccgggctgccgacctaccgtaccccggaaggaaccatcactgcttttatgcatatggtggagtaccggcgtaatcagaagcaactacgcgaaacgccggcgttgcccagcaatctgacttccaataccgcagaagcgcatcttctgttgcaacaggcgattgccgaaggggctacgtcgctcgatacccatgaagttcagcccatcctgcaagcgtatggcatgaacacgctccctacctggattgccagcgatagcaccgaagcggtgcatattgccgaacagattggttatccggtggcgctgaaattgcgttcgccggatattccacataaatcggaagttcagggcgtcatgctgtacttgcgtacagccaatgaagtccagcaagcggcaaacgccattttcgatcgcgtaaaaatggcctggccgcaggcgcggatccacggcctgttggtgcaaagtatggctaaccgtgctggcgctcaggagttgcgggttgtggttgggcacgatccggttttcgggccgttgatcatgctgggtgaaggcggtgtggagtggcgtcctgaagatcaagccgtcgtcgcactgccgccgctgaacatgaacctggcccgctatctggttattcaggggatcaaaagtaaaaagattcgtgcgcgcagtgcgctacgcccattggatgttgcaggcttgagccagcttctggtgcaggtttccaacttgattgtcgattgcccggaaattcagcgtctggatattcatcctttgctggcttctggcagtgaatttaccgcgctggatgtcacgctggatatctcgccgtttgaaggcgataacgagagtcggctggcagtgcgcccttatccgcatcagctggaagaatgggtagaattgaaaaacggtgaacgctgcttgttccgcccgattttgccagaagatgagccacaacttcagcaattcatttcgcgagtcaccaaagaagatctttattaccgctactttagcgagatcaacgaatttacccatgaagatttagccaacatgacacagatcgactacgatcgggaaatggcgtttgtagcggtacgacgtattgatcaaacggaagagatcctcggcgtcacgcgtgcgatttccgatcctgataacatcgatgccgaatttgctgtgctggttcgctcggatctcaaagggttaggcttaggtcgacgcttaatggaaaagttgattacctatacgcgagatcacggactacaacgtctgaatggtattacgatgccaaacaatcgtggcatggtggcgctaacccgcaagctcgggtttaacgttgatatccagctcgaagaggggatcgttgggcttacgctaaatcttgcccaacgcgaggaatcatga

SEQ ID NO: 465206 - DNA, 339 bp, Shigella boydii; identical to SEQ ID NO: 31407

SEQ ID NO: 465207 - DNA, 360 bp, Shigella boydii
atgcaactgagcaggctgacgctgagaagtaaaaagccggagcttgtggagcaagagctgtggggtgtcttactggcttataatctggtgagatatcagatgattaaaatggcggaacatctgaaaggttactggccaaatcaactgagtttctcagaatcatgcggaatggtgatgagaatgctgatgacattgcagggcgcttcaccgggacgtataccggagctgatgcgcgatcttgcaagtatgggacaacttgtgaaattaccgacgagaaggggaagggccttcccgagagtggtaaaggagaggccctggaaataccccacagccccgaaaaagagccagtcagttgcttaa

SEQ ID NO: 465208 - DNA, 1260 bp, Shigella boydii
atgtttacatcagtggcgcaagccaatgctgcggttatcgaacaaattcgtcgtgctcgtccacactggctggatgtgcaaccggctttttcacttatcagcgaactaaacgagggcaaaacactgcttcacgccgggccgccaatgcgctggcaggagatgaccggacccatgaaaggggcgtgcgtgggcggatgtctgttcgaaggctgggcgaaagatgaagcgcaggcactggcgatgctggagcagggggaagtgaacttcattccttgtcaccatgtgaatgccgtcgggccaatgggcggcattacttctgccagtatgccgatgctggtggtcgagaacgtgaccgacggcaaccgggcgtactgcaacctcaacgaaggtatcggcaaagtgatgcgttttggcgcttacggcgaagatgtcctgactcgccatcgctggatgcgcgatgtgttaatgccagtattaagcgcggcgctggggcgcatggagcgcggtatcgatctcacggcgatgatggcgcagggcattacgatgggcgatgagttccatcaacgcaatattgcttcctcagcactgttaatgcgtacgctggccccacaaattgctcgcctcgatcatgataaacagcacattgcggaagtgatcgatttcctcagcgtgaccgatcagttcttcctcaacctcgcgatggcctactgcaaggcggcgatggatgctggcgcgatgatccgcgcaggcagcatcgttacggctatgacccgcaacggcaatatgttcgggattcgggtaagcgggctgggtgaacgctggtttactgcgcctgtaaacactccgcaaggtctgtttttcaccggcttctcgcaggagcaggcgaacccggatatgggcgatagcgcgattaccgaaacctttggtatcggaggtgcggcaatgatcgcagcgcctggcgtaacgcgctttgtcggtgcgggtggcatggaagcggccagggcggtatctgaagagatggcggaaatttaccttgaacgcaatatgcagttgcagatcccaggctgggattttcagggcgcgtgcctggggctggatattcgtcgcgtggtagaaaccggcattacgccactcatcaataccggtatcgcccataaagaggcggggatcgggcagattggcgcaggcaccgtgcgggcaccgctggcgtgctttgaacaggcgctggaagcactggctgaaagcatggggattggttga

SEQ ID NO: 465209 - DNA, 210 bp, Shigella boydii; identical to SEQ ID NO: 9340

SEQ ID NO: 465210 - DNA, 447 bp, Shigella boydii
gtggcattcattattgatgtgtttgccggatacatcgtggggtggcgggtctcatcgtccatggaaacgacattcgtgctggatgctctggagcaggcgttatgggcccgtcgaccgtccggcacggtccatcacagtgataaaggttctcagtatgtatcgctggcctacacacagcggcttaaggaagccggattactggcatcaacaggaagtacaggcgactcgtatgacaacgcgatggcggagagcatcaatggtctttacaaagcggaggtaatacaccgtaagagctggaaaaaccgtgcagaagtggaactggccacactcacgtgggtggactggtataataatcgacgattgctggaaaggctgggccacatccctccggcagaagcagaaaaagcttattatgcttccatcggaaacgatgatctggcagcctga

SEQ ID NO: 465211 - DNA, 474 bp, Shigella boydii
atgccgatcatagcagtaactcctgatgaagaacgacaactgatgcgcaaagaaacccagcaaactcatgataagaaccatgtccgacaacttgtcgctatgctgatgctacatcagggaatgaccgtcaccgacgttgccagactgctctgcgctgcacgctcttccgtcggcaaatggataaactggtttaccttgcatggcgctgaaggattaaaaaaccttaggcccggacgtgccctacactggccggtcgccgatattcttcatattttgctactgttggtacatcgctccccgaaggattttggctggctgcgctcacgctggagcacagaactgctggcactcgtcgtcaaccgacgttttgacatgacgctgcatcgtaccgcgctgcacagatacctaaaacaggcagatatagtctggcgcagagcccgcaccaacgctgaaaatcaaagacccgcactatga

SEQ ID NO: 465212 - DNA, 357 bp, Shigella boydii
atgcagttactgttttccagtggcgtgatgacgggacgtataacaccggaacgctttgttgaattaaccagcgcaatgcccgccaggctgtttggcctgtggccgcaaaaaggattattagcgcccggttccgatggcgacgtggtgattatcgacccacgtcagagccaacaaattcagcatcgccatctccacgacaacgccgactactcgccatgggagggttttacctgtcagggcgcgattgtcagaaccttatcccgtggtgaaacgattttctgtgacggcacctttacaggcaaagccgggcgaggtcgtttcctgcgacgcaaaccgtttgtccctcccgtgctctaa

SEQ ID NO: 465213 - DNA, 447 bp, Shigella boydii; identical to SEQ ID NO: 462775

SEQ ID NO: 465214 - DNA, 447 bp, Shigella boydii; identical to SEQ ID NO: 465210

SEQ ID NO: 465215 - DNA, 540 bp, Shigella boydii
ttgtttgagcgtggtcgtcagggggcgcaacttaccttacccggcgaacaatttttaacgcatgcagtcagagttcttgacgccatcaacactgccggacagtcgcttcatcgtaaagaaggtcttaataatgatgtcgtcaggattggtgcactacctactgcggcactggggatattaccttcggttataggtcagtttcatcagcaacaaaaagagacgaccttgcaagttgcgacaatgagtaaccctatgattctggcgggtttgaaaaccggggaaatcgatatcggcattggtcggatgtcagatcctgaactgatgaccgggcttaattacgaactgctgtttcttgaatcgcttggatttgcccctatatttccagacatctgttatcacttaacccattacaagcccgctgccgcagatattcccgtggcgagcgataacccagcgcactatgcggatgccattcgttataatgctcgaacgcctctgcaaggttctttgctgccgttaacccgtctggtttgggcatga

SEQ ID NO: 465216 - DNA, 384 bp, Shigella boydii
atggcggaaacgctgggtgagcaatatgacccggtactgccatctcccctgcgccagtcttcagcccgtaaaccgttacctgccccacttccccgtgaaacccgggtcatccgtccggaagaggaatgctgcccggcctgtggtggcgaactcagttctctgggatgtgatgtgtcagagcagctggagcttatcagcagcgcctttaaggttatcgaaacacaacgtccgaaactggcctgttgccggtgtgaccatatcgtgcaggcaccggtgccttcaaaacccattgcacgcagttatgccggagcggggcttctggcccatgttgtcgctggaaaatatgcaggctatctgccgttataccgccagtcagaaatataa

SEQ ID NO: 465217 - DNA, 183 bp, Shigella boydii
atggacacctcacttgctcatgagaatgcccgcctgcgggcactgttgcagacgcaacaggacaccatccgccagatggcgaaatacaaccgcctgctctcacagcgggtggcggcttatgcttccgaaatcaaccggctgaaggcgctggttgcgaaactgcagcgcatgcagttcggttaa

SEQ ID NO: 465218 - DNA, 861 bp, Shigella boydii
atgaaattgcaccatagaatgctccggcattttatcgccgcaagtgtcattgtgctgacatcttccttccttatttttgaacttgtcgccagcgacagagcaatgagtgcctatctgcgctatatcgtgcagaaagcagactcctcctttctttatgataagtatcagaatcagagtattgccgcgcatgtgatgcgcgctctcgctgctgagcagtcggcagtgtcgccagaacagcggcgcgccatctgcgaggcttttgagtctgccaataatacccatggcttaaacctgactgctcataaatacccgggcttacgcggcacactacaaaccgcatccactgactgcgacacaattgtggaagctgcagcactattacccgcttttgatcaggcagtggaaggcaaccgccaccaggatgattacggttcaggtcttgggatggccgaagagaaatttcactattatctcgatctcaatgaccgctatgtctatttttatgagccggttaatgttgaatactttgcgatgaataactggtccttcctgcagtcaggaagtattggtatcgatcgcaaagatattgaaaaggtatttaccgggcgtaccgtattgtcgagcatttaccaggatcagcgtactaaacagaacgtgatgagtttgctgacgccggtgtatgttgcagggcagctaaaagggattgtgctgctggatattaacaaaaacaatttgcggaatatcttttacactcatgaccgccctctcctctggcgttttctcaatgtcacgctaaccgataccgattcggggcgtgaagtggccaaattcagtgtgccacttcagaagccatctcagtaa

SEQ ID NO: 465219 - DNA, 540 bp, Shigella boydii
atgtttgatgtcactttgctgatcctgctcgggttagctgcgctgggctttatcagtcataacaccactgtcgccgtttcaattctggtgttgatcattgtccgcgtcacaccgttaagcacctttttcccgtggattgaaaaacaggggctaagtatcgggataatcattctgacgattggcgttatggcccccatcgccagcggcgacgctaccgccctcaaccttgattcactcgtttctgaactggaaatcgctggtggcaattgcagtaggcgtgattgtctcctggctgggtgggcgcggcgtgaccttaatgggcagccagccgcaactggtcgccgggctgctggtaggcactgttttaggcgtggcgctgtttcgcggcgtaccggtcggcccgcttattgccgcgggtctggtttcgctgattgtggggaaacagtagttaatcccgcaatatatcggcctggcgtttgccccaggcctttcttaaacatagtaataaaggccgttgttgaatcataccccagcgtatga

SEQ ID NO: 465220 - DNA, 576 bp, Shigella boydii
atgcgtgaagctgtaccggcgcatttgcccgtcagcgtgaaagtgcgtctgggctgggacagcggtgagaagaaatttgaaatcgccgatgcggttcaacaggctggtgctacggagctggtggtgcatggacggacaaaagagcagggttaccgcgcggagcatattgactggcaggcgattggcgagattcgccagcggctgaatattccggtgattgccaacggtgaaatctgggactggcagagtgcgcaacaatgtatggcgatcagcggctgcgacgcagtgatgattggtcgcggggcgctcaatattcccaacctgagccgggtggtaaaatataacgaaccgcgaatgccgtggccggaggtggttgctttgctgcaaaaatatacccgtctggaaaagcagggcgataccgggttatatcacgttgcgcggattaaacagtggttgagttatttgcgtaaagaatacgatgaagcaacggaattatttcagcatgttcgggtgttgaataattcccctgatattgcaagggctattcaggcaattgatatcgataagctgcgataa

SEQ ID NO: 465221 - DNA, 147 bp, Shigella boydii; identical to SEQ ID NO: 462232

SEQ ID NO: 465222 - DNA, 1239 bp, Shigella boydii
atgttaaagtggtcggcttttcccctgaaacatgccacgggtaacaccatgagtgaatttattgccgaaaaccgcggcgcggatgccatcacccgaccgaactggtcagccgttttctcggtggcgttttgtgtcgcctgtctgattatcgttgagtttttgcccgtcagtttgttgacgccaatggcccaggatttaggcatttcggaaggggttgccgggcaatcggtgaccgtgaccgcctttgtggcaatgtttgccagtttgtttattacccagacaattcaggctactgaccgctgctacgttgttattttgtttgccgttttgctgacgctctcctgcttgctggtttcctttgctaactcattcagtttgcttttaatcggtcgtgcctgtctggggctggcgctgggcgggttctgggcgatgtcggcgtcgctgaccatgcgtctggtgccgccgcgtacggtgccgaaggcgctgtcggtgatcttcggcgcggtttctattgcgctggtgattgccgcgccgttgggcagttttttaggcgagcttatcggttggcgcaatgtctttaatgcggcggcggtgatgggcgtgctgtgtattttctggattatcaaatcattgccttcactgccaggcgaaccctcgcatcagaaacaaaatactttccgcttattacaacgtccgggtgtgatggcagggatgatcgccatcttcatgtctttcgccgggcagtttgctttcttcacgtatattcgcccggtgtatatgaacctggcgggattcggcgtggatggcttaacgctggtgctgttgagttttggtatcgccagctttattggtacgtcgctttcgtcgttcattcttaaacgttcggtaaaactggccttagcaggcgcgccgttaatactggctgtgagtgcgttggtactgacgttgtggggaagcgataaaatcgttgctaccggcgtggcgattatctgggggctaacttttgcattggttcccgtcggctggtcaacgtggatcacccgctcgctggccgatcaggcagaaaaagccgggtctattcaggtggcggttattcagcttgctaatacctgtggcgcggcaatcggcggttatgcgctggataatattggtctgacttcgccgttgatgttgtccggcacattgatgttgctgactgcattgttggttactgcaaaggtgaaaatgaagaaatcctga

SEQ ID NO: 465223 - DNA, 1113 bp, Shigella boydii
gtgaatatttatcgactctcttttgtatcctgcctggtcgtggcgatgccttgcgcattggcggtcgaattcaaccttaatgttctcgataaatcgatgcgcgaccgcattgatatttcattattaaaggaaaaaggagtcattgctcccggtgagtattttgttagcgttgcggtaaataataaccaaatcagtaacgggcaaaagattaactggcacaaaaatgacgataaaaccattccgtgcatcaatgatttactggtcgataaatttggcttaaaacctgaagtccgtcagtcgttaccattgataaatcagtgcgtcgattttagctcccgacctgaaatgctcttcaatttcgatcaagccaatcagcaactgaatattagtattccgcaagcctggctggcgtggcactcagaaaactggaccccaccctccacatggaaagaaggtgtcgccggtgtcctgatggattacaacttgtttgccagcagctaccgcccacaggatggcagcagcagcactaatcttaacgcctatggaacagccggaatcaacacgggggcatggcgcttacgcagtgattatcagttgaatcagactgatagcgatgataaccatgaacagtcaggcgaaatatcacgtacctatctttttcgcccgttaccgcaattaggttcaaaattaaccctcggcgaaacggattttagttccaatattttcgacggtttttcttataccggtgcggcactggcaagtgacgatcgaatgttgccatgggaactacgcggctacgccccacaaattagcggtattgcacagaccaatgccacggtgacgatcagtcaatcaggccgcgtcatttaccagaaaaaagtcccaccaggcccatttatcattgacgaccttaatcagtctgttcagggcacactggatgtcaaagtgacggaagaagatggtcgggtgaacaatttccaggtttcggcagcatcgacgcccttcctgactcgtcagggacaggttcgctataaactggccgcgggtcagccacggccctccatgtcacatcaaactgaaaatgaaaccttttttagcaatgaagtttcctag

SEQ ID NO: 465224 - DNA, 228 bp, Shigella boydii
atgatcgtcatcgatccacgttataacgacactgctgccgggcgtgaagatgaatggctgcctattcgccctggcaccgatggcgcactggcctgtgcgattgcctgggtactgattactgaaaacatggtcgatcagccatttctcgacaaatattgtgttggttacgatgaaaaaacgctgcccgccataaagcctatattctgggcgaagggcctgacggcatag

SEQ ID NO: 465225 - DNA, 870 bp, Shigella boydii
atgttcgatccagaaaccttgcggactttcattgcggttgctgaaacaggaagtttttcaaaagcggcagaacgattatgtaaaaccacggcgacgatcagttatcgcattaaacttctggaagagaataccggagtagcgctgtttttccgtacgactcgtagcgtaacgttgacagcggctggcgagcatctactttcccaggccagagactggctgagctggctggaaagtatgcccagcgagctgcaacaggtgaatgatggcgtggaacgccaggtgaatattgtcatcaacaacctgctctataacccccaggccgtcgcccagttgctggcgtggctgaatgaacgttacccctttacccagtttcacatctcccgacaaatctatatgggcgtctgggactcgctattgtacgaaggtttttcgctggctatcggcgtcacgggaactgaggcgctggcaaatacctttagtcttgatcccttaggatcggtgcaatggcgatttgtcatggcggcggatcatccgctggcgaacgttgaagagccgctaacagaagcgcagttgcgtcgctttccggcggtcaatattgaagacagcgcccgcaccttaaccaaacgcgtcgcctggcgattgccagggcaaaaagagattattgttcctgatatggaaacgaaaatcgccgcccatctggcgggcgttggcattggttttttgccaaaatcgctttgccagtcaatgatcgataatcaacaactggtcagccgggtaatcccaacgatgggtaatgactccaacttactgatagtgttttatgttcagataatgcccgatgaccttgtcatgcagctccaccgattttga

SEQ ID NO: 465226 - DNA, 378 bp, Shigella boydii
atgattggcgtacgctcctccagcggcaaccgactgttgatagaacaacagctggccgacaagccctggaagctggactggttttacgaagtgcgtcatctttcgacgtcattaggactagtggaggcaggactggggatttcggcgcttcctggtctggcaatgccccatgcgccctattcttcgattattggtatcccactggtggaacccgttatacgtcggacattggggattattcgccgcaaagatgccgtgctttctccggcagctgaacgcttttttgccttgctgattaatttgtggactgacgataaagacaatttgtggaccaatatcgtcgaacgccagagacatgcgttacaggagataggttaa

SEQ ID NO: 465227 - DNA, 261 bp, Shigella boydii; identical to SEQ ID NO: 461695

SEQ ID NO: 465228 - DNA, 498 bp, Shigella boydii
atggcgcaggtacttgatgagcttgttctgtccctcgggattgatgacagggactttactgccggggaacaggcagtacatgctgcccttaaccggctcacgacggtgatggaaggtgtcgctgacacattcagtcagggacagaagaaaaccagtgaatcactggaaaaaaccggaaaagatgctgataaaacggcccgtcgaatggaagatgccgggaaacgggcgtcccgttttttttcagggatccgtagcgagattctggctcttgcgggtgtcagtctgacgctgggggggctgaagaacctggtaacaggttttgcccgtgatctgaaccgtctgtccgtggaatccgatgcttttggcatgaaggccagaaatctggacggatggttacgggctgcgcgggcaaataatgttgatgaaggggaaatgtctggggcattttcccggcattgcaaatgcaaaagcggccttcagagccggaaggtcctttga

SEQ ID NO: 465229 - DNA, 420 bp, Shigella boydii
atggaacagaaagcattatctgcagaaccccgcagatcattttcaaatgagtttaaacttcaaatggttaaactggcttcacaaccaggagcctctgttgcccgtattgcccgggaacacgatatcaatgataacctgctgttcaaatggctcaggctctggcagaacgaagggcgcatatcgcggcgtcttccggtaacaacctcttctgacactggcgttgaattattacctgtggagataacaccggatgagccgaaagaacctgtggctgctcttacttcgtctttatctactcagactacagttagtgccagctcctgcaaggtggagttccgtcacggtaacatgacgctggaaaatccttcaccagagctgctcacagtgttgatccgtgaactgaccgggaggggacgatga

SEQ ID NO: 465230 - DNA, 261 bp, Shigella boydii; identical to SEQ ID NO: 461695

SEQ ID NO: 465231 - DNA, 855 bp, Shigella boydii
atgacagtaaagatttctggtgtactgaaagacggcacaggaaaaccggtacagaactgcacaatccagctgaaagcaaaacgtaacagtaccacggtggtggtgaacacgctggcctcagaaaatccggatgaagccgggcgttacagtatggacgttgagtatggtcagtacagcgttattctgttggtggagggattcccgccgtcacatgccgggactatcaccgtgtatgaagattctcaacccggtacgctgaatgattttctcggtgccatgactgaggatgatgcccgtccggaggcactgcgtcgctttgaactgatggtggaagaggtggtgcgtaacgcagaggaggcgaagaagaatgccggagaggcggagacgtcagcgaggaatgccggcatatcagccagtcaggcagaagagagcgctgcaaatgctgacacttcagcaggggatgcatcggagtcagcccggcaggcggcagaaagtgcagcctcagcaaagcagtcagaggaggcgtcctcgtcctcggcctctgcggccgctcaaaaagccagtgagtcattacaaagtgcaacagatgctgagttgtcaaaaaagacggcagaaagtgcagccggtaatgcagtcagggatgcaacgaccgcaacagaaaaagcccgggagtcagcagaaagcgcacagtcagcggaacaaagcaggatagcggcggaagaggccgtaaaccgaatccccaccgtggtgggacctcccgggccaaagggggaaccggggcccgcgggtcctcaggggccgaagggagataaaggagagcgtggcgacaccggcccggcaggggccaaaaggtga

SEQ ID NO: 465232 - DNA, 213 bp, Shigella boydii; identical to SEQ ID NO: 462242

SEQ ID NO: 465233 - DNA, 129 bp, Shigella boydii
atggaattagttaatacattatttgcaagccttgccggtactgatcccttcacaggcgtggatattacgattgccaactgcaaatcggcatactgggatgaaggcattgttcagcaacttattaactag

SEQ ID NO: 465234 - DNA, 261 bp, Shigella boydii; identical to SEQ ID NO: 461695

SEQ ID NO: 465235 - DNA, 207 bp, Shigella boydii
atggatataatgagaagtgttgtggggatggtggtgttactggcaatagcatttctgttgtcagtgaataaaaagagcatcagtttgcgcacggttggagccgcactgctgctgcaaatcgctattggtggcatcatgctctacttcccaccgggaaagtgggcagtagaacaggcggcattaggcgttcataaagtgatgtcttag

SEQ ID NO: 465236 - DNA, 1758 bp, Shigella boydii
ttgcagcttcaccgcccacatgctgttcaggttattatttgtatcaacctgaactttctgtatctgctggattgcagcactctgattttccagttttttattgacggtttgcgtgatttcattgctgacattcgtaatggacgtcctgatttcagtcaggtccggcgcaagctgaccgttatcaatctgcgtccacaactccttgccgagatgcgtgttattgatcaaccctttataaaaactcagataaccttccgcatcatcgctcgcccgaccgacggcctccacaaatgccgatttgccaacggtgttcacactgcgaacgtaaaaataataatcatggcccggcctgatattgatactggcggctatccagtacagcgccgtgccaagatagcgggcgctggtttcaacctgcctgatatccgcaatccgcttttccgaaaaccagaactcaaactgcaccgtcgggtcgtatacagccagtttcgggaccgccgttatctgaaaataccccggtatcagttcaatagtgacaggcgctgccggtgccgcaatccggaacgataccgacgccggatcgccctgctgcccccgggcatttaccgcccggactgtcagactgtaattccccagcgccagctgcctgaagcggtatgtggtttccgtcgtcctggctgtgctgaccagccgcccactgccgtcgtccgctgccacggtcaggcgaagcaggaagctcacacccttcaccaccttcggcgtgtcccatcgcgccagcacctgatattccccgctgtctgcggtgacttcggcggtcagatgctgcaccgctggcggcgtgacaccattcaccgtgccgcgccggtcaccgtcaaagtgtgccccgttatccacgatggcctctttttccggcacatgctgcacggcggtgatggcatacgtgccgtcgtcgttctcacggatactcacgcagcggaacaggcgctggcgcagcgtcggcagcttcagcccccacacgctgtattctgcaacgccgtcaggaacccggctcactttcaccttcacgccgtcggtgacggactgaacctccacgctgaccggattgccatttccgtcaaccaggcttatcagcgtggtacaggaggacggcagcgtgatttcacggtcgagcgtcagcgtccgggtctggctgttcaccgccagtacgcgaccaccggtgctgataccggcataatcatcatcgcagatttcaatgacatcacccggtacatggcgaagcccttctgcgccgacgctgaagtccacggtctgcgtttccagcagttccgttttaatcagccacagcccggcgcggtgcgcctgtccccggctggtacagccaaaggcatccatcttcgtgacgttacgaccgtaacggagaatggcctgcgcgtcctccacaagctctgtcgccgtctcatgaccgttgtccggatcaatccagttcacctcaacgacattatggcggtccttcagggcgctgaagctgtagcggaacggcgcgccatcatccggcatcaccacattactgcggttataggtccacactttatccgacggtcggtcctgcacgaacgtcagcgtctgcccgttccataccggcatacagcgcatcgccgagcagaaatcactgagaacatcccacgccttacgctgtgtggtcaggtaagcgttacaggtgatgcgcggctccgtgccgccaaatccgtccggcactga

SEQ ID NO: 465237 - DNA, 447 bp, Shigella boydii
gtggcgttcatcattgatgtgtttgccggatacatcgtggggtggcgggtctcatcgtccatggaaacgacattcgtgctggatgctctggagcaggcgttatgggcccgtcgaccgtccggcacggtccatcacagtgataaaggttctcagtatgtatcgctggcctacacacagcggcttaaggaagccggattactggcatcaacaggaagtacaggcgactcgtatgacaacgcgatggcggagagcatcaatggtctttacaaagcggaggtaatacaccgtaagagctggaaaaaccgtgcagaagtggaactggccacactcacgtgggtggactggtataataatcgacgattgctggaaaggctgggccacatccctccggcagaagcagaaaaagcttattatgcttctatcggaaacgatgatctggcagcctga

SEQ ID NO: 465238 - DNA, 831 bp, Shigella boydii; identical to SEQ ID NO: 462438

SEQ ID NO: 465239 - DNA, 477 bp, Shigella boydii; identical to SEQ ID NO: 462627

SEQ ID NO: 465240 - DNA, 447 bp, Shigella boydii; identical to SEQ ID NO: 462775

SEQ ID NO: 465241 - DNA, 198 bp, Shigella boydii; identical to SEQ ID NO: 462554

SEQ ID NO: 465242 - DNA, 183 bp, Shigella boydii; identical to SEQ ID NO: 463949

SEQ ID NO: 465243 - DNA, 777 bp, Shigella boydii
atgacattaaccgatcactttgataatgctattccacctgttttttaccatgagcaccaatcatttttcttagataactttaaagaggttgtggatgaagttagcaggtatgtgcatggtaatcaggggaaaactgatgttccaatatttaacactaaagatatgaggcttggaattgggttgcatcttattgattttataagaaagagtaaagatcaaagattccgagagttttgttataataaaaacattgatcctgttagtctggatagaattataaactttgtgtttcagcttgagtatcatataccaagaatgctaagtacagataacttcaaaaaaataaaactcagagacatatctttggaggatgcgattaaagcatctaattatgaagagattaacaataaagtgactgataaaaaaatggctcatcaggcccttgcttattctttaggcaataaaaaagctgatatagcactttatttactatctaaatttaattttacaaaacaagatgtcgcagagatggagaaaatgaacaacaatagatattgtaatctgtatgatgttgaatacttacttagtaaagatggtgccaactataaagtgctagaatattttatcaataatggattggttgatgtaaacaaaaaatttcaaaaagcaaatagtggggacactatgcttgacaatgcaatgaaaagcaaaaatccaaaaatgattgattttttattaaaaaatggagcaatattaggcaaacgatttgagatatga

SEQ ID NO: 465244 - DNA, 1455 bp, Shigella boydii
atgaaaatacctgaagcagtaaatcatattaatgttcagaacaatattgatcttgttgatggaaaaataaatccgaacaaagatacaaaagcattacaaaaaaacatatcatgcgtaacaaactcatcctcttctggcataagtgaaaaacatttagatcactgtgctgatactgtgaaaagctttttaaggaagtctatagcagcgcaaagttatagtaaaatgttctctcaagggaccagtttcaaatcattaaatctttctattgaagcgccatctggagcacggtcatcatttcggtcacttgagcacctcgataaggtgtccagacactatctttctgaaataatacaaaaaactcatcctctttcttcggatgaacgtcacttgctctctattattattaattctgattttaacttcagacatcaaagtaacgctaacctgtcaaataatactcttaatattaagtcctttgataaaattaagtctgagaatatacaaacatataaaaacacattctctgaggatattgaagaaatagctaaccacgattttgttttttttggggttgaaatttccaatcatcaagaaacactcccactaaataaaacacatcatactgtggattttggtgctaatgcgtatatcattgatcatgactctccatatggatatatgacattaaccgaccactttgataatgctattccacctgttttttaccatgagcaccaatcatttttcttagataactttaaagaggttgtggatgaagttagcaggtatgtgcatggtaatcagggaaaaactgatgtgccaatatttaatactaaagatatgaggcttggaattgggttgcatcttattgattttataagaaagagtaaagatcaaagattccgagagttttgttataataaaaacattgatcctgttagtctggatagaattataaactttgtgtttcagcttgagtatcatataccaagaatgctaagcacagataacttcaaaaagataagactcagagatatatctttggaggatgccattaaagcatccaattatgaagaaattaacaataaggtgactgataaaaaaatggctcatcaagctcttgcttattctctaggcaatgcaaaatctgatatggcactttatttactatctaaatttaattttacaaaacaagatatcgcagagatggagaaaatgaacaacaatatgtattgtgagctgtatgatgttgagtatttacttagtgaagatagtgccaactataaagtgctagaatattttattaataatggattggttgatgtaaacaaaagatttcaaaaagcaaatagtggggacactatgcttgacaatgcaatgaaaagcaaagattcaaaaacaattgattttttattaagaaatggagcggtatcaggcaaacgatttgggaggtga

SEQ ID NO: 465245 - DNA, 372 bp, Shigella boydii
gtgctggatgcactggagcaggcgttatgggcccgtcgaccgtccggcacggtccatcacagtgataaaggttctcagtatgtatcgctggcctacacacagcgacttaaggaagccggattactggcatcaacaggaagtacaggcgactcgtatgacaacgcgatggcggagagcatcaatggtctttacaaagcggaggtaatacaccgtaagagctggaaaaaccgtgcagaagtggaactggccacactcacgtgggtggactggtataacaatcgacgattgctggaaaggctgggccatactcctccggcagaagcagaaaaagcttattatgcttccatcggaaacgatgatctggcagcctga

SEQ ID NO: 465246 - DNA, 288 bp, Shigella boydii
atggccccagcgttattcatcctcggtgccgctggctttacgctatatccggtggcgatggcatgggcttgcgagaaagttgaacatcatcaactggtggcgatgaaccaggccttactgttgagctatactgtgggaagtctgcttggcccgtcatttaccgctatgctaatgcagaatttctccgataatttattgtttatcatgatcgccagcgtatcgtttatctatttgctgatgctgctgcgcaacgccggtcatacgccgaaacccgttgctcacgtgtaa

SEQ ID NO: 465247 - DNA, 546 bp, Shigella boydii; identical to SEQ ID NO: 463236

SEQ ID NO: 465248 - DNA, 429 bp, Shigella boydii
atgaagcttcctccagcaatggcgaactggtgtttaaacgctacgagcagcgttaagtttgcagtcaatgccggatgcggcgtgaacgccttatccggcctacaaaagcatgcagattcaatatattgcagaattcacgtaggcctgataagacgcgccagcgtcgcatcaggcgctgaatgccggattgttacccggcatttgtcatttagcggtgatgtttgcctggaccatgaccgccgtgatgatcatgaggagctttcttatggtggcgcggcggtggcggcggtccgtgtgggtgccagcgattgcctcgccattcataatgttgtttccaccagccgtggtcgcgccagtgacctccatcccagtaatagccacgattatcacgattgcctatctgtaattttactgacgggactaacgtaa

SEQ ID NO: 465249 - DNA, 402 bp, Shigella boydii; identical to SEQ ID NO: 462646

SEQ ID NO: 465250 - DNA, 447 bp, Shigella boydii; identical to SEQ ID NO: 462775

SEQ ID NO: 465251 - DNA, 1068 bp, Shigella boydii
gtgtccgttaaactcaggctacctcaggtggttgaagagcgtcagcgcgggttaaccagtttgtgccaaattaaccgcaagacccgggaagtcattggtattgcctttgatgatccagcctatgtgacctggattgcctacaatccagaacctgaaaccgcgcgattgcgttatggttattcttccatgaccacaccagacactttgtttgaactggatatggataccggtgagcgtcgtgtattaaaacaaacggaagttcctggttttgatgcggcgaattaccgcagtgaacacctgtggatagtcgcccgtgatggcgtcgaagttccggtttcgttggtctaccatcgcaaacattttcgcaaaggacacaacccgttgctggtgtatggctatggttcttacggcgcaagtattgatgccgatttcagttttagccgcttgagtttgttagatcgtggctttgtctacgccattgtccatgttcgcggcggtggtgagctggggcaacaatggtacgaagacggaaaatttctgaagaagaaaaatacgtttaatgattatcttgatgcctgcgatgcattgttaaaactgggctatggctctccttcgctttgttatgcgatgggcgggagtgcggggggcatgttgatgggcgttgcaattaatcaacgcccggaattattccacggcgttatcgcccaggtaccgtttgttgatgttgtaacaacgatgcttgatgaatcaattcctcttaccactggtgagtttgaagagtggggtaacccgcaggatccgcaatattacgagtacatgaaaagctacagcccgtatgacaacgtcaccgcacaggcttatccgcatttactggtaacgaccggtttacacgattctcaggtgcaatattgggaaccggcaaaatgggtcgctaaattgcgcgagctgaaaaccgataaccatcttttattgctctgtaccgacatggactcaggccatggcggtaaatctggccgctttaaatcgtacgaaggcgtagtgaaccgccccgggaatcctggagactaa

SEQ ID NO: 465252 - DNA, 423 bp, Shigella boydii
atgtgtcgggtacctggtgtatccaggagcggttattacgaccgggtacagcatgccccctcagacagaaaacaaagtgatgagcggctaaaactggagattaaggtggcacatatccgcactcgcgaaacatatggaacccggcggctccagacggagctggcagataacggaattatcgtcggtcgtgacagactggcacgtcttcgtaaggagctgaggctgcactgtaagcagaaacgcaagttcagggcgaccacaaactctgaccacaatctgccggttacgccgaatctgctgaatcagaactttacgcccacagcacctaatcaggtctgggtcgcagattcagttgtccaggccttccgaaatcaaccgactgaaggcgctggtcgcgaaactgcagcgtatgcagttcggtaa

SEQ ID NO: 465253 - DNA, 429 bp, Shigella boydii; identical to SEQ ID NO: 462506

SEQ ID NO: 465254 - DNA, 225 bp, Shigella boydii; identical to SEQ ID NO: 462715

SEQ ID NO: 465255 - DNA, 696 bp, Shigella boydii
gtgcactatcagccgattgtctccttagccaatggcaaaattgtcggtgctgaggcactggcgcgctggccgcagacagacggtagttggttgtcaccagatagttttattccgctggcacagcaaacaggcctttctgagccattgacgctactgattataagaagcgtctttgaagatatgggcgactggctgcgtcagcatccacagcagcatatttcgatcaatcttgaatccaccgtgctcacctcggaaaaaatcccgcaattgctgcgtgaaatgatcaatcactatcaggttaatcccagacagatcgcgcttgaactcactgaacgcgagtttgccgatccgaaaaccagcgccccgataatttctcgctaccgggaggcgggccatgaaatttatcttgatgattttggtacgggatattcaagtttaagttatttacaggatctggatgtcgacattctgaagatcgataaatctttcgttgatgcgctggaatataaaaatgtcacgccgcatatcatcgaaatggcaaaaacactgaaactgaaaatggtagcggagggaatcgaaaccagtaaacaagaagagtggctacgccagcatggcgtgcactacggtcagggctggctctacagcaaggcattaccgaaagaagatttcttacgctgggccgagcaacatttgtga

SEQ ID NO: 465256 - DNA, 588 bp, Shigella boydii; identical to SEQ ID NO: 462635

SEQ ID NO: 465257 - DNA, 303 bp, Shigella boydii
atgaacaggcacacacaaatccgccaggcagtactggcaagcctgaagggcgaatgcggggggaatgtcgtgctttttgacgggcttccggcatttattgatgcgcaggaactgcccgccgtggcggtgtggctgagtgatgcgcagtacaccggaaaaatgacggatgaggacgactggcaggctgttctgcatattgccgttttcgtccgtgcacaggcgccggattctgagctggatacgtggatggagaacaccatatttccggccatgatgaaccgccccgggaatcctggagactaa

SEQ ID NO: 465258 - DNA, 195 bp, Shigella boydii; identical to SEQ ID NO: 463979

SEQ ID NO: 465259 - DNA, 456 bp, Shigella boydii
atgacattaaccgatcactttgataatgctattccacctgttttttaccatgagcaccaatcatttttcttagataactttaaagaggttgtggatgaagttagcaggtatgtgcatggtaatcaggggaaaactgatgttccaatatttaacactaaagatatgaggcttggaattgggttgcatcttattgattttataagaaagagtaaagaacaaggattccgagagttttgttataacaaaaacattgatcctgttagtctggatagaattataaactttgtgtttcagcttgagtatcatataccaagaatgctaagtacagataacttcaaaaaaataaaactcagagacatatctttggaggatgcgattaaagcatctaattatgaagagattaacaataaagtgactgataaaaaatggctcatcaggcccttgcttattctttag

SEQ ID NO: 465260 - DNA, 285 bp, Shigella boydii
gtgtccagacactatatctctgagataatacaaaaagctcatcctctttcttcagacgaacgtcacttactttctattattattaattctaattttaacttcagacatcaaagtaactctaatctgtcaaataatattcttaatattaaatcctttgataaaattcagtctgaaaatatacaaacacataagaatacatactctgaggatattaaagaaatctctaaccacgattttgtttttttggggttgaaatttccaatcatcaagaaaaactcccactaa

SEQ ID NO: 465261 - DNA, 243 bp, Shigella boydii
atgtcgcgtaaaggtaactgttacgacaacgctccgatggaaagcttctggggaacgctgaaaaatgagagcctgagccactatcgttttaataaccgggatgaagccatctcagtaatacgggaatacattgagattttctacaatcgtcagcgtcgtcactctcgtctggggaatatctccccggcagccttcagggaaaaatatcatcagatggctgctcaaaaaaagaacaaatggtag

SEQ ID NO: 465262 - DNA, 261 bp, Shigella boydii; identical to SEQ ID NO: 461695

SEQ ID NO: 465263 - DNA, 1173 bp, Shigella boydii
atgagctatataaaattgctcactcaattatcttttcctaatagaatctcggggccaatcttggaaacaagtcttagcgatgtttcgattggtgagatttgtaacattcaggctggaattgaaagtaatgaaattattgcaagagctcaggttgtcggatttcatgatgaaaaaacaatattaagcttgattggaaattctcgtggactttcacggcaaacgttgattaagcccactgcccagtttcttcatacgcaagtcggccgtggattattgggagcagtagtcaatcctttaggggaggttactgataagtttgctgttacggataacagtgaaattctttatcgacctgtagataatgctcctccgctatatagtgaaagggctgcaattgagaagccttttttaacaggtatatatgttattgggttaattggtgagcgaggtcgagaggttacagaaacggttgattatttgaaaaactctgagaaaaaaagcaggtgtgttttagtatatgcaacttcggattactcttcggttgatcgttgtaatgctgcatatatagccactgctatagccgaattttttaggactgaaggacataaagtagcgctttttattgattcattaacaaggtatgccagagcattacgtgatgtggccttagccgctggagaatcacctgccagaagaggctatccggtttcggtttttgatagcttacccagacttcttgaaaggccaggaaagttaaaggcaggtggctctattactgcattttacactgttcttttggaggatgatgattttgctgatccattagctgaagaggtaagatccattttagatggacatatatatttgagcagaaatctagcccaaaaaggacaatttcctgcaattgattccttaaaaagtataagcagggtatttacacaggttgttgatgaaaaacatcgtattatggccactgcatttcgggagctactttctgaaatagaagagctaaggacaattattgactttggtgaatacaaaccgggggagaatgcctctcaggataaaatctacaacaaaatatctgttgttgagagttttctgaagcaagattatcgactcggttttacttatgagcagacaatggagcttcttggtgaaacaattagataa

SEQ ID NO: 465264 - DNA, 594 bp, Shigella boydii; identical to SEQ ID NO: 463274

SEQ ID NO: 465265 - DNA, 627 bp, Shigella boydii; identical to SEQ ID NO: 9357

SEQ ID NO: 465266 - DNA, 303 bp, Shigella boydii; identical to SEQ ID NO: 9358

SEQ ID NO: 465267 - DNA, 585 bp, Shigella boydii; identical to SEQ ID NO: 460740

SEQ ID NO: 465268 - DNA, 420 bp, Shigella boydii; identical to SEQ ID NO: 463084

SEQ ID NO: 465269 - DNA, 672 bp, Shigella boydii
atgataaaagatgaactttatgagttggtcttaactgatgatccgaaaggaaaattatatgtgagggattcagagaaaattgaagaaggggtcagtacaactgagtttgttgtgggatatggtgctatttcgatggtaaaaaaatcggaatcgatggcaactaaaggattggttggactggagcgtgtagatctcatccgagaggttgtatttgaaaatggatattatgattggggatgtgttgttaatgatgttttgccaaatatatgcaaaggcaatgcgcgcattcctatttttcacttcttaaatcacgctaaattaattaatcctgatgggagtataattaatgaaacagaactctcaggtggcgttttatcacgattaaatatcactcctattagttttcagtctcaaggatgggataaacgacgctctgaaaccgttcctgaggtcaaggtgggggtcaatgagttatatcttgcttatgatttcagtttctttttaagaatgatgccttatatggagcctggattaatcaagcgcgatatgggagagcttctcaaaatattgaaaaaacatatagatgaagctatgaatactcaggtgttgtcaagtaatttttgcaaattagtgtgtatttatgattatatcaaaaatagtcacaggtattaa

SEQ ID NO: 465270 - DNA, 237 bp, Shigella boydii; identical to SEQ ID NO: 460237

SEQ ID NO: 465271 - DNA, 447 bp, Shigella boydii; identical to SEQ ID NO: 462775

SEQ ID NO: 465272 - DNA, 771 bp, Shigella boydii
atggtcacttttgagacagttatggaaattaaaatcctgcacaagcagggaatgagtagccgggcgattgccagagaactggggctctcccgcaataccgttaaacgttatttgcaggcaaaatctgagccgccaaaatatacgccgcgacctgctgttgcttcactcctggatgaataccgggattatattcgtcaacgcatcgccgatgctcatccttacaaaatcccggcaacggtaatcgctcgcgagatcagagaccagggatatcgtggcggaatgaccattctcagggcattcattcgttctctctcggttcctcaggagcaggagcctgccgttcggttcgaaactgaacccggacgacagatgcaggttgactggggcactatgcgtaatggtcgctcaccgcttcacgtgttcgttgctgttcccggatacagccgaatgttgtacatcgaattcactgacaatatgcgttatgacacgctggagacctgccatcgtaatgcgttccgcttctttggtggtgtgccgcgcgaagtgttgtatgacaatatgaaaactgtggttctgcaacgtgacgcatatcagaccggtcagcaccggttccatccttcgctgtggcagttcggcaaggagatgggcttctctccccgactgtgtcgccccttcagggcacagactaaaggtaaggtggaacggatggaacagtttttacatcccactaatgactcgcctgcgcccgatggggagcactgtcgatgttga

SEQ ID NO: 465273 - DNA, 351 bp, Shigella boydii; identical to SEQ ID NO: 464002

SEQ ID NO: 465274 - DNA, 447 bp, Shigella boydii; identical to SEQ ID NO: 462775

SEQ ID NO: 465275 - DNA, 447 bp, Shigella boydii; identical to SEQ ID NO: 465210

SEQ ID NO: 465276 - DNA, 270 bp, Shigella boydii
gtgtactgtcgtaatggccaggtggaaatcgacaacaacatcggtgaaaacgcgctgcgatcggtggcggttggaagaaaaaattatctcttcttcggttctgacaacggtggagaaagcgcggcgattatctacagtctgctggtcacctgcaaactgaacggagtggagccggaggactggttgcgcgaagtgatcgtgaagctcaatgactggccgtcgaaccgagtgcatgaactgctgccctggaacttctcagctgtaaaataa

SEQ ID NO: 465277 - DNA, 225 bp, Shigella boydii; identical to SEQ ID NO: 462726

SEQ ID NO: 465278 - DNA, 180 bp, Shigella boydii; identical to SEQ ID NO: 461173

SEQ ID NO: 465279 - DNA, 321 bp, Shigella boydii; identical to SEQ ID NO: 462743

SEQ ID NO: 465280 - DNA, 213 bp, Shigella boydii; identical to SEQ ID NO: 462242

SEQ ID NO: 465281 - DNA, 420 bp, Shigella boydii; identical to SEQ ID NO: 463084

SEQ ID NO: 465282 - DNA, 249 bp, Shigella boydii; identical to SEQ ID NO: 463591

SEQ ID NO: 465283 - DNA, 225 bp, Shigella boydii; identical to SEQ ID NO: 462228

SEQ ID NO: 465284 - DNA, 564 bp, Shigella boydii
gtgaaggaagccgggtgcctggcccacgcccgccgaaaaatccatgacgaggatgtgcgccgtccgacagaaatgactcaggaagcgctcagacggatagcagagttatacgacatagaagcggagatacgtggcagtccggcagaggaacggcttgcagtcagaaaagccagaagcgtccagttgatgcagtcattgtacgactggatacagttgcagaggaaaacgctgtcgaaacatgcggagatggcgaaggcgttcgactatatcctgaatcactggaatgcgctgaacgagttctgtcgtgacggctgggtggaaatagacaacaacatcggtgaaaacgcgttacgatcggtggcggttggaagaaaaaattatctctttttcggctcagacaagggaggagaaagtgcggcgatcatctacagtctgctggtcacctgcaaacagaacgaagtggagccggaggactggttgcgcgaagtgatcgagaagctcaatgactggccgtcgaaccaagtgcatgaactgctgccctggaacttctcgtctgtaaaataa

SEQ ID NO: 465285 - DNA, 174 bp, Shigella boydii
atgaaaaaaagaaattttagcgcagagtttaaacgcgaatccgctcaactggttgttgaccagaaatacacggtggcagatgccgccaaagctatggatgttggcctttccacaatgacaagatggggcaaacaactgcgtgatgagcgtcagggcaaaaatcgaaatacgtaa

SEQ ID NO: 465286 - DNA, 174 bp, Shigella boydii
atgaaaaaaagaaattttagcacagagtttaaacgcgaatccgctcaactggttgttgaccagaaatacacggtggcagatgccgccaaagctatggatgttggcctttccacaatgacaagatcggtcaaacaactgcgtgatgagcgtcagggcaaaaatcgaaatacgtaa

SEQ ID NO: 465287 - DNA, 555 bp, Shigella boydii; identical to SEQ ID NO: 462745

SEQ ID NO: 465288 - DNA, 324 bp, Shigella boydii
gtgtgccacttcacccgggaacacgatatcaatgataacctgctgttcaaatggctcaggctctggcagaacgaagggcgcatatcgcggcgtcttccggtaacaacctcttctgacactggcgttgaattattacctgtggagataacgccggatgagccgaaagaacctgtggctgctcttactccgtctttatctactcagactacagttagtgccagctcctgcaaggtggagttccgtcacggtaacatgacgctggaaaatccttcaccagagctgctcacagtgttgatccgtgaactgaccgggaggggacgatga

SEQ ID NO: 465289 - DNA, 141 bp, Shigella boydii
atgatctcactcccgtcaggcacccgcatctggctcgttgctgggataaccgatatgcgtaagtctttcaacgggctgggtgaacaggtacagcatgtgctgaatgataatcccttctccggtcacctgttcatcttctga

SEQ ID NO: 465290 - DNA, 420 bp, Shigella boydii; identical to SEQ ID NO: 463084

SEQ ID NO: 465291 - DNA, 216 bp, Shigella boydii
atgcaactgagcaggctgacgctgagaagtaaaaagccggagcttgtggagcaagagctgtggggtgtcttactggcttataatctggtgagatatcagatgattaaaatggcggaacatctgaaaggttactggccaaatcaactgagtttctcagaatcatgcggaatggtgatgagaatgctgatgacattgcagggcgctgaggtagcctga

SEQ ID NO: 465292 - DNA, 261 bp, Shigella boydii; identical to SEQ ID NO: 461695

SEQ ID NO: 465293 - DNA, 447 bp, Shigella boydii; identical to SEQ ID NO: 462775

SEQ ID NO: 465294 - DNA, 303 bp, Shigella boydii; identical to SEQ ID NO: 459543

SEQ ID NO: 465295 - DNA, 447 bp, Shigella boydii; identical to SEQ ID NO: 465210

SEQ ID NO: 465296 - DNA, 297 bp, Shigella boydii; identical to SEQ ID NO: 463283

SEQ ID NO: 465297 - DNA, 189 bp, Shigella boydii
atggaaagcttctggggaacgctgaaaaatgagagcctgagccactatcgttttaataaccgggatgaagccatctcagtaatacgggaatacattgagattttctacaatcgtcagcgtcgtcactctcgtctggggaatatctccccggcagccttcagggaaaaatatcatcagatagctgcttaa

SEQ ID NO: 465298 - DNA, 447 bp, Shigella boydii; identical to SEQ ID NO: 462775

SEQ ID NO: 465299 - DNA, 372 bp, Shigella boydii; identical to SEQ ID NO: 462525

SEQ ID NO: 465300 - DNA, 240 bp, Shigella boydii; identical to SEQ ID NO: 463853

SEQ ID NO: 465301 - DNA, 327 bp, Shigella boydii
atgactaaaaatactcgtttttcccccgaagtccgtcaacgggcagtccgtatggttctggaaagtcagggcgaatatgactcacaatgggcgacaatttgttccattgctccaaagattggctgtacgccggagactctgcgtgtctgggttcgccagcatgagcgggataccgggggcggtgatggcgggctcaccaccgctgaacgtcagcgtctgaaagagctggaacgtgaaaatcgtgaactgcgccgcagtaacgatatccttcgccaggcttccgcttattttgcgaaggcggagttcgaccgcctctggaaaaagtga

SEQ ID NO: 465302 - DNA, 219 bp, Shigella boydii; identical to SEQ ID NO: 465001

SEQ ID NO: 465303 - DNA, 369 bp, Shigella boydii
atgaaagcgctggaaatggcatgggaaacccgtggtaagcccggcggggtgatgttccacagcgatcagggcagtcattatacgagcaggcagttccggcagttattgtggcgataccagatcagacagagtatgagccggcgcggaaactgctgggataacagcccaatggaacgcttcttcaggagtctgaagaacgaatggatgccggtggtgggttacgtaagcttcagcgaggcagctcacgccataacggactatatcgttggatattacagcgcactaagaccgcacgaatataacggtgggttacccccaaacgaatgtaagcgtcaacggagcaccgtattgacgcttatttattggtga

SEQ ID NO: 465304 - DNA, 225 bp, Shigella boydii; identical to SEQ ID NO: 462715

SEQ ID NO: 465305 - DNA, 180 bp, Shigella boydii
atgggcaactttaatgttaaggaagtagatgggtgcttcatggatgcacaaaagatagctatagataaactattttctatgctgaaagacggggttgttttaaaaggtaataagataaatgataccatccttatagagaaggatggggaagttaaattaaaattaattcgagggatataa

SEQ ID NO: 465306 - DNA, 267 bp, Shigella boydii; identical to SEQ ID NO: 80380

SEQ ID NO: 465307 - DNA, 234 bp, Shigella boydii; identical to SEQ ID NO: 19714

SEQ ID NO: 465308 - DNA, 1080 bp, Shigella boydii
atgtcattctttgttaaatataatacaaccgttatggaagcaattgataaggttggatctacttatcaaagtcaattcacacaagatataatgtcattagtgacagcatctgtcacgttatatgtactatggaaaggctatcaaatactcgccagtaaaactcagactccgatgcaggatttagtttgggatttatcaaaatttgcgatcataatcatgtttataacaaatgcagatggatatttgacagcggcaaccaatgcattgcaaggcatgaaagatgggctttctggcggagttagcgcatggcaaaccttagataacttatgggagaaaacacaaaatcttgcggaaaaggtatatcaaaaagatactgatttcattcctttggctggcgcattaggtatgacgcttgtttgggctggctcacttattttaatgacaattagtgctgttgtttttttaactgccgatattacgatgaaattccttattataacagcgccaatatttattttctgtctgatgttcggttttattagagttatgtttaataactggttgcaatcgctattttctagcatcctgactgtgttatttgccagtttagtaattcggatagctatggattttcagggggatatattgcaacaagtatctaatgcgacacccaatagtaatgttatgaccgtaagtgcaatgggatttttagccggattgttgggagctttattggttcttatagctaaaagttttgctgtccagttagcaggtgcaggtgttgaaggtgctgttcagggcgcagccatgatggggctgggtgccgctggtatggctactggtaagtctctgatgcttggcggtcgcgctggtttaggttttggcttagggatggccggaagaacgggcatgaattctttatcagggaaagcagggaatctgatggggcgtggtgcgcgaacagccgctgaatgggcgggtgaaaagggatatcaggcgctggctccgacaggtgctttggggatgaaggctagaagacttgcatccctggaaaaagcgcgagcgaggaatgccgcatga

SEQ ID NO: 465309 - DNA, 129 bp, Shigella boydii; identical to SEQ ID NO: 40093

SEQ ID NO: 465310 - DNA, 258 bp, Shigella boydii
atgaaaaaaaaagaaaagattgattttcttaatgcaataaaagcagggcactctggctttatagctggtaatcctgctcatgcattggatgataagactatgaacgccatcattcataactacgaggcaacgattgcgcccggtaaagcaggtaactgcaaagaaactcctctcacaaagtattgttcgaggactatgccagagcgtatttcagttgaagaaatcaatgaggttaaaatttatccagagttattctga

SEQ ID NO: 465311 - DNA, 309 bp, Shigella boydii
atgaaagcaagaagtgtgagagttgccggaattgaaattatcgatagtgttaaaacggtcgcttatgtttttactgaaaccttactgtttatggtctggttttcggcaattgtctatgggctttatcgtgttcttatcgttttatgggatgatcctttaaagccgcaatcgctcatggaatttcttaatttcatagttgagttgtatagctatgtacttccttcgttggctgttatcgcagtggctttaatcgccgttttatccatttgtaaaatactctcagcaatatgggagggaagaaaacaatga

SEQ ID NO: 465312 - DNA, 360 bp, Shigella boydii
atgatgacaaaacattataaagaacgattcaataaaagaattggtggtgaagttcagattagtgctgatatccgtgtcagtgatttcatgacagaaggtgcagcttacgtcactataacggaatcaactgaatcatccctgtatgagcaaatctgccagtatgccttgcaacatggtgaagatttacaggggatgtttaaggatgaaaaatatgaatatatgtcctgttttgttcgtgatgtggcaacattcagagctaattttgaaaacgaagagacgttaaaacctctgtttaatcatggtaaaggtgacactgttgaatttgttatcagtgttcctgaaaaaagagtcgaggattaa

SEQ ID NO: 465313 - DNA, 588 bp, Shigella boydii; identical to SEQ ID NO: 375883

SEQ ID NO: 465314 - DNA, 216 bp, Shigella boydii; identical to SEQ ID NO: 21515

SEQ ID NO: 465315 - DNA, 138 bp, Shigella boydii
atgtcaacgcagcagatcgtacagcttgctgattcccttgtcaaaggctgggaaaccagaattccggcaatgaaatttagtgaatgggatcaattccggtggtggttaaactacttgcaagggtatgaaatgttttaa

SEQ ID NO: 465316 - DNA, 990 bp, Shigella boydii
gtgagagcactactgacccctgaaattgccccgcgtatggggatcgtattgttcaggccaggttcagagctgatgcccctgtttatgcaggggcgtgtcctgctggagcctgagccggaacgttattcatctttcgccagtggtgccgttccggcggcatcacaaccgctggcggatgatcctgccgttcgggctgtgttccgcaatgaggcagtgatccgtcgtgctggtggcgtggaatgtcttgaaagctggttacttcgtgaaaaaggctgccagtggcctcattccgactggcacagcgagaacatgaccacaatgcgacacgcgccgggcgcaatccgtctgtgctggcactgtgataaccagctgcgcgatcagttcacggaacggctggaatcaatggcaacggataactgtgcccgctgggtgttgtctgttgtgcgtcgggatctcggttttgatgacagtcacgttgtgacaatgccggaactgtgctggtggctgattcgtaatgacctggcggatgccttaccggaaagtgcagcccgtaaggcactgagattaccaaagcctgttgtgccgtctgtcacccgggaaagtgaccttgtgccttcggttcctgccaccagcatcatccaggataaagcgaaaaaggtgctggcgctgaaagtggatccggagtcgccggagtcttttatgttacgcccaaaacgtcgccgctgggttaatgaaaagtacacgcgctgggttaagacacagccgtgtgcatgttgtggaaagcccgctgatgatccccaccacctgataggtcacggtcagggtggaatgggaacaaaagcgcatgacctctttgtgttgcctttgtgcagaaagcatcacgacgagctgcatgcggataccgtggcatttgaagagaagtatggctctcagctggagctgatatttcgttttatcgatcgtgcgctggcaattggcgtattggcgtaa

SEQ ID NO: 465317 - DNA, 177 bp, Shigella boydii
atgatggacgctcccgtgggcagaacgtccgtgaatgcgattgatggcacattgctgattttagcgggtggcactgatgagcagattgcacgtgcacgcccgattcttatgtgcatgggtaatgagctggtcgaggctgggcggcccaggaatggggatccgcgtgaagctaattaa

SEQ ID NO: 465318 - DNA, 381 bp, Shigella boydii; identical to SEQ ID NO: 458903

SEQ ID NO: 465319 - DNA, 231 bp, Shigella boydii; identical to SEQ ID NO: 463702

SEQ ID NO: 465320 - DNA, 525 bp, Shigella boydii; identical to SEQ ID NO: 463707

SEQ ID NO: 465321 - DNA, 348 bp, Shigella boydii; identical to SEQ ID NO: 462825

SEQ ID NO: 465322 - DNA, 420 bp, Shigella boydii; identical to SEQ ID NO: 462828

SEQ ID NO: 465323 - DNA, 783 bp, Shigella boydii; identical to SEQ ID NO: 461746

SEQ ID NO: 465324 - DNA, 624 bp, Shigella boydii; identical to SEQ ID NO: 461766

SEQ ID NO: 465325 - DNA, 747 bp, Shigella boydii; identical to SEQ ID NO: 460259

SEQ ID NO: 465326 - DNA, 1128 bp, Shigella boydii
gtgattcgccctggtcaggagcgggcagagcaacatattgacctggcctatgccatcaccgcccacggtgcacagggggcgagtgaaacctttgccatcgcgcttgaaggcacggaaggtaaccggaaactgatggccggctttgagtcagcctacgtggccctgtcgcgtatgaagcagcatgtgcaggtgtacaccgataaccgtcagggctggacggatgccatcaacaatgccgtacagaaaggaactgcccacgatgtgtttgagccgaaaccggaccgggaggtcatgaatgcagagcggctgttcagtacggcgcgggagctgcgggacgtggcggcaggccgtgccgttctccgtcaggcggggctggccgggggagacagtcctgcacggtttattgatccgggacgtaaatatccgcaaccgtatgtggcactgccggcgtttgaccgtaacggcaagtccgccggtatctggctgaacccgctgaccacggatgacggaaacgggctgcggggattcagcggtgaaggtcgggtaaaaggcagcggggatgcgcagttcgtggccctgcagggcagccgtaacggagaaagcctgctggctgataatatgcaggatggcgtccggattgcccgtgataatcctgacagtggtgtggtggtaagaatctccggtgaaggccgtccgtggaatcccggtgccatcaccggtggccgcgtgtggggggatatcccggacaacagcgtccagccgggagccggaaatggcgaaccggtcacggcagaggtactggcacagcggcaggctgaagaggccatccgccgtgaaacggaacgtcgcgcagatgaaattgtccgtaaaatggcagagaacaaacctgacctgccggacggcaaaacagagcaggctgtcagggaaattgccgggcaggagcgtgaccgggctgccataactgaacgggaagccgcgctgccggagagtgtactgcgtgaaccacaacgggtgcgggaagcggtctgggaagttgcccgggaaaatttgctgcaggagcgtctgcagcagatggagcgggatatggttcgtgacctgcagaaagagaaaaccccgggcggagactga

SEQ ID NO: 465327 - DNA, 3690 bp, Shigella boydii
ttgctgtccgtcatcacccgtgtggaggcactggcctccacacgggtgatgacggacggacagtcagaaacggtgctgaccggtaatctggtgatggcactgtttaaccacgacaccagtcgcgatcaggaaccacagttacacacgcatgcggtggtgactaatgttacgcagcataacggcgaatggaagacactgagcagtgacaaagtggggaaaacggggttcattgagaatgtgtacgctaatcagattgcctttggcaggctctaccgggaaaaactgaaagagcaggttgaggcgctgggctatgaaactgaagtggtcggtaagcacggtatgtgggaaatgccgggtgtaccggtggaggccttttccggacgctcacagactatccgggaggccgtcggggaagacgcctcgctgaaatcccgggatgtggcggcgctggatacgcgtaaatccaaacagcacgtcgatcctgaagtcagaatggccgagtggatgcagacgctgaaggaaaccgggttcgacatccgggcatatcgtgacgcagcggaacaacgggcatatacccgcacgcagacacccggacccgcttcacaggacgggccggatgtgcagcaggcggtgacacaggccattgccggattaagtgaacgcaaagtgcagtttatgtatacggacctgctggccaggacggtcggcatactgccgccggaaaatggtgtgattgaacgggcacgcgccggtatcgatgaggccatcagccgtgagcagcttatccccctcgatcgtgagaaggggctgttcacgtccgggattcatatgctcgatgagctgtcagtccgggcactcagtcgtgacatcatgaaacagaaccgggtgaccgtacatccggagaaaagtgtcccccggacggccggttacagcgatgccgtcagtgttctggcacaggaccgtccgtcgctggccattgtgtccgggcagggcggtgcagccgggcatcgtgagcgggtggctgaactggtcatgatggcccgggagcaggggcgggaggtgcagattatcgctgctgaccgtcgctcgcagatgaacctgaagcaggatgaacggctgtccggtgaactgataaccggacgtcgtcagttgctggaaggcatggccttcacgccgggcagtaccgttatcgtcgaccagggcgaaaaactctccctgaaagagacgttaaccctgctggatggtgccgcacgtcataacgtacaggtcctgataactgacagcgggcagcgaaccggtacaggcagtgcactgatggccatgaaggatgccggggtgaacacatatcgctggcaggggggagaacagcgaccggccaccatcatcagtgaaccggaccgttatgtccgctatgcccggctggccggagattttgcggccagcgtgaaagccggagaagagagcgtggcacaggtcagcggagtacgggaacaggccatactgacacaggccattcgcagtgagctgaaaacacagggcgtgctcggacacccggaggtaaccatgaccgccctgtcaccggtctggctggacagccggagccgttatctgcgggatatgtaccgcccgggaatggtgatggagcagtggaacccggagacacgcagtcatgaccgctatgtgacagaacgtgtgacggcgcagagtcacggcctgaccctgcggaatgcgcagggcgaaacgcaggtggtgcgtatttcttccctggacagcagctggtcgctgttccggccggaaaaaatgccggtggcagacggtgagcgtctgagggtgacagggaaaattcccggactccgcgtctccggcggtgaccgcctgcaggtggcatccgtcagtgaagatgcgatgacggttgttgtgccgggacgggctgaaccggccaccctgcctgtgagcgattcaccgttcacggcactgaagctggagaacggctgggtggaaacgcccgggcattccgtcagcgacagtgcgacggtttttgcctccgtcacacagatggcaatggacaatgccaccctgaacggtctggcccgcagtggtcgtgatgtccggctgtattcctcactggatgaaacccgtactgcggaaaaacttgcccgccatccctcctttacggtggtttctgagcagataaaggcgcgtgccggtgagacattgctggaaaccgctatcagtctgcagaaagccgggcttcacacgccggcacagcaggccattcatctggcccttcctgtgctggaaagtaaaaacctggccttcagcatggtggacctgctgacagaggcgaagtcgtttgctgcagaaggaaccggttttgctgacctgggaggggaaatcaatgcgcagataaaacggggtgatttactgtatgtggatgtggcaaaaggctatggcacaggcctgctggtttcccgtgcgtcgtatgaggcagaaaagagcattcttcgccatattctcgaaggtaaggaagcggtcacgccgctgatggagatagtacctggcgaactcatggagaaactgacatcaggacagcgcgccgccacccgtatgatactggaaacgtccgaccgtttcacggtggtgcagggctatgccggtgtgggtaagaccacacagttccgggcggtgatgtcagccgtgaacatgctgccggagagtgaacgtccccgtgtcgtggggctggggcccacacaccgtgcggtcggggagatgcgcagcgccggcgtggatgcacagacactggcgtcctttctgcatgacacgcagctgcagcagcgcagcggagaaacgccggatttcagcaacacgctgttccttctcgatgagagctctatggtgggcaataccgacatggcacgggcatacgccctgattgcggccggtggcggtcgggctgtggccagcggtgacacggaccagctgcaggccatcgcgcccggtcagcctttccgtctccagcagacgcgcagtgctgccgatgtggtcatcatgaaggagattgtgcgtcagacgccggaactgcgggaggcggtatacagcctgattaaccgggatgtggaaagggcgctgtccgggcttgagcgtgtgaaaccgtctcaggtgccacgtctggagggcgcatgggcaccggagcactccgtgacggagttcagtcacagccaggaagcgaaactggcagaagcgcagcagaaggcgatgctgaaaggcgaggcttttccggatgtccccatgacactgtatgaagccattgtccgcgactataccggcaggacaccggaagcacgggagcagacgctgattgtcacgcacctgaatgaggaccggcgcgtactgaacagcatgattcatgatgcacgggaaaaggccggagaactggggcaggtgcaggtcatggtgccagtcctgaacacagcgaatatacgcgacggggagctgcgtcgtctctccacctgggagaataacccggatgcccttgccctggtggataatgtgtatcaccggattgccggtatcagcaaggatgacgggctgataaccctgcaggatgcggaaggtaacacgcggctgatttcgccccgggaggcggtggctgaaggcgtcacgctgtacaccccggacaccatccggtga

SEQ ID NO: 465328 - DNA, 141 bp, Shigella boydii
atgagttttaacgcaaaggatatgacccagggcggtcagattgcgtccatgcgtatccgcatgttcagccagatcgccaatattatgctttactgcctgtttattttttctggatactcgttggtctggttttatgggtaa

SEQ ID NO: 465329 - DNA, 357 bp, Shigella boydii; identical to SEQ ID NO: 463749

SEQ ID NO: 465330 - DNA, 1131 bp, Shigella boydii
atgctcgacagttatgccgagcaggcggataacatgccgttattgcatcgggcgctggtgctggcgtgggcacaggagatgaatctgccgtgcaaaacgttgttgaaagggttggatgaagctatcgcccggcgcggaactaaagatgaagatttctctgaggaagacatccgcgatatcaatgacagcctgatcctcgatacaccggaatctccactggcagatgcggtggcaaacgtcttaaccatgacgttgctgaaaaaagcgcagttgaagtccacggtgatgccacaggttcagcaatatgcgtgggataaagcggcaaacagcaatcagccgctggcgcacacggttgtgctgctcaatagcggtggtgacgctacccagacggccgctattttaagtggtttgaccgctgagcaatccactattgagcgagcgctggccatgaactggctggcgaaatatatggcgacaatgcctccagttgttttgcctgcgcctgcgggcgcatgggctaaacataagttaactggagggggcgaatactggcgttgggttggtcagggcgtgccggacattctctcttttggtgacgaattatcgccgcaaaatgtgcaggtccgctggcgtgagccggcaaaaatggctcaacaaagtaacattccggtgaccgttgaacgccagttgtatcggcttatccctagtgaagaagagatgagctttattctgcaaccggtgaccagcaatgagattgacagcgatgcgctgtatctcgatgaaatcacgcttaccagcgagcaggatgcagttctgcgctacggtcaggtggaagtaccgctgccaccgggagccgacgttgagcgcacaacatggggcatttcggtcaataaacccaacgccgcgaaacagcaggggcaattgctggaaaaagcgcgaaatgaaatgggcgaactggcctatatggtgccggtgaaagaactgacgggaacggtcactttccgccatttgctgcgcttctcgcaaaaagggcaattcgttctgcctcctgctcgttatgtgcgttcctatgcacctgcacagcaaagtgttgcggcagggagtgaatggaccgggatgcaggtgaaataa

SEQ ID NO: 465331 - DNA, 615 bp, Shigella boydii; identical to SEQ ID NO: 463750

SEQ ID NO: 465332 - DNA, 1503 bp, Shigella boydii
gtggcgttaattcgtcagcaggcggcagagcagaataaggtgtaccagtccatgctggttatgaacggtcagcatacggaattcaaccgtctgctggggctgggtaatgaactgcttcagcagcggcagggactggtgaatgtgccgttacggctgccacaggccactctggatgataaacagcagagtgccctgacaaaaacagagcgtatccgactggggtatgcggcggatgacctcggttttgtgggtgatccgtatcaggaggcgagacaacgttatatcagtaatgccctggaagcctggcgcaataacgaggcgaataaacccaaatcccggggtggaaaatcagagacggaaaaagcggaagacagtttttcccggctgctgaagcagcagaaagagcaactggcactggcggggcagaatacagagctggcgaagctgaaataccagactgcgcagggcgaactgaaaaccctgacggagatgcagaagcaggaactgctgcgcaatgcggccctgattgaccagcaaaaaatccgggagcagttgcggtcccgggaagagaccctgaagaatgataatgtggctgcgcgtgcatcaaatgaagcggaactgctggggtacgggcagggagagcggctccgtgaacgcatgcgggagttgcagcagatccgcgacagtttccgccagaaggatgcggaccttcagtctcagtatcagaccggggatatcagtgaggatttttacagacaggctctggcacagaacgcgcagtatctgagtgaacgtctgaaagagcaggaagccttttatgccgaatcggatgtgcagcgtgcggactggcagaaagggctgcaggagggattcagtaactgggtggataatgcgtccgattacgcctcacaggcagtacagcttgcgacggagggtatctcagggatggtgaataacatcacggagatgctgaacggaaataaagtggaatggcgcagctgggcctcatcagtgctgcaggaaatatcaaaagttcttatgaatgccgcgattgtcaacgggatcaagacggcggcaaacagtatgtccggagcgggaggatttatcggcagtattggtagctggctgggcggtgcggtggccaatgcaaaaggcggtgtgtatacctcggcaaacctgagtgcgtacagcaacagtattgtggatacgcccacgtactttgcctttgcaaaaggggcgggactgatgggggaggccggtcctgaagccattatgcccctgacccgggcggcggatggctcgctgggtgtgcgagcggtgggcagtatgaacggcagtgcaggtctggtgtattccccggtctaccatatcgccattcagaatgacgggactaatggccagatagggccggaagctgcgggcagccttgtgcaactgattgaccagcgggtgcaggcggtgatgctgtccatgcgacgtgacggaggaatgctgagtggctga

SEQ ID NO: 465333 - DNA, 1470 bp, Shigella boydii; identical to SEQ ID NO: 460832

SEQ ID NO: 465334 - DNA, 555 bp, Shigella boydii
atggagcgggagttccccgaagcactggaacggatgaaagagatactgccaccgtatctcattatggttctggaaaaccagtacaaccgactgaatgagctggactcactgatagaggatattgaaaaacagcttaccagcgtggcgaggcagaatgaaacctgtaagcggttgctggatattcctggcgttggaccacttattgcgacggcagcggtggccaccatgggggaagcatcagcgtttaaatcggggcgagagttcgccgcatatgttggtctggttccaaaacaaactggctccggagggaaagtacgtctgctggggataagcaaacgtggtgacacttatctcaggacattatttatccacggtgcaagagcggtggcattagtagctaaagagcctggcccgtggataaccgaactgaaaaaacgtcgtccagccagtgtggcaatcgtcgccatggcaaacaagctggcacgaacagtatgggcgataaccgcccatgaccgtaagtatgacaggaaccacgtcagtatcagaccatattaa

SEQ ID NO: 465335 - DNA, 840 bp, Shigella boydii; identical to SEQ ID NO: 461112

SEQ ID NO: 465336 - DNA, 4056 bp, Shigella boydii
atgaacaaaatatttaaagttatctggaaccctgcgacagggaattatactgttaccagcgaaacggcaaaaagccgtggcaagaaatctgggcgcagtaagctgttaatttctgcgctggttgcgggtggaatgttgtcgtcgtttggggcattggcgaatgccgggaatgacaacggtcagggtgttgattacggtagtggatcagctggcgacggctgggttgctataggcaaaggggcgaaagcaaatacttttatgaacaccagtggttccagtactgctgtgggttatgacgctatagctgaaggccaatatagctctgccatcgggtcaaaaacccatgcgattggtggtgcatcaatggcctttggggttagtgcaatatcagaaggcgatagaagtatagcactgggtgcctcttcgtattcattgggccaatactcaatggccctcggccgttattcaaaagcattgggtaaattgtctattgctatgggggactcttccaaagcggaaggagcaaacgccattgccctgggaaatgccactaaagctactgagattatgagtattgctcttggcgacaccgccaatgcgtcaaaagcgtattcaatggcgctgggagcaagtagcgtcgcatctgaagaaaacgcaattgccctggggcgtagcagtgtagctagcggtactgacagcctcacatttggcagacaatcacttgccagcgcagcgaacgctattgcgataggtgctgagaccgaagccgctgaaaatgcaactgctattggcaataatgcgaaggcaaaagggactaatagcatggcaatggggttcggaagccttgccgataaagtcaatactatcgcattaggaaatggcagccaggctctggcagataatgcaatcgccataggccagggcaacaaagctgatggcgtggatgccatcgctctgggtaatggtagccagtcgagaggcttaaacaccattgccttaggcacagccagtaatgcaactggtgataagagtcttgcgcttggtagtaatagcagtgccaacggtattaactctgtcgcgctgggcgcagattccattgcggatttagacaataccgtctctgtcggcaatagttcattaaaacgcaagatcgttaatgtgaaaaatggcgcgatcaagtctgacagttacgatgccattaatggttcacagctttatgccattagcgactcggtagcaaaaaggcttggaggaggggctgcagtagatgttgatgacggtactgttacagcaccaacctacaatttaaaaaatggtagcaaaaataacgtaggggctgcgctcgctgtacttgatgaaaacaccctgcaatgggaccaaaccaaaggcaaatacagcgctgctcatggtactagtagcccaactgccagcgtaatcaccgatgttgcggatggcacgatttcagcctccagtaaggatgcggttaacggttcccaactgaaagctaccaatgacgatgtcgaagccaacaccgccaatatcgctactaataccagcaacattgccacgaatacggcaaatattgccaccaataccaccaatatcaccaacctgacggattccgttggtgaccttcaggctgatgccctgctctggaacgaaactaaaaaggcattcagtgcagctcacggccaggataccaccagcaaaatcaccaacgttaaagatgccgacctgacggctgacagcactgatgctgttaacggctctcagctgaaaaccaccaacgatgctgtggcgacgaataccaccaatatcgccaataacacttccaatattgccactaacaccaccaacatctctaatctgactgagacggtgactaatcttggtgaggatgcgctgaaatgggataaggacaatggtgtattcacggcagctcatggcaccgagaccaccagcaaaatcaccaacgttaaagatggcgacctgacgactggcagcaccgatgccgttaacggctctcagctgaaaaccaccaacgatgccgtggcgacgaataccaccaatatcgccactaacaccaccaacatctctaatctgactgagacggtgactaatcttggtgaggatgcgctgaaatgggataaggacaatggtgtcttcactgcagctcatggcaacaataccgccagcaaaatcaccaatatcctggacggcacagtcactgcaaccagttccgatgccattaacggtagccagctttatgacttaagcagcaatatcgccacctacttcggcggcaatgcttctgtgaatactgacggtgtgtttaccggtccaacctacaaaatcggtgaaacaaattattataacgtcggcgatgcactggctgcgattaactcctcatttagcacgtctctcggcgatgctctgctttgggatgccaccgcaggtaaattcagtgccaaacacggtactaatggtgacgcaagcgtgatcactgatgtcgcagatggtgaaatttcagactccagttctgacgcagtaaacggctcacaactccacggcgtgagcagttatgttgttgatgcgctggggggtggtgccgaagtcaatgcagacggcaccatcactgcgccgacgtacaccattgctaatgctgattacgataatgtcggtgatgccctgaatgctatcgataccactcttgacgacgctctgctctgggatgcggacgccggtgaaaatggtgcatttagcgccgctcatggaaaagataaaactgccagtgtaatcactaacgtcgctaacggtgcaatctctgctgccagcagcgacgcgattaacggctcacaactctataccaccaataagtacatcgctgatgcgctggatggtgacgcagaagtcaacgctgacggcaccatcaccgcaccgacttacaccattgcgaacgccgagtacaacaacgtcggtgacgccctggatgcgcttgatgataacgccctgctgtgggatgagactgccaatggcggtgctggagcctacaatgccagccatgacggtaaagccagcatcatcactaatgtcgctaatggcagtattagtgaggacagtaccgatgcagtgaacggttctcagttgaatgcgacgaatatgatgattgagcagaacacccaaattatcaatcagctcgctggtaacaccgacgcaacctatatccaagaaaacggtgcgggtattaactatgtgcgtactaacgacgacggcttagcgttcaacgacgccagcgcacagggtgttggcgctacagctataggttataactctgtcgccaaaggcgatagcagcgtagctattggtcagggcagctacagcgacgttgatacgggtatcgccctaggtagcagctctgtttccagccgagtgattgccaaaggctcccgtgacaccagcataacggaaaatggcgttgttattggttacgacaccacggatggcgaactgctcggtgcattgtctatcggtgatgacggtaaatatcgtcaaatcatcaacgtagccgatggttccgaagcccatgacgccgttacggttcgtcaattgcagaatgcgattggtgcggtcgcaaccacgccgactaaatacttccacgctaattcaacggaagaagattcactggcagtgggaactgactcgctggcaatgggtgcgaaaaccatcgtgaatggcgataaaggtattggtatcggttatggtgcctacgtggacgcgaatgcacttaacggcattgccattggtagcaatgcgcaagtcattcatgtcaacagtattgcgataggtaatggttctacgaccactcgtggcgctcaaaccaattataccgcctacaacatggacgcaccgcagaactctgtcggtgaattctcagtcggtagtgcggatggtcaacgtcagatcacaaacgtcgcagctggttcagcggataccgatgcggttaacgtgggtcagttgaaagtcactgatgagcgcgtagcgcaaaatacccagtag

SEQ ID NO: 465337 - DNA, 381 bp, Shigella boydii; identical to SEQ ID NO: 458903

SEQ ID NO: 465338 - DNA, 621 bp, Shigella boydii
gtgcagcacgagacaaaaatggaaaaccagagctggttgaaaaaaatcgcacgccgcctggggcctggtcatgtcgttaatctctgctttatcgtggtattgcttttttccaccttgctgacctggcgtgaagtggtagtgctggaagatgcctatatctccagcccgcgtaatcatctggaaaacgtagccaacgcgctcgataagcatttgcagtataacgtcgacaaactgatctttttgcgtaatggcatgcgcgaagctctcgtagcgccactggatttcacttcactgcgtaatgctgtaaccgagttcgaacagcatcgcgacgagcacgcctggcaaattgaactcaaccgacgacgcaccctgtcagtcaatggcgtatcggatgcattagtcagcgaggggaatctcctgtctcgcgaaaatgaaagcctcgacaatgaaattaccgctgcactggaagttggttacttgctgcgactggcgcacaacacctcgtcgatggttgaacaggcgatgtatgtctcgcgtgccggattttacgtttcgacgcagccgaccttgtttacgcgcaatgtaccaacgcgttattacggctatgtcacccaaccctag

SEQ ID NO: 465339 - DNA, 510 bp, Shigella boydii
atggccaaagaaagggcattaacgctggaagcactacgggttatggatgcgatcgatcgccggggcagttttgcggcggcggcggatgagctgggacgcgtgccttccgcacttagctacaccatgcaaaaactggaagaagagctggatgtggtgctgtttgaccgctcgggccatcgcaccaaattcaccaatgtcgggaggatgttgctggagcgagggcgcgttttgctggaagcagcagataaactgactaccgatgcggaagccctcgcgcgcggttgggaaacgcatctcaccattgtgaccgaggcactggtaccgacacctgcctttttcccgttaatcgacaaactggcggcaaaagccaatacccaactggcaatcatcaccgaagtgctggcgggggcgtgggaacgactggagcagggggggcggatatcgttatcgcgccggatatgcattttcgttcctcgtcggagatcaactcgcgcaagctctataccttaa

SEQ ID NO: 465340 - DNA, 1212 bp, Shigella boydii
atgcacaggattgatacgctgactgcggtaaaagataagtttggtccgggtaagaacggatttactgacggaaatcttcgcacaggacgtcttgctacctggctgaacagtgccatgtggaatgccattcaggaggaaatctgtggtgtcattgagaaggccgggatagaactgaataaagaagaacacgaccagctatataaggctatattattgctggtgggcggtgcaattaacgaagaggcattgctgataaaaaataacctttcggatgtggaagacagggatgaggctgttgaaaacctcggattaaaacccacggtggataaggcaaaaaatgccgttcagcgtgatggcgacaccatgaccggagagctgaaaatccgtggtgttaatgcgctgaggattttcaacgaagcttttggcctgatttttcgtcgttcggaagagtgcctgcaccttattcccaccagtgaaggtcagggggaaaatggcgatattggtccccttcgcccgttcaccattaatctgcggacgggtgaaatatccatgtcgcataaagtgtctgttggcggtggttcgcaggtcaatggtgcgctgggtatcggcgttcagaacgccctggggggggggaattcaattgctttcggggataacgatacaggtataaaacaaaacggcgacggcattctggatgtttatgcgaatggacagcatgtatttcgtttccagaatggtgtggcgatagcgttaaaaaatattcaggccggaaatgctaaaaaattcacgttatccagcgccaacaactccacgaaaaatgcagcgttttatttgtggggtaatccatccaggcctgttgttgcagagcttggtgatgattccggctggcatttctacagccagagaaataccgatggtagtatcacattcgctgtaaacggacaggtaattccgttaaattacggaaacttcgatgcccgctataaacatcgaactgagggggtacaggatgtgcggtatggttatgaaatgtattacaaccctggcagcaacaccgtttcatggacgtttcgctcaccttcgggacacgggttgtcagggatagcgatatcggataccggccgtaactcagcggataacgtcaacggtgtgtattaccgaccgctgcaaaaactgattaatggcacctggtataacgtagcgagtatttaa

SEQ ID NO: 465341 - DNA, 900 bp, Shigella boydii; identical to SEQ ID NO: 461193

SEQ ID NO: 465342 - DNA, 423 bp, Shigella boydii; identical to SEQ ID NO: 461182

SEQ ID NO: 465343 - DNA, 276 bp, Shigella boydii
gtggcttccatttccatcagatgtccttcctgctccgctactgaaggcgtggtgcgtaacggcaaaagcaccgccggacatcagcgctatctctgctctcattgccgtaaaacatggcaactacagttcacttacaccgcctctcagcccggtacgcaccagaaaatcattgatatggccatgaatggcgtcggatgtcgtgccagtgcacgcattatgggcgttggcctcaacacgattttacgtcacttaaaaaactcaggccgcagtcggtaa

SEQ ID NO: 465344 - DNA, 123 bp, Shigella boydii
atgttgggtggagcggacaatccaaatggtgaaggggggatgcggacgatttcctggactgctttatcattccagcccgcattgttggcggtacattttgaggctgacggcacccagcgataa

SEQ ID NO: 465345 - DNA, 303 bp, Shigella boydii; identical to SEQ ID NO: 459543

SEQ ID NO: 465346 - DNA, 654 bp, Shigella boydii; identical to SEQ ID NO: 461326

SEQ ID NO: 465347 - DNA, 1761 bp, Shigella boydii; identical to SEQ ID NO: 461901

SEQ ID NO: 465348 - DNA, 1455 bp, Shigella boydii; identical to SEQ ID NO: 463790

SEQ ID NO: 465349 - DNA, 495 bp, Shigella boydii
gtgatcatgagtcttttgaatgaagttcagaaattcattgaagcccatccggggtgtacttccggagacattgcggatgcttttgcaggttactcacggcagcgcgttctgcagtcagcaagcaagttacgtcagagtgggcgtgtggctcaccgttgtgaaggggatacacgcagacattttccgcgccagataaagatatcgccggaggcggaacggcaaccagttcgtgaaaccagacctgtgcgcaatttctatgtcggcactaacgacccgcgggagattttatgcctgacccgccaggctgaagaactggagtccaggggcttataccgtcgtgctgcaacggtgtggatggcggcattccgtgaaagccactcccagccagaacgaaacaattttctggcgcgtcgtgagcagtgtttacggaaaagcagcaagcgcgctgtatcgggtgatgagtggtatctgtcagggaattacgtgggggcttaa

SEQ ID NO: 465350 - DNA, 1272 bp, Shigella boydii; identical to SEQ ID NO: 463803

SEQ ID NO: 465351 - DNA, 279 bp, Shigella boydii; identical to SEQ ID NO: 463424

SEQ ID NO: 465352 - DNA, 267 bp, Shigella boydii; identical to SEQ ID NO: 461574

SEQ ID NO: 465353 - DNA, 369 bp, Shigella boydii
gtggaacgccgcttcggcaacgatcttccgtcgtctccagtggagtggctgacggataatggttcatgctaccgggctaatgaaacacgccagttcgcccggatgttgggacttgaaccgaagaacacggcggtgcggagtccggagagtaacggaatagcagagagcttcgtgaaaacgataaagcgtgactacatcagtatcatgcccaaaccagacgggttaacggcagcaaagaaccttgcagaggcgttcgagcattataacgaatggcatccgcatagtgcgctgggttatcgctcgccacgggaatatctgcggcagcgggcttgtaatgggttaagtgataacagatgtctggaaatatag

SEQ ID NO: 465354 - DNA, 699 bp, Shigella boydii
atgcgcagcgtcttccgggttatccggactgtacgtgaaaagcatgcctgtactcagtgcgatgccatcgtgcaggcccccgcgccttcacggcccatcgagcggggtatcgcaggaccggggctgctggcccgcgtgctgatctcaaagtatgcagagcacaccccgctgtaccgccagtctgaaatgtacggccgccagggcgtggagctgagtcgttcactgctgtcgggctgggtggatgcatgctgccggctactgtcaccgctggaagaagcgcttcaggactatgtgctgactgacggtaagctccatgctgatgacacgcctgtcccggtgctgttgccaggcaataagaaaacgaagaccgggcggttatggacctacgttcgtgacgaccgtaacgccgggtcaacgctggcgccggcggtgtggttcgcttacagcccggacagaaaaggcatccatccgcagacccatcttgcggggttcagtggtgtactgcaggcggatgcatacgccgggttcaacgagctgtaccgggatggccggataacggaagccgcctgttgggctcacgcccgccgtaaaatccacgatgtgcacgttcgcaccccgtcagccctgacggaggaagcgctgaaacggatcggcgaactgtacgccatcgaggcagagataaggggaatgacggcgtag

SEQ ID NO: 465355 - DNA, 399 bp, Shigella boydii
ttgaaaacgaaaccgctgctgaaatccctggaaagctggctgcgtgaaaagatgaaaaccctgtcgcgacactcagaactggcgaaagcgttcgcatacgccctgaaccagtggccggcgctgacgtactatgcagatgatggctgggctgaggcggacaataacatcgctgaaaatgcgttgcggatggtcagtctgggccgcaaaaactacctgttcttcggttcggatcatggaggagagcggggagcgctgctgtacagcctgatcgggacgtgcaaactgaacggagtggagccagaaagctacctccgctatgtccttgacgtcatagccgactggccgataaaccgggtcggcgaactgctcccctggcgcgtagcactgccgactgaataa

SEQ ID NO: 465356 - DNA, 468 bp, Shigella boydii; identical to SEQ ID NO: 461580

SEQ ID NO: 465357 - DNA, 237 bp, Shigella boydii; identical to SEQ ID NO: 460237

SEQ ID NO: 465358 - DNA, 303 bp, Shigella boydii; identical to SEQ ID NO: 461506

SEQ ID NO: 465359 - DNA, 276 bp, Shigella boydii; identical to SEQ ID NO: 458859

SEQ ID NO: 465360 - DNA, 450 bp, Shigella boydii; identical to SEQ ID NO: 461614

SEQ ID NO: 465361 - DNA, 315 bp, Shigella boydii; identical to SEQ ID NO: 463833

SEQ ID NO: 465362 - DNA, 411 bp, Shigella boydii; identical to SEQ ID NO: 463834

SEQ ID NO: 465363 - DNA, 555 bp, Shigella boydii; identical to SEQ ID NO: 463815

SEQ ID NO: 465364 - DNA, 369 bp, Shigella boydii; identical to SEQ ID NO: 465353

SEQ ID NO: 465365 - DNA, 360 bp, Shigella boydii
atgcaggagaaagaacacacgttatcgaaaaaatgccgtctgagagatgcgttccggtatatcaggaagcactgggttgcgttgtgcaacttcagtgatgatggtctggctgaggcggataataatgccgctgaaagagcgcttcgtgcagtctgtctcggaaagaaaaactttatgttcttcggcagcgatcacggtggagagcgtggtgcgctactgtacgggctgatcggcacctgccgactgaacggtatcgatccggaagcgtatctgcgctatatcctgagcgtactgccggaatggccttccaaccgtgttgacgaactcctgccatggaacgtagcactcaccaataaataa

SEQ ID NO: 465366 - DNA, 276 bp, Shigella boydii; identical to SEQ ID NO: 458859

SEQ ID NO: 465367 - DNA, 555 bp, Shigella boydii; identical to SEQ ID NO: 461707

SEQ ID NO: 465368 - DNA, 351 bp, Shigella boydii; identical to SEQ ID NO: 463831

SEQ ID NO: 465369 - DNA, 369 bp, Shigella boydii; identical to SEQ ID NO: 465353

SEQ ID NO: 465370 - DNA, 360 bp, Shigella boydii; identical to SEQ ID NO: 461764

SEQ ID NO: 465371 - DNA, 366 bp, Shigella boydii
ttgcgacagtctcgtcatcgtcgcccgttaccggagcatctgccccgcgaaataaatcgcctggagccaaaagaaagctgttgcccggagtgtggcggtgagctggattatctgggggaagtcagcgcagaacaactggaactggtgagcagcgctctgaaagtgatccgcacagaacgggtaaaaaaagcctgtacaaaatgtgactgcatcgttgaagcaccggcaccatcccgtccgatagagcgtggtatcgcgggcccggggttacttgcccgcatgttaacgggaaaatactgcgaacacctgccactgtatgaaccgccccgggaatcctggagactaaacttcctgagaaagaggtaa

SEQ ID NO: 465372 - DNA, 297 bp, Shigella boydii
atgcgtaagtctttcaacgggctgggtgaacaggaacagcatgtgctgaatgataatcccttctccggtcacctgttcatcttccgtggccgacggggtgacatgattaaaatcctgtgggctgatgctgatggtctgtgcctgttcaccagacgcctggaggaaggccagtttatctggcctgctgtgcgtgacggcaaggtatccattacccgctcgcaactggcaatgctcctcgataagctggactggcgtcagccaaaaacatcccgccttaacgcactgacaatgttgtaa

SEQ ID NO: 465373 - DNA, 294 bp, Shigella boydii; identical to SEQ ID NO: 25632

SEQ ID NO: 465374 - DNA, 276 bp, Shigella boydii; identical to SEQ ID NO: 458859

SEQ ID NO: 465375 - DNA, 360 bp, Shigella boydii; identical to SEQ ID NO: 461764

SEQ ID NO: 465376 - DNA, 276 bp, Shigella boydii; identical to SEQ ID NO: 458859

SEQ ID NO: 465377 - DNA, 207 bp, Shigella boydii; identical to SEQ ID NO: 24440

SEQ ID NO: 465378 - DNA, 237 bp, Shigella boydii
atgacggatggctggccactgtatgaatcccgcctgaagggaaagctgcacgttatcagcaagcgatatacgcagcgaattgagcggcataacctgaatctgaggcagcacctggcacggctgggacggctgggacggctgggacggctgggacggaagtcgctgtcgttctcaaaatcggtggagctgcatgacaaagtcatcgggcattatctgaacataaaacactatcaataa

SEQ ID NO: 465379 - DNA, 183 bp, Shigella boydii
atgcttgatggtaaatataaagatttcaaaacgttaaacagggatctaataaaaccctgtgttgacgaactgaacaaaaaaagcgacctggctgtaacggttgagacgatcaaaaaggggcgcacggttgtagccctgcattttcgcttcaaggaagacaaacagatcaagatgacgatctag

SEQ ID NO: 465380 - DNA, 1836 bp, Shigella boydii; identical to SEQ ID NO: 15968

SEQ ID NO: 465381 - DNA, 1182 bp, Shigella boydii; identical to SEQ ID NO: 464801

SEQ ID NO: 465382 - DNA, 468 bp, Shigella boydii
ttgttctataagttgctcagcaagctcattttcgctgttcttcatcgtgccgaaggctgcagccgtcagcagatggctggtcagttccatctggcagaccattttgacctgcgggtagagcgccgggttcccggcatgtgtctggcgggggaaggctgcatcgttctctggtgtatccggtgtgcgccagaacacaccatcgatggccagcagggtcaggccgcaccagtgcggatgcggcgtggcgttatgccagagctgcgctgttttcgtgaacacgcggcggacagcctcacttcccaggcgctggcgggcctgaataacggcactggggacaacgaaggggcgattgcccggcagcatgatgtccaggcgattcacaatctggtgaagaggttctttacgctcaagcgccatgccaacaatacaccagaccatcatttcgaggggaagacggcgcttgcgtag

SEQ ID NO: 465383 - DNA, 309 bp, Shigella boydii
atgttcgatttttcaaaggtcgtggatcgtcatggcacatggtgtacacagtgggattatgtcgctgaccgtttcggcactgctgacctgttaccgttcacgatttcagacatggattttgccactgccccctgcattatagaggcgctgaatcagcgcctgatgcacggcgtattggctacagccgctggaaaaacgatgagtttctcgcggctattgcccactggttttccacccagcattacaccgccatcgattctcagacggtggtgtatggcccttctgtcatctatatggtttcagaactga

SEQ ID NO: 465384 - DNA, 1221 bp, Shigella boydii
atgtctatttataaaattcctcttccgctcaatattctggaagctgcacgagagcgtattacctggacactcaacaccctaccccgcgtttgtgtctcattttctggcggcaaagactctggtttaatgctgcatctgacagccgaacttgcccgacaaatgggcaaaaaaatctgcgttttgtttatcgactgggaggcgcaattctcttgcactattaactatgttcagtccctgcgcgagttgtacaccgatgtcatcgaagagttttactgggttgcgctcccgcttacgacgcaaaattccctttcacaataccaacccgaatggcagtgctgggaacctgatgtcgaatgggtgcgtcaggccccgcaagatgcgataaccgatcctgactttttctgcttttaccagccaggcatgaccttcgaacaatttgtacgtgagtttgccgaatggttttcacaaaaacgtccggcggcgatgatgatcggcatccgtgcggatgagtcctacaaccgttttgtcgccatcgccagtttaaataaacaacgttttgccgacgataaaccatggactacggccgcaccaggcggtcatagctggtacatttaccccatttacgactggaaagtggctgatatctggacctggtatgcaaatcatcaaagtctctgcaacccactgtataacctaatgtatcaggcaggcgttcctctgcgtcatatgcgaatttgcgaaccttttggcccggagcaacgacaaggattatggctctatcacgttatcgaaccggatcgctgggctgctatgtgcgcacgagtcagcggggtaaaaagtggcggcatttacgccggacatgacaatcatttctatgggcatcggaaaatcctcaagccagaacatttagactggcaagaatatgcattattgctgctcaatagcatgccggaaaaaacagctgagcattaccgcaataaaatcgccatttatttgcactggtatcagaaaaaaggcatcgaggttccacaaacccagcaaggggacattggcgcgaaagatatcccctcctggcggcggatatgcaaagttttactcaataacgattactggtgtcgggcattatcatttagtcctacgaaagcgaagaactatcagcgttataacgaacggataaaaggaaaacgtcaggaatgggggatactatgcaacaacgattaa

SEQ ID NO: 465385 - DNA, 210 bp, Shigella boydii
atgacggatggctggccgcagtatgaatcacgcctgaagggaaagctgcacgttatcagcaagcgttacactcagcgcattgagcgacataatctgaatctgagacaacatctggcaaggctgggacggaagtcactgtcgttctcaaaatcggtggagctgcatgacaaggtcatcgggcattatctgaacataaaacactatcagtaa

SEQ ID NO: 465386 - DNA, 270 bp, Shigella boydii; identical to SEQ ID NO: 463682

SEQ ID NO: 465387 - DNA, 522 bp, Shigella boydii
atgggaagccaggaactccaacgcaagctcggattttgggccgttcttgcaatcgccgtcgggacaaccgtcggctccggtatttttgtatctgtgggtgaagtggcaaaagcagcgggcacgccgtggcttacggtgctcacgtttgtcattggcgggttaattgtgatcccgcaaatgtgcgtctatgcggaactatccaccgcttatccggaaaatggcgcagattatgtttatctgaaaaatgccggaagccgaccgctggctttcctctccggctgggccagcttctgggccaacgatgcgccgtcattgtcgattatggcgctggcgattgtcagcaatcttggctttttaacgcctatcgatccgttgcccggtaaatttatcgccgccggattaattatcgcctttatgttgctacacctgcgctccgttgaaggcggcgcagcgtttcagacgctaattaccatcgccaaaattatcccgttcactatcgtcattggccttgggatcttctag

SEQ ID NO: 465388 - DNA, 291 bp, Shigella boydii; identical to SEQ ID NO: 464098

SEQ ID NO: 465389 - DNA, 468 bp, Shigella boydii; identical to SEQ ID NO: 19402

SEQ ID NO: 465390 - DNA, 468 bp, Shigella boydii
ttgttctataagttgctcagcaagctcattttcgctgttcttcatcgtgccgaaggctgcagccgtcagcagatggctggtcagttccatctggcagaccattttgacctgcgggtagagcgccgggttcccggcatgtgtctggcgggggaaggctgcatcgttctctggtgtatccggtgtgcgccagaacacaccatcgatggccagcagggtcaggccgcaccagtgcggatgcggcgtggcgttatgccagaactgcgctgttttcgtgaacacgcggcggacagcctcacttcccaggcgctggcgggcctgaataacggcactgggggcaacgaaggggcgattgcccggcagcatgatgtccaggcgattcacaatctggtgaagaggttctttacgctcaagcgccatgccaacaatacaccagaccatcatttcgaggggaagacggcgcttgcgtag

SEQ ID NO: 465391 - DNA, 294 bp, Shigella boydii
gtggcgcacgtcttcggtgaacgcactctggccacactggagcgtcttctgagcctgctgtcggcctttgaggtcgtggtatggatgacggatggctggccgcagtatgaatcacgcctgaagggaaagctgcacgttatcagcaagcgttacactcagcgcattgagcgacataatctgaatctgagacaacatctggcaaggctgggacggaagtcactgtcgttctcaaaatcggtggagctgcatgacaaggtcatcgggcattatctgaacataaaacactatcagtaa

SEQ ID NO: 465392 - DNA, 807 bp, Shigella boydii; identical to SEQ ID NO: 464586

SEQ ID NO: 465393 - DNA, 1194 bp, Shigella boydii
atgacgacaatccgcgacggcgtccgcggcaaagataaactggatgtgcccattaagttcatctggaactacgcgggaaataccctcgttaatcagcattctgacatcaacaaaacgcatgaaattctgcaggacgaatcgaaatgcgaaatgattgtggtcatcgaaaactttatgacctcatcggcaaaatatgccgacattctgctgccagacctgatgaccgttgagcaggaagatattattcctaacgactacgccggtaacatgggatatctcattttcctccagcctgtcaccagcgaaaaattcgaacgcaaaccgatttactggatcctgagtgaagtcgcgaaacgtcttggacctgacgtctatcaaaagttcacagaaggtcgcacgcaggaacaatggttacaacatctgtacgccaaaatgcttgccaaagatccggcgttaccgtcttacgacgaactgaaaaaaatgggtatctataagcgtaaagatcccaatggccattttgtcgcctacaaagcatttcgtgacgaccgcgaggcaaatccacttaaaacgccttccggtaagattgaaatttattccagcaggctggcggaaattgcccgtacctgggaactggaaaaagatgaagtgataagcccattgccagtttatgcctcaacctttgaaggctggaactcccctgaacgtagaaccttcccactgcaactgtttggtttccattacaaatcccgtactcactcgacctacggcaatattgatctcctgaaggctgcctgccgtcaggaggtgtggatcaaccctatagatgcgcagaaacgtgggattgccaacggcgatatggtgcgggtgtttaaccatcgtggcgaagttcggctaccagccaaagtaacaccacgtattctccctggagttagcgctatgggccagggagcctggcacgaggccaatatgtctggcgataaaatagaccatggcggctgtgtgaatacgctaaccactctgcgcccttcaccactggcgaagggaaaaccgcagcacactaatctggtcgagatcgaaaaaatattttggttcactgctgttgatggctgcgtggttggcggagaatggtcgccagacagaatgcgaagaattgctggcatggcacctttttccgtggtcaacacgttttcttga

SEQ ID NO: 465394 - DNA, 210 bp, Shigella boydii
atgacggatggctggccgctgtatgaatcacgcctgaagggaaagctgcacgttatcagcaagcgttacactcagcgcattgagcgacataatctgaatctgagacaacatctggcaaggctgggacggaagtcactgtcgttctcaaaatcggtggaactgcatgacaaggtcatcgggcattatctgaacataaaacactatcagtaa

SEQ ID NO: 465395 - DNA, 219 bp, Shigella boydii; identical to SEQ ID NO: 464825

SEQ ID NO: 465396 - DNA, 1233 bp, Shigella boydii
atggccttcgtcagtctgaaaccgtgggaagagcgtaatggtgatgaaaacagtgcggaagcggtaatccatcgtgccaaaatggaattgggcaagatccgcgacggttttgtcattccattcaatatgccagccattgttgaactgggcacggcaacgggtttcgactttgagttaattgatcaggctgggctgggtcacgatgccctaacccaggcccgtaaccagttgcttggtatggcggcgcaacatcctgccagcttagtcagcgtgcgtcctaatggcctggaagacaccgcgcagtttaaactggaagttgaccaggaaaaggcgcaggcattaagtgtttcactttctgacatcaatcagaccatttcaacggcgttgggtgggacttatgttaacgacttcatcgaccgtggtcgcgtgaaaaaggtgtatgttcaggcggatgccaaattccgtatgctgccagaagatgtcgataaactttatgtccgcagcgccaacggcgaaatggtgccattctcggcctttaccacttcacattgggtgtatggctctccgcgactggaacgctacaacggtctgccgtcaatggagattcagggggaagccgcgccaggaaccagttccggcgatgccatggcgttgatggaaaaccttgcgtcaaaattacctgcgggcattggttatgactggacgggtatgtcgtatcaggaacgcttatcgggaaaccaggctcccgctctggtagcaatttcctttgtggttgttttcctgtgccttgctgcactctatgaaagctggtcaattcctgtctcggttatgttggtcgtgccgttagggattgtcgacgtgctgctggcggcaacactctttaatcaaaaaaatgacgtctactttatggtgggcttgctaacgacaattggcttgtcggccaaaaacgctattttgattgttgagttcgctaaagatctcatggagaaagagggtaaaggtgttgttgaagcgacactaatggcagtacgtatgcgtctgcgtcctatcctgatgacctctctcgcctttattctcggcgtattaccgctagctatcagtaacggtgcaggcagtggcgcgcagaacgcagtgggtattggggtaatgggcggaatggtctctgcaacgttgctggcaatcttcttcgtaccggtgttctttgtggtgatccgccgttgctttaaaggataa

SEQ ID NO: 465397 - DNA, 267 bp, Shigella boydii; identical to SEQ ID NO: 464426

SEQ ID NO: 465398 - DNA, 210 bp, Shigella boydii; identical to SEQ ID NO: 9340

SEQ ID NO: 465399 - DNA, 174 bp, Shigella boydii; identical to SEQ ID NO: 464844

SEQ ID NO: 465400 - DNA, 303 bp, Shigella boydii; identical to SEQ ID NO: 458125

SEQ ID NO: 465401 - DNA, 327 bp, Shigella boydii
atgaatcgtgattccttttatccagccatcgcctgttttccgctgttactgatgctggccgggtgtgcgcctatgcatgaaacccgccaggcgttaagccagcaaacgcccgctgcacaagttgacaccgcattacccacggcgctgaaaaatggttggccagacagccaatggtggctggagtatcacgataatcagctcacttcattaattaacaatgcactacagaacgcaccggatatgcaggtggctgaacagcgcattcagctagctgaagcccaggcgaaggcagttgccactcaggatggtccgcagatcgacttttag

SEQ ID NO: 465402 - DNA, 267 bp, Shigella boydii; identical to SEQ ID NO: 464848

SEQ ID NO: 465403 - DNA, 639 bp, Shigella boydii
atgaagctttcaaatatcgtcacagttataattcttgcaaattccagtacgctaacaccccaggcgatggcagaaaaattaattcctgaaactgatgctgagttgttagtttggtctgatgccacaagcgtggaatatatgaaatatgcagcaaaggaattcaataaagattttggctacaaggtaaagtttacatttcgcaatatagcgccaatggatgcagcatcaagaattatgcaggatgggggtacgactcgtgtagctgatgtagctgaaattgaacatgataccctggggcggttagtcgttgctggcggggttatggaaaacatggtctcagctgagcggattaaaaaaacatttattccaggcgcagtatcggcagctacatataataacatcagctatggttttcctgtaagtttcgcaacgctggcgcttttctataataaggatttgttaaacaccgcaccaaaaacattcgaagaaatcaatactttcagtaaaagtttaataattcatccgagcataaatatgctctgctatgggatgtacaaaattattatgtttcacgtatgtttattaccttgtatggtgccaacgaattcggtaaaaccggtaacgatcctaaagctctag

SEQ ID NO: 465404 - DNA, 705 bp, Shigella boydii
gtgaatacacaacaactgaaaatgaagagtgcacctgtgctacctatttcctgtttgattatgggcgggactcagttatcacgtcattattatgtgaaaggcgggatattctttgcaatacaagtatgctttttgctttatctttccgatattgtgcatacattaataggtttgttcacattaggtgatgtcgcgcaaattcgaaaagggttgactgttattcagggtgacaattctatatttatgcttgtagagggcgtgatagcgaccattattgttggcttattcgccactatttacatccttaatattaaagatgcgcggaactcatcttattgccatctgacttttaaacaacagttatataagctctatgaggataaatttgcatttatagtcctaacgcccgcatttttagcaagtatagcattcattgttttacctattgtaattacagttcttgtatcgtttacaaactatgctgcgccaaatcacatcccaccaaagaacctggttgattgggttgggattaaaaatttcataatgttgtttaaatttaaaatatggtctgatacgtttctaggtgtcgctctctggacatttatttgggcaatttgcgcgacggtttttaccttcagttttggctttattctggctttagcactggctaaaaaaatatacgtttcgcaaaagtctggcgattga

SEQ ID NO: 465405 - DNA, 381 bp, Shigella boydii
atgcacattggacaggctcttgatctggtatcccgttacgattctctgcgtaacccactgacttctctgggggattacctcgaccccgaactcatctctcgttgccttgccgaatcaggtactgtaacgctacgcaagcgccgtcttcccctcgaaatgatggtctggtgtattgttggcatggcgcttgagcgtaaagaacctcttcaccagattgtgaatcgcctggacatcatgctgccgggcaatcgccccttcgttgccccaagtgccgtattcaggcccgccagcgcctgggaagtgaggctgtccgccgcgtgttcacgaaaacagcgcagctctggcataacgccacgccgcatccgcactggtgcggcctga

SEQ ID NO: 465406 - DNA, 624 bp, Shigella boydii
atggcagtacgaaaactcaccactgggaaatggctttgcgaatgttaccctgccggacgaagtgggcgtcgtgtgcgtaaacaattcgccaccaaaggcgaagcactggcttttgagcgccacacgatggaagaaaccgaagcaaagccctggctgggtgaatcagtggatcgtcgaacactgaaagacgtggttgagctatggttcaaactacatggtaaatctctgacagctgggcagcatgtctatgacaaattgctgttgatggttgacgctctgggcaatcctcttgcaaccgatctcacctctaaaatgtttgcccactatcgagataaacgcctgacaggcgagatctacttcagcgagaaatggaagaaaggagcaagcccggtcaccattaacctggagcaaagctatctaagtagtgtttttagcgaactatcccgtctgggcgaatggtcgtatccgaacccactggagaacatgcgaaaattcaccatcgcagaaaaagagatggcatggcttacccatgagcagattgttgaattgctggctgattgcaaacgtcaggacccaattctggcactggtagttaagatatgcttaagcacaggcgcacgctag

SEQ ID NO: 465407 - DNA, 267 bp, Shigella boydii; identical to SEQ ID NO: 464848

SEQ ID NO: 465408 - DNA, 468 bp, Shigella boydii; identical to SEQ ID NO: 19402

SEQ ID NO: 465409 - DNA, 276 bp, Shigella boydii; identical to SEQ ID NO: 461950

SEQ ID NO: 465410 - DNA, 213 bp, Shigella boydii; identical to SEQ ID NO: 464184

SEQ ID NO: 465411 - DNA, 213 bp, Shigella boydii; identical to SEQ ID NO: 462242

SEQ ID NO: 465412 - DNA, 468 bp, Shigella boydii; identical to SEQ ID NO: 465382

SEQ ID NO: 465413 - DNA, 1383 bp, Shigella boydii
atggttattagaaaccctgaaaagaaaagtgaaataacaataaaagatgttatagacaatgaactctgtactggttgtggagtttgtatttcggaagatagtagcaaaacctcctttatgaaatggaattctgaaggtttttatgagccatgtttctctcctgtatcaacattattcaatatgcagcgtgtttgtccctttaacttaagtagggatacattagtgaatgaggatgaacttgcgcatgagttttttgatggtaagggatatttagattctgaggttgggttttataaaaaaatatatgtgggttattctaaacattttagagagacttcatcctccggtggtatagctacatatgtatttgaacaacttcttagacgtaagtatgttgatgctctgtttatagttagggagcttggtggttcatatggatatcaagtcttcgataatccagaacatattaaggatatgtctaaaacaagatattatcctgtaacgctagaaaagttatttgataatatttataagcttaatggtagagtggccgtttcaggagtggcatgttttattaaagccattaggctcaaacaacattaccatccagaactgaaagagaaaataccattccttgttggtataatttgtggaggactcaaaagtcgatattacactgattatttatcacagtctgctggttgtgtcagtgagtaccaaaatgctgagtatcgagtgaaaaagaaagatagtcatgctcttgactatcgtttcacttgtgttgagaaatcaaataatataattcattctgttgatatgcaaagaatgggggatatgtggggttcagggctatttaaggcaaacgcatgtgactattgtgatgatgttacaaccgaactcgcagacatatcattgggtgatgcctggatttcgccatacaatatggatggagctggtaataatgtagttgtatgtcgctccaccacagctcatgaaattattttatctgggattgagaaaaaagacttagaattaacggaactcgaattagagcagttgaaattgtcacaacaaggaagttttaaccacaggcataaaggattattatatagaataaaaaatgcagagaaaaataatcgcttagtgcctgttaagaggaaaagattcttacgctctatatcttttttattaaagttaattcaaaaacaacgatcagttacaaggagaaaaagcatagagatatggatggaaactcaaaattcagcaactttcgataagaaaatgaagggatatttattcacgttgcgttggttaacagtggtcaataggaaattaagtcggatgttcaagattgtttctctaaatagaatgggtaaaaaatga

SEQ ID NO: 465414 - DNA, 276 bp, Shigella boydii; identical to SEQ ID NO: 458859

SEQ ID NO: 465415 - DNA, 468 bp, Shigella boydii
ttgttctataagttgctcagcaagctcattttcgctgttcttcatcgtgccgaaggctgcagccgtcagcagatggctggtcagttccatctggcagaccattttgacctgcgggtagagcgccgggttcccggcatgtgtctggcgggggaaggctgcatcgttctctggtgtatccggtgtgcgccagaacacaccatcgatggccagcagggtcaggccgcaccagtgcggatgcggcgtggcgttatgccagaactgcgctgttttcgtgaacacgcggcggacagcctcacttcccaggcgctggcgggcctgaataacggcactgggggcaacgaaggggcgattgcccggcagcatgatgtccaggtgattcacaatctggtgaagaggttctttacgctcaagcgccatgccaacaatacaccagaccatcatttcgaggggaagacggcgcttgcgtag

SEQ ID NO: 465416 - DNA, 249 bp, Shigella boydii
atggctacatacggcggtcagtttacgcttactgacaacgcgatagcggagagcatcaatggtctttacaaagcggaggtaatacaccgtaagagctggaaaaaccgtgcagaagtggaactggccacactcacgtgggtggactggtataacaatcgacgattgctgggaaggctgggccatactcctccggcagaagcagaaaaagcttattatgcttccatcggaaacgatgatctggcagcctga

SEQ ID NO: 465417 - DNA, 501 bp, Shigella boydii
atgaacagggaaattcagcagcggctacagtgggtaaaactctatgaaacgtccggtgatgcgggatttgtatgccgtcgctgtggcatttctcggcccacattgcgtaaaatggtggcgcagatatctggctcagggcatcgctggtctggaaagccacagccgtcgccccaagcgttcaccatcaacgaaaaccggcacttgcgaagtcgctctgattctggagttacgttctcagcgaaatctgggggcaagacgtattcaaagcgagttaaaacgacttcattcaatctcactggcaatagcaacaatccacaaagtccttttccagaatcaggtttgaaccgccccgggtttcctggagagtgttttatctgtgaactcaggctgccagatcatcgtttccgatggaagcataataagctttttctgcttctgccggaggagtatggcccagccttcccagcaatcgtcgattgttataccagtccacccacgtga

SEQ ID NO: 465418 - DNA, 468 bp, Shigella boydii
ttgttctataagttgctcagcaagctcattttcgctgttcttcatcgtgccgaaggctgcagccgtcagcagatggctggtcagttccatctggcagaccattttgacctgcgggtggagcgccgggttcccggcatgtgtctggcgggggaaggctgcatcgttctctggtgtatccggtgtgcgccagaacacaccatcgatggccagcagggtcaggccgcaccagtgcggatgcggcgtggcgttatgccagaactgcgctgttttcgtgaacacgcggcggacagcctcacttcccaggcgctggcgggcctgaataacggcactgggggcaacgaaggggcgattgcccggcagcatgatgtccaggtgattcacaatctggtgaagaggttctttacgctcaagcgccatgccaacaatacaccagaccatcatttcgaggggaagacggcgcttgcgtag

SEQ ID NO: 465419 - DNA, 468 bp, Shigella boydii; identical to SEQ ID NO: 19402

SEQ ID NO: 465420 - DNA, 525 bp, Shigella boydii; identical to SEQ ID NO: 464868

SEQ ID NO: 465421 - DNA, 294 bp, Shigella boydii; identical to SEQ ID NO: 25632

SEQ ID NO: 465422 - DNA, 216 bp, Shigella boydii; identical to SEQ ID NO: 5123

SEQ ID NO: 465423 - DNA, 294 bp, Shigella boydii; identical to SEQ ID NO: 460208

SEQ ID NO: 465424 - DNA, 1131 bp, Shigella boydii
atgctcgacagttatgccgagcaggcggataacatgccgttattgcatcgggcgctggtgctggcgtgggcacaggagatgaatctgccgtgcaaaacgttgttgaaagggttggatgaagctatcgcccggcgcggaactaaagatgaagatttctctgaggaagacatccgcgatatcaatgacagcctgatcctcgatacaccggaatctccactggcagatgcggtggcaaacgtcttaaccatgacgttgctgaaaaaagcgcagttgaagtccacggtgatgccacaggttcagcaatatgcgtgggataaagcggcaaacagcaatcagccgctggcgcacacggttgtgctgctcaatagcggtggtgacgctacccagacggccgctattttaagtggtttgaccgctgagcaatccactattgagcgcgcgctggccatgaactggctggcgaaatatatggcgacaatgcctccagttgttttgcctgcgcctgcgggcgcatgggctaaacataagttaactggagggggcgaatactggcgttgggttggtcagggcgtgccggacaatctctcttttggtgacgaattatcgccgcaaaatgtgcaggtccgctggcgtgagccggcaaaaatggctcaacaaagtaacattccggtgaccgttgaacgccagttgtatcggcttatccctggtgaagaagagatgagctttattctgcaaccggtgaccagcaatgagattgacagcgatgcgctgtatctcgatgaaatcacgcttaccagcgagcaggatgcagttctgcgctacggtcaggtggaagtaccgctgccaccgggagccgacgttgagcgcacaacatggggcatttcggtcaataaacccaacgccgcgaaacagcaggggcaattgctggaaaaagcgcgaaatgaaatgggcgaactggcctatatggtgccggtgaaagaactgacgggaacggtcactttccgccatttgctgcgcttctcgcaaaaagggcaattcgttctgcctcctgctcgttatgtgcgttcctatgcacctgcacagcaaagtgttgcggcagggagtgaatggaccgggatgcaggtgaaataa

SEQ ID NO: 465425 - DNA, 468 bp, Shigella boydii; identical to SEQ ID NO: 19402

SEQ ID NO: 465426 - DNA, 126 bp, Shigella boydii
atgcacattggacaggctcttgatctggtatcccgttacgattctctgcgtaacccactgacttctctggggattacctcgaccccgaactcatctctcgttgccttgccgaatcaggtactgtaa

SEQ ID NO: 465427 - DNA, 210 bp, Shigella boydii
atgacggatggctggccgctgtatgaatcacgcctgaagggaaagctgcacgtaatcagcaagcgatatacgcagcgaattgagcggcataacctgaatctgaggcagcacctggcacggctgggacggaagtcgctgtcgttctcaaaatcggtggagctgcatgacaaagtcatcgggcattatctgaacataaaacactatcaataa

SEQ ID NO: 465428 - DNA, 210 bp, Shigella boydii; identical to SEQ ID NO: 9340

SEQ ID NO: 465429 - DNA, 294 bp, Shigella boydii; identical to SEQ ID NO: 25632

SEQ ID NO: 465430 - DNA, 294 bp, Shigella boydii; identical to SEQ ID NO: 460208

SEQ ID NO: 465431 - DNA, 468 bp, Shigella boydii; identical to SEQ ID NO: 461580

SEQ ID NO: 465432 - DNA, 219 bp, Shigella boydii
atgtacatgtcgaagaaaacggccggcgggaggaatacggcgcgctacctgggtcgttatctgaagaagccgccgatagcggcctcccggctggcacattacaacggaggggcgagcctgaacttccgttacctggaccacaaaacgggagaaacggcgacggaaacgctgacacagcgtgagctggtcgcgaggctgaaacagcacatcccggagtaa

SEQ ID NO: 465433 - DNA, 183 bp, Shigella boydii
atgaagcactacgttgagaaagtgcagcagccggaatttgccgccgcgaaagatggctataccttcgtatctcaccagcaggaagtgggtacaggttacttcgataaagtgacgactattattcagggcggcacgtcttcagtcaccgcgctgaccggctccactgaagaatcgcagttctaa

SEQ ID NO: 465434 - DNA, 468 bp, Shigella boydii; identical to SEQ ID NO: 19402

SEQ ID NO: 465435 - DNA, 819 bp, Shigella boydii; identical to SEQ ID NO: 463221

SEQ ID NO: 465436 - DNA, 1047 bp, Shigella boydii
atgaccaataatcccccttcagcacagattaagcccggcgagtatggtttccccctcaagttaaaagcccgctatgacaactttattggcggcgaatgggtagcccctgccgatggtgagtattaccagaacctgacgccggtgactgggcagctgctgtgcgaagtggcgtcttcgggcaaacgagacatcgatctggcgctagatgctgcgcacaaagtgaaagataaatgggcgcacacctcggtgcaggatcgcgcggcgattctgtttaagattgccgatcgaatggaacaaaacctcgagctgttagcgacagctgaaacctgggataacggcaaacccattcgcgaaaccagtgctgccgacgtgccgctggcgattgatcattttcgctatttcgcctcgtgtattcgggcgcaggaaggtgggatcagtgaagttgatagcgaaaccgtggcctatcatttccatgaaccgttaggcgtggtggggcagattatcccgtggaacttcccgctgctgatggcgagctggaaaatggctcccgcgctggcggcgggcaactgtgtggtgctgaaacccgcacgtcttaccccgctttctgtactgctgctaatggaaattgtcggtgatttactgccgccgggcgtggtgaacgtggtcaatggcgcaggtggggaaattggcgaatatctggcgacctcgaaacgcatcgccaaagtggcgtttaccggctcaacggaagtgggccaacaaattatgcaatacgcaacgcaaaacattattccggtgacgctggagttgggcggtaagtcgccaaatatcttctttgctgatgtgatggatgaagaagatgcctttttcgataaagcgctggaaggctttgcactgtttgcctttaaccagggcgaagtttgcacctgtccgagtcgtgctttagtgcaggaatctatctacgaacgcggtaatgactccaacttactgatagtgttttatgttcagataatgcccgatgaccttgtcatgcagctccaccgattttga

SEQ ID NO: 465437 - DNA, 1473 bp, Shigella boydii
gtgagacgtaatctttcacacattattgccgcagcattcaatgaaccgctgcttctggagcccgcctatgcgcgggttttcttttgcgcgctcgggcgcgagatgggcgcagcaagtctttcggtaccacaacagcaggtacagcttgatgctcccggaatgctggctgaaacggacgagtacatggccggaggtaaacgaccggcccgtgtttaccgggtggtgaacggtattgcggtactgccggtgaccggcacgctggtgcaccggctgggggggatgcggccattttccggaatgactggctatgacggcattgtcgcctgtcttcagcaggcaatggcagatagccaggtgcggggcatactgctggacattgacagtccgggtgggcaggccgccggcgcgtttgactgcgctgacatgatttaccgcctccgtcagcagaagccggtctgggcactgtgcaatgacacggcctgttctgcagccatgctgctggcgtcggcctgctcccgacggctggttacccagacatcccgtatcggctccattggcgtgatgatgagccatgtcagctatgccggtcatctggcgcaggccggtgtggatatcacgctgatttatgccggggcgcacaaggtggatggcaatcagtttgaagcgttgccggcagaggttcgccaggatatgcagcagcggattgatgcggcgcaccggatgtttgccgaaaaagtggcgatgtataccgggttgtctgtggatgcggtcacgggaacagaggccgccgtttttgaaggtcagtccggcattgaggccgggctggcggatgaattaatcaatgcgtcggatgccatcagtgtgatggccacggcgctgaacagtaatgtcagaggaggcactatgccgcaattaactgcaacggaagccgccgtgcaggagaaccagcgagtgatggggatcctgacatgccaggaagcgaaaggacgtgaacagcttgccacgatgctggcagggcaacagggcatgagcgttgaacaggcccgggcgattctggccgcggcggcaccgcagcagccggtggcatccgcgcagagtgaagccgatcgcattatggcgtgtgaagaagcgaacggtcgtgaacaactggcagcaacgctggcggcgatgccggagatgacggtggaaaaagcccgcccgatcctggctgcttcaccgcaggcgaatgccggaccatcactccgtgatcagatcatggcactggatgaggcaaaaggggctgaggcgcaggctgaacagctggctgcctgcccgggaatgaccgtggagagcgcccgggctgtgctggctgcgggatcaggtaaggcagaaccggtctctgcatccacaaccgccctgtttgaacatttcatggcgaatcattcaccggcagcggtgcggggtgagcgtgtcacagacgtcagcagacggtga

SEQ ID NO: 465438 - DNA, 228 bp, Shigella boydii; identical to SEQ ID NO: 464651

SEQ ID NO: 465439 - DNA, 468 bp, Shigella boydii
ttgttctataagttgctcagcaagctcattttcgctgttcttcatcgtgccgaaggctgcagccgtcagcagatggctggtcagttccatctggcagaccattttgacctgcgggtagagcgccgggttcccggcatgtgtctggcggcggaaggctgcatcgttctctggtgtatccggtgtgcgccagaacacaccatcgatggccagcagggtcaggccgcaccagtgcggatgcggcgtggcgttatgccagagctgcgctgttttcgtgaacacgcggcggacagcctcacttcccaggcgctggcgggcctgaataacggcactgggggcaacgaaggggcgattgcccggcagcatgatgtccaggcgattcacaatctggtgaagaggttctttacgctcaagcgccatgccaacaatacaccagaccatcatttcgaggggaagacggcgcttgcgtag

SEQ ID NO: 465440 - DNA, 468 bp, Shigella boydii; identical to SEQ ID NO: 19402

SEQ ID NO: 465441 - DNA, 861 bp, Shigella boydii
atgaatatcgcaattgtgacaataaatcaggagaatgccgcaatagcaagctggctggcggcgcaggatttcagtggttgtaccctggcgcactggcagattgaacctcagcctgtagtggcggaacaggtgctggatgcgttggtggaacagtggcagcgaacgcctgcggacgttgttctctttccgccgggaacgtttggcgatgaactgtcgacccggctggcctggcgtttacatggtgcaagcatctgccaggtgacttcgttagatattccaaccgtaagcgtgcgcaaatcccactggggaaatgcgctaacggcgacgctgcaaacagaaaaacgcccgctatgcctttccctggcgcgtcaggcgggagcagcgaaaaacgccacgttgccctctggaatacaacaactgaacattgtcccgggtgcgcttcccgactggctggttagcacagaggatctgaaaaatgttactcgcgacccattagctgaggccagacgggtgctggtggtggggcagggcggagaggcagataaccaggaaatcgctatgctggcagaaaagctgggagccaaagtgggctacagtcgggcgcgagtgatgaacggtggcgttgatgctgaaaaagtgattggtatttccggacatttgctggcacctgaggtgtgtattgttgttggcgcttccggcgcagcagcgttaatggcgggcgtacgcaatagcaagtttgtggtggcgattaatcatgacgccagcgctgcggtattttcacaggcagatgttggcgtggttgatgactggaaagtggtgctggaggcactggtgacaaacattcacgcagattgccaataa

SEQ ID NO: 465442 - DNA, 174 bp, Shigella boydii
gtgagttggagtcattacccgatcgccattatgatcatggcatattcagtgattggtttaatctctgcgctgaaaatgccagaggtgaaagaccgtgatttaagtgcgctggaagacgctgcggaagatcaaccgcgtgttgtaagagctgcgcaaccttccagaagtctgtaa

SEQ ID NO: 465443 - DNA, 468 bp, Shigella boydii; identical to SEQ ID NO: 19402

SEQ ID NO: 465444 - DNA, 225 bp, Shigella boydii
atgtattaccctgtgacagactatatcgctcttgctctcattattagctttctttttctgacattatttatctgcctgttatgccttaaacatgagcgaataaaaaaagaaactatcaggcaaaaaaatgcacatattctggagcatggctggaatgcaactgagttctcatggttccgatacggacagtataacgaaacgggggtgatgctgccaacttactga

SEQ ID NO: 465445 - DNA, 267 bp, Shigella boydii; identical to SEQ ID NO: 11114

SEQ ID NO: 465446 - DNA, 468 bp, Shigella boydii; identical to SEQ ID NO: 461580

SEQ ID NO: 465447 - DNA, 225 bp, Shigella boydii
atgactagtctaaaaactagtattaagactatcacttatttaagtgatactggttgtctggagattcagggggccagtctaaaaattcatcgctgtatccgcctgattaaattcacattttatctgctgggcgcactattagtggtagtggctggtggaatctatgcgctgcaaatgaagggtaaaagcggtgtcaagctagtagtggcaaaagaaattcattaa

SEQ ID NO: 465448 - DNA, 267 bp, Shigella boydii; identical to SEQ ID NO: 30160

SEQ ID NO: 465449 - DNA, 1113 bp, Shigella boydii
atgaaaatcactaaactcactacctttattatgcatgtaccggtaactaaaaatattatcggtgactccacacacagcattactcattggggaatgccgggcgtaatgatcgagacagataccggccttgtaggttacggttataccggaacccatgcagacattactaccgaccgtcttatcaccaccattattaaagatgccttcggcccgatgttgattggagaagacgccagtgaagttcgctatctccaccgtaagatgtcacgcagctcgaccaatatctgggtgggccgcggtgggttaatgcaaatggcgctttcagcaatcgatatcgccctgtgggacctgaaagccaaaatggtggagcaacctttgtggaaagtctttggcggttctcaacattcccgtgttcttgcctacaacaccgactgcggctggctggttcgtaacacggcggagttagtggatgactgcaagaagatgatttttgaggagggattttccgccatcaagatgaagataggcaagcccgatccgcgagaagatctcaaacgaatcgaagccgtcagaaaagcgataggcgatgacgtcaatctgatggtcgacgcgaatgcaaaatgggacatcagcactgccaagcagtacggtgccaagctggctgatttcgatattacctggtttgaagagccgatgtggcatgatgatatcgcaagtcaccgcacgctgtccgggcatatcagtacgccgattgcgttgggtgagttactctatcagtttgattcctttaaagagtttgtactggccggtgcggtggattatctccagcccgatgccactcgctgcggtggactgaccgccgtatgggaaatagccgatctcggtcaggcgttcaatctgccggtcacaccacatcatggtgatatgatgcaggcacaattacatctggtaatggcacatccctcttgctctctgttggagtttattccctggacgctgggctgctttgtcgatccggttgaggtcaaagagggatattactctcttcccaccgcgccgggtgccggcactaccttacgcccggaagctcttgagcactttagcgttagatga

SEQ ID NO: 465450 - DNA, 1368 bp, Shigella boydii; identical to SEQ ID NO: 30162

SEQ ID NO: 465451 - DNA, 744 bp, Shigella boydii; identical to SEQ ID NO: 30163

SEQ ID NO: 465452 - DNA, 186 bp, Shigella boydii; identical to SEQ ID NO: 30164

SEQ ID NO: 465453 - DNA, 291 bp, Shigella boydii
atgatttcactcccatcaggtacccgtatctggctcgttgccggcgttaccgatatgcgtaaatccttcaacggactgggagaacaggtacaacatgtgctgaatgataatcccttctccggccacctgtttatcttccgtggccgacggggtgacaccgttaaaattctttgggctgatgctgatggtctgtgcctgttcaccaaacgccttgaggaaggtcagtttatctggcctgcggtgcgtgacggtaagatatccattacccgctcgcaactggcaatgctgtaa

SEQ ID NO: 465454 - DNA, 468 bp, Shigella boydii; identical to SEQ ID NO: 19402

SEQ ID NO: 465455 - DNA, 1266 bp, Shigella boydii
gtgagttattccaaagactttgaccagctcaacagccgcgttacttttgctggatatcgcttctcggaagagaactttatgaccatgagcgagtatctggatgccagtgacagcggaatggtacgcacgggcaacgacaaagagatgtacaccgccacttataaccagaacttccgcgatgcgggtgtttcggtttatctcaactatacccgccatacctactgggatcgcgaggagcagataaactacaacatcatgctctcgcactatttcaatatgggcagtattcgtaatgtcagcatctcgatgactggctaccgttacgagtatgacaaccaggccgacaaaggcatgtacatttcgctcagtatgccgtggggcgacaacagtaccgttagctataacggtaactatggcagtgggacggacagcagtcaggtcggttatttcagccgtgtcgatgacgcgactcactatcagttgaacgtcggcaccagtgacaaacacaccagcgttgacggctattacagccatgatggttcgctggcgcaggttgacctcagtgcgaactaccatgaagggcaatacacctctgcgggcttgtcgttacagggcggcgcaacgcttactgcccacggtggcgcacttcaccgtacccagaatatgggcgggacacgcttgttgattgatgccgatggcgttgccgatgttccggtggaaggtaacggggctgctgtttataccaatatgtttggtaaagccgtcgtttctgacgtcaataactattaccgcaatcaggcgtatatcgacctcaacagattgcctgaaaacgctgaagcaacccagtcggtggtgcaagccacgctaactgaaggtgccattggctaccgtaaatttgctgtcattagcggacaaaaagcgatggcggtgctgcgcctgagcgacggcagccatcctccgtttggcgcagaagtaaaaaatgataacgagcagacagtgggccttgtcgatgatgacggcaatgtttatctggctggggtgaaacctggcgaacacatgagtgtgttctggagtggtgttgcgcattgcgatatcaacctgccggacccgctgcctgccgatctgtttaacggcttgttactgccatgccagcataaaggcaatgtagcacctatcacttcgccggcggtcaaaccggcgattcaggaacagacacagcgggtgacgccaacggaaccaccgacttcaatttcagtaaaccagtaa

SEQ ID NO: 465456 - DNA, 210 bp, Shigella boydii
atgacggatggctggccgctgtatgaatcacgcctgaagggaaagctgcacgttatcagcaagcgttacactcagtgcattgagcgacataatctgaatctgagacaacatctggcaaggctgggacggaagtcactgtcgttctcaaaatcggtggagctgcatgacaaggtcatcgggcattatctgaacataaaacactatcagtaa

SEQ ID NO: 465457 - DNA, 801 bp, Shigella boydii; identical to SEQ ID NO: 461785

SEQ ID NO: 465458 - DNA, 480 bp, Shigella boydii; identical to SEQ ID NO: 463183

SEQ ID NO: 465459 - DNA, 390 bp, Shigella boydii
atgcgtaagtctttcaacgggctgggtgaacaggtacagcatgtgctgaatgataatcccttctccggtcacctgttcatcttccgtggccgacggggtgacatgattaaaatcctgtgggctgatgctgatggtctgtgcctgttcaccagacgccgttactggccgaatcaactgagtttctcagaatcatgcggaatggtgatgagaatgctgatgacattgcagggcgcttcaccgggacgtataccggagctgatgcgcgatcttgcaagtatgggacaacttgtgaaattaccgacgagaagggaaagggccttcccgagagtggtaaaggagaggccctggaaataccccacagccccgaaaaagagccagtcagttgcttaa

SEQ ID NO: 465460 - DNA, 1917 bp, Shigella boydii
atgtccggcagtgcttttgccgttacgcaccacgccttcagtagcggagcaggaaggacatctgatggaaatggaagccacgcaagcaccttaaaatcaccatcatacactaaatcagtaagttggcagcattacccgcaattaggttcaaaattaaccctcggcgaaacggattttagttccaatattttcgacggtttttcttataccggtgcggcactggcaagtaacgatcgaatgttgccatgggaactacgcggctacgccccacaaattagcggtattgcacagaccaatgccacggtgacgatcagtcaatcaggccgcgtcatttaccagaaaaaagtcccaccaggcccatttatcattgacgaccttaatcagtctgttcagggcacactggatgtcaaagtgacggaagaagatggtcgggtgaacaatttccaggtttcggcagcatcgacgcccttcctgactcgtcagggacaggttcgctataaactggccgcgggtcagccacggccctccatgtcacatcaaactgaaaatgaaaccttttttagcaatgaagtttcctgggggatgctgtcaaacacctcgctgtacggcggcctgctgctttctggtgatgactaccattctaccgcaatgggtattgggcaaaatatgctgtggcttggtgcgctgtcgtttgatgtcacgtgggccagtagccattttgatactcagcaggacgagcggggcttaagctaccgttttaattacagcaaacaagtggatgccactaacagcacgatttccctcgccgcttatcgtttctccgatcgtcattttcacagctacgccaactatctggatcacaaatacaacgacagcgatgcgcaggacgaaaaacagacgatcagcttatctgtgggccaaccgattaccccactaaacctcaatctttacgccaacctgctacatcaaacctggtggaatgcagacgcctccacgaccgccaacatcacggcaggttttaatgttgatattggtgactggagagatatctctatttcgacgtcattcaatacaacccattacgaagataaagatcacgacaaccagatttacctgtcgatttcgctccccttcggtaacggtggtcgggttggctatgacatgcaaaacagtagccacagcaccacacaccgcatgtcgtggaacgatacgctggatgaacgtaatagctggggcatgtctgccggactgcaatccgaccgtcctgacaatggagcccaggtgagcggcaactatcagcacctgagttcagcgggtgagtgggatatttctggtacctatgccgccaatgattacagttccgtcagcagcagctggagcggttctttcaccgcaatccaatatggtgcagcgtttcatcgccacagctccaccaatgaaccacgcctgatggtcagcaccgatggcgtggcagatattccggttcagggcaatctcgactacaccaaccattttggcattgcggtggtaccgttgatttccagttaccagccttccaccgtggcggtgaacatgaatgacttacccgacggcgtaacagttgcagaaaacgttatcaaagaaacgtggattgaaggcgcgataggttacaaatcactggcttcccgttccggtaaagacgttaacgtcatcattcgcaacgccagcggtcagtttcctcccctcggagcggatatccgccaggatgacagcggcattagcgtggggatggttggcgaggaaggacatgcctggttaagcggagtcgctgaaaatcaaaagtttaccgtggtctggggtgataaccagcattgctcgctccatcttcctgaacatatggaagacaccgcaaatcgcctgattttaccttgtcattaa

SEQ ID NO: 465461 - DNA, 468 bp, Shigella boydii; identical to SEQ ID NO: 465382

SEQ ID NO: 465462 - DNA, 294 bp, Shigella boydii; identical to SEQ ID NO: 460208

SEQ ID NO: 465463 - DNA, 600 bp, Shigella boydii
atgcgtaaagtttgtgcagccattttgtccgcagccatctgtctgtccgtatccggtgcgcctgcatgggcgtctgaacatcagtccacactgagcgcgggatatcttcatgcccgtacgaacgctcccggcagcgataatctgaacgggattaacgtgaaataccgttatgagtttacggacgcgctggggctgattacgtccttcagttatgccaatgctgaagatgagaaaaaaacgcactacagcgatacccgctggcatgaagattccgttcgtaaccgctggttcagcgtaatggcggggccgtctgtgcgcgtgaatgaatggttcagcgcgtatgcgatggcgggtgtggcttacagccgtgtgtcgactttctccggggattatctccgcgtaactgacaacaaggggaaaacgcacgacgtgctgaccggaagtgatgacggtcgccacagcaacacgtctctggcgtggggggctggcgtgcagtttaacccgaccgaatccgtggccattgatattgcttatgaaggttccggcagtggcgactggcgcactgacggtttcatcgtgggtgtcggctataaattctga

SEQ ID NO: 465464 - DNA, 837 bp, Shigella boydii; identical to SEQ ID NO: 464897

SEQ ID NO: 465465 - DNA, 477 bp, Shigella boydii; identical to SEQ ID NO: 464898

SEQ ID NO: 465466 - DNA, 1455 bp, Shigella boydii
atgaataataagggctccggtctgaccccagctcaggcactggataaactcgacgcgctgtatgagcaatctgtagtcgcattacgcaacgccattggcaactatattacaagtggcgaattacctgatgaaaacgcccgcaaacaaggtttttttgtctatccatcactgaccgtaacctgggacggtagcacaaccaatccccccaaaacgcgcgcatttggtcgttttactcacgcaggcagctacaccaccacgattactcgccctactctctttcgttcgtatcttaatgaacaacttacgttgctgtatcaggattatggtgcgcatatctcggtgcaaccctcgcagcatgaaatcccttatccttatgtcatcgatggctctgaattgacacttgatcgctcaatgagcgctgggttaactcgctatttccctacaacagaactggcgcaaattggcgatgaaactgcagacggcatttatcacccaactgaattctccccgctatcgcattttgatgcgcgccgcgtcgatttttccctcgcgcggttgcgccattataccggtacgccagttgaacattttcagccgttcgtcttgtttaccaactacacacgttatgtggatgaattcgttcgttggggatgcagccagatcctcgatcctgatagtccctacattgccctttcttgtgctggcgggaactggatcaccgccgaaaccgaagcgccagaagaagccatttccgaccttgcatggaaaaaacaccagatgcccgcgtggcatttaattaccgccgatggtcagggtattactctggtgaatattggcgtgggaccgtcaaatgctaaaaccatctgcgatcatctggcagtactacgcccggatgtctggttgatgattggtcactgtggcggattacgtgaaagtcaggccattggcgattatgtacttgcacacgcttatttacgcgatgaccacgttcttgatgcggttctgccgcccgatattcctattccgagcattgctgaagtgcaacgtgcgctttatgacgccaccaagctggtgagcggcaggcccggtgaggaagttaaacagcggctacgtactggcactgtagtaaccactgatgacaggaactgggaattacgttactcagcttctgcacttcgttttaacttaagccgggccgtagcaattgatatggaaagtgcaaccattgccgcgcaaggatatcgtttccgcgtgccatacgggacactactgtgtgtttcagataaaccgttgcatggcgagattaaacttcccggccaggctaaccgtttttatgaaggtgctatttccgaacacctgcaaattggcattcgggcgatcgatttgctgcgcgcagaaggcgaccgactgcattcacgtaaattacgaacctttaatgagccgccgttccgataa

SEQ ID NO: 465467 - DNA, 507 bp, Shigella boydii
gtgcgggtattacttcgacctgttctggttacggaactcgggctggtggtccttaagccaggccgtgaatccatgccggtattccacaatacccgggtactggtggagccggaaccgaaaagcatgcgtaatctgccgtccggggtcgttcctgccgttcgccagccgctagtggaagacaaaacattgctgccgtttttcagtaacgcacgggtgattcgtgctgctggtggtgctggtgcattgtctgactggctgttgcgccatattaaatcctgccagtggccacacggcgattatcatcacagcgaaaccgtcattcaccgttatggtaccggcgcaatggtgttgtgctggcactgcgacaaccagttgcgtgaccagacatccgaatcactcgagcaacttgctcatcaaaacctgtcagcatggatgattgacgtcatcggtcacgcaataagcggtacgcaggagcgtgaattatctctggctgaattatcctggtag

SEQ ID NO: 465468 - DNA, 480 bp, Shigella boydii; identical to SEQ ID NO: 463183

SEQ ID NO: 465469 - DNA, 363 bp, Shigella boydii; identical to SEQ ID NO: 464902

SEQ ID NO: 465470 - DNA, 327 bp, Shigella boydii; identical to SEQ ID NO: 464915

SEQ ID NO: 465471 - DNA, 480 bp, Shigella boydii; identical to SEQ ID NO: 464906

SEQ ID NO: 465472 - DNA, 294 bp, Shigella boydii; identical to SEQ ID NO: 25632

SEQ ID NO: 465473 - DNA, 1941 bp, Shigella boydii
atgaacaccgataaacaagtttacccactgtattacgaagcaaaaaatgacaaagtaagaaaacgtctcggtattaaaggcggtttttactgggctgaagcgaaaaaattatccattgccatctcccgtggtgctgttgcgattgacgatgctggatacgatgaagatgacttcaaaaaacctgttcgcgtcaatttgcccgttgttgatgacctcccaccagaaggcgtgtttgatacggaattctgcaaccgttacgaaaaaggcggggaagatggcatcacaatggtatttatcgcgccctcaccctctgcgcaggacaaaccagccagcactgacaataccaatgttaatggcgaagacatgacggagattgaggagaatatgctactcccgatttctggtcaggagctgcccattcgctggcttgctcaacacggcagcgaaaaaccggtaacgcacgtttcacgcgacgaactccaggcattacacattgcacgggctgaggaactaccagctgttactgccctggctgtttcgcataaaaccagcctgctcgacccgctggaaattcgcgatctccacaaactcgtgcgtgatactgacaaagttttccctaatcctggcaattcaaatctgggactgatgactgcttttttcgaagcatatctggatgccaactacaccgatcgcggtctgctgacaaaagagtggatgaaaggaaatcgtgtttcacgcatcacgcgcacggcttccggtgcgaatgctggcggcgggaacctcaccgatcgcggcgaaggtttcgtccacgatctgacgtcgctggcgcgcgacgtagccactggcgtactggcccgttcaatggacgtggatatttataaccttcatccggcacacgctaaacgcattgaggaaattatcgctgaaaataaaccacccttttctgttttccgcgacaaattcatcaccatgcctggcgggatggattattcccgcgccatcgtggttgcgtcagtgaaagaagcaccgattggtatcgaggtcatccccgcgcacgtcactgaatatctgaacaaggtactgactgaaaccgatcatgccaaccctgatccggaaatcgtggatattgcctgcggtcgctcctctgccccgatgccgcaacgtgtaacagaagaaggaaaacaggatgatgaagaaaaaccgcaaccatcttgcgcaatggcagatgaacaggcaacggctgaaacagtggaaccggatgcaactgaacatcatcaggacacgcagccgctggatgctcagtcacaggtaaatgctgttgatgcgaaatatcagaaactgcggacagaactccatgaagcccggaaaaacattccgcccaaaaatcctgtcgatgcagacaaattactggctgcctctcgcggagaatttgttgaagggattagcgacccgaatgattcgaaatggattcccggtcatcatatctcctcaaatgaagtcaaaaaaacggaaaatgaagtgcgacagactgaagataaacagcaccagaacagcgaaccggaggagggaacaccctgcaatcagactggcgaggataactgccctgactgtggcgcggtgatgggagacgcaacttatcaggaaacttttgacgaaaaaaaaccagatgaagcacaggaagaagagccgaagaaaacggaaaaagctgatgatttgttgccggagaacgctggcagcgatcagcataatgatagcaataatgaaactggcgaagatgaactcaactggaaaaaacaggtgttgattgcggcggtttacggtttatgtgcgaatcctgcgtgcatagcctatgcgcctgcaatccctggcatcgcaatgatgattgccaacaagcttgaaaattttggagtgaccagtgatgagcgcttacccgatttttga

SEQ ID NO: 465474 - DNA, 123 bp, Shigella boydii; identical to SEQ ID NO: 461374

SEQ ID NO: 465475 - DNA, 456 bp, Shigella boydii; identical to SEQ ID NO: 464908

SEQ ID NO: 465476 - DNA, 285 bp, Shigella boydii
atgagcagaaaaacccaacgttactctacggagtttaaagccgaagccgtcaaaacggttcctgaaaatcagctttcgatcagtgaaggcgcttcccgattatctgttcctgaaggcactttaggacaatgggttaccactgcaagaaaagggctcaatacaccaggctcccgcacagtggctgagctggaatctgaagttatgcaactgcgtaaggcgttaaatgaagctcgccttgagcgagatatatgtaagcgtaaactgacagccgtatgtagccattaa

SEQ ID NO: 465477 - DNA, 447 bp, Shigella boydii
gtggcgttcatcattgatgtgtttgccggatacatcgtggggtggcgggtctcatcgtccatggaaacgacattcgtgctggatgctctggagcaggcgttatgggcccgtcgtccgtctggcaccatccatcacagcgataaaggctctcagtatgtgtcactggcctatacggagcgactaaaagaagccggattactggcatcaacaggaagtacaggcgactcgtatgacaacgcgatggcggagagcatcaatggtctttacaaagcggaggtaatacaccgtaagagctggaaaaaccgtgcagaagtggaactggccacactaacgtgggtggactggtataacaatcgacgattgctgggaaggctgggccatactcctccggcagaagcagaaaaagcttattatgcttccatcggaaacgatgatctggcagcctga

SEQ ID NO: 465478 - DNA, 282 bp, Shigella boydii
atgacaattttcacccccatcattaaaaacgattatcggctctatgagcagtatgtatttcaggccaaggcgcgcacattaacctgtccgatcgtgctatttcatggcgatgctgacaatctggtaatgcaggatgaattacttgcatgggaaaaattcaccacacgaaagacgcggactattatatttcctgctgccgatcatttttttgtcgataagcattttgaacaggtggtaggttatgtgaaccagacgattgaatcactcgaaatagtagggtag

SEQ ID NO: 465479 - DNA, 513 bp, Shigella boydii
atggctgttccatcatcaaaagaagagttaattaaagctattaatagtaatttttctttattaaataagaagctagaatctattacgccccaactcgcctttgaacctctattggaagggcacgcgaaggggactacgattagcgtagcgaatctggtttcctatctgattggctggggagagctggtgttacactggcatgaccaagaggcaaaaggaaaaactattatttttcctgaggaaggatttaaatggaatgaattggggcgtttagcacagaaattctaccgtgactatgaggatattacagagtacgaagttttattggcacggttaaaggaaaataagcagcaactcgtggctttgattgaacgattcagtaacgacaagctttacggtaaaccttggtataataaatggacccgaggtcgtatgattcaatttaataccgcctcgccttataaaaatgcttcggggaggttaaataaactgcagaaatgtcttgcagaatag

SEQ ID NO: 465480 - DNA, 738 bp, Shigella boydii
atgtccggcagtgcttttgccgttacgcaccacgccttcagtagcggagcaggaaggacatctgatggaaatggaagccacgcaagcaccttaaaatcaccatcatacactaaatcagtaagttggcagcattacccgcgggtggtttacttaagtaataatgctgataaatctatttctgtatttagcaaagaagaaaaaataccttatatcatccaagcttgggtagatccatttaataaagaggataaaagaaaagcgccgtttaccgttattccgccagtatcacgattagaaccttcgcaagaaaaaatattacgcattattcacaccaaaggtgtgtcattgcctgatgatcgcgagtcagtcttctggctgaatattaaaaatattccgccatcagcgagcaacaaagcgacgaactcgctggaaatagcagtaaaaacgcgtatcaagctgttctggcgaccagcaaatatccgccttattcccgaagatgctgcgccgaaagtgaaatggcgccgggaagggcgaaatctgatagcagagaatcccaacccaattcatatcagtgtgatggatgtcatcgttgatggccatgatgtgcccctcaatatgatccgtccttttgaaacgctcacgttacctttacctgctaattctgcgggaggccaaatgacctggcgatttattaatgattacggcgcagtcagtgacccgataaaaatgacgctgtaa

SEQ ID NO: 465481 - DNA, 1455 bp, Shigella boydii
atgaaaatacctgaagcagtaaatcatattaatgttcagaacaatattgatcttgttgatggaaaaataaatccgaacaaagatacaaaagcattacaaaaaaacatatcatgcgtaacaaactcatcctcttctggcataagtgaaaaacatttagatcactgtgctgatactgtgaaaagctttttaaggaagtctatagcagcgcaaagttatagtaaaatgttctctcaagggaccagtttcaaatcattaaatctttctattgaagcgccatctggagcacggtcatcatttcggtcacttgagcacctcgataaggtgtccagacactatctttctgaaataatacaaaaaactcatcctctttcttcggatgaacgtcacttgctctctattattattaattctgattttaacttcagacatcaaagtaacgctaacctgtcaaataatactcttaatattaagtcctttgataaaattaagtctgagaatatacaaacatataaaaacacattctctgaggatattgaagaaatagctaaccacgattttgttttttttggggttgaaatttccaatcatcaagaaacactcccactaaataaaacacatcatactgtggattttggtgctaatgcgtatatcattgatcatgactctccatatggatatatgacattaaccgaccactttgataatgctattccacctgttttttaccatgagcaccaatcatttttcttagataactttaaagaggttgtggatgaagttagcaggtatgtgcatggtaatcagggaaaaactgatgtgccaatatttaatactaaagatatgaggcttggaattgggttgcatcttattgattttataagaaagagtaaagatcaaagattccgagagttttgttataataaaaacattgaccctgttagtctggatagaattataaactttgtgtttcagcttgagtatcatataccaagaatgctaagcacagataacttcaaaaagataagactcagagatatatctttggaggatgccattaaagcatccaattatgaagaaattaacaataaggtgactgataaaaaaatggctcatcaagctcttgcttattctctaggcaatgcaaaatctgatatggcactttatatactatctaaatttaattttacaaaacaagatgtcgcagagatggagaaaatgaacaacaatatgtattgtgagctgtatgatgttgagtatttacttagtgaagatagtgccaactataaagtgctagaatattttattaataatggattggttgatgtaaacaaaagatttcaaaaagcaaatagtggggacactatgcttgacaatgcaatgaaaggcaaagattcaaaaacaattgattttttattaaaaaatggagcggtatcaggcaaacgatttgggaggtga

SEQ ID NO: 465482 - DNA, 480 bp, Shigella boydii; identical to SEQ ID NO: 464913

SEQ ID NO: 465483 - DNA, 294 bp, Shigella boydii; identical to SEQ ID NO: 25632

SEQ ID NO: 465484 - DNA, 480 bp, Shigella boydii; identical to SEQ ID NO: 463183

SEQ ID NO: 465485 - DNA, 294 bp, Shigella boydii; identical to SEQ ID NO: 25632

SEQ ID NO: 465486 - DNA, 795 bp, Shigella boydii
atgtctgtagtgatatcaggtgcgctgactgatggcgcaggtatccccatgtccggataccatattattctgaaatcccgggtaaacaccccggaagtggtgatgcacactgttgctgatgtgatgacaggaaacgatggtgaatactgtttccatgcgcggactggaaaatatggtgtgtatctgaaaccgggctggcacaacgagtacaacgttggcgacattgctgtatatgaggactcaaagcccggcacgctgaatgactttctgattgctcctgatgagggcgacctgaagccggatgtcgtcaaacgctttgaggaaatggtggtgcaggcgcagcagagcgccggggccgcagccggaaacgcacagcagacggcgcaggatgtggcggcagccgcaggttatgcccgcgcagcagaacaggccaaaaatgacattgatgctgcgctgaccggcactctgaaaatggctaaccatctgtcagaaatcgcagcagcaggcgaaaaggcacaacagaagtcccgggataatctggggctgaaaagtgcggccacgatggaagcacagagcgacatttacgaccggacaaaaggccgtctggcgatacccggcgcattcggctttgggtgtgcttttctgcctgaagatgttatccgttttgacactaagagtgatttcctggcctgggtaaggaatgcgctgccaggtgaatattccgttgctggcccctacgacatcatcatacccgacacacggtttgaaggggatgctcagcatccggtggactga

SEQ ID NO: 465487 - DNA, 1251 bp, Shigella boydii
atggaaaactttaaacatctccctgaaccgttccgcattcgtgttattgagccagtaaaacgtactactcgcgcttatcgtgaagaagcaattattaaatccggtatgaacccgttcctgctggatcgcgaagatgtgtttatcgatttactgaccgacagcggcaccggggcggtaacccaaagtatgcaggcagcgatgatgcgcggcgacgaagcctacagcggcagccgcagctactatgcgttagccgagtcagtgaaaaatatctttggttatcaatatactattccgactcaccagggccgtggcgcagagcaaatctatattccggtactgattaaaaaacgcgagcaggaaaaaggcctggatcgcagcaaaatggtggcattctctaactatttctttgataccacgcagggccatagccagattaacggctgtaccgtgcgtaacgtctatatcaaagaagccttcgatacgggcgtgcgttacgactttaaaggcaactttgacctcgaaggattagaacgcggtattgaagaagttggcccgaataacgtgccgtatatcgttgcaaccatcaccagtaactctgcaggtggtcagccggtttcactggcaaacttaaaagcgatgtacagcatcgcgaagaaatacgatattccggtggtaatggactccgcacgctttgctgaaaacgcctatttcatcaagcagcgtgaagcagaatacaaagactggaccatcgagcagatcacccgcgaaacctacaaatatgccgatatgctggcgatgtccgccaagaaagatgcgatggtgccgatgggcggcttgctgtgcatgaaagacgacagcttctttgatgtgtacaccgagtgcagaaccctttgcgtggtgcaggaaggcttcccgacatatggcggcctggaaggcggcgcgatggagcgtctggcggtaggtctgtatgacggcatgaatctcgactggctggcttatcgtatcgcgcaggtacagtatctggtcgatggtctggaagagattggcgttgtctgccagcaggcgggcggtcacgcggcattcgttgatgccggtaaactgctgccgcatatcccggcagaccagttcccggcacaggcgctggcgtgcgagctgtataaagtcgccggtatccgtgcggtagaaattggctctttcctgttaggccgcgatccgaaaaccggtaaacaactgccatgcccggctgggtaa

SEQ ID NO: 465488 - DNA, 294 bp, Shigella boydii; identical to SEQ ID NO: 465391

SEQ ID NO: 465489 - DNA, 192 bp, Shigella boydii; identical to SEQ ID NO: 464451

SEQ ID NO: 465490 - DNA, 213 bp, Shigella boydii; identical to SEQ ID NO: 462242

SEQ ID NO: 465491 - DNA, 912 bp, Shigella boydii
atggtggggtttggtaataaatacattgccgctcaattcggcatttcgccgggtcttgctgcaaccgtcaatgcatcagtattaatcgccgcgttaattggcggtttattagcgaaccgagtaataaaccgctttgggcaaaagcaggcatttattattggcatggggctgtgcaccatcggtgctgcagcggtagctattgctcccagtatctggtgggtgctggtgtgccgcgtcatcatgggctttggtttaggcatcgacttccctttggcaaccaatgctgtggcagagcttcgtggttcaacgtcgaagaaaaccggaacgtcggtcaacctctggcaaatggcctggtatgtttcgacaaccgttgtttatttggtacttttgccgctgcttctgtcgggtatcgctgaagaacaattgtggcgttacggaatattcatcggagctatttttgcagtcatcttcatgattttgcgttacttctttattggtgaatccgcaatgtgggccgcacgcgtcgggcgttaccaggaagcgtgcgacattctgggaaaacgttatggtgttcaggctcgcgttgcggcatcgggtacaacagaagcgaaattctcggaaaaagcagagaataaatacagtggtggatatggcatcttatttaatgatcgttaccgcaaacgcaccattcttggctgtgtcgtggcaaccatgcaggcgtggcaatataacgccgtaggtgtttatcttcctcttacgttggcgggaataataagtggcgggcttactggcgcgttgaccggttctgccgtcgtgaatgccctttgtggggtgacaggcgggatgatcggctcgtttattctccaacgactggtactcgccgacagtcgatgtatggatttgctgttgtga

SEQ ID NO: 465492 - DNA, 276 bp, Shigella boydii; identical to SEQ ID NO: 464937

SEQ ID NO: 465493 - DNA, 213 bp, Shigella boydii; identical to SEQ ID NO: 462242

SEQ ID NO: 465494 - DNA, 600 bp, Shigella boydii
atgcgtaaagtttgtgcagccattttgtccgcagccatctgtctggctgtatccggtgcgcctgcatgggcgtctgaacatcagtccacgctgagcgccgggtatcttcagccccatactgatatgccaggcagcgatgacctgaagggcattaacgtgaaataccgttatgagtttacggacacgctggggctggtgacgtcattcagctatgccaacgctgaagatgagcaaaaaacgcattacagcgatacccgctggcatgaggattccgtgcgtaaccgctggttcagcgtgatggcggggccgtctgtgcgcgtgaatgaatggttcagcgcgtatgcgatggcgggtgtggcttacagccgtgtgtcgaccttctccggggattatctccgcgtaactgacaacaaggggaaaacgcacgacgtgctgaccggaagtgatgacggtcgccacagcaatacctctctggcgtggggggctggcgtgcagtttaacccgaccgaatccgtggccattgaccttgcttatgaaggttccggcagtggcgactggcgcactgacggtttcatcgtgggtgtcggttataagttctga

SEQ ID NO: 465495 - DNA, 435 bp, Shigella boydii
ttgtccgcgaaccagattgaaggcgatctcgttaaaacagtgggcaaacctttcccacgggactcccgggcaccggagaggtggccatcagggaccattaccgtcagggtttatgacgatcagccgtttgatcggcaaattgttattcccgcggtggcgtttcgcggtgctaaacatgagcggaagaataacaatatttattcgtcatgccgcctgatagtgaagaaaaacggtgctgaaatttataaccgaacgaccctggataatacgctgatatatacgggtgttattgatatgcctgccggtcacggtcacatgacgctggagttttctgtatcggcatggctggtaaatggctggtatcccacagcaagtatcagcgatttgctggttgttgtgatgaagaaagccactgcaggcatcacgattagctga

SEQ ID NO: 465496 - DNA, 252 bp, Shigella boydii; identical to SEQ ID NO: 464926

SEQ ID NO: 465497 - DNA, 825 bp, Shigella boydii
atgagtatggagctgatggttaaagcgatgaaaattcgagtgggaaatccattgcgaaaactggttctgattaagctggctgataatgccagcgatcagggtgagtgctggcccagctaccagcatattgctgaccagtgcgagattagcaaacgttctgtgatgaatcatattgcggccctttgtgagtccgggctggtaaaaaaagtcacccggaaaggtgaaaaaggtaactcaagtaatatctatctccttcatcttgatggtgcaggagattcactagggggtagtgcaaataattcactatctggtgcagcaaattcaccaggtagtgcaggagttgcaccaaggggtagtgtaggagattcacccagaaccagtcactcttttgaaccagtcaaagaaccagtcaatgaaccaatagctgttggtgcatcagttgatgagtccgtgcgagttcgttcaaaccgaccggaatactctccggagtttgagcaggcatggctggcatatcccaaacgtgctggtggcaattcaaaatctgcagccttcaaagcctggaaagcccgtttgaacgagggggtaaaccccgaaaccatgctggaaggtgtgaaacgctacgcgggctgggtatctgcgatgggcaatagcggcacacaatttgtgaaacaggctgtcacgttctttggtccagatcgtcatttcgaagaatcctgggaagttcctgcggtatctgcagccagacgcgaggacccgtacttcaaagccagttacgacaacgtggactacagccagatcccggcaggattcagggggggattatga

SEQ ID NO: 465498 - DNA, 627 bp, Shigella boydii
atgactagtctaaaaactagtattaagactatcacttatttaagtgatactggttgtctggagattcagggggccagtctactttataagcaccacgttacagcgaatcacatcactcttacggcactggcgctttctctttttaccggattgctgttggtgttggtggcacaacccatcctctttttgctattgcccatcgtgctttttatccgtatggcgctcaatgcgctggatggcatgttggcgcgtgagtgcaatcagcaaacacgtctgggggcgattttgaatgaaactggcgatgttatttccgatattgcgctctatttaccgtttttatttttaccggaaagtaacgcatcactcgtaatactcatgttattttgcaccatattgactgagttttgcggtttactcgcgcagacgattaacggtattcgcagttatgccggtccattcggcaaaagcgatcgcgcgttaatatttggtctgtgggggctagccgttgccatttatccacagtggatgcaatggaataatcttttatggagcattgcttcaattctgcttctctggactgcgattaatcgttgtcggagtgtgctttttatgagtgctgaaagataa

SEQ ID NO: 465499 - DNA, 480 bp, Shigella boydii; identical to SEQ ID NO: 463183

SEQ ID NO: 465500 - DNA, 480 bp, Shigella boydii; identical to SEQ ID NO: 464940

SEQ ID NO: 465501 - DNA, 252 bp, Shigella boydii; identical to SEQ ID NO: 464926

SEQ ID NO: 465502 - DNA, 216 bp, Shigella boydii
atgtaccagatgaaaaaaatcacaacaggtgtgtcatacaccacgtcagcggtgggaacgggctactggttcctgcagttgctggacagggtttccccgtctcagtgggcggcaataggcgtgctggggagtctgctgtttgggctgctgacatatctgactaacctgtatttcaaaatcagagaggaccgtcgtaaggctgtacggggagagtaa

SEQ ID NO: 465503 - DNA, 288 bp, Shigella boydii
atgatactttggtctgtgaaaaaagaaaccgatatccggcgtggaaggcattgtgttttcctgatgcatgttcacctggtctttgtcaccaaataccgacgtcagatttgtgaccatgacgcgacagaaaaactacgcacttacttttcaaatgtatgtgctgattttgaagctgaactggttgaaatggatggcgaaccagatcacgtccatttgttaattaactatcctcccaaactggcaatatccagtctggtaaacagcctcaaaggcgtatcgggtaggtga

SEQ ID NO: 465504 - DNA, 327 bp, Shigella boydii; identical to SEQ ID NO: 464459

SEQ ID NO: 465505 - DNA, 273 bp, Shigella boydii; identical to SEQ ID NO: 461110

SEQ ID NO: 465506 - DNA, 267 bp, Shigella boydii
atggcgacgctggggcgtcttatgagcttgctgtcaccctttgatgtggtgatatggatgacggatggctggccactgtatgaatcccgcctgaagggaaagctgcacgtaatcagcaagcgatatacgcagcgaattgagcggcataacctgaatctgaggcagcacctggcaaggctgggacggaagtcgctgtcgttctcaaaatcggtggagctgcatgacaaagtcatcgggcattatctgaacataaaacactatcaataa

SEQ ID NO: 465507 - DNA, 210 bp, Shigella boydii; identical to SEQ ID NO: 9340

SEQ ID NO: 465508 - DNA, 753 bp, Shigella boydii
atgaaccttgaagccttaccgaaatattactccccgaaatctccaaaactgagcgatgacgcaccggcgacaggctctggtggtttaacgattacggatgtgatggctgcgcaggggatggtgcagtcgaaagcaccgcttgggtttgccttattcctggcaaaagttggtgttcaggatcctcagtttgcgattgaaggtctgctcaattacgcgatggcactggataacccgacattgaataaattgagtgaagaaacccggctacagatcattccttaccttgtgaattttgcctttgctgattattctaggtctgcggcaagtaaggctcgctgtgagcattgtgctggtactggatttcataatgtattgcgcgaggtggtgaaacactccagaagcggggaatctgttatcaaggaagagtgggtgaaggaactatgtcagcattgtcatggtaagggagaagtcagcacagcgtgcagagggtgtaagggtaaaggtattgtcctggatgaaaaaaggacccggcttcatggcacgcctgtttataagatttgtgggcgttgcaatggaaaccggtttagccgtttaccaactacactggcacgacgtcatgtccagaagctggttccagacctgactgattatcagtggtacaaaggatatgcagacgtaattgataaactagtaacaaagtgctggcaggaagaagcatatgctgaaacacaattgagaaaggtgacgagataa

SEQ ID NO: 465509 - DNA, 162 bp, Shigella boydii
atgggtacaaaagcgcatgacctctttgtgttgcctttgtgcagaaagcatcacgacgagctgcatgcggataccgtggcatttgaagagaagtatggttcccagctggagctgatatttcgttttatcgatcgtgcgctggcaataggcgtactggcgtaa

SEQ ID NO: 465510 - DNA, 213 bp, Shigella boydii; identical to SEQ ID NO: 462242

SEQ ID NO: 465511 - DNA, 294 bp, Shigella boydii; identical to SEQ ID NO: 25632

SEQ ID NO: 465512 - DNA, 780 bp, Shigella boydii; identical to SEQ ID NO: 464942

SEQ ID NO: 465513 - DNA, 504 bp, Shigella boydii; identical to SEQ ID NO: 464943

SEQ ID NO: 465514 - DNA, 267 bp, Shigella boydii; identical to SEQ ID NO: 464426

SEQ ID NO: 465515 - DNA, 600 bp, Shigella boydii
atgcgtaaagtttgtgcagccattttgtccgcagccatctgtctggctgtatccggtgcgcctgcatgggcgtctgaacatcagtccacgctgagcgccgggtatcttcagccccatactgatatgccaggcagcgatgatctgaacgggattaacgtgaaataccgttatgagtttacggacacgctggggctggtgacgtcattcagttatgccaatgccaaagatgagcaaaaaacgcattacagcgatacccgctggcatgaagattccgtgcgtaaccgctggttcagcgtgatggcggggccgtctgtgcgcgtgaatgaatggttcagcgcgtatgcgatggcgggtgtggcttacagccgtgtgtcgactttctccggggattatctccgcgtaactgacaacaaggggaaaacgcacgacgtgctgaccggaagtgatgacggtcgccacagcaatacctctctggcgtggggggctggcgtgcagtttaacccgaccgaatccgtggccattgatattgcttatgaaggttccggcagtggcgactggcgcactgacggtttcatcgtgggtgtcggttataagttctga

SEQ ID NO: 465516 - DNA, 327 bp, Shigella boydii; identical to SEQ ID NO: 464915

SEQ ID NO: 465517 - DNA, 726 bp, Shigella boydii
atgaagaaaaaatacgaactggttgttaaagggataaataattacccggataagattactgttactgtggcactggaaattggtgggtatccgtcactgttgttgccatatgtggcgattagtcttgaccgtactgaagatgccacgctggagttttacgaagctgaggcgaaaaagcaggcgaagcagtttttcatggatgttgctgccgggttatgtgaaggggatggtccgttgccggaaaagcgccccgtaattttagaggcgcaggatgtgttgataacctacagaggaaaactaccgggaataattacttgttctctgaagatgccgccgtcaacactgcggtcagaaaaagaggcgtcttgtctgcagtctgagtactccattacggttaaaagtgccggagaggaaggaaataaacgttattttattgcgtctgcacctgataaagatcaggaatgggagtgtaaccggccatcctttgttgtatacggagatggcgggaaaataaccatctcagaaaatgggaaattaacaccgccatcgcaccagcatagtgaggcgctcattgaatttgccattgattacctgaagaacaataaaaagcaggggctgatgaagtgcattggtcgttgcatgggatatctgcagatagctgctgagattgaagcgctggccagtggtgctgataaggatgcaatggtaatgactccaacttactga

SEQ ID NO: 465518 - DNA, 345 bp, Shigella boydii; identical to SEQ ID NO: 464381

SEQ ID NO: 465519 - DNA, 273 bp, Shigella boydii; identical to SEQ ID NO: 7046

SEQ ID NO: 465520 - DNA, 189 bp, Shigella boydii; identical to SEQ ID NO: 463227

SEQ ID NO: 465521 - DNA, 468 bp, Shigella boydii; identical to SEQ ID NO: 19402

SEQ ID NO: 465522 - DNA, 234 bp, Shigella boydii; identical to SEQ ID NO: 464402

SEQ ID NO: 465523 - DNA, 480 bp, Shigella boydii; identical to SEQ ID NO: 464896

SEQ ID NO: 465524 - DNA, 309 bp, Shigella boydii
atgttaacccgcgttaaatatcccacgttggccagcatctgtctcacggaaagtcatactgccttgcatgatcgcgggcgttccggcgcatgggcatttctgatgattgtggcgtggatgctgctggcgggtaactgggcgattttaccgggtgtctggcaatgggcggtggggtgttttgtcccgacgttgattctggtgatgatgcttatcgatcttggtgcgtttgttggcacacaaggcgaaaataaatatggtaaagatactcaggatgtgaagtataaagccgacaataaatcaagtaattaa

SEQ ID NO: 465525 - DNA, 870 bp, Shigella boydii
atggaggcctgtggaggttctcagcactgggcacgggaactgacaaaacttggtcataaagtccggttgttgcaggcccgcttcgttaaggcattcgtcatgggcaataagaatgatgtgatggatgcccgggctatctggatggcggttcagcagccgggtaaagaaatcgccgtaaaaacagaagaacagcagtcggtactggttctgcaccgtacccgcatgcaactggtgaagttccggaccacacaaattaatgccctgcacgggacgttactggagtttggtgaaaccatccacaaaggccgggcagcgatggagcgggagttccccgaagcactggaacggatgaaagagagactgccaccgtatctcattatggttctggaaaaccagtacaaccgactgaatgagctggactcactgatagaggatattgaaaaacagcttaccagcgtggcgaggcagaatgaaacctgtaagcggttgctggatattcctggcgttggaccacttattgcgacggcagcggtggccaccatgggggaagcatcagcgtttaaatcggggcgagagttcgccgcatatgttggtctggttccaaaacaaactggctccggagggaaagtacgtctgctggggataagcaaacgtggtgacacttatctcaggacattatttatccacggtgcaagagcggtggcattagtagctaaagagcctggcccgtggataaccgaactgaaaaaacgtcgtccagccagtgtggcaatcgtcgccatggcaaacaagctggcacgaacagtatgggcgataaccgcccatgaccgtaagtatgacaggaaccacgtcagtatcagaccatattaa

SEQ ID NO: 465526 - DNA, 576 bp, Shigella boydii
gtgcttatcagcacggaaggggcaacagaatggtgcgcagaatacgatgagtggggcaacctgctgaatgaagagaacccgcatcatctgcagcagctcattcgcctgccggggcagcagtatgatgaggagtccggcctgtattacaaccgccaccgctattatgacccgctgcaggggcgatatatcactcaggatccgattgggctgaaggggggatggaatttttatcagtatccgctgagcccggtgaatagcatggatccattaggattatatgaatttaaatcaaaaaatatagatgatattggaatatttgcattggcaatgtgtaatggagaatcaattaacgagaataaagaatatggtggactaatatgtaagaagcaaggtgaatatttccccatgaatccgataagttcaaatgataatgatagtgtagacttgcgaaatataaaatgccctgaaggttcagagagagtaggcgattatcacactcacggtttttactctgacgataaagggaataaagtaacaaaagaaaatgatgtttatgatagtctaaatttttggtaa

SEQ ID NO: 465527 - DNA, 210 bp, Shigella boydii; identical to SEQ ID NO: 9340

SEQ ID NO: 465528 - DNA, 324 bp, Shigella boydii
ttgactatttttgccgttatttctggtgcagaaagttgggaagatatagaggatttcggggaaacacatctcgatttcttgaagcaatatggtgattttgaaaatggtattcctgttcacgatactattgccagagttgtatcctgtatcagtcctgcaaaatttcatgagtgctttattaactggatgcgtgactgccattcttcagatgataaagacgtcatcgcaattgatggaaaaacgggtaatgactccaacttactgatagtgttttatgttcagataatgcccgatgaccttgtcatgcagctccaccgattttga

SEQ ID NO: 465529 - DNA, 255 bp, Shigella boydii; identical to SEQ ID NO: 464791

SEQ ID NO: 465530 - DNA, 252 bp, Shigella boydii; identical to SEQ ID NO: 464875

SEQ ID NO: 465531 - DNA, 210 bp, Shigella boydii; identical to SEQ ID NO: 9340

SEQ ID NO: 465532 - DNA, 168 bp, Shigella boydii; identical to SEQ ID NO: 33300

SEQ ID NO: 465533 - DNA, 462 bp, Shigella boydii
atggtgcagtacacccgtaacagtttttacatcccactaatgactcgcctgcgcccgatggggagcactgtcgatgttgaaacagccaaccgccacggtctgcgctggctgcacgatgtcgctaaccaacgaaagcatgaaacaatccaggcccgtccctgtgatcgctggctcgaagagcagcagtccatgctggcactgcctccggagaaaaaagagtatgacgtgcatcctggtgaaaatctggtgagcttcgacaacccccccagcatcatccactctccatctacgactcattctgcagaggagtggcgtgatgatggaactgcaacatcaacgactgatggcgctcgccgggcagttgcaactggaaagccttataagcgcagcgcctgcgctgtcacaacaggcagtagaccaggaatggagttatatggacttcctggagcatctgcttcatga

SEQ ID NO: 465534 - DNA, 327 bp, Shigella boydii; identical to SEQ ID NO: 464915

SEQ ID NO: 465535 - DNA, 381 bp, Shigella boydii; identical to SEQ ID NO: 464998

SEQ ID NO: 465536 - DNA, 468 bp, Shigella boydii; identical to SEQ ID NO: 461580

SEQ ID NO: 465537 - DNA, 303 bp, Shigella boydii; identical to SEQ ID NO: 461664

SEQ ID NO: 465538 - DNA, 327 bp, Shigella boydii; identical to SEQ ID NO: 464915

SEQ ID NO: 465539 - DNA, 420 bp, Shigella boydii; identical to SEQ ID NO: 464991

SEQ ID NO: 465540 - DNA, 477 bp, Shigella boydii
gtggatgacgcagtctccctgctgacacggggtggcagactgagctgtaagtttcgactgtcaggcgcactgaccaacaaccagttcggtctgggaatttatctgtataccgatgtagcgttacctgacgtcgtggcgatgaccgggactggtaacccgttcctgatgtcgttcttcacccagaccacagacggcaaactgaatctgatgcatcacaagaaagccggaaacacaaagttgggcgagttcgggaattacagtaacgactggcagacgctggagctggtgttcaccgccggcagtgccacggttactccgaaactgaatggagtggctggcccggcattccaggtcataaaagacagtctgacactggggctgaatgcgctgacgctgacggatattaccaaaaatgcagcgtatggcgttgagatagaaagtctggtgctggagataaatgcaccggcatcatcataa

SEQ ID NO: 465541 - DNA, 243 bp, Shigella boydii; identical to SEQ ID NO: 464992

SEQ ID NO: 465542 - DNA, 303 bp, Shigella boydii; identical to SEQ ID NO: 458125

SEQ ID NO: 465543 - DNA, 426 bp, Shigella boydii
atggaattacaggactggcgaaaagaacctcgtaaaaactattcgaatgaattcaaacttcgtatggtggaactggcatcacaacctggagcctctgttgcccgtattgcccgggaacacgatatcaatgataacctcctgttcaaatggctcaggctctggcagaacgaagggcgtgtttcgcggcgtcttccggtaacgacctcttctgacactggcgttgaattattacctgtagaaataacgccgggtgagcagaaagaacctgtggcggccattgcgccgtctttatccacttccactcagaccagagtcagtgccagttcctgcaaggtggagttccgtcacggtaacatgatgctggaaaatccatcgccagagctgctcacggtgttgatccgcgaactgagcgggaggggaagatga

SEQ ID NO: 465544 - DNA, 318 bp, Shigella boydii; identical to SEQ ID NO: 464967

SEQ ID NO: 465545 - DNA, 255 bp, Shigella boydii; identical to SEQ ID NO: 464791

SEQ ID NO: 465546 - DNA, 198 bp, Shigella boydii
ttgtttcctccggataaccggatccgcgatctgaacaactataacaaggcgctgtttgacgccctgacccacgcgggtgtgtgggaagacgacagtcaggtgaaaagaatgctggtggagtggggaccggttatcccggaagggaaggtcgagatcactatcagtaagtacgagaaaccggcgggtgcagcagcctga

SEQ ID NO: 465547 - DNA, 180 bp, Shigella boydii; identical to SEQ ID NO: 461173

SEQ ID NO: 465548 - DNA, 396 bp, Shigella boydii
gtgggcaaagctttcccccgggactcccgtgcaccggagcggtggccatcagggaccattaccgtcagggtttatgacgatcagccgtttgaccggcagattgttattccggcggtggcattcagtggcgctaaacatgagaaagagcatactgatatttactcctcatgccgtctgatagtgcggaaaaacggtgctgaaatttataaccgtaccgcgctggataatacgctgatttacagtggtgttattgatatgcctgccggtcacggtcacatgacactggagttttcggtgtcagcatggctggtaaataactggtatcccacagcaagtatcagcgatttgctggttgtggtgatgaagaaagccactacaggcatcacgattagctga

SEQ ID NO: 465549 - DNA, 309 bp, Shigella boydii; identical to SEQ ID NO: 463017

SEQ ID NO: 465550 - DNA, 210 bp, Shigella boydii
atgacggatggctggccgctgtatgaatcacgcctgaagggaaagctgcacgttatcagcaagcgatatacgcagcgaattgagcggcataacctgaatctgagacaacatctggcaaggctgggacggaagtcactgtcgttctcaaaatcggtggagctgcatgacaaggtcatcgggcattatctgaacataaaacactatcagtaa

SEQ ID NO: 465551 - DNA, 267 bp, Shigella boydii; identical to SEQ ID NO: 464794

SEQ ID NO: 465552 - DNA, 276 bp, Shigella boydii
gtggcttctgtttctatcagctgtccctcctgttcagctactgacggggtggtgcgtaacagcaaaagcactgccggacatcagcgctatctctgctctcactgccgtaaaacatggcaactgcagttcacttacaccgcttctcaacccggtacgcaccagaaaattattgatatggccatgaatggcgttggatgccgggcaactgcacgcattatgggcgttagcctcaacacgattttacgtcacttaaaaaactcaggccgcagtcggtaa

SEQ ID NO: 465553 - DNA, 231 bp, Shigella boydii; identical to SEQ ID NO: 465010

SEQ ID NO: 465554 - DNA, 207 bp, Shigella boydii; identical to SEQ ID NO: 14967

SEQ ID NO: 465555 - DNA, 195 bp, Shigella boydii; identical to SEQ ID NO: 464976

SEQ ID NO: 465556 - DNA, 189 bp, Shigella boydii; identical to SEQ ID NO: 463227

SEQ ID NO: 465557 - DNA, 258 bp, Shigella boydii; identical to SEQ ID NO: 461678

SEQ ID NO: 465558 - DNA, 279 bp, Shigella boydii; identical to SEQ ID NO: 464808

SEQ ID NO: 465559 - DNA, 2655 bp, Shigella boydii; identical to SEQ ID NO: 464807

SEQ ID NO: 465560 - DNA, 468 bp, Shigella boydii; identical to SEQ ID NO: 19402

SEQ ID NO: 465561 - DNA, 468 bp, Shigella boydii
ttgttctataagttgctcagcaagctgattttcgctgttcttcatcgtgccgaaggctgcagccgtcagcagatggctggtcagttccatctggcagaccattttgacctgcgggtagagcgccgggttcccggcatgtgtctggcgggggaaggctgcatcgttctctggtgtatccggtgtgcgccagaacacaccatcgatggccagcagggtcaggccgcaccagtgcggatgcggcgtggcgttatgccagagctgcgctgttttcgtgaacacgcggcggacagcctcacttcccaggcgctggcgggcctgaataacggcactggggacaacgaaggggcgattgcccggcagcatgatgtccaggcgattcacaatctggtgaagaggttctttacgctcaagcgccatgccaacaatacaccagaccatcatttcgaggggaagacggcgcttgcgtag

SEQ ID NO: 465562 - DNA, 414 bp, Shigella boydii; identical to SEQ ID NO: 458878

SEQ ID NO: 465563 - DNA, 333 bp, Shigella boydii
gtgcaggggcgcgagaaagatcagatcaaccgtggcggcgagaagatcgctgccgaagagatcgaaaacctgctgctgcgccatccggcggtgatctatgccgcactggtgagcatggaagatgagctgatgggcgaaaaaagctgtgcttatctggtggtaaaagagccgctgcgcgcggtgcaggtgcgtcgtttcctgcgtgaacagggtattgccgaatttaaattaccggatcgcgtggagtgtgtagattcacttccgctgacggcggtcgggaaagtcgataaaaaacaattaagtcagtggctggcgtcacgcgcatcagcctga

SEQ ID NO: 465564 - DNA, 354 bp, Shigella boydii
atgaaagcgctggaaatggcatgggaaacccgtggtaagcccggcggggtgatgttccacagcgatcagggcagtcattatacgagcaggcagttccggcagttattgtggcgataccagatcagacagagtatgagccggcgcggaaactgctgggataacagcccaatggaacgcttcttcaggagtctgaagaacgaatggatgccggtggtgggttacgtaagcttcagcgaggcagctcacgccataacggactatatcgttggatattacagcgcactaagaccgcacgaatataacggtgggttacccccaaacgaatcggaaccgttcgccagaaaacgggcgtaa

SEQ ID NO: 465565 - DNA, 270 bp, Shigella boydii; identical to SEQ ID NO: 463682

SEQ ID NO: 465566 - DNA, 1677 bp, Shigella boydii
gtgagcagcaaagtggaacaactgcgtgcgcagttaaatgaacgtattctggtgctggacggcggtatgggcaccatgatccagagttatcgactgaacgaagccgattttcgtggtgaacgctttgccgactggccatgcgatctcaaaggcaacaacgacctgctggtgctcagcaaaccggaagtgatcgccgctatccacaacgcctactttgaagcgggcgcggatatcatcgaaaccaacaccttcaactccacgaccattgcgatggcggattaccagatggaatccctgtcggcggaaatcaactttgcggcggcgaaactggcgcgcgcctgtgctgacgagtggaccgcgcgcacgccggagaaaccgcgctacgttgccggtgttctcggcccaaccaaccgcacggcgtctatttctccggacgtcaacgatccggcattccgcaacatcacttttgaccagctggtggcggcctatcgcgaatccaccaaagcgctggtggaaggtggtgcggatctgatcctgattgaaaccgttttcgacacccttaacgccaaagcggcggtttttgcggtgaaaacggagtttgaagcgctgggcgttgagctgccgattatgatctccggcaccatcaccgacgcctccgggcgcacgctctccgggcagaccaccgaagcattttacaactcattgcgccacgccgaagcgctaacctttggcctgaactgtgcgctggggcccgatgaactgcgccagtacgtgcaggaactatcacggattgcggaatgctacgtcaccgcccacccgaacgccgggctgcctaacgcctttggtgaatacgatctcgacgccgacacgatggcaaaacagatacgtgaatgggcgcaagcgggctttctcaatatcgtcggtggttgctgcgggaccacgccgcaacatattgcagcgatgagtcgtgcagtagaaggattagcgccgcgcaaactgccggaaattcccgtagcctgccgtttgtctggcctggagccgctgaacattggcgacgatagcctgtttgtgaacgtgggtgaacgcaccaacgtcaccggctctgctaagttcaagcgcctgatcaaagaagagaaatacagcgaggcgcaggatgtggcgcgtcagcaggtggaaaacggcgcgcagattatcgatatcaacatggatgaagggatgctcgatgccgaagcggcgatggtgcgttttctcaatctgattgccggtgaaccggatatcgctcgcgtgccgattatgatcgactcctcaaaatgggacgttatcgaaaaagggctgaagtgtattcagggcaaaggcattgttaactcaatctcgatgaaagagggcgtcgacgcctttatccatcacgcgaaattgttgcgtcgctacggtgcggcagtggtggtgatggcctttgacgaacagggacaggccgatactcgcgcacggaaaatcgagatttgccgtcgggcgtacaaaatcctcaccgaagaggttggcttcccgccagaagatatcatcttcgacccgaacatcttcgcggtcgccaccggtattgaagagcacaacaactacgcgcaggactttatcggcgcgcgtcatgaaacaggcggtggcgtatctcgaaccgtttattga

SEQ ID NO: 465567 - DNA, 375 bp, Shigella boydii; identical to SEQ ID NO: 13405

SEQ ID NO: 465568 - DNA, 471 bp, Shigella boydii
atgtctggaaatataggggcaaatccaggtgtctcatgtgccattgaaactgccggagacgcaccagccagcaagctgttaccgctggcgaaattgtgcgatgaagtgttgttcgatttaaaaattatggacgcgactcaggcgcgggatgtggtgaagatgaacctgccacgcgtactggagaacctgcgtttgctggtgagtgagggtgtcaacgtgatcccgcgtttgccgctgatctccggtttcacactcagccgggagaatatgcagcaggcgctggacgtgctgatcccgctgaatatcaggcagatccatctgttgccgtttcatcagtacggcgagccgaaataccgcctgctggggaaaacatggtcgatgaaggatgttgctgcgccgtcatcagccgatgtggcaacgatgcgcgaaatggcagaacgggccggatttcaggttaccgtgggaggttaa

SEQ ID NO: 465569 - DNA, 210 bp, Shigella boydii; identical to SEQ ID NO: 465456

SEQ ID NO: 465570 - DNA, 1389 bp, Shigella boydii
ttggcgaaagatgcgcagaaattcgcagccaaagtctttcatgccgataaaacctattttgtgctgaacggcacatcggcagcgaataaagtggtgacgaatgcgctgttaacgcgtggcgatctggtgctcttcgaccgtaacaaccataagtcgaatcatcacggcgcgctgattcaggcgggggcgacgccggtctatctggaagcttcacgcaacccgtttggtttcattggcggtattgatgcgcactgttttaatgaagagtatctgcgccagcaaattcgcgacgttgcgccagaaaaagccgagctgccgcgcccgtttcgcctggcgattattcagctgggaacctatgacggaactgtctataacgcccgtcaggtgatcgataccgttgggcatctgtgtgattacattctgtttgattccgcgtgggtcggttacgaacagtttatcccaatgatggcggatagctcgccgctgctattagaacttaacgaaaacgatccggggatctttgtgactcagtcggtgcacaaacagcaggcgggattctcacagacgtcgcagatccataaaaaagataaccatatccgcggacaggcgcgtttttgcccgcataagcggttgaataacgcctttatgctccatgcttctaccagccctttctatccgctgtttgctgcactggatgttaacgccaaaattcatgaaggggagagtgggcgtcggctgtgggctgagtgcgttgagttgggtattgagtcgcgcaaggctattcttgcgcgctgtaagctgttccgcccgtttatcccgcccgttgttgatggcaaattgtggcaggattatccgacatcagtgttagccagcgaccgccgttttttcagttttgagccgggggcgaagtggcacggctttgaaggatatgccgcggatcagtattttgttgatccgtgcaagctgttactcactacaccaggtatcaatgccgaaaccggcgaatatagcgactttggcgttccggcgacgattctggcgcactatctgcgtgagaacggcattgtgccggagaagtgcgatctcaactccattctgttcttattaactccggcggaaagccacgagaagctggcacaactggtagagatgttggcgcagtttgaacagcatattgaggatgactcgccgctggctgaggtgttgccgagcgtttataacaaatatccggtgcgctatcgcgactacactttgcgccagttgtgtcaggagatgcacgatctgtatgtcagtttcgacgtcaaagacctacaaaaagcgatgttccgccagcagagtttcccgtcagtggtgatgaacccccaggatgcgcatagcgctgataggtaa

SEQ ID NO: 465571 - DNA, 129 bp, Shigella boydii
atggcggaaaaccgtgttgaggccaacgcccataatgcgtgcactggcgcgacatccgacgccattcatggccatatcaatgattttctggtgcttaccgggctgagaggcggtgtaagtgaactgtag

SEQ ID NO: 465572 - DNA, 276 bp, Shigella boydii; identical to SEQ ID NO: 464627

SEQ ID NO: 465573 - DNA, 525 bp, Shigella boydii
atgaaacgtgtttctcaaatgaccgcgctggcaatggctttagggctggcttgcgcttcttcgtgggccgctgaactggcgaagcctcttacacttgaccagcttcaacaacaaaatggcaaagcgatagatactcgccccagcgcgttttataacggctggccacaaaccttaaatggcccttctggtcatgaacctgccgccttaaacctctctgccagctggctcgacaaaatgagcaccgaacagctcaacgcgtggatcaagcaacataacctgaaagccgatgccccggtggcgctgtacggtaatgacaaagatgtcgacgccgtcaaaacgcgactgcaaaaagcaggttttacgcatatctccattctgagtgacgcgctaagcgaaccttcccgtctacaaaaactgccgcactttgagcagctggtttatccgcaatggctgcacgacctgcaacaaggtaaagaggttacggcgaaacctgccggtgactggaaagtcattgaagcggcctag

SEQ ID NO: 465574 - DNA, 345 bp, Shigella boydii; identical to SEQ ID NO: 464216

SEQ ID NO: 465575 - DNA, 303 bp, Shigella boydii
atgagcagaaaaaaccaacgttactctaaagagttcaaagccgaagctgtcagaacggttcttgaaaatcaactttcgatcagtgaaggcgcttcccgattatcccttcctgaaggcactttaggacaatgggttaccgccgccagaaaagggctcggtactcttggttcccgcacggtggctgaactggaatctgaaattctgcaactgcgtaaggcgttaaatgaagctcgccttgagcgagatatattaaaaaaagcaacagcgtattttgcacaggagtcgctgaaaaatacgcgttaa

SEQ ID NO: 465576 - DNA, 240 bp, Shigella boydii; identical to SEQ ID NO: 464629

SEQ ID NO: 465577 - DNA, 291 bp, Shigella boydii; identical to SEQ ID NO: 465453

SEQ ID NO: 465578 - DNA, 225 bp, Shigella boydii; identical to SEQ ID NO: 133446

SEQ ID NO: 465579 - DNA, 519 bp, Shigella boydii; identical to SEQ ID NO: 464880

SEQ ID NO: 465580 - DNA, 210 bp, Shigella boydii; identical to SEQ ID NO: 465385

SEQ ID NO: 465581 - DNA, 819 bp, Shigella boydii
atgtgtcaggtatttggtgtatccaggagcggttattacaactgggtacagcatgaaccctcagacagaaaacaaagtgatgagcggctaaaactggagattaaggtggcacatatccgcactcgcgaaacatatggaacccggcggctccagacggagctggcagagaatggcatcatcgttggtcgtgaccgactggcacgtcttcgtaaggagctaaggctacgctgtaagcagaaacgcaagttcagagcgactacgaacccgaaccacaatctgccagttgcgccaaatctgctgaaccagacgttcgctcctacagcaccaaatcaggtctgggtggcggacctgacgtatgttgccacacaggagggatggttgtccctcgctggcatcaaagatgtttatacgtgcgaaattgtcggctacgccatgggagagcgcatgacaaaagagctgacaggtaaagccctgtttatggcgctcaggagccagcgcccacctgccgggctaatccaccactctgatcgaggttcacagtactgcgcatacgattaccgggtcatacaggagcagtctggtctgaaaacatcaatgtcgcgtaaaggtcactgttacgacaacgctccgatggaaagcttctggggaacgctgaaaaatgagagcctgagccactatcgttttaataaccgggatgaagccatctcagtaatacgggaatacattgagattttctacaatcgtcagcgtcgtcactctcgtctggggaatatctccccggcagccttcagggaaaaatatcatcagatggctgcttaa

SEQ ID NO: 465582 - DNA, 276 bp, Shigella boydii; identical to SEQ ID NO: 458859

SEQ ID NO: 465583 - DNA, 471 bp, Shigella boydii
ttgggcggctggacgttgctggcgggtcaaacggcgaaagccgctgccgatgacggactgttcccaccgatttttgcccgtgtaaataaagcgggtacgccagtggcggggctgattatcgtcggtattttgatgaccatcttccagctcagcagcatttcaccaaacgcgaccaaagagttcggtctggtttcttccgtctcggtcatctttacactggtgccatatctttacacctgtgcggcgttactgctgctcggacacggtcactttggtaaagcacgcccggcatatctggcagttactaccattgccttcctctactgcatctgggccgtggtggggtccggagcgaaagaggttatgtggtcatttgtcaccctgatggtcatcaccgccatgtatgcgctgaattacaaccggctacataaaaacccgtatcccttagatgcaccaataagcaaagattaa

SEQ ID NO: 465584 - DNA, 168 bp, Shigella boydii; identical to SEQ ID NO: 464689

SEQ ID NO: 465585 - DNA, 381 bp, Shigella boydii
atgagctacagacaacgtaaaataacggtggagttcactctttcagacggacgaacgtttggtaatggccagggcaatatgctgaccattaccgacgcaagctgttttgccagtattgccgtatatggaggggtggctggtacacaaatcacgctgtatatctggggaatgtcaccggcgcatatgacgaatttaagctggcgcggtgtgtggcgacaggagcagagtaccgcaaataaaatgcggctgtgggccgacgggcggcttatttttgaaggtgatattactgatgcatacgccgactacaaccaggcgccggatattccgctcattcgtgtcgttacggggaagtcatcttcacagggatcttcggtcagttag

SEQ ID NO: 465586 - DNA, 294 bp, Shigella boydii
gtggcgcacgtcttcggtgaacgcactctggccacactggagcgtcttctgagcctgctgtcggcctttgaggtcgtgatatggatgacggatggctggccgctgtatgaatcacgcctgaagggaaagctgcacgttatcagcaagcgttacactcagcgcattgagcgacataatctgaatctgagacaacatctggcaaggctgggacggaagtcactgtcgttctcaaaatcggtggagctgcatgacaaggtcatcgggcattatctgaacataaaacactatcagtaa

SEQ ID NO: 465587 - DNA, 459 bp, Shigella boydii; identical to SEQ ID NO: 464527

SEQ ID NO: 465588 - DNA, 2634 bp, Shigella boydii
atgattgatgaattacctcgtcagggggatattcttaatattattaccttgcaaacaggtttaaatttttctccgatcaccgtttcacacaatatccatgccggaacacagcttaaccccggtggatgggatataatacctggcgctatttatagtgaagatcgagaaaataatgtttcatttgcagaagcttccataacaacgccatacgtttttgtcatgcaaaaagcacctgacagtgaacaaacattaaaaaaaggaatgaaagttgccattccatattattatgagctgcattcgcaattaaaagagatgtatccggaggttgagtggataaaagtcgataacgccagcgctgcatttcacaaggtcaaggaaggtgaacttgatgctctggtcgcgacacagctaaattcgcgttacatgatcgatcattactatcctaatgaactgtatcattttcttattcccggcgttccgaatgcatcgctttcgttcgcttttcctcgcggagaaccggaacttaaggatattattaataaagcactgaatgcaattcccccaagcgaagttctgcgcctgacggaaaaatggattaaaatgcccaatgtgaccattgacacatgggacctctatagcgagcaattttatattgttacgacattatccgttttattagttggcagtagccttttatggggattctacctgttacgctcagttcgtcgtcgtaaagtcattcagggtgatttagaaaaccaaatatcattccgaaaagcactctcggattccttaccaaatccaacttatgttgtaaactggcaaggtaatgtcattagtcataatagtgcttttgaacattatttcactgcggattactacaaaaatgcaatgttaccattagaaaacagtgactcaccctttaaagatgttttttctaatgcgcatgaagtcacagcagaaacgaaagaaaatcgaacaatatacacacaggtatttgaaattgataatggcatcgagaaaagatgcattaatcactggcatacattatgcaatctgccagccagcgatcatgctgtttatatttgtggttggcaagatattaccgagacgcgtgatttaattcatgcactcgaagtagagagaaataaagcgatcaatgcaactgtcgcaaaaagtcagtttctggcaacaatgagtcacgaaataagaacaccaataagctccattatgggcttcctggaacttctgtcgggttctggtcttagcaaggagcaacgggtggaggcgatttcacttgcctacgccaccggacaatcactcctcggcttaattggtgaaatccttgatgtcgacaaaattgaatcgggtaactatcaacttcaaccacaatgggtcgatatccctactttagtccagaacacttgtcactctttcggtgcgattgctgcaagcaaatcgatcgcattaagttgcagcagtacatttcctgatcattacctggttaagatcgaccctcaggcgtttaagcaggtcttatcaaatttactgagcaatgctctcaaatttaccaccgagggggcagtaaaaattacgacctccctggttcacattgatgacaaccacgctgttatcaaaatgacgattatggattctggaagtggattatcgcaggaagaacaacaacaactctttaaacgctacagccaaacaagtgcaggtcgccagcaaacaggatctggcttaggcttaatgatctgcaaagaattaattaaaaatatgcagggcgatttgtcattagaaagtcatccaggcataggaacaacatttacgatcacaatcccggtagaaattagccagcaagtggcgactgtcgaggcaaaagcagaacaccccatcacactacctgaaaagttgagcatattaatcgcggatgatcatccgaccaacaggctattactcaaacgccagctaaatctattaggatatgatgttgatgaagccactgatggtgtgcaagcgctacacaaaatcagtatgcaacattatgatctgcttattactgacgttaatatgccgaatatggatggttttgagttgactcgcaaactccgtgagcaaaattcttccttacccatctgggggcttacagccaacgcacaggctaacgaacgtgaaaaagggttaagttgcggcatgaacttatgtttgttcaaaccgttgaccctggatgtactgaaaacacatttaagtcagttacaccaggttgcgcatattgcacctcagtatcgccaccttgatatcgaagccctgaaaaataatacggcgaacgatctacaactgatgcaggagattctcatcactttccagcatgaaacgcataaagatctacccgctgcgtttcaagcactagaagctggcgataacagaacttttcatcagtgtattcatcgcatccacggtgcggctaacatcctgaatttgcaaaagttgattaatattagccatcagttagaaataacacctgtttcagatgacagtaagcctgaaattcttcagttgctgaactctgtaaaagaacacattgcagagctggaccaggagattgctgttttctgtcagaaaaatgactaa

SEQ ID NO: 465589 - DNA, 138 bp, Shigella boydii
atgttgattgaagccgggggaataatgatgccgggtaatccgataaaaatcagcggctgcgcggacccgcatgttatgccgggagcggcaacgctcgaccagcatggggaacaaattcgccaggagttctcatcataa

SEQ ID NO: 465590 - DNA, 1536 bp, Shigella boydii
atgccacaacgacaccaccagggacataaacgcacaccgaaacagttggcgctcatcatcaaacgctgtttgccgatggtgctcactggcagcggcatgctttgcactaccgctaacgccgaagagtattatttcgaccccattatgctggaaactacaaaaagtggtatgcaaacaactgatctgtcacgtttttcaaaaaaatacgcacaactaccaggaacttatcaggttgatatctggctgaataaaaagaaggtttcacagaaaaaaattacatttaccgccaatgcagagcaacttctgcagccacagtttacggtagaacaactacgtgagctgggtattaaggtggatgaaatcccggcgctggctgaaaaagatgacgatagcgtgatcaactcgcttgaacaaatcatacccggtacagctgctgaatttgatttcaatcatcagcgacttaatttgagcattccccaaattgcactgtaccgtgatgcaagaggttacgtctccccttctcgttgggacgatggtataccaacgctgtttaccaactactcgtttacaggttctgataaccgttaccgccagggcaatcgtagccaacgacagtacctgaatatgcaaaatggtgctaattttggcccctggcgattacgtaactattctacgtggacacgcaacgatcaggcgtcaagctggaacactatcagtagttatttacaacgtgatatcaaggcgttgaagtctcagttgcttctgggagaaagcgccaccagcggcagtattttttccagctacacctttactggcgtgcaactcgcttccgacgataatatgttgccaaacagccagcgcggatttgccccaacggtacgcggtatcgcaaacagtagtgcaatcgtgactatcaggcaaaatggttatgtgatctatcaaagcaacgtgccagcgggtgcctttgaaattaacgatctctacccctcttccaacagcggcgatttagaagtcacgattgaagaaagtgacggtacacaacgtcgctttatccagccttattcttcattacccatgatgcagcgacctgggcatctaaaatatagcgcgaccgctggacgctatcgcgctgatgcaaacagtgatagcaaggaacccgaatttgctgaagccacggcaatatatggtttgaataatacttttacgctgtatggcggcctgctcggttctgaagattattatgcgctggggatcggtatcggcggcacacttggcgcactgggcgcgttgtcgatggatatcaacaggctgacacccaattcgataaccagcactcttttcatggctatcaatggcgtacgcagtacatcaaagatatcccggaaaccaacaccaatatcgctgttagctactatcgctataccaacgatggctattttagttttgatgaagccaatacccgcaattgggactataacagtcgccaaaaaagtgaaattcaattcaacatcagccagacaatatttgatggggtaa

SEQ ID NO: 465591 - DNA, 375 bp, Shigella boydii; identical to SEQ ID NO: 13405

SEQ ID NO: 465592 - DNA, 453 bp, Shigella boydii; identical to SEQ ID NO: 464256

SEQ ID NO: 465593 - DNA, 480 bp, Shigella boydii
gtggcggacctgacgtatgttgccacacaggagggatggttgtacctcgctggcatcaaagatgtttatacgtgcgaaattgtcggctacgccatgggagagcgcatgacaaaagagctgacaggtaaagccctgtttatggcgctcaggagccagcgcccacctgccgggctaatccaccactctgatcgaggttcacagtactgcgcatacgattaccgggtcatacaggagctgtctggtctgaaaacatcaatgtcgcgtaaaggtcactgttacgacaacgctccgatggaaagcttctggggaacgctgaaaaatgagagcctgagccactatcgttttaataaccgggatgaagccatctcagtaatacgggaatacattgagattttctacaatcgtcagcgtcgtcactctcgtctggggaatatctccccggcagccttcagggaaaaatatcatcagatggctgcttaa

SEQ ID NO: 465594 - DNA, 456 bp, Shigella boydii; identical to SEQ ID NO: 464908

SEQ ID NO: 465595 - DNA, 546 bp, Shigella boydii; identical to SEQ ID NO: 463588

SEQ ID NO: 465596 - DNA, 375 bp, Shigella boydii; identical to SEQ ID NO: 13405

SEQ ID NO: 465597 - DNA, 936 bp, Shigella boydii; identical to SEQ ID NO: 464347

SEQ ID NO: 465598 - DNA, 156 bp, Shigella boydii; identical to SEQ ID NO: 464919

SEQ ID NO: 465599 - DNA, 354 bp, Shigella boydii; identical to SEQ ID NO: 464933

SEQ ID NO: 465600 - DNA, 192 bp, Shigella boydii; identical to SEQ ID NO: 464451

SEQ ID NO: 465601 - DNA, 303 bp, Shigella boydii; identical to SEQ ID NO: 464760

SEQ ID NO: 465602 - DNA, 327 bp, Shigella boydii; identical to SEQ ID NO: 462700

SEQ ID NO: 465603 - DNA, 468 bp, Shigella boydii; identical to SEQ ID NO: 465390

SEQ ID NO: 465604 - DNA, 819 bp, Shigella boydii
atgtgtcaggtatttggtgtatccaggagcggttattacaactgggtacagcatgaaccctcagacagaaaacaaagtgatgagcggctaaaactggagattaaggtggcacatatccgcactcgcgaaacatatggaacccggcggctccagacggagctggcagagaatggcatcatcgttggtcgtgaccgactggcacgtcttcgtaaggagctaaggctacgctgtaagcagaaacgcaagttcagagcgactacgaacccgaaccacaatctgccagttgcgccaaatctgctgaaccagacgttcgctcctacagcaccaaatcaggtctgggtggcgaacctgacgtatgttgccacacaggagggatggttgtacctcgctggcatcaaagatgtttatacgtgcgaaattgtcggctacgccatgggagagcgcatgacaaaagagctgacaggtaaagccctgtttatggcgctcaggagccagcgcccacctgccgggctaatccaccactctgatcgaggttcacagtactgcgcatacgattaccgggtcatacaggagcagtctggtctgaaaacatcaatgtcgcgtaaaggtcactgttacgacaacgctccgatggaaagcttctggggaacgctgaaaaatgagagcctgagccactatcgttttaataaccgggatgaagccatctcagtaatacgggaatacattgagattttctacaatcgtcagcgtcgtcactctcgtctggggaatatctccccggcagccttcagggaaaaatatcatcagatggctgcttaa

SEQ ID NO: 465605 - DNA, 645 bp, Shigella boydii
atggttttaataaaaaagaatgtcttatcggcttcaattgcaacagtcattttaggctcaacaggagcctttgcggcaaacgatcgcggctttacctccgacactgactggtcagaagaacaagcgggctttaatggacatgttggtactacatttgaatatgagaccaaaagcactgataactatttaggtaaaacagtaaaggaatatactaaaacacacgagattttccaggcctatttcagccaacctaattggcaatttgcagcaatctatggccttaagtctatcgatcgccgacaagaagaaaaaggctatcacgaaaatgaaacaagtctgcaaaactatatatcactaaacaaaacgttcactattggtaacggtttcgacttcagtctggtatacgacctgatgtataccgacggtaatatagatagcccttatgtcacaggcttgcatactgtaactgttgacaacagttttcgccctacgttgacgtactttaactctgactggaacgcaggtttttattcaaacgttgaatacttgtacagtcgaaatgataagagctcctggggcgtacgcgaagaagaaggtcaaagtatactatttcagccctataaacgttttggtgcatgggggtga

SEQ ID NO: 465606 - DNA, 276 bp, Shigella boydii; identical to SEQ ID NO: 464846

SEQ ID NO: 465607 - DNA, 276 bp, Shigella boydii; identical to SEQ ID NO: 464937

SEQ ID NO: 465608 - DNA, 294 bp, Shigella boydii; identical to SEQ ID NO: 460208

SEQ ID NO: 465609 - DNA, 468 bp, Shigella boydii
ttgttctataagttgctcagcaagctcattttcgctgttcttcatcgtgccgaaggctgcagccgtcagcagatggctggtcagttccatctggcagaccattttgacctgcgggtagagcgccgggttcccggcatgtgtctggcgggggaaggctgcatcgttctctggtgtatccggtgtgcgccagaacacaccatcgatggccagcagggtcaggccgcaccagtgcggatgcggcgtggcgttatgccagagctgcgctgttttcgtgaacatgcggcggacagcctcacttcccaggcgctggcgggcctgaataacggcactgggggcaacgaaggggcgattgcccggcagcatgatgtccaggcgattcacaatctggtgaagaggttctttacgctcaagcgccatgccaacaatacaccagaccatcatttcgaggggaagacggcgcttgcgtag

SEQ ID NO: 465610 - DNA, 150 bp, Shigella boydii; identical to SEQ ID NO: 464936

SEQ ID NO: 465611 - DNA, 168 bp, Shigella boydii
atgacgatctggaccaaagaacgtgacagcctgtttcacaaattgtgtgccgctattgcccatcgcagatacccagcccgcgtagcgtttcacaccttccagcatggtttcggggtttaccccctcgttcaaacgggctttccaggctttgaaggctgcagattttga

SEQ ID NO: 465612 - DNA, 351 bp, Shigella boydii; identical to SEQ ID NO: 464002

SEQ ID NO: 465613 - DNA, 327 bp, Shigella boydii; identical to SEQ ID NO: 464459

SEQ ID NO: 465614 - DNA, 480 bp, Shigella boydii; identical to SEQ ID NO: 463183

SEQ ID NO: 465615 - DNA, 696 bp, Shigella boydii
atggtagtgtccgctattgccagtacacctcatggtgatgatacccgcacatttggtccctatgtggatggacagtcactctattacagttttattaatcatggcaaagagagtgtggttcttgatttaaagaatgattacgataaaagtatatttataaatatgctcaaacaagctgatgtattagctgagaattttcgcccaggtacaatggaaaaactggggttttcatgggaaacgcttcaagaaatcaacccgcgcctcatatatgcttcatcgtcaggtttcggacataccggtccgctaaaagatgctcctgcctacgataccatcattcaggcaatgagcgggataatgatggaaacaggatatcctgatgctccgccagtgcgcgttggtacatctcttgcggatctatgcggcggtgtctatttattcagcggaatagtgagtgcactttatggccgcgaaaagagccagagaggggcgcatgtcgatatagcgatgtttgatgccacgctgagttttctggagcatggtctgatggcatatatcgcgacagggaagtcaccacaacgtctgggaaatcgccatccctacatggcaccttttgatgttttcaatactcaggataagccgattacgatttgttgtggtaatgacaagcttttttcggtaatgctgccaacttactga

SEQ ID NO: 465616 - DNA, 843 bp, Shigella boydii; identical to SEQ ID NO: 464396

SEQ ID NO: 465617 - DNA, 216 bp, Shigella boydii; identical to SEQ ID NO: 464382

SEQ ID NO: 465618 - DNA, 249 bp, Shigella boydii
atgaagatacgccagcagcgatgcgcgatatggggcagcaatgaccttgccaataatctgtttaatgacattcgcatgttcccaaaaccaaaggggatgcgctgggctacgtttgacaggaagcgggcagagttatcagttatggagatggcttactggcaggcattcagcccggtagtggacagaatcacgggcgttattgagcgtaaagcaggaaaagcagccagaggcattggcctgactctataa

SEQ ID NO: 465619 - DNA, 780 bp, Shigella boydii; identical to SEQ ID NO: 464942

SEQ ID NO: 465620 - DNA, 582 bp, Shigella boydii; identical to SEQ ID NO: 464941

SEQ ID NO: 465621 - DNA, 327 bp, Shigella boydii
atgactaaaaatactcgtttttcccctgaagtccgtcaacgggcagtccgtatggttctggaaagtcagggcgaatatgactcacaatgggcgacaatttgttccattgctccaaagattggctgtacgccggagactctgcgtgtctgggttcgccagcatgagcgggataccgggggcggtgatggagggctcaccaccgctgaacgtcagcgtctgaaagagctggaacgtgaaaatcgtgaactgcgccgcagtaacgatatccttcgccaggcttccgcttattttgcgaaggtggagttcgaccgcctctggaaaaaatga

SEQ ID NO: 465622 - DNA, 726 bp, Shigella boydii; identical to SEQ ID NO: 464752

SEQ ID NO: 465623 - DNA, 417 bp, Shigella boydii; identical to SEQ ID NO: 464964

SEQ ID NO: 465624 - DNA, 399 bp, Shigella boydii; identical to SEQ ID NO: 464751

SEQ ID NO: 465625 - DNA, 687 bp, Shigella boydii; identical to SEQ ID NO: 464953

SEQ ID NO: 465626 - DNA, 375 bp, Shigella boydii; identical to SEQ ID NO: 13405

SEQ ID NO: 465627 - DNA, 657 bp, Shigella boydii
atgtttattaccttgtatggtgccaacgaattcggtaaaaccggtaacgatcctaaagctctaggcattgcttcatctgaagcgaagaaagggctagagacgatgaaacgcttaaagaaagcgaatccctctaatcctcttgatatgggtaatccacaagttctaagaggtctgtttaatgaaggtaaagttgctgctgtaatcgacggaccttggtccatacaaggttacattgacagcggaatcaattttggcgtgacacgcatcccaacattagatggtcatcagcctcgcacattttcaacagtacggctggccgttgtaagctcatttaccgcatatcctcatgccgctgaattattcgctgactacctgacaacggataagatgttgatgaagcgttatgaaatgacgaatctcatcccaccaatcgattcacttatgaacaaaattagccagacaggtagtgaagctataaaagcaattattgctcaagctaattattctgacgcaatgccatcaataccggaaatgtcttatctatggtctccaatgactaatgctattttggctacctgggttgagaataaaacaccggatgaagttttaaatcatgcacaaacaattattgaagaacaactttcgcttcaggagtaa

SEQ ID NO: 465628 - DNA, 234 bp, Shigella boydii; identical to SEQ ID NO: 464402

SEQ ID NO: 465629 - DNA, 480 bp, Shigella boydii; identical to SEQ ID NO: 464912

SEQ ID NO: 465630 - DNA, 480 bp, Shigella boydii
gtgagagcactactgacccctgaaattgccccgcgtatggggatcgtattgttcagaccaggttcagagctgatgcccctgtttatgcaggggcgtgtcctgctggagcctgagccggagcgttattcatctttcgccagtggtgccgttccggcggcatcacaaccgctggcggatgatcctgacgttcgggccgtgttccgcaatgaggaagtgatccgtcgtgctggtggcgtggaatgtcttgaaagctggttacttcgtgaaaaaggctgccagtggcctcattccgactggcacagcgagaacatgaccacaatgcgacacgctccggggcaatccgtctgtgctggcactgcgataatcagctgcgcgatcagttcacggaacggctggaatcaatggcaacggataactgtgcccgctgggtgttgtctgttgtgcgtcgggatctcggttttgatgacagtcacgttgtga

SEQ ID NO: 465631 - DNA, 267 bp, Shigella boydii; identical to SEQ ID NO: 464848

SEQ ID NO: 465632 - DNA, 150 bp, Shigella boydii
atggcattaatcatcggcagtgccggcgcaagcctgacggaagtgatattacttaaatcaatgttcagaatgccgatgatagctgcattcctgacggttatattaggtatggctatcttgatgggctatttgactcaattgctattttaa

SEQ ID NO: 465633 - DNA, 195 bp, Shigella boydii; identical to SEQ ID NO: 464976

SEQ ID NO: 465634 - DNA, 327 bp, Shigella boydii; identical to SEQ ID NO: 464915

SEQ ID NO: 465635 - DNA, 468 bp, Shigella boydii; identical to SEQ ID NO: 465415

SEQ ID NO: 465636 - DNA, 462 bp, Shigella boydii; identical to SEQ ID NO: 465533

SEQ ID NO: 465637 - DNA, 267 bp, Shigella boydii; identical to SEQ ID NO: 464848

SEQ ID NO: 465638 - DNA, 288 bp, Shigella boydii; identical to SEQ ID NO: 464959

SEQ ID NO: 465639 - DNA, 690 bp, Shigella boydii
gtgcgtaaagtctggcgtcagttgttacgggaaggtatcagagtggccagatgcactgtggcacgtctcatggcggttatgggacttgccggtgttctccggggtaaaaaggtccgtacgaccatcagccggaaagccgttgccgcaggcgaccgcgtaaaccgtcagttcgtggcagaacgacctgaccagctgtgggtggctgattttacttacgtcagcacatggcagggcttcgtctatgtggcgttcatcattgatgtgtttgccggatacatcgtggggtggcgggtctcatcgtccatggaaacgacattcgtgctggatgctctggagcaggcgttatgggcccgtcgaccgtccggcacggtccatcacagtgataaaggttctcagtatgtatcgctggcctacacacagcggcttaaggaagccggattactggcatcaacaggaagtacaggcgactcgtatgacaacgcgatggcggagagcatcaatggtctttacaaagcggaggtaatacaccgtaagagctggaaaaaccgtgcagaagtggaactggccacactcacgtgggtggactggtataataatcgacgattgctggaaaggctgggccatactcctccggcagaagcagaaaaagcttattatgcttccatcggaaacgatgatctggcagcctga

SEQ ID NO: 465640 - DNA, 306 bp, Shigella boydii
gtgtttaattctgacaacctgagactcgacggaaaatgcgccatcatcacaggtgcgggtgcaggtattggtaaagaaatcgccattacattcgcgacagctggcgcatctgtggtggtcagtgatattaacgccgacgcagctaaccatgttgtagacgaaattcaacaactgggggggcaggcatttgcctgccgttgtgatattacttccgaacaggaactcggtaatgactccaacttattgatagtgttttatgttcagataatgcccgatgactttgtcatgcagctccaccgattttga

SEQ ID NO: 465641 - DNA, 327 bp, Shigella boydii; identical to SEQ ID NO: 464915

SEQ ID NO: 465642 - DNA, 429 bp, Shigella boydii
atgatggtctggtgtattgttggcatggcgcttgagcgtaaagaacctcttcaccagattgtgaatcgcctggacatcatgctgccgggcaatcgccccttcgttgcccccagtgccgttattcaggcccgccagcgcctgggaagtgaggctgtccgccgcgtgttcacgaaaacagcgcagctctggcataacgccacgccgcatccgcactggtgcggcctgaccctgctggccatcgatggtgtgttctggcgcacaccggatacaccagagaacgatgcagccttcccccgccagacacatgccgggaacccggcgctctacccgcaggtcaaaatggtctgccagatggaactgaccagccatctgctgacggctgcagccttcggcacgatgaagaacagcgaaaatgagcttgctgggtaa

SEQ ID NO: 465643 - DNA, 489 bp, Shigella boydii
atgagtcttttgaatgaagttcagaaattcattgaagcccatccggggtgtacttccggagacattgcggatgcttttacaggttactcacggcagtgcgttctgcagtcagcaagcaaattacgtcagagtggtcgtgtggctcaccgttgtgaaggggatacacgcagacatttcccgcgcctgactgagagagcgcaggaggcggaaccgcaaccagttcgtgaaaccagacctgtgcgcaatttctatgtcggcactaacgacccgcgggagattttgtgcctgacccgccaggcggaagaactggagtccaggggcttataccgtcgtgctgcaacggtgtggatggcggcattccgtgaaagccactcccagccagaacgaaacaattttctggcgcgtcgtgagcagtgtttacggaaaagcagtaagcgcgctgtatcgggtgatgagtggtatctgtcagggaattacgtgggggcttaa

SEQ ID NO: 465644 - DNA, 273 bp, Shigella boydii; identical to SEQ ID NO: 7046

SEQ ID NO: 465645 - DNA, 276 bp, Shigella boydii; identical to SEQ ID NO: 464846

SEQ ID NO: 465646 - DNA, 303 bp, Shigella boydii; identical to SEQ ID NO: 461664

SEQ ID NO: 465647 - DNA, 420 bp, Shigella boydii; identical to SEQ ID NO: 464991

SEQ ID NO: 465648 - DNA, 303 bp, Shigella boydii; identical to SEQ ID NO: 461506

SEQ ID NO: 465649 - DNA, 225 bp, Shigella boydii; identical to SEQ ID NO: 133446

SEQ ID NO: 465650 - DNA, 390 bp, Shigella boydii; identical to SEQ ID NO: 465003

SEQ ID NO: 465651 - DNA, 267 bp, Shigella boydii; identical to SEQ ID NO: 464665

SEQ ID NO: 465652 - DNA, 810 bp, Shigella boydii; identical to SEQ ID NO: 464809

SEQ ID NO: 465653 - DNA, 456 bp, Shigella boydii
ttgtgtggtccggaacttcaccagttgcatgcgggtacggtgcagaaccagtaccgactgctgttcttctgtttttacggcgatttctttacccggctgctgaaccaccatccagatagcccgggcatccatcacatcattcttattgcccatgacgaatgccttaacgaagcgggcctgcaacaaccggactttatgaccaagttttgtcagttcccgtgcccagtgctgagaacctccacaggcctccataccaatcaggcatggctcacggttgccgaagaacgtcagaaaatcctgtctacgcaactgtttatcaaccacttcacctgtgtgctcattgatgaagtgaatctgaatgacatgttttgcgatatcaacgccaaccggtgtatatttcatttgtggagtctccagtctgagggagctttatgcatcccgtattgggcactatga

SEQ ID NO: 465654 - DNA, 1221 bp, Shigella boydii; identical to SEQ ID NO: 465384

SEQ ID NO: 465655 - DNA, 663 bp, Shigella boydii; identical to SEQ ID NO: 461715

SEQ ID NO: 465656 - DNA, 534 bp, Shigella boydii; identical to SEQ ID NO: 464815

SEQ ID NO: 465657 - DNA, 219 bp, Shigella boydii; identical to SEQ ID NO: 464825

SEQ ID NO: 465658 - DNA, 456 bp, Shigella boydii; identical to SEQ ID NO: 463414

SEQ ID NO: 465659 - DNA, 174 bp, Shigella boydii; identical to SEQ ID NO: 464844

SEQ ID NO: 465660 - DNA, 327 bp, Shigella boydii; identical to SEQ ID NO: 465401

SEQ ID NO: 465661 - DNA, 468 bp, Shigella boydii; identical to SEQ ID NO: 19402

SEQ ID NO: 465662 - DNA, 957 bp, Shigella boydii; identical to SEQ ID NO: 464180

SEQ ID NO: 465663 - DNA, 681 bp, Shigella boydii
gtgcgcagtctggaagcactagtacgttggcagtcacctgaacgtgggttgattccaccgttggacttcatttcctacgccgaagagtcagggctaattgtgcctttaggccgttgggtgattctcgatgtcgtacgccaggtggcaaagtggcgggataaaggcataaacctgcgagtggcggtaaatatttctgcacgtcagctcgccgatcaaaccattttcaccgccctgaaacaggttctccaggaactcaattttgaatactgccctatagatgttgaactgacagagagttgtctgattgagaatgatgaactggcactgtctgttattcaacaatttagccaactaggtgcgcaagtgcatctggatgattttggtaccggctactcttcactttcgcaactggcgcgctttccgatcgatgccatcaaacttgaccaggtttttgttcgagatattcacaaacaacctgtctcgcagtcactggtccgggcgatcgtcgctgtggcccaggcattgaatcttcaggtgatcgccgaaggtgtagagagtgcaaaggaagatgcttttttaaccaagaacgggatcaatgagcggcaaggatttttgtttgccaaaccgatgcccgccgtcgccttcgaacgctggtataaacgctatctgaagcgcgcataa

SEQ ID NO: 465664 - DNA, 549 bp, Shigella boydii
gtggaaaaagaaaatatcaccatcgatccgcgttcttcatttactccatcttcgtcggcagatattcccgtgccaccagatggattagttcaacgcagtacccgaattaaacgcattcaaaccaccgccatgttgttattattttttgcggcggtaatcaattatctcgaccgcagttcgctgtcggtagcaaatttaacgattcgtgaagaattgggattaagtgccaccgaaatcggcgctttgctctccgtgttttcactcgcttacgggattgcgcaacttccttgcggcccactattggatcgtaaaggcccacgcctgatgctgggactggggatgttcttctggtcactgttccaggcaatgtctggcatggtgcacaactttacgcagttcgtgttggtgcgtatcggtatggggattggtgaagcgccgatgaacccatgcggtgtaaaagtcattaacgactggggtaatgactccaacttactgatagtgttttatgttcagataatgcccgatgaccttgtcatgcagctccactga

SEQ ID NO: 465665 - DNA, 525 bp, Shigella boydii; identical to SEQ ID NO: 464868

SEQ ID NO: 465666 - DNA, 1131 bp, Shigella boydii; identical to SEQ ID NO: 465424

SEQ ID NO: 465667 - DNA, 696 bp, Shigella boydii
atgcgaaagatttttcttccgttgttactggtggcactttcgcctgtcgctcacagtgaaggtgtgcaggaagtcgagattgacgcaccgctctctggctggcatccggcagagggcgaagatgccagtttttcacaatcgatcaattacccggcgtcgtccgtcaacatggcagatgatcaaaatatctcagcgcagatccgcggcaaaataaagaattatgctgcggcgggtaaaattcagcagggccggctggtggtcaacggtgccagtatgccgcagagagttgaatccgatggttcatttgcacgcccttatattttcactgaaggcagcaacagcgtgcaggtcatcagcccggatgggcaaagccgacaaaaaatgcagttttactcaacgccgggtacaggaacgattcgtgcacgtttacggctggttctctcgtgggatacggacaataccgatctcgatctccatgttgtcacgcccgatggcgaacacgcctggtacggtaacactgtgctgaaaaacagtggtgcactggatatggatgtcacgacggggtacggacccgagattttcgccatgccagcgccagttcacggacgctatcaggtgtatatgaagtggtcaacaaaaactggccaccgagttagagtttttccagtatcgattttccgattcgtttgggggtaa

SEQ ID NO: 465668 - DNA, 351 bp, Shigella boydii
gtggcaaatcgtgagcctgtcaccattcatcctgacgatgccctggcgcgcggcattcaagatggcgatactgttcggctgtggaacgcacgcgggcaaattcttgccggagcggtcattagcgagggaattaaacctggcgtgatttgtattcacgaaggggcatggccggatttggatttaaccgctgacggtatttgtaaaaacggcgcagtcaacgtgctgaccaaagatctccccagctcgcggctggggaatggctgtgcgggtaatacggcgctggcatggctggaaaaatacaacggtccggaactgacacttacagcgtttgaaccaccggccagctcataa

SEQ ID NO: 465669 - DNA, 360 bp, Shigella boydii; identical to SEQ ID NO: 464873

SEQ ID NO: 465670 - DNA, 294 bp, Shigella boydii; identical to SEQ ID NO: 25632

SEQ ID NO: 465671 - DNA, 294 bp, Shigella boydii; identical to SEQ ID NO: 25632

SEQ ID NO: 465672 - DNA, 456 bp, Shigella boydii
ttgtgtggtccggaacttcaccagttgcatgcgggtacggtgcagaaccagtaccgactgctgttcttctgtttttacggcgatttctttacccggctgctgaaccgccatccagatagcccgggcatccatcacatcattcttattgcccatgacgaatgccttaacgaagcgggcctgcaacaaccggactttatgaccaagttttgtcagttcccgtgcccagtgctgagaacctccacaggcctccataccaatcaggcatggctcacggttgccgaagaacgtcagaaaatcctgtctacgcaactgtttatcaaccacttcacctgtgtgctcattgatgaagtgaatctgaatgacatgttttgcgatatcaacgccaaccggtgtatatttcatttgtggagtctccagtctgagggagctttatgcatcccgtattgggcactatga

SEQ ID NO: 465673 - DNA, 645 bp, Shigella boydii; identical to SEQ ID NO: 464889

SEQ ID NO: 465674 - DNA, 267 bp, Shigella boydii; identical to SEQ ID NO: 464426

SEQ ID NO: 465675 - DNA, 867 bp, Shigella boydii; identical to SEQ ID NO: 464884

SEQ ID NO: 465676 - DNA, 837 bp, Shigella boydii; identical to SEQ ID NO: 464897

SEQ ID NO: 465677 - DNA, 477 bp, Shigella boydii; identical to SEQ ID NO: 464898

SEQ ID NO: 465678 - DNA, 210 bp, Shigella boydii; identical to SEQ ID NO: 9340

SEQ ID NO: 465679 - DNA, 210 bp, Shigella boydii; identical to SEQ ID NO: 9340

SEQ ID NO: 465680 - DNA, 210 bp, Shigella boydii
atgacggatggctggccgctgtatgaatcacgcctgaagggaaagttgcacgttatcagcaagcgttacactcagcgcattgagcgacataatctgaatctgagacaacatctggcaagactgggacggaagtcactgtcgttctcaaaatcggtggagctgcatgacaaggtcatcgggcattatctgaacataaaacactatcagtaa

SEQ ID NO: 465681 - DNA, 1104 bp, Shigella boydii
atgaatagtttagcaaggcgtttacgtgactatgataaaacagacatggtgatgggcagagtttacagtaatgtttttgactgtggatttattgatatggaacaatcatggattcagctattattaattttttctaacaagaacgatagcgtatcaaaagaaataaaagaagcaatagaaaacaactatataacatatcgtgagaagcaacgactcattggagtattatcaaaaatttgtaactccatcgaatacactaaaatcaagctgactttaacattggacgatctccaaacaaaaaaagaaaacttaagaaagttgcttcaagagcatattaacatgctaaagaaagatcttgatatgagacttcaggatgctgccatagatgtacatcgactagatagcactgcacgtaaaacatcagaacatcttcgtaaacgcatcaagaaaacgctccctctttcacttttcaaatctattgattttaagcaggctagcgattgtttcacaaaacataagatatctattaagatagataaagaaccgtatgccgaaggaatagaatccatcccttatatcaatgaaggtgatattcaagcagacttaattctcaaggacatccagagaataatactttcaaatttatttagcactggctgttcgcaacataccgtaatagaagatttcaatatgttgattgatcacataaaatcatctgctgacttggctggcaaactggttcttgtgatgagtaaagagatctttcagcaatataatcgtatgcttttcgataatcccaacctcagagaactaatgagaaaaaatgatgatggctctatgaacataactactgaatccggtacccgtaaggtttacttcttaccatttgttaatcaaccattttctcttgtggtaaaggataactacttcactaaattaattattagagaatatgataataataagttagtaaatgtcacttcagagaatatcaaaagtgactcagataaattcaagctaactcttaactatgagttgaatatagtatttgaaggaaacgctgatttaaaaatagctcactcgcaaagagtgacatcagaataa

SEQ ID NO: 465682 - DNA, 276 bp, Shigella boydii; identical to SEQ ID NO: 458859

SEQ ID NO: 465683 - DNA, 267 bp, Shigella boydii; identical to SEQ ID NO: 464901

SEQ ID NO: 465684 - DNA, 303 bp, Shigella boydii
atgagcagaaaaacccaacgttactctacggagtttaaagccgaagccgtcaaaacggttcctgaaaatcagctttcgatcagtgaaggcgcttcccgattatcccttcctgaaggcactttaggacaatgggttaccgctgcaagaaaagggctcaatacaccaggctcccgcacagtggctgaactggaatctgaagttatgcaactgcgtaaggctttaaatgaagcacgacttgagcgagatatattaaaaaaagcaacagcgtattttgcccaggagtcgctgaaaaatacgcgttag

SEQ ID NO: 465685 - DNA, 1455 bp, Shigella boydii
atgaaaatacctgaagcagtaaatcatattaatgttcagaataatattgatcttgttgatggaaaaacgaatccgaataaagcaacaaaagcattacaaaaaaatatattacgcgtaacaaactcatcttcttctggcataagtgaaaaacatttagatcactgtgctaatactgtgaaaaactttttaaggaagtctatagcagcgcaaagttatagcaaaatgttttctcaagggaccagtttcaaatcactaaatctttctattgaagcgccatctggagcacggtcatcatttcggtcacttgagcatctcgataaggtgtccaggcactatatctctgagataatacaaaaagttcatcctctttcttcagacgaacgtcacttactttctattattattaataataattttaacttcagacatcaaagtaactctaatctgtcaaataatattcttaatattaaatcctttgataaaattcagtctgaaaatatacaaacacataagaatacatactctgaggatattaaagaaatctctaaccacgattttgttttttttggggttgaaatttccaatcatcaagaaaaactcccactaaataaaacacatcatactgtagattttggcgccaatgcgtatatcattgatcatgactctccatatggatatatgacattaaccgatcactttgataatgctattccacctgttttttaccatgagcaccaatcatttttcttagataactttaaagaggttgtggatgaagttagcaggtatgtgcatggtaatcaggggaaaactgatgttccaatatttaacactaaagatatgaggcttggaattgggttgcatcttattgattttataagaaagagtaaagatcaaggattcagagagttttgttataacaaaaatattgatcctgttagtctggatagaattataaactttgtgtttcagcttgagtatcatataccaagaatgctaagtacagataacttcaaaaaaataaaactcagagacatatctttggaggatgcgattaaagcatctaattatgaagagattaacaataaagtgactgataaaaaaatggctcatcaggcccttgcttattctttaggcaataaaaaagctgatatagcactttatttactatctaaatttaattttacaaaacaagatgtcgcagagatggagaaaatgaacaacaatagatattgtaatctgtatgatgttgaatacttacttagtaaagatggtgccaactataaagtgctagaatattttatcaataatggattggttgatgtaaacaaaaaatttcaaaaagcaaatagtggggacactatgcttgacaatgcaatgaaaagcaaaaatccaaaaatgattgattttttattaaaaaatggagcaatattaggcaaacgatttgagatatga

SEQ ID NO: 465686 - DNA, 420 bp, Shigella boydii
atggaacagaaagcattatctgcagaaccccgcagatcattttcaaatgagtttaaacttcaaatggttaaactggcttcacaaccaggagcctctgttgcccgtattgtccgggaacacgatatcaatgataacctgctgttcaaatggctcaggctctggcagaacgaagggcgcatatcgcggcgtcttccggtaacaacctcttctgacactggcgttgaattattacctgtggagataacgccggatgagccgaaagaaccggtggctgctcttactccgtctttatctactcagactacagttagtgccagctcctgcaaggtggagttccgtcacggtaacatgacgctggaaaatccttcaccagagctgctcacagtgttgatccgtgaactgaccgggtggggacgatga

SEQ ID NO: 465687 - DNA, 276 bp, Shigella boydii
gtggcttccatttccatcagatgtccttcctgctccgctactgaaggcgtggtgcgtaacggcaaaagcactgccggacatcagcgctatctctgctctcattgccgtaaaacatggcaactacagttcacttacaccgcctctcagcccggtacgcaccagaaaatcattgatatggccatgaatggcgtcggatgtcgcgccagtgcacgcattatgggcgttggcctcaacacggttttacgtcacttaaaaaactcaggccgcagtcggtaa

SEQ ID NO: 465688 - DNA, 525 bp, Shigella boydii
atggcagcgacgcacacactccctctggcgtcaccgggaatggcacgcatctgcctttacggggatttgcaacgatttggccgccgcatcgaccttcgtgtgaaaacgggggctgaagccatccgcgcactggccacacagctcccggcgtttcgtcagaaactgagtgacggctggtatcaggtgcgcattgccgggcgtgatgcaggtgaaaccgaattgtctgcccgtcttaatgagccgctggcaaatggtgcagtgatccacatagtaccgcgtctggtgggagctaaaagtggcggtgtgtttcaggcggtgctgggggcagctgttatggcggttgctatatggatgccgggggtaggaattatggcgagtaatctgctgttttctctcggtgccagtatgacgcttggcggtgttgcacagatgctggcaccgaaagccagaactccccgtacacagacaacggataacggcaaacagaacacctgtttctcctcactggataacatggttgcctag

SEQ ID NO: 465689 - DNA, 471 bp, Shigella boydii
gtgacgcctcctctgtttgcgatgaagggaaaaaaagagaataccttgcgtattcttgatgcaacaaataaccaattgccacaggaccgggaaagtttattctggatgaatgttaaagcgattccgtcaatggataaatcaaaattgactgagaatacgctacagctcgcaattatcagccgcattaaactgtactatagcccggctaaattagcgttgccacccgatcaggccgcagaaaaattaagatttcgtcgtagcgcgaattctctgacgctgattaacccgacaccctattatctgacggtaacagagttgaatgccggaacccgggttcttgaaaatgcattggtgcctccaatgggcgaaagcacggttaaattgccttctgatgcaggaagcaatattacttaccgaacaataaatgattatggcgcacttacccccaaaatgacgggcgtaatggaataa

SEQ ID NO: 465690 - DNA, 132 bp, Shigella boydii
atgagccatgccgatatgaacaactgctgcggctttaacgaggctgccgcagcgttctcatggaacagcccgaaaaaggccattaacccttatctggacccggcggaagttgcgccgcgaggcactgagtga

SEQ ID NO: 465691 - DNA, 294 bp, Shigella boydii
gtggcgcacgtcttcggtgaacgcactctggccacactggagcgtcttctgagcctgctgtcggcctttgaggtcgtggtatggatgacggatggctggccgctgtatgaatcacgcctgaagggaaagctgcacgttatcagcaagcgttacactcagcgcattgagcgacataatctgaatatgagacaacatctggcaaggctgggacggaagtcactgtcgttctcaaaatcggtggagctgcatgacaaggtcatcgggcattatctgaacataaaacactatcagtaa

SEQ ID NO: 465692 - DNA, 276 bp, Shigella boydii; identical to SEQ ID NO: 464846

SEQ ID NO: 465693 - DNA, 234 bp, Shigella boydii; identical to SEQ ID NO: 461402

SEQ ID NO: 465694 - DNA, 480 bp, Shigella boydii; identical to SEQ ID NO: 464913

SEQ ID NO: 465695 - DNA, 246 bp, Shigella boydii
atgttatgggctaatttcgatgcaccaagtgatgtaaaacttcagtcatctgcttataacatattaaatttaatgttaatgaactttagttatagcattaatgagctggtagagcttcatcgttctgatgagtacttacagttaagagttgttattaaagatgactacgttcacgatgggattgtttttgcagagattctgcatgagttttatcagaggatggaaatcttaaatgaggtcttataa

SEQ ID NO: 465696 - DNA, 237 bp, Shigella boydii
gtggcggacgcgctaccggaagcggtattacgtcgttcgctggggttgcgtgcggaaaaaatccgctcaatgtaccgtgaaagcgacatcgtgccgggagagcagaccgctaccagcatactgaagcagcgcacaaaaaatcttgcgctgctgcctcacgcccaccagcaacagaatccaccacaggaagagacggtggtcagcattgccgttgatccggaatctccggctcagtga

SEQ ID NO: 465697 - DNA, 210 bp, Shigella boydii
atgacggatggctggccgctgtatgaatcacgcctgaagggaaagctgcacgttatcagcaagcgttacacccagcgcattgagcgacataatctgaatctgagacaacatctggcaaggctgggacggaagtcactgtcgttctcaaaatcggtggagctgcatgacaaggtcatcgggcattatctgaacataaaacactatcagtaa

SEQ ID NO: 465698 - DNA, 267 bp, Shigella boydii; identical to SEQ ID NO: 464848

SEQ ID NO: 465699 - DNA, 252 bp, Shigella boydii; identical to SEQ ID NO: 464926

SEQ ID NO: 465700 - DNA, 825 bp, Shigella boydii; identical to SEQ ID NO: 465497

SEQ ID NO: 465701 - DNA, 468 bp, Shigella boydii; identical to SEQ ID NO: 465390

SEQ ID NO: 465702 - DNA, 1107 bp, Shigella boydii
gtgaacaccgttggcaaatcggcatttgtggaggccgtcggtcgggcgagcgatgatgcggaaggttatctgagtttttataaagggttgatcaataaaacgcatctcggcaaggagttgtggacgcagattgataacggtcagcttgcgccggacctgactgaaatcaggacgtccattacgaatgtcagcaatgaaatcacgcaaaccgtcaataaaaaactggaaaatcagagtgctgcaatccagcagatacagaaagttcaggttgatacaaataataatctgaacagcatgtgggctgtgaagctgcaacagatgaaggacggacgcctttatattgcgggtatcggtgccggtattgagaatacgccagcaggaatgcagagtcaggtgctgctggcggcagacaggattgcgatgattaatcctgcgaatggcaacacaaagccgatgtttgttggtcagggcgatcagatattcatgaacgacgtgttcctgaaacgcctgacggctccgaccataaccagcggcggtaatcctccggcattttccctgacacctggcggacggctgacggcgaaaaatgccgatatcagcggtaacgtgaacgcgaactccgggacgctcaacaacgtcacgattaataagaactgtcgggttctgggaaaattgtccgcgaaccagattgaaggcgatctcgttaaaacagtgggcaaacctttcccacgggactcccgggcaccggagaggtggccatcagggaccattaccgtcagggtttatgacgatcagccgtttgatcggcaaattgttattcccgcggtggcgtttcgcggtgctaaacatgagcggaagaataacaatatttattcgtcatgccgcctgatagtgaagaaaaacggtgctgaaatttataaccgaacgaccctggataatacgctgatatatacgggtgttattgatatgcctgccggtcacggtcacatgacgctggagttttctgtatcggcatggctggtaaatggctggtatcccacagcaagtatcagcgatttgctggttgttgtgatgaagaaagccactgcaggcatcacgattagctga

SEQ ID NO: 465703 - DNA, 294 bp, Shigella boydii; identical to SEQ ID NO: 25632

SEQ ID NO: 465704 - DNA, 468 bp, Shigella boydii; identical to SEQ ID NO: 19402

SEQ ID NO: 465705 - DNA, 762 bp, Shigella boydii
atggggattattgcctgggcgttgaatacctggggcaccaacttccatcagatcattatggataccatctcaaccccactggcatcgttgggtagcgtggtgggctgggcctatgtgatctttgttccactgctctggttcttcggtattcatggcgcgctggcgctgaccgcactggacaacggcattatgacgccgtgggcgctggaaaatatcgcgacctatcagcaatatggttccgtcgaagcggcgctggcagccggtaagaccttccatatctgggccaagccgatgctggactcctttattttccttgggggcagtggtgcgactttaggcctgatcctggctatctttatcgcctctcgccgtgctgattatcgtcaggtggcaaaactggcgctgccgtccggcatcttccagattaacgaaccgattctgtttggtctgccaattatcatgaacccggtgatgtttatcccgtttgtactggtacaaccgattctggcggcaatcaccctcgcagcgtactacatgggcattattcctccggtgaccaatattgcaccgtggaccatgccaaccggtctgggagccttctttaacaccaacggtagcgtcgctgcattgctggtcgcactcttcaaccttggtatcgcaacgttaatttatctgccctttgttgtggtggctaacaaagcgcaaaacgcgattgataaagaagagagcgaagaagatatcgctaacgccctgaaattttaa

SEQ ID NO: 465706 - DNA, 1203 bp, Shigella boydii
ttgctgattgtcatttcgggcagtttattttccgcttgtcaatttgcttataaagatgcaaaaaataaaaaaacgttcagtccatatatactagcgtcgcgatttgctacctatacgccgtttttcaatctcaactattttgctttagcagcgaaagagcatcaaagattactctcaattgcaaacacggtgccgtattttcaattatcagtcagggatacaggtattgatacctacgtgttgattgtgggggagtctgtacgtgtcgacaatatgtctttgtatggatatacacgctctacgacaccgcaagttgaagcacaaagaaaacagatcaaactgtttaatcaagcaataagcggcgcaccttacactgcgctgtcggttcccctttctttaactgctgattctgttttgagtcatgacattcataattaccccgacaacattattaatatggctaatcaagcaggatttcagactttctggctaagctcgcaatccgcttttcggcagaatggtacagcagttaccagtatcgccatgcgcgccatggaaacagtttatgtcaaaggatttgatgaattgttgttgccgcatttatcgcaagcattacagcaaaatacgcagcaaaagaaactgattgttcttcatttaaatggaagccatgaaccggcttgtagcgcctatccgcaatccagcgccgtgtttcaaccgcaggacgatcaggatgcctgctatgacaactccattcattacacagatagtttgctaggtcaggtttttgaattattaaaagatcgccgcgcctcggtcatgtattttgccgaccacggcctggaacgtgaccttacgaagaagaacgtctattttcatggaggcagggaggctagccagcaggcatatcatgtcccgatgtttatctggtatagccccgttcttggggatggcgtggatcgcacaacggaaaacaacatcttttcgacagcttacaataattaccttattaatgcgtggatgggggtaacaaagccggaacagccgcaaacgcttgaggaagtgattgcacactataaaggagactcacgggttgtggatgcaaaccatgatgttttcgattatgtgatgttcagaaaggagtttacagaggataagcaaggtaaccccgttactttattcgtaccccttataatggggtgttag

SEQ ID NO: 465707 - DNA, 402 bp, Shigella boydii
gtggcagaagagaaacatcagcgcggtgaactggaaaagccccaccaccagctggtggatacgtatacgtcactgaaccggcagtatgtggagctgcagagtgaatataagcatctgcggcggtattttggtgtgacggcgcaggtgccgtacacggatgtgtggacacataaaccggtgcagttctatcccgggaaacatccgtgcgaaaaaccggcagaaatgctgcagcagataatcagcgcaagcagtcgtccgggtgacctggttgcagatttttttatggactcaggttcaacggtaaaagcggcactggcgctcgggcgtcgtgcgattggcgttgagctggagaccggacgttttgagcagacggttcgggaagtacaggatttaatcgtttga

SEQ ID NO: 465708 - DNA, 480 bp, Shigella boydii; identical to SEQ ID NO: 464955

SEQ ID NO: 465709 - DNA, 294 bp, Shigella boydii
gtggcgcacgtcttcggtgaacgcactctggccacactggagcgtcttctgagcctgctgtcggcctttgaggtcgtggtatggatgacggatggctggccgctgtatgaatcacgcctgaagggaaagctgaacgttatcagcaagcgttacactcagcgcattgagcgacataatctgaatctgagacaacatctggcaaggctgggacggaagtcactgtcgttctcaaaatcggtggagctgcatgacaaggtcatcgggcattatctgaacataaaacactatcagtaa

SEQ ID NO: 465710 - DNA, 480 bp, Shigella boydii; identical to SEQ ID NO: 463183

SEQ ID NO: 465711 - DNA, 294 bp, Shigella boydii; identical to SEQ ID NO: 25632

SEQ ID NO: 465712 - DNA, 795 bp, Shigella boydii
atgatggaggataaatcgagagttcatatactaaacggaatgtataataaaccctcggtgttttttttctttgctgttattgttgtgttaattataatttttttcatctctttaaagaaagatgaagtaaaagaaattgctgaaattatagatgataagagatatggaatagtcaacacaggacagtgcaattatattcttgccgaaacacaaaatgatgcggtatgggcatctgtagccttaaataaaaccggatttaccaaatgcagatatattctggtgtccaacaaagaaataaatagaattcaacaatatatcaatcaacgattcccatatatcaatttgtatgtgttgaatttagtgagtgataaagcggaattactggtatttttaagtaaagaaagaaatagttcaaaagataccgaacttgagaaattgaaaaatgctctgatagttgaatttccgtatatcaaaaatattaaattcaactatcttagcgatcataatgcaagggaggatgctaaaggtattttcacaaaggtaaatgtccagtataaagagatttgtgaaactaataaagttacatattctgtcagagaagaactgacagatgaaaagcttgagctcattaatagactgatttctgattataaaaatgtatatggagatcagtatattgagttttctgtacttttgatagatgatgattttaaaggtaaatcatatcttaacagcaaagacagttatgtaatgttgaatgataaacactggttttttttagataaaaataagtga

SEQ ID NO: 465713 - DNA, 216 bp, Shigella boydii
atgtaccagatggaaaaaatcacaacaggtgtgtcatacaccacgtcagcggtgggaacgggctactggttcctgcagttgctggacagggtttccccgtctcagtgggcggcaataggcgtgctggggagtctgctgtttgggctgctgacatatctgactaacctgtatttcaaaatcagagaggaccgtcgtaaggctgtacggggagagtaa

SEQ ID NO: 465714 - DNA, 480 bp, Shigella boydii; identical to SEQ ID NO: 463183

SEQ ID NO: 465715 - DNA, 600 bp, Shigella boydii
atgcgtaaattatgtgctgttattttgtccgcagtagtctggcaggtcgccgctgctacgccagcgagtgcagcagaacatcagtccacgctgagcgcggggtatctccatgcctcgacgaacgttcccggtagtgatgatctgaacgggattaacgtgaaataccgttatgagtttacggacgcgctggggctgattacgtccttcagttatgccaatgctgaggatgagcaaaaaacgcgctacagcgatacccgctggcatgaagattccgtgcgtaaccgctggttcagtgtgatggcggggccgtctgtacgcgtgaatgaatggttcagcgcgtatgcgatggcgggtgtggcttacagccgtgtgtcgactttctccggggattatctccgcgtaactgacaacaaggggaaaacgcacgacgtgctgaccggaagtgatgacggtcgccacagcaatacctctctggcgtggggggctggcgtgcagtttaacccgaccgaatccgtggccgttgaccttgcttatgaaggttccggtagtggcgactggcgaacggatgcatttattgttggtatcggataccgtttctga

SEQ ID NO: 465716 - DNA, 276 bp, Shigella boydii
gtggcttctgtttctatcagctgtccctcctgttcagctactgacggggtggtgcgtaacggcaaaagcactgccggacatcagcgctatctctgctctcactgccgtaaaacatggcaactgcagttcacttacaccgcttctcaacccggtacgcaccagaaaattattgatatggccatgaatggcgttggatgccgggcaactgcacgcattatgggcggtagcctcaacacgattttacgtcacttaaaaaactcaggccgcagtcggtaa

SEQ ID NO: 465717 - DNA, 327 bp, Shigella boydii; identical to SEQ ID NO: 464459

SEQ ID NO: 465718 - DNA, 600 bp, Shigella boydii
atgcgtaaattatgtgctgttattctgtccgcagtagtctggctggttgccgctggtatgccagcgagcgcagcagagcatcagtccacactaagcgccgggtatcttcagacccatactgatatgccaggcagcgatgatctgaacgggattaacgtgaaataccgttatgagtttacggacacgctggggctggtgacgtcattcagttatgccaatgccaaagatgagcaaaaaacgcattacagcgatacccgctggcatgaagattccgtgcgtaaccgctggttcagcgtgatggcggggccgtctgtgcgcgtgaatgaatggttcagcgcgtatgcgatggcgggtgtgacttacagtcgtgtgtcgactttttccggggattatctccgtgtaactgacagcaaggggaaaacgcacgatgtgctgaccggaagtgatgacggtcgccacagcaacacgtctctggcgtggggggctggcgtgcagtttaacccgaccgaatccgtggccattgatattgcttatgaaggctccggcagtggtgactggcgtaccaacagtttcatcgttggtgtcggctataaattctga

SEQ ID NO: 465719 - DNA, 480 bp, Shigella boydii; identical to SEQ ID NO: 464912

SEQ ID NO: 465720 - DNA, 519 bp, Shigella boydii
atgaagaattgtaaagtatctgtaattattccggtctataatgcggaaaaatatatacaacgttgtattttaagcttattaaagcagacattagatgatgttgaaattatcatcattgatgatggttctactgataattcactttctataataaaagaaactgttgcattgcatactgctagtagagctcgccaaaagagaatcaatataatctctcgagaaaacaaaggagttgcctatacacgaagtcagggattgagactttcgcagggggaatttatcattcattttgatagtgatgattgggcaaaatccaatatgctggaggaaatgtataagacaattgtttccaataatgcagacatggttatatgcgattattttttagtgaagaataataaagaaatacttataaaacagagagtggagtatgagccaaagaaatgtattagatatctactgactggtgagctagaagggtttgttaaaaataatagaaaatactgttccatgaaatga

SEQ ID NO: 465721 - DNA, 480 bp, Shigella boydii; identical to SEQ ID NO: 464896

SEQ ID NO: 465722 - DNA, 774 bp, Shigella boydii
atgcttccatcggaaacgatgatctggcagcctgagttcacagataaaacactctccaggaaacccggggcggttcagagactgtcgcaactggcggggaacctgcggatcgtcttcccgcccactgtaacgatcactgtcctgttcgcgttgtttcagcagggcctcagcctgttcaacttcacgacgcagtttttcagaacgggtaccgaacagcatccggcgcagtttttctatctgagcccgcagatgttctatttcccgttcatcttcttcgatcttttcttcggcgcgggccagtgcagagcgcaggaaggcctccgtctcttcaaccagactcagttgctggtctttctgacggagctggcattccagttctgcaatgcgaatgaggtatttttgattcatggccgtttttataatccggccatgacatttttacaacattgtcagtgcgttaaggcgggatgtttttggctgacgccagtccagcttatcgaggagcattgccagttgcgagcgggtaatggataccttgccgtcacgcacagcaggccagataaactggccttcctccaggcgtctggtgaacaggcacagaccatcagcatcagcccacaggattttaatcatgtcaccccgtcggccacggaagatgaacaggtgaccggagaagggattatcattcagcacatgctgtacctgttcacccagcccgttgaaagacttacgcatatcggttatcccagcaacgagccagatgcgggtgcctga

SEQ ID NO: 465723 - DNA, 429 bp, Shigella boydii; identical to SEQ ID NO: 465642

SEQ ID NO: 465724 - DNA, 450 bp, Shigella boydii
gtggtcatcattgccctgctggtggcctgtggtgcgcttagtctggggctgaatcattaccgtgataacgccataacctacaaagagcagcgcgataaaaaagtcagtgagctggagcaggcaaatgcaaccattactgatatgcagcagcgccagcgtgatgttgctgcacttgatgccagatactcgagggaattagccgatgcgagagctgaaaatgaaactctgcgcgctgacgttgccgctggtcgtaagcgcctgcggatcaacgccacctgccccggtaccgtgcgtgaagcccccaccacctccggcgtggataatgcaaccggcccccgactggcagacaccgctgaacgggattatttcactctcagagagcggttgatgctgatgcagaagcagctggaagtggcgcaggaatatatccgcactcagtgcctgaaataa

SEQ ID NO: 465725 - DNA, 453 bp, Shigella boydii
gtgttgataacctacagaggaaaactaccgggaataattacttgttctctgaagatgccgccgtcaacactgcggtcagaaaaagaggcgtcttgtctgcagtctgagtactccattacggttaaaagtgccggagaggaaggaaataaacgttattttattgcgtctgcacctgataaagatcaggaatgggagtgtaaccggccatcctttgttgtatacggagatggcgggaaaataaccatctcagaaaatgggaaattaacaccgccatcgcaccagcatagtgaggcgctcattgaatttgccattgattacctgaagaacaataaaaagcaggggctgatgaagtgcattggtcgttgcatgggatatctgcagatagctgctgagattgaagcgctggccagtggtgctgataaggatgcaatggtaatgactccaacttactga

SEQ ID NO: 465726 - DNA, 198 bp, Shigella boydii
gtggtctgggatggacagaaagccggtagtgcggttggcatactggtactgccgcttgaaggcacagaggcggtgctgacgtattacaagtcggggacctttgcgacggaggcaatccgctggcctgacagtgtggatgaacacaaaaaggcaaatgcctttgccggcaccgccctgagtcacgcggcgctgccgtaa

SEQ ID NO: 465727 - DNA, 303 bp, Shigella boydii; identical to SEQ ID NO: 458125

SEQ ID NO: 465728 - DNA, 432 bp, Shigella boydii
atgacggcggagcagcgccttgccgaacgtcagttgaaaacgaaaccgctgctgaaatccctggaaagctggctgcgtgaaaagatgaaaaccctgtcgcgacactcagaactggcgaaagcgttcgcatacgccctgaaccagtggccggcgctgacgtactatgcagatgatggctgggctgaggcggacaataacatcgctgaaaatgcgttgcggatggtcagtctgggccgcaaaaactacctgttcttcggttcggatcatggaggagagcggggagcgctgctgtacagcctgatcgggacgtgcaaactgaacggagtggagccagaaagctacctccgctatgtacttgacgtcatagccgactggccgataaaccgggtcggcgaactgctcccctggcgcgtagcactgccgactgaataa

SEQ ID NO: 465729 - DNA, 450 bp, Shigella boydii
gtggtcatcattgccctgctggtggcctgtggtgcgcttagtctggggctgaatcattaccgtgttcacgccatcatctacaaagagcagcgcgataaaaaagccagtgagctggagctggcgaacgcgacaattactgatatgcagatacgccagcgtgatgtcgctgcacttgatgccagatactcgagggaattagccgatgcgagagctgaaaatgaaactctgcgtgctgatgttgccgctggtcgtaagcgcctgcggatcaacgccacctgctccggtaccgtgcgtgaagccaccggcaccgcccgcgtggataatgcaaccggcccccgactggcagacaccgctgaacgggattatttcatcctcagagaacggttgatgacgatgcagaagcaactggaaggggcgcaggaatatatccgtactcagtgcctgaaataa

SEQ ID NO: 465730 - DNA, 327 bp, Shigella boydii; identical to SEQ ID NO: 462700

SEQ ID NO: 465731 - DNA, 327 bp, Shigella boydii; identical to SEQ ID NO: 464915

SEQ ID NO: 465732 - DNA, 276 bp, Shigella boydii; identical to SEQ ID NO: 464846

SEQ ID NO: 465733 - DNA, 327 bp, Shigella boydii; identical to SEQ ID NO: 464915

SEQ ID NO: 465734 - DNA, 318 bp, Shigella boydii; identical to SEQ ID NO: 464967

SEQ ID NO: 465735 - DNA, 420 bp, Shigella boydii; identical to SEQ ID NO: 464991

SEQ ID NO: 465736 - DNA, 432 bp, Shigella boydii
atggacggtacggtctggcgtctgctgaatggctttaagcttttccgcgaaaaaatggatacccgtcgcggttcaaattcacaactcgaaacggcagtgaaagatctgggcgcagtggtatccttcaaggggtattacggcgatctggtcattgcggtagcgaaaacgtcttatgtggcagaggacggtaccgaaaaacgttatctgccggagggcacactggtcctggggaatacggcagcagaggggattcgttgctatggagccattaaggatgcacaggcgttgtctgaaggagtggtggcttcttcccgttacccgaaacactggctgactgtgggcgatccggcccgtgaattcaccatgacgcagtccgcaccgctgatggtgctgccggatccggatgagtttgtggtggtacaggtgaaataa

SEQ ID NO: 465737 - DNA, 375 bp, Shigella boydii; identical to SEQ ID NO: 13405

SEQ ID NO: 465738 - DNA, 276 bp, Shigella boydii
gtggcttctgtttctatcagctgtccctcctgttcagctactgacggggtggtgcgtaacggcaaaagcactgccggacatcagcgctatctctgctctccttgccgtaaaacatggcaactacagttcacttacaccgcctctcagcccggtacgcaccagaaaatcattgatatggccatgaatggcgtcggatgtcgcgccagtgcacgcattatgggcgttggcctcaacacggttttccgccatttaaaaaactcaggccgcagtcggtaa

SEQ ID NO: 465739 - DNA, 327 bp, Shigella boydii; identical to SEQ ID NO: 462700

SEQ ID NO: 465740 - DNA, 222 bp, Shigella boydii
gtggtgatatggatgacggatggctggccgctgtatgaatcccgcctgaagggaaagctgcacgtaatcagcaagcgttacactcagcgaattgagcggcataacctgaatctgagacaacatctggcaaggctgggacggaagtcactgtcgttctcaaaatcggtggagctgcatgacaaggtcatcgggcattatctgaacataaaacactatcagtaa

SEQ ID NO: 465741 - DNA, 330 bp, Shigella boydii; identical to SEQ ID NO: 461591

SEQ ID NO: 465742 - DNA, 396 bp, Shigella boydii
gtgggcaaagctttcccccgggactcccgtgcaccggagcggtggccatcaggaaccattaccgtcagggtttatgacgatcagccgtttgaccggcagattgttattccggcggtggcattcagtggcgctaaacatgagaaagagcatactgatatttactcctcatgccgtctgatagtgcggaaaaacggtgctgaaatttataaccgtaccgcgctggataatacgctgatttacagtggtgttattgatatgcctgccggtcacggtcacatgacactggagttttcggtgtcagcatggctggtaaataactggtatcccacagcaagtatcagcgatttgctggttgtggtgatgaagaaagccactacaggcatcacgattagctga

SEQ ID NO: 465743 - DNA, 195 bp, Shigella boydii
atgcacattggacaggctcttgatctggtatcccgttacgattctctgcgtaacccactgacttctctgggggattacctcgaccccgaactcatctctcgttgccttgccgaatcaggtactgtaacgctacgcaagcgccatgccaacaatacaccagaccatcatttcgaggggaagacggcgcttgcgtag

SEQ ID NO: 465744 - DNA, 195 bp, Shigella boydii; identical to SEQ ID NO: 464976

SEQ ID NO: 465745 - DNA, 279 bp, Shigella boydii; identical to SEQ ID NO: 464808

SEQ ID NO: 465746 - DNA, 324 bp, Shigella boydii
atgattaaaatggcggaacatctgaaaggttactggccgaatcaactgagtttctcagaatcatgcggaatggtgatgagaatgctgatgacattgcagggcgcttcaccgggacgtataccggagctgatgcgcgatcttgcaagtatgggacaacttgtgaaattaccgacgagaaggggaagggccttcaaggagaggccctggaaataccccacagccccgaaaaagagccagacagttgctttactgactggcattacgcccttcggggcggtttttttacatggcacgaaagaccaaacatttgttatcaaatggtaa

SEQ ID NO: 465747 - DNA, 294 bp, Shigella boydii
gtggcgcacgtcttcggtgaacgcactctgaccacactggagcgtcttctgagcctgctgtcggcctttgaggtcgtggtatggatgacggatggctggccgctgtatgaatcacgcctgaagggaaagctgcacgttatcagcaagcgttacactcagcgcattgagcgacataatctgaatctgagacaacatctggcaaggctgggacggaagtcactgtcgttctcaaaatcggtggaactgcatgacaaggtcatcgggcattatctgaacataaaacactatcagtaa

SEQ ID NO: 465748 - DNA, 219 bp, Shigella boydii; identical to SEQ ID NO: 464825

SEQ ID NO: 465749 - DNA, 432 bp, Shigella boydii
ttggcaaacgtcagcgaagccgatgccatggattatgtcgcgggctacaccgtgtgtaacgactacgccattcgtgactatctggaaaactactaccgccctaacctgcgggtaaaaagccgcgacggactgacgccgatgctttcaaccatcgtgccgaaagaggcgatcccggacccgcataatctgccccttcgcaccttcgtcaacggcgagttacgccagcaaggcaccaccgccgatctgatcttcagcgtgcccttcctgatcgcctacttaagtgaatttatgaccctgaatccgggcgacatgatcgccaccggcacacccaaaggcttatctgacgtggtgcctggcgatgaagtagtggtggaagtagaaggcgtgggccgcctggtgaaccgaattgtgagtgaggatacagcgaaatga

SEQ ID NO: 465750 - DNA, 189 bp, Shigella boydii; identical to SEQ ID NO: 463227

SEQ ID NO: 465751 - DNA, 294 bp, Shigella boydii; identical to SEQ ID NO: 460208

SEQ ID NO: 465752 - DNA, 276 bp, Shigella boydii
gtggcttctgtttctatcagctgtccctcctgttcagctactgacggggtggtgcgtaacggcaaaagcactgccggacatcagcgctatctctgctctcactgccgtaaaacatggcaactgcagttcacttacaccgcttctcaacccggtacgcaccagaaaattattgatatggccatgaatggcgttggatgccgggcaaccgcccgcattatgggcgttggcctcaacacgattttccgccacttaaaaaactcaggccgcagtcggtaa

SEQ ID NO: 465753 - DNA, 525 bp, Shigella boydii; identical to SEQ ID NO: 464868

SEQ ID NO: 465754 - DNA, 294 bp, Shigella boydii; identical to SEQ ID NO: 460208

SEQ ID NO: 465755 - DNA, 612 bp, Shigella boydii
atgaagtttttaccctatttttttcttctctgttgtggtctttggtcgaccataagtttcgcagacgaagattacatcgaatatcgtggcatcagtagtaacaaccgtgtcacacttgatccagtacgtctgagcaacaaggaattacgttggttagcgagcaaaaaaaatcttgtgattgcagtacacaagtcccaaacggctaccttgttgcataccgattcgcagcaacgggttcgtggtattaatgctgattatttaaatcttttaaaaagagcgttaaatatcaaattaacactccgggaatacgccgatcatcaaaaagcaatggacgcgctggaagaaggtgaagtcgatatagtgttatcacatttagttgattcgccacctcttaatgatgacattgctgcaaccaaaccactgataattacctttccggcgctcgtcaccacccttcacgattcaatgcgaccgcttacctcatcaaaaccagtaaatattgctcgagtagcaaattatccccctgacgaggtaattcatcaatcatttccaaaagcaacaattatctcttttacaaatttatatcaggcattagcatccgtcatagaatag

SEQ ID NO: 465756 - DNA, 384 bp, Shigella boydii; identical to SEQ ID NO: 464877

SEQ ID NO: 465757 - DNA, 219 bp, Shigella boydii; identical to SEQ ID NO: 465432

SEQ ID NO: 465758 - DNA, 300 bp, Shigella boydii
atgatggaactgcaacatcaacgactgatggcgctcgccgggcagttgcaactggaaagccttataagcgcagcgcctgcgctgtcacaacaggcagtagaccaggaatggagttatatggacttcctggagcatctgcttcatgaagaaaaactggcacgtcatcaacgtaaacaggcgatgtatacccgaatggcagccttcccggcggtgaaaacgttcgaagagtatgacttcacattcgccaccggagcaccgcagaagcaactccagtcgttacgctcactcagcttcatataa

SEQ ID NO: 465759 - DNA, 276 bp, Shigella boydii; identical to SEQ ID NO: 458859

SEQ ID NO: 465760 - DNA, 201 bp, Shigella boydii
atgcaacagtctaccccgtatctctcatttcgcggcatcggtaaaacgtttcccggcgttaaggcgctgacggatattagttttgactgctatgccggtcaggttcatgcgttgatgggtgaaaatggcgcaggaaaatcaactctcttaaaaaatcctcagcggcaactatgcgccaaccacgggttctgtagtgattaa

SEQ ID NO: 465761 - DNA, 291 bp, Shigella boydii
atgattggacaatttttaagtgcaacagagattttagcaaagaactatgttcgtaataaaatggttaaaaatccattttattcgaatttaaaatggaattttattgaaaaaaacatcataagattaacatcctcaccggttaaatcagtactttgcatatcagctttttcatttgtactactttatgttggatatttaaacgaattatttataaaaaataatcttttacattatttcccgtttaggcattcattaaccgaatggcaaacaaccattttaagtggccggtaa

SEQ ID NO: 465762 - DNA, 189 bp, Shigella boydii; identical to SEQ ID NO: 463227

SEQ ID NO: 465763 - DNA, 255 bp, Shigella boydii; identical to SEQ ID NO: 8418

SEQ ID NO: 465764 - DNA, 2148 bp, Shigella boydii
atggcgatttatcatctcagcatgaaaattatctccagaagcagcggctacagcgccgtagcttccgctgcctatcgttccggttcactgatgcttgatgagcgtaccggactgactcacgactacacccgcaaaagcggtgtggctgaggctgtgattctgacccccgccaccgcccctgcctggtgtacgaaccgtgccgaactctggaatgccgttgagaaggccgaacgccggaagaactcacaacttgcgcgggaaattgaactcgccatcccccacgaactgccgcaggatgccgcacgggaaaccgttctcgcctttgtcagagaaaactttgtcagtcagggcatgattgctgatgtggcgttccatcacatggataaaacaaatccccatgcgcacatcatgctgaccacgagggctatcggacctgctgggttcagcggaaaggtcagggactggaacgaccggacacatgccgagacgtggcgggcatcatgggctgaccatgcaaacagggcactggcgaacgccggttatcaggaagagatagaccatcgttcatacgagcgacaggggcttgagaaaacgcctggtattcacctcggaaagtctgcctgtgcgatggaaacacgcggtatcgaaacagaacgcggcgaacagaatcgtctgattaacaggcttaacctggaaatacagatttcccgcaccgaactcaggaacggagggctgacagagcctgcccgccgtgtggctgaccttctgaatatcgggcttcctgacaacgcaacttcgtacacactacgtgacattatcgaagcgttgccgaaggacagtaactcggcatggaaactcaccagtaatgccatgtcgatgatggcagatatgcaggcgacgcgcagacgctgggaagagctgaacaccgaacgaaaggaagcgatgagccatgctgccagcctgaaaaaatcatcgccgttttcgtccggtttttcccgtattcccctgatgcaatgggcggcaccggaataccgtagtgagcagggaaaaatccagtctctgagccagcaaatggaaaaattacgacagcattaccggaaggtggagaaacaggacattcccgcgagtcagatggcatttgaaaaacagtggcagcagtggggggaatccggccttgcagctctcagagcccagttgcttaaacgtgaagaggaattgcgccggaaggaacaggaagatactgaacgtagtcgcgcggagcagctcaggaaaaatgacaatgccgttatggattcaggggtgctgagagcagtcgttacggggtatggcgaggctcccatgcctggtaacggggaaatgacctgttaccttctgcttcacaaccggaacggagaatatacgctctgggggaacgagctggagaaataccgcaccagaatctttgagagtgttgatttaatgcgtgacaggagtggttatatctgtgaccgaagcgaaatcggccaacgtccgccactgcaacgtgtttattcctctgcaacctttgagcaactgctgacgcaggtttgccagacatggccgcaacatacccgcaatctccgccagccgaagacatggccggagtctttctgtcttggagaagaccgccagccagccatgccatcaccagcggcaaggaaggtggattttatgcagggacgtctgccaccgacgctgatgccggtcatgagttctgtcgaccgggaaacccgccagcttcagcttttgctggtcatgggcgtggatgactctctgggcggtgttatccggcttaatggtacgctgtatcccgcgtttgccgttccctcagccgataacaggcatctggtcatcagtgcgctgaccgataaggggttacggtatgcagggtatggtgttgccgtaaatcacgatgcagacagccacatatcacctgcaccagaactgatgcagtttcatctgaaaacccgtgaggcaccgctttttgctgccgtcaacacaccagaaaaacagccggatcatctgttccgctcgctgggttttaatcgtacctgggaggaatggcagcgcgaggaagatgcacgaacacacaccaccgagaggagacatgatcgcggttggtcacagtga

SEQ ID NO: 465765 - DNA, 702 bp, Shigella boydii
atgtcagatctgatagcttacaaatcaaacgcccttatcgaggcaagctacaagctcactttgcaggaacagcgcttcctgctggtctgtatcagccgcctgaaatccggagaagattccccttcgccggatgaacaaaaaaccatgaccatcacggctgcagagtttcatgatgcctttcctgacatgggacggcagcacgctgaagctaggctcaaggaagcgatagatcgcctctgggacaggtcagtaatcatcaagaacgaggaaaaacgagaagagttccgctgggtgcagtaccgggcgcagtatttcaaaggtgaggcgaaagtagatatcaccttctccgatgccatcatgccgtatctgacacagctcaaggggcagtttacgcgggtagtcgtgaagaacgtctccagcctttccagcacctacagcatccgcatttacgagctgctccagcagttccgcagcaccggtgacagaacgatagctatcgatgatttccgaaccatgcttgccgttgaagataaatatcaacaattcaaagacttgaataagatgataatcaagccagccatcgccgaactgaacgaaaaaagcgatctggttgtaactgttgagacgatcaaaaaggggcgcacggttgtagccctgcattttcgcttcaaggaagacaaacagatcaagatgacgatctaa

SEQ ID NO: 465766 - DNA, 837 bp, Shigella boydii; identical to SEQ ID NO: 464897

SEQ ID NO: 465767 - DNA, 480 bp, Shigella boydii; identical to SEQ ID NO: 464895

SEQ ID NO: 465768 - DNA, 480 bp, Shigella boydii; identical to SEQ ID NO: 463183

SEQ ID NO: 465769 - DNA, 1104 bp, Shigella boydii; identical to SEQ ID NO: 465681

SEQ ID NO: 465770 - DNA, 189 bp, Shigella boydii; identical to SEQ ID NO: 463227

SEQ ID NO: 465771 - DNA, 237 bp, Shigella boydii; identical to SEQ ID NO: 465696

SEQ ID NO: 465772 - DNA, 639 bp, Shigella boydii; identical to SEQ ID NO: 465403

SEQ ID NO: 465773 - DNA, 1218 bp, Shigella boydii
atgatgtcgcgcctggaacatgtcgaagaagagaaaatcaattacgatttcttcctcaacctgccagaaatcaaccgtagcaaactggaacgtattgatattcgtacatcgcagctgattacaccgctgtttgaatattccggtgcttgctccggttgtggcgagacgccgtatattaaattgctgactcagctctatggcgaccggatgttgatcgctaacgccaccggctgttcttcaatttatggcggtaacctgccctctacaccgtataccaccgatgccaacggtcgtgggccggcatgggcgaactctctatttgaagataatgccgaatttggccttggtttccgcctgacggtcgatcaacaccgtgtccgcgtgctgcgtctgctggatcaatttgccgataaaatcccggcggaattactgacggcgttgaaatcagacgctacgccagaggttcgtcgagaacaggtcgcagctttacgccagcaactcaacgatgttaccgaagcacatgaactgctacgtgatgcagatgcactggtggaaaaatcaatctggctgattggtggtgatggctgggcttacgatatcggctttggcggtctggatcatgtattgagtttgacggaaaacgtcaacattctggtgctggatacgcaatgctattccaacaccggtggtcaggcgtcgaaagcgacaccgctgggtgcagtaactaaatttggcgagcacggcaaacgtaaagcgcgtaaagatcttggcgtcagtatgatgatgtacggtcatgtttatgtggcgcagatttctctcggcgcgcagctgaaccagacggtgaaagcgattcaggaagcggaagcgtatccgggaccatcgctgatcattgcttatagcccgtgtgaagagcatggttacgatctggcactcagccatgaccagatgcgccaactcacagctaccggcttctggccgctatatcgcttcgatcctcgtcgtgccgatgaaggcaaactgccgctggcgctggattcacgcccgccgtcagaagcactggaagaaacgttacttcacgagcaacgtttccgtcgtctgaattcgcagcagccagaagtggcagaacagttatggaaagatgctgcagctgatttgcaaaaacgctatgacttcctggcacaaatggccggaaaagcggaaaaaagcaacaccgattaa

SEQ ID NO: 465774 - DNA, 456 bp, Shigella boydii; identical to SEQ ID NO: 464908

SEQ ID NO: 465775 - DNA, 738 bp, Shigella boydii
atgttaaaagatcaggtaaaggcattaaaagggttaaactctaaaaggggggaaccaacgaaattattaattcggaatagtgatggtcttctgcaagaagtaaaggttaatctaaaagtggtgacatttaactttggtgtaaatgaattagcgctaaaaatgggcttaggctggaggaatgttgacaagcttaatggtgaatcaatatgttctttgttgggggataatttcctcaaaaatggtgtgattggaggttgggctgcagaagctatagaaaaaaatccaccatgtaagaatgatgtgatatatctggctaaccagataaaagagattataaacaagaatttacaaaaaaatgataatggagagccgtataaattgtcacaaagaatggctctattggcttatactataggtgctgtaccttgctggaattgtaagagtgggaaggacagaacaggtatgcaggatgctgaaattaaaagagaaataataagaaaacatgaaacagggcagttttctcaattaaatagtaaattatcctcagaagagaaaagattattttctactattctaatgaatagtggtaatatggaaatccaagagatgaatactggtgtgcctggaaataaagttatgaaaaaattaccgctatcttcgttagagctgtcttatgctgaaagaataggggaccccaaaatatggaatatggtgaaagggtattcgtcatttgtataa

SEQ ID NO: 465776 - DNA, 210 bp, Shigella boydii
atgcggtatccaacccgcgaatatcagcgtgattcaccgtcggatttactgctacgtcgccctcagggaattaaacctaaaaagaaaatcgtcaaaattagagattccggtttgacacggaaagtcatattagcgctgggagcttaccaccataacaggcccatcatcgacagaggagaacaggataaatatattatcgtttcgcgttaa

SEQ ID NO: 465777 - DNA, 480 bp, Shigella boydii; identical to SEQ ID NO: 463183

SEQ ID NO: 465778 - DNA, 354 bp, Shigella boydii; identical to SEQ ID NO: 464933

SEQ ID NO: 465779 - DNA, 267 bp, Shigella boydii
atggccacactggagcgtcttctgagcctgctgtcggcctttgaggtcgtggtatggatgacggatggctggccgctgtatgaatcacgcctgaagggaaagctgcacgttatcagcaagcgttacactcagcgcattgagcgacataatctgaatctgagacaacatctggcaaggctgggacggaagtcgctgtcgttctcaaaatcggtggagctgcatgacaaagtcatcgggcattatctgaacataaaacactatcaataa

SEQ ID NO: 465780 - DNA, 468 bp, Shigella boydii
ttgttctataagttgctcagcaagctcattttcgctgttcttcatcgtgccgaaggctgcagccgtcagcagatggctggtcagttccatctggcagaccattttgacctgcgggtggagcgccgggttcccggcatgtgtctggcgggggaaggctgcatcgttctctggtgtatccggtgtgcgccagaacacaccatcgatggccagcagggtcaggccgcaccagtgcggatgcggcgtggcgttatgccagaactgcgctgttttcgtgaacacgcggcggacagcctcacttcccaggcgctggcgggcctgaataacggcactgggggcaacgaaggggcgattgcccggcagcatgatgtccaggcgattcacaatctggtgaagaggttctttacgctcaagcgccatgccaacaatacaccagaccatcatttcgaggggaagacggcgcttgcgtag

SEQ ID NO: 465781 - DNA, 138 bp, Shigella boydii; identical to SEQ ID NO: 16164

SEQ ID NO: 465782 - DNA, 600 bp, Shigella boydii
atgcgtaaagtttgtgcagccattttgtccgcagccatctgtctggctgtatccggtgcgcctgcatgggcgtctgaacatcagtccacgctgagcgccgggtatcttcagccccatactgatatgccaggcagcgatgacctgaagggcattaacgtgaaataccgttatgagtttacggacacgctggggctggtgacgtcattcagctatgccaacgctgaagatgagcaaaaaacgcattacagcgatacccgctggcatgaggattccgtgcgtaaccgctggttcagcgtgatggcggggccgtctgtgcgcgtgaatgaatggttcagcgcgtatgcgatggcgggcgtggcttacagccgtgtgtcgaccttctccggggattatctccgcgtaactgacaacaaggggaaaacgcacgacgtgctgaccggaagtgatgacggtcgccacagcaatacctctctggcgtggggggctggcgtgcagtttaacccgaccgaatccgtggccattgaccttgcttatgaaggttccggcagtggcgactggcgcactgacggtttcatcgtgggtgtcggttataagttctga

SEQ ID NO: 465783 - DNA, 294 bp, Shigella boydii; identical to SEQ ID NO: 25632

SEQ ID NO: 465784 - DNA, 276 bp, Shigella boydii; identical to SEQ ID NO: 464937

SEQ ID NO: 465785 - DNA, 480 bp, Shigella boydii
gtggcggacctgacgtatgttgccacacaggagggatggttgtacctcgctggcatcaaagatgtttatacgtgcgaaattgtaggctacgccatgggagagcgcatgacaaaagagctgacaggtaaagccctgtttatggcgctcaggagccagcgcccacctgccgggctaatccaccactctgatcgaggttcacagtactgcgcatacgattaccgggtcatacaggagcagtctggtctgaaaacatcaatgtcgcgtaaaggtcactgttacgacaacgctccgatggaaagcttctggggaacgctgaaaaatgagagcctgagccactatcgttttaataaccgggatgaagccatctcagtaatacgggaatacattgagattttctacaatcgtcagcgtcgtcactctcgtctggggaatatctccccggcagccttcagggaaaaatatcatcagatggctgcttaa

SEQ ID NO: 465786 - DNA, 468 bp, Shigella boydii; identical to SEQ ID NO: 464406

SEQ ID NO: 465787 - DNA, 480 bp, Shigella boydii; identical to SEQ ID NO: 464955

SEQ ID NO: 465788 - DNA, 198 bp, Shigella boydii; identical to SEQ ID NO: 464433

SEQ ID NO: 465789 - DNA, 726 bp, Shigella boydii; identical to SEQ ID NO: 464950

SEQ ID NO: 465790 - DNA, 216 bp, Shigella boydii; identical to SEQ ID NO: 21150

SEQ ID NO: 465791 - DNA, 480 bp, Shigella boydii
gtggcagacctgacgtatgttgccacacaggagggatggttgtacctcgctggcatcaaagatgtttatacgtgcgaaattgtcggctacgccatgggagagcgcatgacaaaagagctgacaggtaaagccctgtttatggcgctcaggagccagcgcccacctgccgggctaatccaccactctgatcgaggttcacagtactgcgcatacgattaccgggtcatacaggagcagtctggtctgaaaacatcaatgtcgcgtaaaggtcactgttacgacaacgctccgatggaaagcttctggggaacgctgaaaaatgagagcctgagccactatcgttttaataaccgggatgaagccatctcagtaatacgggaatacattgagattttctacaatcgtcagcgtcgtcactctcgtctggggaatatctccccggcagccttcagggaaaaatatcatcagatggctgcttaa

SEQ ID NO: 465792 - DNA, 351 bp, Shigella boydii; identical to SEQ ID NO: 464002

SEQ ID NO: 465793 - DNA, 417 bp, Shigella boydii; identical to SEQ ID NO: 464964

SEQ ID NO: 465794 - DNA, 468 bp, Shigella boydii
ttgttctataagttgatcagcaagctcattttcgctgttcttcatcgtgccgaaggctgcagccgtcagcagatggctggtcagttccatctggcagaccattttgacctgcgggtagagcgccgggttcccggcatgtgtctggcgggggaaggctgcatcgttctctggtgtatccggtgtgcgccagaacacaccatcgatggccagcagggtcaggccgcaccagtgcggatgcggcgtggcgttatgccagagctgcgctgttttcgtgaacacgcggcggacagcctcacttcccaggcgctggcgggcctgaataacggcactgggggcaacgaaggggcgattgcccggcagcatgatgtccaggcgattcacaatctggtgaagaggttctttacgctcaagcgccatgccaacaatacaccagaccatcatttcgaggggaagacggcgcttgcgtag

SEQ ID NO: 465795 - DNA, 480 bp, Shigella boydii; identical to SEQ ID NO: 464896

SEQ ID NO: 465796 - DNA, 480 bp, Shigella boydii
gtggcggacctgacgtatgttgccactcaggagggatggttgtacctcgctggcatcaaagatgtttatacgtgcgaaattgtcggctacgccatgggagagcgcatgacaaaagagctgacaggtaaagccctgtttatggcgctcaggagccagcgcccacctgccgggctaatccaccactctgatcgaggttcacagtactgcgcatacgattaccgggtcatacaggagcagtctggtctgaaaacatcaatgtcgcgtaaaggtaactgttacgacaacgctccgatggaaagcttctggggaacgctgaaaaatgagagcctgagccactatcgttttaataaccgggatgaagccatctcagtaatacgggaatacattgagattttctacaatcgtcagcgtcgtcactctcgtctggggaatatctccccggcagccttcagggaaaaatatcatcagatggctgcttaa

SEQ ID NO: 465797 - DNA, 276 bp, Shigella boydii; identical to SEQ ID NO: 458859

SEQ ID NO: 465798 - DNA, 237 bp, Shigella boydii
atgaagcgtctggctgatgggggagaaatgaattttgatggctatctggataagatgtcacatctggtgaatgaagggacgctcgatcctgatattttaagcaaaatgcgagatgctgcaccacaattaattagcttcgcgaagtcgtttgacccaacctcaaaggaagagattaaaatacttacagacacttctaaattaatttatgatttgttcggggttaaatcggagaaataa

SEQ ID NO: 465799 - DNA, 303 bp, Shigella boydii; identical to SEQ ID NO: 461506

SEQ ID NO: 465800 - DNA, 327 bp, Shigella boydii; identical to SEQ ID NO: 462700

SEQ ID NO: 465801 - DNA, 480 bp, Shigella boydii; identical to SEQ ID NO: 463183

SEQ ID NO: 465802 - DNA, 297 bp, Shigella boydii; identical to SEQ ID NO: 464965

SEQ ID NO: 465803 - DNA, 276 bp, Shigella boydii; identical to SEQ ID NO: 464846

SEQ ID NO: 465804 - DNA, 426 bp, Shigella boydii
atggaattacaggactggcgaaaagaacctcgtaaaaactattcgaatgaattcaaacttcgtatggtggaactggcatcacaacctggagcttctgttgcccgtattgcccgggaacacgatatcaatgataacctcctgttcaaatggctcaggctctggcagaacgaagggcgtgtttcgcggcgtcttccggtaacgacctcttctgacactggcgttgaattattacctgtagaaataacgccgggtgagcagaaagaacctgtggcggccattgcgccgtctttatccacttccactcagaccagagtcagtgccagttcctgcaaggtggagttccgtcacggtaacatgatgctggaaaatccatcgccagagctgctcacggtgttgatccgcgaactgagcgggaggggaagatga

SEQ ID NO: 465805 - DNA, 231 bp, Shigella boydii; identical to SEQ ID NO: 465010

SEQ ID NO: 465806 - DNA, 351 bp, Shigella boydii
atgctgccgggcaatcgccccttcgttgcccccagtgccgttattcaggcccgccagcgcctgggaagtgaggctgtccgccgcgtgttcacgaaaacagcgcagctctggcataacgccacgccgcatccgcactggtgcggcctgaccctgctggccatcgatggtgtgttctggcgcacaccggatacaccagagaacgatgcagccttcccccgccagacacatgccgggaacccggcgctctacccgcaggtcaaaatggtctgccagatggaactgaccagccatctgctgacggctgcagccttcggcacgatgaagaacagcgaaaatgagcttgctgggtaa

SEQ ID NO: 465807 - DNA, 276 bp, Shigella boydii; identical to SEQ ID NO: 458859

SEQ ID NO: 465808 - DNA, 276 bp, Shigella boydii; identical to SEQ ID NO: 458859

SEQ ID NO: 465809 - DNA, 294 bp, Shigella boydii
atggccccccgcctgctcatcattgatgaaataggctatctgccgttcagtcagaaagaagcaaaactgttcttccaggtcatcgctaaacgttatgaaaagagcgcaatgatcctgacatccaatctgccgttcgggcagtgggatcaaacgttcgccggtgatgcagcactgacctcagcgatgctgggccgtatcttacaccactcacatgtcgttcaaatcaaaggagaaagctatcgactcagacagaaacgaaaggccggggttatagcagaagctaatcctgagtaa

SEQ ID NO: 465810 - DNA, 285 bp, Shigella boydii
atgagcagaaaaacccaacgttactctacggagtttaaagccgaagccgtcaaaacggttcctgaaaatcagctttcgatcagtgaaggcgcttcccgattatctgttcctgaaggcactttaggacaatgggttaccgccgcaagaaaagggctcaatacaccaggctcccgcacagtggctgagctggaatctgaagttatgcaactgcgtaaggcgttaaatgaagctcgccttgagcgagatatatgtaagcgtaaactgacagccgtatgtagccattaa

SEQ ID NO: 465811 - DNA, 228 bp, Shigella boydii; identical to SEQ ID NO: 464473

SEQ ID NO: 465812 - DNA, 279 bp, Shigella boydii; identical to SEQ ID NO: 464808

SEQ ID NO: 465813 - DNA, 1221 bp, Shigella boydii; identical to SEQ ID NO: 465384

SEQ ID NO: 465814 - DNA, 534 bp, Shigella boydii; identical to SEQ ID NO: 464817

SEQ ID NO: 465815 - DNA, 378 bp, Shigella boydii; identical to SEQ ID NO: 15904

SEQ ID NO: 465816 - DNA, 693 bp, Shigella boydii
atggaagaggggctggcgaaacgcttaaacgttgccctcggtgataccgtgacttttatgggcgatacccaggagttccgcgctaaagtgaccagcctgcgcaaagtggaccgggaaagtctgcggcctaatttctattttattttcccggaaggggcattagacgggcaaccgcagagctggcttaccagtttccgctgggagaatggcaacggcatgttgacgcaactcaaccgccagttcccgaccattagcctgttagatattggcgcgattttaaaacaggtcggtcaggtgctggagcaggtaagtcgggcgctggaggtgatggtggtgctggtcaccgcctgcggtatgttgctgttgctggcacaggtgcaggtgggaatgcgccagcgtcatcaggagctggtggtatggcgcacactcggtgcggggaaaaaactgctgcgcacgacattgtggtgtgagttcgccatgcttgggtttgtttccggcctggtggccgcaattggtgcggaaacggcactggcagtgttgcaggcgaaagtgtttgatttcccgtgggagccagactggcgattgtggattgttctgccgtgcagcggtgcgctgctgctgtcgcttttcggcggctggctgggtgcgcgactggttaagggtaaggcgctgttcaggcagtttgcggggtga

SEQ ID NO: 465817 - DNA, 819 bp, Shigella boydii
atgtgtcaggtatttggtgtatccaggagcggttattacaactgggtacagcatgaaccctcagacagaaaacaaagtgatgagcggctaaaactggagattaaggtggcacatatccgcactcgcgaaacatatggaacccggcggctccagacggagctggcagagaatggcatcatcgttggtcgtgaccgactggcacgtcttcgtaaggagctaaggctacgctgtaagcagaaacgcaagttcagagcgactacgaacccgaaccacaatctgccagttgcgccaaatctgctgaaccagacgttcgctcctacagcaccaaatcaggtctgggtggcggacctgacgtatgttgccacacaggagggatggttgtacctcgctggcatcaaagatgtttatacgtgcgaaattgtcggctacgccatgggagagcgcatgacaaaagagctgacaggtaaagccctgtttatggcgctcaggagccagcgcccacctgccgggctaatccaccactctgatcgaggttcacagtactgcgcatacgattaccgggtcatacaggagcagtctggtctgaaaacatcaatgtcgcgtaaaggtaactgttacgacaacgctccgatggaaagcttctggggaacgctgaaaaatgagagcctgagccactatcgttttaataaccgggatgaagccatctcagtaatacgggaatacattgagattttctacaatcgtcagcgtcgtcactctcgtctggggaatatctccccggcagccttcagggaaaaatatcatcagatggctgcttaa

SEQ ID NO: 465818 - DNA, 294 bp, Shigella boydii
gtggcgcacgtcttcggtgaacgcactctggccacactggagcgtcttctgagcctgctgtcggcctttgaggtcgtggtatggatgacggatggctggccgctgtatgaatcacgcctgaagggaaagctgcacattatcagcaagcgttacactcagcgcattgagcgacataatctgaatctgagacaacatctggcaaggctgggacggaagtcactgtcgttctcaaaatcggtggagctgcatgacaaggtcatcgggcattatctgaacataaaacactatcagtaa

SEQ ID NO: 465819 - DNA, 249 bp, Shigella boydii
atggctacatacggcggtcagtttacgcttactgacaacgcgatggcggagagcatcaatggtctttacaaagcggaggtaatacaccgtaagagctggaaaaaccgtgcagaagtggaactggccacactcacgtgggtggactggtataacaatcgacgattgctgggaaggctgggccatactcctccggcagaagcagaaaaagcttattatgcttccatcggaaacgatgatctggcagcctga

SEQ ID NO: 465820 - DNA, 510 bp, Shigella boydii
  misc_feature (479)..(488): n is a, c, g, or t
atgtctttggattccccgcaacgcttccacaaattctcaaaaaaatcaggcattaactatattgcatcgcaaaagctctcacaaaacaagattaataaatttaataattaccttttccgctggcagggcctggatggctcagaaattctgatgcataactttcctgaagacacgtatgatagccgagcacgtgctcgctctttagaatatattgaacaaaactataatgaaaaagagatctgtccctatgcgcttatggtgtatggtgtcggtgatggcggcgctggccccggtgaggaacatatagaacgattaacacgtatacgcaatattgatggcttacctcatgttgatttcagccgtgttgataagttcttcacttacgccgacgcctttcgcgaaagcttgcccattatttcaggtgaactttatttcgaggctcatcaagggtgctttacatcagagtcagcaactaaagnnnnnnnnnnttacatcagggtcagcaactaa

SEQ ID NO: 465821 - DNA, 468 bp, Shigella boydii; identical to SEQ ID NO: 465418

SEQ ID NO: 465822 - DNA, 216 bp, Shigella boydii; identical to SEQ ID NO: 5123

SEQ ID NO: 465823 - DNA, 384 bp, Shigella boydii; identical to SEQ ID NO: 464877

SEQ ID NO: 465824 - DNA, 213 bp, Shigella boydii; identical to SEQ ID NO: 462242

SEQ ID NO: 465825 - DNA, 225 bp, Shigella boydii; identical to SEQ ID NO: 462228

SEQ ID NO: 465826 - DNA, 378 bp, Shigella boydii; identical to SEQ ID NO: 460256

SEQ ID NO: 465827 - DNA, 1266 bp, Shigella boydii; identical to SEQ ID NO: 465455

SEQ ID NO: 465828 - DNA, 819 bp, Shigella boydii
atgtgtcaggtatttggtgtatccaggagcggttattacaactgggtacagcatgaaccctcagacagaaaacaaagtgatgagcggctaaaactggagattaaggtggcacatatccgcactcgcgaaacatatggaacccggcggctccagacggagctggcagagaatggcatcatcgttggtcgtgaccgactggcacgtcttcgtaaggagctaaggctacgctgtaagcagaaacgcaagttcagagcgactacgaacccgaaccacaatctgccagttgcgccaaatctgctgaaccagacgttcgctcctacagcaccaaatcaggtctgggtggcggacctgacgtatgttgccacacaggagggatggttgtacctcgctggcatcaaagatgtttatacgtgcgaaattgtcggctacgccatgggagagcgcatgacaaaagagctgacaggtaaagccctgtttatggcgctcaggagccagcgcccacctgccgggctaatccaccactctgatcgaggttcacagtactgcgcatacgattaccgggtcatacaggagcagtctggtctgaaaacatcaatgtcgcgtaaaggtcactgttacgacaacgctccgatggaaagcttctggggaacgctgaaaaatgagagcctgagccactatcgttttaataaccgggatgaagccatctcagtaatacgggaatacattgagattttctacaatcgtcagcgtcgtcactctcgtctggggaatatctccccggcagccttcagggaaaagtatcatcagatggctgcttaa

SEQ ID NO: 465829 - DNA, 225 bp, Shigella boydii; identical to SEQ ID NO: 462228

SEQ ID NO: 465830 - DNA, 600 bp, Shigella boydii
atgcgtaaattatgtgctgttattttgtccgcagtagtctggcaggtcgccgctgctacgccagcgagtgcagcagaacatcagtccacgctgagcgcggggtatctccatgcctcgacgaacgttcccggtagtgatgatctgaacgggattaacgtgaaataccgttatgagtttacggacgcgctggggctgattacgtccttcagttatgccaatgctgaggatgagcaaaaaacgcgctacagcgatacccgctggcatgaagattccgtgcgtaaccgctggttcagtgtgatggcggggccgtctgtacgcgtgaatgaatggttcagcgcgtatgcgatggcgggtgtggcttacagccgtgtgtcgactttctccggggattatctccgcgtaactgacaacaaggggaaaacgcacgacgtgctgaccggaagtgatgacggtcgccacagcaatacctctctggcgtggggggctggcgtgcagtttaacccgaccgaatccgtggccattgaccttgcttatgaaggttccggtagtggcgactggcgaacggatgcatttattgttggtatcggataccgtttctga

SEQ ID NO: 465831 - DNA, 210 bp, Shigella boydii; identical to SEQ ID NO: 9340

SEQ ID NO: 465832 - DNA, 1875 bp, Shigella boydii
atgtccggcagtgcttttgccgttacgcaccacgccttcagtagcggagcaggaaggacatctgatggaaatggaagccacgcaagcaccttaaaatcaccatcatacactaaatcagtaagttggcagcattacctaagtggccaattgacaattattggtattgtatacccccttgttataggtttagtaagtgtcttattcccaaaaaaggcagatagaaaaatagcccaaactgcttatcagcgttactcaggattcatgcttgctggactcagcgggcttttcttatcaggatttatacttctcagtgtactaattaaaactgtctttggaagttatctttatggtatagcttgtctaatcagcatattatggcttttgataaacatagttctttctatttggttctttatcgtgagtcttgaaattcttgatgatgtaaaacggcaaataattataaagcgatacattgccttcgaaatagtaatgccccatatttgtaacaaaatctcagccaagcttaggttataccctatctatcaaaaacataactattcaaatttagaaatcaagcaagccgattacaaaggagaatacatatctgtggctagcagttattctaaggaagatgagttaagtttatatcaccgtccttttcaacttactcttaatcttattaattaccaactaaaaaagaagaatcattttgcgtcatttgtcattggtgataatcgtacaaaagaaacagaatccacgggtaagatactttttagcgttaaaaatatcaaaccagacagcttattaataaaaatacttaagcaatgtttttatagggctccgattaaaggaggatatttttccgtaagtcttacaatgcaggctataacagcagatacgtatatgtatctgcgggattctgatctcattagttttgacaatgctatctctgcattaattaataactttaataatctctgcgatttgtatttttttcaagatgataataccaacaataacttcttactgatcactacagaattatttgaacggagttttcaatatgagttttcagatgaagtttataaaatatcaaataattccatggataaaattaatctttctgaaagattttttgatttatgtctttggagcggagtgcgtattatcaataatagaaaacatcttatcagcaatgaactttgtatctatatgggaattactcgttcacaatggtcaatattaacagaatggttccgaaacaaccaatcactcttaaatgcctcgcttcgttcacgttataatcgtatattaagaacctataccactgtttgggagcaatatcaagaaagcataaactttcgtttctgcaatacagagaattcagatttatttgaattattttgcaaaacgcaactacaagaacttccatcgatgattattgatgcaacacagactcgcgatccttctactattgatacagccgtcgatcttattaaccgatggcagcactcaatgaatattgacagccattcggtagaaaaatacagttacaaaggccagctttttaacccggtttttttcatatccaaaaaactaaacttcaattcagacagagagtggttcaatattgccatcataaatgcgttgactgacatgcgtatatgcacatgtctttatctgacatcaagaatcaatacttctgacaaactaatgacacattacattaaacttattttagagggtaaacttattgaccaaaccggtggatatgaaactcccactgaagaaattgataatgcaagccaactaatcaagatattaattagaatctgcctgtggacatggtctgaaaatatggagcacaatgggtag

SEQ ID NO: 465833 - DNA, 1071 bp, Shigella boydii
atggctaacgcctggctcagattatggcatgacatgccaaatgaccctaagtggcgaacaattgccagggtgtcagggcagccaattgcaacagtgatggcagtgtatatccacctcctggtgagcgcgtcacgaaatgtcacgcgaggtcacattgatgtcacgacagaagatttggcaagtgcgctcgacgtgacagaagaggtaattgattcaattttgcagacgatgcaggggcgggtacttgatggtgatttaatcactggatgggaaaaacgccaggtgctgaaagaggacaacggcaatattccgcaaaccgcaaaatctcctgcagagcgcaagagggcgcagcgagagagggaaagaaagcgggaacaaaatggcgattgtcacggcgcgtcacgatatgtcacgcacatgtcacgacgagtcacgacagataaagatacagataaagatacagatcaagaagatcaaaacactatggtccatggcgtaaaaaacgccacgaaccaggcaggggatgttcagaccgtcaatcctggtcagccagcaggcacgacaccggaagccgattcagcgtatgcgctgaaagccgattcgggcgctgtgcagcaggtgatgaccgcaagtccggagcaatcacaccaactgcagcagcctgaagccgattccgccattcagcgggaagccgatcgggtagtcccggaaaacaccgggcagtctgtgggacgagtggattatccggatgtgttcgaacaggtctggcgggagtacccgttgcgtgccggggcaaacccgaagaaatccgctttcagtgcctggaaggccagattacgcgagggggtgccaccagaggccatgctggatggcgtgaggcgttacgcaagatacctggcggctaccgggaaaacgggaacggaatttgttcagcgagcgacgacgttttttggaccggaccggaattttgagaacccctggttgctcccggtaagcggcacgaacaaccagcgttgtgtgaatcatatttctgaaccggatagcgaaattccgccgggcttcagggggtaa

SEQ ID NO: 465834 - DNA, 600 bp, Shigella boydii
atgcgtaaagtttgtgcagccattttgtccgcagccatctgtctggctgtatccggtgcgcctgcatgggcgtctgaacatcagtccacgctgagcgccgggtatcttcatgcccgtacgaacgctccaggcagcgatgacctgaagggcattaacgtgaaataccgttatgagtttacggacacgctggggctggtgacgtcattcagctatgccaacgccaaagatgagcaaaaaacgcattacagcgatacccgctggcatgaggattccgtgcgtaaccgctggttcagcgtgatggcggggccgtctgtgcgcgtgaatgaatggttcagcgcgtatgcgatggcgggcgtggcttacagccgtgtgtcgaccttctccggggattatctccgcgtaactgacaacaaggggaaaacgcacgacgtgctgaccggaagtgatgacggtcgccacagcaatacctctctggcgtggggggctggcgtgcagtttaacccgaccgaatccgtggccattgaccttgcttatgaaggttccggcagtggcgactggcgcactgacggtttcatcgtgggtgtcggttataagttctga

SEQ ID NO: 465835 - DNA, 303 bp, Shigella boydii; identical to SEQ ID NO: 461506

SEQ ID NO: 465836 - DNA, 132 bp, Shigella boydii; identical to SEQ ID NO: 465690

SEQ ID NO: 465837 - DNA, 390 bp, Shigella boydii
gtgtcagatatgcagaaaaatgtgaatcccggcaggcgaaaaggctgccctaattatcctcccgaatttaaacagcagctcgttgctgcctcctgtgaacccgggatatccatctcaaaacttgctcttgaaaatggcattaacgccaatctgttgttcaaatggcgacaacaatggcgcgagggaaagctgctattaccttcttcagagagcccccagctacttcctgtgactctcgatgcagctgccgaacagccagaatcgctcgcagaggatccggaaaccctcagtatcagctgtgaggtaacgttccggcacgggacgctccgcttcaatggcaatgtcagcgaaaagctcctgactctgctgatacaggaactgaagcgatga

SEQ ID NO: 465838 - DNA, 192 bp, Shigella boydii; identical to SEQ ID NO: 464451

SEQ ID NO: 465839 - DNA, 819 bp, Shigella boydii; identical to SEQ ID NO: 463221

SEQ ID NO: 465840 - DNA, 696 bp, Shigella boydii; identical to SEQ ID NO: 465615

SEQ ID NO: 465841 - DNA, 381 bp, Shigella boydii; identical to SEQ ID NO: 463673

SEQ ID NO: 465842 - DNA, 819 bp, Shigella boydii; identical to SEQ ID NO: 463221

SEQ ID NO: 465843 - DNA, 1140 bp, Shigella boydii
atgctgagtattaacgggaaaagcgtcagcattgaagtgaattttaacggtgtcgccagcttcgccgctgctgcaacggcactacagacagcgctgaccgcagcagtggctacagtggtattcgataccacacagaatgcttttgtcattactgtcgccggggcgaaacccgggagtaccacgataacgttcggcagtggatcggcagcagaactcctgaagatgaccagtaacaccggtgcggtgatatcccggggcgcgcctgtatctgatgtccctgacacaatggcagccattaaggccgcttcccagcaatgggcgggtttttccacggtatctgaggtcactgacgagcaacacctggcgttttctgcatgggcaaacgggcagggcaagcgttacttttatgtggcatggacaaccagcggcaacgccagagtaaaaggcagtactgaacacatcgcttaccagataattgctgtcaataactacagctctgttgtacctgttttcgcgactgatggtaaccgggctgcagcggtactggggtatgcagcgtgccttgattttatccgaccagaggggcgtgtatcattcaagttccgcgagtatgaggggctggccgctgatgttaccagtggcagcgattatgatgcgctgatcgccgcaggttacaatttctacggaaaatatgcggaaaacagtgtggtggaagattactgggcggatggcactattaccggtgattttaaatggctggacagtttctgcgggcaaatctggctgaatgccagtttgcagggggcggtgatcgcattattcaagtcaaaccagacggtcccctacaacaatgaagggcgggcgctggttgcagcgtcaatgagtgacgttatccagcagtacaaacgctggggagggatccgtgaaggggtgacactgacggaggcgcagaagaaacagattaacaatgttgtggaggcagatgtttcttcaacgttgtttgccaccggctattacctgtatatcggcgatatgcttccctctttgcgggcaacccgtagcagtccgtcctgtacgctctggtactgtgacggcggtagtatccagaaacttgttattgcatccacggaggtccagtaa

SEQ ID NO: 465844 - DNA, 819 bp, Shigella boydii
atgtgtcaggtatttggtgtatccaggagcggttattacaactgggtacagcatgaaccctcagacagaaaacaaagtgatgagcggctaaaactggagattaaggtggcacatatccgcactcgcgaaacatatggaacccggcggctccagacggagctggcagagaatggcatcatcgttggtcgtgaccgactggcacgtcttcgtaaggagctaaggctacgctgtaagcagaaacgcaagttcagagcgactacgaacccgaaccacaatctgccagttgcgccaaatctgctgaaccagacgttcgctcctacagcaccaaatcaggtctgggtggcagacctgacgtatgttgccacacaggagggatggttgtacctcgctggcatcaaagatgtttatacgtgcgaaattgtcggctacgccatgggagagcgcatgacaaaagagctgacaggtaaagccctgtttatggcgctcaggagccagcgcccacctgccgggctaatccaccactctgatcgaggttcacagtactgcgcatacgattaccgggtcatacaggagcagtctggtctgaaaacatcaatgtcgcgtaaaggtcactgttacggcaacgctccgatggaaagcttctggggaacgctgaaaaatgagagcctgagccactatcgttttaataaccgggatgaagccatctcagtaatacgggaatacattgagattttctacaatcgtcagcgtcgtcactctcgtctggggaatatctccccggcagccttcagggaaaaatatcatcagatggctgcttaa

SEQ ID NO: 465845 - DNA, 213 bp, Shigella boydii; identical to SEQ ID NO: 462242

SEQ ID NO: 465846 - DNA, 210 bp, Shigella boydii; identical to SEQ ID NO: 463045

SEQ ID NO: 465847 - DNA, 225 bp, Shigella boydii; identical to SEQ ID NO: 462228

SEQ ID NO: 465848 - DNA, 294 bp, Shigella boydii; identical to SEQ ID NO: 460208

SEQ ID NO: 465849 - DNA, 546 bp, Shigella boydii; identical to SEQ ID NO: 463588

SEQ ID NO: 465850 - DNA, 819 bp, Shigella boydii
atgtgtcaggtatttggtgtatccaggagcggttattacaactgggtacagcatgaaccctcagacagaaaacaaagtgatgagcggctaaaactggagattaaggtggcacatatccgcactcgcgaaacatatggaacccggcggctccagacggagctggcagagaatggcatcatcgttggtcgtgaccgactggcacgtcttcgtaaggagctaaggctacgctgtaagcagaaacgcaagttcagagcgactacgaacccgaaccacaatctgccagttgcgccaaatctgctgaaccagacgttcgctcctacagcaccaaatcaggtctgggtggcggacctgacgtatgttgccactcaggagggatggttgtacctcgctggcatcaaagatgtttatacgtgcgaaattgtcggctacgccatgggagagcgcatgacaaaagagctgacaggtaaagccctgtttatggcgctcaggagccagcgcccacctgccgggctaatccaccactctgatcgaggttcacagtactgcgcatacgattaccgggtcatacaggagcagtctggtctgaaaacatcaatgtcgcgtaaaggtcactgttacgacaacgctccgatggaaagcttctggggaacgctgaaaaatgagagcctgagccactatcgttttaataaccgggatgaagccatctcagtaatacgggaatacattgagattttctacaatcgtcagcgtcgtcactctcgtctggggaatatctccccggcagccttcagggaaaaatatcatcagatggctgcttaa

SEQ ID NO: 465851 - DNA, 378 bp, Shigella boydii; identical to SEQ ID NO: 460256

SEQ ID NO: 465852 - DNA, 780 bp, Shigella boydii; identical to SEQ ID NO: 464942

SEQ ID NO: 465853 - DNA, 294 bp, Shigella boydii; identical to SEQ ID NO: 465586

SEQ ID NO: 465854 - DNA, 582 bp, Shigella boydii; identical to SEQ ID NO: 464941

SEQ ID NO: 465855 - DNA, 216 bp, Shigella boydii; identical to SEQ ID NO: 7765

SEQ ID NO: 465856 - DNA, 180 bp, Shigella boydii; identical to SEQ ID NO: 461173

SEQ ID NO: 465857 - DNA, 147 bp, Shigella boydii
atgccggaactggaagaactggcggcagcaatggtgcaggcgcaggtcgatcgcaacgatgagatttatcgccgtcagcgtgaaatgaaagaggagctgagcggtctggatgatttggcttcaattcgggcgtttgacgttgagtaa

SEQ ID NO: 465858 - DNA, 321 bp, Shigella boydii
atgctgccgcagcatagcgatattgaaatagcctggtatgcttcgatacagcaggagccgaatggctggaagaccgccaccacacagttctacatccaggaattcagtgagtatattgcgccactgcaggatgctgtagatctggaaatcgcaacggaggaagaaagatcgttgctggaggcatggaataaatatcgggtattgttgaatcgtgttgatacatcaactgcaccgatattgagtggcctgcaaatcctgtcagggagtaatcattgggattatgccgcagacacgtcgtatgcaggaacgtgctgcggttag

SEQ ID NO: 465859 - DNA, 267 bp, Shigella boydii
atggcgacgctggggcgtcttatgagcttgctgtcaccctttgaagtggtgatatggatgacggatggctggccactgtatgaatcccgcctgaagggaaagctgcacgtaatcagcaagcgatatacgcagcgaattgagcggcataacctgaatctgaggcagcacctggcacggctgggacggaagtcgctgtcgttctcaaaatcggtggagctgcatgacaaggtcatcgggcattatctgaacataaaacactatcagtaa

SEQ ID NO: 465860 - DNA, 819 bp, Shigella boydii; identical to SEQ ID NO: 463221

SEQ ID NO: 465861 - DNA, 225 bp, Shigella boydii
atgtcgcgtaaaggtcactgttacgacaacgctccgatggaaagcttctggggaacgctgaaaaatgagagcctgagccactatcgttttaataaccgggatgaagccatctcagtaatacgggaatacattgagattttctacaatcgtcagcgtcgtcactctcgtctggggaatatctccccggcagccttcagggaaaaatataatcagatggctgcttaa

SEQ ID NO: 465862 - DNA, 195 bp, Shigella boydii; identical to SEQ ID NO: 465743

SEQ ID NO: 465863 - DNA, 828 bp, Shigella boydii
gtgctgactgacggtaagctccatgctgatgacacgcctgtcccggtgctgttgccaggcaataagaaaacgaagaccgggcggttatggacctacgttcgtgacgaccgtaacgccgggtcaacgctggcgccggcggtgtggttcgcttacagcccggacagaaaaggcatccatccgcagacccatcttgcggggttcagtggtgtactgcaggcggatgcatacgccgggttcaacgagctgtaccgggatggccggataacggaagccgcctgttgggctcacgcccgccgtaaaatccacgatgtgcacgttcgcaccccgtcagccctgacggaggaagcgctgaaacggatcggcgaactgtacgccatcgaggcagagataaggggaatgacggcggagcagcgccttgccgaacgtcagttgaaaacgaaaccgctgctgaaatccctggaaagctggctgcgtgaaaagatgaaaaccctgtcgcgacactcagaactggcgaaagcgttcgcatacgccctgaaccagtggccggcgctgacgtactatgcagatgatggctgggctgaggcggacaataacatcgctgaaaatgcgttgcggatggtcagtctgggccgcaaaaactacctgttcttcggttcggatcatggaggagagcggggagcgctgctgtacagcctgatcgggacgtgcaaactgaacggagtggagccagaaagctacctccgctatgtacttgacgtcatagccgactggccgataaaccgggtcggcgaactgctcccctggcgcgtagcactgccgactgaataa

SEQ ID NO: 465864 - DNA, 267 bp, Shigella boydii; identical to SEQ ID NO: 464426

SEQ ID NO: 465865 - DNA, 381 bp, Shigella boydii; identical to SEQ ID NO: 463673

SEQ ID NO: 465866 - DNA, 378 bp, Shigella boydii; identical to SEQ ID NO: 461419

SEQ ID NO: 465867 - DNA, 195 bp, Shigella boydii
atgattaaaatcctgtgggctgatgctgatggtctgtgcctgttcaccagacgcctggaggaaggccagtttatctggcctgctgtgcgtgacggcaaggtatccattacccgctcgcaactggcaatgctcctcgataagctggactggcgtcagccaaaaacatcccgccttaacgcactgacaatgttgtaa

SEQ ID NO: 465868 - DNA, 381 bp, Shigella boydii; identical to SEQ ID NO: 463673

SEQ ID NO: 465869 - DNA, 381 bp, Shigella boydii; identical to SEQ ID NO: 463673

SEQ ID NO: 465870 - DNA, 381 bp, Shigella boydii
atgcagaaaaatgtgaatcccggcaggcgaaaaggctgccctaattatcctcccgaatttaaacagcagctcgttgctgcctcctgtgaacccgggatatccatctcaaaacttgctcttgaaaatggcattaacgccaatctgttgttcaaatggcgacaacaatggcgcgagggaaagctgctattaccttcttcagagagcccccagctacttcctgtgactctcgatgcagctgccgaacagccagaatcgctcgcagaggatccggaaaccctcagtatcagctgtgaggtaacgttccggcacgggacgctccgctttaatggcaatgtcagcgaaaagctcctgactctgctgatacaggaactgaagcgatga

SEQ ID NO: 465871 - DNA, 381 bp, Shigella boydii; identical to SEQ ID NO: 463673

SEQ ID NO: 465872 - DNA, 342 bp, Shigella boydii; identical to SEQ ID NO: 463479

SEQ ID NO: 465873 - DNA, 195 bp, Shigella boydii; identical to SEQ ID NO: 465867

SEQ ID NO: 465874 - DNA, 309 bp, Shigella boydii; identical to SEQ ID NO: 465008

SEQ ID NO: 465875 - DNA, 327 bp, Shigella boydii; identical to SEQ ID NO: 462700

SEQ ID NO: 465876 - DNA, 429 bp, Shigella boydii; identical to SEQ ID NO: 465642

SEQ ID NO: 465877 - DNA, 225 bp, Shigella boydii; identical to SEQ ID NO: 133446

SEQ ID NO: 465878 - DNA, 231 bp, Shigella boydii; identical to SEQ ID NO: 465010

SEQ ID NO: 465879 - DNA, 201 bp, Shigella boydii
atggctgaagcgcaaaatgatcccctgctgccgggatactcgtttaatgcccatctggtggcgggtttaacgccgattgaggccaacggttatctcgatttttttatcgaccgaccgctgggaatgaaaggttatattctcaatctcaccattcgcggtcagggggtggtgaaaaatcagggacgagaatttgtttgctga

SEQ ID NO: 465880 - DNA, 378 bp, Shigella boydii
atggacgaacagtggggctacgtcggtgctaaatcacgtcagcgctggctgttttacgcgtatgacaggatacggaggacggttgtggcgcacgtcttcggtgaacgcactctggccacactggagcgtcttctgagcctgctgtcggcctttgaggtcgtggtatggatgacggatggctggccgctgtatgaatcacgcctgaagggaaagctgcacgttatcagcaagcgttacactcagcgcattgagcgacataatctgaatctgagacaacatctggcaaggctgggacggaagtcactgtcgttctcaaaatcggtggagctgcatgacaaggtcatcgggcattatctgaacataaaacactatcagtaa

SEQ ID NO: 465881 - DNA, 420 bp, Shigella boydii
atgcaggatcactacaatctgatttatcgcgaagaagagcgcgagatgctgccactgtgttatcaggagggcgtggcggtgattccggcgcgggggcgactgacgcgtccgtggggagaaactaccgcacgactggtgtctgatgaggtggggaaaaatctctataaagaaagcgatgaaaatgacgcgcagatcgcagagcggttaacgggcgtcagtgaagaactcggtgcaacacgagcacaagttgcgctggcttggttgttgagtaaaccgggcattgccgcaccgattatcggtacatcgcgggaagaacagcttgatgagctattgaacgcggtggatatcactttgaagccggaacagattgccgaactggaaacgccgtataaaccgcatccggtagtaggatttaaataa

SEQ ID NO: 465882 - DNA, 570 bp, Shigella boydii
atgtctggagacatcctacaaacaccggacgcaccaaagccacagggcgcgctggataattattttaaaattaccgctcgtggcagtaccgttcgtcaggaagtactggctggcttaacgacctttctggccatggtttattccgttatcgtcgttccgggaatgctgggcaaagcaggttttcctcccgcagctgtgtttgttgccacctgtctggtcgcgggcttcggctcgttgctgatgggattatgggccaatttgccaatggcgattggttgcgcgatttccttgacggcgtttaccgcattcagtctggtactcgggcaacaaattagcgttcctgtcgcactgggcgcggtatttctgatgggcgtcatcttcaccgccatttccgtaaccggtgtgcgtacctggatcttacgtaatttgccgatgggtatcgctcatggtacaggtatcggtattggcctgtttctgctgctgattgctgctaacggtgtgggtatggttatcaaaaacccgattgaaggcttgccagtggcgctcggtgcgtttactccttcccggtga

SEQ ID NO: 465883 - DNA, 279 bp, Shigella boydii; identical to SEQ ID NO: 464808

SEQ ID NO: 465884 - DNA, 378 bp, Shigella boydii; identical to SEQ ID NO: 465880

SEQ ID NO: 465885 - DNA, 369 bp, Shigella boydii; identical to SEQ ID NO: 465353

SEQ ID NO: 465886 - DNA, 378 bp, Shigella boydii; identical to SEQ ID NO: 465880

SEQ ID NO: 465887 - DNA, 378 bp, Shigella boydii; identical to SEQ ID NO: 460256

SEQ ID NO: 465888 - DNA, 378 bp, Shigella boydii; identical to SEQ ID NO: 465880

SEQ ID NO: 465889 - DNA, 378 bp, Shigella boydii; identical to SEQ ID NO: 465880

SEQ ID NO: 465890 - DNA, 378 bp, Shigella boydii; identical to SEQ ID NO: 460256

SEQ ID NO: 465891 - DNA, 378 bp, Shigella boydii; identical to SEQ ID NO: 465880

SEQ ID NO: 465892 - DNA, 318 bp, Shigella boydii
ttggagtcattacctgattcattcagccataaagaacttggcgtaaccgtcggaggcctgaacaccgataccataaacagcgcggttaacgggcgttgggatgggcaatacggaaatgtctacgctaccgtatctgatagttatgaccgtaagaatcatgatcatctttcggcctttacgggcacttatagctctacgctggctgtcagtcgctatggcgttaatttgggagccagtggtacagacgatttgctgggtgcggtattggtggatgtgaaaggcttctctgaacaggatgaagagagtcaggatctgtaa

SEQ ID NO: 465893 - DNA, 147 bp, Shigella boydii
atgactaagagcaccacgatgatgagtatcttcatcatgaccctttccttatttaagaccccttcctcgggaggggctttcccgtttcagcatcccgctgaaatcgtcggcttacctcctttcgccaagcatgcagtctatcgctaa

SEQ ID NO: 465894 - DNA, 381 bp, Shigella boydii; identical to SEQ ID NO: 458155

SEQ ID NO: 465895 - DNA, 378 bp, Shigella boydii
atggacgaacagtggggctacgtcggtgctaaatcacgtcagcgctggctgttttacgcgtatgacaggatacggaggacggttgtggcgcacgtcttcggtgaacgcactctggccacactggagcgtcttctgagcctgctgtcggcctttgaggtcgtgatatggatgacggatggctggccgctgtatgaatcacgcctgaagggaaagctgcacgttatcagcaagcgttacactcagcgcattgagcgacataatctgaatctgagacaacatctggcaaggctgggacggaagtcactgtcgttctcaaaatcggtggagctgcatgacaaggtcatcgggcattatctgaacataaaacactatcagtaa

SEQ ID NO: 465896 - DNA, 378 bp, Shigella boydii; identical to SEQ ID NO: 460256

SEQ ID NO: 465897 - DNA, 378 bp, Shigella boydii; identical to SEQ ID NO: 460256

SEQ ID NO: 465898 - DNA, 378 bp, Shigella boydii; identical to SEQ ID NO: 465880

SEQ ID NO: 465899 - DNA, 378 bp, Shigella boydii; identical to SEQ ID NO: 460256

SEQ ID NO: 465900 - DNA, 624 bp, Shigella boydii
atgaagttttttaataataatgatgttcttattctttcacaaatagatgaattctccaaaatggcagaaagagtagattcggagttctacaagtccaagcctgtttttgcttggaataaagtttatcgacgttctcttttcgacaatgaagtatttcctaagggatggtattatgaagatgttgcattaattccgttattattagatagagcaaaagttttataccatattaatagcgtttgttatttttacagacagagacaaggagcaatcacttttttttatgacaataaatatcttgatattttaaaaggagtgtcttttttatatgacaggtcacaatcttcattcattaaaacgataattataaatcagttttttactttaaccttactatctttaagattgccgactgataattatttcatgaatatgagggggattattgatacctattgtgaaaaatttgacttggattcctttgagcctaaactaatattaaaacacattccttttttattgcttaaaaaattgaagtcgctgtgtgtttatccactgtatttatttaaacctgcagtttttttacataaacaaattaaacattttagaggaaaactaaagtga

SEQ ID NO: 465901 - DNA, 378 bp, Shigella boydii; identical to SEQ ID NO: 465880

SEQ ID NO: 465902 - DNA, 378 bp, Shigella boydii; identical to SEQ ID NO: 465880

SEQ ID NO: 465903 - DNA, 546 bp, Shigella boydii
atgtccagaatcaataagttcgtacttacagtcagtctgctgatttttatcatgatttcagcagttgcctgcgggatctacactcaaatggtaaaggaacgggtgtatagcctgaaacagtccgttattgatactgcttttgcggtggcaaatattgctgaatatcggcgtagcgtggcaattgatcttatcaacacgctaaatcccacggaggaacagctgttggttggtttgcgcacagcttacgccgactcggtttccccctcttatttgtacgatgtcggtccttatctgatttccagtgacgaatgtattcatgtaaaggagttcgagaaaaattattgtgcagatattatgcaggttgtgaagtatcgacatgtcaaaaatacagggtttatctcttttgacggtaaaaccttcgtctattacctctatccggtaactcacaatcgtagtctgatatttttgcttggtctggagcgtttttctttactgtcaaaatcgctggcgatggacagcgagaacctgatgttctctctattttag

SEQ ID NO: 465904 - DNA, 378 bp, Shigella boydii
atggacgaacagtggggctacgtcggtgctaaatcacgtcagcgctggctgttttacgcgtatgacaggatacggaggacggttgtggcgcacgtcttcggtgaacgcactctgaccacactggagcgtcttctgagcctgctgtcggcctttgaggtcgtggtatggatgacggatggctggccgctgtatgaatcacgcctgaagggaaagctgcacgttatcagcaagcgttacactcagcgcattgagcgacataatctgaatctgagacaacatctggcaaggctgggacggaagtcactgtcgttctcaaaatcggtggagctgcatgacaaggtcatcgggcattatctgaacataaaacactatcagtaa

SEQ ID NO: 465905 - DNA, 1521 bp, Shigella boydii
atgagcaaacaatcacagcatgtattaattgccctgccccacccgctgcttcacctggtcagtttaggtttagtctcgtttatctttacccttttctcgcttgagctttcgcagtttggcacccaactcgccccactgtggttcccgacatccatcatgatggtggcgttttatcgccatgccgggcgcatgtggccgggaattgcgctaagctgttcgctgggaaatatcgccgcatccatcctgcttttttccaccagctcgctgaacatgacctggacgaccatcaatattgttgaagccgtggtcggggcagtgctgctacgtaaattgctgccgtggtataaccccttgcaaaatctggctgactggctgcgtctggcactcggcagcgccattgttccacctctgttggggggtgttctggttgtcctgctgacgcccggagacgatcctctcagggcatttttgatatgggtactgtcagaatccatcggcgctctggcactggtgccgctgggattgttatttaaaccacactatctgctgcgccatcgcaacccacggttgctttttgagtcgctgctcacgttagccatcacactgacgttaagctggctttcgatgctgtatctgccgtggccttttactttcattattgtgctgttgatgtggagcgccgtgcgtctgccacgaatggaagcctttttgatcttccttaccacggtgatgatggtgtcgctgatgatggccgcggatccctccctgcttgctacgccgcgtacgtacctgatgagccatatgccgtggctaccatttttgctgatcctgctgcccgccaacatcatgaccatggtgatgtatgcctttcgtgcggaacgcaaacacatttccgaaagcgaaatccactttcggaacgcgatggaatattccgctatcggtatggcgttagtgggcaccgagggacaatggctgcaaaccaacaaagcgctctgccagtttctcgggtacagtcaggaagagctgcgcggactcacctttcagcaactgacctggccggaggatctcaataaagatctccaacaggttgaaaagctgataagcggtgaaataaacacctattcaatggaaaaacgctactacaaccgcaatggcgatgttgtctgggcgttgcttgccgtctcactggtgcgccacacggatggcacgccgctctattttatcgctcagattgaagacattaacgagctaaaacgcaccgaacaggtcaatcagcaactgatggagcgcatcactctggctaacgaagcgggcgggattggcatctgggagtgggagttgaagccgaatatttttagctgggataagcggatgttcgagctgtatgaaattcctccacatatcaaaccgaactggcaggtgtggtacgagtgcgtgctgccggaagatcgccagcatgccgaaaaagtgattcgttgcaatcacgctcgccctttaaactggaatttcgcattaccgtaa

SEQ ID NO: 465906 - DNA, 378 bp, Shigella boydii; identical to SEQ ID NO: 465895

SEQ ID NO: 465907 - DNA, 378 bp, Shigella boydii; identical to SEQ ID NO: 465880

SEQ ID NO: 465908 - DNA, 381 bp, Shigella boydii
atgcggggagcggtggaacgccgcttcggcaacgatcttccgtcgtctccagtggagtggctgacggataatggttcatgctaccgggctaatgaaacacgtcagttcgcccggatgttgggacttgaaccgaagaacacggcggtgcggagtccggagagtaacggaatagcagagagcttcgtgaaaacgataaagcgtgactacatcagtatcatgcccaaaccagacgggttaacggcagcaaagaaccttgcagaggcgttcgagcattataacgaatggcatccgcatagtgcgctgggttatcgctcgccacgggaatatctgcggcagcgggcttgtaatgggttaagtgataacagatgtctggaaatatag

SEQ ID NO: 465909 - DNA, 378 bp, Shigella boydii; identical to SEQ ID NO: 460256

SEQ ID NO: 465910 - DNA, 378 bp, Shigella boydii; identical to SEQ ID NO: 465880

SEQ ID NO: 465911 - DNA, 378 bp, Shigella boydii; identical to SEQ ID NO: 465880

SEQ ID NO: 465912 - DNA, 378 bp, Shigella boydii; identical to SEQ ID NO: 465880

SEQ ID NO: 465913 - DNA, 378 bp, Shigella boydii
atggacgaacagtggggatacgtcggggctaaatcgcgccagcgctggctgttttacgcgtatgacaggctccggaagacggttgttgcgcacgtattcgttgaacgcactatggcgacgctggggcgtcttatgagcttgctgtcaccctttgacgtggtgatatggatgacggatggctggccactgtatgaatcccgcctgaagggaaagctgcacgtaatcagcaagcgatatacgcagcgaattgagcggcataacctgaatctgaggcagcacctggcacggctgggacggaagtcgctgtcgttctcaaaatcggtggagctgcatgacaaagtcatcgggcattatctgaacataaaacactatcaataa

SEQ ID NO: 465914 - DNA, 291 bp, Shigella boydii
atgaggatcatcgataacttagaacagttccgccagatttacgcctctagcaagaagtggcaacgctgtgttgaagcgattgaaaatatcgacaacattcagcctggcgtcgcccactccatcggtgactcattgacttaccgcgtggagacagactccgcgaccgatgcgctatttaccgggcatcgacgctattttgaagtgcattacggtaatgactccaacttattgatagtgttttatgttcagataatgcccgatgactttgtcatgcagctccaccgattttga

SEQ ID NO: 465915 - DNA, 522 bp, Shigella boydii
atgaaagttgcaatattaactcaaccattacatacgaattatggtggcacattacaagcctatgcattacaaaaagtcttgattaatttgggacatgaaccagagactattaattataggtcgaaaattaagaggccactatttatccgtgttgtgttgtcaaaaattaaaaggatagtattatgccgaaaaatcacatttgattttacaacacaagatagaattaatattaggacgcatcatcaatctttcattgatacaagattaaactattcagaggagattaacggtactgaggggttgagagattatattttaaaaaataattacggtgctgtaataataggtagtgatcagacatggagaccaatatattcgcctagaatagattttttggtactgataaatgggagttcacggagtcacaaactaatttatttaaattgttactttcaaaatttgactatgtttcagttagagagtcctcaggagtcaaattatgtagtgaaaaatttggtttga

SEQ ID NO: 465916 - DNA, 378 bp, Shigella boydii; identical to SEQ ID NO: 465880

SEQ ID NO: 465917 - DNA, 369 bp, Shigella boydii; identical to SEQ ID NO: 465353

SEQ ID NO: 465918 - DNA, 378 bp, Shigella boydii; identical to SEQ ID NO: 465880

SEQ ID NO: 465919 - DNA, 378 bp, Shigella boydii; identical to SEQ ID NO: 465880

SEQ ID NO: 465920 - DNA, 378 bp, Shigella boydii
atggacgaacagtggggctacgtcggtgctaaatcacgtcagcgctggctgttttacgcgtatgacaggatacggaggacggttgtggcgcacgtcttcggtgaacgcactctggccacactggagcgtcttctgagcctgctgtcggcctttgaggtcgtggtatggatgacggatggctggccgctgtatgaatcacgcctgaagggaaagctgcacgttatcagcaagcgttacactcagcgcattgagcgacataatctgaatctgagacaacatctggcaaggctgggacggaagtcactgtcgttctcaaaatcggtggagttgcatgacaaggtcatcgggcattatctgaacataaaacactatcagtaa

SEQ ID NO: 465921 - DNA, 378 bp, Shigella boydii; identical to SEQ ID NO: 465904

SEQ ID NO: 465922 - DNA, 378 bp, Shigella boydii; identical to SEQ ID NO: 460256

SEQ ID NO: 465923 - DNA, 378 bp, Shigella boydii; identical to SEQ ID NO: 465880

SEQ ID NO: 465924 - DNA, 378 bp, Shigella boydii; identical to SEQ ID NO: 465880

SEQ ID NO: 465925 - DNA, 378 bp, Shigella boydii; identical to SEQ ID NO: 465880

SEQ ID NO: 465926 - DNA, 240 bp, Shigella boydii; identical to SEQ ID NO: 464629

SEQ ID NO: 465927 - DNA, 378 bp, Shigella boydii; identical to SEQ ID NO: 465904

SEQ ID NO: 465928 - DNA, 378 bp, Shigella boydii; identical to SEQ ID NO: 465904

SEQ ID NO: 465929 - DNA, 696 bp, Shigella boydii; identical to SEQ ID NO: 465667

SEQ ID NO: 465930 - DNA, 378 bp, Shigella boydii; identical to SEQ ID NO: 465920

SEQ ID NO: 465931 - DNA, 294 bp, Shigella boydii; identical to SEQ ID NO: 25632

SEQ ID NO: 465932 - DNA, 303 bp, Shigella boydii; identical to SEQ ID NO: 459543

SEQ ID NO: 465933 - DNA, 1263 bp, Shigella boydii
atggctgacagcagcgggcagcatcaggatgagggtagcacatttactaaaacgggggcgggtacgctggagctgaccgccagcggtacaacgcagtcggcagtacgtgtcgaagaaggcaccctgaaaggcgatgttgcggatatctttccttatgcttcgtcactgtgggtcggtgatggggcgacgttcgttactggcgcggatcaggatattcagtctatcgatgctacttccagcggcactatcgatatcagcgatggtacggttttgcgtctgaccgggcaggatacttccgtcgcccttaatgcctcattgtttaacggcgatgggacgctggtgaatgctaccgatggcgtgacgttgacaggtgagcttaataccaaccttgaaactgacagcctgacctatcttgccgacgtgacggttaatggtgatctgaccaatacgtccggtgcggttagcctgcaaaatggcgtcgctggcgatacgctaacggtaaacggtgattataccggcggcggtacgctactgttcgacagcgaattaaacggcgatgactcggtaagcgatcaattggtgatgaacggtaatactgctggcaacacaactgtggtggttaactccattacagggattggtgagccgacatcgacaggcattaaagtggttgatttcgcagctgatcccacgcagtttcaaaacaatgcacagttcagtctggctggcagtggctacgtcaacatgggagcatatgactacacgctagtggaagataacaacgactggtatctgcgatcgcaagaagtaacgccgccatcgccacctgatccagacccggacccaacacccgatcctgacccaacacccgatccaatccccgcttaccagccggtgctgaatgccaaagttggcggttatctcaataacctgcgggcggcaaatcaggcgtttatgatggagcgacgcgatcacgctggtggcgatggtcagacgctgaatttacgtgttatcggcggacgttatcattacacggcggcagggcaactggctcagcaggaagacacttctacggtgcagcttagcggcggcttgtttagcgggcgctggggcacggatggcgagtggatgcttggggcggttggtggctacagtgataatcagggcgacagccgctcgaatatgaccggaactcgcgccgataaccagaaccacggttatgccgttgggctgacctcaagctggtatcagcacggtaattag

SEQ ID NO: 465934 - DNA, 306 bp, Shigella boydii
atgaaaagcaaagtactggcacttttaattcctgccctgctcgccgcaggtgctgcacatgcagccgaagtttataataaagacggcaacaaattagatctgtatggcaaagttgatggcctgcattatttttctgataattcagcgaaagatggcgatcagagctatgcgcgtctgggttttaaaggcgaaacccaaattaacgatcaactcactggctacggtcaatgggaatacatattcaggcaaacaacactgaatcttcaaaaaaccagtcatggacccgtctggcatttgccgggctga

SEQ ID NO: 465935 - DNA, 378 bp, Shigella boydii; identical to SEQ ID NO: 465880

SEQ ID NO: 465936 - DNA, 369 bp, Shigella boydii; identical to SEQ ID NO: 465353

SEQ ID NO: 465937 - DNA, 372 bp, Shigella boydii
gtgcagaatgtggctgccactgtgcttgcgcagtatgctgccagcccccgactcaatgccctcattaacagctttaacgcagcgctttcccccgacagttttatcagtgatttttatggtcttatctggaacatcgataccgcagaaaagtatggtcttgatgtctggggaaagattgtgggtgtcagtcgccggctgacggtaaaggacgattttaattacctgggcttcagcgagtccaggatggacaccccggtaatggatgatccctgtccgtttaatcagtggatttgcccctatatttccagacatctgttatcacttaacccattacaagcccgctgccgcagatattcccgtggcgagcgataa

SEQ ID NO: 465938 - DNA, 378 bp, Shigella boydii; identical to SEQ ID NO: 465880

SEQ ID NO: 465939 - DNA, 378 bp, Shigella boydii; identical to SEQ ID NO: 465904

SEQ ID NO: 465940 - DNA, 525 bp, Shigella boydii; identical to SEQ ID NO: 465573

SEQ ID NO: 465941 - DNA, 378 bp, Shigella boydii; identical to SEQ ID NO: 465880

SEQ ID NO: 465942 - DNA, 378 bp, Shigella boydii; identical to SEQ ID NO: 465880

SEQ ID NO: 465943 - DNA, 282 bp, Shigella boydii
atgaataaatatcaggcagttattattggttttggcaaggctggaaaaacattagccgtcacgctggcaaaagcaggttggcgagtggctctcatcgaacaatcaaatgcaatgtatggcgggacctgtattaatatcggctgcatcccaactaaaacattggttcatgacgcacagcagcacacagattttgtccgtgccatacagcgtaaaaatgaagtggttaatttttacgtaataagaattttcataatcttgcggatatgcctaatatcgacgtga

SEQ ID NO: 465944 - DNA, 1047 bp, Shigella boydii; identical to SEQ ID NO: 465436

SEQ ID NO: 465945 - DNA, 378 bp, Shigella boydii; identical to SEQ ID NO: 465880

SEQ ID NO: 465946 - DNA, 378 bp, Shigella boydii; identical to SEQ ID NO: 465904

SEQ ID NO: 465947 - DNA, 378 bp, Shigella boydii; identical to SEQ ID NO: 465880

SEQ ID NO: 465948 - DNA, 1755 bp, Shigella boydii
atgaacccgctgaataccttaaaaattgcctggagcagtaccgatgagcaagggctggaatacttccatcagctaaaaaaatctggcaaaccagtgattgccattgatcctatccgctccgaaaccatcgacttctttggcgataatgccacctggatcgcgccgaatatgggcaccgacgtggcactgatgttagggattgcgcataccctgatgacacaaggcaaacacgataaagtgttccttgaaaaatacactaccgggtatccgcagtttgaagagtatctgagaggtaagagcgataatacgccgaagagcgcggcctgggcggcggaaattactggcgtaccggaagcgcagatagtcaaactcgctgaactgatggcggcgaatcgcacaatgctgatggcaggctggggaattcagcgccagcaatatggtgaacagaaacactggatgctggtgacgctggcggcggtgttagggcagattggtacaccgggcggcggttttggtttctcttatcattactccaatggtggcaacccgacacgtgttggcggcgtgctgccggaaatgtctgcggcgattgccggacaggccagcgaggccgctgatgatggcggaatgagggcgattcctgttgcccgtatcgtcgatgcgctggaaaatcctggcggcaaatatcagcataacggtaaagagcaaacgtatccgaatatcaaaatgatctggtgggcgggtggcggtaactttacccatcaccaggatactaatcgtctgattaaagcatggcagaaaccggagatgatcgtcgtttctgaatgctactggaccgcagctgctaaacatgcagatatcgtattaccgatcaccacatcgtttgagcgcaatgacttgacgatgaccgttgattacagcaaccagcatattgtgccgatgaagcaggctgtcgctccgcaatttgaagcgcgaaacgattttgatgtgtttgccgatcttgcggaattactgaaacctggcggaaaagagatctataccgaaggtaaagatgaaatggcgtggctgaaatttttctatgatgccgctcagaaaggtgcccgtgcgcaacgcgtgactatgccgatgtttaatgccttctggcagcaaaataaactgatcgaaatgcgccgcagcgagaagaacgaacagtacgttcgttatgctgatttccgcgccgatccggtgaaaaatgcgctgggtacgccaagcggcaaaattgagatttactccaaaacgctggaaaaatttggctataaggattgcccggcacacccaacctggcttgcgcctgatgagtggaagggtaccgccgacgagaagcagttgcagcttctgaccgcacatccggcacaccgtttacatagtcagcttaactatgcggaactgcgtaaaaaatatgcggttgcagatcgtgaaccaatcactattcataccgaagatgctgctcgctttggtattgcgaatggtgatctggtgcgtgtgtggaacaaacgtggtcagattctgacaggcgcggtggtgactgacgggatcaaaaaaggcgtggtatgcgtgcatgaaggtgcatggccagatctggaaaatggcttgtgtaaaaacggcagtgcgaacgtgttaacggcggatatccccagctcgcagctggcaaatgcctgtgccggtaactctgcgctggtgtatatcgaaaaatatacgggtaacgcaccgaagtga

SEQ ID NO: 465949 - DNA, 645 bp, Shigella boydii; identical to SEQ ID NO: 464889

SEQ ID NO: 465950 - DNA, 378 bp, Shigella boydii; identical to SEQ ID NO: 465880

SEQ ID NO: 465951 - DNA, 627 bp, Shigella boydii
ttgccgtctgcggggattgtgtggcgaagggctgcgccaactctgcgtatccgtgacccgcataaagatgaaaagatggcagcaatccataaagcactggacgaatgcagcgcagaacatcaggtcttttatgaagatgaagtggatatccatcttcatcccaaaatcggtgcggactggcaactgcgcggacagcaaaaacgggtggtcacgccgggacagaatgaaaaatattatctggccggagcgctgcacagcgggacaggtaaagtcagctatgtgggcggcaacagcaaaagttcggcgctgttcatcagcctgctgaagcggcttaaagcgacataccgtcgggcgaaaaccatcacgctgatcgtggacaactacattatccacaaaagccgggaaacacagagctggctgaaggagaacccgaagttcaggctcatttatcagccggtttactcgccatgggtgaatcatgctgaacggctatggcaggcacttcacgacacaataacgcgtaatcatcagtgccgctcaatgtggcaactgttgaaaaaagttcgccattttatggaaaccgtcagcccattccccggaggcaaacatggactggcaaaagtgtag

SEQ ID NO: 465952 - DNA, 378 bp, Shigella boydii; identical to SEQ ID NO: 465880

SEQ ID NO: 465953 - DNA, 378 bp, Shigella boydii; identical to SEQ ID NO: 465880

SEQ ID NO: 465954 - DNA, 1596 bp, Shigella boydii
atgaaacctgtaaaaccacctcgtattaatggacgagtgccggtcctgtcggcacaggaagcggtgaattatattcccgacgaagcaacactttgtgtgttaggcgctggcggcggtattctggaagccacgacgttaattactgctcttgctgataaatataaacagactcaaacgccacgtaatttattgattattagtccaacagggcttggcaatcgcgccgagcgtggtattagtccgctggcgcaagaaggtctggtgaaatgggcattatgtggtcactggggacaatcgccgcgtatttctgaactcgcagaacaaaataaaattattgcttataactatccacaaggtgtacttacacaaaccttacgcgccgccgcagcccaccagcctggtattattagtgatattggcatcgggacatttgtcgatccacgccagcaaggcggcaaactgaatgaagtcacgaaagaagacctgattaaactggtcgagtttgataacaaagaatatctctattacaaagcgattgcgccagatatcgccttcattcgcgctaccacctgcgacagtgaaggctacgccacttttgaagatgaggtgatgtatctcgacgcattggttattgcccaggcggtgcacaataacggcggtattgtgatgatgcaggtgcagaaaatggttaagaaagccacgctgcatcctaaatctgtccgtattccgggttatctggtggatattgtggtggtcgatccggatcaaagccaactgtatggcggtgcgccggttaaccgctttatttctggtgacttcacccttgatgacagcaccaaacttagcctgcccctaaaccaacgtaaattagttgcgaggcgtgcattattcgaaatgcgtaaaggcgcggtggggaatgtcggcgtcggtattgctgacggtattggcctggtcgcccgggaagaaggttgtgctgatgactttattctgacggtagaaacaggtccgattggcggaattacttcacaggggattgcctttggcgcgaacgtgaatacccgtgccattctggatatgacgtcccagtttgatttttatcacggtggtggtctggatgtttgttatttgagttttgctgaagtcgaccagcacggtaacgtcggcgtgcataaattcaatggcaaaatcatgggtaccggtggatttattgatatcagtgccacctcgaagaaaattattttctgcggcacgttaaccgcgggcagtttaaaaacagaaattgccgatggcaaattaaatatcgtccaggaaggacgggtgaagaaatttattcaggaactaccggaaattacttttagcggaaaaatcgcgctcgaacgggaactggatgttcgttacatcaccgaacgtgctgtattcacgctgaaagaagacggcctgcatttaatcgaaatcgcccctggcgtcgatttacaaaaagatattctcgacaaaatggatttcaccccagtgatttcgccagaactcaaactgatggacgaaagattatttatcgatgcggcgatgggttttgtcctgcctgaagcggctcattaa

SEQ ID NO: 465955 - DNA, 225 bp, Shigella boydii; identical to SEQ ID NO: 465447

SEQ ID NO: 465956 - DNA, 396 bp, Shigella boydii
atgaaccattatccgtcagtcacttcactggagacgccggaagctcgttgccgaagcggtgttccaccgctcccagcatgtcgccaacgggagagcatctacggtctgattgaactgtttattcaaattgtccaccgtctgtcagtacgctctgaacgtcggctggttaaaacactgctcgctgattttcagagggttcacggtaaaacagcacttttattccggattgcggaagcggctctgaataatccggatgggctggttaaagaggttgtgtaccatctgcatattgttgaaccagatcgcagctggatttgcccctatatttccagacatctgttatcacttaacccattacaagcccgctgccgcagatattcccgtggcgagcgataa

SEQ ID NO: 465957 - DNA, 753 bp, Shigella boydii
gtgcttctccgtatacaccatgttatcggagagctgcccacgtatggttatcgtcgggtatgggcgctgcttcgcagacaggcagaacttgatggtatgcctgcgatcaatgccaaacgtgtttaccggatcatgcgccagaatgcgctgttgcttgagcgaaaacctgctgtaccgccatcgaaacgggcacatacaggcagagtggccgtgaaagaaagcaatcagcgatggtgctctgacgggttcgagttctgctgtgataacggagagagactgcgtgtcacgttcgcgctggactgctgtgatcgtgaggcactgcactgggcggtgactaccggcggcttcaacagtgaaacagtacaggacgtcatgctgggagcggtggaacgccgcttcggcaacgatcttccgtcgtctccagtggagtggctgacggataatggttcatgctaccgggctaatgaaacacgccagttcgcccggatgttgggacttgaaccgaagaacacggcggtgcggagtccggagagtaacggaatagcagagagcttcgtgaaaacgataaagcgtgactacatcagtatcatgcccaaaccagacgggttaacggcagcaaagaaccttgcagaggcgttcgagcattataacgaatggcatccgcatagtgcgctgggttatcgctcgccacgggaatatctgcggcagcgggcttgtaatgggttaagtgataacagatgtctggaaatatag

SEQ ID NO: 465958 - DNA, 588 bp, Shigella boydii
atggcggtagatatcgctatgtttggtcgtatgctggcgaaaaaacccgggtttaatgtagaagccgcctgccaggtcgcgcatgcgtttggtgtcagtgaaacgattgtcgaaaatgattttttcaccgccgtagatgatttacgccaggcttctgaagatgccggtgccggtcatgtagatgaaaccggattcggttctgcgctgttctacacctatatctgcattgataaagatctgctggtagaaaacctcggcggtgacgaagcgttagctaatcagaccatacgcgcctttacggaagccgcgcttaaagtctccccaaccggtaaacaaaacagctttgccagccgggcttatgcctcctgggcgctggcagaaaaaggcaccgatcaaccgcgttctctggcggcagctttctatgaacccattaatggcacccgtcagttagaggtggcggtgcagcgtattacaactcttcgcgaaaatatgaatacggtctacgaacagaagaccgattacgcaagttttgacgtgatgaacaaacagggaagcatgaaggacgtgctggactttatctgcgcgtaa

SEQ ID NO: 465959 - DNA, 378 bp, Shigella boydii; identical to SEQ ID NO: 460256

SEQ ID NO: 465960 - DNA, 762 bp, Shigella boydii
atgaataacatattacttccgccaattaatattccctgtacacttttcgaaactattagtttattcgattatttttctgctgatgatatgcaatatggtgatatggtagaacaagactttctctcactcggcctaagcgatatctcagcaaaagttgatccttacagacttattaaataccatttccctggcccaggttctattaatgttgcttttagtgcctcaagttccggaacaaaaatatcacaacgtgaatgcactgatattttatttgcagaaatgaaagagctagcaaaaatgttttccttttttggacaaaataaaacacttatcgaagatctgattgaacattttagatatggaaatggcagcaattttcatagccaacaattaaatttatcttttcatgaaaaaataaataaatatggttataatagtccaatacgaataatcaaagaatgtatcgaaaatggcattaattcaactccctcgacaggataccaacctcttatcctgcaaagcattaaaaccaaattactttcatcaagactaaataaatttaataacttcgaggacagttttaatggcttaggaatcagtgttcatgatatttcagctcaaaaaatatctcttttaagttttcaaaaatacgctataggatggagtgcaacaattcattttgtagcacaggaccactccggtcttgatgtaactgatatcaaaaacaagacttacagcaaatatagattttttcgcatatag

SEQ ID NO: 465961 - DNA, 837 bp, Shigella boydii; identical to SEQ ID NO: 464897

SEQ ID NO: 465962 - DNA, 477 bp, Shigella boydii; identical to SEQ ID NO: 464898

SEQ ID NO: 465963 - DNA, 390 bp, Shigella boydii
atgaagcatgaattatcaagtatgaaggcatttgtcatactggcagagtccagttcgtttaacaatgccgctaaattactcaatattacgcaacctgcattaacgcgaagaataaaaaagatggaggaagatttacatattcaactatttgagcgtacaactcgcaaggttacgttaacaaaagcaggaaaaaggttgctcccggaggcgcgggaattaataaagaaattcgatgaaacgctttttaatattcgtgatatgaatgcttatcatcgtggtatggtgacgttagcgtgtattccgaccgcaggtaatgactccaacttattgatagtgttttatgttcagataatgcccgatgactttgtcatgcagctccaccgattttga

SEQ ID NO: 465964 - DNA, 378 bp, Shigella boydii
atggacgaacagtggggatacgtcggggctaaatcgcgccagcgctggctgttttacgcgtatgacaggctccggaagacggttgttgcgcacgtattcggtgaacgcactatggcgacgctggggcgtcttatgagcttgctgtcaccctttgacgtggtgatatggatgacggatggctggccactgtatgaatcccgcctgaagggaaagctgcacgtaatcagcaagcgatatacgcagcgaattgagcggcataacctgaatctgaggcagcacctggcaaggctgggacggaagtcgctgtcgttctcaaaatcggtggagctgcatgacaaagtcatcgggcattatctgaacataaaacactatcaataa

SEQ ID NO: 465965 - DNA, 381 bp, Shigella boydii; identical to SEQ ID NO: 458155

SEQ ID NO: 465966 - DNA, 1074 bp, Shigella boydii
atgaactcgttttcacttctgacaaccccgtggttgcccgttcgttttaaagacggaacgacaggcaaactggcaccagtcgatctggctgatgaaaatgttgtcgatatcgctgcgccgcgggcagatctccagggggcggcctggcagtttttgctggggctactacaaaccagcttcgcgccaaaagatcaacgtagttgggatgatatctgggaagacggactggaagctgaaaagctaagggaagcattgctgtctttagaacatgcttttcagtttgggccagattccccttcatttatgcaggattttgatgaattaaaagttaaggcaacttttattgcttcgcttcttcctgacgcaccaggaaaacaaacaaaagaacgaaatacagaccattttattaagcgagacacaactcagcatctgtgcctgcattgtgtgcctttagcgcttttttcaatccagttgaatgcacctataggtggacgcggttactatcctgggctacgtggcggagggcctctgacgacacttatagaattgctggagtatcagggcaatcaacaaacccctttgtggcgaaagctgtggctaaacgtaatgccgcaagatgaagccgatttacctttaccaaaaacctttgatgacctggtctttccttggcttgcaccgacgcgtaccagcgaactggacggtgctgtggtaacggatgaacaagtcaataaacttcaggcctactggggaatgccacgacgtatacgtattgattttaagacaacctcaatgggtaactgcgacatttgcggtaggcagagcgatgctcttttgggcttgatgtcactcaaaaactatggtgttcaatacgtcatgtggcgccatcctctaacaccttaccgtctgccgcttaaagagggtggagatttttactcagttaaaccacaacctggtggtttaatctggcgcgactggttaggcctcatagaggtaggtaactcaaaaaacaatactgaactccccgcacaggtcgtgaaacttttgaatgccagcaatctaaagcagacaaggtga

SEQ ID NO: 465967 - DNA, 225 bp, Shigella boydii; identical to SEQ ID NO: 133446

SEQ ID NO: 465968 - DNA, 327 bp, Shigella boydii
atgactaaaaatactcgtttttcccccgaagtccgtcaacgggcagtccgtatggttctggaaaatcagggcgaatatgactcacaatgggcgacaatttgttccattgctccaaagattggctgtacgccggagactctgcgtgtctgggttcgccagcatgagcgggataccgggggcggtgatggagggctcaccaccgctgaacgtcagcgtctgaaagagctggagcgtgaaaatcgtgaactgcgccgcagtaacgatatccttcgccaggcttccgcttattttgcgaaggcggagttcgaccgcctctggaaaaaatga

SEQ ID NO: 465969 - DNA, 381 bp, Shigella boydii; identical to SEQ ID NO: 458155

SEQ ID NO: 465970 - DNA, 1239 bp, Shigella boydii
atggacgcgatggcttatgattacatcagccccacgcgttgggatgaggggattaacgcgctcaccatcaactacgatttttctggttcacatacactacgttcagattatggttcacaagagacagataccagttatctcaatctgcgcaatggactgaatattggaccgtggcggctacgtaattacagtactttaaacaccagcgatggccgtgtggaatacaactccattagtacctggatacagcgcgatattgccgcgttaagaagccagattatgattggtgatacgtggacggcgagcgatattttcgacagtacgcaaattcgcggcgcgcgtttgtatactgataacgatatgctacccgccagccagaatggctttgctcctgtggttcgtgggattgcaaagtccaacgccaccgtcatcattcggcagaatggctacgtgatttatcagtctgccgttccagaaggtgcttttgagatcaccgatctcaacaccgccagtacaggtggcgatttggacgtaaccatcaaagaagaagacggtagcgaacaacgattcacccaaccttatgcttcattggcgattcttaaacgtgaaggtcagacagatgttgatgtcagcgtgggtgaattgcgcgatgaagacggatttacaccggacgtccttcaggcgcaaatacttcatggtttttcccacgggatcactttatatggaggtatgcaggctgctgaaaattatggttctgcagctctgggtgtcggtaaagatcttggcgctttgggcgcaatttctttcgatgtgacacatgctcgtgcgaattttagccatgatgatacagaaacgggtcagtcatatcgctttctctattcaaaacgatttgacgacacagacactagcttgcgcctagttggctatcgttactccaccgagggctactataccctcaatgagtgggcatcgcggcgcaacagccctgaagacttttgggaaacaggtaaccgacgtagtcgcgtggagggaacgctaacgcagtcgttggggagagattatggcaatttatacctgacattaagccggcaacaatactggcataccgatgatgtcgaacgattaatgcaatttggctacagcagtagctggtggatttgcccctatatttccagacatctgttatcacttaacccattacaagcccgctgccgcagatattcccgtggcgagcgataa

SEQ ID NO: 465971 - DNA, 738 bp, Shigella boydii; identical to SEQ ID NO: 465480

SEQ ID NO: 465972 - DNA, 216 bp, Shigella boydii
atgacgcccgaaagaaacggttcgtatatggtgaaagcatccctggcgaatggatcctcttatgagaaggatctggtggtaatcgatcaaaaactgacactctcggcgtccagcccgcttatcggtgtcaattccccaacaggtgcaactctgacggcaacgctaacttctgcaaatggcactccagtggagggtcaggtctcaactttagcgtaa

SEQ ID NO: 465973 - DNA, 1344 bp, Shigella boydii
gtgagaaccaactcttcaggtcaggctccagtcgttctgaccagcaataaagtcggtacatatacggtgactgcatcgttccataacggtgtaacaatacagacacagacaatcgtgaaagtcactggcaactcaagcaccgcccatgttgctagctttatcgctgctccatcgactatcgccgccaccaacagtgatttaagtaccttaaaggcaacggttgaggatggcagtggtaacctgatcgaaggtttaactgtgtacttcgccttaaaaagcggctctgccacattaacgtcattaacagcggtgaccgatcaaaacggaatcgcgacaacaagcgtgaaaggagcgatgacaggtagcgtcacggtaagcgcagtcacgaccgctggtggaatgcaaacagtagatataacgctggtggctggcccggcagacacctcgcagtccgtccttaagaacaatcggtcatcattgaaaggagactttaccgatagtgctgagctacatcttgttctgcacgatatatcaggcaatccgatcaaagtttctgaagggctggaatttgtgcagtcaggtaccaacgtgccctatgtgcaagttagtgcaattgactacagtaaaaatttctcaggcgagtacaaagccactgttacaggcggcggagagggtatcgcaacgctgatccctgtattgaatggtgttcatcaagctggtctgagtaccacaatacaattcactcgcgcagaagacaaaataatgagcggtacagtgtcagtcaatggtactgacctaccgacaactacattcccttcgcagggattcaccggggcgtattatcagttgaataatgacaactttgcccctggaaaaacggcggctgattatgagttttcaagctctgcctcctgggtcgatgttgatgctaccggtaaagtgacatataaaaatgtcggcagcaattgggaaaggattacggcgacgccaaaatcaggaggccctagctatgtatacgaaatccgtgtgaagagttggtgggtgaacgccggcgatgctttcatgatatacagccttgctgaaaatttttgcagtagcaatagctacacacttccccgtgcagatcatttaaaccatagtcgttcccgaggcatcgggtcactgtacagtgaatggggagatatggggcattacacgactgaggctggttttcaatcaaatatgtattggtcatctagtcccgcaaactcaaacgaacaatacgtagtttccctggcaacaggtgatcaaagcgtatttgaaaagcttgggtttgcttatgcgacatgttataaaaacctctga

SEQ ID NO: 465974 - DNA, 303 bp, Shigella boydii; identical to SEQ ID NO: 461506

SEQ ID NO: 465975 - DNA, 159 bp, Shigella boydii
atggggaagtatctttttagcgttattttcgggagtaaaaaacatggtatctttccgtatgtcagttgtatcttgctggtattcgtagtcgtgataaggcatacaacgatatttatcttcacgttagtgaagaataagttgttttgtgatctatgttaa

SEQ ID NO: 465976 - DNA, 378 bp, Shigella boydii; identical to SEQ ID NO: 465880

SEQ ID NO: 465977 - DNA, 1386 bp, Shigella boydii
atgaaggccagtgataaaccccgccagctggcggtcccctttgcgagtaccggagataaaaaccgtatcccggacaaggcgacacagcagaccagagagagcggtaatgctgcgtatgattcaggttttcctccggtgaccatgacagcggtctcagcgggaggtataccgccacacggcaaggattttaacggtctgatgtacgatattaccgcagcaatacggttcgcccaagctggcggtttgtacacgtataatgccggttttgcgggggccattggtggatatgcaaaaggagccattctcgccggagtcgcaacaacagcggtctggctgaataccacagacgataacctgaccgatcctgaaggctccgacagtgcgggctgggtaaatcttcttgaggatccgaaaaggatattcctgcggcagaagaacaatctgtcagaccttcagaataaagggacggcacgggataatcttcaggtttacagtaaagagcagtcagatcaacgctatgttcatcgggaaggcgataaaataaccggagagctgaaaatccgtggtgttaatgcgctgaggattttcaacgaagcttttggcctgatttttcgtcgttcggaagagtgcctgcaccttattcccaccagtgaaggtcagggggaaaatggcgatattggtcccctgcgcccgttcaccattaatttgcggacgggtgaaatatccatgtcgcataaagtgtctgttggcggtggttcgcaggtcaatggtgcgctgggtatcggcgttcagaacgccctgggggggaattcaattgttcttggtgataatgacaccggatttaaacagaatggagacggtattctggatgtttatgctaatagtcagcgtgtattccgctttcagaatggagtggctattgcttttaagaatattcaggccggaactgccagaaaattcacgttatccagcgccaacaactccacgaaaaatgcagcgttttatttgtggggtaatccatccaggtctgttgttgcagagcttggcgatgattcaggctggcattttttcagccagaggaatacagataacagcatcacgttcgccgtaaacggacaggtaattccgttaaattacggaaacttcgatgcccgctataaatatcgaacagagggggtacaggatgtacggtatggccatgaaatgtattacagccccggcagtaacaccgtttcgtggagatttcgcgcaccttcgggacacgggctgtcagggatagcgatatcggataccggccgtgactcagcggataacgtcaacggcgtgtattaccgcccgcttcagaaactgattaatggcacctggtataacgtggcgagtgtttaa

SEQ ID NO: 465978 - DNA, 303 bp, Shigella boydii
atgaaaaaaagaaattttagcgcagagtttaaacgcgaatccgctcaactggttgttgaccagaaatacacggtggcagatgccgccaaagctatggatgttggcctttccacaatgacaagatgggtcaaacaactgcgtgatgagagtcagggcaaaacaccaaaagcctctccgataacaccagaacaaatcgaaatacgtaagctgaggaaaaagctacaacgcattgaaatggagaatgaaatattaaaaaaggctaccgcgctcttgatgtcagactccctgaactgttctcgataa

SEQ ID NO: 465979 - DNA, 1176 bp, Shigella boydii
gtgaactggattgatccggacaacggtcatgagacggcgacagagcttgtggaggacacgcaggccattctccgttacggtcgtaacgccacgaagatggatgcctttggctgtaccagccggggacaggcgcaccgcgccgggctgtggctgattaaaacggaactgctggaaacgcagaccgtggacttcagcgtcggcgcagaagggcttcgccatgtaccgggtgatgtcattgaaatctgcgatgatgattatgccggtatcagcaccggtggtcgcgtactggcggtgaacagccagacccggacgctgacgctcgaccgtgaaatcacgctgccgtcctccggtaccacgctgataagcctggttgacggaaatggcaatccggtcagcgtggaggttcagtccgtcaccgacggcgtgaaggtgaaagtgagccgggttcctgacggcgttgcagaatacagcgtgtgggggctgaagctgccgacgctgcgccagcgcctgttccgctgcgtgagtatccgtgagaacgacgacggcacgtatgccatcaccgccgtgcagcatgtgccggaaaaagaggccatcgtggataacggggcacactttgacggtgaccggcgcggcacggtgaatggtgtcacgccgccagcggtgcagcatctgaccgccgaagtcaccgcagacagcggggaatatcaggtgctggcgcgatgggacacgccgaaggtggtgaagggtgtgagcttcctgcttcgcctgaccgtggcagcggacgacggcagtgagcggctggtcagcacagccaggacgacggaaaccacataccgcttcaggcagctggcgctggggaattacagtctgacagtccgggcggtaaatgcccgggggcagcagggcgatccggcgtcggtatcgttccggattgcggcaccggcagcgcctgtcactattgaactgataccggggtattttcagataacggcggtcccgaaactggctatatatgacccgacggtgcagtttgagttctggttttcggaaaagcggattgcggatatcaggcaggttgaaaccagcgcccgctatcttggcacggcgctgtactggatagccgccagtatcaatatcaggcgggccatgattattatttttacgttcgcagtgtga

SEQ ID NO: 465980 - DNA, 378 bp, Shigella boydii; identical to SEQ ID NO: 465880

SEQ ID NO: 465981 - DNA, 378 bp, Shigella boydii; identical to SEQ ID NO: 465880

SEQ ID NO: 465982 - DNA, 378 bp, Shigella boydii; identical to SEQ ID NO: 465895

SEQ ID NO: 465983 - DNA, 378 bp, Shigella boydii; identical to SEQ ID NO: 465880

SEQ ID NO: 465984 - DNA, 381 bp, Shigella boydii
atgctgggagcggtggaacgccgcttcggcaacgatcttccgtcgtctccagtggagtggctgacggataatggttcatgctaccgggctaatgaaacacgccagttcgcccggatgttgggacttgaaccgaagaacacggcggtgcggagtccggagagtaacggaatagcagagagcttcgtgaaaacgataaagcatgactacatcagtatcatgtccaaaccagacgggttaacggcagcaaagaaccttgcagaggcgttcgagcattataacgaatggcatccgcatagtgcgctgggttatcgctcgccacgggaatatctgcggcagcgggcttgtaatgggttaagtgataacagatgtctggaaatatag

SEQ ID NO: 465985 - DNA, 378 bp, Shigella boydii; identical to SEQ ID NO: 465904

SEQ ID NO: 465986 - DNA, 378 bp, Shigella boydii; identical to SEQ ID NO: 465880

SEQ ID NO: 465987 - DNA, 252 bp, Shigella boydii; identical to SEQ ID NO: 464926

SEQ ID NO: 465988 - DNA, 249 bp, Shigella boydii
gtgaaaaatttcctcactgctctttcagatagcatttgctcattatttatttttaatagtaatatggcatcaatctccttggggaatgaatccgtttcaacagatgacgaccttgagtatggttatttaataaacactggcaatcattatgatgtttacctccctcctgaactttttgctcaggcttataagttaaaaaataaggaaatgaatgcgcaactcgactatttaaatcgttatgcaatttaa

SEQ ID NO: 465989 - DNA, 378 bp, Shigella boydii; identical to SEQ ID NO: 460256

SEQ ID NO: 465990 - DNA, 819 bp, Shigella boydii; identical to SEQ ID NO: 465850

SEQ ID NO: 465991 - DNA, 378 bp, Shigella boydii; identical to SEQ ID NO: 460256

SEQ ID NO: 465992 - DNA, 306 bp, Shigella boydii; identical to SEQ ID NO: 464418

SEQ ID NO: 465993 - DNA, 249 bp, Shigella boydii; identical to SEQ ID NO: 465618

SEQ ID NO: 465994 - DNA, 351 bp, Shigella boydii; identical to SEQ ID NO: 464002

SEQ ID NO: 465995 - DNA, 480 bp, Shigella boydii
gtgagagcactactgccccctgaaattgccccgcgtatggggatcgtattgttcagaccaagttcagagctgatgcccctgtttatgcaggggcgtgtcctgctggagcctgagccggagcgttattcatctttcgccagtggtgctgttccggcggcatcacaaccgctggcggatgatcctgacgttcgggccgtgttccgcaatgaggcagtgatccgtcgtgctggtggcgtggaatgtcttgaaagctggttacttcgtgaaaaaggctgccagtggcctcattccgactggcacagcgagaacatgacaacaatgcgacacgcgccggcgcaatccgtctgtgctggcactgcgataaccagctgcgcgatcagttcacggaacggctggaatcaatggcaacggataactgtgcccgctgggtgttgtctgttgtgcgtcgggatctcggttttgatgatagtcacgttgtga

SEQ ID NO: 465996 - DNA, 354 bp, Shigella boydii; identical to SEQ ID NO: 464933

SEQ ID NO: 465997 - DNA, 1128 bp, Shigella boydii
atgaacaacaataacacattgtacgtcgggttagatgttcacaaagaatcgattactgtcgcttatgctatcaattcagaacctgttgaactgatgggtaaaattggcacatcacctactgatattcagaatctttgtaaacgtctcaggtcaaagtcatcgcaggtcagtatcgtttatgaagcggggccctgtggttatggactttatcgtcggctggtgaaatccggttttgactgcatggtctgcgccccctcacttatcccgaaaaaaccgggggagcgggttaaaaccgatcgccgtgatgccatcagacttgtgcgttcactgcgtgcaggagatctttctgctgtctacgtacccggcattgaagatgaggcattccgggatttggcccgggcatgggcatctgcccgcgatgatttacggcatgcaaggcaacgtctgaaatcgtttcttctggttcatggggtccattatgtcgggcgagcagattggggccctgcacaccgacgctggctcagcaaatactcattcgaaagtccctggcgacaattagcttttgacgaacaccgtcgtacaatagaagaccggcaggcacaatgtgaacggctggaatccgccctgaaggaggccgttaccgaatggaggctgtatccggtagtagaggcgctgcaagccatgcgagggattcagtttattactgcggttggattaatttctgaactgggtgatctgacccgttttgaacatccacgacaactgatgtcatggtttggtatcacgccatcagaatattcatcgggtggaagcagacatcagggcagcattaccaaagccggaaacagctatgccagaaagctattggtcgaggcagcgtggagttaccgtcatccggcacgcatcagtccggcaatacaaaaaaggcaggaaaatttaccccgccccgtcattgacagagcatgggatgctcaactcaggctctgtaagaggtatcgaaaacttcaggccaaaggaaagaatgtcaatattacaattgttgctgttgcacgtgagctggcgggttttatctgggatatgggccgaatagcaatgtctgtcgcacaacaaccacaatgtcacaaataa

SEQ ID NO: 465998 - DNA, 378 bp, Shigella boydii; identical to SEQ ID NO: 465880

SEQ ID NO: 465999 - DNA, 201 bp, Shigella boydii
atgactgttcaaacaagtaaaaatccgcaggtcgatattgctgaagataatgcgttcttcccttcagaatattcgcttagccaatataccagtcccgtctctgatcttgatggcgtggacggtaatgactccaacttattgatagtgttttatgttcagataatgcccgatgactttgtcatgcagctccaccgattttga

SEQ ID NO: 466000 - DNA, 600 bp, Shigella boydii; identical to SEQ ID NO: 465718

SEQ ID NO: 466001 - DNA, 378 bp, Shigella boydii; identical to SEQ ID NO: 465904

SEQ ID NO: 466002 - DNA, 378 bp, Shigella boydii; identical to SEQ ID NO: 465904

SEQ ID NO: 466003 - DNA, 378 bp, Shigella boydii; identical to SEQ ID NO: 465895

SEQ ID NO: 466004 - DNA, 225 bp, Shigella boydii
atgtcgcgtaaaggtaactgttacgacaacgctccgatggaaagcttctggggaacgctgaaaaatgagagcctgagccactatcgttctaataaccgggatgaagccatctcagtaatacgggaatacattgagattttctacaatcgtcagcgtcgtcactctcgtctggggaatatctccccggcagccttcagggaaaaatatcatcagatggctgcttaa

SEQ ID NO: 466005 - DNA, 378 bp, Shigella boydii; identical to SEQ ID NO: 465895

SEQ ID NO: 466006 - DNA, 378 bp, Shigella boydii
atggacgaacagtggggatgcgtcggggctaaatcgcgccagcgctggctgttttacgcgtatgacaggctccggaagacggttgttgcgcacgtattcggtgaacgcactatggcgacgctggggcgtcttatgagcttgctgtcaccctttgacgtggtgatatggatgacggatggctggccactgtatgaatcccgcctgaagggaaagctgcacgtaatcagcaagcgatatacgcagcgaattgagcggcataacctgaatctgaggcagcacctggcacggctgggacggaagtcgctgtcgttctcaaaatcggtggagctgcatgacaaagtcatcgggcattatctgaacataaaacactatcaataa

SEQ ID NO: 466007 - DNA, 225 bp, Shigella boydii; identical to SEQ ID NO: 133446

SEQ ID NO: 466008 - DNA, 558 bp, Shigella boydii
gtgaatattccgttgctggcccctacgacatcatcatacccgacacacggtttgaaggggatgctcagcatccggtggactgatgcacgccctgagacaacagaaccgcggtacagagccaaatcccttactttttacggcattaacggccccatttatcacacccgctactgctactggcccatatccagactgactggctgggtgaaaataaatataaccacagaagatattatttacagaatcgtggcgagctctgtccgcaacagatggggagaccctgacattggcgggctgattattgctgcgtaccagggagaagctgacggtgataaagtcatcagacttgtcagggggcagtcatacagaggctcacgactgggaccggtggggatttcagtgcccagtactcccaccggaacgtatatagcatccccacaatttttcattacgggatgttcagagcattcattaccggggtcatattgcgccctgtccggggtgccggatgcacatgtctctggcgcaatgcccgggctttttattcgcacatcgtga

SEQ ID NO: 466009 - DNA, 282 bp, Shigella boydii
atgcggaatggtgatgagaatgctgatgacattgcagggcgcttcaccgggacgtataccggagctgatgcgcgatcttgcaagtatgggacaacttgtgaaattacagacgagaaggggaagggccttcccgagagtggtaaaggagaggccctggaaataccccacagccccgaaaaagagccagtcagttgcttaactgactggcattacacacaggcggtgccttttatttttactgaagttcacaggaggtttatgtgtttaattctgacaacctga

SEQ ID NO: 466010 - DNA, 306 bp, Shigella boydii; identical to SEQ ID NO: 465640

SEQ ID NO: 466011 - DNA, 378 bp, Shigella boydii; identical to SEQ ID NO: 460256

SEQ ID NO: 466012 - DNA, 837 bp, Shigella boydii; identical to SEQ ID NO: 461976

SEQ ID NO: 466013 - DNA, 369 bp, Shigella boydii; identical to SEQ ID NO: 465353

SEQ ID NO: 466014 - DNA, 294 bp, Shigella boydii; identical to SEQ ID NO: 460208

SEQ ID NO: 466015 - DNA, 294 bp, Shigella boydii; identical to SEQ ID NO: 25632

SEQ ID NO: 466016 - DNA, 300 bp, Shigella boydii
atggtggctttcgacggatcggcggaaaccgctctgaacgtcttgtcggttgcactttccggctcaaaagaaaccgtcagggtggttgttttcccttttgccaccgtaccggatgtcggcgtcaccttaatcgcactgaccggcgtaattttgctgcgttcttccgctacagaaggtttacccacgttagtgactttcaccgtgcgggtgatcacttctttcgccgtcacggccttaccgatactgctgacccagccacgaaacacatccaccgtgccattcggaaaacggattttatag

SEQ ID NO: 466017 - DNA, 294 bp, Shigella boydii; identical to SEQ ID NO: 25632

SEQ ID NO: 466018 - DNA, 378 bp, Shigella boydii; identical to SEQ ID NO: 460256

SEQ ID NO: 466019 - DNA, 180 bp, Shigella boydii; identical to SEQ ID NO: 464956

SEQ ID NO: 466020 - DNA, 300 bp, Shigella boydii; identical to SEQ ID NO: 466016

SEQ ID NO: 466021 - DNA, 300 bp, Shigella boydii; identical to SEQ ID NO: 466016

SEQ ID NO: 466022 - DNA, 501 bp, Shigella boydii
gtgaatgcgaactccgggacgctcaacaacgtcacgattaacgagaactgtcgggttctgggaaaactgtccgccaaccagattgaaggcgatctcgttaaaacagtgggcaaagctttcccccgggactcccgtgcaccggagcggtggccatcagggaccattaccgtcagggtttatgacgatcagccgtttgaccggcaaattgttattccggcggtggcattcagtggcgctaagcatgagagagagcatactgatatttactcctcatgccgtctgatagtgcggaaaaacggtgctgaaatttataaccgtaccgcgctggataatacgctgatttacagtggcgttattgatatgcctgccggtcacggtcacatgacactggagttttcggtgtcagcatggctggtaaataactggtatcccacagcaagtatcagcgatttgctggttgtggtgatgaagaaagccactacaggcatcacgattagctga

SEQ ID NO: 466023 - DNA, 276 bp, Shigella boydii; identical to SEQ ID NO: 458859

SEQ ID NO: 466024 - DNA, 456 bp, Shigella boydii
atgtctgtagtgatatcaggtgcgctgactgatggcgcaggcatccccatgtccggatgccagattattctgaaatcccgtgtaaacacctcagaagtggtgatgcgtaccagggctgatgtagtgaccggaaataacggtgaatattcgtttgaggcacaggtcggaaaatattgcgtgtatctgaaacgggactggcgcgacgagtactgtgttggcgacattgctgtatacgacgactcaaagcccggcacgctgaatgactttctgactgcccccgatgaaggcgacctgaagccggatgtcgtcaaacgctttgaggaaatggtgggcaggcgcagcagagcgccggggccgcagccggaaacgcacagcagacggcgcaggatgtggcggcagccgcaggttatgcccgcgcagcagaacaggccaaaaatgacattgatgctgcgctga

SEQ ID NO: 466025 - DNA, 300 bp, Shigella boydii; identical to SEQ ID NO: 466016

SEQ ID NO: 466026 - DNA, 327 bp, Shigella boydii; identical to SEQ ID NO: 464430

SEQ ID NO: 466027 - DNA, 327 bp, Shigella boydii; identical to SEQ ID NO: 464915

SEQ ID NO: 466028 - DNA, 327 bp, Shigella boydii; identical to SEQ ID NO: 464915

SEQ ID NO: 466029 - DNA, 378 bp, Shigella boydii; identical to SEQ ID NO: 460256

SEQ ID NO: 466030 - DNA, 378 bp, Shigella boydii; identical to SEQ ID NO: 460256

SEQ ID NO: 466031 - DNA, 267 bp, Shigella boydii; identical to SEQ ID NO: 462029

SEQ ID NO: 466032 - DNA, 378 bp, Shigella boydii
atgcagtcattgtacgactggatacagttgcagaggaaaacgctgtcgaaacatgcggagatggcgaaggcgttcgactatatcctgaatcactggaatgcgctgaacgagttctgtcgtgacggctgggtggaaatagacaacaacatcggtgaaaacgcgttacgatcggtggcggttggaagaaaaaattatctctttttcggctcagacaagggaggagaaagtgcggcgatcatctacagtctgctggtcacctgcaaacagaacgaagtggagccggaggactggttgcgcgaagtgatcgagaagctcaatgactggccgtcgaaccaagtgcatgaactgctgccctggaacttctcgtctgtaaaataa

SEQ ID NO: 466033 - DNA, 369 bp, Shigella boydii; identical to SEQ ID NO: 465353

SEQ ID NO: 466034 - DNA, 294 bp, Shigella boydii; identical to SEQ ID NO: 460208

SEQ ID NO: 466035 - DNA, 360 bp, Shigella boydii
gtgtgggcgttctgtattactgacaaagccgcctccgatgaagttaaagccgcttttgaaaacagcgccactcgtgcttttggtcctgctggttttctcgagcaggatgactcggagaactggtgtgaaatccagaaattgcttaaaggccaccgcgcccgcaacagcaaactgtgtctggaaatggggcttggtcaggaaaagcgccgcgacgacggcattcctggcattactaactatatcttttcagaaactgccgctcgtggaatgtaccaacgctgggccgatcttctgagtagcgaaagctggcaggaagtgctcgataaaaccgccgcttaccagcaggaggtgatgaaatga

SEQ ID NO: 466036 - DNA, 336 bp, Shigella boydii
atgcaggaaaacgatctgcatgaaaaacagattattcttcttaccgggaatgatagcgagcgagaagcgcagattgagcagcagttacgcgaactaacgttactgccgctcaacattaaacatatgtcggtaaaggcatttttgcagacaggcgctccgcgcggcgcggcgcggcgcggcgcggcgcggcgcggcgcggcgcggcgcggcgcggcactgattattgcgccttataccatgccgttaccgctcttttcaccaccgctgatctatacggacctgacactgacaacacatcaacaggagcagatccgcaaaatgctcgaatcagcatga

SEQ ID NO: 466037 - DNA, 942 bp, Shigella boydii
atgagcaacgacatcgcaaacatcaacgcaccagtagacacagcaatcgctggaactgctgcaactattttcagcccagacggcttgaaccaactgatgaaattcgccgaggtaatggcgcaaagccgcgtaacggtaccggcgcacctcgccgggaaaccagctgattgcatggccgtggcaatgcaggctgcgcagtggggaatgaacccgtttgccgtggctcagaaaacccatgttgtgaacggcacgctaggttatgaagcccaattagtaaacgcagttatctcaacaatgtcgccaacaaaagatcgcatcaactacgagtggttcgggccgtgggaacgcgtgatcggtaagtttgttgagaaaacatccaaaaacggcaatccgtatatcgcaccaggctggactctaaaagacgaagaaggttgcggtgttcgcgtatgggcaaccatgaagggcgaggatcaacctcgagtgcttgagttaatgctgtctcaagcacaggtaagaaactccacactttgggccagtgatccgaaacaacaactcgcataccttgcgacaaaacgctggtctcgcttgcactgtcctgacgtaatcatgggcgtctacacaccagacgaattacaggaaacggcaccgcgcgttgagcgagacattactccgcaaacgatcactgctgcgggaatgaacagtctgatcaacgctaaacaagtgaaaaagcctgatgagcaaacgcgtaaagcggatagccgtgctccagaagaaatgctaatggcctttaccagcgcagcgatgaattacagcactgtctccgaactggataaggcttacaaatacattgcacaaaaactttcagatgatgacgaactgctggcaaaagccaccgacgtttacagcgttcgtcgggaagaattaaacgaaacatctatgtaa

SEQ ID NO: 466038 - DNA, 504 bp, Shigella boydii
atggaaagtaatatcaaagggttagtttccgccgggcatgagatggcttcggaactgaaagcagaatgtggggccgttgatatgcgtagtgtggcaaagctgatcagcaatttggcaacgcaattggaagtgcaactggtgcgtgctaatgcgctggccgaagaccaccagagagcgattgagtcaattaagcaggctgatgcagctgttaagttggcacacgagaagttttcggcgctggcagcggagaatgcaaagctgaagaagttctgcaaagacgctgcattcgatgccgattacgaagcagagctaggtatggagagaggtggattcagtgatgcacttaacgaaataaaaaccccagccaccgacgccttcctggctgaagtgcgggctcagggtgtggagatgctctacgcaagcagagcggctcagtgggctgatgaattgttagctgagcttaatgaattcgccactcagcttcgcgaaggaggtgcagcatga

SEQ ID NO: 466039 - DNA, 234 bp, Shigella boydii
atgagcaatcagattaagcctgccagaagaattgatgcagatggtaatgccagagacgtcgacaacgcttacgaggagggaatctacgccgccgtaataggcctcgaggtaactgacaatccgtattcaacagatgatccactcaaccgtaagctttggctaaaggctttcgctggggtcaagagtggaaagatcagaagcgccgcccagttacgcaaaggaggcaaccagtga

SEQ ID NO: 466040 - DNA, 774 bp, Shigella boydii
gtgagcaagattgattatcaggcactgcgtgaagcggcagaaaaagcaacgtgtggtgagtggtcgctcgaatatggagagggccgatttgatggtgatgatgcgctaattaatcgcgaggctgctggatatattcccatttgcagaattgaaggagcgcatcctgaaagcggtttcgatgaagatttccaaatggaacagcaggccaatgctgaattcatcgctgcagccaatccggctaccgtgctggcactgctggatgaacgggaaagaaaccagcaatacatcaaacgccgcgaccaggagaacgaggatattgcgctaacggtagggaagctgagagttgagctggaagccgcagagaataacctcattgatagtgaatgccatgttgctgaactggaagaagcgctacgcaataagcaggcgttacttgaagcatcagagaagcgcaacgcaaaattacaaagcgagaatgcatacatccgcaaccggtacaaagaactggacctattaatcgggaaaaacattctggtcatgcaggctgccattatcgaatggcaatcgactggcgacgctaaaagcggactagcatggatttataacacactgtttggcccaggcgaattgccggacgaatctgagaaaaatgctcaggcctactttaatcgcaaatatgcaccgattgacgaaaagcttatggcgcttcacaagtggttttgggaacaaagtgaagccgagcgcgccgctggcattcgcatcaaaggagagtga

SEQ ID NO: 466041 - DNA, 210 bp, Shigella boydii; identical to SEQ ID NO: 20633

SEQ ID NO: 466042 - DNA, 690 bp, Shigella boydii
atgaccactataaccaaagagcgactgatgacaatcaaggagtggcgcgaaacatacggacctggtagcaacgttgtgctgccagcagaagaagcggaagaactggcacgaattgcactggcatcactgggagcagaaccagttgcttatattttcaaacatccggccgggaaattattctgggctttaacggatgaaagcaataaagagcaagcggacgttattcctgtttatgctgccgcgcctgcgtcggttgtgccggataatgcatcagagcctcttgcttatgcttacaaagagcttacgcctgagattatgcgcaaccatttagctgtattcgagcgatatggaatagccccaaacgatagctctaccacaattcaggcactgcgaatcgcgctggatggcatagagcggagcgacgccatgcttcatggtgccgaacctgtaagccaaacttacaagttgaaccagctatcgggcaactctccggtaactccggatgattggataagctgtagtgagcaaatgccggacgacgcgcagtggtgcgtagtgaacacagaatacgggtattacgtgcaatgctggtctgaaggtcaagggtggcttggtgatgatatcagcatccctgaatgcgatgtaatcaattggatgccgctaccagaaccgccgcaggaggtgaagtaa

SEQ ID NO: 466043 - DNA, 369 bp, Shigella boydii
atggactattcacagttaagtgattttgaaattaacagaatggtaggagacataatttttaaaggcctttgggcatgtaaaccggaaacatcagggaataacaccaacaaatggtattacggaaatgctgatacaacttttgagccattaaaccctttacctgactactgcaatgatccgagcgcctcatggcctgtaatcgcaaaacatcagatcagcatatgtgcatacgaaagaaataatcctggaatgaagaatgaatattggtgggaggcggatagattttgtgaatttattaccatagacaacaacccactccgcgccgccatgattgtatttctcatgatgcaggaaaatcagaatggctaa

SEQ ID NO: 466044 - DNA, 357 bp, Shigella boydii
atgaacgaccagcaaatcgaaaaagaaatcgttgagaaaggcaaaacggcaccgcgagttacgcctcaatatatcgaaagcatcattcttgaagagcatttctttactgcttatgacggcattcgtgccgccaatatgggcgttggcgattcatggacagcgcataactctacagacctcctgactttctgcgtactggtgctgaagaatggcttcaccgtcaccggagagagtgcctgtgcaagccaggaaaactttgatgcagaaattggtcggaagattgcccggcagaatgctgtaaacaaaatctggatgctcgaaggttacttgctgaagcagaagctaagcgagcaataa

SEQ ID NO: 466045 - DNA, 540 bp, Shigella boydii
atgtgtaacccagccatcgctttggttgccgtcacagtggcatccacagccgcgtcaatgtacagccagagcaagcaggcaaaataccagtcagccatagctgatcggaatactgaaattgctgaagctcaggcacaggattcaatcaatcgtgggaatattgaagcggatcagcgtcgtcgtgaaatgcgtcaacgctcaggcactgcggcggccactatgggggctaccggtgcggaattaagtagcggaacagctcttgacgtttttgcggataatgctcagttcggcactcttgatgcgttaacgacagtgaataatgctcagcgtgaggcatatgggtatcaggttcagggaatgaatgctcaggcacagggggctgctgctcagtcggctgctaaatcatcgatgaccagcactttgttaacggcaccactaaaagcatacggtgcataccagatgggcggaggaacgtggagcccattctctcagaaggctgcgccgatttctgctgctgttggcactccaaccggtcgataa

SEQ ID NO: 466046 - DNA, 402 bp, Shigella boydii
atggctgaagacggtatggtgcgcgccaccagcgaggatccacgcttcggaagcagttggcagatccggttgcgctttccacagcgcattcgccaccggcagtttcggcagggagtgcggtgttttcaccgtgtctatacagttaaccagcagacggtaacgatcgccgagatcaatcaggctggcgacaatcgctggaccggtttgggtattgaagatcagtcaggcaggatcgtccttaccaccaataccgagatgctgaacgtcgaggatcggtttctcttctacggcaatcgacgggcagacttccagcatatgggagccgagcaccaggtcattacctttctcgaagtgataggtgtagtcctccataaaggaggtgccgccctgcagaccggttga

SEQ ID NO: 466047 - DNA, 654 bp, Shigella boydii
atggtaagtctgttcttctcattacctaaaggtggtgcaggggcacgacctgaagtgaaaaaagagctggcggtattaatgcgtccgcaggtgctgtctgcattgctgacgacggtactgggagctggtgcaatgtttactctctacacctatatctctccggtactgcaaagtattacccacgcaacaccggtgttcgtcacggcaatgctggtgctgattggtgtcggattctctatcggtaactatcccggcggcaaactggcagatcgttcagttaacggcacgttgaaaggctttttgttgttgttgatggtgattatgctggcaatcccgttcctggcccgcaatgagttcggcgcagctattagcatggtggtgtggggcgcagcaacctttgcggtcgtaccgccgttacagatgcgcgtgatgcgtgtcgccagtgaagcgccaggtctgtcttcatcagtcaatattggtgcctttaatcttggaaatgcgctgggagcagctgctggtggtgcggtaatttccgctgggctgggatacagctttgtgccggtgatgggagcgattgtcgcgggactggcattattgctggtgtttatgtcagccagaaaacaacctgaaacagtttgcgttgctaacagctaa

SEQ ID NO: 466048 - DNA, 744 bp, Shigella boydii
atgcctcaatctcttccggacaccactacgccaaaaaggcgctttcgctggccgacggggatgccgcagctggtagcactattgctggtgctgctggtcgacagcctggtagccccgcgtttctggcaggtagtgcttcaggatgggcgtttgttcggtagccccatagacattcttaaccgtgcagcccccgttgcgttactggcgattggtatgacgctggtgatcgccaccggtgggattgatctctccgtaggggcggtgatggctatcgccggagccacaacggctgtgatgacggtcgcggaagtcagcctgccgattgttttgttaagcgccctgggcaccggcatcctggcgggattgtggaacggcatactggtagcgatcctcaaaattcagccatttgtcgccaccctgatcctgatggtcgccgggcgcggcgtggcgcaactgatcacctccggacagatcgtcacgtttaactcgccggatctctcatggtttggcagtggatcgctgttgttcctgccaacgccagtcattattgcggtactgacgcttctcctgttctggctgttgacccgcaaaacggcactggggatgtttatcgaagccgttggtatcaacattcgggcggcaaaaaatgccggggtaaacacgcggatcatcgtcatgctcacttatgtgttgagcgggctgtgtgcggcgattgcgggcattatcgtggcggcggatcgctga

SEQ ID NO: 466049 - DNA, 1122 bp, Shigella boydii
atgaaatggcatgagcagttgatctctcatttcgcagagaccttcttcccgttgctgcccgcgttgattagcggcggtttgatcctcggttttcgcaatgtgatcggcgatttgcccatgagcaacggtcaaacgctggcgcaaatgtacccttccctgcaaacgatctacgattttctgtggttgatcggtgaagcgatcttcttctacctgccggtcgggatttgctggtcagcggtgaaaaaaatgggcggcacaccgatccttggtatcgtgcttggcgtgacactggtttccccccaactgatgaacgcttatctgctcgggcagcagctgccggaagtgtgggactttggcatgttcagcatcgccaaagtgggctatcaggcgcaggtgatcccggcactgttagccgggctggcgctgggcgttattgaaactcgccttaaacgcatcgtgccagattacctctatctggtggtggtgcccgtctgttcgctgatcctcgcggtgttcctcacccatgcgctgattggtccgtttggtcgcatgattggcgatggcgttgcctttgcggtacgtcacctgatgaccggcagctttgctccgattggcgcggcattgtttggcttcctgtacgccccgctggtgatcaccggggtacaccagaccacgcttgctattgatttgcagatgattcaaagcatgggtggtacgccagtgtggccactgattgcgctgtcgaatatcgctcagggctccgccgtgatcggcattatcatttccagccgcaagcacaatgaacgcgagatctccgtgcctgcggcgatctccgcctggcttggggtcactgagcctgcaatgtactgcatcaacctgaaatatcgcttcccgatgctgtgcgcgatgattggttctggtctggcaggattgctatgcggcctgaacggcgttatggcgaatggcatcggcgtaggcggcctgccgggaattctctcgattcaaccgaactactggcaggtgtttgcgctggcaatggctatcgccatcatcatcccgattgtactcacctcgtttatctatcagcggaaataccgcctgggcacgctggacattgtttaa

SEQ ID NO: 466050 - DNA, 213 bp, Shigella boydii; identical to SEQ ID NO: 36005

SEQ ID NO: 466051 - DNA, 390 bp, Shigella boydii
atgaataacgaggaaacattttaccaggccatgcggcgtcagggcgttacccggcgcagctttctcaaatattgtagtctggctgccacgtcgctgggattaggcgcgggaatggcaccaaagattgcctgggcgctggagaacaaaccccgcattccggtggtatggatccacggtctggaatgcacctgctgtaccgaatcttttatccgctccgctcacccactggcgaaggacgtcatcctttccctgatttccctcgattatgacgatactttgatggctgccgccggaacccaggcggaagaagtcttcgaagacatcaccaggcggaagaagtcttcgaagacatcatcacgcaatacaatggcaaatatatcctcgcagtag

SEQ ID NO: 466052 - DNA, 396 bp, Shigella boydii
atgatagatatggaaatgaaatgtgtacctgttatcaccaagttgttgcatcaacgcaactggtcacttatgaccatatctgatgggcaagggtcatttataacttcagataacccagtttgcttaatgtggactaatcctgaattagcacgaggcccttattcccccgggtttggtgtaaaagacactttagttttgttcccagtatcaaaaaaccttcttttggcgggcgagtttgatggtcatgagggtgtattcagttgtaatgaggagcaggctgcggtcttcaatacttcagtcattcggcataccgcagaaagaatattttcatctaatgataatttcaaatttttagactcatctaaaaaaatgaagcaaggcaaaagcctggtttga

SEQ ID NO: 466053 - DNA, 1014 bp, Shigella boydii; identical to SEQ ID NO: 463632

SEQ ID NO: 466054 - DNA, 264 bp, Shigella boydii
atgtttatgtggtggaaaggaaaacttcaacccggtaattatgacaagctgatttccgcaatggatttctacccgacagctcttgatgcagccgatatcagcattccaaaagaccttaagctggatggcgtttccttgctgccctggttgcaagataagaaacaaggcgagccacataaaaatctgacctggataacctcttattctcactggtttgacgaggaaaatattccattctgggataattaccacaaatttgggtaa

SEQ ID NO: 466055 - DNA, 852 bp, Shigella boydii; identical to SEQ ID NO: 464102

SEQ ID NO: 466056 - DNA, 303 bp, Shigella boydii; identical to SEQ ID NO: 464103

SEQ ID NO: 466057 - DNA, 240 bp, Shigella boydii
atgcacaataaaaccacaccggacgcagccgccgaagccatcaaaacgctgatgcacgcgctgattgatatttctgttatcgcggacagggcacataagcacgccaccagcgaaacagaatatgccggtgctttcgttcctcactcactggctgtcatgcaatttagtgctgatacggcgctgaatgaggccaaagctatcctgattgctgattgtgaaaatggggggggttatgcgtga

SEQ ID NO: 466058 - DNA, 213 bp, Shigella boydii
atgattaatctgtcacttactgaccttaaccgcattcagtttcgtgagaaattcacagggcagctactggtcaatgtggataaaggtcgcgtggtgtgtaattaccacttaccagatgaagcaattgtcgccacaagggaatcattacaggaaatcacaaaacgtgccggaatgattaacacgaatattcaggggatgctttatgcacaataa

SEQ ID NO: 466059 - DNA, 792 bp, Shigella boydii
atgaagattgaatatacgccagaacgtgggcggggattcgttcgccctggtgaaactgaaaaacaacaaaattggggtttttcaggtataaaaaaagcggccccgaaatggagccgcctttctgaacagataacccgctgcgccgtttgtgtgtgtgatcccaaacataagcacggggatgatagccgctatcaggctggtgggcaatgcaatcagtctggttcagttcgttgccatacctgcaatgagcgcttttccctgtactctttaaggaattgctcaagggcaaaagcacatggtgcgaatctttctgattcatgctctatctttctgcgccgtcttttccgtgccggtgataatgttttggtcaattctttatcggtcattgtgttgtcctgcatagcaatgcgccgtaatacctcacaccacggcgctgatagtgattattctgattctttggccttgcggcgctggcggcgtttgatctcgccttcaagtgccgaaacgataaattgccctgtactttcgccatcttcctttaaattttctacagcatcagctattgcgtgtggtactcgagcctcaagctttttggattttgcattaactgcttttgttgccatatctgatttcctcgttattaggtggctgacagtatacacacaagaaaacggaaaaacactattgacgtggctgacacccgttactaatatagtggctgacacctttatcaaggtaatcgatgaaaagacaaagccccgcaagtgtcgttaccactcgcagggcttctaa

SEQ ID NO: 466060 - DNA, 246 bp, Shigella boydii
atggcccagggattgccccagaaaaccgcgaacatatctttgaaccatatctttgaaccttttgttcgcctcgatcccagccgggatcgctcaaccggcggctgcgggctggggctggcaattgtccactctatagcactggcaatgggcggtacggttaattgtgacaccagcgaactgggtggtgctcgcttctcgtttagctggccgttatggcataacatcccgcaatttacctctgcctga

SEQ ID NO: 466061 - DNA, 309 bp, Shigella boydii
atgtctatagactggaactggggtatttttttacaacaagccccgttcggcaacaccacctatcttggttggatctggagtggttttcaggtgacgatcgctttgtcgatctgcgcctggattatcgctttcctcgtcggttcatttttcggcattttacgtaccgttccaaaccgttttctctccggtctgggtacgttgtatgtcgaactgttccgcaacgtgccgttgattgtgcaattctttacctggtatctggtgatcccggagctgttgccggagaaaatcggcatgtggtttaaggcctag

SEQ ID NO: 466062 - DNA, 792 bp, Shigella boydii
atgagagcctgcattaacaatcaacagattcgccaccataacaaatgcgtgattctggaactgctgtaccggcaaaagcgcgccaataaatcaacgctggcccggctggcgcaaatttcgattccggcagtcagtaatattttgcaggaactggaaagcgaaaaacgggtggtgaatattgacgatgaaagccagacgcgcgggcatagtagcggtacatggctgattgcgccggaaggtgactggacgctgtgcctgaacgtgacgcccaccagtattgagtgtcaggttgctaatgcttgtttaagtccgaaaggtgaatttgagtatttacagattgatgcaccgacgccgcaggcgctgctgtccgaaatcgaaaaatgctggcatcgccaccgtaaattgtggccggaccgcaccatcaatctggcgctggcaatccacggtcaggttgatccggtgaccggcgtgtcgcaaaccatgccgcaagcgccgtggacgacgccggttgaggtgaagtatctgctggaagagaagctgggcattcgggtgatggtcgataatgactgcgtgatgctggcgctggcggagaaatggcaaaataattcgcaggaacgggatttctgcgtgatcaacgttgattacggcattggctcgtcgttcgtgattaacgagcaaatttatcgcggcagtttgtatggtagcggacaaattggtcacaccatcgttaatccggatggcgtcgtctgcgactgtggacgttacggctgcaggaaaccgtcgcctcgttaa

SEQ ID NO: 466063 - DNA, 225 bp, Shigella boydii; identical to SEQ ID NO: 462228

SEQ ID NO: 466064 - DNA, 708 bp, Shigella boydii
atgagttctcaatttacgacgcctgttgttactgaaatgcaggtcatcccggtggcgggtcatgacagtatgctgatgaatctgagtggtgcacacgcaccgttctttacgcgtaatattatgattatcaaagataattctggtcacactggcgtaggggaaattcccggcggcgagaaaatccgtaaaacgctggaagatgcgattccgctggtggtaggtaaaacgctgggtgaatacaaaaacgttctgacgctggtgcgtaatacttttgccgatcgtgatgctggtgggcgcggtttgcagacatttgatttgcgtaccactattcatgtagttaccgggatagaagcggcaatgctggatctgctggggcagcatctgggggtaaacgtggcatccctgctgggcgatggtcaacagcgtagcgaagtcgaaatgctcggttatctgttcttcgtcggtgatcgcaaagccacaccgctgccgtatcaaagccagccggatgactcatgcgactggtatcgcctgcgtcatgaagaagcgatgacgccggatgcggtggtgcgcctggcggaagcggcgtatgaaaaatatggcttcaacgatttcaaactgaaaggcggtactggccggggaagaagaggccgagtctattgtggcactggcgcaacgcttcccgcaggcgcgtattacgctcgatcctaa

SEQ ID NO: 466065 - DNA, 777 bp, Shigella boydii
gtgattggcgcgttcaacgccaactatcatcttcaggaaggtagttataaccacacgatggggattcgcccgcaagggcgcatgctgatcctcggcggcaccggaccaatgggactgttggcgattgattatgcgctacatggacccgttaacccgtcgcagctcgtcattaccgataccgacaacgataaattgagttatgcgcgcaagcactatccatcagaaccgcaaacactgattcattatctcaatgccgccgatgcagcatttgatacgctaatggcgctgagtggcggtcacggcttcgatgatattttcgtctttgtgcctaatgaaggactggtgactctcgcctcttccttgctggcgacagatggttgcctgaatttcttcgccggaccgcaggataaacatttcagcgcgccaattaatttctacgatgtgcattatgcatttacccactacgtgggcacgtcaggtggcaataccgacgacatgcgcgcggcggtcaaactgattgaagagaaaaaagtgcaggccgcaaaagtggtaacacatattcttgggctgaatgccgcgggcgaaaccacgcttgaattgcctgccgtcggcggcggcaaaaagctggtgtataccgggaaatacctgccgctgacgtcactcacgcagattcaggatcaagcactggcggcgattctggcgcgtcatcaggggatctggtccggtgaggcggagcaatatctgctcactcatgcagaggcaatttcccatgattaa

SEQ ID NO: 466066 - DNA, 132 bp, Shigella boydii
atgagtaaggtcttcacaattggagaaattctggttgaaattatggcgagtaaaatcggccagccatttgatcaaccaggtatctggaacggcccttatcccagtggtgcgcccgctatttttatcgactag

SEQ ID NO: 466067 - DNA, 645 bp, Shigella boydii; identical to SEQ ID NO: 464944

SEQ ID NO: 466068 - DNA, 267 bp, Shigella boydii; identical to SEQ ID NO: 464426

SEQ ID NO: 466069 - DNA, 309 bp, Shigella boydii
atgaaaaattgctggaagatcctcgatatagaggaaacgactgacgtcgatattatccgccgcgcttatctggcgctgttaccgtcctttcatccagaaaccgatccgcagggttttaaacaacttcgtcaggcgtatgaggaggcgctacggattgcgcagtcgcctgctaaatctgtttggcaaccagaagaatatgaggtagcagaacatgaaattctgctcgcctttcgcgcgttacttgcctctgatagcgaacgttttctgccctccgcctggcagcgattcattcagcaattaaattattga

SEQ ID NO: 466070 - DNA, 825 bp, Shigella boydii; identical to SEQ ID NO: 464595

SEQ ID NO: 466071 - DNA, 168 bp, Shigella boydii
atgtttaggttgaaccctttcgtacgggtcgggctgtgtttgtccgctatttcttgtgcatggcctgtgttagcggtcgatgatgatggcgaaacgatggttgtcactgcatcttccgttgaacaaaacctcaaagatgcacccgccagtatcagcgtcattacctag

SEQ ID NO: 466072 - DNA, 213 bp, Shigella boydii; identical to SEQ ID NO: 36005

SEQ ID NO: 466073 - DNA, 1425 bp, Shigella boydii
atgttaaatgttaaaaaaatcattaacgatagtaatattgcgttcggtactagtggtgctcgcggtttagtgatcgatttttcccatgatgtttgtgctgcgttcactcatgcgtttctttctgttattgatgacaaatacaattttaataaagttgccttagcaattgataaccgcccaagcagttacgaaatcgctcaggcatgcgccttcgctatcaaacaacatgggttcactgtcgaatatcatggtgtaattccgactcccgcattagctcattattcgatgcagaaaaacattccctgcataatggtcacagggagtcatatcccttttgatcgtaatggcttaaaattctacagacctgatggtgaaatcactaaagaggatgagctcgcaattataaatagtgagtatacatttccgcctgtaggtgtattacctcatcttgaaacaagcactcaaggtgcagactactaccttgagcgttatgtttctctttttaatcccgagattttaaaggggaaaagaataggggtatatgaacattctagtgcgggacgcgatttatatgctcctctttttaatcaaatgggtgcagaggtcatttccctcggcaggagtgatgagttcgttccgattgatacggaagcagtaagcgatgaagatcgtatacttgcaagagagtggtctaaaaaatataatcttgatgctattttctcaacagatggcgatggtgatcgtcctttagttgctgatgaaaatggtgaatggttaagaggcgatattctgggactacttactgctattgaacttaatatcaaggcgttggctattccagtgagttgtaatacagcaattgaagagtctaataaatttgcaagtatacaacgaacgaaaataggttctccttatgtaattgcagcatttgcagatcttgctaagcaatttgattcagtcgcaggttttgaagctaatggtggttttctccttgcctccgatttacaaattaatggcaaggaattaaaatcgttgcctacacgagatgctgtgttaccagcattaatgctcttaatagcttctcgcaatagtactatttctcaactgattaataatcttcctcagcgattcacttggtcagatagagttaaaaacttcccttcagattcaagtcaacaaattataaaaaatgccatatcgtcacccaataatttctttaatagtttaggttatgaatcattatcctgttccgctattgatgaaacggatggtgcaagatttactttaaataatggtgatattatacatctccgtccttccggtaatgctccagaactccgttgttatgctgaggccagtgatgaaaatcaggctaagcaatatgttacgaatgtgctgggaaatattacctctttgatttcttga

SEQ ID NO: 466074 - DNA, 747 bp, Shigella boydii
atgcgaatttctattatcacagctacttataatagtgaaaaaactctccttgatacattactttctctagaaaaacaaacgtatccagatatcgaatatatagttgtagatggagcatcgaacgataatacaattaagctgattaagagtaattgtacaaaagtttcaaaaatcatttgcgaacccgataagggcatttatgatgctctgaataaaggtattcaagcagcttcgggtgatgttattggttttttacattctgatgatttattagcttatgatgatgctattgcagatatagcaaaaacatttgaaattacagggtgtgatgctatttatggcgatttggagtatgttgcccaaaataatacgactaaacgtattagattatggaaaagtggttcatttagtcgtttcaagatgaaagtgggttggatgccgccacacccatcattttatatgaaacgcaaatgttataggcagtttggttgtttttctttagattatcgtatatctgctgattatgactcattattacgatatattttaaagcaacgtatttcaatagaatatttaccaaaagtcttagtgaagatgcgtgttggtggaattagcaatcgttcagtctcttcaatggtaaagaagtcaatggaagacatccgtgttatgaaccagaatggtattatctggccaatagctttagtgtataaaaatatatccaaacttcctcaatttattaaaaagtaa

SEQ ID NO: 466075 - DNA, 1407 bp, Shigella boydii
atgctacttcccgttgtcatggccggtggttctggtaccagattatggcctctttcacgtacactttatccgaaacaatttctgtctttaaatagtcgtttaaccatgttgcaagagacattgcggcggcttgacaaggtagaacataaacccgctttggtcatttgtaacgaatcacatcgctttatcgttgctgaacaattgcgtaaagagggtttaaagcatagcggtattttgcttgagcctgttggtcgtaatactgcgcctgctgtagcactcgcagcactacaggctatggtaactggagatgatcctattctgttggttcttgctgctgatcatgaaattcagaatgaggataatttcattgatgcagttcttgcagccaagaattttgcagaacagggtaagcttgttacgtttggtattgttccaacatccccagaaacgggctatggttacattaagtcaggtgaatatctggatggaaaaggttacaaagttgctgcttttgttgaaaaaccagagcttcacgtagctcagcagtatatatcagatggcggttatctttggaatagtgggatgtttatgttcagagcatctgtatttatcgatgaactgaaaaaattccgaccagatattttagccagttgccaacgctccttgtcctcttcgatacaagatttagattttatccgtctggataatgcttcattttcttgctgtcctgaagagtctattgactatgcagttatggaaaaaacagccgaagctgtcgtcgttccattaaatgcacaatggagtgatgttgggtcatggtctgcattgtgggaaataagttcaaaagatcaaagcggtaatgccattcgtggtgatgtattggttgaagatgctacagatagttatctttattcgcagcatagacttattggtgccgtgggcataaaggatttggttgttgttgaaacgaaagatgccgtattagttgctcataaagataaagttcagcaagttaaaaacatcgtcgctcaacttaaaaagaataatcgcacagaatatttacagcatcgggaaatatttcggccttggggcagtcatgatactatagctgaagggccgcgctttcaagtgaaacatgtgattgtattacctggccacattaccgctaagcaaattcattaccatcgtactgagcattggattgttgtctcggggacagctaaagtccatcttgaagataagacttaccttgtttctgaaaatgaatcaacatatatacctgttggtgttccacatgccattgaaaatcctggcaagatcccgcttgaaataatcgaggtcagatcaggagtctacctggaagaggatgatgttataagagtttcttcttctggagtaggatactaa

SEQ ID NO: 466076 - DNA, 213 bp, Shigella boydii; identical to SEQ ID NO: 36005

SEQ ID NO: 466077 - DNA, 252 bp, Shigella boydii
atgagcaacattaccatttatcacaacccggcctgcggcacgtcgcgtaatacgctggagatgatccgcaacagcggcacagaaccgaccattatccattatctggaaactccgccaacgcgcgatgaacgtaagcgtgcagcaagaaccgtattgacggggatgtgttattcagtcggcagtgctacgcgccaggggagcagttcgccgacccggtttatcggccagtcggctatgacgtcaagtacatag

SEQ ID NO: 466078 - DNA, 213 bp, Shigella boydii
atggtcagtctgggccgcaaaaactacctgttcttcggttcggatcatggaggagagcggggagcgctgctgtacagcctgatcgggacgtgcaaactgaacggagtggagccagaaagctacctccgctatgtacttgacgtcatagccgactggccgataaaccgggtcggcgaactgctcccctggcgcgtagcactgccgactgaataa

SEQ ID NO: 466079 - DNA, 213 bp, Shigella boydii; identical to SEQ ID NO: 36005

SEQ ID NO: 466080 - DNA, 174 bp, Shigella boydii
atgcaggatgctgaaattaaaagagaaataataagaaaacatgaaacagggcagttttctcaattaaatagtaaattatcctcagaagagaaaagattattttctactattctaatgattagtaaatatttgttttatttccgattgcaattcctttttatttttaatgcctag

SEQ ID NO: 466081 - DNA, 1377 bp, Shigella boydii
ttggcgaaagatgcgcagaaattcgcagccaaagtctttcatgccgataaaacctattttgtgctgaacggcacatcggcagcgaataaagtggtgacgaatgcgctgttaacgcgtggcgatctggtgctcttcgaccgtaacaaccataagtcgaatcatcacggcgcgctgattcaggcgggggcgacgccggtctatctggaagcttcacgcaacccgtttggtttcattggcggtattgatgcgcactgttttaatgaagagtatctgcgccagcaaattcgcgacgttgcgccagaaaaagccgagctgccgcgcccgtttcgcctggcgattattcagctgggaacctatgacggaactgtctataacgcccgtcaggtgatcgataccgttgggcatctgtgtgattacattctgtttgattccgcgtgggtcggttacgaacagtttatcccgatgatggcggatagctcgccgctgctattagaacttaacgaaaacgatccggggatctttgtgactcagtcggtgcacaaacagcaggcgggattctcacagacgtcgcagatccataaaaaagataaccatatccgcggacaggcgcgtttttgcccgcataagcggttgaataacgcctttatgctccatgcttctaccagccctttctatccgctgtttgctgcactggatgttaacgccaaaattcatgaaggggagagtgggcgtcggctgtgggctgagtgcgttgagttgggtattgagtcgcgcaaggctattcttgcgcgctgtaagctgttccgcccgtttatcccgcccgttgttgatggcaaattgtggcaggattatccgacatcagtgttagccagcgaccgccgttttttcagttttgagccgggggcgaagtggcacggctttgaaggatatgccgcggatcagtattttgttgatccgtgcaagctgttactcactacaccaggtatcaatgccgaaaccggcgaatatagcgactttggcgttccggcgacgattctggcgcactatctgcgtgagaacggcattgtgccggagaagtgcgatctcaactccattctgttcttattaactccggcggaaagccacgagaagctggcacaactggtagagatgttggcgcagtttgaacagcatattgaggatgactcgccgctggctgaggtgttgccgagcgtttataacaaatatccggtgcgctatcgcgactacactttgcgccagttgtgtcaggagatgcacgatctgtatgtcagtttcgacgtcaaagacctacaaaaagcgatgttccgccagcagagtttcccgtcagtggtgatgacccccccaggatgcgcatag

SEQ ID NO: 466082 - DNA, 213 bp, Shigella boydii; identical to SEQ ID NO: 466078

SEQ ID NO: 466083 - DNA, 957 bp, Shigella boydii
atggaaaaatccgtcgagctggtaaaagcatatgttcgtgctggcttcagtaaaattcatcttgatgcgtcaatgtcctgcgcgggggatcccataccgttagcaccagaaacggttgcggaacgagctgctgtgctttgctttgctgcggaaagtgtggcgacagattgccagcgtgagcaactgagctatgtcattggcaccgaagttccggttccgggcggtgaggccagcgccattcagtcagtacacatcacccatgttgaagatgccgccaatactttacgtacgcatcaaaaggcctttattgcccgtgggctgacagaggcgttaacacgtgtgattgccatcgtggtgcagccgggtgtggaatttgatcacagcaatattatccattatcagccgcaggaagcgcaggcgctggcgcaatggatagaaaacacccgaatggtttatgaagcacattctaccgattaccagacccggacggcttattgggaattagtccgcgatcactttgcaatattgaaagtcggtcccgcattaacctttgctttacgcgaggcgatatttgcactggcacaaattgagcaggaacttatcgcccccgaaaatcgcagcggttgcctggcggtaattgaagaagtgatgctcgacgaaccgcaatactggaaaaaatattatcgtacgtgttttaacgattcattactggatattcgttacagcctgtcggatcgtattcgttattactggccgcatagtcggattaaaaatagcgtcgaaacgatgatggtgaatcttgaaggcgtggacatcccactgggcatgattagtcagtatcttcccaaacaatttgaacgcattcagtccggggaattatcagcaataccgcatcagctgattatggataaaatttatgatgttttgcgcgcctatcgctacggctgtgcggaataa

SEQ ID NO: 466084 - DNA, 213 bp, Shigella boydii; identical to SEQ ID NO: 464184

SEQ ID NO: 466085 - DNA, 378 bp, Shigella boydii; identical to SEQ ID NO: 465880

SEQ ID NO: 466086 - DNA, 345 bp, Shigella boydii; identical to SEQ ID NO: 464216

SEQ ID NO: 466087 - DNA, 276 bp, Shigella boydii; identical to SEQ ID NO: 464627

SEQ ID NO: 466088 - DNA, 552 bp, Shigella boydii
atgtctttggattccccgcaacgcttccacaaattctcaaaaaaatcaggcattaactatattgcatcgcaaaagctctcacaaaacaagattaataaatttaataattaccttttccgctggcagggcctggatggctcagaaattctgatgcataactttcctgaagacacgtatgatagccgagcacgtgctcgctctttagaatatattgaacaaaactataatgaaaaagagatctgtccctatgcgcttatggtgtatggtgtcggtgatgacggcgctggccccggtgaggaacatatagaacgattaacacgtatacgcaatattgatggcttacctcatgttgatttcagccgtgttgataagttcttcacttacgccgacgcctttcgcgaaagcttgcccattatttcaggtgaactttatttcgaggctcatcaagggtgctttacatcagagtcagcaactaaagctcataatcgaaatatggaaaataaattacatgatgctgaattttttacaactattactaataatatgacataa

SEQ ID NO: 466089 - DNA, 213 bp, Shigella boydii; identical to SEQ ID NO: 36005

SEQ ID NO: 466090 - DNA, 213 bp, Shigella boydii
atggtcagtctgggccgcaaaaactacctgttcttcggttcggatcatggaggagagcggggagcgctgctgtacagcctgatcgggacgtgcaaactgaacggagtggagccagaaagctacctccgctatgtccttgacgtcataaccgactggccgataaaccgggtcggcgaactgctcccctggcgcgtagcactgccgactgaataa

SEQ ID NO: 466091 - DNA, 768 bp, Shigella boydii
gtgaaaaagcaatggattgttggcacggcactgcttatgttgatgactggtaatgcctgggcagatggcgaaccgccaactgaaaatatcttaaaagatcaattcaaaaagcagtatcacggcattctcaagcttgatgctatcaccttaaaaaatcttgatgctaagggtaatcaggccacttggtcagcggaaggcgatgtctcttccagtgacgatctctatacctgggtcggtcagttggcagattacgaactgctcgaacagacctggacgaaagataaaccggtaaaattctcggcgatgttaaccagtaaaggaacgcccgcgtctggctggtcggtgaacttttactcttttcaggcggcagccagcgatcgtgggcgggtggtcgacgatatcaaaacgaataataaatatctgatcgtgaatagcgaagatttcaattatcgctttagtcagcttgaatctgcgttgaatacccagaagaactcgattcctgcgctggaaaaggaagtgaaagcgtttgataagcaaatggtggcggcgcagaaagcagcggatgcatattggggaaaagatgcaaacggtaagcaaatgacccgcgaagaagcctttaaaaaaattcaccaacagcgtgatgagtgtaagcgtgcagcaagaaccgtattgacggggatgtgttattcagtcggcagtgctacgcgccaggggagcagttcgccgacccggtttatcggccagtcggttatgacgtcaaggacatag

SEQ ID NO: 466092 - DNA, 351 bp, Shigella boydii
gtggcaaatcgtgagcctgtcaccattcatcctgacgatgccctggcgcgcggcattcaagatggcgatactgttcggctgtggaacgcacgcgggcaaattcttgccggagcggtcattagcgagggaattaaacctggcgtgatttgtattcacgaaggggcatggccggatttggatttaaccgctgacggtatttgtaaaaacggcgcagtcaacgtgctgaccaaagatctccccagctcgcggctggggaatggctgtgcgggtaatacggcgctggcatggctggaaaaatacaacggttcggaactgacacttacagcgtttgaaccaccggccagctcataa

SEQ ID NO: 466093 - DNA, 4542 bp, Shigella boydii
atggtagtcgttcaggcacctacgttaagccagaaagattcctcggtatcgttaagtacccagacgttgagcgcggattcccattcaaccgccacactgacttttattgcgcatgatgcagcaggtaatcctgttatcgggctggtgctctcgacgcgtcacgaaggtgttcaggacatcaccctttctgactggaaagataatggtgacggaagctatacccagatcctgaccacaggtgcgatgtctggcacgctgacgcttatgccacagctgaacggtgtggatgcggctaaagcccccgccgtggtgaatatcatttctgtttcgtcatcccggactcactcgtcaattaagattgataaggaccgttatctctccggcaatcctatcgaggtaacggtagaactgagagatgaaaatgacaaacctgttaaggagcaaaaacagcaactgaataccgcagtcagcatcgacaatgtgaaacctggtgtcactacagactggaaagaaaccgcagatggcgtctataaggcaacctataccgcctataccaaaggcagtgggcttactgcgaagctattaatgcaaaactggaatgaagatttgcataccgctggatttatcatcgacgccaacccgcagtcagcgaaaattgcgacattatctgccagcaataatggtgtgctcgccaatgagaatgcagcaaacaccgtctcggtcaatgtcgctgatgaaggaagcaacccaatcaatgatcataccgtcacgtttgcggtattaagcggatcggcaacttcctttaacaatcaaaacaccgcaaaaacggatgttaatggtctggcggctattgatctgaaaagtagtaagcaggaagacaacacggttgaagtcacccttgaaaatggcgtgaaacaaacgttaatcgtcagttttgtcggcgactcgagtaccgcacaggttgatctgcagaagtcgaaaaatgaagtggtcgctgacggcaatgacagcgccacaatgaccgcgacagttcgggatgcaaaaggcaacctgctcaatgacgtcaaggtcaccttcaatgttaattcagcagcagcgaaactgagccaaaccgaagtgaatagccacgacgggatcgccacagctacgctgaccagtttgaaaaatggtgattatacggttacggcctctgtgagctctggttctcaggctaatcaacaggtgaattttatcggtgatcaaagtactgcagccctgaccctcagtgtgccttcaggtgatatcaccgtcaccaacacagctccgcaacatatgactgcaaccttgcaggataaaaatggcaacccactaaaagataaagaaatcaccttctctgtgccaaacgacgtcgcaagtcggttctcgattagcaacggcggaaaaggcatgacggatagtagcggggttgcaatcgcctccctgaccggcacgttagcgggcacgcatatgatcacggctcgtctggctaacagcaatgtcagcaatgcacagccaatgacgtttgtggcggataaagacagagcggttgtcgttctacaaacatcgaaagcggaaatcattgggaatggcgtggatgagacgcccctgacagcaacagtgaaagatccttttgataacgtggttaaaaatctgtcagtagtcttccgcacctcccccgcagacacgcaactgagtctgaacgcgcgtaatactaatgagaacggtattgctgaagttacccttaagggcacggttttgggtgttcatacagccgaagccatactgcttaacggcaacagagatacgaagatagtcaatattgcgcccgatgccagcaacgcgcaggtcaccctgaacatccctgcacaacaggtggtgacgaataacagcgacagcgtgcagctgacggcgacggtgaaagatccgtcgaatcatccggtggcgggaataacggtgaacttcaccataccacaggacgtggcggcaaactttacccttgaaaataacggtattgccatcactcaggccaatggcgaagcgcatgtcaccctcaaaggcaaaaaagcgggcacgcatacggttaccgcaacgctgggtaacaataatgccagcgatgcgcaaccagtcaccttcgtggcggataaggacagcgcggttgtcgttctgcaaacatcgaaagcagaaatcattgggaatggcgtggatgagacgactctgacggcaacagtgaaagatccttttgataacgcagtaaaagatctacaggtcaccttcagtaccaaccccgcagatactcaacttagtcagagcaaaagcaatactaacgacagtggtgtggccgaagttacctttaagggcacggttttgggtgttcatacagccgaagccacactgcctaacggcaacaacgatacgaagatagtcaatattgcgcccgatgccagcaacgcgcaggttacgctgaacatccctgctcaacaggtggtgacgaataacagcgacagcgtgcagctgacggcgacggtgaaagatccgtcgaatcatccggtggcgggaataacggtgaatttcaccatgccacaggacgtggcggcaaactttaccctcgaaaataacggtattgccatcacccaggccaatggggaagcgcatgtcacgctcaaaggtaaaaaagcgggtacgcatacggttaccgcaacgctgagtaataacaataccagtgattcacagccggtaacgtttgtggcggacaaaacctcggctctggttgttcttcagatatcaaaaaatgagatcacaggtaatggcgtagatagcgcaacgctaactgcaacggtcaaagatcagttcgacaatgaggtgaacaatcttccggtaacattcagcacagcttcttcaggcctcaccctgaccccaggggaaagtaataccaatgtgtctggcatcgcgcaggccactctcgcaggcgttgcctttggtgagcagacggttactgcatcactggctaatactggtgccagcgacaacaaaactgtgcactttattggcgacacaacggcggcaaaaattatcgagttgacgcctgacccaggcagcataatcgccggtaccccacagaacagcaccggtagcgtaatcaccgctacagtcattgataataatggctttccggtgaaaggtgtgactgtgaacttcaccagcaacgcagcgacagccgaaatgacgaatggcggccaagccgtaacgaacgaacagggtaaggctaccgtcacttataccaatacccgctcctcgatagaatcaggagcgagaccggataccgttgaggccagtctggaaaatggtagctctacgcttagcacatcaattaatgtcaacgctgatgcgtctacggcacatctcaccttgttacaggcacttcttgatacagtctccgcaggcgacactaccaatctgtatattgaggtgaaggataattacggcaacggtgtaccccagcaggaggtaaccctcagcgtttcaccaagtgaaggcgtgactcccagtaataacgctatatatacgaccaatcacgacggcaatttttacgcaagctttaccgctacaaaagccggggtttatcaagtgacggcaaccctcgaaaatggcgattcgatacaacaaacggtgacctatgtgccgaacgtcgcgaatgccgaaatcacgctggcagcctcgaaggatccggtgattgccgacaataacgatctcacgacactaacagcaacagtcgctgatacagagggcaatgcgatagccaacactgaagtaacatttactctgccggaagatgtgaaggcgaacttcacgctgagcgatggcggtaaagcggttactgatactgaaggcaaagcgaaagtcacgctgaaaggtacaaaagcaggcgctcatactgttacagcatcgatggctggcggtaagagtgagcagttggtggtgaattttattgcggatacgctcacagcgcaggttaatcttaacgttaccgaggacaactttatcgctaataacgtcgggatgaccaggctgcaggcaacagtgactgatggaaacggcaacccgttagccaatgaggcggtgacattcacgctaccggcagatgtgagcgcaagctttactctcggacaaggcggttccgccattactgacatcaacggcaaggctgaagttacactgagcggtacaaaatccggctcctaccccgtgacagttagcgtgaacaattatggtgtcagtgatacgaaacaggtgactttgattgccgatgctggtaccgcaaaactagcctccttaacctctgtatactcattcgtcgtcagcacgaccgagggcgcgaccatgactgcaagcgtcactgacgctaacggcaacccggtagaaggcataaaagttagtttccgcggaacctccgtcacgctaagcagcaccagcgttgaaacggatgatcggggtgaagtggtcaacaaaaactggccaccgagttag

SEQ ID NO: 466094 - DNA, 378 bp, Shigella boydii; identical to SEQ ID NO: 465895

SEQ ID NO: 466095 - DNA, 213 bp, Shigella boydii; identical to SEQ ID NO: 36005

SEQ ID NO: 466096 - DNA, 144 bp, Shigella boydii
atgtgtggcattttcagtaaagaagtcctgagtaaacacgttgatgttgaataccgcttctctgccgagccttatattggtgcctcatgcagtaatgtgtcagttctatctatgttatgcctgcgggcgaagaaaacaatctaa

SEQ ID NO: 466097 - DNA, 381 bp, Shigella boydii; identical to SEQ ID NO: 458903

SEQ ID NO: 466098 - DNA, 591 bp, Shigella boydii
atggcacaaccactcagtaacccgacagacgtgaacagcgaaatcaatgcacaggactttatgctgcggcagtttctcggacgtcatgcgtttatcactctgggacgggtggtagccgtggaagagggatttattgaggcccgaccgatggtaatgggcgttgcagcagacggttccccggttgaacatgaggtgatttataacattcccgtatggcgactacaggggggcggtaatgcggtgattatcccgccacatgtgggggatatcggttttcttgccatctggctgggtggcgtgctcaacggtgatcccgtccagtttgtggtatttgatgacaaccagatacggattgtatctccctggaaagtggagatatccgcgcctgagggggtgattaatgcgccgaaaagcttcaccgttaactcaccacaaattgcgctgaacggcgataccgccgtcagtaaggggcttgacgttaccgggcagtccaggctttccggcggttcgaacatcgggggtattgattttggaaaccacgttcacggcggcgttgagtccggcggctcaaccacgcagggatcccggtaa

SEQ ID NO: 466099 - DNA, 378 bp, Shigella boydii; identical to SEQ ID NO: 465904

SEQ ID NO: 466100 - DNA, 165 bp, Shigella boydii
atggcaatttcatcgcgtaacacacttcttgccgcactggcattcatcgcttttcaggcacaggcggtgaacgtcaccgtggcgtatcaaacctcagccgaaccggcgaaagtggctcaggccggcaacacctttgctaaagagagcggggcgagcgtggactga

SEQ ID NO: 466101 - DNA, 213 bp, Shigella boydii; identical to SEQ ID NO: 36005

SEQ ID NO: 466102 - DNA, 219 bp, Shigella boydii; identical to SEQ ID NO: 465432

SEQ ID NO: 466103 - DNA, 705 bp, Shigella boydii
gtgaatacacaacaactgaaaatgaagagtgcacctgtgctacctatttcctgtttgattatgggcgggactcagttatcacgtcattattatgtgaaaggcgggatattctttgcaatacaagtatgctttttgctttatctttccgatattgtgcatacattaataggtttgttcacattaggtgatgtcgcgcaaattcgaaaagggttgactgttattcagggtgacaattctatatttatgcttgtagagggcgtgatagcgaccattattgttggcttattcgccactatttacatccttaatattaaagatgcgcggaactcatcttattgccatctgacttttaaacaacagttatataagctctatgaggataaatttgcatttatagtcctaacgcccgcatttttagcgagtatagcattcattgttttacctattgtaattacagttcttgtatcgtttacaaactatgctgcgccaaatcacatcccaccaaagaacctggttgattgggttgggattaaaaatttcataatgttgtttaaatttaaaatatggtctgatacgtttctaggtgtcgctctctggacatttatttgggcaatttgcgcgacggtttttaccttcagttttggctttattctggctttagcactggctaaaaaaatatacgtttcgcaaaagtctggcgattga

SEQ ID NO: 466104 - DNA, 378 bp, Shigella boydii; identical to SEQ ID NO: 465880

SEQ ID NO: 466105 - DNA, 150 bp, Shigella boydii
atggcgggcgtacgcaatagcaagtttgtggtggcgattaatcatgacgccagcgctgcggtattttcacaggcagatgttggcgtggttgatgactggaaagtggtgctggaggcactggtgacaaacattcacgcagattgccaataa

SEQ ID NO: 466106 - DNA, 2190 bp, Shigella boydii
atgtttgtggagcataacctgataaaaaatatcaagatattcacactagcgtttacgctcaccgtggtacttattcagctatcccgttttatttcgccacttgccattatccattccagttatatctttctggcgtggatgccactgtgcgtaatgctgtcaatcttgtttatctttggctggcgaggtgtcgttcccgttttatgcgggatgttttgcaccaatctgtggaactttcatctctcttttttacagactgcggtcatgctcggtagccagacgtttgtcgtgttgtgtgcctgcgcaatattacgctggcagctggggacgcgttggcgttatggattgaccagccgatatgtctggcaacgtctgttctggcttggtttggtgacgccgatcggcatcaaatgcagcatgtatcttgtggggagcttctttgatttcccgctaaagatatccacctttttcggcgatgcggatgccattttcacggtcgttgatttgctaagccttttcaccgctgtgctgatttacaacatgcttttctactatctcactcgcatgattgtaagtccccactttgcgcagatattgtggcgcagggatatcgcgccgtcgttgggcaaagagaaacgcgcatttaccttaagctggctggcagcgttaagcgtgcttctacttctgttgtgcacaccttatgaaaacgactttattgccggttacctggtacccgttttcttcatcatctttaccctcggggtcggtaagcttcgctatccgtttttaaatctcacctgggctgtttcaacgctttgccttctgaattacaaccagaactttttgcaaggggtggaaaccgaatattcgctggcatttattcttgcggtgctgatttcctttagcgtttgcctgctctatatggtgcgcatttatcatcgcagtgaatggcttaatcgccgctggcatttgcaggcgctgaccgatccgttaacgctcctgcccaacttccgtgcgttggaacaagcgccggagcaagaggcgggcaagagtttttgctgcctgcgcattgataatcttgagtttatgagtcgtcattacggcttaatgatgcgcgttcactgtatccgctcaatttgccgtacgctgctgccgttgatgcaggaaaacgaaaagttgtatcaattgccgggtagtgaactgctgttagtgctgagcgggccggaaacggaagggcgactccagcatatggttaacatcctgaatagtcggcaaattcactggaacaataccgggctggatatgggctatggtgctgcctgggggcgttttgatggaaatcaggaaaccctgcaacccttgttggggcagttaagctggctggcggagcaatcctgcgcacatcatcatgtgctggcgctggatagcagagaggagatggtttccgggcagaccactaaacaggtgctattgctgaataccattcgcacggcgttagatcagggtgatttgctgctctacgcccagccaattcgcaacaaagagggtgaaggttatgatgagatcctcgcgcgactgaaatatgacggcggcattatgaccccggataagtttctgccccttattgctcagtttaaccttagcgcgcgttttgatttgcaagtgctggaatccttgttgaagtggctggcaacacacccttgcgacaaaaaaggaccgcgcttttcagtcaatttaatgccgctcacgctgctgcaaaagaatattgccgggcggattattcgtctgtttaagcgttatcacatctccccgcaggcggtcattcttgagatcaccgaggagcaggcgttttctaacgcagaaagcagcatgtacaacatcgagcagctgcataagtttggtttctggattgcgattgatgactttggcaccggctatgccaactacgaacggttaaagcgtttgcaggctgatatcatcaaaattgatggcgtctttgtgaaagatattgtcacgaacacgctggatgcgatgattgtgagatcaattaccgatctggcgaaagcgaagtcattgagtgtggtcgcggagtttgtcgagacgcaacagcagcaggcgctattgcataagctcggggtgcaatatctgcaagggtatttgattggtcgcccgcagccattagctgattaa

SEQ ID NO: 466107 - DNA, 267 bp, Shigella boydii; identical to SEQ ID NO: 464426

SEQ ID NO: 466108 - DNA, 378 bp, Shigella boydii
atggacgaacagtggggctacgtcggtgctaaatcacgtcagcgctggctgttttacgcgtatgacaggatacggaggacggttgtggcgcacgtcttcggtgaacgcactctgaccacactggaacgtcttctgagcctgctgtcggcctttgaggtcgtggtatggatgacggatggctggccgctgtatgaatcacgcctgaagggaaagctgcacgttatcagcaagcgttacactcagcgcattgagcgacataatctgaatctgagacaacatctggcaaggctgggacggaagtcactgtcgttctcaaaatcggtggagctgcatgacaaggtcatcggacattatctgaacataaaacactatcagtaa

SEQ ID NO: 466109 - DNA, 2250 bp, Shigella boydii
atgacggtctcaaccgaagttgaccacaacgaatacattggtaacggtgttacaacgacattcccttataccttcaggattttccagaaatctgatctggtagtacaagtggttgaccttgatgaaaatatcgctgtgctagctctcgatactgattacacagttaccggggctggaggatacaacggtggaaatgtaattgtgtcaaaggcattggctaacggtcataagatttctatatcacgagaactcccggttacgcaggaaactgatctacgcaatcagggtaagttctttgcagaagtgcatgaggatgcttttgataagctaactatgctaatccagcatgttcgcagtttgttcagccttacacttcgaaaaccattatttgtggcaaagtattatgatgctctggataattatatcaaaaatttgcgtgatccgactgaaccacaggatgcagcaactaagaactatgtagatatacaggttagtggaaatatgaacaggagccttcgtgttcctgagcctataaaccaattaccatcagcgaaagaaagagctaataaaatgcctgtgtttgatagttcaggtaatgcaattgttgttcttcctccttctgggtcggcaacagaaattatgatcgagcttggcaagaatacaggggctggattatcaggtttttctggagatttgacttatccatctaatacagtcggcgatgctctttctcatgctgactggttcagttatattcagagaaacttattagctgaaaatttgaaaaaattgcgtgatggaaaagtattttctgtaacttggtacggcgactctaactctgtacgagactctgaaaacgtccagactcaatttcgcgtagcaatgaatagtgcatatggggcaggcaaagtaaccaccataagtcgagctaggtcaggtttctgcgcgcaagatgcttttgaaacttttacggataatcattctggtgatatttcgttgattaacttcggtactaatgacgcatcggcacaatacggttatgcattagtaggtaacattgagcaatacactttctggattgagaggctgattattagggagctaacttgggggcatccagttgttttgttgacgccattaccgttgcgatttgataaagcatacgaaacttattctacttctagcccaagcgatccattcccgacagttaagcgagttgatgttcaacaaatggggaatgcattaaaataccttgccgataagtactcgattcctgttattgatagtgtggagctaatggcaggctacagagacaatatctacgctgaggccacgcaatcaattaatgctggaactcgatttggagatccggtgcacttggttctcaatgcatcttctgcgtggggatttaagatagccgctgcatttatcggtgatctggtaatgcgaaaaacagttgtttctgatggctcacaattgactatcagaaaactttacgatccgatagtaattaattcaccgaggttagccagtgacatttacaaatactataataattctgctgaagctgcttttgcatatggtgataatatcgttggcaatcgatgcttagatatatcagcaggagaaagagtaacatggtctttctttgcagagagcgatgagcttatagcatggcctatcctttatgttccttctggttcggtggttaatgtttatattgatggaaataatattatgccacctaaacctcttgatataaatcgagatttttcatattcgaatgatacctcaatgttgaggataaactttggatttaatattgttaatcagcccataggctatttgaaaccaacgacaaagacagaaattaacaactatcttcgtatcaactctcgtggttggcatactcttactgttaatgtatcaaccggttctgctttctgttccggcatagaattctggagtcaagcacgccttacggccgaacagtcgaaaaaagatacagccgatatttatgactggacaaatggggatattcatggagcaaaacgaggagtattctattatgcatttccagaatcgacaggaaaaccaattaatgttacttccggtatttttgttattaaagaaaaaagtaaagataaatcaataggaattatcaatttttatgagtctgagccagtaaatgggcgaatctggactcaactaaagattgaaggtaagtggttgccatggagccaatcatga

SEQ ID NO: 466110 - DNA, 291 bp, Shigella boydii
atggatgaagtcggctttatggtcacccacatcgacgagagcggttttctgcgtttcaccaccattggtggctggtggaatcagtcgatgctcaaccaccgggtaaccatacgcacacacaagggagtgaaaatccctggtgtgattggttccgtcgcgcctcatgcgttaacggaaaagcaaaggcaacagccgctgtcatttgatgagatgttcattgatattggcgcaaacagtcgcgatgaggtggaaaaacgcggtgtggcgatgggcgattttattagcccgtaa

SEQ ID NO: 466111 - DNA, 567 bp, Shigella boydii
gtggtcggcaaggcgctggataaccgcatcggctgcgcaatgatggctgaactattgcagacggtgaataatcccgaaattacgctgtatggcgtcggcagcgtggaagaagaagttgggctacgcggggcacaaacctcggcggaacacattaaaccggatgtagtgatcgtgctggataccgctgtcgcaggcgatgttccgggcattgataacattaaatacccgctgaaactgggccaggggccggggctgatgctgtttgacaagcgctacttccccaaccagaaactggtagcagcgttaaaaagctgtgccgcacataacgatttaccgctgcaattttccaccatgaaaaccggtgcgacggatggcgggcgctacaacgtgatgggcggcgggcgtccggttgttgcgctgtgcctgccaacccgctatctgcacgctaacagcggtatgatttcaaaagccgattacgatgctctgctcacgttgatacgggattttctgaccaccttaaccgcggagaaagtcaacgcgtttagccagttccgtcaggtggattaa

SEQ ID NO: 466112 - DNA, 951 bp, Shigella boydii
atggaaactaaaaaaagacttggctatattgatgccgttaaaggtttcggaattatacttgttgtttatgcgcatattataaatggcttatcatcttatgtgatttatcttttccatatgccattgttttttatcgtttctggaattttatttaaagagcccaatgacaaaaataagtttatagttgggaaagttaaatcactaatcgttccttatttttcatattctattttattatttgtggtgttttcttcttataatattatgagggatgggtatgattcaaaattaatgataaaacaactaataaagatggtttatggtggtcaggttatgactggttggtttggtgttttttggtttattcctgttatgtttttcactcttatagttttgatgttaattagtgaaaaactaagggtggcaaaagataagtggctcttggcttttattttattaatgtgctcttatgtattgtcttggttggtaaaattcccaattccattaaatgccaatgttgtgttgtatgctgttccattggcaatggttggtttattctataaagagtgtaatgtacggcttttgttttttattgttgtatctatcgtgctgctttttattgcgatagcgtatcaaaaaatttttatgtttgacatgaagacgtcattgtatggtgttccattcgtcagttttatcataaatattgtattttctgttgttgttattgaattatttaaacgacttgatggaaattatataaaaccattagaaataataggcaaagcatcattaacaattatgtttgtgcatcagatgtttcattttatccttgctgaatatatgagagaaggtatagcgatgtttatgataactcttattttgtctataattactcacgaaatatttactaggatcgcattaacaagagtattgtttttaggtggtagatga

SEQ ID NO: 466113 - DNA, 432 bp, Shigella boydii
atgagaaaaatttacctaatattaacaatcataatttctgtatttactggcatatatattggtgccagtcaaacattaccatataatttaaaatattctctcaaagaatattttttatcgggtaaaaacaattcaccgataggccatgcttattggtcaaaacgtgatctaacatatttaaaacaaaggaaagttgatattattatgcttggcgacagcatcacagaaacaggaagatggtctgacttctttccttcagtatcaatagcgaactatggcatagctggtgataccagccaaggaattaagaatagattagaacctataataaatgcaaaacccaagaaggtctttattatgattggtactaacgatcttaccaatcatgaaagtgtacaaaagatattagataattatagaaatattaaatag

SEQ ID NO: 466114 - DNA, 234 bp, Shigella boydii
atgctcagttttctctgcggcttgcttttctacaaaccagtagcatctattcttatcggtattgcgagccttatcccaacaattactcagaattcatttgagacagggatcgttttttctgctggtgcattcgtatcagcaattgtagctgtgcgtattggtatatggctctatcaccgctccgataatccacgcgagttaatgccggggagaaaagacgatggtaacgcatga

SEQ ID NO: 466115 - DNA, 309 bp, Shigella boydii
atggtaacgcatgattattttttgcttatcaccaatgcagttatttgtactggcatagcaattcgcgttgtcacattccggcgtaacggttctcaacaccgaagatggggtggatggcttgcttatttcctgattgttgctgcagccagtattcctgttcgtgttgcctatgcaatctggttacgcacgccaatggctgtggatttatctgaggtcattatcaacgcagtcatgcttgctgcggttattaaaactcgcggtaacgtcgttcagattttcaaaataacgaggtctaaatatggagattaa

SEQ ID NO: 466116 - DNA, 630 bp, Shigella boydii
atggagattaaacaatttcagcgagctgccggtatcagcgaagcgctggccgcacgctggttctcgcatataacttttgcgataaaagagtttggtattagcaaccacgaagatcaggcaatgtttattgctcaggtcgggcatgagtctggaggcttcaaccggttgcaggagaatttcaattacagcgttacaggacttgctaacttcgttcgggctgggcgtctcacccaaggacaggctaatgcactggggcgccgtgctggtgaaccgccattgccactagagcgccagcgcgcgatcgcgaatctggtgtacagcaaacgcatgggtaacaatgctccaggcgatggctggaattaccgtgggcgcgggcttatccagattaccggtttgaataactatcgtgactgtggaaacagtctgaaagttgacctgctggagagtccagaactgctggcgcaggacgaatatgcggctcgtagcgcggcgtggttcttctccagcaaaggctgcatgaagtataccggagatattgtacgtgtaactctgcttatcaatggtggcaggaacggcatcgacgaccggcgcgcgcgatacatcactgccagtaaggagctggcggtatga

SEQ ID NO: 466117 - DNA, 483 bp, Shigella boydii
atgatcctgtcatttgtaaaagcatactggaatcagttgattatcatggcggtgcttgctgttctggtcatatcaggagttgttgcctggaatgtacacggcagccgtcagtacgacgccgggtatgcgcaggcgaaagaagatcgcaaagccgaagaagaaaaagttcgtcagcactacgaacaggagaaagcgaccaatgaacgtgaagcgaagcagaggatcgaccaggcgcgcaatgatgctcttgatgctgccgctcgcgctggcaggttgcagcgacagctcgttgccatccgtgagcagctcaggcagtataacgccattgtcggcgctggggcgtcagccgcagataccggagttttgcttgccgacgtgttcagcaaatctttcgagagaaatagacaactggcagagtatgctgaccgggcagccgaagccggaagagtctgcgaaaaacagtacgacaccctgaccagatag

SEQ ID NO: 466118 - DNA, 267 bp, Shigella boydii; identical to SEQ ID NO: 464426

SEQ ID NO: 466119 - DNA, 1017 bp, Shigella boydii
atgaacgctaagataattgcctcgctggccttcaccagcatgttcagcctcagcaccctgttaagcccggcacacgccgaagagcaggaaaaggcgctgaatttcggcattatttcaacggaatcacagcaaaacctgaaaccgcaatggatgccattcttacaggatatggagaagaagctgggcgtgaaggtgaacgccttctttgccccagactacgcaggcattatccagggaatgcgcttcaataaagtggatatcgcctggtacggcaacctgtcggcaatggaagcggtggatcgcgccaacggccaggtcttcgcccagacggtcgcggcggatggatcgccaggttactggagcgtgttgatcgtcaacaaagatagtccgatcaacaacctgaacgatctgctggcgaagcggaaagatctcaccttcggcaatggcgatcctaactccacctctggcttcctcgtccccggttactacgtctttgccaaaaacaatatctccgccagcgactttaagcgcaccgtcaacgctgggcatgaaaccaacgcgctggccgtcgccaacaagcaggtggatgttgccaccaacaacaccgaaaacctcgacaagctgaaaacctccgcgccagagaagctgaaagaactgaaggtgatctggaagtcgccgctgatcccaggcgatccgatcgtctggcgcaagaatctctccgaaaccaccaaagacaagatctacgacttctttatgaactacggaaaaacgccggaagagaaagcggtgctggaacgcctgggctgggccccgttccgcgcctccagcgacctgcaactggtgccgattcgccagctcgcactgtttaaagagatgcagggcgtaaaaagcaataaaggactgaatgagcaggacaagctggcgaaaaccaccgagattcaggcgcagctggatgacctggaccgcctgaacaacgcgttaagcgcgatgagttcggtgagtaaagcggtgcagtaa

SEQ ID NO: 466120 - DNA, 411 bp, Shigella boydii
atgacctgttcaacttcattaagcggcaaaaacaggattgtccttatcgctggcattctgatgattgccacaacattacgcgtcacctttaccggcgcagcaccgttactggatacgattcgttccgcttactcgctgacgacagcgcaaaccggcttattgaccaccctgccattattggcctttgcgctaatctcacctttggccgccccggtagcgcgacgttttggtatggaacgtagcctgtttgccgcgttacttttgatctgtgctggtatcgcaattcgctctctcccttcgccttacttattatttggcggtacagcggtcattggcggtgggattgcattaggcaatgtcttactgccaggattaattaaacgcgatttccctcattccgtctcatgctga

SEQ ID NO: 466121 - DNA, 213 bp, Shigella boydii; identical to SEQ ID NO: 36005

SEQ ID NO: 466122 - DNA, 438 bp, Shigella boydii
atggaaatcattcaatactcgcactatcggaagttcaccagccagccgcggtacgttcttacatacgatgtaccgctgttctctttacgatttatagctgtactggtgaattatgagcaatctgaatccatgcatgacgtgtggtgcctgttgtgcattttccgcgtctctttttactgggcagaagctgacgatgctggcggaaaggtttcggtcagtctcactgagcaaatatctccttttcatcgctgtatgcgcggcaccaatcagaaaaatccccgatgtggcgctcttgccggccccccccggagaaaacgcatattgctctgtttacaaaaaccgtccacatgcagggaattcgcaatgtccggcgaaaatagcatcgtaaatgaagcatgtaatcgcgcacgggaaaaatatggatttccaaaaatctga

SEQ ID NO: 466123 - DNA, 597 bp, Shigella boydii; identical to SEQ ID NO: 464305

SEQ ID NO: 466124 - DNA, 135 bp, Shigella boydii
atgagtaaaagaggcggaggttttttcctccgcctgtgcgcgtcagagtttagcgaatttttcgagggtgcgaataagctgcgtgacgaagccatattcgttatcgtactaggcgaccgttttcaccagttgtaa

SEQ ID NO: 466125 - DNA, 225 bp, Shigella boydii
atgtcgcgtaaaggtcactgttacgacaacgctccgatggaaagcttctggggaacgctgaaaaatgagagcctgagccactatcgttttaataaccgggatgaagccatctcagtaatacgggaatacattgagattttctacaatcgtcagcgtcgtcactctcgtctggggaatatctccccggcagccttcagggaaaagtatcatcagatgactgcttaa

SEQ ID NO: 466126 - DNA, 2916 bp, Shigella boydii
atgcagcgttttatggagcgtcagactcaggcggcccggcagacaatgcatgcggcttcttcggctgcaacagcagcatcagcccatgcgcagacggtggagaagaatgcacgggctcatgaacgcatggcccgtgaggtggaacaaacccgtctgcgcgtggatgccctgaatcagaaaatgcgcgaggaacaggcgcaggccagggcactggcggaggcgcaggataaagcggctgccgccttttatcgccagattgacagtgtgaaacaggccggtgcggggcttcaggaattacagcgtattcagcagcagatccgacaggccagaaacagtggcggggttggtcagcaggattatctggcgctgatttcggagatcacggcgaaaacccgtgccctgacgcaggcagaggaacaggccacccggcagaaagcggcgtttatccgccagcttaaagagcaggcaacccgccagaatctgtcgtcttctgagttgcttcgcgccagggcggctcagctgggggtaagcagtgctggagaagtgtatatccgcaaaatggagcgggcaggaaaagccacacattcgctggggctgaaaagtgcggcagcccggcgggagctgggggtgttaatcagtcagatggcgcgcggcaattttggtgcgctgaggggatccgggataacgctggctaaccgtgccggatggacaggcgcactgatgtcgccgaaaggcatgatgactggcggcgttattggcggacttgtcgcggcggtcctgggtctgggtaaagcctggcatgacggccggaaggagggcgaggaatttaaccgtcagctggcgctgacgggacattatgccggtgtcactgtcgggcagttgtggaaactcagccgggccatatccgggaatggtatcacgcaacatgcggcagccggtgcgctggcacaggtggtgggcagtggggcatttcatggaaacgatattggtatggtggcgaaagctgccgcacagatggagcgatcggttggccagtcggtcagcgataccataaatcagtttaagcggctgaaggatgatcctgtaaatgccgcgaaggcgctggacaatgcgctgcattttttgactgccactcagcttgagcagatacgcgtccttggggagcaggggcggtccagtgatgcggcccggatcgccatgtctgcgctggcagaggaaaccggtaaacgcacatctgatattgataataatctcaatgcgctgggtagtacgctgcaaaccttgtctgactggtggaagcagttctgggatgcggccatgaatattggtcgtgaagactcgctggatgcgcagattgatgcgttacaggaaaaaattcagcgcgcgaaaaaatatccgtggacaaacgcctccacacaggtggagtacgatcagcagcgtcttaacgatcttcaggagaaaaaacgccggaaggatttgcaggatgcaaaagcgcaggcagaacggaattaccaggagcaacagaaacgccggaatgctgaaaatgccgtgctgaaccggatgaatgaaacggaagctgcacgacatcagcgggaaattgcgcgtattaatgccatgcagtacgccgaccaggctgtcagggatgcggcgatacagcgtgaaaatgaacgttacgaaaaagccattaagaaaaatacacgggcaacccgtaatgatgaggccacccggttattgctgcagtacagtcagcagcaggcacaggtggaagggcagattgctgctgccagacagtcagcaggcattgccactgaaaggatgactgaagcgcataaacagcttctggccctgcagcagcgcatcagcgacctggacgggaaaaagctgacggcagatgaaaagagtgtgctggcccgtaagaatgagctgattcaggcgctgacgctgctggatgtgaaacagcaggagctgcagaaacagacagcgcttaacgacctgagaaaaaaaacggttcagctgaccagccagctggcagacaaagaacgtgcactgcgtgagcagcacaatctggatattgccactgcaggtatgggggataagcagcggcagcgctaccaggcacagttgcgcatccggcaggaataccggcaacagttgcaacagcttgagaatgacagtcgccagaaaggcacttacgggacggaggactaccggagggctgaggaggtgctgaaggggagcctgaagcgacaactgaatgaaaacaaacgctactggcaggaactggaagtggcgcagggcgactggaaaaacggtgccatgcgggcgtttcagaattttacggcggatgcggataatgcggcgggaacggcagaacagatgtttacagtggcattcagcagtgccggtaatgcactggcgacattctgtaccaccggtaagctgaattttaaatccttcacctcttccctgttgtcagatatggccagaattatggcacagatggccatgatgcaggcggtaaagggcgtcggttctttattcggcttcacgactaatgctgatggcggtgtttaccagtctgctgatttgagtcgctacagtggcacggtggttaaccgtccgacgttttttgcttttgcaaaaggagcgggtgtgatgggggaagcgggacctgaagccattctgccactgcgtcgcggtgctgatggtaagctgggggttgtggcggatactggtggttcaggcatggtgatgtttgccccgcagtacaacatcgggatcaataacgacggcacgaacgggcagataggtccggcagcactgaaggtggtttatgacctcgggaaaaaagcggccgcggactttatgcaacagcaggcccgtgatggtggccggttaagtggagcataccggtaa

SEQ ID NO: 466127 - DNA, 600 bp, Shigella boydii
atgcgtaaagtttgtgcagccattttgtccgcagccatctgtctggctgtatccggtgcgcctgcatgggcgtctgaacatcagtccacgctgagcgccgggtatcttcagccccatactgatatgccaggcagcgatgacctgaagggcattaacgtgaaataccgttatgagtttacggacacgctggggctggtgacgtcattcagctatgccaacgctgaagatgagcaaaaaacgcattacagcgatacccgctggcatgaggattccgtgcgtaaccgctggttcagcgtgatggcggggccgtctgtgcgcgtgaatgaatggttcagcgcgtatgcgatggcgggcgtggcttacagccgtgtgtcgaccttctccggggattatctccgcgtaactgacaacaaggggaaaacgcacgacgtgctgaccggaagtgatgacggtcgccacagcaatacctctctggcgtggggggctggcgtgcagtttaacccgaccgaatccgtggccattgaccttgcttatgaaggttccggcagtggcgactggcgcactgacggtttcatcgtgggtgtcggctataaattctga

SEQ ID NO: 466128 - DNA, 213 bp, Shigella boydii; identical to SEQ ID NO: 36005

SEQ ID NO: 466129 - DNA, 213 bp, Shigella boydii; identical to SEQ ID NO: 36005

SEQ ID NO: 466130 - DNA, 213 bp, Shigella boydii; identical to SEQ ID NO: 36005

SEQ ID NO: 466131 - DNA, 798 bp, Shigella boydii
atgcacctgcacctcataaaacgggcgccgggattagcaccccgaaagttactcgagcgcataaccgcgctgaagcggttttttttatgcgtaatgcacagccacattcaaattatggtgaggcgtgcggggcagccgcaaggctggccgggttctcgagtgaccggtagtgctaaccctgtgcgtctcaccacccatgagattagcacctctgctggtgagttaattaacttatcacttgaggatgtcattatggctaccaccctttctcaccctgacgtaaccatcgaaaatggtcgcgccgtcactacttctatttcgattgctgagttttttggcaagcagcatcaccatgttgttcaaaaaatagaacccctcgaatgttctgaactatttttaaccagcaacttttcgcgggttaaattcgaacaccgcggcaattcttataacgcctaccaaatcaccaaaaacggcttcgttttcctggtgatgggcttcacgggcaaaaaagccgccacattcaaggaagcctacattgctgagttcgaccgcatggaggccgaactgcgccagaataacaccccacctgctgacaagatgattccgggtgatggtcgcactctggttgttcacttcgacaaattcggcaatgtcgaattcaccgaaaccgttcctgatggcgcactggtctgtaccctggagactttccggttttatctggaaaaacagggctggactcttgtaaaccggggcgcaattaaaaacatgaccgtagagcagttgctttccttaaaataa

SEQ ID NO: 466132 - DNA, 768 bp, Shigella boydii
atgcaatatcctctgcccgttttgccgctgtctcagcgcgcgttgccgcggattccgccgtacttttgctctgagctgccgccgtcgcactgccagctgcctctgtcgccttcgtggatgccgtcgtggcgctgccctttgctgctgacgcctgtctggtcgcctcatcttttgaagcagacgcagatgatgccgatgacgccgccgaactggcggacgatgcggcagccgtttttgaggattctgcgctggtttccgacgctttcgcgttcgtctcggatgtcttcgctgcggaagcagacctcgctgctgcgctggccagtacagcggcttcgccagccttcgttgtggctgttgaagcagacgatgcagcactttctgccgattttccggcggcggtggcactggctgaggcctgcccggcacttgttgacgcggcactggcagataatgcagccgctgtttttgagtctgccgcagctgaggcgctctgtcccgctgccgtttcagaagacctggcgttcgtctcggacgtttttgccgccttcgcagaatttgctgccgccgttgccgaggaagctgcgctgctggcgctcgaggctgcgttcgtttctgatgattttgccgcctcttttgaagccgacgcatcccgtgctgaagtggctgcttctgacgctttcgtggtcgcggtggatgcagaagtggctgctgattgttgtgacgctgccgcattcgtttctgacgttttcgcggcactggcactggtag

SEQ ID NO: 466133 - DNA, 267 bp, Shigella boydii
atggcgacgctggggcgtcttatgagcttgctgtcaccctttgacgtggtgatatggatgacggatggctggccactgtatgaatcccgcctgaagggaaagctgcacgtaatcagcaagagatatacgcagcgaattgagcggcataacctgaatctgaggcagcacctggcacggctgggacggaagtcgctgtcgttctcaaaatcggtggagctgcatgacaaagtcatcgggcattatctgaacataaaacactatcaataa

SEQ ID NO: 466134 - DNA, 225 bp, Shigella boydii; identical to SEQ ID NO: 462228

SEQ ID NO: 466135 - DNA, 1449 bp, Shigella boydii
atgacattaacaagacgtgaatttattaaacacagcggtattgccgctggagcgctggtggtgacatcggcagcaccgctccccgcatgggcagaagagaagggcggtaaaatcctcaacgcgggacgttggggagcgatgaacgtagaagtgaaggacggcaagattgtttcttcaacaggcgcgctggcgaaaaccataccgaattccttacagtctacggcggcggatcaggtacacaccacgacgcgtattcagcatccgatggtgagaaaaagctatctcgataatccactgcaaccgacgaaaggtcgtggtgaagatacctatgtacaggtgagctgggaacaagcattaaaactgattcatgagcaacacgatcgcattcgcaaagctaacggaccatcggctatttttgccggatcatacggctggcgctcttctggcgtgttgcataaagcgcaaaccttactgcaacgttatatgaacctggcgggcggttattccgggcatagcggcgattattcaaccggggcggcacaggtgatcatgccgcatgtggtcggttctgtagaggtgtatgaacagcagacctcctggccgctgattctggaaaacagccaggttgtggtgctgtgggggatgaacccgctgaataccttaaaaattgcctggagcagtaccgatgagcaagggctggaatacttccatcagctaaaaaaatctggcaaaccagtgattgccattgatcctatccgctccgaaaccatcgacttctttggcgataatgccacctggatcgcgccgaatatgggcaccgacgtggcactgatgttagggattgcgcataccctgatgacacaaggcaaacacgataaagtgttccttgaaaaatacactaccgggtatccgcagtttgaagagtatctgagaggtaagagcgataatacgccgaagagcgcggcctgggcggcggaaattactggcgtaccggaagcgcagatagtcaaactcgctgaactgatggcggcgaatcgcacaatgctgatggcaggctggggaattcagcgccagcaatatggtgaacagaaacactggatgctggtgacgctggcggcggtgttagggcagattggtacaccgggcggcggttttggtttctcttatcattactccaatggtggcaacccgacacgtgttggcggcgtgctgccggaaatgtctgcggcgattgccggacaggccagcgaggccgctgatgatggcggaatgagggcgattcctgttgcccgtatcgtcgatgcgctggaaaatcctggcggcaaatatcagcataacggtaaagagcaaacgtatccgaatatcaaaatgatctggtgggcgggtggcggtaactttacccatcaccaggatactaatcgtctgattaaagcatggcagaaacggtga

SEQ ID NO: 466136 - DNA, 225 bp, Shigella boydii; identical to SEQ ID NO: 462228

SEQ ID NO: 466137 - DNA, 1455 bp, Shigella boydii; identical to SEQ ID NO: 461930

SEQ ID NO: 466138 - DNA, 621 bp, Shigella boydii
atggcggttatgggacttgccggtgttctccggggtaaaaaggtccgtacgaccatcagccggaaagccgttgccgcaggcgaccgcgtaaaccgtcagttcgtggcagaacgacctgaccagctgtgggtagctgattttacttacgtcagcacatggcagggcttcgtctatgtggcgttcatcattgatgtgtttgccggatacattgtggggtggcgggtctcatcgtccatggagacgacattcgtgctggatgcactggagcaggcgttatgggcccgtcgaccgtccggcacggtccatcacagtgataaaggttctcagtatgtatcgctggcctacacacagcggcttaaggaagccggattactggcatcaacaggaagtacaggcgactcgtatgacaacgcgatggcggagagcatcaatggtctttacaaagcggaggtaatacaccgtaagagctggaaaaaccgtgcagaagtggaactggccacactcacgtgggtggactggtataacaatcgacgattgctggaaaggctgggccatactcctccggcagaagcagaaaaagcttattatgcttccatcggaaacgatgatctggcagcctga

SEQ ID NO: 466139 - DNA, 378 bp, Shigella boydii; identical to SEQ ID NO: 465880

SEQ ID NO: 466140 - DNA, 474 bp, Shigella boydii
atgggtacggtgacgtttgactgtcggatgtttgtcagtctgtacccggagttttccacggtgacaccggagctactgacggcggtgtttaaccgggcgaccgcgttgtacctggataacacggacgacagtccggttaccgacctgaaggagcgggaacagcttctgttcctgctggttgcgcatctgtgcgcattgcgggggctgggaaacgggagagacgggcaggctggtctggtggggcgtatcaccagtgcgtcggaaggttctgtatcggtatcggtatcggtatcggtatcggtggataatagcggcagtaatgatgcgtcgtggtggtatctccagaccccctggggtgctgactactggcaggcgacagcgccataccgctcaatgcagtatcattccgggggggcaccttcgcgatatccggggcattattaccggggatacgggagggggcgtcgatggtaa

SEQ ID NO: 466141 - DNA, 267 bp, Shigella boydii; identical to SEQ ID NO: 464426

SEQ ID NO: 466142 - DNA, 369 bp, Shigella boydii; identical to SEQ ID NO: 465353

SEQ ID NO: 466143 - DNA, 1545 bp, Shigella boydii; identical to SEQ ID NO: 464357

SEQ ID NO: 466144 - DNA, 588 bp, Shigella boydii
atgagggtgcttgagaatgccatccgcaatctgaacagtcttgatacccgtatggtgccgcaggccagcgcatgggcagtaaaccgggttgctgcaaaagttgtctcggttgccacccggcaggtcgccaggaataccgttgtgggagataaccaggtgaaggggggccccctgaaactggtgcgtcagcgcgtccgggtatttaaagccagtccggcaggaaaaatgtatgcccgtatccgtgttaaccggggcaatctgcccgccattaagcttggcacaacatgccggcgtgccggtgacggactgaaggtggggaaatacttttttcgtggtgcgtttatccagcagctggcgaatggtcgctggcatgttctcaggcgtcttcctgaagcgtgttttgaaacaggaaaggacagtaaggggcggcccagaaaaaatcgtctgcccgtggaggttgtgaaaattccgctggccggaccgctgacacaggcatttgaggatgcccgcgaccgcatcattgccgcggaaatgccgaaacagctggggtatgccctgaaacagcaactgaggatacatttgggatga

SEQ ID NO: 466145 - DNA, 192 bp, Shigella boydii; identical to SEQ ID NO: 464758

SEQ ID NO: 466146 - DNA, 213 bp, Shigella boydii; identical to SEQ ID NO: 466078

SEQ ID NO: 466147 - DNA, 387 bp, Shigella boydii
  misc_feature (369)..(378): n is a, c, g, or t
gtgatccagtcttttcttaagcaagtaagtactaagcctgaattaattatattagtgcttatggttatgatcattgctatgttgatcataccattacctacataccttgttgattttttaatagggcttaatattgtacttgctattctcgtttttatgggatcattttatattgaaagaatattgagtttttctacattcccttcggttttgttgataacgacattatttcgtctcgctttatcaataagtactagtcgactaattttagttgatgcggatgcgggtaaaattattactacatttggccagtttgtcattggtgatagtctggctgtaggttttgttattttttcaatagtaactgtnnnnnnnnnnttgttataa

SEQ ID NO: 466148 - DNA, 1605 bp, Shigella boydii
atgagcattgatgcggatttaaaggctggaattattgatgccgcaggagctaaagaaagacgcagtattctggaacgtgagagtcaattgtatggttcatttgatggagcaatgaagttcattaaaggtgatgcaattgctggcatcattattatttttgtcaatttaataggaggtatttctgttggtatgagtcaacatggaatgtctctatctggtgcattatctacttataccatactaactattggtgacggattggtctctcagattcctgctctgttaatttctataagtgcaggatttatcgttacaagagttaatggtgatagcgataatatgggacgtaacataatgtcccagatatttgggaatccttttgttctcattgttacatcagctcttgccttggcgatagggatgttgccaggttttccgttttttgtttttttcctgatagcagttactttgacggctttattctattataaaaaggtcgtagaaaaagaaaaaagtctgtctgagtctgattctagtggctatactggtacatttgatattgataatagccatgactcatctttggcaatgatagaaaatctggatgctattagttcagaaaccgtacctttaattttattatttgccgaaaataagataagtgcaaatgatatggaaggtcttattgaaaggataagaagtcagttctttattgattatggtgtcaggcttccaactattttatatagaacaagcaatgagcttaaggtcgatgatattgttttgttaataaatgaggtgcgtgccgatagttttaatatatactttgacaaagtgtgtattacagatgaaaatggagatatagatgctctaggtattcctgttgtttcaacttcatataatgaacgtgttatttcttgggtagacgtttcatatacagaaaatctaactaatattgatgctaaaattaaaagtgctcaagatgaattttatcaccagttgtcacaagctttattaaacaatataaatgagatttttggtatacaagaaacaaaaaatatgttggatcagtttgaaaatcggtatcctgatctattaaaggaagtcttccgacatgtgactatacagagaatttctgaggtattacaaagattgcttggagaaaatatttctgttcgcaatttaaaacttattatggagtctttggcgctttgggctcccagagaaaaagatgtcataacattagttgaacatgtccgtgcatcactttctaggtatatttgtagtaaaatagctgtttctggtgagattaaagttgtgatgctttccggatatattgaggatgcaataagaaaagggataaggcaaacctctggtggctctttcttgaatatggatatagaggtttcggatgaggtaatggaaactttagcacatgctttgagagaattgagaaatgcaaaaaaaaatttcgttcttttggtatcagtagatatacgtaggtttgttaaaagacttatagataacagatttaagagtatactcgttatatcgtatgctgagattgatgaagcatataccattaatgtattaaagactatttag

SEQ ID NO: 466149 - DNA, 126 bp, Shigella boydii
atgttgcatttaaaaaatattactgcgggcaatccgaaaaccgtggaacaatatcagctgacaaaacaatatgatgtcacctggcttttttcggaagacggaaaaaactggtatgaagagcggtga

SEQ ID NO: 466150 - DNA, 1542 bp, Shigella boydii
atgagccatgccgatatgaacaactgctgcggctttaacgaggctgccgcagcgttctcatggaacagcccgaaaaaggccattaacccttatctggacccggcggaagttgcgccggtttctgcgctttcaaacctgatcactctgtacgctgccgataacgagcaggaacagttgcgccgcgaggcactgagtgatcaggtctgggagcgttattttttttatgaatcacgtgatcctgtccagcacgaaatggagcaggataagctcattagccgggcaaagctggcgcatgagcagcagcgttttaatccggatatggtcattctggcggacgtcaacgctcagccttcccatatcagcaagccgctgatgcaacgtattgaatacttcagcagcctgggcaggccaaaggcttattcccgctatttacgtgagacgattaagccatgtctggaacgactggagcatgtacgcgacagccagctatctgcatcttttcgttttatggcaagccatgtagggctggacggcctgctgattctgcctgaaatgagtcaggatcaggtgaaacgcctgtctacccttgtcgctgcgcatatgagcatgtgccttgatgcagcttgtggtgatttgtatgccaccgatgacgttaagccagaagaaatccgcaagacatgggaaaaggtggcagcggaaaccctgcgtctggatgtcatcccgcctgcgtttgagcaactccgtcggaaaagaaaccgccgtaaacccgtgccctatgaactcattccgggttcgctggcgcgtatgttgtgcgccgactggtggtaccggaaattatggaaaatgcgttgcgaatggcgggaagagcagttgcgtgctgtctgcctggtcagcaaaaaagcatctccctatgtcagctatgaagccgtgatgcataaacgtgagcagcgccgcaagtcattggagtttttccgttctcatgaactggtgaacgaagagggcgacacgctggatatggaagacgtggtaaacgccagcagcagcaacccggcgcaccgccgcaatgagatgatggcctgtgttaaaggtctggagcttatcgcggaaatgcgcggtgactgcgccgttttctacaccattacctgtccgtcacgtttccattccacgctcaataacggcagaccaaacccaacctggacaaatgcgacggtaagacaaagcagcgattatctggtcggcatgtttgctgcatttcgtaaggcgatgcacaaagccgggttgcgctggtatggcgtgcgggtggctgagccgcatcatgacggtacagttcactggcacctgttgtgttttatgcgcaaaaaagaccgccgcgccattactgcattgttgcgtaagtttgccatccgtgaagaccgcgaggaactgggtaataacactggtccacgctttaaatatgagctgataaacccgcgcaaaggaacgccgacaagctacatcgcgaaatacatcagtaagaacattgacggtaagcgtacagcctga

SEQ ID NO: 466151 - DNA, 213 bp, Shigella boydii; identical to SEQ ID NO: 36005

SEQ ID NO: 466152 - DNA, 267 bp, Shigella boydii; identical to SEQ ID NO: 464426

SEQ ID NO: 466153 - DNA, 378 bp, Shigella boydii
atggacgaacagtggggctacgtcggtgctaaatcacgtcagcgctggctgttttacgcgtatgacaggatacggaggactgttgtggcgcacgtcttcggtgaacgcactctggccacactggagcgtcttctgagcctgctgtcggcctttgaggtcgtggtatggatgacggatggctggccgctgtatgaatcacgcctgaagggaaagctgcacgttatcagcaagcgttacactcagcgcattgagcgacataatctgaatctgagacaacatctggcaaggctgggacggaagtcactgtcgttctcaaaatcagtggagctgcatgacaaggtcatcgggcattatctgaacataaaacactatcagtaa

SEQ ID NO: 466154 - DNA, 225 bp, Shigella boydii; identical to SEQ ID NO: 462228

SEQ ID NO: 466155 - DNA, 741 bp, Shigella boydii
atgttccctgtttcatcaattggtaatgatattagtagtgatttagtccgtcgaaaaatgaatgaccttcctgaaatccccatagaaaataatctcgaagcactagcaccaggtatagaaaaactaaaacagacctctattcaaatggtcactttacttaacgcgttacaaccaggtggaaaatgcattatcactggtgattttcaaaaagaattagcgtacttacaaaatgtaattctttataatgactcgtttcttcgtctggattttttaggttataacgcccaaattattcaacgatcggacaatacctgcgaacttaccattaatgaaccgttaaaaaaccaggaaatatctacaggcaatatcaatgttaattgtccattgaaagatatttacaatgaaatcaggaggttgaacgtaatctttagttgtgggactggagatatagttgatctatcctctctggacttacgtaatgtcgatttagattattatgatttcacagataaacatatggctaatactattctaaatccttttaaattggattcaacaaattttactaatgccaacatgtttcaggttaattttgttagttcaacacaaaacgccacaatctcctgggattatttactaaaaataacgcctgttttaataagtattagcgatatgtattctgaagaaaaaatcaagtttgtcgaaagttgtttaaatgagcttggagacattaccgaataa

SEQ ID NO: 466156 - DNA, 1059 bp, Shigella boydii
gtggttgttttttcatgggtgtttatctttgcgctctatttcacaccttatgcgctaattgttggtcagttaggctcgaccttcaaagatgggaagggcggggtcagtacctggattaaacacacgatggggcccggactggcttatctcgccgcgtggacctactgggtggtgcatattccctatctggcacaaaaaccccaggcaattctgattgcgctcggttgggcgatgaaaggcgacggttcgctaatcaaagaatattcagtcgtagcgttacaggggttaacgctggtgctgtttatcttctttatgtgggttgcttcacgcggtatgaaatcgctgaaaatcgtcggttctgtggcagggattgcgatgtttgttatgtcgctcctgtatgtggcgatggcggtaaccgcgcctgcgattactgaagtgcatattgcgaccacaaacattacctgggaaacgttcattcctcatatcgactttacctacattaccactatttcaatgctggttttcgcggttggcggagcagagaagatttctccttacgttaatcaaacgcgcaacccaggaaaagaatttccaaaagggatgttatgcctggcggtgatggttgcggtttgtgccattctgggctcactggcgatggggatgatgtttgactcgcgtaatatcccggatgacttaatgactaacggtcaatattacgcctttcagaagctgggcgagtattacaacatgggtaatactttaatggtgatttacgccattgcgaataccctgggacaagtagctgcgctggtattctcgattgatgccccgcttaaagtgctattaggtgatgctgacagcaaatatattccagccagtttatgtcgtaccaacgcttctggtacgcccgttaatggctattttctgaccctggtgctggtggcaattctgattatgctgccgactctcggcatcggtgatatgaacaatctctataaatggctgttgaatcttaactcggtagtgatgccgctgcgggtaatgctgccaacttactga

SEQ ID NO: 466157 - DNA, 462 bp, Shigella boydii
atggattcactgcgcgactggggacatgcgaaagattacgtgcgtatgcagtggatgatgttgcagcaagatcacccagaggattttgttattgcaacaggcaaacaaatttccgtacgtgaatttgttcgtatgtcagctaaagaagtcggtctggagttagaattctccggacaaggtgttgatgaaatagcaactgttgtgaataaaacatctgactgtgctattggtgttagtattggggatgtgatcgttcgtgttgatcctcgttatttccgtcctgcagaagttgaaactcttcttggtgatccagcaaaagcgaaaaaagtattgggttgggaaccagagattacagttgaagagatgtgtgcagaaatggttgccagtgatctggcgaaagcaaaacagcatgcactactgaaaagccatggttacgatgttgcagtttctctggagcggtaa

SEQ ID NO: 466158 - DNA, 993 bp, Shigella boydii
atgacaaaaaaacgtatctacgttgctggtcaccgaggtatggttggctctgctatttgccgtcaattatcactgcgtgatgatatcgaattagtggtcaaaacacacaaagaactcgatctaaccgtacagaaggaagttgatgcattttttgagcaagagaaaattgatcagatttatcttgctgcggctaaagtcggtggcatttatgccaacaatacatttccggcagaattcatctatcagaatctcatgattgagagtaatattattcattcagctcacaaggccggaattcaaaaattactttttttaggctcaagctgtatttatcctaaattcgcagagcagccgatgaacgagtctgcgcttttaacgggcatacttgagccaactaatgagccatacgcaattgctaaaattgcgggcataaaattatgtgaatcttataaccgtcaatatggccgtgattatcgcagtgtaatgcctactaatctttatggcataaatgataatttccaccccgaaaactctcatgttattccggcactcatgcgtagattccatgaggcaaaagagagtggtgcaccagaagttattgtctggggaacaggaacaccgatgcgtgagtttttatatgttgatgatatggctgccgcatctgttcatgtaatggaacttgacgaagcaatttatcaacaaaatacacagcctatgttatctcatattaatgttggtacgggtgtagattgttccatacgtgaaatggctgaaacaatggcctctgtggtgggttatcaaggtaaaattgtttttgatgttactaaacctgatggcactccgcgcaaacttatggacgttacccggctcaaaaacttgggctggcaatatcaatataacttacatgaaggcttatcattaacatataaatggtttattgagaatattaattcttttcggggtggaaattatcatttatgccataaagattag

SEQ ID NO: 466159 - DNA, 1218 bp, Shigella boydii; identical to SEQ ID NO: 464250

SEQ ID NO: 466160 - DNA, 270 bp, Shigella boydii; identical to SEQ ID NO: 461548

SEQ ID NO: 466161 - DNA, 915 bp, Shigella boydii
gtgcgctattacgaaacggcaagtagcacgacatttgtcgccagaccgggaggtatcgaaggctggctaccgattgccggtctgatgaatctgaaatatagccttacaacaggtcagttaccgtccgtccacgccgccgcgatgctgttattggtcgcttttatcgtcatcagtctattactcaaaaaggccttttgctcatggttatgcccggttggtacgctttctgaattaatcggcgatctcggtaacaaactgtttggtcggcaatgtgtccttccccgctggctggatattcctctgcgcggcgtgaagtatttgctgttgagtttttttctctatatcgcgttattgatgcccgctcaggcgattcactattttatgttgtcgccctacagcgtggtgatggacgtaaaaatgctcgatttctttcgtcatatggggaccgcgacattaatcagcgtgaccgttttgctgattgccagcctgtttattcgccatgcctggtgtcgttatctttgcccatatggcgcgctgatgggcgtggtttcgctattatcgccgtttaagattcgtcgcaatgccgaaagttgtatcggctgtggcaaatgcgcaaaaaattgcccatcacggatcccggtagataaattaattcaggtacgaacagtggaatgtaccggctgtatgacttgcgtagagtcatgtccggtagcctcaacattgaccttttcactgcaaaaacctgcggcaaataaaaaagcttttgcgttgtctggctggttaatgacgctactggttctggggattatgttcgcggtgattggttacgcaatgtatgcgggagtatggcaaagcccggtgccggaggaattgtaccgacgcttaattccacaagcgccaatgattggtcactaa

SEQ ID NO: 466162 - DNA, 510 bp, Shigella boydii
atggctacatacggcggtcagtttacgcttacaataaatatgaaaagatggtttaaataccccgttacttttgacttacactatacggtatcgcatcgtttaatattcgcaccggccagatttttatttctattagttgtcacaatactgaatgcgtacgaccacagtattctggctcctgtgtggtcatgctttaattctgcgttccggacagataagcagttgcttgcaggaatccttcttgtgttaatgtcagttcccctttttaccagtgctgatttccacattccgtccaacagagcttatagcctttccctggattatagcctttccctggattatagcctttccctggattatagcctttccccggattatagcctttccctagattatagcattgtccggctgaagttctttttgaataataatagaagcactgctggcagatccagtccgtttttcataacccactgtactgataaccataatctaatcagtagaaattga

SEQ ID NO: 466163 - DNA, 213 bp, Shigella boydii; identical to SEQ ID NO: 36005

SEQ ID NO: 466164 - DNA, 495 bp, Shigella boydii
gtgagcatgagtcttttgaatgacgttcagaaattcattgaagcccatccggggtgtacttccggagacattgcggatgcttttgcaggttactcacggcagcgcgttctgcagtcagcaagcaagttacgtcagagtgggcgtgtggctcaccgttgtgaaggagatacacgcagacattttccgcgccagataaagatatcgccggaggcggaacggcaaccagttcgagaaaccagacctgtgcgcaatttctatgtcggcactaacgatccccgggtgattttgtgcctgacccgccaggctgaagaactggagtccaggggcttataccgtcgtgctgcaacggtgtggatggcggcattccgtgaaagccactcccagccagaacgaaacaattttctggcgcgtcgtgagcggtgcttacggaaaagcagcaagcgcgctgtatcgggtgatgagtggtatctgtcagggaattacgtgggggcttaa

SEQ ID NO: 466165 - DNA, 294 bp, Shigella boydii; identical to SEQ ID NO: 460208

SEQ ID NO: 466166 - DNA, 762 bp, Shigella boydii
atggggattattgcctgggcgttgaatacctggggcaccaacttccatcagatcattatggataccatctcaaccccactggcatcgttgggtagcgtggtgggctgggcctatgtgatctttgttccactgctctggttcttcggtattcatggcgcgctggcgctgaccgcactggacaacggcattatgacgctgtgggcgctggaaaatatcgcgacctatcagcaatatggttccgtcgaagcggcgctggcagccggtaagaccttccatatctgggccaagccgatgctggactcctttattttccttgggggcagtggtgcgactttaggcctgatcctggctatctttatcgcctctcgccgtgctgattatcgtcaggtggcaaaactggcgctgccgtccggcatcttccagattaacgaaccgattctgtttggtctgccaattatcatgaacccggtgatgtttatcccgtttgtactggtacaaccgattctggcggcaatcaccctcgcagcgtactacatgggcattattcctccggtgaccaatattgcaccgtggaccatgccaaccggtctgggagccttctttaacaccaacggtagcgtcgctgcattgctggtcgcactcttcaaccttggtatcgcaacgttaatttatctgccctttgttgtggtggctaacaaagcgcaaaacgcgattgataaagaagagagcgaagaagatatcgctaacgccctgaaattttaa

SEQ ID NO: 466167 - DNA, 687 bp, Shigella boydii
atgtacaccggcaagggcgatgcgtttgcgaaccctttgtcggacactgactggctgcgtcttgcgatggtgaaggatctgcaacctggcgaaatgaccgctgatgcagaagatgacacttatctcgatgatgaagatgcagactggaaaacgacaacccaggggcagaaatccgtcggtgatactttggcgacgctggcctggcgtccgggtgacagcgggcagaaaaaactggttcagttgttcgattccggtgaagtctgcgcgtttcgtatcaaataccccaacggtacggttgatgttttccgtggctggatgagttcactgggtaaaaccattacctcaaaagaggtgatgacccgtactgtaaaaatcagcggtgtggggcgtccgtatctggcagaggagggcgctgaaaccgtgggtgttaccggactgacggtggcaccggcatctgtcagtgtcaaagcgggagcaaccaccacactgacctttacagtaaaacctgatggggccagtgacaaagcgatcagtgtgcattcgtcagatcctcagactgcttcggtgaccctgagcgggcttgtggccacggtgaaaggcgtgaagcagggcagtgtcagcatcgtgggcatgacctctgacggagagtttgtggcagtggctgcggtgaccgtcagcgcaccataa

SEQ ID NO: 466168 - DNA, 267 bp, Shigella boydii; identical to SEQ ID NO: 464426

SEQ ID NO: 466169 - DNA, 348 bp, Shigella boydii; identical to SEQ ID NO: 464879

SEQ ID NO: 466170 - DNA, 459 bp, Shigella boydii
ttgcaacgatttggccgccgcatcgaccttcgtgtgaaaacgggggctgaagccatccgcgcactggccacacagctcccggcgtttcgtcagaaactgagtgacggctggtatcaggtgcgcattgccgggcgtgatgcaggtgaaaccgaattgtctgcccgtcttaatgagccgctggcaaatggtgcagtgatccacatagtaccgcgtctggtgggagctaaaagtggcggtgtgtttcaggcggtgctgggggcagctgttatggcggttgctatatggatgccgggggtaggaattatggcgagtaatctgctgttttctctcggtgccagtatgacgcttggcggtgttgcacagatgctggcaccgaaagccagaactccccgtacacagacaacggataacggcaaacagaacacctgtttctcctcactggataacatggttgcctag

SEQ ID NO: 466171 - DNA, 378 bp, Shigella boydii
atggacgaacagtggggctacgtcggtgctaaatcacgtcagcgctggctgttttacgcgtatgacaggatacggaggacggttgtggcgcacgtcttcggtgaacgcactctgaccacactggagcgtcttctgagcctgctgtcggcctttgaggtcgtggtatggatgacggatggctggccgctgtatgaatcacgcctgaagggaaagctgcacgttatcagcaagcgttacactcagcgcattgagcgacataatctgaatctgaggcaacatctggcaaggctgggacggaagtcactgtcgttctcaaaatcggtggagctgcatgacaaggtcatcgggcattatctgaacataaaacactatcagtaa

SEQ ID NO: 466172 - DNA, 726 bp, Shigella boydii; identical to SEQ ID NO: 464435

SEQ ID NO: 466173 - DNA, 378 bp, Shigella boydii; identical to SEQ ID NO: 465904

SEQ ID NO: 466174 - DNA, 213 bp, Shigella boydii; identical to SEQ ID NO: 36005

SEQ ID NO: 466175 - DNA, 303 bp, Shigella boydii; identical to SEQ ID NO: 458125

SEQ ID NO: 466176 - DNA, 267 bp, Shigella boydii; identical to SEQ ID NO: 464426

SEQ ID NO: 466177 - DNA, 297 bp, Shigella boydii
atggacttcctggagcatctgcttcatgaagaaaaactggcacgtcatcaacgtaaacaagcgatgtatacccgaatggcagccttcccggcggtgaaaacgttcgaagagtatgacttcacattcgccaccagagcaccgcagaagcaactccagtcgttacgctcactcagcttcatagaacgtaatgaaaatatcgtattactagggccatcaggtaatgactccaacttattgatagtgttttatgttcagataatgcccgatgactttgtcatgcagctccaccgattttga

SEQ ID NO: 466178 - DNA, 369 bp, Shigella boydii; identical to SEQ ID NO: 465353

SEQ ID NO: 466179 - DNA, 213 bp, Shigella boydii; identical to SEQ ID NO: 36005

SEQ ID NO: 466180 - DNA, 192 bp, Shigella boydii; identical to SEQ ID NO: 464451

SEQ ID NO: 466181 - DNA, 555 bp, Shigella boydii
gtggaaaaagaaaatatcaccatcgatccgcgttcttcatttactccatcttcgtcggcagatattcccgtgccaccagatggattagttcaacgcagtacccgaattaaacgcattcaaaccaccgccatgttgttattattttttgcggcggtaatcaattatctcgaccgcagttcgctgtcggtagcaaatttaacgattcgtgaagaattgggattaagtgccaccgaaatcggcgctttgctctccgtgttttcactcgcttacgggattgcgcaacttccttgcggcccactattggatcgtaaaggcccacgcctgatgctgggactggggatgttcttctggtcactgttccaggcaatgtctggcatggtgcacaactttacgcagttcgtgttggtgcgtatcggtatggggattggtgaagcgccgatgaacccatgcggtgtaaaagtcattaacgactggggtaatgactccaacttactgatagtgttttatgttcagataatgcccgatgaccttgtcatgcagctccaccgattttga

SEQ ID NO: 466182 - DNA, 381 bp, Shigella boydii; identical to SEQ ID NO: 458903

SEQ ID NO: 466183 - DNA, 225 bp, Shigella boydii; identical to SEQ ID NO: 462228

SEQ ID NO: 466184 - DNA, 396 bp, Shigella boydii; identical to SEQ ID NO: 461287

SEQ ID NO: 466185 - DNA, 153 bp, Shigella boydii
gtgggaaagttacaagaggttgaggggataattaaagggatgcttatgacattagatatccggataggtacggatatcgttgttattaaatctagtttatacgttaagatgcagctacagcagaaattgccactgttaattttttcatcgtga

SEQ ID NO: 466186 - DNA, 444 bp, Shigella boydii
atgaactatgggcaggcaatccagctaggtatattagagatactatatatggcgaatgataaaattaccgttataactataaattacaataatgcagaaggcttatcaaaaacgattgcttcagttgaaaagcaaactaataaagaatttgagtatctaattattgatggtggttctgaggataattcaatagaacatgctaagaaaagtgtaatatgcacaaaaataatatctgaaaaagataatggaatctatgatgcaatgaataaaggagcctcacttgctaaaggtgagtatatcatttttacaaactctggtgatgaattaagaaaaaatagcattgaaattttgatgaatgtattgagagagacaaatacattatacgatatataccacgggattttggctttcaaaaaaaatgatatactcacctttagcaagtga

SEQ ID NO: 466187 - DNA, 486 bp, Shigella boydii
atgattaatggaatattgcatatagttaacaagggggaaattaaaattggtaacggtgtcaagattaattcttcattacgttacaatccaatttcacatcatccatgttcattttacacttctgaaaatgcggtgattgagattggggataaatccgggttgtcgggttgtaccttatattctgttaaaaaaatccatattggaaaaagagtgttgattggtgcaggcgtaaatatttatgatacagattttcattctttactcgtggatgagagattaaatggtgatagtaacattaaatcctctccagtttatatatacgatgattgttttattggagctaatgttacaattttgaaaggtgttacaataggggctggcagtgttgttgctgcttgctcggtagtaacgaagaatataggggaaaatgaactatgggcaggcaatccagctaggtatattagagatactatatatggcgaatga

SEQ ID NO: 466188 - DNA, 381 bp, Shigella boydii; identical to SEQ ID NO: 458903

SEQ ID NO: 466189 - DNA, 297 bp, Shigella boydii; identical to SEQ ID NO: 464965

SEQ ID NO: 466190 - DNA, 165 bp, Shigella boydii; identical to SEQ ID NO: 464985

SEQ ID NO: 466191 - DNA, 213 bp, Shigella boydii; identical to SEQ ID NO: 36005

SEQ ID NO: 466192 - DNA, 378 bp, Shigella boydii; identical to SEQ ID NO: 465904

SEQ ID NO: 466193 - DNA, 213 bp, Shigella boydii; identical to SEQ ID NO: 466078

SEQ ID NO: 466194 - DNA, 582 bp, Shigella boydii
ttgcaacgatttggccgccgcatcgaccttcgtgtgaaaacgggggccgaagccatccgggcgctggccacacagctcccggcgtttcgtcagaaactgaatgacggctggtatcaggtgcgcattgccgggcgtgatgcaggtgaaaccgaattatctgcccgtcttaatgagccgctggcaaatggtgccgtgatccatatcgtgccgcgtctggcgggagctaaaagtggcggtgtgtttcaggtggtgctgggggcggcgttgattgcggtggcatggtggaaccctgtgggctggctgggtgccgcggctgtatcgggcatgtatgcggcaggggccagtatgatcctgggcggtgtggcgcagatgctggcaccgaaagccaggacgtccacggcagccagtacagataacggcaaacagaacacctatttttcctcactggataacatggttgctcagggcaatgttttgcctgttctgtacggtgaaatgcgtgtggggtcgcgggtggtttctcaggagatcagcacggcagacgaaggggacggtggtcaggttgtggtgattggtcgctga

SEQ ID NO: 466195 - DNA, 213 bp, Shigella boydii; identical to SEQ ID NO: 466078

SEQ ID NO: 466196 - DNA, 138 bp, Shigella boydii; identical to SEQ ID NO: 16164

SEQ ID NO: 466197 - DNA, 372 bp, Shigella boydii
atgggagaaatgtcgaataataatataaaagttcatttaaatgaaccagagataatatttttacatgccgatcttcagcaatacttaagccaaagttgcggtgcgtttgtgtgcatggcagcccaagaagtgattgaacaaagggaaagcaattctgacagcgccccctatacgttattaaaaaactatgctgacagatttaaaaaatattcagcagaagagcagtacaaaattgattttcaacatcgactggtaaacaggaattgttatttagataaatatggcgatgcaggtaatgactccaacttactgatagtgttttatgttcagataatgcccgatgaccttgtcatgcagctccaccgattttga

SEQ ID NO: 466198 - DNA, 381 bp, Shigella boydii; identical to SEQ ID NO: 458903

SEQ ID NO: 466199 - DNA, 348 bp, Shigella boydii
atgcgttacatcatgaagcatgccagtgccatgcgtgataaaggcgggcgctatgttttcctgatcaaagctgccaccagcgaagtgtggtggccggaagatgcagatcatattgcttttattcgcgggcgtattggttttgaactgcctgcctggtttatcccgaaagacgaaaagcaggtgccaacaggtgctttcttcgctggtgctattgctgttttcgacaagacctggaagggaccggcaatcagctacatcgggcgcgatgaacttgaggcatgtggtgaggcatttctggcgcaggttcgccagcaggcggaaaagctggtcagggagatggtggcatga

SEQ ID NO: 466200 - DNA, 378 bp, Shigella boydii; identical to SEQ ID NO: 465880

SEQ ID NO: 466201 - DNA, 249 bp, Shigella boydii; identical to SEQ ID NO: 461985

SEQ ID NO: 466202 - DNA, 165 bp, Shigella boydii; identical to SEQ ID NO: 461984

SEQ ID NO: 466203 - DNA, 213 bp, Shigella boydii; identical to SEQ ID NO: 36005

SEQ ID NO: 466204 - DNA, 240 bp, Shigella boydii; identical to SEQ ID NO: 25727

SEQ ID NO: 466205 - DNA, 213 bp, Shigella boydii; identical to SEQ ID NO: 466078

SEQ ID NO: 466206 - DNA, 267 bp, Shigella boydii
atggcgacgctggggcgtcttatgagcttgctgtcaccctttgacgtggtgatatggatgacggatggctggccactgtatgaatcccgcctgaagggaaagctgcacgtaatcagcaagagatatacgcagcgaattgagcggcataacctgaatctgaggcagcacctggcacggctgggacggaagtcgctgtcgttctcaaaatcggtggagctgcataacaaagtcatcgggcattatctgaacataaaacaccatcaataa

SEQ ID NO: 466207 - DNA, 213 bp, Shigella boydii; identical to SEQ ID NO: 36005

SEQ ID NO: 466208 - DNA, 177 bp, Shigella boydii
atgatgagcgaaagtaataagcaacaggcagtgaataagttgacagagattgtcgctaactttaccgccatgatttctacccgaatgcctgatgacgtggtggataaactaaaacagctaaaggatgccgaaacgtcgtcgatggggaaaattatctaccatacgatgttcgggtaa

SEQ ID NO: 466209 - DNA, 219 bp, Shigella boydii
gtggttttcccggggcgtatcatgctggcgaatacctgtatgtggacctaccgttctgatgagtgtggttacacgggcagggcagtggctgacgagttcgacaaaccaacgacggatatccggaaggacaaatgcagcaagtgtatgcgcgggtgtgagttgcgcaacaataccggtaatttcggcggtttcctttccatcaataaactttctcagtaa

SEQ ID NO: 466210 - DNA, 213 bp, Shigella boydii; identical to SEQ ID NO: 466078

SEQ ID NO: 466211 - DNA, 330 bp, Shigella boydii; identical to SEQ ID NO: 96322

SEQ ID NO: 466212 - DNA, 267 bp, Shigella boydii; identical to SEQ ID NO: 464426

SEQ ID NO: 466213 - DNA, 213 bp, Shigella boydii; identical to SEQ ID NO: 466090

SEQ ID NO: 466214 - DNA, 213 bp, Shigella boydii; identical to SEQ ID NO: 36005

SEQ ID NO: 466215 - DNA, 186 bp, Shigella boydii
atgcgagagctgaaaatgaaactctgcgtgctgatgttgccgctggtcgtaagcgcctgcggatcaacgccacctgctccggtaccgtgcgtgaagccaccggcacctccggcgtggataatgcaaccggcccccgactggcagacaccgctgaacgggattatttcatcctcagagaacggttga

SEQ ID NO: 466216 - DNA, 213 bp, Shigella boydii; identical to SEQ ID NO: 466078

SEQ ID NO: 466217 - DNA, 213 bp, Shigella boydii; identical to SEQ ID NO: 36005

SEQ ID NO: 466218 - DNA, 213 bp, Shigella boydii; identical to SEQ ID NO: 36005

SEQ ID NO: 466219 - DNA, 360 bp, Shigella boydii; identical to SEQ ID NO: 466035

SEQ ID NO: 466220 - DNA, 303 bp, Shigella boydii; identical to SEQ ID NO: 464103

SEQ ID NO: 466221 - DNA, 1236 bp, Shigella boydii
atgaaacagattctaatttcattttcttttagattaatgggtcctgttatcatgcttctgaccacgccacaattgttgtcgactttgggaaatgtggaatatggagtttggtctttattgattacaacgattagttggttgacaatatgcgactttggcatatcaaatcagatacgaaatgaaagtaagattttaattgttcaagataataaagaaagtatacgagagatatatacagcggcagttataatttcattctttataacattattatgttgtgtgattataagttttattaatatcgacttgatatataaattgtttttatcttgtgtttttttatttgctatagaaacaaatatttgtagagccctatgcctttcattgaataaacctgaattggcctctgcagtaactaatattccgaatttatttttattgatatatgtgttttgttattcgtcatttaacataaacaatgtgatggatatatattgttatggctctgccatgatgttcgtatcaatttttattattttatataaatttaatattaagttgttttggccagttttccacccttcttacttaagattttctatcatgaaatactctctacttagaggtggtggtggtttctttatggttcaattggtttcgatggggttaataataagtgatagatatataatatcatctatatttggtgttgaagatgtcacaaaatatgatttgatatttaaggtgtcaaatttttgcataatgtttttttcaattgtaaatatggttctttggtcgaaatttacagaattttggatgcaagggttttatacaaaaatcaaggttatctttaaagtgtttgacttatgttttttattgttagttatcgtcctaattttgattttaaaccatatacactggatttttgaattatggctaaatgtaactaatgaaaattacaatgaagtttatattacagggattgtcctttatttggttgggtattattggatgtcagcttattcctcttttttaaatggtataagcatcataaaaaaacaatttattatccagggtggagggcttttgatcaaagctattactttattaattgctatgaatatcttgaaagtatttaaggttgaatatattattttgctgggtggtgcgtgtctatttattgttggttttttattcaggaagtgtgcgcatgataaaatcaatagttgtatatag

SEQ ID NO: 466222 - DNA, 534 bp, Shigella boydii; identical to SEQ ID NO: 464564

SEQ ID NO: 466223 - DNA, 294 bp, Shigella boydii
gtggcgcacgtcttcggtgaacgcactctggccacactggagcgtcttctgagcctgctgccggcctttgaggtcgtggtatggatgacggatggctggccgctgtatgaatcacgcctgaagggaaagctgcacgttatcagcaagcgttacactcagcgcattgagcgacataatctgaatctgagacaacatctggcaaggctgggacggaagtcactgtcgttctcaaaatcggtggagctgcatgacaaggtcatcgggcattatctgaacataaaacactatcagtaa

SEQ ID NO: 466224 - DNA, 132 bp, Shigella boydii; identical to SEQ ID NO: 466066

SEQ ID NO: 466225 - DNA, 294 bp, Shigella boydii; identical to SEQ ID NO: 25632

SEQ ID NO: 466226 - DNA, 738 bp, Shigella boydii
gtggcgctgcccttcgctgctgacgcctgtctggtcgcctcatcttttgaagcagacgccgatgatgccgatgacgccgccgaactggctgacgatgcggcagccgtttttgaggattctgcacgggtttccgacgctttcgcgttcgtttcggatgtcttcgctgcggaagctgacctcgctgctgcgctggcctgttcagtggcttcgccagccttcgttgtggctgttgaagcggacgacgcggcactttctgccgactttccggcagcggtggcactggctgaggcctgcccggcacttgttgatgcggcactggcagatgatgcagccgctgtttttgagcctgccgcagctgaggcactctgtcccgctgccgtttcagaagacctggcgttcgtctcggacgtttttgccgccttcgcggaatttcctgccgccgttgccgaggaagcggcactactggcgcttgatgatgcgttcgtttctgatgatttcgctgcctcttttgaggccgccgcatcccgggctgaggtggcagcttctgacgcctttgtggtcgctgcggatgcagaagtggctgcagatttttgtgacgctgccgcattcgtttctgacgttttcgccgcaccggcactggtagctgccgcgctttttgaggactctgcagcggcagcactttttgaggcttcagtggcctttgttgatgccgttcctgcgctggaagacgctgactga

SEQ ID NO: 466227 - DNA, 189 bp, Shigella boydii; identical to SEQ ID NO: 464175

SEQ ID NO: 466228 - DNA, 993 bp, Shigella boydii
atgaaagtgacatttgagcagttaaaagcagcctttaatcgggtcttaatttcacgcggcgttgacagcgaaacggctgacgcctgtgcagagatgttcgcccgcaccaccgaatccggcgtttattctcacggcgttaatcgtttccctcgtttcattcaacaactggaaaacggcgatatcattcctgatgcccaacccaaacgtataaccagcctcggcgcaattgaacagtgggatgcccagcgttcgatcggcaacctgacggcgaaaaagatgatggatcgcgccattgaactggctgccgatcactgtattggtctggtggcacttcgtaatgccaaccactggatgcgcggcggcagctacggctggcagacggcggaaaaaggctatattggcatttgctggaccaactccatcgccgtaatgccgccgtggggcgcaaaagagtgtcgcattggcactaacccgctgatcgtcgccattccttccacgccgatcaccatggtcgatatgtcgatgttctcttacggcatgttagaagttaaccgcctggcgggccgtcagctcccggtcgatggtggctttgatgatgagggcaatttgaccaaagaacctggcgttatcgagaagaatcgccgcattttgccgatgggctactggaaaggttctggcatgtcgattgtgctggatatgatcgctactctcctttccgacggcgcatcggttgccgaagtcacccaggacaacagcgacgaatacggcatttcacaaatttttattgccattgaagtggacaagcttatcgacggtcccacccgcgatgccaagctgcaacgcatcatggattacgttactaccgctgaacgcgctgacgaaaaccaggccatccgcttacccggccacgaatttactaccctgctggccgaaaaccgccgtaacggcatcactgttgatgacagcgtgtgggccaaaatccaggcgttatga

SEQ ID NO: 466229 - DNA, 324 bp, Shigella boydii
atggcaaagaattttgtagaagaaggaaaaacggtggcgattgttgccagtgcagccatcagcagcggagacctggtgcaggtgggtgatgtttttgcggtggcgctgaccgatattccacagggtgaaacaggcgacggcctgaccgaaggtgtgtttatgctgcctaagctgaaaacggatgacatgaaaacgggtaagaaggtttatctgaagtccggaaaagttcagctgactaacagcggctctgatccgctggtcggggttgtctgggcagatgccggaaccagtgcagaagaagtgccggtaaaactcaatgtctga

SEQ ID NO: 466230 - DNA, 213 bp, Shigella boydii; identical to SEQ ID NO: 464184

SEQ ID NO: 466231 - DNA, 351 bp, Shigella boydii; identical to SEQ ID NO: 466092

SEQ ID NO: 466232 - DNA, 213 bp, Shigella boydii; identical to SEQ ID NO: 466090

SEQ ID NO: 466233 - DNA, 165 bp, Shigella boydii; identical to SEQ ID NO: 466100

SEQ ID NO: 466234 - DNA, 1230 bp, Shigella boydii
atgcgtaaatatcctttaagtttactgaaggataaaaatattgtgactttttttgatttctggggaaaaacccgacgcggcgagaaagacgggggcgacgactatcaccttctttgctggcattcgctggatgtagccgcgatgggctatttaatggttaaaagaaattgcttcgggctggctgattattttcgtcaattagggatttctgacaatgaacaggcggctcaatttttcgcctggttgctgtgctggcacgatattggaagatttgcccgctcttttcaacaactttacctgccccctgaactcaagattcaggaaggtgccagaaaaaattacgaaaaaatctctcattcaacgctgggctactggttgtggaatcattatttaagtgaatgtcaggagttacttacttcatcttcgctctctccgcgcaaacttaggcgagtgatagaaatgtggatgcccgtgacgacagggcatcatggtcggccccctgagcgtatggatgaattggataattttctgcctgaagacaaagctgcagcacgagattttctccttgaaatcaaaccactgtttccgctcatagagatccccgcattctgggatgatgatgagggcattgaacttataaaacacctttcctggtatatctctgcaaccgtcgtgctcgcagactggacgggttcgtcaacgcgattttttccacgcgtcgcacacccaatggatattaaaggttactggcagaaaactttagttcaggctcaaaacgccttaaccgtctttcctctaaaagcaaaagtcgcgcctttcaacggaattaatacgctgtttccttttattgagaatccgacaccgttacagcaaaaggtgctggatctggatatcagccagcaaggaccgcagttatttattctggaagatgtgactggcgcaggtaaaacagaagcggcgcttatcctggcgcacaagttgatagctgcggggaaagctcaggggctgttttttggtctgccaacaatggcaacggccaatgccatgtacgatcggctggtcaaaacctggcttgctttctattcgccagaatcccgccccagcctggtgctggcacatagtgcccgcacattaatggaccgctttaatggtaatgactccaacttactgatagtgttttatgttcagataatgcccgatgaccttgtcatgcagctccaccgattttga

SEQ ID NO: 466235 - DNA, 150 bp, Shigella boydii; identical to SEQ ID NO: 466105

SEQ ID NO: 466236 - DNA, 294 bp, Shigella boydii; identical to SEQ ID NO: 25632

SEQ ID NO: 466237 - DNA, 411 bp, Shigella boydii; identical to SEQ ID NO: 466120

SEQ ID NO: 466238 - DNA, 567 bp, Shigella boydii; identical to SEQ ID NO: 466111

SEQ ID NO: 466239 - DNA, 405 bp, Shigella boydii; identical to SEQ ID NO: 464304

SEQ ID NO: 466240 - DNA, 699 bp, Shigella boydii
atgcaggatattccacaggaaacacatcatgagacgacacgcctcactcagtcagcccaggtggtgctctgggaaatcgatctgacagaggtcggtggtgaacgttattttttctgtaatgagcagaacgaaaaaggtgagccggttacctggcaggggcggcagtatcaggcataccccattcaggggacaggatttgaactgaacggcaagggcagtgctgcccgtccgacactgacggtttctaacctgcacggtatggtcaccgggatggcggaagatctgcagagtctggtcggcggaacggtggtccggcgtaaggtttacgcccgttttctggatgcggtgaacttcgtcaacggaaacagtgacgccgacccggagcaggaggtgatcagccgctggcgcatcgagcagtgcagcgaactgagcgcggtcagtgcctcttttgtactggccacgccgacggaaacggacggcgctgtttttccgggacgtatcatgctggccaacacctgcacctggacctatcgcggcgatgagtgcggttatcacggtccggcggtcgcggatgaatatgaccagccaacgtccgatatcacgaaggataaatgcagcaaatgcctgagcggttgtaagttccgcaataacgtcggcaactttggcggcttcctttccattaacaaactttcgcagtaa

SEQ ID NO: 466241 - DNA, 213 bp, Shigella boydii
ttgccagagaaatttttccggacggatgctgataataatgatgtgccaatgacggcagcatcatggatggcactgagtgaagcgacagagcaggcgatgtttgcgaagggagtggagattaatacacggcagttgcagatgaaagccgaggttgaggcgctgacagacctgaaggcgatccgcagttatgttgtcggatggcctgctgtctga

SEQ ID NO: 466242 - DNA, 213 bp, Shigella boydii; identical to SEQ ID NO: 36005

SEQ ID NO: 466243 - DNA, 1449 bp, Shigella boydii; identical to SEQ ID NO: 466135

SEQ ID NO: 466244 - DNA, 477 bp, Shigella boydii; identical to SEQ ID NO: 462627

SEQ ID NO: 466245 - DNA, 474 bp, Shigella boydii; identical to SEQ ID NO: 466140

SEQ ID NO: 466246 - DNA, 237 bp, Shigella boydii; identical to SEQ ID NO: 465696

SEQ ID NO: 466247 - DNA, 243 bp, Shigella boydii; identical to SEQ ID NO: 461390

SEQ ID NO: 466248 - DNA, 294 bp, Shigella boydii
atgcagacccgggataaccttgagcgcatggtggttatccaggcgtttatagcggtacgggtgctgggcctgcggcagggaggtgtcagtgaagaaacacaaaatgacagctgtgagaaaatactgacgccgacagagtggaaactacagtgggttaagctggaaggaaagccgcttccggtgcaggcaccgaccctgaaatgggcctggggcgatggtatgacagcaaacgcacaggtcgtcccggttggggcgtcatgtgggatggctggtcagacttcaggatatggttga

SEQ ID NO: 466249 - DNA, 588 bp, Shigella boydii; identical to SEQ ID NO: 466144

SEQ ID NO: 466250 - DNA, 525 bp, Shigella boydii; identical to SEQ ID NO: 465688

SEQ ID NO: 466251 - DNA, 999 bp, Shigella boydii
gtggaggccgtcggtcgggcgagcgatgatgcggaaggttacctggattttttcaaaggcaagataaccgaatcccatctcggtaaagagctgctggaaaaagttgatctgacggaggataacgccagcagactggatgagttttcgaaagagtggaaggatgccaacgataaatggaatgccatgtgggctgtcaaaattgagcagaccaaagacggcaaacattatgtcgcgggtattagcctcagtatggaggacacggaggaaggcaaactgagccagtttctggttgccgctaaccgtatcgcgtttattgacccggcaaacgggaatgaaacgccgatgtttgtggcgcagggcaatcagatattcatgaacgacgtgttcctgaaacgcctgacggcccccaccattaccagcggtggcagtcctccggtattttccctgacatcagacggaaagctgaccgctaaaaatgcggatatcagtggtagtgtgaatgcgaactccgggacgctcaacaacgtcacgattaatgagaactgtcagattaaggggaaactgtcagccaatcagattgaaggcgatattgtcaaaacggtcagcaagtctttccccagcacgaacagttatgccagtggcaccatcacggtaagaatcagtgatgatcagaaatttgaccggcaggtcatgataccgccagtgttattccgcggtggtaagcatgagaatttcaacagtaataaccaacagtcatactggtattcaacctgccggttaagagtgacccgcaatggtcaggagatttttaatcagtccacgacggatgctcagggcgtattttcctcagttatagatatgcctgccggacaggggacgctgacactgacattcaccgtatcttcatcaggagcgaataactggacaccaacaaccagtatcagcgatctgctggttgtggtgatgaaaaaatccacagcaggcatcagtatcagctga

SEQ ID NO: 466252 - DNA, 549 bp, Shigella boydii
gtgaaaacgggggccgaagccatccgggcgctggccacacagctcccggcgtttcgccagaaactgaatgagggctggtatcaggtgcgcattgccgggcgtgatgcaggcgaaaacgaattatctgcccgtcttaatgagccgctggcaaatggtgccgtgatccatatcgtgccgcgtctggcgggagctaaaagtggcggtgtgtttcaggtggtgctgggggcggcgttgattgcggtggcatggtggaaccctgtgggctggctgggtgccgcggctgtatcgggcatgtatgcggcaggggccagtatgatcctgggcggtgtggcgcagatgctggcaccgaaagccaggacgtccacggcagccagtacagataacggcaaacagaacacctatttttcctcactggataacatggttgctcagggcaatgttttgcctgttctgtacggtgaaatgcgtgtggggtcgcgggtggtttctcaggagatcagcacggcagacgaaggggacggtggtcaggttgtggtgattggtcgctga

SEQ ID NO: 466253 - DNA, 516 bp, Shigella boydii
atggtatatgcttcatcaatctcagcatacgatataacgagtatactcttaaatctgttatctataagtcttttaacaaacctacgtatatctactgataccaaaagaacgaaatttttttttgcatttctcaattctctcaaagcatgtgctaaagtttccattacctcatccgaaacctctatatccatattcaagaaagagccaccagaggtttgccttatcccttttcttattgcatcctcaatatatccggaaagcatcacaactttaatctcaccagaaacagctattttactacaaatatacctagaaagtgatgcacggacatgttcaactaatgttatgacatctttttctctgggagcccaaagcgccaaagactccataataagttttaaattgcgaacagaaatattttctccaagcaatctttgtaatacctcagaaattctctgtatagtcacatgtcggaagacttcctttaatagatcaggataccgattttcaaactga

SEQ ID NO: 466254 - DNA, 402 bp, Shigella boydii; identical to SEQ ID NO: 462853

SEQ ID NO: 466255 - DNA, 267 bp, Shigella boydii; identical to SEQ ID NO: 464426

SEQ ID NO: 466256 - DNA, 867 bp, Shigella boydii
atgaccactcgtgtgttccgtcggcaattttctgaaatgaccgagctggttaatacgctggcgtttttgcccgactcaacggatcagatcgaggctctgaaaattcgcgaaggcgatgcgaaagagattatcagcatcaaaaattcgatcgcggaaatgaaagatgccgaaattgaacggacaaataaattgctctcactgatctcttacgatcaggaaagcggttttattaaaaatatggcgattattgagtccaacaataatcagtatctggctgtggggatcatcaaactgtgtggtctggaagccgtggaagcggtgtttggtgttgatgaacgcaataaaatcgtcaggaaattgtgtcagcgaattgccgagaaatatgcgcaatgctgcgatatcgtgacattcaatgccgatctctatttacttctgtgtcgggaaaatgtacagacatttacccgtaaaatagcgatggtaaacgattttgacagcagctttggctaccgcaatctgcgcatccataagtctgccatttgtgaacctttgcagggggaaaacgcctggagttacgcagaaaaactgaaactggcgatttccagtatccgtgaccatatgttctccgagtttattttctgtgatgacgcgaaactcaacgaaatagaagagaatatctggattgcgcgtaatattcgccatgcaatggaaattggcgaactattcctcgtctatcaaccgatcgttgatattaacacccgcgccattctgggcgcggaggcgttgtgccgttgggtttctgcggagagggggatcatttcaccgctgaaattcattaccattgctgaagatattgaagtggcacactga

SEQ ID NO: 466257 - DNA, 294 bp, Shigella boydii; identical to SEQ ID NO: 460208

SEQ ID NO: 466258 - DNA, 381 bp, Shigella boydii; identical to SEQ ID NO: 458903

SEQ ID NO: 466259 - DNA, 225 bp, Shigella boydii; identical to SEQ ID NO: 462228

SEQ ID NO: 466260 - DNA, 267 bp, Shigella boydii; identical to SEQ ID NO: 464426

SEQ ID NO: 466261 - DNA, 579 bp, Shigella boydii
atgaaaaggaatttattatcttccgctattatagtcgccatcatggccctcggtctgacgggttgtgatgataaaaaagccgaaacagaaacgcccccgcctgccaatagtcaacctgccgcaccagctcctgaagctcccgttgcaaaagcagaagctaaacctgaaacacctgcgcaaccggtggtcgatgaacaagcggttttcgacgaaaaaatggatgtctatatcaagtgctataacaagttacagatccctgtacagcgcagtctggcgcgttatgttgactggctgaaagattttaaacaggggcctaccggtgaagagcgtactgtttatggcatctacggcattagtgaatccaacctcgctgagtgtgaaaaaggcgtaaaaagtgctgtggcgttaacgcctgcgctgcaaccaattgatggcgtggcggtgagttatatcgatgctgccgtggcgttgggtaataccattaacgaaatggataaatattacacccaggaaaattataaagacgatgcgtttgcgaaagggaaaacgctgcaccagacattcttaaaaaatctgtaa

SEQ ID NO: 466262 - DNA, 240 bp, Shigella boydii; identical to SEQ ID NO: 464629

SEQ ID NO: 466263 - DNA, 297 bp, Shigella boydii; identical to SEQ ID NO: 466177

SEQ ID NO: 466264 - DNA, 498 bp, Shigella boydii
atgaaccttgaagccttaccaaaatattactccccaaaatctccaaaattgagcgatgacgcaccggcgacaggctcaggtggtttaacgattacggatgtgatggctgcgcaggggatggtgcagtcgaaagcaccgcttgggtttgccttattcctggcaaaagttggtgttcaggatcctcaatttgcgattgaaggtctgctcaattacgcgatggcactggataacccgacattgaacaaattgagtgaagaaacccggttacagatcatcccttaccttgtgaattttgcctttgctgattattccaggtctgcggcaagtaaggctcgctgtgagcattgtgctggtactggatttcataatgtattgcgcgaagtggtgaaacactccagaagcggggaatctgttatcaaggaagagtgggtgaaggaactatgtcagcattgtcatggtaagggagaagtcagcacagcgtgcagagggtgtaagtag

SEQ ID NO: 466265 - DNA, 519 bp, Shigella boydii; identical to SEQ ID NO: 464880

SEQ ID NO: 466266 - DNA, 348 bp, Shigella boydii; identical to SEQ ID NO: 464879

SEQ ID NO: 466267 - DNA, 225 bp, Shigella boydii; identical to SEQ ID NO: 133446

SEQ ID NO: 466268 - DNA, 393 bp, Shigella boydii; identical to SEQ ID NO: 464239

SEQ ID NO: 466269 - DNA, 555 bp, Shigella boydii; identical to SEQ ID NO: 466181

SEQ ID NO: 466270 - DNA, 372 bp, Shigella boydii; identical to SEQ ID NO: 462946

SEQ ID NO: 466271 - DNA, 213 bp, Shigella boydii; identical to SEQ ID NO: 466078

SEQ ID NO: 466272 - DNA, 234 bp, Shigella boydii; identical to SEQ ID NO: 464402

SEQ ID NO: 466273 - DNA, 285 bp, Shigella boydii; identical to SEQ ID NO: 461629

SEQ ID NO: 466274 - DNA, 213 bp, Shigella boydii; identical to SEQ ID NO: 36005

SEQ ID NO: 466275 - DNA, 531 bp, Shigella boydii
gtgtcattagttggcgagcgcaattcttcgttggagcatgttacgtatggaacattgataaatgttatacctcgcttttcatctcggggacaaattgagatgtctttaacgatagaggatggaacaggaaatagtcagtcaaattacaattataataatgaaaatacatctgtccttccagaagttggaaggaccaaaatcagtacaatagcgagagttccacaaggcaaaagtttgttgataggtggttatacgcatgaaacgaactctaacgaaatagtatctattccttttctctcctctattcctgtaatcggtaatgtgttcaagtataaaacaagtaatatcagtaatattgtaagggtttttctgattcaaccccgtgagataaaggagtcaagttattataatacagcagaatataagagcctcatatctgaaagagaaatacaaaagactacacaaataatcccatctgaaactactttgctggaagacgaaaaatcattggtttcatacttaaattactaa

SEQ ID NO: 466276 - DNA, 267 bp, Shigella boydii
atggcgacgctggggcgtcttatgagcttgctgtcaccctttgacgtggtgatatggatgacggatggctggccactgtatgaatcccgcctgaagggaaagctgcacgtaatcagcaagcgatatacgccgcgaattgagcggcataacctgaatctgaggcagcacctggcacggctgggacggaagtcactgtcgttctcaaaatcggtggagctgcatgacaaagtcatcgggcattatctgaacataaaacactatcaataa

SEQ ID NO: 466277 - DNA, 411 bp, Shigella boydii; identical to SEQ ID NO: 464954

SEQ ID NO: 466278 - DNA, 666 bp, Shigella boydii
atgagcggttggtttgacctgaccttaaatcagcgtgtttataatcaggacggtaaaacggcaaatgcggtcgttacctatgatggcaacgtgggtgagcagtataacgatgcctggtttggtgacagtgccaatgaaaatatcatgcagttcagcgatatttacctgacaacacgaggttttttacccttcgcaccagaggcagacttctgggtcggcaaacataaactcccgcaatatgagatccagatgctggactggaaaaccttaaccacggatgtcgccgcgggtgtggggattgaaaactgggcacttggtgtagggctgtttgatatgtccttaagccgtgatgatgtcgatgtttactctcgtgatttttcgcgtaccagccagatgaataccaattctgtggatgttcgttatcgcaatatcccgttatgggatgatgtgacattatcattaatggctaaatattccgcacctaataaaacggatcaacaacaagataacgaaaatgacaacagttattttgaaatgaaagatagctggatgctgacttctgttttacggcaaaacctgcaacgcgatacgtttaatgaatttacgttacaggttgccaataattcctatgccagcagtggtgatgctgccaacttactgatttag

SEQ ID NO: 466279 - DNA, 318 bp, Shigella boydii; identical to SEQ ID NO: 464788

SEQ ID NO: 466280 - DNA, 387 bp, Shigella boydii
atgatgaacggacatactgacaacgtaaaaatatttatgcaagaaattcagtcactgatatacaatcatatcattcatgaagataatctggttaaattactgcaaactaaaagtgctaacgaaacacctgggctctatatctccatgttgtatgggttcgatgaaacaatcgatatctttctgaatgcattaaccactccaatagcacaagagcttttaaacaaaaaaatagtgatggatattttagcaatgaaaacacgtgatggtgaactagggttgtttgctgcaatggaaaataatcaccctttgtgtgtcacacggttcctctctaaaattaatggcatcgcctttaaatacaagttgagggtaatgctgccaacttactga

SEQ ID NO: 466281 - DNA, 612 bp, Shigella boydii
atgaacttcggcagccgctccgaaaaagtctcccgtcgtatcgcacagatggaagctgacctgaaggcacttcagaaagaaagtgatacccttaccggtcgggttgacgacccggccgtgcagcgcccgctgcgtcaaacccgcacccgcaaaccgttccccgaatcactcccccgcgatgaaaaacggctgctgccggcagcgtcatgctgcccggaatgtggaggctcactgagctatccgggtgaggatgccgccgaacagctggagttgatgcgcagcgtcttccgggttatccggactgtacgtgaaaagcatgcctgtactcagtgcgatgccatcgtgcaggcccccgcgccttcacggcccatcgagcggggtatcgcaggaccggggctgctggcccgcgtgctgatctcaaagtatgcagagcacaccccgctgtaccgccagtctgaaatgtacggccgccagggcgtggagctgagtcgttcactgctgtcgggctgggtggatgcatgctgccggctactgtcaccgctggaagaagcgcttcaggactatgtgctgactgacggtaagctccatgctgatgacacgcctgtcccgtaa

SEQ ID NO: 466282 - DNA, 294 bp, Shigella boydii; identical to SEQ ID NO: 25632

SEQ ID NO: 466283 - DNA, 330 bp, Shigella boydii; identical to SEQ ID NO: 461591

SEQ ID NO: 466284 - DNA, 387 bp, Shigella boydii; identical to SEQ ID NO: 463695

SEQ ID NO: 466285 - DNA, 213 bp, Shigella boydii; identical to SEQ ID NO: 36005

SEQ ID NO: 466286 - DNA, 201 bp, Shigella boydii
atggatataaataactggcaagagcaatcaattaataacatctacagattcatatctggtcttattggtatatatatagcagtgtttgttttctatattatttcaaaaaacaccttattattaaattcactttcattattaggcaaacacaccctttcaatatatataatacaaactttcattttttattggattagttaa

SEQ ID NO: 466287 - DNA, 381 bp, Shigella boydii; identical to SEQ ID NO: 458903

SEQ ID NO: 466288 - DNA, 381 bp, Shigella boydii; identical to SEQ ID NO: 458903

SEQ ID NO: 466289 - DNA, 381 bp, Shigella boydii; identical to SEQ ID NO: 458903

SEQ ID NO: 466290 - DNA, 213 bp, Shigella boydii; identical to SEQ ID NO: 466078

SEQ ID NO: 466291 - DNA, 372 bp, Shigella boydii; identical to SEQ ID NO: 462946

SEQ ID NO: 466292 - DNA, 267 bp, Shigella boydii; identical to SEQ ID NO: 464426

SEQ ID NO: 466293 - DNA, 303 bp, Shigella boydii
atggatttattaaaaggcgctacagcacatggaacccctgtattatacatcgccatgagcaagggtaatgaagacgtcgtgttatcttatatatcgacgctgaatatttttgcaaaaaaatattcttttagtcaacgtcagttattcacactgttggccgctaaaaatcatgacaacatgtcagctgttcatatagccattcatcataatcattataaaactgtagaaacatattatgctgctataaatgtaatcagccaaagcctgagttttagtgctgatgaactaaagacgtatttataa

SEQ ID NO: 466294 - DNA, 222 bp, Shigella boydii
atgcagagcttcagtgatgtgtggatggatgcgcagtttgcctcgctgaaggcattgatcgtgagaatggtgtccggcagtagtgatgctgcggtggctgatttcagccttttaccggaagagaacgggataccggagcgaacggacgaagaactgatgcatcttggggaaggtatttccggaggtgtgcgttatggaccagatagccaacctggtcattga

SEQ ID NO: 466295 - DNA, 213 bp, Shigella boydii; identical to SEQ ID NO: 466078

SEQ ID NO: 466296 - DNA, 213 bp, Shigella boydii; identical to SEQ ID NO: 466090

SEQ ID NO: 466297 - DNA, 303 bp, Shigella boydii
atggcggggccgtctgtgcgcgtgaatgaatggttcagcgcgtatgcgatggcgggtgtggcttacagccgtgtgtcgactttctccggggattatctccgcgtaactgacaacaaggggaaaacgcacgacgtgctgaccggaagtgatgacggtcgccacagcaacacgtctctggcgtggggggctggcgtgcagtttaacccgaccgaatccgtggccattgatattgcttatgaaggttccggcagtggcgactggcgcactgacggtttcatcgtgggtgtcggctataaattctga

SEQ ID NO: 466298 - DNA, 294 bp, Shigella boydii; identical to SEQ ID NO: 460208

SEQ ID NO: 466299 - DNA, 267 bp, Shigella boydii
atggcgacgctggggcgtcttatgagcttgctgtcaccctttgacgtggtgatatggatgacggatggctggccactgtatgaatcccgcctgaagggaaagctgcacgtaatcagcaagcgttacactcagcgcattgagcgacataatctgaatctgagacaacatctggcaaggctgggacggaagtcactgtcgttctcaaaatcggtggagctgcatgacaaggtcatcgggcattatctgaacataaaacactatcagtaa

SEQ ID NO: 466300 - DNA, 267 bp, Shigella boydii; identical to SEQ ID NO: 464794

SEQ ID NO: 466301 - DNA, 759 bp, Shigella boydii
gtgaaaattgccatattgtcccgggatggaacgctctattcgtgtaagcggctgcgtgaagccgctatacagcgcggtcacctggttgaaattcttgatccgctttcttgctacatgaacataaatcctgcggcgtcttctattcactacaaaggccgcaagttaccccattttgacgcagtgatcccgcgtattggcaccgccattaccttttatgggacggcggcactgcgccagttcgagatgctggggagctatccgctcaatgagtcggtcgccattgcccgggcgcgtgacaaattgcgttccatgcaactgctgacgcgtcaggcggcggaaagcgtgattgacgctttccgcggtctgaacgcgcatattctggtgcaggaatatatcaaagaggcgcaagggtgcgatatccgctgtctggttgttggcgatgaagtggtcgctgcgattgaacggcgggcgaaagagggcgattttcgttccaatttgcatcgtggcggcgcggcaagcgtcgccagtatcacaccacaggagcgtgaaatcgcgataaaagccgcgcgaacgatggcgctggacgttgctggtgtggatattctgcgtgctaatcgcgggccgttggtgatggaagtgaatgcgtcgccggggctggaaggaatagaaaaaaccactggtatcgacatcgcgggtaaaatgatccgctggatcgaacgctacgctacgacagaatattgcctgaaaacgggtggttag

SEQ ID NO: 466302 - DNA, 279 bp, Shigella boydii; identical to SEQ ID NO: 464808

SEQ ID NO: 466303 - DNA, 276 bp, Shigella boydii
gtggggcgcaatagccgtaacggtacccgaggtgggcgcgtgaacaggcagcattttgccgcgaccacgggtaagcggctggccgcgcaatactttatcgccgacgctaacgcacaactcaccttcagcgccaatatgctgtttcagtggaataacaaaacgctgcgccagtggtacctggcgcaggggtgtaccgttggactgggttttcatctccggtggatggatgccgccgttgaaatcccagattttattttttctgaatgcagagaataa

SEQ ID NO: 466304 - DNA, 204 bp, Shigella boydii
atgcgcaagaatgcgaataccctctacgacctgagccgcgcaatcctgcatcaaacggtcatcggcggtaatgtacggctcgcactcagccgcgttgataatcaacgtttcaatcttatctccgccaccctgcaatttaacgcctgtcgggaatcctgcaccgcccagcccggcaacaccaaactgatgtatgcgctcgattaa

SEQ ID NO: 466305 - DNA, 1221 bp, Shigella boydii; identical to SEQ ID NO: 465384

SEQ ID NO: 466306 - DNA, 762 bp, Shigella boydii
atgctgatacccggcgtacaggcggcaaagccgcaaaaagtgacgctgatggtggatgacgttccggtagctcaggtgttgcaggcgctggctgaacaggagaagttgaacctggtcgtgtcgccagacgtcagcggtacggtgtcgttacatctaacagatgttccctggaagcaggcactacaaactgtagtgaaaagcgccggactgataacgcggcaggaaggcaacattctctcagtgcattccattgcctggcagaataacaatatcgcccgccaggaggcggagcaggcgcgggcgcaggcaaatctgccgctggaaaatcgcagtataaccctgcaatacgccgacgcgggagaactggcgaaagcgggggagaagctactgagtgccaaagggagtatgaccgtcgataaacgcaccaatcgccttttgctacgagataacaaaacggcgttaagcgcgcttgaacagtgggtagcgcaaatggatctgccggtcgggcaggttgagctgtcggcgcatattgtcaccattaatgaaaaaagtttgcgtgagttaggcgtgaaatggacgctggccgatgcgcaacacgctggtggcgttgggcaagtcaccacgcttggtagcgacctctccgtagcgacggcgacaacgcatgtcggttttaacattgggcgcatcaacggacgcttgctggatcttgagctttccgcgctcgaacagatgttccctggaagcaggcactacaaactgtag

SEQ ID NO: 466307 - DNA, 1677 bp, Shigella boydii; identical to SEQ ID NO: 465566

SEQ ID NO: 466308 - DNA, 258 bp, Shigella boydii
atggaacaggttgtcattgtcgatgcaattcgcaccccgatgggccgttcgaagggcggtgcttttcgtaacgtgcgtgcagaagatctctccgctcatttaatgcgtagcctgctggcgcgtatgcacggtatcagccgtgaaatgcaggatgcctttgccgcgcggtcacacgccgcacctgggccgccacgcagtcgggcgcatttaaaaatgaaatcatcccgaccggtggtcacgatgccgacggcgtcctga

SEQ ID NO: 466309 - DNA, 213 bp, Shigella boydii; identical to SEQ ID NO: 462242

SEQ ID NO: 466310 - DNA, 1374 bp, Shigella boydii
atgaatcaacaactctcctggcgcaccatcgtcggctacagcctcggtgacgtcgccaataacttcgccttcgcaatgggggcgctcttcctgttgagttactacaccgacgtcgctggcgtcggtgccgctgcggcgggcaccatgctgttactggtgcgggtattcgatgccttcgccgacgtctttgccggacgagtggtggacagtgtgaatacccgctggggaaaattccgcccgtttttactcttcggtactgcgccgttaatgatcttcagcgtgctggtattctgggtaccgaccgactggagccatagcagcaaagtagtgtatgcatatttgacctacatgggcctcgggctttgctatagcctggtgaatattccttatggttcacttgctaccgcgatgacccaacaaccacaatcccgcgcccgtctgggcgcggctcgtgggattgccgcttcattgacctttgtctgcctggcatttctgatagggccgagcattaagaactccagcccggaagagatggtgtcggtataccatttctggacgattgtgctggcgattgccggaatggtgctttacttcatctgcttcaaatcgacgcgtgagaatgtggtacgtatcgttgcgcagccgtcattgaagatcagtctgcaaaccctgaaacggaatcgcccgctgtttatgttgtgcatcggtgcgctgtgtgtgctgatttcgacctttgcggtcagcgcctcgtcgttgttctacgagcgctatgtgttaaatgataccgggctgttcactgtgctggtactggtgcaaaacttggttggtactgtggcatcggcaccgctggtgccggggatggtcgcgaggagcggtaaaaagaatatcttcctgattggcgctttgctgggaacctgcggttatctgctattcttctgggtttccgtctggtcactaccggtggcgttggttgcgttggccatcgcttcaattggtcagggcgttactatgactgtgatgtgggcactggaagctgataccgtagaatacggtgaatacctgaccggcgtgcgaattgaagggctcacctattcactattctcatttacccgtaaatgcggtcaggcaatcggaggttcaattcctgcctttattttgggattaagcggatatatcgccaatcaggtgcaaacgccggaagttattatgggcatccgcacatcaattgccttagtaccttgcggatttatgctactggcattcgttattatctggttttatccgctcacggataaaaaattcaaagaaatcgtggttgaaattgataatcgtaaaaaagtgcagcagcaattaatcagcgatatcactaattaa

SEQ ID NO: 466311 - DNA, 210 bp, Shigella boydii; identical to SEQ ID NO: 9340

SEQ ID NO: 466312 - DNA, 1650 bp, Shigella boydii
gtgaactggcgcagaatcgtctggctattggcgttggttactcagccaacgcttgcggaggagacgccgttacaactggcactgcgtggtgcgcagcacgatcaactgtatcagctgtcgtcatcaggcgtgaccacagtctcagcattacctgactcgctcaccacgccgttagggagtttgtggaaactgtatgtttacgcctggctggaggatacccatcaaccggagcagccctatcagtgtcgcggaaactccccggaagaggtttattgttgtcaggctggggagagcataacgcgcgataccgcgctggtacgttcctgtgggctctattttgcgccgcagcggttgcatattggcgcagatgtgtgggggcaatactggcaacagcgtcaggcgcctgcgtggttagcgtctcttactacgctgaagccagaaacctcggtaacggttaaatcgctgcttgattcattagcgacgttacctgcgcaaaacaaagctcaggaagtcttactggatgtggtgctggacgaggcgaaaatcggtgtcgcatccatgctcggtagtcgggtacgggtgaaaacctggagctggtttgccgatgataaacaggaaatccgtcagggtggttttgccggctggttaaccgatggtacaccgctgtgggttactggcagtggcaccagcaaaacggtactaacccgttatgcgacggtgcttaatcgggttttgccagtgccgacgcaggttgccagtgggcaatgtgtagaggtggagctgtttgcccgctatccgctgaagaaaatcacagcggaaaagagtacgacggcagtaaaacccggcgtacttaatgggcgctatcgtgtgacgtttactaatggtaaccacattacgtttgtcagccacggtgagacgaccttactgagcgaaaagggcaaactgaaattgcagtcgcatctcgatcgtgaagagtacgttgccagagttctggatcgcgaggcgaaaagtacgccccctgaggcagcgaaagccatgaccgtggcgattcgcacttttttacagcaaaacgccaatcgggaaggcgattgcctgaccatccccgacagcagcgccacgcagcgtgtttctgcttcgccagcgaccacgggggcgcgaacgatgaccgcctggacgcaggatctcatctatgcaggcgatccggttcattatcatggcagtcgagctaccgaagggacactttcctggcggcaagccacggcccaggcggggcagggagagcgttacgaccagatactcgcgtttgcttatcccgacaacagccttagccgctggggagcgccacgctcaacctgccagttattacccaaagcgaaagcctggctggcgaaaaaaatgccgcagtggcggcgtatattacaaggcgagacggggtacaacgaaccagacgtgtttgcggtctgtcgtttagtctcaggtttcccctataccgatcggcagcagaaacggctgtttattcgtaacttctttacgcttcaggatcggctggatttaacccatgagtatctgcacctggcctttgatggttatcccaccgggcttgatgagaactatatcgaaacgctgacccgacaattattaatggactaa

SEQ ID NO: 466313 - DNA, 183 bp, Shigella boydii; identical to SEQ ID NO: 465433

SEQ ID NO: 466314 - DNA, 210 bp, Shigella boydii; identical to SEQ ID NO: 9340

SEQ ID NO: 466315 - DNA, 471 bp, Shigella boydii; identical to SEQ ID NO: 465583

SEQ ID NO: 466316 - DNA, 1047 bp, Shigella boydii
gtgcgggtattacttcgacctgttctggtaccggaactcgggctggtgatcgttaagccgggccgtgaatccatgccggtattccacaatacccgggtactggtggagccggaaccgaaaagcatgcgtaatctgccgtccggggtcgttcctgccgttcgccagccgctggcggaggataaatcattactgccatttttcagcgacgaacgagtgattcgtgctgctggtggcgctggcgcattgtctgactggttactgcgccatgttaaatcctgccagtggccacacggcgattatcaccacagtgaaaccgtcattcaccgttatggtaccagcgcaatggtgttgtgctggcactgcgacaaccagctgcgcgaccagacctccgaatcactcgggcaacttgctcaccaaaacctgtctgcatggatgattgacgtcatacgccatgcaatgaatggctcgcaggaacgggaattatcgctggctgaattatcctggtgggcggtccgcaatcaggtggcggacgcgctaccggaagcggtattacgtcgttcgctggggttgcgtgcggaaaaaatccgctcaatgtaccgtgaaagcgacatcgtaccgggagagcagaccgccaccagcatactgaagcagcgcacaaaaaatcttgcgccgctgcctcacgcccaccagcaaaacccgccacaggaagagacggtggtcagcattgccgttgatcctgagtctccggaatctttcatgaaacgacctaaacgtcgccgctgggttaacgagaaatacacacgctgggtgaagacacagccgtgtgcgtgttgtggtaagccagccgacgatccccatcacctgattggtcatggtcagggcggaatggggacaaaatctcacgatattttcacgctaccgctgtgtcgggagcatcacaacgagcttcatgcggatcctctggcgttcgaagaaaagcatggttctcaggttgatttaatttttcgttttcttgatcacgcctttgcaactggcgtgcttgggtaa

SEQ ID NO: 466317 - DNA, 480 bp, Shigella boydii; identical to SEQ ID NO: 464940

SEQ ID NO: 466318 - DNA, 324 bp, Shigella boydii; identical to SEQ ID NO: 463235

SEQ ID NO: 466319 - DNA, 333 bp, Shigella boydii
atgtccggcagtgcttttgccgttacgcaccacgccttcagtagcggagcaggaaggacatctgatggaaatggaagccacgcaagcaccttaaaatcaccatcatacactaaatcagtaagttggcagcattaccaaaatagccgtaaattacaggaattgatttgggataagttggttgcatatgtcaatgattttaacttaagcaatcaagaaaaatcacgcttaatactaaggttatttgatgatgttaagttgctatttaatgaagtgcctgtcagcattttagtaaatgatattttttttgaaggattttttcatgaagcaacctga

SEQ ID NO: 466320 - DNA, 822 bp, Shigella boydii; identical to SEQ ID NO: 464328

SEQ ID NO: 466321 - DNA, 1536 bp, Shigella boydii; identical to SEQ ID NO: 465590

SEQ ID NO: 466322 - DNA, 420 bp, Shigella boydii; identical to SEQ ID NO: 465686

SEQ ID NO: 466323 - DNA, 267 bp, Shigella boydii; identical to SEQ ID NO: 464848

SEQ ID NO: 466324 - DNA, 231 bp, Shigella boydii
atgaaacagcctgcgcccgtttatcagagaattgcgggtcatcaatggcgacatatctggctttctggcgatatacacggttgtcttgagcagttgcgccgcaaattatggcattgtcgttttgatccgtggcgagatttacttatctcagtgggagacgttatcgatcgtgggccgcaaagtttacgttgtctgcagttactggaacaacattgggtttgtgcggtatga

SEQ ID NO: 466325 - DNA, 327 bp, Shigella boydii; identical to SEQ ID NO: 464915

SEQ ID NO: 466326 - DNA, 480 bp, Shigella boydii; identical to SEQ ID NO: 464912

SEQ ID NO: 466327 - DNA, 267 bp, Shigella boydii
atggcgacgctggggcgtcttatgagcttgctgtcaccctttgatgtggtgatatggatgacggatggctggccactgtatgaatcccgcctgaagggaaagctgcacgtaatcagcaagcgatatacgcagcgaattgagcggcataacctgaatctgaggcagcacctggcacggctgggacggaagtcgctgtcgttctcaaaatcggtggagctgcatgacaaagtcatcgggcattatctgaacataaaacactatcaataa

SEQ ID NO: 466328 - DNA, 135 bp, Shigella boydii
atgtaccagatggaaaaaatcacaacaggtgtgtcatacaccacgtcagcggtgggaacgggctactggttcctgcagttgctggacagggtttctgaaccgccccgggtttcctggagagtgttttatctgtga

SEQ ID NO: 466329 - DNA, 507 bp, Shigella boydii; identical to SEQ ID NO: 465467

SEQ ID NO: 466330 - DNA, 237 bp, Shigella boydii; identical to SEQ ID NO: 465696

SEQ ID NO: 466331 - DNA, 486 bp, Shigella boydii
atggcacgcatctgcctttacggggatttgcaacgatttggccgccgcatcgaccttcgtgtgaaaacgggggctgaagccatccgcgcactggccacacagctcccggcgtttcgtcagaaactgagtgacggctggtatcaggtgcgcattgccgggcgtgatgcaggtgaaaccgaattgtctgcccgtcttaatgagccgctggcaaatggtgcagtgatccacatagtaccgcgtctggtgggagctaaaagtggcggtgtgtttcaggcggtgctgggggcagctgttatggcggttgctatatggatgccgggggtaggaattatggcgagtaatctgctgttttctctcggtgccagtatgacgcttggcggtgttgcacagatgctggcaccgaaagccagaactccccgtacacagacaacggataacggcaaacagaacacctgtttctcctcactggataacatggttgcctag

SEQ ID NO: 466332 - DNA, 276 bp, Shigella boydii; identical to SEQ ID NO: 464937

SEQ ID NO: 466333 - DNA, 252 bp, Shigella boydii; identical to SEQ ID NO: 464926

SEQ ID NO: 466334 - DNA, 273 bp, Shigella boydii; identical to SEQ ID NO: 461110

SEQ ID NO: 466335 - DNA, 480 bp, Shigella boydii; identical to SEQ ID NO: 463183

SEQ ID NO: 466336 - DNA, 480 bp, Shigella boydii; identical to SEQ ID NO: 464955

SEQ ID NO: 466337 - DNA, 384 bp, Shigella boydii; identical to SEQ ID NO: 464401

SEQ ID NO: 466338 - DNA, 546 bp, Shigella boydii; identical to SEQ ID NO: 463588

SEQ ID NO: 466339 - DNA, 210 bp, Shigella boydii; identical to SEQ ID NO: 464558

SEQ ID NO: 466340 - DNA, 480 bp, Shigella boydii; identical to SEQ ID NO: 463183

SEQ ID NO: 466341 - DNA, 327 bp, Shigella boydii; identical to SEQ ID NO: 464915

SEQ ID NO: 466342 - DNA, 666 bp, Shigella boydii; identical to SEQ ID NO: 464939

SEQ ID NO: 466343 - DNA, 327 bp, Shigella boydii; identical to SEQ ID NO: 465621

SEQ ID NO: 466344 - DNA, 870 bp, Shigella boydii
atggaggcctgtggaggttctcagcactgggcacgggaactgacaaaacttggtcataaagtccggttgttgcaggcccgcttcgttaaggcattcgtcatgggcaataagaatgatgtgatggatgcccgggctatctggatggcggttcagcagccgggtaaagaaatcgccgtaaaaacagaagaacagcagtcggtactggttctgcaccgtacccgcatgcaactggtgaagttccggaccgcacaaattaatgccctgcacgggacgttactggagtttggtgaaaccatccacaaaggccgggcagcgatggagcgggagttccccgaagcactggaacggatgaaagagagactgccaccgtatctcattatggttctggaaaaccagtacaaccgactgaatgagctggactcactgatagaggatattgaaaaacagcttaccagcgtggcgaggcagaatgaaacctgtaagcggttgctggatattcctggcgttggaccacttattgcgacggcagcggtggccaccatgggggaagcatcagcgtttaaatcggggcgagagttcgccgcatatgttggtctggttccaaaacaaactggctccggagggaaagtacgtctgctggggataagcaaacgtggtgacacttatctcaggacattatttatccacggtgcaagagcggtggcattagtagctaaagagcctggcccgtggataaccgaactgaaaaaacgtcgtccagccagtgtggcaatcgtcgccatggcaaacaagctggcacgaacagtatgggcgataaccgcccatgaccgtaagtatgacaggaaccacgtcagtatcagaccatattaa

SEQ ID NO: 466345 - DNA, 633 bp, Shigella boydii
atgttgacatttgatgatggataccttgacaactggtttcaggtatatcctttattaaaagagtttaatctcaaagcacatatttttttaattaccggttttattgggaatggtccggttcgtcactctcctggaaaggaatattctcatcgcgattgcgaacatcaaatagcgacagggaatgctgataatgttatgcttcgctggtctgaagtaaacgaaatgttgcaatctggtctggtcgaatttcatgttcatacgcatactcatacacgctgggataaaaagttcagttcacgagaagaacagtgtaaacatcttcggcaggacttgttgagcgggagagaatatttgaaagaaatgacaggaaaatgcagtaaacatttgtgttggccggaaggttattataacaaggattatattcaggtcgctgaagaacttggattctattatttatatacaacagaaagaagaatgaatgctcctgctaaaggaactacacggataggaagaataagcaccaaagaacgggaaagttgcgcatggctgaaaagacgacttttttattatacaacaccgtttttttcatcgttgctggcctttcataaggggccaagattaccggatgattaa

SEQ ID NO: 466346 - DNA, 480 bp, Shigella boydii; identical to SEQ ID NO: 464934

SEQ ID NO: 466347 - DNA, 303 bp, Shigella boydii; identical to SEQ ID NO: 458125

SEQ ID NO: 466348 - DNA, 417 bp, Shigella boydii
atgcctgaccattctctttttcgattacggattcttccgtggtgcattgcgctggcaatgtcagggagttatagcagtgtctgggctgaagacgacattcagtttgattcccgttttctggaattaaaaggcgacacaaaaattgatctgaagcgtttttccagccagggatatgttgagcccggaaaatacaatttacaggttcaactaaataaacagccattggcggaagagtacgatatttactggtatgctggtgaagatgacgcgagcaaaagctatgcttgtctgacaccggaactggtagcgcagtttggtttaaaagaagacgtggcgggtaatgactccaacttactgatagtgttttatgttcagataatgcccgatgactttgtcatgcagctccaccgattttga

SEQ ID NO: 466349 - DNA, 480 bp, Shigella boydii; identical to SEQ ID NO: 464896

SEQ ID NO: 466350 - DNA, 480 bp, Shigella boydii
gtggcggacctgacgtatgttgccactcaggagggatggttgtaccttgctggcatcaaagatgtttatacgtgcgaaattgtcggctacgccatgggagagcgcatgacaaaagagctgacaggtaaagccctgtttatggcgctcaggagccagcgcccacctgccgggctaatccaccactctgatcgaggttcacagtactgcgcatacgattaccgggtcatacaggagcagtctggtctgaaaacatcaatgtcgcgtaaaggtcactgttacgacaacgctccgatggaaagcttctggggaacgctgaaaaatgagagcctgagccactatcgttttaataaccgggatgaagccatctcagtaatacgggaatacattgagattttctacaatcgtcagcgtcgtcactctcgtctggggaatatctccccggcagccttcagggaaaaatatcatcagatggctgcttaa

SEQ ID NO: 466351 - DNA, 420 bp, Shigella boydii
atggaacagaaagcattatctgcagacccccgcagatcattttcaaatgagtttaaacttcaaatggttaaactggcttcacaaccaggagcctctgttgcccgtattgtccgggaacacgatatcaatgataacctgctgttcaaatggctcaggctctggcagaacgaagggcgcatatcgcggcgtcttccggtaacaatctcttctgacactggcgttgaattattacctgtggagataacgccggatgagccgaaagaaccggtggctgctcttactccgtctttatctactcagactacagttagtgccagctcctgcaaggtggagttccgtcacggtaacatgacgctggaaaatccttcaccagagctgctcacagtgttgatccgtgaactgaccgggtggggacgatga

SEQ ID NO: 466352 - DNA, 441 bp, Shigella boydii
atgcgtgttattaagatgtataattgtatgcttgaaaagatcagtacgaaaccatatattgcgcccccatatattacaggtttgcttgatgacgtagagaaggtgctggataagataaatattctgatagataaagagtatgtttatgatggtaagacgctggcagaagtcattatggaaaacaaagtattatccagtcgcgaacgtaaagaaactatgatagggcttttcacaggcagtaagaaatatactttactgcaatgtgttgagaagcttggtgtattagttcactatgtgaaatcaccggtcgatgaaattaaaaatgtgatgatgttgtatggcgataaggccgaaaacaggaacagacgcagaatgatatatgatgcgttaaccattatttgtgaagatgacatcaggaataaccctcctgagctgtcgtga

SEQ ID NO: 466353 - DNA, 138 bp, Shigella boydii; identical to SEQ ID NO: 16164

SEQ ID NO: 466354 - DNA, 189 bp, Shigella boydii; identical to SEQ ID NO: 463227

SEQ ID NO: 466355 - DNA, 267 bp, Shigella boydii; identical to SEQ ID NO: 464848

SEQ ID NO: 466356 - DNA, 429 bp, Shigella boydii
gtggcctgtggtgcgcttagtctggggctgaatcattaccgtgataacgccataacctacaaagagcagcgcgataaaaaagtcagtgagctggagcaggcaaatgcaaccattactgatatgcagcagcgccagcgtgatgttgctgcacttgatgccagatactcgagggaattagccgatgcgagagctgaaaatgaaactctgcgcgctgacgttgccgctggtcgtaagcgcctgcggatcaacgccacctgccccggtaccgtgcgtgaagcccccaccacctccggcgtggataatgcaaccggcccccgactggcagacaccgctgaacgggattatttcactctcagagagcggttgatgctgatgcagaagcagctggaagtggcgcaggaatatatccgcactcagtgcctgaaataa

SEQ ID NO: 466357 - DNA, 234 bp, Shigella boydii; identical to SEQ ID NO: 464307

SEQ ID NO: 466358 - DNA, 195 bp, Shigella boydii; identical to SEQ ID NO: 465867

SEQ ID NO: 466359 - DNA, 420 bp, Shigella boydii; identical to SEQ ID NO: 464991

SEQ ID NO: 466360 - DNA, 303 bp, Shigella boydii; identical to SEQ ID NO: 461506

SEQ ID NO: 466361 - DNA, 309 bp, Shigella boydii; identical to SEQ ID NO: 465008

SEQ ID NO: 466362 - DNA, 309 bp, Shigella boydii
gtgatcagccgctggcgcatcgagcagtgcagcgaactgagcgcggtcagtgcctcttttgtgctggccacaccaacggagacggatggcgtggttttcccggggcatatcatgctggcgaatacctgtatgtggacctaccgttctgatgagtgtggttacacgggcagggcagtggctgacgagttcgacaaaccaacgacggatatccggaaggacaaatgcagcaagtgtatgcgcgggtgtgagttgcgcaacaataccggtaatttcggcggtttcctttccatcaataaactttctcagtaa

SEQ ID NO: 466363 - DNA, 267 bp, Shigella boydii; identical to SEQ ID NO: 464426

SEQ ID NO: 466364 - DNA, 195 bp, Shigella boydii; identical to SEQ ID NO: 464976

SEQ ID NO: 466365 - DNA, 267 bp, Shigella boydii; identical to SEQ ID NO: 464848

SEQ ID NO: 466366 - DNA, 267 bp, Shigella boydii; identical to SEQ ID NO: 464426

SEQ ID NO: 466367 - DNA, 255 bp, Shigella boydii; identical to SEQ ID NO: 7767

SEQ ID NO: 466368 - DNA, 372 bp, Shigella boydii; identical to SEQ ID NO: 464557

SEQ ID NO: 466369 - DNA, 1095 bp, Shigella boydii
atgctggttcttcctaccagtgccggaaagtcattgattgcttgtatgttgtctcgttggtacttagagaactacaccggaaaggtgttaatcattgtcccgactacatcgctagtggttcaaatgagggatgatttcatcgattatcggttattcccttatgaagcaattcatacaatgatgagtggtagcgggaaacatccgggagataggctaatcactgtttcaacatggcaatcagcttgcaagatgcctcctgaatggttccgacaatatggaatgttgatagttgatgaatcgcataaggctagtgccaaaaatatcaccaatatcatcaatggaatgaatcattgccagtttaaaatcggtatgactggttcccctaaagaatcaaagtgccatttaatgcagtatgtcgggcttttcggtgatatttctaagatcgtgagtattgaccgcctgatggaagaaggccaagtgacaaaactgaaaattaactgtctttttcttcgttataccgatgaggaatgtagcgcggttaaggggagagaatatgcggaagagatcaagtatattacatctaacccacgacgtaataagtttgcttgcaatttggcgctaaaactcgctaagaagggcgaaaacgtattcctgatgttccgcaacactaagcacggaaaacttatgtatgatgcgttacagaaggtacacgacaaggtttattatattgacggtggagttaagacagaagaacgtgatgaatttaagaaaatggcggagggtgacactggcttaatctgtgttgcgtcttatggtgtgttctctactggtgtttccatcaagaacttgcatcatgttattttcggtcatccagtgaaggaatcaaccatcgttcgtcagagtatcggtcgtgcattgcgtaaacatggttctaaggatattgcaacggtctgggatcttatcgatcatctgtgtatattcggtcgtaacggaaaagtcaagcataaaaattatgcggtaaaacatgcacttgagagaatccgctattatctaaccgacaagttcagctatgcaactaaaacaattgctatataa

SEQ ID NO: 466370 - DNA, 354 bp, Shigella boydii
atgatctctcgttacttcaaacgtaaagaatttgaatgcaaatgcgggaagtgcggacaggataccgtagacgctgaattactggcaattcttgaggatgtacgcgaacacttcgggaaaccagtaattattaacagtgctaaccgttgtccggcacacaacaagaaagttggtggtgcttctcgttcaatccatatcactggtaaggccgcagatattgtagtgaaaggcgtctctcctgatatcgttcactcttatcttgatagcaaatatcccaatgagtatggattaggaaaatacaaaacctttacgcacattgatagccgtggttataaggctagatggaatggataa

SEQ ID NO: 466371 - DNA, 348 bp, Shigella boydii
atggctaaaaatattttcactgaatttcctacttatccggtcgatcagctttccggtatttttattaatggcattagtccagaatcaatgacatatgattttgaggcgaagagagttaaacataaacaatataaagaatgtatccgcgatcatgaaaaagggaccgtgttttgtgtcgctacattggctaaacgtcctaagtatcgttttcgtgtcgggcaagaagtcgatgtagttaatccttatagctttaattgtctgggcgatgcacgcgcggtgtgtgtaggcactgctccttattatatcaagggtatgcgctttattggttatatcttcgaaatgatctaa

SEQ ID NO: 466372 - DNA, 684 bp, Shigella boydii
atggcaaccagtgtcaataaacgtaacgctctaaggactaagaaagcgttacggcaatggtctgaaaaggcaaccgatacattcgaaagggcactaggggaaggggcgatctttgcttccagagcactccagaagaagattaacaagaatgttgatagacctactcgctggactcagcaagctgtaggtaataccaactacaagaaccgatcagggaccagacaccaaatcttcatcaagggcgcaagggataaggacaagaagatcggcagtcaggatgactatctgaaacactatttcgatggtggcaaaatcaataagctagtgccaatcaccaacggtaaggtcttagactcccacgggaacattacggccatcaaaggcggtaagatgatgcgtaacatcgaaaacggcaacttcatcaaggtagagaacaaggaagggacttttatcatgaagaagtacaagcctaagaaatcccgaaccaaacgcgctaggaatggatcggcggtggcaaaacgtcgcttagagaaacgcatccagaaacagagtaagcgaattgttgccgttaagtcggataaaatttctactcgttattcgacgctaggatcgtgggaaagcaacgaggaaatgatgcttaagaacattaataagcacattaaatcgcgcatgagatacgtttaa

SEQ ID NO: 466373 - DNA, 171 bp, Shigella boydii
atgaagaataaacttaagaaatattttggttatctcttgattgtcgccctcacttataacgtagctatcagacctctgcttacgtccattgggcttgaactcccggctatgaccgtggatgaacaattgcttaggacactggcgggggtcttttcgttattagggggctaa

SEQ ID NO: 466374 - DNA, 279 bp, Shigella boydii
atgactgaaattatatatggcggtatcggtgttatcgccttaatttgtggtggtctttggagacttcaccgaaatcaattagcaactgaaaataggttatctaaattggaatccagcgacgcattgttaaaccagaagtttgagacgatgcagaataaccatactcagattgctgaacgtgtttaccaaatggaacaaacactacacggtatagagaagaaagtggttgcgatggacgccaaatttgaccaagttctcgacatactcaaacaaaaataa

SEQ ID NO: 466375 - DNA, 3747 bp, Shigella boydii
atgggatttgaaatattagtaggcgcggttattgctggtgcgtctgctgggatggctgctgctgcaacattttctgttatgaccgcagtcgctatcggtatggctgctggtgcaatgaccttgatcgcttccactgtaggcgcaccaaaaacaccgaaagtacaaagcccagataatgcggtgacactaggaacatcaaacgatccgaagacagtattacccgttcttttcggtactacccgcacgggtgcaatctgcgtttacaaggcaatttctaagcaagaaaacaataagttagtgcaaatcttcgctattgccgagggtgaaatcgaccattacaaagcactgtttatcgataacaaaaatgttcttgttggtaagaacatgacgatccgtgatggtgtactggacaaaggcaacattaaagaagaataccggaaagttttagaggttgagttccgcactggtaagaatcctaacaccgctttgtcactggcaaaacgtcacttagggtcagactggaacgacaactacaaaggcaatggtattgcgaccatgtgtattgtgttacgtcgtgatgacaaatctttggctgctggtgttgatattcttcagccaaatagccaggtagcagtagacgtttgcgggttaaagattcgtaaccttgaaaccaatgctattgaggctagcactaacggcgtggatcagattttccactacctaacaaatgaaaaatatggcttatccgtaccaattgaaaacattaacgttgattcattcctgaaagtacgtaagcaagtacgccagatggacctacattcaaacggtgcatgtgatccgaacgccagctttaaagagaacttaactagccttatgcagactttcggcggggtgatgttcgaatccttcggaagaattaccctgaaactggatgctcctgatattgttaagcataccttcaatgaagacaatatcatgatgggtaaggtatcactgaaaacaggtggcactaacggttatttcaataccattaacgcgatgtatcaagaaccatcaatcgactattcagagcaaatgctacgttatccggctgatgctgaaaacgatgctactattcgtcaagatggtcgaattatcgctaaagatattgaatatcgttttgttaagtctaaagcccagattgataaacttgcgagtattgaacgaaataaatctcgtatcactcaggttatcagctttatgactactgacgcattcactgccgaagtttgggacgttatcagcgtaacctatgatgaattaaaactgaataattcactttggcgtattactgcaattgatcgctctattgattctggtattgctgggatgatgactatcaccgctacagaatataattctcaggtttatactgacctgaactatgcggctaacccagataaccgaccaagtggtttaccggattcaatgacagtacagaagcctactaatttcagaattaaggcaactggtgaaaccatccacggtaaaaacgtaactttgacatgggatgcaccggaagatttcaaccgctacggtttccagattgattatcgtgtgagtggatcacctaactggattaagctgggacagacttcacagcaaattttcaatatcaatgcactggcaaaagatcgctcctacgattaccgcgtttgtgctttcggtattattgctcgttccgaatgggtggaactggttaaccagaatcctactgttacctatgaattgccgactccggttattcgaatcaaaaatcagggtagcacgcctggtactttcgaaggcaatgatctgattatcgaatgggaaaaccagcaacaattagatgtgatgatcaacggtgaaactaacaagtttagtgacctgtttgaagcatacattatcaaggttactaacaaggctggtaagtctattcagtaccgtacccgcgatcctgaatcatggacttatacgcttgatatgaaccaatttaacggcctttcgcgtcaactgacggtagaagtatcagctaagggctataacaactcagagagcgccccagcgcgtttagtggctatcaacccacaacataagccaatgaaaggttttagtgcgcgtggtggctttaatactgcgtttgttagctgggcagatgacgtagaacatgactatgcagggtcaatcatccagtatgcaaccgataacactttctcagatgcaagggcagtaagcacgaatagtgttagccatacttcctttgatattgcagacggtgattattatatccgtggtgctcactacgatattttcggtatggatgatgctgtttggtctgaaccgtatttcatgtctatgaagtctacgattagttgggacgatcaggacaaagaagcactggaagaccttattggtttacaagatcgcttagatgaaaccatcgcggatgctattgctcaagctggcgctaatgccgatgctaaaatcgatgcaatgcataagcagatcactaccgaaacagggcagacggtgcaagcctcagccgataccttaaagagtctgattgtctctggtgatcaagcaagttccactaagattgatcaggttaaagctgaactgaaaggcgatatcaccaaagaagttagcgcatctgctactaccctgaaacaagcaattgcaaccagtgaggcagcaagcgcaagtaagattgaccaagttcgggtagaaatggatggcaagattgctggtgtgaatcaggaagcagatgtaaaaatcgatgctttgaaaggaaccattaacagcaaatacaatctagcggttaatgcagatggtcgcgtggctggtattcacatgagcgcaactaacgatccggcacaaccgactaaaatcatctttactgctgataaaattgctgtagctccgcagaacgggaccgatgtttgcccgtttggtatcgaaggtaacaaggtttatctcgataatgcgatgattcgtaatgctgcaattggcacagcccagattaatgatgcggcgattactactgccaagatcggaaatgctgcaattaacagcgcgaagattcaggacggggcaatcactaacgccaagatcgtaaacggtgcaattgataacgccaaaattggtaactatatccagtcttccaactggaacggatcaaccggatggcatatcaacaagaacgggtccgctacgttcatgaacgctaccgttaaaggtaatatcacggctgattctggtactctgaacaacgtcacgattaactctagctgtgttattaagggtatgcttgaagctactcaggttaagggtgatttcgttaaggtgattggtaagaaattcccacatcgtcaacaaaactggcctgatggcactgttacggtaagggtggaggatgatcataagtttgaccgccaaattgtgattccagctattcaccataacgggtctgttcgtcgtggcgaaagtagtgatcattgggacacttgccgattaatcgttaagaaaaatggctctgttctatatgatcgcacggctacttctggcagcatgtacacaggtgttattgacatgccagcgggtaaaggtgctgtaacgttaacattccaagttatttgtgatggtgttaacgactataacccaagtgcatatatcagcgatctaacggtaatggtaactaagaaagcaactaccggtattactgtttcttaa

SEQ ID NO: 466376 - DNA, 420 bp, Shigella boydii
atgctaaaaactaggcttatcaccgattacatcaattctttaataggtcaggagttcgttcagggtgagaatgattgcaatctcattgcatgtaagatcatcgatattctcgctggtactgacctatataattctctttataaaaaatattcaactaaagaagaaggcttgaaaatctgcaaagaattaagcgggtattcaaatatccttcaaccaattaagaaacatttcaaattagtcactgatgatttacaggacggcgacttactggtcacagcccacaaattaggaaaccgtaattattattccgtagttcctcattattccggttatggcctcgttgaagaagatggtatctggatgaccattcctgtttcagacattgactatgaacaagtttatagattcgggggtgaataa

SEQ ID NO: 466377 - DNA, 654 bp, Shigella boydii
atggcaactattcaggaatcattcagcaaactatgcactaatcttgacttcattgaggtatacaacgaccagacaggtcagaacgtgtctagattgacgctaccgcagcttttctctactggatcgatgtttcacattatcgaagtgattaccgcgtcaggggatgttctacggcttacagatgggtatttcgatttggactataacggatttacgtatctcgcaacgggcgatttccttcaaatctcatcgaataccgaagagaaggagatcaacaacaacgggattaacgtaaccgtttctaacgttcgcgaagaatacattactctcattcgaaacaagcaattcgataaatccgatgtgaaaattgaaatggttttccttaaccccaacacgggcaaggttgaaactacttaccctgttttccgtggggtagtcgattccatcggtattaacatcgaacatgaagatgatgagtgtaaaaacgaatcagaatttcagcttaatagtatctgggaagttctagataaaaacgctcgtagtcatgcctccgatggtatccaccgttcctatgttggaaacgagaacgatctattcttctcccgtgccgggaagtggaactcagaaagcaagtggcattcatcgaagaaataa

SEQ ID NO: 466378 - DNA, 561 bp, Shigella boydii
atgttcaaatccaagaatattaaaatcacagattttactcttaaatcaaaacagcctttcttcaaggcgcaatctatctccggtaagttccagcgtcgctttactggcatccatttttacgaagcagaatttaccgcgaattacatggctcaggatattaacgaagtaaaagaatttgtagcgcgtcacctttttggtcgtccttttagtgtgccactgtcttacttttcacaatatacaggtgatgtacgccagatggttacggctgctgctggtactgctcgcggtgggcgtaaggtgagaatctccaacttcaccggaacactgaaagcaggaactatcatccagtttgagaaccacaagaaaatctacacgatcaccgaagacgtgaaatcaggtggtgaaatgaaactcttccctaacttgcgtcagaacgtcctagcgggtgaggtgatcaagtatcagaacgtagaaggtgaatttgttctcaaaactgaaaacatcgattggaagatcgcccagattggcaagatgaaattcgaattagtggagaatgtataa

SEQ ID NO: 466379 - DNA, 2433 bp, Shigella boydii
atgacaaaacatatagtaacaatagaaggggataataaaggtctaaggagaagtaccaatgaagccgccgaccttctcgatagtttgtctgaaaaggcaagtaatattgattttggtggtggcttatctggtctgactggatctcttcgtgggatcgctggctctgctggtttggctgctggtggtatcggcttagttgcgaccgcagtggttgcagccgctaaagctggcgcggaatacgttaaacaatattcagaagtatctaaggcgaccggactctcgattgaatcccttcaaagactggaaaaggaattttctggtactggcctaacagttgaaaaattcggtgatatcaacaaagacaccttagataagatgggtgatgcatgggctaacggtggtggtattgctgatgacttagaatcggttggtcttaagttagaaaactatgctcacttcatgactgatccgcaaggtggtatgaaagcggcgatccaagtgttctatgacatgaagaaagccggaaaatcaatggctgaaatcaagttcatgatggaatctttagccagtgattcaagtcatatgaccagccagcttgagaaatataatagtgctcaagaggcgatgatcgctattcagaatcaatctgttaacgtcaccgaagaaaacgctaaaaaatatgataaattttctcagaatattaataagctggaaaataacctgaaaggcgcagccatgaccatttctggtcctttggttgatagcttaaactggttatttgactggtttaatattgattgggaaaagagttctctattcagggcattagatcgactgaataaagaaggcaagaccgctacgggtggtattcttaacgccaaccataaagacgctcaaaagattattgacaagtacaataaagaaaagcgttggaataatctagcagattgggaaaaggccgcgatccgtggtgctggtgtcgatcctcgtactgctggctttgatgttgaaggatttaagaaacgttttggtgggtcttataaaacttcaagtggtgctctgattgtcgtagatgctggtgaacatctgacacgcaaggcagatcctaacactgatttaactctaccaaataaaccagtaagaccagaatcattgggtaaatctggcaacgagaagaaagccgaggaagaagccaaaaagaaagcggaagaggcagctaaaaaggctaaggaagccgcagaaaaagcacagaaagcacgcgaggatgcaatcaagcgactgaatgcacttgatgttaaattgcaagggcaagttgcagcgtctatcacttctcaaaatagccagttgcaaaacagcttaaaagatgtgaacgacgcgttagctctgggcttaatctctcaggaagacgcagccgcgaaacgccaggcgctaatcgatcagaatactgaaaacgtttataaaatgatgttgggtgctgatccgattgatgctctgaatgctttaacacaattgcaacaaatcagggacaacgagctagaaagccataaacgtttacttgatggtaaagctatctcctacgaagaatatatgcgtcgtgtgaacgataccgagcaaaactattctcagattgaaaattctttacagggaatggatggttataaaaccaatcaattaactagtggttatgattatcaagactcaaataatccgtttgctaaatttaatgcaatcgataaagagaaatcggatgctgaacaagattataagaccgataaactcaagattgacggtattaatgatccggctaaacggatggctgcattagaaaaactcaatgaaaaccatcaaaaacggatggctgcaattgaaaagaaatatgctgatgctcgtcagtcaatagctgatgatatgtatggcggttttgctgctgcaatgactctcttcgggcaggaaaacactaaagctatgcagatggctttcaatgctcataaagcattctccattggacaagcgacggtgaacatgtggacggctgctaccgatgcatggaacgatccgaccaacgtaaccacaggacaaaagatcgctgctgctgcattggctgtttctcagaacatggggaacatcgcaaacatcaagtctactaacgttagcggtatggctcatgatggtatcgataacatccctcgtgagggtacatggttgcttgataagggtgaacgagtagttgatcagcgtactaacggtgatttgaaagacttcttatctgctcaaaaatcaggcggtggcaactctcagccgattgaagttaacgcacctttgaacattaacggcaacgttaatagctcagacaagatggtcatggatgctatcaaacgtcacgctaagttagttgctcaggcggtagaagacgcacagcgtcgtaagatgtaa

SEQ ID NO: 466380 - DNA, 342 bp, Shigella boydii
atgatgagatcggggcttagtaaagatgaaatggataatatgccaatcactctgttttggaaattatatattttcgacacctacttagaaccacaaagccccgcgtttcatgatatgcagaatgcgatgttgcaatattccatgtatatgacgtcgcaaggaatgacacgcgaaactgcacgcaaactcaagcctagccaattccaattaattagagaagaaaaactctttaaaactaaagaagaactggaagaaattgcacgcaagaaagaagaagaacgtaaagcggcaatgctgaacatgtttgatccatctttgcttgagaaactcagaagcggttaa

SEQ ID NO: 466381 - DNA, 309 bp, Shigella boydii
atgaatattaatgaaatgctgaaagctctttctccgaaacgcgaatctctgaccatcggtggattcactttctatgctcgccctatgtcagtaaaagaatttaacgaacatgttttcaataccgataaagatgaccgtgatgaacgttctattcttcgttgtattgaagatgaagacggtaaaccagtatttgaatctatggaacaagttaaggcactgtatactaacgtccgcagtgaattaatcggtttggttgctcaagcgtcattgatgcaagatccgtcagtaattgaaaacgaggtaaagtaa

SEQ ID NO: 466382 - DNA, 507 bp, Shigella boydii
atggcaaatgtcgttaaagttcctggctggatcgggtcatctgctgtatcggtgacgggtaagcgatggatgaaagaagcactaacagctttaaaagttccggctccgcgtaatatgtcggcaatggctggtcgtggtatggatacggttgtagctactgctgcatggtctacttcattgggtaataactggggggtaactgcttcaaactatcctgtttccggtatgcaaagcaaaggatctatggagaaccccgaaaacgtgggcgtagggcgtctgattggcgttatcgttggtcaattcaatggcggtactcctactatggctgtatatctccagaacggtagagcggggaatataaccgttaatttgggtggtgctactgtcactgttccttataacagtatgcaaagtggttttcattactattggttaagcaatcctccggctgctttcctcaataacattaagaagactggcactaagcagactttgaaaatctcttaa

SEQ ID NO: 466383 - DNA, 474 bp, Shigella boydii
atgtctcaacaatttaaagatatttttactggtggtctggtaagtctgttctatcacgctgataccactaacaccgatcttgctgatgaagcatacgaagaaattaaagagtgtgctggtttccctgaaactggtatcgagcgcggtactgtagaagttaaatccttctcttctcagtataaccgtaaactggtaggtaaactgaacgttcctgatctgactctgaccgttaactacatcccaggcgatgcggtacatgaaaaactgatcaaagctgccgaagacggtactcgtattcagattaaagtagaatattacgttgacgcagcaaaacagactggtattcgcaccgctttcaacggcttcatttctaaagttgctatgaacggtggcgatgaagaagttgtaaccaaagagtttaccttcgcggtggatggtgctccgctgaaacagcaaatcttcactgccggatga

SEQ ID NO: 466384 - DNA, 3603 bp, Shigella boydii
atgcaatcaatccaatttaaacgcacacaaacggctggtaaaaaaccaacgccggaacaattatcacagggtgaattggctattaaccttgctgatcacgttctgtataccaaagataaaaataacgcagtagttcaaatctctgtttctccagaaaaacacgctgaacttaacacgaaagtagaccagaataaaactagcactgaccgtgttattgcttccaacaaacaagaggccgctaataatctggctagtgctaaagctgaactgaatcagactattaccacgaaagatacagcgaccaataagcgcattgatgctaccaacaccactgttagtaacttaacccagacagttacggcaaataaaaccgatgccgacactaagatcaataaccttacggggaccgtatctgcgaataagaccgcaattgaaagaaccgttgccgcaaacaaatctgatgcagatagcaaacatgcagctttaacgaaaacggtcactgacaataacaccgcgattaacaacaaggttaataccactaacaccaacgttagcaacttaactaaaactgttactgcaaataaaaccgatgcagataacaaaatttctagcttaactagcacggttgcagctaacaagacagcgatcgaaaagactgtttccgacaataagaaagacgcggatactaagattaccaatcttactggcactgttaatagcaaccataccgcaattaacaacaaggtagaccagaataaatcttctactgatgccgcaattgcagccgctaacaaacgaattgatggtattgaaggtagcaatgatgctctttacatcaagaagaataccaatactaagcatggtgggtatctgttaagcaagacagctaactatctggaagaccagacatcacgagatcttaactactttggtgctttccgtaccaatggtcaagatggactcatggatctaactcttaatgttcctcattctgccggtaaagcgcacggtcgcggatttactttccgttatgcgtctggtggatctcgtgttgaaacctatggttttgatagagaaggacagaagaactttagctataagatgtatcacgaaggtgataagccgactcctggcgagattggcgcatacaccaaagccgaagttgataagatgtttgttaaaaacgtcgttatgtctgttcccaattctagcgaaaacgtatctgcatatttcaaattggcaaccgcaacaattccacaaaacgggcgtagtgtgtttttccgtattcatggtggtaatggttacaacgttacggcatatgatcaggttgacgtagtagaaattcttctgcgtagtggtaacgatagacctaaaggtcttaacgtaattgcataccgtagaaatacaaacaaagattttgaggtatttgctgtcaatacttccggtgataactatgatatctacgtgaaatatcagcgttataccgataacgttattgtcgaatatgggaaatctgtttatgtaagtttgacggtttatgatacgccggaagccacgttaattaaaccttccgttggtgttatcggtggtcgcaacgtaactctttttaatactgaaaataaacgtggtgtgttaagttttgatgataacacacaaaacagctatgacattgttcatctaagtaatgataaaggtactggacggaaatatattcgtaaattccgtagcaactataacgaaatggtttggcatgaaaccgttcagggtgctgtatatcgtcttgctactggtgctacagattctacagaagttattagaattgattctaatagtgcaataccgggtaattataaaggatatgtaattactggtaaaatggaattgcacggtagtggtaatgcgatgactttacatcgacagactggtcaagctgcatatatggcgtggtgggatcgtcgtgatggtaaaaaccaacgtagtggttatatcggtcatgcggatggtactagtgatggttttgtgtggcgtaatgatgttggtgctaactcatttgatttggaaggtagtggacaagtaaatttgactacaggaaaaacaaaaattgtatataccaatggtcaatattattccgctaacgctgatgcattccgtatgatttacggtaagtatggtgcattctggcgaaatgatggtggtaaagtttatctgttgtctactgccgaaaatgatagatttggtggttggaatacatatcgaccttttatctacgatcttacttccggtaacgttcaattaggtggtgatggaaacgaagatgtattaactctagaacgcgcaagcaaggccgctcgattctctggcaacgcttacatcaaaggtcaacatttaacatttgatgctggtgctggacaatcccgcgattacttccggtttaaccattggggcgatagtaataacgctcgcgataacatcctacagattgaagacagtcagggtgcacactttaccactgaacgcgctatgggtactggcaatatcacagcacgttttaaaggctttgtgcgtgtagaatccggtgagattgcctttgatgctaatcgtggatctgcgtctcaatttaccttacatacatggggtaacgagcaacgcaaacaggtttttgaatgtaaggatgctactagttatcattggtataccgaacgtacaaacggtggaactggtcctatcctgttctctgttgctggtacattaaaaactgcgagcaatatacaggttggcggtgctgatattgagtttcgtcgcagtggtaataagcatttatggtttagagatccgaacggtttagaattaggtttgatgtactgcgatgatgctggtgttatccgcttccgtggtcagaaacaaggtcaaacttggaaacttgctgataaaatgattcatcttgaggcggggactgtcggcgggtctgataaaggtttgattcgtggtaatgttgctggtggtagctgggctagctggcgtgatcgttctgccggaatcctcgtagactgtccgaactcaaccgattccgctcataacatctggaaagcgactcattggggaaaatatcatattgcggcaatgggtgtgcatgttcctagtggtactattaccaatgctttagctcgcctaaacgttcacgacgccaactttgactttaacgctgcgggtgattttagcgcaggtcgtaacggtagctttaacgatgtttacattcgctctgactcccgtttgaagattaacaaggaagaattacaggacggtgcattagagaaagtaaactcactgaaagtctacacctacgataaagttaaatctctttccgatgacacggtgattaaacgcgaagtaggtattattgctcaggatctggaagaagtattgccggaagcagtaggtattcaatccaccgaagatccagaaaatccagaagcaattaagactatttctaactctgctgttaatgccttgattattaaagctattcaggaaatggacgccaaatatcaagctaagattgaagcattgactaaagagattgccgaactcaaagcaactaaataa

SEQ ID NO: 466385 - DNA, 834 bp, Shigella boydii
atgaatattacacaagataacttagatattttcactggatcacatgttgaagtgtcgatctctaaccagatagacaatcaggtcgactttttcgatcctagctttagttccatcgagaacgttgcagcatttcctacgctaaccgaatccacagagatagaaactctggaagagtacgatcaggacgctacggggaaacttgctggttatcgtagactggaaccaacgacactcacgttaaaccgtgttcttgacgatgaacatcaagcaatgttgatgaaagcggtagaggataaaacacctttacgcttccgtctgttctatgttgtgaactctggctatagtgctgctaacacagggtacttttgtatattcgatgcttacgtcacatcacataaaacccgtggcgcagataacaaagctgtaacactggaatttaaacttgaaccagatggcgggattctggatcgcggtattgcaacggagggtcgtcttctccgtcgcggggattatggcgtaggtgcaggtgtacatccattcaccggacctattgatagtgaatctctgacaggaaaccgcttcgtaacctacaaaggaacggctagcactaacccttatggtgctgatacatcgttaattcatcttcaagctaatgagcatggcgcatggcaattaacgtgtaatacttctggtgctccacgtttgcgggtacgaaatatccaggaaaatgggaagtcggaatggatcaaggtatattccaccaatgagaaaccgacacctagcgaaattggcgcagtggctaagactgaccggatcgatttcggcgaatactaa

SEQ ID NO: 466386 - DNA, 291 bp, Shigella boydii
atgttcaaattatcagaatcacaattaaatcgaatgtttaaaagtgctcctgtatttgtggtggaaggtggtaaatcaattcgtgcttatcatgaaattactactaccgacgaatcaggggtaatgacagaaacagaatttctattctgtcgtgagggagacttaaagcaaggtgatattgtcacagtagaaaaccagcgtttcaaagttcaatacgttaagcgtaatggtgacaatacttgtgattgctttatcactttagcagggggtacacatgctcgctaccgttaa

SEQ ID NO: 466387 - DNA, 2007 bp, Shigella boydii
atgcttaaatttcgccgcgatcttaacggttacggtggagttattaacgaagggcataacgatcaatacgaatttgaaattgctttctcaagtacacagccttatcagcgccaattttgggatgagcaaaatcaagaaatggtggtattagatgaaattctggtacatacaccggaagcggttgatctgtctcgtctgaataataacgctccgttgctgttcaatcacaatttcgataatcacattggtgtagtttgtaacgctcgaatcgatgcggataacgtaggtcgtgctctggttaagttctccaagcatgggactttggctaatgatattcgtaataaagtcattgaaggtacgatggaaaaaatttcggtcggctatgacattaaagaatatcacatcgactacgctaaatcgcaactcattgtttctaaatggattcctcacgagatttcatgggtgtcggtgcccgcagacgacacagtgggtctgaatcgctctctaaatactatcacagttaatttggaggctaaacgcgatatgactaaagaacaaattgaagaaatcaaagaagaacaagaatccgctcaggttgaagaaactccggtagaagaaattaaagaatcggaagttgaagaaactcaagagcgccaagttgaagagaataaagaagatgaaaatctcgaagacggaaaagacgctgaacatcctgaaagtgttgatgatgatagttcaactgttcgggaagcagaagaagtaaaagaagaacgtgaagccgctccggttgaagaagaaaaaatcgaagaagtggctgaacgttccgaagaagacgaattagaaatccgcgagatcgcgcgggaactaaatattgacgacgaagagttaaaacgcgcattggcaattaaagacatgacgccggaagcattccgaactaaggcactaaataatcttgtcaatgctcaacgtaataacgaacaacaaattaaggactctaaaatggaaaaaacttttgacctgaacaacgtaattcgctctctggtagatggtgctgctctgggtgctaacgaagctgaatattccgcaatggctgctactgcaactatgcagcgtggtcgtgctgctcgtggtggctctgtattcgttccggctgctgctatgcgtgctgcttctgctggtaacaccaaagctgacctgaccgctatcactgacgaaaaactgatgactgaatcctacatcgaaatgctgatgccggaatctgttctgggtcgtctgggtgtgactgtttacagtggcttgaactccccgaccgctattccaaaaatgactaaatccagcgttgacgctttcggcttcgttgatgaaaacggtgctgcaccggaaagcaaagctgaatttgcgaacgtgaaactgtctccgaaaacttttgctggtggcaacccgatcagccgtcagtcgctgaaaaccgttccgggcatcgctaccctgatcaccgatcacattaacaaatctgttcggatcaaactggaacaactgattctgtctgataaagaaaatgctcgtggtccggctggtctggttaagcaactggtagacgctagccgcgttaccaagaaagctgctttctcttataaagatttcctcaaggagattgctcagcttacggacgctggcgttcctgctcaggcgatcaagtttgcaatgagcggtgcaactgctgctgaactggaatctaccctgaaagataacggcgtttccggttatatcatcgaaaacggcaaactggctggttacgaagtagttacttctggcgttatcccggcagaccacatcgttctgggtgacttctccggtattactatcggtgagtggggaggtctggaactcgacatggatctaactacatatagggatcgtggtgcggtagtgcctcgtatctttgtagatttggactacgttgtagcacagccggaagctctgaaagttcttcacatctccgctgaatga

SEQ ID NO: 466388 - DNA, 1512 bp, Shigella boydii
atgtttaatctttttcgacgcaaaaaggcggtagaaactccagttaaaactaatcaccgccagcaacaaccaaaaattttcatcgacaaacaagtagaaaaattccagaaatctctggcgactcgtagtttaggactggttggtgatcgtattgatggatcacttcaacaagacaccattacaggaaccttcaataaggctctcaaatcgaacggtaagcgcctttatgatcagggtcgtactctggctataaacaatgctgtaggcaagcgatacaagcagtatatcgttgaccaagttgttggtacggggcttgatccgaaaccatcaatcgttaaatcaaatggcaaacttgacaccgcactgaataagcagatcgagaatgctttctggaagtgggcgcagagtgctaaacgcttctctcgcaacggtcgctttaacttccgtgaaatgctggcaatggcagaatctgaacgtgttcagggtggagaatgcttcatcgttttaaccaaagaaaacaacgagttacaagtttctattctgtctgctgataggtgcgactggtcgcttagtcgtgaaataagcaaagaccgcgcgatctttcaagggattgagtatgacgtagaaacaatgcgccctgtagcatactggtttagaaaaatcaatctactgactcagacctacactggcgaaaattatcgcgtagatgcttctcaggtgtgccactactaccagccactgtgcgcggaaagtttacgtggtgtgactgacttcctgccagtgattaaggatattgctcatcaagaagcgttccgcgaagcggtcctgatccagaaaaggatcgcggcctcagcaatgtgtttcatcgagcgtccgaaagattctggtgacgattttgatactggtgaagatgaagaccaatatcaagcgccggaagttattcacgatttcgcgccgggtactattcaggaattgccggaaggggcaacgatcaagagcatccaggcgacgcaaagcggcgatgatttcatttcctttaacgctggtatgttcactagcatagcaatgggtcttggcgtgttcaatcagggcttaacaggagattgttcacaaatcaactactcatccgcgcgtttcggtgaactacttcaacgtaaccgcgttaaagcacttcaaaacaaattgattgaaacagtggtgttgccaattttcgaagcgtatctgcgtcattattccgcgcgtggtgttgttccgattcgtattactgcaattccacatattatcgataacactactattatcaggccacgtttcgagtctgtcgatgttattaaagacgtaaacgctgatattgctttaattgataaaggacttaaatcacgtactgccgttattcttgaacgtggtgatgatcctgaaaaagtattctcagagattcaagccgaaaagagcgcactaaatattatcgttgatggtgagagcaaggataacccttctcaaaccgatccctaa

SEQ ID NO: 466389 - DNA, 495 bp, Shigella boydii
atgagtttagaactaattcccttagtaattcgtaaaggtgaaaaaatcacgctggcgaatgaagagggtgtaacaattcaggtaggaaatagtaaaggtatcatttatcaggttgatgacactccggctaatcacgagattaaaaccttagattttgccgaaggtaaatataccatcgtaaccactttggaagaagaactggtatcaatgcaggaattaactgttttaccagtattcgccaaacaatccaaaaaagaatatctgcgggaaactatcgccttaatcgagcaagttattttcgcccgtttatctggggacgaagccgcattatctcaaatgaccgtgaaagagaatactttcgcctatgagtcattaggtgttctccagcaattaaagactgattatgaacgtcagttatctaaagtaattcaagccgaacgacgtaaacagggaattagcccgattaaaaatatcaaattacgtcttacgcgataa

SEQ ID NO: 466390 - DNA, 1905 bp, Shigella boydii
atgaaactgatttcgaacaaggccaaattaaaaaagattctcagaaatgcagccaaatatattacgccaccgcctaaactccttccttctgaatggtgcgaagctaatatggtgctggtagatggtcctcaagctggggataaagttaaattgttgtcattccaaaaaggcatgattgatgcacctttccttgagaacaagaaaaagtatgtcctgatgaccagtgcgcagatcggaaagactaccatcttgaacggcatcctgtttaaccagatggctaacgatccatgcaatatgattatcggacaatcaaccgctaaagaaatgtctcaatatctcgctggtaagatccgaccgtctatcgaagcatgtgatgcattaaaagacgtggttacagacaagaatgatcgcaatgcggttaacaacaataaccagctacagctaaaaacgaatcacttcctttacatggtatcgctaaccagtccatcgaccctacgtggtaagaccgcaaaggttggattgcttgacgaaatcgatgctgctacagcctcagaagaaggtgatccggtggcactggctgctaaccgattaactacctttggcgatgaaggccgattagtcgtatccagcaccccgaccagtaagctgggaagcattaaccagcaatggttatcaagcgatatgcgcatgttttttgttccgtgtcctcattgcggtagacaccaggtgatcgagtgggaaaacgttcaatttgaatggcgtaacatcgatggtaagaacttacccgatcctgatactgctcgttatatttgcccccactgtaagcaatcatggacagaaggggaacgaatcagggcagtagcgcaaggcgagtggagagcaacccgtgaaagtgaggtagccggattctggatcagccgtctgtattcacctttcagcacgatccgcgcttgtgtggttgattttagtcatgcgtggcaatcctttgatttacaatcattttataacaccgtgttaggtaaggtatacgacgatcaggacacggcagtagaagcaaatgaactggaacaactcaaaacagatgtttctatcgagaatatccctgatgacgtgattttcttgtgtgcgggtactgaccagcaattagatcgcgcagaaactacgatcatgggcgtggcaaaggataagatttatattctggatcatcgcagcttttacgatcataactgtgaacgatatgaatcccctgtatgggatagattaatcaacttccataaaaccaaatttactactgtatcgggtgatcgtgttcctatgctcgccagcttccttgatacatcgaacggtcgattcactcaagctggataccgtatttgcggcaagtggaagaacttacacgctatcaaaggtagttctgctggtaacgctccgatcattccggttaaacctacccgcacaggtggtcatgaattgcttatgttgggtgttaacgtgggtaaaactgcatttcgtgaaatgttggctaggaacctgaaagataatcctcatattggcttagaaatatcagacaccgttcctgatgattatctcgatcagcttttaagtgaatctgtcaagcgtactactactggcgtgagatgggtaaagaacccaggcgttaggaacgaggcgctcgactgcgccgtgtatgctacagcggcttctcgctacgtcctttcaaaaatgtcatgggataaactcattgcaatgaaagacagcttaaaccgtgttgtcgaagaatccgtaaaagctcctgaaacgcaatctgacgagcaaatcgaagaaactaagccaatcacacgaccgcaacgtcaaaacatcgccagacgcccaaatagaggccgtagctgggtaacatcgttctaa

SEQ ID NO: 466391 - DNA, 606 bp, Shigella boydii
atgctaattaatcagcaacaaagagatgaattagaattagccttttcttgttgtaccgatcatgaatatcgtttgccagttaagcaccatcacaagaagactgattacacaacatcgggttttagccgtgaggaagcgaaagagattttaatcgagttgtatcgcgatcatgggtatacagatatccataacttctttaagaagcaccgaacatcacagacagagtttaatagagttcgtgaatggtttgattttgacattaagcgattctatcgagtagatgacggtcctatctatcggttgcagtggacaccgattagggaagtgcttaaacagaagagattgaatcatgccattacacgctatcgtaatgtggctttcaagaaaggctatggtgatacaagggaattgtttgtagaactcgctaacgtgcgatatagccattattacaggaatcctaaagagttcttcgaagtgctgcgcaaggttgatataagtcggggtacatactattcacggttgaagaagtacgggattaaggcagatttttttatgtcagttgacgatggagaactttttccgataaaatgtaagtcctctaaataa

SEQ ID NO: 466392 - DNA, 225 bp, Shigella boydii
atgactactaaagctactcgcggtcgtcctgcccgttttaatcgtgaacaactggcagagattgtaaaagcgtactatcaagcaccgaaaggtaaagagaacaaagaacgggtattaaatgagcatggcttatctatagcccagctatacaaatccctacataaagttgatttgaaattctttgttcaggttgacggtgaaatggtagaagcaacaggaatttga

SEQ ID NO: 466393 - DNA, 834 bp, Shigella boydii
atgaatactgttactactatgaatactgctgttaaaactgcttctgtgtctctggttgttgataacgaagttgcaaaaatgactcttcgtgaaattgccgaccttattggagttcgtttttcaaaccttgaaacttctatgaaccgactggttgaacgccaagttatccgaaaacctgcaacgcagaatttcgagaaaatcaataacttagggtttgctgttactgttaaagattatgtgtttgagggtgagcaaggtcgcttagattcgattgtcttgattgctcaaaacgtaccggaatttactcgccaactggttgaccgttggaattatctggaagagaaactgaaaaccgccaataatactcctgttaacccgtatgcggactttgaagaaaccgactggatcgaactggcattagatgaaaaacgcaaaaataaaaaactgattgagctacacattcgcaaatccgtagatagccattctatgacacgtctgttaggcgctaaaaagggcgctacgaaggttaaacaagcactgacggccttacgtactgctggctacattgagcgcgtctatgatgaaaataacaagccgtgtgggtatgttgctaatgactcttctctgtctttctgccgcatgaatgctcattaccagcttgagtttactgttgatgttcttccggtgctggttgaattgggcgttttggaagaagaacagaaagcaactcttaaactgccgcagccaaataacactattctgattcaaaacaaagctgctaaacagattcgtgaatcaggtaacgtaatttcccttgttgattttgggatctga

SEQ ID NO: 466394 - DNA, 333 bp, Shigella boydii
atgaaagaatttaccatcactaaatccctgtatgactggactgttaaaatctccggcaaaaccgtttctgtaacccctagccatgtagaaaatgattggggtgtatcccgtgaaactatctcccgtagtatgcatgttccgtttgatctgatgaccttaactggtattcatgcaatgctggaagttcgcgagcaattcgaagctggtaatcacaatgcgactccagttaacaatcaccttcttactaatgaagaacgtgaaatcatcgaaaattggcgttatgaatatgcgattccttattatgaagaagaccaagtagaaatcgattggtaa

SEQ ID NO: 466395 - DNA, 468 bp, Shigella boydii
atgaaccataaaatgactaccactactcctttcatcctgttaggttttgatgctgatagcttccacaatgacaagttaatgaagatgttccgtgaacgtggttacaacattcttttcaactctgatgaatctcatttctctagtgcatggtatgcgttttgccgtaataagaagccgaccatcgttgttaactgcttcaccgatgaagaacgcttaaagtaccaggatctaccagcaattattgtccgtgatgatcttccgtttgaagtccgttccggtgacattgacctgggtagcttcgttactgtctatgaactggatgaagcaatgtttaactacggcaaagaaaccgctcaggaagccccggaagatgacgaacaagacgaagatgacgaagactacgctccaatctgtttctcttctcagaatggcttctacggttacgatgaaggcttagatatgctgtaa

SEQ ID NO: 466396 - DNA, 180 bp, Shigella boydii
atggctaaacctgtacgattcacacgagaagtattactcccgattgctaaacgttattttgaagcgatgcagggtgacaaactggcggttttgaaggaagaagggatcgacccatctgattttagaaaactgctaaaacgatatgacattaaagtgaagattgaagctaccgtctggtaa

SEQ ID NO: 466397 - DNA, 942 bp, Shigella boydii
atgttattttccgctaactttttcactaacgaagtaaccaacgctaaagcagttatcaaatttggcaccgaagcaaacaagaagattcagccgaaagttgttgctcatgtttcctttgcgcagcagaaatccgctttcgctggctttaaagcacatcgtgaagcactgatcgcggctggctttggtgttgacggtaaactgcctaacggcattcgtaaagcaatcgaccgcgttaaacctgctaaagacgttgcagtagaccacatcgttacctttaccgttaagaactcttctgaactgttccacctggttattgctggtgatactgctattgtttccgctcctaacatggattttcaggataccgctgattgccagatcaccttcggtcgtcgtaaagaagttaccggaaaagctaaactgaacttcaccaaatccggcaatccttactttgctgtattctttaacagccacgctaccgaaaaagaagttgtagaactggttgcttatgaaggtgaagagaaagaacgtattgaatcttgcgaagcatttctggaactggaagcacaggttaatgctgtttctcctgttgtagaagatcgctttgctgcactggaagcacagatcgcagaactgaaagctgcactggaagaaaaagaccagattatcgaagcccagaaagctgaaattgaagaactgaaagctaaagaagttgctccggtggcagtagttgaaaacgcggctgatgaggccgcaaatgatgaagtagaagtgaaaatcgatgtgatgcgtgatccgatggctgcactgcaattgcttcgttcttttaagggcaaatctcatttttctagtgatgcggtagacgaggaagaagaacaaaaacgcaatactgcactgattcacgatgaaatgtacggtactaacttttcttactgccaataa

SEQ ID NO: 466398 - DNA, 285 bp, Shigella boydii
atgactactttcattacatacgtattcatcattactattctggctgctatttctgcttataaacttggaaccgaaccgaaagaacgaggcgaattattcttaggtgcatttgtttcgtttgctagtcttgcgttaattgtcgaagggatttcttatattgttggcctagttacgatgacgctttttaacttccatccaactattgctatgcatttgatgatgaccgtactctgggtatattgcttaatcgaatttttaacgtttgttttcaaacagactaaataa

SEQ ID NO: 466399 - DNA, 555 bp, Shigella boydii
atgaaagaagaattaacccttacagaaatttcccgtttatacggctattcattgaatggtggcggtaagcgatggttagaaaggggactaccttacaataccaatacgaggcgtgttccggcaaaggaaggttgcgattgggtgctaaagaacatcattaaccccttaaaaaacacttctatcaaggaacaaatcgacgtagagaaattacgccgcgagagagcattagcagatgcagccgaacgagagaaccaggaaaaaatgaatctcctgattcctgtcgggtatgtagaacaggaactagcggaatattgcgggaaagtgaaacagactattttgcagatcgccacaatcgatgctttagaaattctcgaatctgccactgaccagaaaacattgaagaataagctaagggagatcatcgagcgtcgtttaaatgaagtaggggacttgtttgaaaatgcggatttgggagaagacgaggaagaagaattaccattaatggatgaaccggaagaagaaccagaagaagacgatgaatttgatgtgtcttaa

SEQ ID NO: 466400 - DNA, 207 bp, Shigella boydii
atgaaacaaaaagagctatggattaaccagatcaaagggttatgtatttatccggtggtgatttatcactcggtcattaccttttatccgcatatgaccacttttcagcatccgttatcggaagtcctgagcaaatgctggatctatttcaatctttaccttgcccctttcgtatgccggtttttttctttatatccggctatttga

SEQ ID NO: 466401 - DNA, 291 bp, Shigella boydii; identical to SEQ ID NO: 464098

SEQ ID NO: 466402 - DNA, 852 bp, Shigella boydii; identical to SEQ ID NO: 464102

SEQ ID NO: 466403 - DNA, 975 bp, Shigella boydii
gtgacgacggaaaccgatgtcgccagcctgaaaaatcatctcgccggagagccgttgggccacgaaacgaagctggcgcaaaaacgcgtcgagccagtggttccgcagtccaccgagcagggctggtatatcgacaaatcacgctttgatttccatatcgatccggtgctgaaccagtcggtcggtggcccggaaaacttttacatgtatcagctgggcgtgatgggaatggcagatttgtggctgacggaccatctgctgaccaccggcagcctgtttgcaaatcttgccaacaactacgacaagtttaactacaccaatccgccgcaggactcgcacttaccgcgcgttcgtacccatgtgcgcgagtatgtgcagaacgatgtctatgtgaataacctgcaagccaactacttccagcatctgggcaacggcttctacggtcaggtctatggaggttatctcgaaaccatgtttggcggtgcgggggccgaagtgttgtatcgtccgctggacagtaactgggcgtttggtctggatgccaactacgttaaacagcgcgactggcgtagtgcaaaagatatgatgaaattcaccgactacagcgtgaaaaccggacatctgaccgcctactggacgccatctttcgcccaggacgtgttggtgaaagccagcgtcgggcagtatctggcaggggataaaggcggcacgctggagatcgccaaacgctttgacagcggcgtggtggtgggtggctatgccacgatcaccaacgttttgaaagaggagtacggcgaaggggacttcaccaaaggcgtgtatgtctcggtaccgttggatctcttctcgtctggcccgacacgcagccgtgcggcgattggctggacgccgctgacgcgtgacggtggtcagcaacttgggcgtaagttccagttgtatgacatgaccagcgaccgtagcgtcaatttccgctaa

SEQ ID NO: 466404 - DNA, 291 bp, Shigella boydii; identical to SEQ ID NO: 461599

SEQ ID NO: 466405 - DNA, 348 bp, Shigella boydii; identical to SEQ ID NO: 464590

SEQ ID NO: 466406 - DNA, 249 bp, Shigella boydii
atgaagatacgccagcagcgatgcgcgatatggggcagcaatgaccttgccaataatctgtttaatgacattcgcatgttcccaaaaccaaaggggatgcgctgggctacgtttgacaggaagcgggcagagttatcagttatggagatggcttactggcagtcattcagcccggtagtggacagaatcacgggcgttattgagcgtaaagcaggaaaagcagccagaggcattggcctgactctataa

SEQ ID NO: 466407 - DNA, 306 bp, Shigella boydii
gtgagaaacagaacgcgcagctataccaccgacctgccccgtatagggttgccattccttgcgaacatgcgtagcaggctagcggatgctgaaccgggtacgcagctttatacccagaccgaaagcggaacgttgtatgccttccggcaagccgacagctacgccatgacaatcaacggcgtgacgcgggctattcgcaccacaaccacgaaggccgggtatggcgtccgggaatggtacgcttgcccccactgtaacttcactataaaagccagagtgccgacatactggacaggatgcgcatga

SEQ ID NO: 466408 - DNA, 273 bp, Shigella boydii; identical to SEQ ID NO: 464593

SEQ ID NO: 466409 - DNA, 1203 bp, Shigella boydii
atgttaaaagtggaaatgttatccaccggggatgaagtgttacacgggcaaatcgttgacactaacgctgcctggctggccgattttttctttcatcaggggctgccattatctcgccgcaatacggtgggggataaccttgatgacttagtcaccattcttcgcgaacgtagtcagcacgccgatgtgctgatcgttaacggcgggctgggaccgaccagcgatgatttaagcgcactcgccgctgcgacagcaaaaggtgaaggcctggtgctgcatgaagcctggctcaaagagatggaacgctatttccacgaacgtggacgagtaatggcaccgagcaaccgtaaacaagcggagctgcctgccagtgctgaatttatcaataacccggtaggcaccgcctgtggttttgccgtgcagcttaatcgttgcctgatgttctttactcccggcgtaccgtcagaatttaaggtgatggtcgagcacgaaatcctgccgcgcctgcgcgagcgtttttctttaccacagccgccggtttgtctgcgtttaactacctttggtcgttcggaaagcgatctggcacaaagcctggacactctacaactgccgccgggcgtaacaatgggctatcgctcttcaatgccgattatcgaactgaaactcaccggaccggcaagcgagcaacaggcgatggaaaaactgtggctggacgttaaacgtgttgccggacagagcgtgattttcgaaggcaccgaaggactgcccgcgcagatcagtcgcgaattgcaaaaccgccagttcagcctgacgttgagcgagcaattcaccggtggtttattggctttgcaactttctcgcgcaggtgctccattgctggcgtgtgaagtggttccttcacaggaagaaaacctggcgcaaactgcgcactggattacagaacggcgggccaaccattttgccgggctggcactggctgtttcgggtttcgagaacgaacatctcaactttgcgctagccacaccagacggcactttcgctctgcgtgtgtgtttcagcactacgcgctacagcctggctatccgtcaggaagtgtgcgcaatgatggcactgaatatgctgcgccgttggttaaacggccaggatatcgccagtgagcatggctggattgaggttattgagtccatgaccttatctgtctga

SEQ ID NO: 466410 - DNA, 630 bp, Shigella boydii; identical to SEQ ID NO: 464125

SEQ ID NO: 466411 - DNA, 213 bp, Shigella boydii; identical to SEQ ID NO: 464907

SEQ ID NO: 466412 - DNA, 339 bp, Shigella boydii
atgactagtctaaaaactagtattaagactatcacttatttaagtgatactggttgtctggagattcagggggccagtctactactgaccaacgatccattctccagtcgcacaaccttgccagagagcgcccgtgttgccagtgcctcaacaatcccgaatcgtgatgcgcgaaatattcctctgcgtgtggatctaaaacagggtgatcagagctggcaggatgaagtgttaatgattcaggaaggccagtgttgggtgatcgacgatgtacgctacttaggcggcagcgttcatgccacggcgggtacgctccgtcagtccatcgagaatcgctaa

SEQ ID NO: 466413 - DNA, 213 bp, Shigella boydii
gtgtatgatggtgattttaaggtgcttgcgtggcttccattttcatcagatgtccttcctgctccgctactgaaggcgtggtgcgtaacggcaaaagcactgccggacatcagcgctatctctgctctcattgccgtaaaacatggcaactacagttcacttacaccgcctctcagcccggtacgcaccagaaaatcattgatatggccatga

SEQ ID NO: 466414 - DNA, 291 bp, Shigella boydii; identical to SEQ ID NO: 465914

SEQ ID NO: 466415 - DNA, 303 bp, Shigella boydii; identical to SEQ ID NO: 461506

SEQ ID NO: 466416 - DNA, 996 bp, Shigella boydii
atgagtaatctggccgcgatgctgcgcctgcccgcaaacctgaaatcgacacaatggcagatccttgccggaccgattttgatcctgttgatcttgtcgatgatggtgctgccactgcccgcattcatactcgacctgttgtttaccttcaatattgccttgtcgatcatggtgttgctggtggcgatgtttacccagcgcacgcttgagtttgctgcgtttccgaccattctgttgtttactacgttgttgcgtctggcacttaacgtggcttcaacccgtatcattttgatggaagggcataccggcgcggcggcggcagggaaggtggtcgaagcgttcggtcacttcctcgttggtggcaatttcgctataggtatcgtggtgtttgtcattctcgtgatcatcaactttatggtcattaccaaaggtgccgggcgtatcgcagaagtgggtgcgcgctttgttctcgatggtatgccgggtaagcagatggcgattgacgccgaccttaacgctggattgattggtgaagatgaggcgaaaaaacgccgctccgaagtgactcaggaagccgatttttacggctcaatggacggggcaagtaagtttgttcgcggcgatgccatcgccgggatcctcatcatggtcattaacgttgtcggcgggttgctggtcggcgtgctgcaacatggcatgagcatgggacacgcggcggaaagttatacgctattgaccattggcgacggtctggtggcacaaattccggcgctggtgatttctaccgccgcgggggtcatcgttacgcgtgtcagcaccgatcaggatgttggcgagcagatggtgaatcagcttttcagtaacccaagcgttatgttgttaagcgccgccgtgctcggtttactcggcttggtgcctggaatgccgaacctggtatttttgctgttcactgccggattgctggggctggcctggtggatacgcggacgcgaataa

SEQ ID NO: 466417 - DNA, 213 bp, Shigella boydii; identical to SEQ ID NO: 464184

SEQ ID NO: 466418 - DNA, 213 bp, Shigella boydii; identical to SEQ ID NO: 464907

SEQ ID NO: 466419 - DNA, 195 bp, Shigella boydii; identical to SEQ ID NO: 464644

SEQ ID NO: 466420 - DNA, 384 bp, Shigella boydii; identical to SEQ ID NO: 464877

SEQ ID NO: 466421 - DNA, 534 bp, Shigella boydii; identical to SEQ ID NO: 464817

SEQ ID NO: 466422 - DNA, 213 bp, Shigella boydii; identical to SEQ ID NO: 464907

SEQ ID NO: 466423 - DNA, 1680 bp, Shigella boydii
atgaaaactaaactgtattcgtatattcgcttctcgtctatgcgtcagaatgatggttcgagttatgaacgacaaatcaggatggcgagagaggttgcggcaaagtatgaccttgaactggtaaatgattatcaggatctgggtgtatctgcgtttaagggtgctaactctaaaacaggggcgctatctcgtttccttgatgcaattggtagatccgttcctgttggtagctggttattcattgaaaacttggaccgcttatcccgtgccgatattgtcagtgcgcaggagttattcctttcaatcatccgtaggggaataaccattgttactggtatggataacaagatctactcgctggatactgttaccgctaatccgatggacctgatgttctccatccttctattcatccgtggtaatgaggaaagccagactaagcgcaatcgtactaactcaagcgcactgattaagattaaagcccatcaagaaaatccccagaatccggcagtggcaatcgaggaagttggaaagaatatgtggtggacggataccacttccggttatgtgttgcctcatccggtgtacttccctgttgttcaggagattgtggaattacggaagaatggacgttcaaccgccgagatactggatcaccttaacgagacatatgcaccgccaccagcggttagcaacaagaagcattcaaaatggtcacgggcgatggttgaaaggttgtttcatacccgcgctttgattggtatcaaggaaatatctgtagatggcgttaactatgagttaaaggattattaccctcgtgttattgatgaccctacgttctatcaccttaagaaaaatattggtgctagagcatggaactttggagacaaggaagaagttaaaccgatccccctgcttagtggtattggcctattgaaatgtgatcattgcggttgcgctatggttaaagtgaagggaacgaacaaacgttctgaccagtatcgttatacatgtgatgcgacccgttcacgtagacttgattgcgagcatccaaactggagttttcgaggtgatcaattagagaaagctgtattgcaattgctggctgataaaatctggattgctgaggacaaggctaatccggttccggcgttgaaagtacaggttgatgaaatatcacgcaagattgataacctgattgccctttctgctatgacaggagcaacgaaggagctagccgatcagattactaccctcaatagcgagcgtgaaacactctacaatcagatcaagatggcagaagaggaaatgtattctgttgactctcaaggctgggagaagctcgcagaatttgatttagaagatgtttacaacgaggaacgactaaaggtccggtttaagattaagcaagctctaaagcggatcgggtgtagcaggattgacagaaacaaaaacttgtttgtactggaatacatcgatggaaagacccagagagttgtaatagaaaattcaagaggaacgaggaaaggacaaatctttgtcgatttgaaaactatcaatgataggcagattctggagagtaacgggcttgttctgcatccatgtttagacatgctgacagataagaactggaaaccagaagaggaaataccaggtccattacaggaatttggaatttaa

SEQ ID NO: 466424 - DNA, 246 bp, Shigella boydii; identical to SEQ ID NO: 35149

SEQ ID NO: 466425 - DNA, 342 bp, Shigella boydii
atgaaaaagactatctacgcaattattgtttctgtgtgtgttggtggcatcggtggatttgtttgtgggtatgactattccgatactcaacatcaagagactatccggtcaaataaggccgagattaaggatctgaatcaggagattagccagttagaaaatgctctctcactcaaagacagtgaatatagcgaggtttatgcagataaacaaaaatattggaaagagaaagataatctcgttgtttacgggatgaaattgtgtaagagcatgaaggacgagcgcagttgtttaatggaacttgcccttaaaggtaacgtgaccatcgacttcaaagactaa

SEQ ID NO: 466426 - DNA, 270 bp, Shigella boydii
atgaacattaccaaagcaatccataactatgctcgccgccgtggaatcgaacttcaactcgaagatgagcaggttagattctgggagatagagcaagattgtgaatggatgttcagctattcgattgctcaatgtggttgcttgttctggaaaggtaatgtgtatcttcctcgcgatattaaagaagaacttccggcgatgattggcaccgataagaagttaaaggaagtcttagattttatacataaagagtttattagcaagaagtga

SEQ ID NO: 466427 - DNA, 297 bp, Shigella boydii
atgcagcgcttatttattttggttgccgtcatgttactgagcggatgcttaaccgccccgcctaaagaagccgccagaccgacattaatgcctcgtgctcagagctacaaagatttgacccatctgccagcgccgacgggtaaaatctttgtttcggtatacaacattcaggacgaaaccgggcaatttaaaccctacccggcaagtaacttctccactgctgttccgcaaagcgccacggcaatgctggtcacggcattgaaagattctcgctggtttataccgctggagcgctag

SEQ ID NO: 466428 - DNA, 948 bp, Shigella boydii; identical to SEQ ID NO: 464659

SEQ ID NO: 466429 - DNA, 2001 bp, Shigella boydii
gtgctggataacgacacctcgcgtaaagaattgatcgaccagttgcgtactgtcgccgcgacgccccctgcggaaccggtcccgaagatcgtgccgccgacgctggttgaagagcaaaccgtgctgcaaaaggtcaccgaagtcagccgccattatggtgaagccctttccgcccgcttcgggcaactttatcgcaatattaccggctccccgcataagccgtttaatccacaaacattcagcaatgcgctgacccatttttcaatgttagcggtattagtgtttggtttttactggctgattcgcctgtgcgcactgccgctgtatcgcaaaatgggcctgtgggcgcggcaaaaaaatcgtgagcgcagtaactggttgcagcttccggcgatgattatcggggcgtttattatcgacctactgttactggcactgacattatttgtcggccaggtattaagcgacaacctgaatgcaggcagtcgcaccatcgctttccaacaaagtttgtttctcaacgcctttgccctgattgaatttttcaaagctgtactacgcctgattttttgcccaaacgtggctgaactgcgcccgttcacgattcatgacgagaccgcccgttactggagtcgtcgcctgagctggttaagcagtttgataggttatggcctgattgtggccgtgccgattatctctaatcaggtgaatgtacagataggtgcgctggcgaacgtcatcattatgctgtgcatgaccgtctgggcgttgtacctgatctttcgcaataaaaaagagattacccaacatttgctcaactttgcggagcattcgctggcctttttcagcctgtttatccgcgcctttgcgctggtgtggcactggctggcaagcgcctattttatcgtgctgtttttcttttcgttgttcgatccgggcaacagcctgaaatttatgatgggtgcaacggtgcgcagcctggcgattattggtatcgcagcgtttgtttccggtatgttttcccgctggctggcgaaaaccatcaccctctcgccacatactcagcgtaactatccggagttgcaaaaacggctgaatggctggctttcggcggcgctgaaaacggcgcgtattctgaccgtctgcgtggcggtaatgttgctgttgagcgcatggggattgttcgatttctggaactggctgcaaaacggcgcggggcagaaaaccgtagatatcctgatccgtatcgcacttattctttttttctcggcggttggctggacggtgctcgccagtttgatcgaaaaccggctggcttcggatattcatggccgcccgctacccagcgcccgtacgcgtaccctgctgacgctgtttcgtaacgcgctggcggtgattatcagtaccatcaccatcatgattgtgttgtcggaaatcggcgtcaatatcgcgccattgctggcaggtgccggggcattaggtctggctatctcgtttggttcgcaaacgctggtgaaagatatcattaccggggtgtttattcagtttgaaaacggcatgaacactggagatttggtgactatcgggccgttgaccggcacagtggaacggatgtcgattcgctccgtgggcgtgcgccaggataccggggcgtatcacatcattccgtggtcttcgataaccacctttgctaacttcgtccgcggtattggttcggtagtggcaaactacgatgttgatcgccatgaagatgctgataaagccaatcaggcactgaaagatgcggtagcggaattgatggaaaacgaagaaattcgcgggctgattattggtgaaccgaattttgccgggattgtcggcttaagcaataccgcgtttacactgcgtgtttcgttcaccacgctgccactcaaacagtggacggtacgctttgccctcgacagccaggtgaaaaaacatttcgacctggtgggcgttcgcgcgccagtgcagacttattag

SEQ ID NO: 466430 - DNA, 195 bp, Shigella boydii; identical to SEQ ID NO: 464667

SEQ ID NO: 466431 - DNA, 291 bp, Shigella boydii; identical to SEQ ID NO: 464666

SEQ ID NO: 466432 - DNA, 129 bp, Shigella boydii
atggttgcccagggcaatgtcctgcctgttctgtacggtgaaatgcgcgtggggtcacgtgtggcatctcaggagatcagcacggcagatgaaggggatggtggtcaggttgtggtaattgggcggtaa

SEQ ID NO: 466433 - DNA, 453 bp, Shigella boydii; identical to SEQ ID NO: 464256

SEQ ID NO: 466434 - DNA, 540 bp, Shigella boydii
atgccagtgttacacaaccgcatttccaacgacgcgctaaaagccaaaatgttggctgagagcgaaccgcgaaccaccatttcgttttacaagtatttccacatcgccgatcctaaggcgacccgtgacgctttatatcagctgtttaccgcgctgaatgtttttgggcgagtgtatctggcgcatgagggcattaacgcgcaaatcagcgtacctgcgagcaatgttgaaacatttcgcgcgcagctctatgccttcgacccggctttagagggtttacgcctgaatatcgcgttggatgatgacgggaaatccttctgggtactgcgcatgaaggtacgtgatcgcattgttgccgacggtattgacgatcctcactttgatgccagcaatgttggtgagtatctgcaagcggcggaagtgaacgccatgcttgacgatcccgatgcactatttatcgacatgctgaagtggtcaacaaaaactggccaccgagttagagtttttccagtatcgattttccgattcgtttgggggtaa

SEQ ID NO: 466435 - DNA, 402 bp, Shigella boydii
gtggcagaagagaaacatcagcggggagaactggaaaagtcccattaccaactggtcagcacatacagtgagctgagccggcagtatgtggagctgcagagtgaatataaaaatttgcggaggtatttcggtgtgacggtgcaggtgccgtacaccgatgtgtggacgtataaaccggtgcagtactatccagggaaacatccgtgcgaaaaaccggcagaaatgttgcagcagataatcaacgcgagcagtcgtccgggagaccaggttgcagatttttttatgggctcaggttcaacggtaaaagcggcactggcgctcgggcgtcgtgcgattggcgttgaactggagaccggacgttttgagcagacagtcagggaagttcaggatttaatcgtttga

SEQ ID NO: 466436 - DNA, 363 bp, Shigella boydii; identical to SEQ ID NO: 464682

SEQ ID NO: 466437 - DNA, 1455 bp, Shigella boydii
atgaaaatacctgaagcagtaaatcatattaatgttcagaacaatattgatcttgttgatggaaaaataaatccgaacaaagatacaaaagcattacaaaaaaacatatcatgcgtaacaaactcatcctcttctggcataagtgaaaaacatttagatcactgtgctgatactgtgaaaagctttttaaggaagtctatagcagcgcaaagttatagtaaaatgttctctcaagggaccagtttcaaatcattaaatctttctattgaagcgccatctggagcacggtcatcatttcggtcacttgagcacctcgataaggtgtccagacactatctttctgaaataatacaaaaaactcatcctctttcttcggatgaacgtcacttgctctctattattattaattctgattttaacttcagacatcaaagtaacgctaacctgtcaaataatactcttaatattaagtcctttgataaaattaagtctgagaatatacaaacatataaaaacacattctctgaggatattgaagaaatagctaaccacgattttgttttttttggggttgaaatttccaatcatcaagaaacactcccactaaataaaacacatcatactgtggattttggtgctaatgcgtatatcattgatcatgactcaccatatggatatatgacattaaccgaccactttgataatgctattccacctgttttttaccatgagcaccaatcatttttcttagataactttaaagaggttgtggatgaagttagcaggtatgtgcatggtaatcagggaaaaactgatgtgccaatatttaatactaaagatatgaggcttggaattgggttgcatcttattgattttataagaaagagtaaagatcaaagattccgagagttttgttataataaaaacattgaccctgttagtctggatagaattataaactttgtgtttcagcttgagtatcatataccaagaatgctaagcacagataacttcaaaaagataagactcagagatatatctttggaggatgccattaaagcatccaattatgaagaaattaacaataaggtgactgataaaaaaatggctcatcaagctcttgcttattctctaggcaatgcaaaatctgatatggcactttatttactatctaaatttaattttacaaaacaagatgtcgcagagatggagaaaatgaacaacaatatgtattgtgagctgtatgatgttgagtatttacttagtgaagatagtgccaactataaagtgctagaatattttattaataatggattggttgatgtaaacaaaagatttcaaaaagcaaatagtggggacactatgcttgacaatgcaatgaaaggcaaagattcaaaaacaattgattttttattaaaaaatggagcggtatcaggcaaacgatttgggaggtga

SEQ ID NO: 466438 - DNA, 1536 bp, Shigella boydii
atgccacaacgacaccaccagggacataaacgcacaccgaaacagttggcgctcatcatcaaacgctgtttgccgatggtgctcactggcagcggcatgctttgcactaccgctaacgccgaagagtattatttcgaccccattatgctggaaactacaaaaagtggtatgcaaacaactgatctgtcacgtttttcaaaaaaatacgcacaactaccaggaacttatcaggttgatatctggctgaataaaaagaaggtttcacagaaaaaaattacatttaccgccaatgcagagcaacttctgcagccacagtttacggtagaacaactacgtgagctgggtattaaggtggatgaaatcccggcgctggctgaaaaagatgacgatagcgtgatcaactcgcttgaacaaatcattcccggtacagctgctgaatttgatttcaatcatcagcgacttaatttgagcattccccaaattgcactgtaccgtgatgcaagaggttacgtctccccttctcgttgggacgatggtataccaacgctgtttaccaactactcgtttacaggttctgataaccgttaccgccagggcaatcgtagccaacgacagtacctgaatatgcaaaatggtgctaattttggcccctggcgattacgtaactattctacgtggacacgcaacgatcaggcgtcaagctggaacactatcagtagttatttacaacgtgatatcaaggcgttgaagtctcagttgcttctgggagaaagcgccaccagcggcagtattttttccagctacacctttactggcgtgcaactcgcttccgacgataatatgttgccaaacagccagcgcggatttgccccaacggtacgcggtatcgcaaacagtagtgcaatcgtgactatcaggcaaaatggttatgtgatctatcaaagcaacgtgccagcgggtgcctttgaaattaacgatctctacccctcttccaacagcggcgatttagaagtcacgattgaagaaagtgacggtacacaacgtcgctttatccagccttattcttcattacccatgatgcagcgacctgggcatctaaaatatagcgcgaccgctggacgctatcgcgctgatgcaaacagtgatagcaaggaacccgaatttgctgaagccacggcaatatatggtttgaataatacttttacgctgtatggcggcctgctcggttctgaagattattatgcgctggggatcggtatcggcggcacacttggcgcactgggcgcgttgtcgatggatatcaacaggctgacacccaattcgataaccagcactcttttcatggctatcaatggcgtacgcagtacatcaaagatatcccggaaaccaacaccaatatcgctgttagctactatcgctataccaacgatggctattttagttttgatgaagccaatacccgcaattgggactataacagtcgccaaaaaagtgaaattcaattcaacatcagccagacaatatttgatggggtaa

SEQ ID NO: 466439 - DNA, 189 bp, Shigella boydii; identical to SEQ ID NO: 463227

SEQ ID NO: 466440 - DNA, 774 bp, Shigella boydii
atgattaagtttagcgcaacgctcctggctacgctgattgccgccagtgtgaatgcagcgacggtcgatctgcgtatcatggaaaccactgatctgcatagcaacatgatggatttcgattattacaaagacaccgccacggaaaaattcggactggtacgtacggcaagcctgattaacgatgcccgcaatgaagtgaaaaacagcgtactggtcgataacggcgatttgattcaggggagtccgctggccgattacatgtcggcgaaaggattaaaagcaggtgatgttcatccggtttataaggcgctgaatacgctggattatacggtcggtacactcggcaatcatgaatttaactacggtctggattacctgaaaaatgcgctggcgggagcgaaattcccttatgtaaatgccaacgtcattgacgccagaaccaaacagccaatgtttacaccgtatttaattaaagataccgaagtggtcgataaagacggaaaaaaacagacgctgaagattggctatattggcgtcgtgccgccgcaaatcatgggctgggataaagctaatttatccggaaaagtgacggtgaatgatattaccgaaaccgtgcgcaaatacgtgcctgaaatgcgcgagaaaggtgccgatgtcgttgtcgttctggcgcattccgggctgtctgccgatccgtataaagtaatggcggaaaactcagtttattacctcagtgaaattccgggcgttaacgccattatgtttggccggtga

SEQ ID NO: 466441 - DNA, 327 bp, Shigella boydii
atgactaaaaatactcgtttttcccccgaagtccgtcaacgggcagtccgtatggttctggaaaatcagggcgaatatgactcacaatgggcgacaatttgttccattgctccaaagattggctgtacgccggagactctgcgtgtctgggtacgccagcatgagcgggataccggaggcggtgatggcgggctcaccaccgctgaacgtcagcgtctgagagagctggaacgtgaaaatcgtgaactgcgccgcagtaacgatatccttcgccaggcttccgcttattttgcgaaggtggagttcgaccgcctctggaaaaaatga

SEQ ID NO: 466442 - DNA, 150 bp, Shigella boydii; identical to SEQ ID NO: 464429

SEQ ID NO: 466443 - DNA, 282 bp, Shigella boydii; identical to SEQ ID NO: 464707

SEQ ID NO: 466444 - DNA, 1038 bp, Shigella boydii; identical to SEQ ID NO: 464708

SEQ ID NO: 466445 - DNA, 171 bp, Shigella boydii
atgaatggtgataattcttttggatggaaccatgaagctacattagataatattcacgcccagaaatacaataaagcttacgcgggtgcgggtaatgactccaacttattgatagtgttttatgttcagataatgcccgatgactttgtcatgcagctccaccgattttga

SEQ ID NO: 466446 - DNA, 342 bp, Shigella boydii; identical to SEQ ID NO: 462015

SEQ ID NO: 466447 - DNA, 321 bp, Shigella boydii
atgagcattgatgcggatttaaaggctggaattattgatgccgcaggagctaaagaaagacgcagtattctggaacgtgagagtcaattgtatggttcatttgatggagcaatgaagttcattaaaggtgatgcaattgctggcatcattattatttttgtcaatttaataggaggtatttctgttggtatgagtcaacatggaatgtctctatctggtgcattatctacttataccatactaactattggtgacggattggtctctcagattcctgctctgttaatttctctttcactttcacttttaaatatatcatga

SEQ ID NO: 466448 - DNA, 570 bp, Shigella boydii
atgattccagtaatggctaaagatattgtttttactcctaaatcctcccgtgctgtaactccatcggcattagaacaacgcattctgactcacatcaaagataaggacttaccattagtctttcatggctttctgggtgagtttaaagggcttcattcaagaattgctcttacatgtacccgatgtggcaatagagccgacaaatcagctactaacctgcttaatgaaggtaaacgctgtgcttgtctcaaaagtgattactttcaatataaagcgggtgtgccttatctctatgtaatgaaatcaggggatattggtaaatttggtgttacaaagtcaatcatcaagcgacgcattaatctaggtgtacgcaatcccggtcatgactttgatattgtctttgctggtgaaatgccatcaatgaaacatgctttagccactgaaagagcaataaagagattactggatgtgggtataggcgggattgaatacggcaaaactgaaacattccactactgcaataaatcactaaacaatataaagaatattgcaagtgtggagtggaactaa

SEQ ID NO: 466449 - DNA, 1035 bp, Shigella boydii
atgaaacttgcttacgctgctgaaatccctttcgttaagaaaactaacggcttatcaccggaagaataccaacaacgaatcatcactaaactggaaccaactttcgtatttggtggatttatcctaccgtggaaagctaataaaacttactttcggttatacaatttagacacacaagaatataaggactaccaattacgcaaactggaagatactaatggtggcgagctattccagactgaaaaggctgtatggttgaaaatggaatctcgttgtaatgagaagggaaagaagtttctaggatgggaaggggaatggaaaggacgcaacaagacaaaagcccgtgttttgtgtcctacacacaatcaaatcatgacaccatcactaatcgactctctcagagataactttaagtttgattgtaaaatctgtatggctgaaaaatcccaacgggtaagaagtggcaagacttttgatgaagttattaaggacaaagagacaatcatcaataaacgttgcgagagtacgccttacaccttcaaaggattcatcataaacaccccacacctaaaggatgttaaatttaaaactcattgcaagacacataatcacgaatgggaatctcatttaagatgtgctgattctttcacttgtccgctttgcattaaagaccaactggtgcaactgtctaaccggacttatcagggtaaggctagtttctacattcaattattagatgacaaatttattaaatttggaatcactacccgaaaaccagaagaacgaatgagagaacaaaccagaaagagcaacttcactcaccgcttaatctttactcatgagtttgaggatggttggaaagctgccgatttagagcatgaagtaaaacaacgcttcaagactcatgcagcaccctacaaagatttcaaggatggatggtcggaaactctgactattgatgagttgccgcacttacagcaactggtttatgactacctaaccaatcagccggacgaggctaatatgtgggtatag

SEQ ID NO: 466450 - DNA, 213 bp, Shigella boydii; identical to SEQ ID NO: 464907

SEQ ID NO: 466451 - DNA, 807 bp, Shigella boydii
ttgttgaccacttcaaagcgactgctgggcatgactgaaccgggcaaagcattactggtcattgcagaacgtattctgaatgaagccagtaatgttcgtcggcttgcagacctgtttaccaacgatacgtctggcgttctcactattgcaacgacgcatactcaggcacgttatagtttgccagaggtcattaaatcttttcgcgaacttttcccggaggttcggctcgagctaatccaggggacgccacaggaaattgcgacgttgttgcataatggtgaagctgatattggtatcgccagcgagcgtttgagtaatgacccgcagctcgtcgccttcccgtggtttcgttggcaccatagtttgcttgttccactcgatcatcccttgacgcaaattacaccattgacgctggaatcaatagcgaagtggccgttaatcacttaccgacaggggattacggggcgctcacgtattgatgacgcatttgcccgcaaaggtttgctggcagatattgtattaagtgcgcaggattctgatgtcattaaaacctatgttgctcttgggcttgggatcggaatagttgccgaacaatccagcggtgaacaagaggaaaagaatttaatccgcctggatacgcggcatctttttgatgctaatactgtctggttgggactgaagcgaggacaacttcagcgtaactatgtctggcgctttctggaactttgtaatgcaggactttcagttgaggatatcaagcggcaggtgatggaaaacagtgaagaggaaattgattatcagatatag

SEQ ID NO: 466452 - DNA, 342 bp, Shigella boydii
atggcgctcaggagccagcgcccacctgccgggctaatccaccactctgatcgaggttcacagtactgcgcatacgattaccgggtcatacaggagcagtctggtctgaaaacatcaatgtcgcgtaaaggtaactgttacgacaacgctccgatggaaagcttctggggaacgctgaaaaatgagagcctgagccactatcgttttaataaccgggatgaagccatctcagtaatacgggaatacattgagattttctacaatcgtcagcgtcgtcactctcgtctggggaatatctccccggcagccttcagggaaaaatatcatcagatggctgcttaa

SEQ ID NO: 466453 - DNA, 237 bp, Shigella boydii
gtggcggacgcgctaccggaagcggtattacgtcgttcgctggggttgcgtgcggaaaaaatccgctcaatgtaccgtgaaagcgacatcgtgccgggagagcagaccgctaccagcatactgaagcagcgcacaaaaaatcttgcgctgctgcctcacgcccaccagcaacagaatccaccacaggaagagacggtagtcagcattgccgttgatccggaatctccggctcagtga

SEQ ID NO: 466454 - DNA, 342 bp, Shigella boydii; identical to SEQ ID NO: 466452

SEQ ID NO: 466455 - DNA, 288 bp, Shigella boydii; identical to SEQ ID NO: 464732

SEQ ID NO: 466456 - DNA, 366 bp, Shigella boydii
atgaggcgcttcgcaggcgcatgtcgtttcgttttcaatcgtgctctggcacgtcagaatgagaatcatgaggccggtaataaatacatcccttacgggaaaatggcttcctggctggttgagtggaaaaatgccactgaaacgcaatggcttaaagatgccccgtcacagccattgcaacagtcactgaaagaccttgagcgggcttacaaaaacttcttccagaatcgggctgcttttccccgattcaaaaagcggggacagaatgatgtattccgctacccgcagggcgttaagctcgatcaggaaaacagccgtatttttctgccgaaactgggctggatgcgctaccggaaaagccgttag

SEQ ID NO: 466457 - DNA, 1002 bp, Shigella boydii
atgccaccctttaatattacacagaaagtatctgaggatagtaatgacttttcatttagttcagttaccaatagttctatattagaggatgtatcacttattgcatatccagaaaccaattctatattagtcaaaggtaatgatcagcaaatacagattattcgcgatattatcactcagttagatgtagccaaacgacatatagaattatcattatggataatcgatattgataaatctgaattaaataaccttggcgttaattggcaaggaacggcttcatttggtgattcgtttggtgcatcatttaatatgagctcatcagcatcgataagcactttggacggcaataagtttattgcttcagttatggcattaaatcagaaaaagaaagcaaatgtagtttcaaggccggtgattttgacacaagagaatattccggctatatttgataataacaggactttttatgtgtcattagttggcgagcgcaattcttcgttggagcatgttacgtatggaacattgataaatgttatacctcgcttttcatctcggggacaaattgagatgtctttaacgatagaggatggaacaggaaatagtcagtcaaattacaattataataatgaaaatacatctgtccttccagaagttggaaggaccaaaatcagtacaatagcgagagttccacaaggcaaaagtttgttgataggtggttatacgcatgaaacgaactctaacgaaatagtatctattcctgttctctcctctattcctgtaatcggtaatgtgttcaagtataaaacaagtaatatcagtaatattgtaagggtttttctgattcaaccccgtgagataaaggagtcaagttattataatactgcagaatataagagcctcatatctgaaagagaaatacaaaagactacacaaataatcccatctgaaactactttgctggaagacgaaaaatcattggtttcatacttaaattactaa

SEQ ID NO: 466458 - DNA, 1083 bp, Shigella boydii
atgctggcctgcggcacgcggatactgggagtgaaggaatacaaccgcgataaacctgactgcccccacgtcagatacgtcactaactcatgcggcagccgtgcctgcccgtcctgcggaaaaaaggccacagacctgtggatagcgacacagctgaatcgtcttcctgactgcgactgggtacacctggtcttcaccctgccggacacgctgtggccggtgttcgaaagcaaccggtggctgctgaatgacgtgtgccgtctggcggtggagaatctgctgtatgccgcccggaaacgggggcaggaacccggtatcttctgcgccatccacacgtatggccgtcgtctcaactggcatccgcatgtacatgtgtctgtaacctgtggaggtctgaataagcatggtcagtggaaaaagctgagcttcctgaaagacgcgatgcgttcacggtggatgtggaatatgcggcagctgcttctgaaagcgtggtcagaggggctggcgatgctggagtcgttgtcacatatcacgacggaatcacagtggagaagcctggtgctgaaagccggaggaaaatactggcatgtgtacatgtcgaaaaaaacggccggcgggaggaatacggcgcgctacctgggtcgttatctgaagaagccgccgatagcggcctcccggctggcacattacaacggaggggcgagcctgaacttccgttacctggaccacaaaacgggagaaacggcgacggaaacgctgacacagcgtgagctggtcgcgaggctgaaacagcacatcccggagaagttttttaagatggtgagatacttcgggttccttgccaaccgggtgtgtggagagaagctgccgcaggtgtaccgtgctctggggatggataaaccggaaccagtggcgaaagtgtgctatgcacaaatggtgaaacagttcctgagtcgtgacccgttcgaatgcgtgctgtgtggcggccggatggtataccgccgggccatcgcgggactgaatgtggaggggctgaagaaaaacgcgcgggatatcagtctgctgaggtatatgccggcctga

SEQ ID NO: 466459 - DNA, 303 bp, Shigella boydii; identical to SEQ ID NO: 461506

SEQ ID NO: 466460 - DNA, 534 bp, Shigella boydii; identical to SEQ ID NO: 464756

SEQ ID NO: 466461 - DNA, 726 bp, Shigella boydii; identical to SEQ ID NO: 464435

SEQ ID NO: 466462 - DNA, 216 bp, Shigella boydii; identical to SEQ ID NO: 21150

SEQ ID NO: 466463 - DNA, 270 bp, Shigella boydii
atggtacgcaacggcacggccatatcgatcaacctccacaccagcccgcagaaaacggttcccgataccgtgtcctggcgtgtccacccgtttcggactcacggctttaaaacgcgtacgaaacagttgcgtactctccgtatcccagaccggctgcacaaagatttcgccgttaaacgcatgaacgcccacaccttcacggataaattccgtaaacgtgcgtttcccttccacgtcgatctcaccaaacatcccttctgcgtattctga

SEQ ID NO: 466464 - DNA, 150 bp, Shigella boydii; identical to SEQ ID NO: 464429

SEQ ID NO: 466465 - DNA, 597 bp, Shigella boydii; identical to SEQ ID NO: 464776

SEQ ID NO: 466466 - DNA, 426 bp, Shigella boydii
atgagtattcaaagtttgcttgattatatttctgtgatccctgatggacgacaacaaggaaaagttagacataaattatctgatattttgctcctcaccgtctgtgcagtaattgctggtgccgatgagtggcaggaaattgaagattttggacatgaaagactggaatggctaaagaaatatggtgattttgctaatggcattccggtggatgacaccattgcacgcgttgtgagtaacattgacagtttggcctttgaaaagatgtttattgaatggatgcaggaatgccatgaaatcactgatggcgaaattatagcaatagatggaaagaccataagaggctcctttgataagggaaaaagaaaaggagcaatccatatggtgagtgcattctcgaccgaaaatggtattgtactggggtag

SEQ ID NO: 466467 - DNA, 657 bp, Shigella boydii
atgaaaaaaaacacagatgatggggctaaaatttacacaccacttaccctaaagctttatgactggtgggttttgggagtatcaaatcggcttgcatggggatgtcctacaaaggaacaccttcttccacactttctggaacatttaggtaacaaccatctggatattggtgttggaactgggttttaccttactcacgtacctgagagtagtctgatatctttaatggatttgaacgaagctagcctgaacgcggcatctacaagggctggggaatcaaaaattaaacataaaattagccatgatgtttttgaaccttatcccgcggcgttacatggtcaatttgattccatttccatgttttaccttcttcactgcctgcctggaaatatatctacaaaaagctgtgtaatacgcaatgcggcgcaggccttaactgatgatggaactctatacggagccacaattcttggcgatggagttgtgcacaatagcttcggtcaaaaactgatgcgcatttacaatcagaaaggcatcttttcaaacacaaaagattccgaagaaggcttaacacatatactctcagagcatttcgagaatgttaaaaccaaggttcaaggtactgtagtaatgttttccgcttcagggaaaaaatag

SEQ ID NO: 466468 - DNA, 342 bp, Shigella boydii; identical to SEQ ID NO: 466452

SEQ ID NO: 466469 - DNA, 333 bp, Shigella boydii
ttgtttgttgaatggaaacctgaacttgaagaggctgatattagtgattctgtgattcataaaaaaatcccggtaaaatatgttcaggcaccatcctataaagaaatatttgaggtgctgagtgaaactaaaaaaaggattccagcacatttattccgaatgataaaagatgaactttatgagttggtcttaactgatgatccgaaaggaaaattatatgtgagggattcagagaaaattgaagaaggggtcagtacaactgagtttgttgtgggatatggtgctatttcgatggtaaaaaatcggggtaatgctgccaacttactgatttag

SEQ ID NO: 466470 - DNA, 150 bp, Shigella boydii; identical to SEQ ID NO: 464429

SEQ ID NO: 466471 - DNA, 150 bp, Shigella boydii; identical to SEQ ID NO: 464429

SEQ ID NO: 466472 - DNA, 327 bp, Shigella boydii; identical to SEQ ID NO: 466441

SEQ ID NO: 466473 - DNA, 150 bp, Shigella boydii; identical to SEQ ID NO: 464429

SEQ ID NO: 466474 - DNA, 342 bp, Shigella boydii; identical to SEQ ID NO: 466452

SEQ ID NO: 466475 - DNA, 342 bp, Shigella boydii; identical to SEQ ID NO: 460954

SEQ ID NO: 466476 - DNA, 189 bp, Shigella boydii; identical to SEQ ID NO: 462047

SEQ ID NO: 466477 - DNA, 189 bp, Shigella boydii; identical to SEQ ID NO: 463227

SEQ ID NO: 466478 - DNA, 276 bp, Shigella boydii; identical to SEQ ID NO: 458859

SEQ ID NO: 466479 - DNA, 501 bp, Shigella boydii
gtgaatgcgaactccgggacgctcaacaacgtcacgattaacgagaactgtcgggttctgggaaaactgtccgccaaccagattgaaggcgatctcgttaaaacagtgggcaaagctttcccccgggactcccgtgcaccggagcggtggccatcaggaaccattaccgtcagggtttatgacgatcagccgtttgaccggcagattgttattccggcggtggcattcagtggcgctaaacatgagaaagagcatactgatatttactcctcatgccgtctgatagtgcggaaaaacggtgctgaaatttataaccgtaccgcgctggataatacgctgatttacagtggtgttattgatatgcctgccggtcacggtcacatgacactggagttttcggtgtcagcatggctggtaaataactggtatcccacagcaagtatcagcgatttgctggttgtggtgatgaagaaagccactacaggcatcacgattagctga

SEQ ID NO: 466480 - DNA, 294 bp, Shigella boydii; identical to SEQ ID NO: 459320

SEQ ID NO: 466481 - DNA, 378 bp, Shigella boydii; identical to SEQ ID NO: 462723

SEQ ID NO: 466482 - DNA, 276 bp, Shigella boydii; identical to SEQ ID NO: 458859

SEQ ID NO: 466483 - DNA, 810 bp, Shigella boydii; identical to SEQ ID NO: 464809

SEQ ID NO: 466484 - DNA, 294 bp, Shigella boydii
gtggcgcacgtcttcggtgaacgcactctggccacactggagcgtcttctgagcctgctgtcggcctttgaggtcgtggtatggatgacggatggctggccgcagtatgaatcacgcctgaagggaaagctgcacgttatcagcaagcgttacactcagcgcattgagcgacataatctgaatctgagacaacatctggcaaggctgggacggaagtcactgtcgttctcaaaatcagtggagctgcatgacaaggtcatcgggcattatctgaacataaaacactatcagtaa

SEQ ID NO: 466485 - DNA, 549 bp, Shigella boydii; identical to SEQ ID NO: 465664

SEQ ID NO: 466486 - DNA, 648 bp, Shigella boydii
gtgaaaaagaaagatagtcatgctcttgactatcgtttcacttgtgttgagaaatcaaataatataattcattctgttgatatgcaaagaatgggggatatgtggggttcagggctatttaaggcaaacgcatgtgactattgtgatgatgttacaaccgaactcgcagacatatcattgggtgatgcctggatttcgccatacaatatggatggagctggtaataatgtagttgtatgtcgctccaccacagctcatgaaattattttatctgggattgagaaaaaagacttagaattaacggaactcgaattagagcagttgaaattgtcacaacaaggaagttttaaccacaggcataaaggattattatatagaataaaaaatgcagagaaaaataatcgcttagtgcctgttaagaggaaaagattcttacgctctatatcttttttattaaagttaattcaaaaacaacgatcagttacaaggagaaaaagcatagagatatggatggaaactcaaaattcagcaactttcgataagaaaatgaagggatatttattcacgttgcgttggttaacagtggtcaataggaaattaagtcggatgttcaagattgtttctctaaatagaatgggtaaaaaatga

SEQ ID NO: 466487 - DNA, 177 bp, Shigella boydii; identical to SEQ ID NO: 464860

SEQ ID NO: 466488 - DNA, 294 bp, Shigella boydii; identical to SEQ ID NO: 25632

SEQ ID NO: 466489 - DNA, 276 bp, Shigella boydii; identical to SEQ ID NO: 464627

SEQ ID NO: 466490 - DNA, 540 bp, Shigella boydii
ttgattaacgaaaatctcgttgatcaaccttttctcgataaatactgcgtcggctatgacgaaaaaaccttacccgcagatgcaccaaaaaatggtcactataaagcctatattcttggtgaaggtgatgataatacagcgaaaacgccgcagtgggcttcgcaaattaccggtatcccggtggaccgtatcatcaaactggcgcgtgaaattggcacagcaaaacccgcttatatctgccagggctgggggccgcaacgccaggcaaacggcgaactgactgcacgcgctattgctatgttgcctattttgacgggcaatgtcggcatcagcggcggaaatagtggcgcgcgtgaatcgacctataccattaccatagaacgcctgccggtgctggataatccggtcaaaacgtcaatctcctgcttcagctggacagatgctatcgatcatggtccgcaaatgggtaatgactccaacttactgatagtgttttatgttcagataatgcccgatgaccttgtcatgcagctccactga

SEQ ID NO: 466491 - DNA, 351 bp, Shigella boydii; identical to SEQ ID NO: 465668

SEQ ID NO: 466492 - DNA, 276 bp, Shigella boydii
gtggcttctgtttctatcagctgtccctcctgttcagctactgacggggtggtgcgtaacggcaaaagcactgccggacatcagcgctatctctgctctcactgccgtaatacatggcaactgcagttcacttacaccgcttctcaacccggtacgcaccagaaaattattgatatggccatgaatggcgttggatgccgggcaactgcacgcattatgggcgttagcctcaacacgattttacgtcacttaaaaaactcaggccgcagtcggtaa

SEQ ID NO: 466493 - DNA, 675 bp, Shigella boydii
atgaaagggttattatctttactcatctcttctatgatattccccgtgcatgccggaatggttattttcgggacccgtataatttacccggcagagcagaaagaggtcatggtacaactgatgaatcagggaaaccgctcttcgctgatgcaggcgtggattgatgatggcgacacgtctctgccgccagaaaagattcaggttcctttcatgttaacgccaccagtagtgaaagtagcggccaattctgggcaacaaataaaaattaaaatcatgcctaataaattacccagtaataaggaaagtattttttatcttaatgttctggatattccaccgaatagtccaaaacaagaaggtaagaatgcactgaagtttgcgatgcaaaacagaatcaaattgttttaccggccggcgggtattgctccggtgaataaagcgacctttaaaaagttactgataaatcgcagtggcaatggattggtgataaaaaatgactcagctaattgggtgacgatttcggatgtcaaagctaataatgtcaaagtcaattatgaaactattatgattgcccccttagaaagtcagagtgttaatgtcaaaagtaataatgcaaacaactggtatctgaccattatcgatgaccacggcaactatattagtgacaaaatttaa

SEQ ID NO: 466494 - DNA, 231 bp, Shigella boydii
atgctgagacacaacgttcctgtgcgacgggatctggaccagatcgccgctaatggatttgcccctatatttccagacatctgttatcacttaacccattacaagcccgctgccgcagatattcccgtggcgagcgataacccagcgcactatgcggatgccattcgttataatgctcgaacgcctctgcaaggttctttgctgccgttaacccgtctggtttgggcatga

SEQ ID NO: 466495 - DNA, 225 bp, Shigella boydii; identical to SEQ ID NO: 462228

SEQ ID NO: 466496 - DNA, 276 bp, Shigella boydii; identical to SEQ ID NO: 464846

SEQ ID NO: 466497 - DNA, 207 bp, Shigella boydii; identical to SEQ ID NO: 463945

SEQ ID NO: 466498 - DNA, 225 bp, Shigella boydii
atgtcgcgtaaaggtcactgttacggcaacgctccgatggaaagcttctggggaacgctgaaaaatgagagcctgagccactatcgttttaataaccgggatgaagccatctcagtaatacgggaatacattgagattttctacaatcgtcagcgtcgtcactctcgtctggggaatatctccccggcagccttcagggaaaaatatcatcagatggctgcttaa

SEQ ID NO: 466499 - DNA, 294 bp, Shigella boydii; identical to SEQ ID NO: 25632

SEQ ID NO: 466500 - DNA, 294 bp, Shigella boydii; identical to SEQ ID NO: 25632

SEQ ID NO: 466501 - DNA, 303 bp, Shigella boydii; identical to SEQ ID NO: 459543

SEQ ID NO: 466502 - DNA, 303 bp, Shigella boydii; identical to SEQ ID NO: 461506

SEQ ID NO: 466503 - DNA, 225 bp, Shigella boydii
atgtcgcgtaaaggtcactgttacgacaacgctccgatggaaagcttctggggaacgctgaaaaatgagagcctgagccactatcgttttaataaccgggatgaagccatctcagtaatacgggaatacattgagattttctacaatcgtcagcgtcgtcactctcgtctggggaatatctccccggcagccttcagggaaaaatatcatcagatgactgcttaa

SEQ ID NO: 466504 - DNA, 294 bp, Shigella boydii; identical to SEQ ID NO: 25632

SEQ ID NO: 466505 - DNA, 1107 bp, Shigella boydii
gtgaatactgttggcaaatcggcattcgtggaggctgtcggtcgggcgagcgatgatgcggaaggttacctggatttcttcaaaggagaaatcgggaaaacacatctggcccaggagctgtggacgcagattgataacggtcagcttgcgccggacctggctgaaatcaggacgtccattacgaatgtcagcaatgaaatcacgcagaccgtcaataaaaaactggaaaatcagagtgcggcaatccagcagatacagaaagttcaggttgatacaaataataacctgaacagcatgtgggccgtgaaactgcagcagatgcaggacggacgcctttatattgcgggtatcgatgccggtattgagaatacgccagcaggaatgcagagtcaggtgctgctggcggcagacaggattgcgatgattaatcctgcgaatggcaacacaaagccgatgtttgttggtcagggcgatcagatatttatgaatgaagtgttcctgaaatatctgacggctcccaccattaccagcggcggtaatcctccggcattttccctgacaccggacgggcggctgacggcgaaaaatgccgatatcagcggtaacgtgaatgcgaactccgggacgctcaacaacgtcacgattaacgagaactgtcgggttctgggaaaattgtccgcgaaccagattgaaggcgatctcgttaaaacagtgggcaaagctttcccccgggactcccgtgcaccggagcggtggccatcaggaaccattaccgtcagggtttatgacgatcagccgtttgaccggcagattgttattccggcggtggcattcagcggcgctaaacatgagaaagagcatactgatatttactcctcatgccgtctgatagtgcggaaaaacggtgctgaaatttataaccgtaccgcgctggataatacgctgatttacagtggtgttattgatatgcctgccggtcacggtcacatgacactggagttttcggtgtcagcatggctggtaaataactggtatcccacagcaagtatcagcgatttgctggttgtggtgatgaagaaagccactgcaggcatcacgattagctga

SEQ ID NO: 466506 - DNA, 1272 bp, Shigella boydii
gtgtatgacccgacggtacagtttgagttctggttttcggaggcaaaaatcgcagacacatctcaggtggaaacctctgcccgttatctggggaccggcagtcagtggagtgtatccggcccgcacattaagcccgggaaggatttctggttttacgtgcgcagcgtcaacctggtggggaaatctgcttttgtggaggccagtggacgggccagcaatgatgcagaagggtatctggggctgtttcgggaaaaaataggaaaactgcatctggctcaggggctgtgggagctgatagacaacagccagcttgcggatgagatggcggagatgaagaccaccatcaccgaaacccgcaatgaaatcacacagacggtcagtaaaacgctggaggaccagagcgccaccatacagcagatacagcgcgtgcagaaggacacaaatgatgaccttgctgcactttacatgctgaaggtacagaaaacaaaaaatggcataccctatgttgccggtattggagcggggattgaggatactgatggccagcccctgagcaacatactgctgctggctgaccgtattgcgatgattaacccggaggacggcaacaccacgccgttatttgtggcgcaggggaatcagttgttcatgaacgatgtgttcctgaagcggctgtttgcggtgagtatcacctcgtccggcaatcccccgacgttttccctgacgccggagggcaggctgaccgcaagaaatgctgatatcagcggtaacgtgaatgcgaactccgggacgctcaacaacgtcacgattaacgagaactgccgggttctgggaaaactgtccgcgaaccagattgaaggcgatctcgttaaaacagtgggtaaggcttttccgcgggactcccgggcaccggagcggtggctatcagggaccgttaccgtcaggatttatgacgatcagccttttgaccggcaaattgttattccggcggtggcattcagcggcgctaagcatgagagagagcatactgatatttactcctcatgccgtctgatagtgcggaaaaacggtgctgaaatttataaccgtaccgcgctggataatacgctgatttacagtggcgttattgatatgcctgctggtcacggtcacatgacgctggagttttcggtatcagcatggctggtgaataactggtatcccacagcaagtatcagcgatttgctggttgtggtgatgaagaaagccaccgcaggcatcagtatcagctga

SEQ ID NO: 466507 - DNA, 351 bp, Shigella boydii; identical to SEQ ID NO: 464002

SEQ ID NO: 466508 - DNA, 348 bp, Shigella boydii
atgactaaaaatactcgtttttcccccgaagtccgtcaacgggcagtccgtatggttctggaaaatcagggcgaatatgactcacaatgggcgacaatttgttccattgctccaaagattggctgtacgccggagactctgcgtgtctgggttcgccagcatgagcgggataccgggggcggtgatggagggctcaccaccgctgaacgtcagcgtctgaaagagctggagcgtgaaaatcgtgaaccacggcagcctgacggctgcaaattgaaaaccgcccctgttcgtcctgttgttgccgcacgctccgcagaatatgtatgctctgaggacctgttttattaa

SEQ ID NO: 466509 - DNA, 201 bp, Shigella boydii; identical to SEQ ID NO: 465999

SEQ ID NO: 466510 - DNA, 687 bp, Shigella boydii; identical to SEQ ID NO: 464953

SEQ ID NO: 466511 - DNA, 726 bp, Shigella boydii; identical to SEQ ID NO: 464950

SEQ ID NO: 466512 - DNA, 225 bp, Shigella boydii; identical to SEQ ID NO: 462228

SEQ ID NO: 466513 - DNA, 225 bp, Shigella boydii; identical to SEQ ID NO: 462228

SEQ ID NO: 466514 - DNA, 303 bp, Shigella boydii; identical to SEQ ID NO: 464760

SEQ ID NO: 466515 - DNA, 711 bp, Shigella boydii
gtgagtgaggaaagccgccgctggctggcatcgtgcggcctgaccgtggcgcagatgaaaaaccagatggacccggtgtacacgccggcgcgaaaaattcacctgtaccactgcgaccatcgcggcctgccgctggtgcttatcagcacggaaggggcaacagaatggtgcgcagaatacgatgagtggggcaacctgctgaatgaagagaacccgcatcatctgcagcagctcattcgcctgccggggcagcagtatgatgaggagtccggcctgtattacaaccgccaccgctattatgacccgctgcaggggcgatatatcactcaggatccgattgggctgaaggggggatggaatttttatcagtatccgctgagcccggtgaatagcatggatccattaggattatatgaatttaaatcaaaaaatatagatgatattggaatatttgcattggcaatgtgtaatggagaatcaattaacgagaataaagaatatggtggactaatatgtaagaagcaaggtgaatatttccccatgaatccgataagttcaaatgataatgatagtgtagacttgcgaaatataaaatgccctgaaggttcagagagagtaggcgattatcacactcacggtttttactctgacgataaagggaataaagtaacaaaagaaaatgatgtttatgatagtctaaatttttggtaa

SEQ ID NO: 466516 - DNA, 492 bp, Shigella boydii
gtggctgattttacttacgtcagcacatggcagggcttcgtctatgtggcgttcatcattgatgtgtttgccggatacatcgtggggtggcgggtctcatcgtccatggaaacgacattcgtgctggatgctctggagcaggcgttatgggcccgtcgaccgtccggcacggtccatcacagtgataaaggttctcagtatgtatcgctggcctacacacagcggcttaaggaagccggattactggcatcaacaggaagtacaggcgactcgtatgacaacgcgatagcggagagcatcaatggtctttacaaagcggaggtaatacaccgtaagagctggaaaaaccgtgcagaagtggaactggccacactcacgtgggtggactggtataacaatcgacgattgctggaaaggctgggccatactcctccggcagaagcagaaaaagcttattatgcttccatcggaaacgatgatctggcagcctga

SEQ ID NO: 466517 - DNA, 819 bp, Shigella boydii; identical to SEQ ID NO: 463221

SEQ ID NO: 466518 - DNA, 489 bp, Shigella boydii
atggcgaagcccttctgcgccgacgctgaagtccacggtctgcgtttccagcagttccgttttaatcagccacagcccggcgcggtgcgcctgtccccggctggtacagccaaaggcatccatcttcgtggcgttacgaccgtaacggagaatggcctgcgtgtcctccacaagctctgtcgccgtctcatgaccgttgtccggatcaatccagttcacctcaacgacattatggcggtccttcagggcgctgaagctgtagcggaacggcgcgccatcatccggcatcaccacattactgcggttataggtccacactttatccgacggtcggtcctgcacgaacgtcagcgtctgcccgttccataccggcatacagcgcatcgccgagcagaaatcactgagaacatcccacgccttacgctgtgtggtcaggtaagcgttacaggtgatgcgcggctccgtgccgccaaatccgtccggcactga

SEQ ID NO: 466519 - DNA, 678 bp, Shigella boydii
gtgagtatccgtgagaacgacgacggcacgtatgccatcaccgccgtgcagcatgtgccggaaaaagaggccatcgtggataacggggcacactttgacggtgaccggcgcggcacggtgaatggtgtcacgccgccagcggtgcagcatctgaccgccgaagtcaccgcagacagcggggaatatcaggtgctggcgcgatgggacacgccgaaggtggtgaagggtgtgagcttcctgcttcgcctgaccgtggcagcggacgacggcagtgagcggctggtcagcacagccaggacgacggaaaccacataccgcttcaggcagctggcgctggggaattacagtctgacagtccgggcggtaaatgcccgggggcagcagggcgatccggcgtcggtatcgttccggattgcggcaccggcagcgcctgtcactattgaactgataccggggtattttcagataacggcggtcccgaaactggctatatatgacccgacggtgcagtttgagttctggttttcggaaaagcggattgcggatatcaggcaggttgaaaccagcgcccgctatcttggcacggcgctgtactggatagccgccagtatcaatatcaggcgggccatgattattatttttacgttcgcagtgtgggtaatgactccaacttattga

SEQ ID NO: 466520 - DNA, 492 bp, Shigella boydii
gtggctgattttacttacgtcagcacatggcagggcttcgtctatgtggcgttcatcattgatgtgtttgccggatacatcgtggggtggcgggtctcatcgtccatggaaacgacattcgtgctggatgctctggagcaggcgttatgggcccgtcgaccgtccggcacggtccatcacagtgataaaggttctcagtatgtatcgctggcctacacacagcggcttaaggaagccggattactggcatcaacaggaagtacaggcgactcgtatgacaacgcgatggcggagagcatcaatggtctttacaaagcggaggtaatacaccgtaagagctggaaaaaccgtgcagaagtggaactggccacactcacgtgggtggactggtataacaatcgacgattgctggaaaggctggcccatactcctccggcagaagcagaaaaagcttattatgcttccatcggaaacgatgatctggcagcctga

SEQ ID NO: 466521 - DNA, 330 bp, Shigella boydii; identical to SEQ ID NO: 461591

SEQ ID NO: 466522 - DNA, 420 bp, Shigella boydii; identical to SEQ ID NO: 464991

SEQ ID NO: 466523 - DNA, 294 bp, Shigella boydii
gtggcgcacgtcttcggtgaacgcactctggccacactggagcgtcttctgagcctgctgtcggcctttgaggtcgtggtatggatgacggatggctggccgctgtatgaatcacgcctgaagggaaagctgcacgttatcagcaagcgatatacgcagcgaattgagcggcataacctgaatctgagacaacatctggcaaggctgggacggaagtcactgtcgttctcaaaatcggtggagctgcatgacaaggtcatcgggcattatctgaacataaaacactatcagtaa

SEQ ID NO: 466524 - DNA, 432 bp, Shigella boydii; identical to SEQ ID NO: 465728

SEQ ID NO: 466525 - DNA, 225 bp, Shigella boydii; identical to SEQ ID NO: 466498

SEQ ID NO: 466526 - DNA, 225 bp, Shigella boydii; identical to SEQ ID NO: 462228

SEQ ID NO: 466527 - DNA, 195 bp, Shigella boydii; identical to SEQ ID NO: 464976

SEQ ID NO: 466528 - DNA, 492 bp, Shigella boydii
gtggctgattttacttacgtcagcacatggcagggcttcgtctatgtggcgttcatcattgatgtgtttgccggatacatcgtggggtggcgggtctcatcgtccatggaaacgacattcgtgctggatgctctggagcaggcgttatgggcccgtcgaccgtccggcacggtccatcactgtgataaaggttctcagtatgtatcgctggcctacacacagcggcttaaggaagccggattactggcatcaacaggaagtacaggcgactcgtatgacaacgcgatggcggagagcatcaatagtctttacaaagcggaggtaatacaccgtaagagctggaaaaaccgtgcagaagtggaactggccacactcacgtgggtggactggtataacaatcgacgattgctggaaaggctgggccatactcctccggcagaagcagaaaaagcttattatgcttccatcggaaacgatgatctggcagcctga

SEQ ID NO: 466529 - DNA, 222 bp, Shigella boydii
atgtcgcgtaaaggtaactgttacgacaacgctccgatggaaagcttctggggaacgctgaaaaatgagagcctgagccactatcgttttaataaccgggatgaagccatctcagtaatacgggaatacattgagattttcggtaatgactccaacttactgatagtgttttatgttcagataatgcccgatgaccttgtcatgcagctccaccgattttga

SEQ ID NO: 466530 - DNA, 267 bp, Shigella boydii; identical to SEQ ID NO: 462029

SEQ ID NO: 466531 - DNA, 267 bp, Shigella boydii; identical to SEQ ID NO: 462029

SEQ ID NO: 466532 - DNA, 294 bp, Shigella boydii; identical to SEQ ID NO: 25632

SEQ ID NO: 466533 - DNA, 225 bp, Shigella boydii; identical to SEQ ID NO: 464983

SEQ ID NO: 466534 - DNA, 510 bp, Shigella boydii
atgaaaccagaagatttccgcgccagtacccaacgtccgttcaccggggaagagtatctgaaaagcctgcaggatggtcgcgagatctatatctatggcgagcgagtgaaagacgtcactactcatccggcatttcgtaatgcggcagcgtctgttgcccaactgtacgacgcgctacacaaaccggagatacaggactctctgtgctggaacaccgacaccggcagcggcggctatacccataaattcttccgcgtggcgaaaagtgccgacgacctgcgccagcaacgcgatgccatcgctgagtggtcacgcctgagctatggctggatgggccgtaccccagactacaaagctgctttcggttgcgcactgggcgcgaatccgggcttttacggtcagttcgagcagaacgcccgtaactggtacacccgtattcaggaaactggcctctactttaaccacgcgattgctaacccaccgatcgtcatttgccgaccgataaagtaa

SEQ ID NO: 466535 - DNA, 789 bp, Shigella boydii
atggaaaacagctttaaagcggcgctgaaagcaggccgtccgcagatcggattatggctggggctgagtagcagctacagcgcagagttactggccggagcaggattcgactggttgttgatcgacggtgagcacgcgccgaataacgtgcaaaccgtgctcacccagctacaggcgattgcgccctaccccagccagccggtagtacgtccgtcgtggaacgatccggtgcaaatcaaacaactgctggacgtcggcacacaaaccttgctggtgccgatggtacaaaacgctgacgaagcccgtgaagcggtacgcgccacccgttatccccccgccggtattcgcggtgtgggcagtgcgctggcccgcgcctcgcgctggaatcgtattcctgattacctgcaaaaagccaacgatcaaatgtgcgtgctggtgcagatcgaaacgcgtgaggcaatgaagaacttaccgcagattctggacgtggaaggcgtcgacggcgtgtttatcggcccggcggatctgagcgccgatatgggttatgccggtaatccgcagcacccggaagtacaggccaccattgagcaggcgatcgtgcagatccgtgaatcgggcaaagcgccggggatcctgatcgccaatgagcaactggcaaaacgctatctggaactgggcgcgctgtttgtcgccgtcggcgttgacaccaccctgctcgcccgcgccgctgaagcgctggcagcacggtttggtgcgcaggccaccgccgtgaagcccggcgtgtattaa

SEQ ID NO: 466536 - DNA, 699 bp, Shigella boydii
atgaaaaaagtaaatcattggatcaacggcaaaaatgttgcaggtaacgactacttccagaccaccaatccggcaacgggtgaagtgctggcggatgtggcctctggcggtgaagcggagatcaatcaggcggtagcggcagcgaaagaggcgttcccgaaatgggccaatctaccgatgaaagagcgtgcgcgcctgatgcgccgtctgggcgatctgatcgaccagaacgtgccagagagcgccgcgatggaaaccgcggacaccggcctgccgaaccatcagaccaaaaatgtgttgatcccacgcgcttcccacaactttgaatttttcgcggaagtctgccagcagatgaacggcaagacctatccggttgacgacaagatgctcaactacacgctggtgcagccggtgggcgtttgtgcgctggtatcgccgtggaacgtaccgtttatgaccgccacatggaaggtcgcgccgtgtctggcgctgggcaataccgcggtactgaaaatgtcggaactctccccgctgaccgctgaccgcctgggtgagctggcgctggaagccggtattccggcaggcgtgctgaacgtggtacagggctacggcgcaaccgcaggggatgcgctggttcgtcatcatgacgtacgtgccgtgtcgttcaccggcggtcggccaccgggcgcaacatcatga

SEQ ID NO: 466537 - DNA, 288 bp, Shigella boydii
atgacttctcccgtcaatgtggacgtcaaactgggcgtcaataaattcaatgtcgatgaagagcatccgcacattgttgtgaaggccgatgccgataaacaggccctggagctgctggtgaaagcgtgccccgcaggtctgtacaagaagcaggatgacggcagtgtgcgcttcgattacgccggatgtctggagtgcggcacctgtcgcattctggggctggggtcggcgctggaacagtgggaatacccgcgcggcacctttggtgtggagttccgttacggctga

SEQ ID NO: 466538 - DNA, 1287 bp, Shigella boydii
atgtccgaagatatctttgacgccatcatcgtcggtgcagggcttgccggttcggttgccgcactggtgctcgcccgcgaaggtgcgcaagtgttagttatcgagcgtggcaattccgcaggtgccaagaacgtcaccggcgggcgtctctatgcccacagtctggaacacattattcctggtttcgccgactccgcccccgtagaacgcctgatcacccatgaaaaactcgcgtttatgacggaaaagtcagcgatgactatggactactgcaatggtgacgaaacctcgccatcccagcgttcttactccgttttgcgcagtaaatttgatgcctggctgatggagcaggccgaagaagcgggcgcgcagttaattaccgggatccgcgtcgataacctcgtacagcgcgatggcaaagtcgtcggtgtagaagccgatggcgatgtgattgaagcgaaaacggtgatccttgctgatggagtgaactccatccttgccgaaaagctggggatggcaaaacgcgttaaaccgacggatgtggcggttggcgtgaaggaactgatcgagttaccgaagtcggttattgaagaccgttttcagttgcagggtaatcagggcgcggcttgtctgtttgcgggatcacccaccgatggcctgatgggcggcggcttcctttataccaatgaaaataccctgtcgctggggctggtttgtggtctgcatcatctgcatgacgcaaaaaaatcggtgccgcaaatgctggaagatttcaaacaacatccggccgttgcaccgctgatcgcgggtggcaagctggtggaatattccgctcacgtagtgccggaagcaggcatcaacatgctgccggagttggttggtgacggcgtattgattgccggtgatgccgccggaatgtgtatgaacctcggttttaccattcgcggtatggatctggcgattgccgccggggaagccgcagcaaaaaccgtgctttcagcgatgaaaagcgatgatttcagtaagcaaaaactggcggaatatcgtcagcatcttgagagtggcccgctgcgcgatatgcgtatgtaccagaaactaccggccttccttgataacccacgcatgtttagcggctacccggaactggcggtgggcgtggcgcgtgacctgttcaccattgacggcagtgcgccggaactgatgcgcaagaaaatcctccgccacggcaagaaagtgggcttcatcaatctgatcaaggatggcatgaaaggagtgaccgttttatga

SEQ ID NO: 466539 - DNA, 942 bp, Shigella boydii
atgaacacgttttctcaagtctgggtattcagcgataccccttctcgtctgccggaactgatgaacggtgcgcaggctttagctaatcaaatcaacacctttgtcctcaatgatgccgacggcgcacaggcaatccagctcggcgctaatcatgtctggaaattaaacggcaaaccggacgatcggatgatcgaagattacgccggtgtcatggctgacactattcgccagcacggcgcagacggcctggtgctgctgccaaacacccgtcgcggcaaattactggcggcaaaactgggttatcgccttaaagcggcggtgtctaacgatgccagcaccgtcagcgtacaggacggtaaagcgacagtgaaacacatggtttacggtggtctggcgattggcgaagaacgcattgccacgccgtatgcggtactgaccatcagcagtggcacgttcgatgcggctcagccagacgcgtcacgcactggcgaaacgcacaccgtggagtggcaggctccggctgtggcgattacccgcacggcaacccaggcgcgccagagcaacagcgtcgatctcgacaaagcccgtctggtggtcagcgtcggtcgcggtattggcagcaaagagaacattgcgctggcagaacagctttgcaaggcgataggtgcggagttggcctgttctcgtccggtggcggaaaacgaaaaatggatggagcacgaacgctatgtcggtatctccaacctgatgctgaaacctgaactgtacctggcggtggggatctccgggcagatccagcacatggttggcgctaacgcgtcgcaaaccattttcgccatcaataaagataaaaatgcgccgatcttccagtacgcggattacggcattgttggcgacgccgtgaagatccttccggcgcagaccgcagctttagcgcgttga

SEQ ID NO: 466540 - DNA, 771 bp, Shigella boydii
atgaagattattacttgctataagtgcgtgcctgatgaacaggatattgcggtcaataatgctgatggttcattagacttcagcaaagccgatgccaaaataagccaatacgatctgaacgctattgaagcggcttgccagctaaagcaacaggcagcagaggcgcaggtgacggccttaagtgtgggcggtaaagccctgaccaacgccaaagggcgtaaagatgtgctatcgcgcggcccggatgaactgattgtggtgattgatgaccagttcgagcagccactgccgcaacaaacggcgagcgcactggctgcagccgcccagaaagcaggctttgatttgatcctctgtggcgatagttcttccgacctttatgcccagcaggttggtctgctggtgggcgaaatcctcaatattccggcagttaacggcgtcagcaaaattatctccctgacggcagataccctcaccgttgagcgcgaactggaagatgaaaccgaaaccttaagcattccgctgcctgcggttgttgctgtttccactgatatcaattccccacaaattccttcgatgaaagccattctcggcgcggcgaaaaagcccgtccaggtatggtcggcggcggatattggttttaacgcagaggcagcctggtcagaacaacaggttgccgcgccgaaacagcgcgaacgtcagcgcatcgtgattgaaggcgacggcgaagaacagatcgccgcatttgctgaaaatcttcgcaaagtcatttaa

SEQ ID NO: 466541 - DNA, 1515 bp, Shigella boydii
atgaagaatgaaaagagaaaaacgggaatagaaccgaaggttttctttccgccgttaataatcgtcggcatactttgttggcttacagtcagagatctggatgcagcgaatgtcgttattaatgctgtattcagttacatcaccaatgtatggggatgggcatttgaatggtatatggtggtgatgcttttcggttggttctggctggtgtttggcccgtatgccaaaaagcgtttaggtaacgaaccacctgaatttagtaccgccagttggatctttatgatgttcgcctcctgtacgtctgctgccgtactgttctggggatcgattgagatctactactacatctccaccccgccgtttggcttagaaccgaactcgacaggggcgaaagagttggggctggcttacagcttgttccactggggacctctgccgtgggccacttacagcttcctttcagtcgccttcgcttacttcttctttgtcctcaaaatggaagtgattcgccccagctcgacactggtgccgctggtaggtgaaaaacacgccaaagggttgttcggcactatcgtcgacaacttctatctcgtcgccttgatcttcgcgatgggtaccagtctgggccttgccacgccgctggtgaccgagtgtatgcaatggttgtttggcattccgcataccctgcaactggacgctatcatcattacctgctggattatcctcaacgccatttgcgtcgcttgcggtctgcaaaaaggggtacgtatcgccagtgacgtgcgtagttacctgagcttcctgatgctgggttgggtgttcattgtcagcggtgccagcttcatcatgaactacttcaccgattcggtggggatgttgctgatgtatctgccgcgcatgttgttctatatcgatcccatcgctaaaggcggcttcccgcagggctggaccgtgttctactgggcatggtgggtgatttatgctatccagatgagtatcttcctcgcccgcatctcccgtggtcgtactgtgcgtgaactgtgcttcggcatggtgctggggctgacagcgtcaacctggatcctgtggactgtactcggtagtaacactctgctgttgatagataaaaacattatcaacattccaaatctgatcgaacagtacggtgtggcgcgcgccattatcgaaacctgggccgctctgccactcagcaccgccaccatgtggggcttcttcatcctctgctttattgccaccgttacgctggttaacgcctgctcttataccctggcgatgtccacttgccgcgaagtacgcgatggtgaagaaccaccgctgctggtgcgtatcggttggtcaattctggttggcattatcggtattgttttgctggcgctcggcggcctgaaaccgattcaaactgccattatcgccggaggatgcccgctgttcttcgtcaacattatggtgacgctctactttattaaagacgcgaaacagaactggaaagattaa

SEQ ID NO: 466542 - DNA, 1143 bp, Shigella boydii
atggattttaatttaaatgatgagcaggaactgtttgtcgccggtatccgcgaactgatggccagcgaaaactgggaggcctattttgccgagtgcgaccgtgacagcgtctacccggaacgttttgtcaaagcactggcggatatgggtatcgacagtctgctgatccctgaagagcacggtggtctggacgcggggtttgttactctcgccgccgtgtggatggagctgggacgtctgggggcaccaacctatgtgctgtaccagttgccgggcgggttcaacaccttcctgcgcgaaggcacacaagagcagatcgacaagattatggctttccgcggcaccggtaagcagatgtggaactcagcgattaccgaaccgggcgcgggctccgacgtgggtagcctgaaaacgacttatacccgtagaaatggtaagatttatcttaatggtagtaagtgttttattaccagcagcgcctacaccccatacatcgtggtgatggcgcgcgacggggcttctccggacaaacctgtctacaccgaatggtttgttgatatgagcaaaccgggcatcaaagtgaccaaacttgaaaagctcggtctgcgtatggatagctgctgtgaaatcacctttgacgacgtggaactggacgagaaagacatgttcggtcgggaaggtaacggctttaaccgcgtcaaagaagagttcgatcatgaacgtttcctggtagctttcaccaactacggtacggcgatgtgcgcctttgaagatgcggcgcgctacgccaaccagcgcgtgcagtttggcgaggctattggccgtttccagttgattcaggaaaaattcgcccacatggcgatcaaattaaactccatgaaaaacatgctgtatgaagcagcgtggaaagcagacaacggcaccatcacctctggcgatgcagcgatgtgcaaatacttctgcgccaatgcggcatttgaagtggtggatagcgcaatgcaggtgctgggcggtgtcgggattgcgggcaaccaccgcatcagccgcttctggcgtgacctgcgtgtagaccgcgtctccgggggatctgacgaaatgcagatcctgacgctgggtcgcgcggtgctgaagcaataccgctaa

SEQ ID NO: 466543 - DNA, 198 bp, Shigella boydii
atgctcgtctattggctggatatagtcggcacagcggtatttgccatctccggcgttttgttagccggaaaattgcgtatggacccttttggtgttctggtactgggcgtggttaccgctgtaggcggcgggacaattcgcgacatggcgctggatcacggcccggtattttggccgatctggtcgttgcaatggtaa

SEQ ID NO: 466544 - DNA, 1029 bp, Shigella boydii
atgaaatataaaaaaatagaagacgctttgtcttctaaatctgaaacatggttgattacaggtgttgcgggatttatcggttctaacctattagaggccttactaaaacttaatcaaaaagtagttggcttagataattttgcaactggacatcaagcaaaccttgatgaggttaaagagtctgtttcagctgaacaatggtctgcttttacctttgtggaaggagacatatgtgagccagagacgtgtgtggaggttgttaaaggagttgatcatgtcctacatcaggctgcattaggttctgtgcctcgttcaattaaagatccaattactacaaataataccaatatatcgggtttcattaatatgttggttgccgccaaagatgccaatgtcagaagtttcacttacgctgcaagtagctcaacgtatggtgatcatcctgcattacctaaaattgaagaaaatataggtaatccgctatctccatacgcagtgacaaagtatgtaaatgaattatatgcgcaagtatttgcaagaacctacggattcaaatcaattggattaagatactttaatgtatttggaaaacgccaggatcctaatggggcatatgctgctgtgataccgaagtggactgctgcaatgatcaatgatgaaccgctgtatatcaatggtgatggcgaaacaagtagagacttttgttttattgagaatgtcgtgcaaatgaatattcttgctgcacagtctgatgcgtctgcaagagatcaggtttataacgttgcagttggtgaccgtactacgcttaaacaattattcactgtattaaagaatgcacttaatgaaaatggtgtttcgtataacaaagaacctgaatataaagattttcgtgcaggtgatgttcgccattcgcaagctgatatcactaaagccaaaactagacttggatacgagccacagttcagtatatcggagggcatcctcaaagcgatgccgtggtatgtaaactctctgggcaacaaaaaataa

SEQ ID NO: 466545 - DNA, 1281 bp, Shigella boydii
atgagctttaatcttgaaaattataaaataggaattattgggctgggttacgttggcttacctttagctgttgaatttggcaaaaaaataaagactcttggttttgatatcaacgagaaacggataaaagaattatcagcaggtaatgactttacgcttgaatgtagttctgatgaactggctcaagcttactatcttcaatattcatgtgattataaagaattagcgacttgcaatgtattcattgtgacggtacctactccaattgatgaatataaacaacctgatttaacacctcttgttaaagcctcggaaacactcggaaaaataatcaaaaaagatgatattattatctacgaatcaactgtttatccaggtgcaacagaagaagtatgtatcccagtaattgagaagatctcaggtctggtatttaatatagatttttttgccggttacagcccggaacgcattaatccgggtgacaaagagcaccgcgtgacaacgatcaaaaaagtaacttctggttcaacgcctgaaattgctgagattgtcgataaattatatggaaccatcatcaccgctggaacgcataaagcatcttcgatacgtgtggcggaagcggctaaagtgattgagaacacccagcgtgatttgaatattgctctgattaacgaacttgcaatgattttcaataagctggggattgatacggaggaagtattaaaagccgcaggcactaaatggaacttcttaccattcagaccaggcttagttggggggcattgcatcggagttgatccctactatttgactcataaagcgcaagcgataggttatcatccagaagtcatcctggcggggcgtagaattaatgatggaatgagtaaatatgtagcatcacagttcattaaagccatgctcaagaaaaaattccaaattgaaggtgctaatgtcttaattatggggcttacctttaaagaaaactgtccggatcttcgtaatacaaaagttgtagatatcttggctgaactgaaagaatacaacgtgaacgtggatatttatgatccatgggttgatgttgaagaagcctattatgagtatgggattaatgtattaaacacattacctgataagaaatatgatggagtgatctttgcagttgctcactctcaatttaaaaatatgagtaaagaagaagtccatggaataattagaaatgatggtgttatttatgatttgaaatacatcattgaccctaacttagtagatattcgtctttaa

SEQ ID NO: 466546 - DNA, 270 bp, Shigella boydii
gtgcaggagattggacatccggcgacgctgttcccgatggtagccgcaggcatcggcatcagtattcttcccgcactggcgctaccattgcctgaaggtagcccactggtggtaaagcgcattacgccggttgttgaacgccagttgatgctggtgcgcaggaagaaccgttcactttccaccgccgctgaagcgttatgggacgtggtacgagaccagggcaatgcgctaatggctggtcgggaaggggatccgttgtatcagatatag

SEQ ID NO: 466547 - DNA, 321 bp, Shigella boydii
atgagcgtcggtaaagtgctgaatatgaacaacatcgcggcagccggcatggtggcaacgcttgccaacaacatcccgatgttcggcatgatgaagcagatggatacccgcggcaaagtcatcaactgcgccttcgccgtttctgctgctttcgccctgggcgaccacttagggttcgccgctgccaacatgaatgccatgatcttcccgatgattgtcggcaagttgatcggcggcgtaacggcgattggcgtggcgatgatgctggtgccaaaagatgacgcgaccgcagctaaaaccgaagcggaggcacaatcgtga

SEQ ID NO: 466548 - DNA, 441 bp, Shigella boydii
atggatgaccagttaaaacaaagtgcacttgatttccatgaatttccagttccagggaaaatccaggtttctccaaccaagcctctggcaacgcagcgcgatctggcgctggcctactcaccaggcgttgccgcaccttgtcttgaaatcgaaaaagacccgttaaaagcctacaaatataccgcgcgcggtaacctggtggcggtgatctctaacggtacggcggtgctggggttaggcaatattggcgcgctggctggcaaaccggtgatggaaggcaagggcgttctgtttaagaaattcgccgggattgatgtatttgacattgaagttgatgaactcgacccggacaaatttattgaagttgtcgctgcgctcgaaccgaccttcggcggaatcaacctcgaagacattaaagcgccagaatgtttctataattga

SEQ ID NO: 466549 - DNA, 237 bp, Shigella boydii
atgcggtatccaacccgcgaatatcagcgtgattcaccgtcggatttactgctacgtcgccctcagggaattaaacctaaaaagaaaatcgtcaaaattagagattccggtttgacacggaaagtcatatcagcgcttggcgacggcggaacaaagctgattcgcgacgtaagaaagtggcaggctcatatgacggacctctgtaatgcggtatccaacccgcgaatatcagcgtga

SEQ ID NO: 466550 - DNA, 2532 bp, Shigella boydii
atgcattggatgcatttacctctctatcactccagagcgcatttttccttctcactgctggcattaacgattgccagcgtgttacctgcgtatggcggaaaatttaaccctaaatttctcgaaaacgttcagggtatcgatcaacacatcgacttgtcggtatacgattcacctgtcggtcagcaaatccccggtaaataccgtgtttcggtgtttgtaaacgaagaaaaaatggcttcccggacgctggattttagtaccgccagcgaagcgaaacgcaaagccagcggtgagtcgcttatgccttgccttagccgggtgcaactagaagaaatgggcgtgcgcgttgacagctttccggcgctgaagatgtcaccaccagaagcctgcgtagcgtttgatgaaatcattcctcaagccaccagccgctttgattttaatactcagacgctgcatctttcctttccacaggcggcaatgttgattaccgctcgcggcacggttgatccttctcgctgggacgaaggaatacctgcgctgttgctggattacagctttagtggcagcaatggacgcaatgaaggtacaggttcatcttcagattcgaccagtgacagttattacctgaacctgcgcagcggtttgaacgttggtccgtggcgtttacgtaataacagtatctggaaccgtaccgatggcaaaaaccaatgggataacgttggtacatcgttaaaccgggcgattattccactcaagtcacagataacattgggtgataccgctacgcctggagagatttttgacagtgtacaaatgcgcggggcgttactggcatccgacgatgaaatgttgccggatagccagcgtggctttgctccggtggtgcgcggcatcgccaaaagcaacgctgaagtgagtatcgaacagaacggatatgttatttatcgtacctttgttcagccgggcgcatttgagattaacgatctctatgcaacctccggcagcggcgatctgacggtgatcattaaagaagccgacggaagtgaacaacgttttatccagccgttttcggcagtggcgattttccagcgtgaaggttatctgaaatacagcctggctgccggtgagtatcgtgctggtaattacgacagcgataaaccacatttcgggcagtttaccgccatgtacggcttgccgtggggtatgaccgcctacggtggtgcattgttgtcggcagattacaacgctttagctctgggcctggggaaaaacttcggtaccattggcgcagtatcggtggatgtcactcaggcgaaaagtcagttacgcaacaatgaaaaagaggaaggccagtcttatcgcttcctctattcgaaaagttttgagggtggcactgacctgcgtctgttgggctacaaatactcaaccagcggctactacaccttccaggaagcaactgatgttcgcagtgacgccgacagtgattaccgccgttatcacaagcgcagccagatacagggcaatattacccagcaactgggagactacggctcggtttatttcaatatgacgcagcaggattactggaacgttgacggtaaggaaaactccttaagcgccggttatcacggtcatattggtcgggtgaattacagcgtggcctatacctggacgagaagtccggaatgggaagaagacgatcgcttgtggtcattcagtgtttccatccctctggggggcgcgtggagcagttatcgcatgactaccgaccagaatggcaagacgtcgcaacaggcctctgttagcggcacgttactggaagatcgtaacctgagctataacgttcagcagggttacaccagtaatggcgtaggctacagtggcagcgtcaacatggggtatatgggtggctctggtaacattgacgtaggctataactattctaaagataaccaacaggttaactatggcgtgcgcggcggtgtcatcgttcacagtgaaggtataacgctttcgcagcctttaggcgaaagtctggcgattgtttctgcaccgggcgcgcgtggtggacatgtggttaacagcagcggcgtagaagttgactggatgggcaacgccgtggtgccttatctcacaccatatcgtgaaaccattgtggaattgcgtagcgacacgttggggcaaaacgttgaactacaggaagcgttccagaaagtcgtgcctactcgtggtgcagttgtgcgttcccgctttgatacccgcgtcggttaccgtgtgctgatgagcttaaaacaggcgaatggcaacgcagtaccgtttggtgcaaccgcagcgttaattgatgagagcaaacctgccagcagcattgtgggtgaagaaggacagctttatatcagcgggatgccagaagagggcgaattgcaggtgagctgggggaacgagcaggcgcaacgttgccgtgtgccattccgcttgccagagaacaaggacaatgcggctatcgtgatggttaatgcggtatgcgagaaataa

SEQ ID NO: 466551 - DNA, 750 bp, Shigella boydii
atgggtactataaattcaataattacattgatattctcaccaaaatatatgtctacacaattagatatcccggtgccttttaccgatcgaagcaatggcacggcacagaaagaatgtacgccctatactgctaacaattgggggacaggtggtaaaggaagtatcagtatttatatttcacatccttttattgggcaaatgattattcctaaaacacgagttgcgtccctctttgggacaaaaaagaaaggtgtttacaatgatagtcagcccatggccaatgtcagtatttccgggagtattacagttactcaaggctgtgaacttgccgctggcaccgtactggatattccattcggagaatatcaggcccatgattttaaagggcgtgccggacaaccaccacaaaatgttcagaaggtacaaaaagaattaagctttgactgcaataatatttcagatggcgtcaaaatttatctcagtattgatgcaacaccaaatactgcctatcccagcgcaattgatttaggcaacgccgatgttggtgcagtcattgaggacggtaaaggtaatattcttaagccgaatgacagtaatagcttattagaaatgaacccaggctcgctgtatgaagatgtcaaacgcaaagcgacaaccacaattaccgcttatcccgttagcactaccggaaaattacccgctgccggggattatagcggtattgctaccatacatgtcgaactggagtaa

SEQ ID NO: 466552 - DNA, 195 bp, Shigella boydii
atgcaattttctacaaccccaactctggaaggccagaccatcgttgaatattgcggtgtggtgaccggcgaagcgattttaggtgccaatattttccgtgatttctttgccggtatccgcgatatcgttggcggacgttccggtcgtatgaaaaagaactgcgtaaagcacgggagatcgcctttgaggaattag

SEQ ID NO: 466553 - DNA, 294 bp, Shigella boydii
atgagaagagtcttctggctggtcgctgccgctctgttattggcagggtgtgcaggcgaaaaaggcattgtcgagaaagagggatatcagcttgatacccgacgccaggcgcaggcggcgtatccgcgcattaaagtgctggtgatccactacaccgcagatgattttgatagctcgctggcgacactgaccgataagcaggtcagctcgcattatctggtccctgcggtaccaccgcgatacaacggtaaaccgcgcatctggcaactggtgccggaacaagaactggcctag

SEQ ID NO: 466554 - DNA, 324 bp, Shigella boydii
atgcgtctgctgccagcaatttctgtactggcactggtagtgagtggcgtggtgtcagtgatgcagggcgcagagctggcgactattcatagttctgtgcagcaggccgcagcgctggtgccggactatggtgcgctgatgtcctggcggatcgtgcttttggccgttgccctgtgcttgtggattgcaccacagctaaaaggttatcagcctgcggttccgctactttctgtatcattcattctgcttctggcaggggaattaatcggtcgcggcgtattctatggtttgcatatgaccgtggggatggtcgtcgcaagctaa

SEQ ID NO: 466555 - DNA, 156 bp, Shigella boydii
atgctccgtttacttcgtcattatttttactttgttcccgcgcagttatcaaaagcaaaaggaataggtaaaaatattcttctcaaattacagttagttataaggattttcttaactgcttctcctcaccatcatgttattttcgccacatcataa

SEQ ID NO: 466556 - DNA, 339 bp, Shigella boydii
atgcatggtcttaacaaagacatcatctttccgttgcagatcttcgccctttcaaataacgtactttacaactttcccgaacaaggagttgtgcccgtgttgtatgttatttacgctcaagacaaagctgatagcctcgaaaaacgcctttccgttcgtccggcacatttagcacgtttacagttactgcatgatgaaggtcgtttgttgacagctggtccaatgccagcggtagacagtaacgatccagggctgcgggatttactggctcaaccgttattgctgaatttgaatcgctggaagcagctcaggcctgggccgatgctgacccgtacgtag

SEQ ID NO: 466557 - DNA, 507 bp, Shigella boydii
atgaatcgtattgaacattatcatgactggttacgtgacgcccacgcaatggaaaagcaagccgaatctatgcttgaatccatggccagccgtatagataattatcctgaactacgcgctcgtattgaacaacatcttagtgaaaccaaaaaccagattgttcaactggaaactattcttgatcgtaatgacatttcacgttctgtcataaaagattccatgagtaaaatggctgcgcttgggcagtcaatcggtggtatattcccttctgatgaaatagttaaaggctctattagcggatatgtcttcgagcaatttgaaatcgcctgttacacctcactattagcagcagcaaaaaatgccggtgatacagcttcaattccaaccatcgaaacgattttaaatgaggaaaagcaaatggccgactggctgattcagcatattccgcaaacaactgagaaatttttaattcgctctgaaactgacggcgtagaagcgaagaaataa

SEQ ID NO: 466558 - DNA, 495 bp, Shigella boydii
atgaagaccattgaagatgtatttattcacctgctttcagatacctacagtgcagaaaaacaattaacccgtgcactggcaaaactcgctagagcaacatcaaatgaaaaattaagtcaggcttttcatgcgcacctcgaggaaactcatggacaaattgaacgaattgatcaagttgtggaatctgaatcgaacctgaaaattaagcgcatgaaatgtgtggcaatggaaggtctcattgaagaagctaatgaggtcatcgaaagcaccgagaaaaacgaagtgcgcgatgccgcattgattgccgctgcacagaaagtcgagcactatgagatcgccagttacgggacattagcgacgctggctgaacaattaggttaccgtaaagcagcgaagcttctgaaagaaaccctggaagaagaaaaggccaccgacatcaaactgactgatctggcccttaataacgtaaataagaaagccgaaaataaagcctga

SEQ ID NO: 466559 - DNA, 180 bp, Shigella boydii
atggccgaacatcgtggtggttcaggaaatttcgccgaagaccgtgagaaggcatccgacgcaggccgtaaaggcggtcagcatagcggcggtaattttaaaaatgatccgcaacgcgcatctgaagcgggtaaaaaaggcggtcaacaaagcggtggtaataaatcaggaaaatcctga

SEQ ID NO: 466560 - DNA, 234 bp, Shigella boydii; identical to SEQ ID NO: 153292

SEQ ID NO: 466561 - DNA, 228 bp, Shigella boydii
atggctgatgcaatggatctcgtacagcagcgcgttgaagaagaacgccaacgccatatccgtgctgcccgtgccaaaacgccgggcgtgtcccgcgtgctttgcattgagtgtgaagcgccaattccgccagcacgccgccgtgccattcagggtgtgcagctttgcattacctgtcaggaaatcgcagagctgaaaggcaaacattacaacggaggtgctgtatga

SEQ ID NO: 466562 - DNA, 297 bp, Shigella boydii
atggatgacaaggagttgcacgattacctgcacagtatgagcaaaaaagagcgcagggaactggctgcaaggttacgcctggtgaaaccgaaacggcgtaaagactacaaacagcgaattactgaccatcagcgacagcagctcgtctatgaactgaagtccagaggatttaatggcagcgagaaagaggtcgatttacgccttcgcggcggcagtattccgtcaggagcaggcctgcgtatcttctatcggaaccagcgtttgcaggaagatgataagtggcgaaacctgtattaa

SEQ ID NO: 466563 - DNA, 456 bp, Shigella boydii
atgactgaacagatatatagtgaccacttgaaagaatactgcaaagatagtccaattcttttggtaaaagaatcagaagatatggtcaaaatgtttttcaagattgataaacaaattcccaataaatatcgctggaggttttccgatctgaaaacattcaccaagcaagctagctcgaaaaatacttttcaaggccttaataaaatttactggacagaccaaagttgcaatatagaagcttatacaataatgacatggtggcgcgggaatgaattagttaggtcttgtcttaatggcttaaatcgacgagaagtaatcgttccagccatagcagcacgttcattacttgaattatcaacggtgtttctgctaaacgctaacacgttagaaaaaaatttcgaaaaattacatttttgcctgatacaattgttacctcaacagatattgaaaatttaa

SEQ ID NO: 466564 - DNA, 519 bp, Shigella boydii
atgtattcaccgtattcagaaatgtatcactatgaaagacaacaaaaagataagtatgaaaatattggttttaaatatgaagggatgaattcagagaaatggcctaaattgtatattgaatgggatctcagaccagaaaatttccactattgtttagatggtgaagatgcagactctgtttcgcagagttataaaaatggattttcaataggtaaaacttctacaaaagatatttatgataagcttttctcgaacaacatagtaagagattgcgatgacttttgggctacttgtaataagagaaaggcatgtggtgtgttaggtcggtggaaagaaaaaaaattgattaccccaccactaataacaccatataatgacactttgattattgctggagggaatcatagattcaatgtggcacgtttagctggagcagaagtaattacttttattacacctacagaatatatggataaaattaacgcgatcatatctacggtttcatggaaacttgattga

SEQ ID NO: 466565 - DNA, 576 bp, Shigella boydii
atgcttttacccgtaagtattacatcgtgtggcttgtatcacccgtactggcatttgggagagcgcaaccctcatagcgatgaactatcaaggcagatgatggattttaaggatgaaaataatcgtaatcatcaaagggccattaaccgtttttctcgattagctatagataaggttgggcggttagtaatcagaggtggcggtgggcgttttgttgagtctcctttttcgatagcagttgtcccgtctcacactgaaggcagaatttcaccggctttgattgaggtcgccgagcgaatcgtaaatgttcaccgtcggggcattgttgattgctgtttggaaagaacacgcactgttcctagcgcacatcgtgaaggaggagatcgctcaattactggtcacatgtctagtatcagagttaggggtggtaacctcatggggcgaaatgtgttactactagatgatgttaaaacaacaggcggtagtttgtctgcgtgtttttatttactggagtctgcaggagctggagttataatgccattagctctgctagaaactgcaaactatgaggagtag

SEQ ID NO: 466566 - DNA, 960 bp, Shigella boydii
gtgcactcagaagaattaaaaaatacacttggattagctattcaaatcgggaagctagcatctgatcaaagtgtattaaaattctttgagcttatcgattttgatgttattcgtgatatacgcgacttaactgagatggttaatagccacgggtttctaaaagataaaatatctgagactgattttctaatagcgaacgctgaattggagaaccaccatgttaatggtgtggagctaataccatatgggtctgaattctatcctcttagtttagcttttactcctaatccaccatcaattctctacataaaaggggataaaagtatactcaaagaattgccgggtgtcgcaattgtaggatcccgtgatacctcccctgcaggggaagaaataacgaggcggatcactaatcagatagtgtctgctgggtatattgttgtaagtgggttagcaataggcactgatgcgaatgctcacaaggcaacgttacaggcaaaaggaaaaaccattgctgtcttggcgcatggtcttgaggaggctaagccgaagcaaaacagtcgacttgctcaagagattctggataaaggtggtgcatggatttctgagtatcctatgggtcggccggcccagaaacaatcatttgtacaaagaaatcggatacaagttggattatctgcaggttcaattttaatcgaggctgcgttaaatagcggaacgataactcaagctgagtttgcaaataaggcgaaaagaccagtgtttgcagttgtacctcacctacctaataatccgcttaatcttaattgtgagggaacagttgatttagttaagagcaacatggctagagcgctaaaaacaaaacgggattatgatgatgtgattatgatcataaatgagtcccgggagtatttgttagagctaaaatggccagggaaacagagtacattagacttgatttaa

SEQ ID NO: 466567 - DNA, 852 bp, Shigella boydii
atgtttactgttggtatttacggctttactctaacaaagataactcacttttcattcgggacaatgtatccaatagaaaccagttttcttaaattaaaaaaatatagacaagacaaggaaaaattatatcttactgcgctccttgaacttgacatcatagacaagagcgaaacagatgatatcatatttcatctagagaaaattttgagttttatagaacagagagcagtatttatcagacaccaactaaataataagactcataaatttgacgtgcccatagattaccctctctttataactcctaatattaacttatcaagttcaggagaaatcattcttgaagattgcttttccaaaaactcaagacgctactttattgaacttgctataaataagatcatcattgctagagatcgaccatttaccacaatacttcataaaaatgtattggttttctctaatccaataaattatcttgatgtatcatattacttacttttttctggccttgagtcattagttcgagaacgtgagaatgattttaaatcaaacattacgccaataatgtatcgttacctcaaaaagcatgggtttaatataaatcaacaaaacaataaacatcatgacatctcacttgatatttactgtagcttaaggaacgcattatttcacaatggtcaattcaaaaccatgccgatgaaaagaggctctaaaacaatcagttttgcactaaaggacttttactcacaatttaaacgattaaactgcctcgtcatattaaaagaagcagaattcagcgatcatcatatcaactggaattttagtgattatagaaacccttttatataa

SEQ ID NO: 466568 - DNA, 579 bp, Shigella boydii
atgaacgcacaattaaccgaaatcatgcgccttatcaccaacctgatccgcactggggtagtcaccgaagtggacagggaaaactggctttgccgggtgaaaacgggcgagcttgaaactaactggatcagttggctgacgctgcgtgcaggaaatgcccggacatggtggcgaccatcggaaggtgagcaggtggtgctgctgagtctggggggcaatctggaaacggcctttgcgctgcccgctgtctattcgaatcagtttgcgccaccgtcgacgtcggcggacgcctgtgtgacagaatatcctgacggtggctggtttgaatacgaacctgccaccgggcactggtatgtcaggggcatcaaatccatggtcattgaggctgccgataacatcaccctgaaaaccagtgagtttgtgctggaggctgagtgcacgcgtattaacagcgaagtggtggtcaatggtggcgttactcagggcggcggagcgatgagttctaacgggatcgtggttgatgcgcatcagcatactggcgtcctgaaaggcggcgatacaaccggaggcccggtatga

SEQ ID NO: 466569 - DNA, 360 bp, Shigella boydii
atgacgctttatagcgggatgaacaataccagcggtaaagccattactgatattgaccatctgcgccagtcggtgcgggacattttgctgacgccgcagggtagccgcattgcccgtcgggaatatggttccctgctgtcggcactgatagaccagccacaaaatccggcattacgcctgcaggtcatgtcggcagtgtatgtggcgctgagtcgctgggagccacggctgacgctggattccatcaccattaacagcaattttgacggttcaatggtggtggagctgaccgggcggcgtaataacggtgtgcctgtttccctttccgcatcaacaggagcagagaatggcagtgattga

SEQ ID NO: 466570 - DNA, 909 bp, Shigella boydii
atggcagtgattgacctttcgcagttgcctgcgccgcagattgtggatatgccggactttgagacgctgcttgccgaacgcaaggccgaatttgttgcgcttcatccgaaagatgagcaggaagcagtgatccgcacgctggaactggaatctgaacccgtcaccaaattgcttcaggagaacgcttaccgtgagttgcttctgcgccagcgcattaacgaagccgcgcatgctgtgatggtggcttacgcgatgggcggcgatcttgaccagctcgctgccaactacaacgtgaaacgcctgacggtgacacctgctgatgatgacgctgtaccgcctgttgcggctgtgatggaaagtgatgaagcgttacgcctgcgtgtgcctgcagcctttgaaggactttcagttgcggggccaactgcagcttatgaatttcatgcccgaagcgccgacggtcgggtggcggatgccagtgcaaccagcccggcacctgcagaggtggtgctgactgtccttagccgcgaaggcgatggaactgcagaaaaggacctgctggacgtggtggaaaaagctctgaacagtgagaacgtccgcccggtggctgaccgtcttacggttcgcagcgcagaaatcatcccgtatcgcgtggaagccaccatttttctctatccgggaccggaagcagagccggtaatggcagcggcaaaagccagcctgcagaagtacatcgccagtcagacgcgtcttggtcgggatattcgccgtagcgccatctttgccgcccttcatgttgagggagtgcagcgtgtggagctggcttctcctctggcggatgtggtcctgaacaaaacacaggcggcatcatgtacgcagtggagcgtaaccaacggaggaacggatgaatag

SEQ ID NO: 466571 - DNA, 606 bp, Shigella boydii
atgaatagtctgctgccaccgggttcaacaccactggagcgccgactggcgcaaacctgcagcgggatttctgatctgcaggtgccgcttcgtgacttgtggaatccggctacctgcccggtcagcttcctgccttatctcgcctgggcgttctctgtggatcgctgggacgaaggctggacagaaagcgtcaagcgccaggtggtgaaggatgctttttatattcatcagcataaagggaccaccagtgccgtgcggcgggtggtggagccgttcggatttctgatccgcattattgagtggtggcaaaccggagaggcaccgggcacgtttcgcctggatatcggcgtgcaggaccagggcatcactgaagatacctatctggaacttgagcgactgataagcgatgccaaaccatgtagccgccacatgatcggcatgtccatcaatctgcagaccagcggcccgtattgggtgggagccgccagctatcttggcgaagaaatcacgatctatccgtatatcaacgaaacgattatttccggtggcaccgcgcatgaaggcggggcggtccatgttattgacacaatgagagtgaatccatga

SEQ ID NO: 466572 - DNA, 1731 bp, Shigella boydii
atgagcacaaaattttataccctgctgacggatattggcgcggcgaaacttgccagcgccgccgcgctcggtgtgccgctaaaaattacccatatggcggtgggcgatggcggcggagtattgccaacgccggacgcaaagcagactgcactggtgaatgagaaacgccgggctgcgctgaatatgctctatatcgacccgcagaacagcagccagattattgctgaacaggtgatccctgaaaacgagggtggttggtggatacgtgaagtgggcctgtttgatgaatccggggcattaattgccgtgggcaactgcccggaaagctataagccgcaactggctgaaggcagcgggcgcacccagaccgtgcgcatggtgctgattaccagcagtacggacaatatcaccctgaaaattgacccatcggtagtactggcaacccgtcattatgtagatcagcaaatagaggttcatgagcaatcgcgccgtcatccttctgcttctttgacagaaaagggatttgtacgtctgtatagcggtgtggaaagtaatgatgaaacagtcgctgcaacgccaaaagcagtgaaaatagcgatggataatgccagcgccagactggcaaaagaccgcaatggttctgatattcccaatccggcactgtttgttcagaatctgggattgaaaacgactgttgataaagcagcatcagcgattcagccaggagattatggaattggtctggcttatctgaaaaccatgggaaccaaatcgcaattttttgcttacggtacagctgttggctatccagaagtgccaacacatggtgctggtttccaggcctgttacaacgacaatcggcgtgcacaaatttatgtcgctaatgatggcaagatgtactgtcgattcagcatgttatcgaaaattgccgatgatgaaacaccgtggaatcaggtgttcaccagtgcacattatccagaagcatcagtgagtgttaaaggaatggtgcaactggggaacgatgtaaacagcgtgtcagaaaatgttgcggcgacattgaaagcggtaaaaattgcgatggacaacgccagcgcgagactggcaaaggaccgcaatggtgctgatattccagacccgactttgtttattcagaatctgggacttaaaccgacggttgataaggctgaaagtgctctgcaacagggagcatacggaattggtggtaaaaataactacgaaatgggggaggtttcacagtttcttgcatattcaggtaatgcagatgaagtgccatcgaatggtgcaggttttcaggctgcgtataacaagaacagacgcgcgcagattttcatcaccggagcaggggaaatgtatcaccgtttcagcggctctgatacggttaaagacagtacaacgctatggcgccggggtgtttgtgaagatgaattttcatttggcagcaattatcaccgaataactggcggtgtgctgaagcagttttttaacagttatttttccggggaaactggtgtggtgaataaaaattatcaggtgaattttccgacaccatttgcccgtcagtgctggtacgtgatccctgttttccgttcggcacacggtgggagtgttgagggggttgccattacaactattactgcaactggttttactctgagcatcaccggggataacggtggatggaatattgggtttattgcggagggggtctga

SEQ ID NO: 466573 - DNA, 435 bp, Shigella boydii
atgagttatttttacagtccatcaagaaatgcattttataacagtgaactgaaatctgattattacgatgctctcgatgcgtggccggatgactgtattgaggtaagtgatgcagtctatcaggagttttatcttggttatcgggaagggtacaaaatggttgcaggtactgataaccagccatcatgggaagaacgtccaccattgacccatgaggaacaggtggaacaggcagaaatgatgaaacagatgcgcattaatgaggctaacaacctgattaatgaaaaacaatggccatcaaaattacagcttggcaggctgaacgaaatggagacaaccagatttaatgcgatgctggattatcttgagttacttgaaaatattaatgtaagtgatgccccggatatagtctggcctttgtcaccagaagtctga

SEQ ID NO: 466574 - DNA, 1809 bp, Shigella boydii
atgagtaaagtctttatttgcgccgccattccggacgaacaggcaataaaggaagaaggtgcagtcgctgtagccactgccattgaagccggtgatgaacgtcgcgcccgcgcaaaatttcactggcaattcctggaacattatccggctgctcaggactgcgcttataaatttattgtctgtgaggataaacccggcataccccgccctgccctcgattcctgggatgctgaatatatgcaggaaaaccgctgggatgaggcgtctgcttcctttgtcccggttgagactgaatcagatccgatgaacgtcacttttgacaagctggcccctgaagcacagaacgctgatatggttattagcgcacaggaattgttgcaggaagacatggcaacattcgacggacatatcgttgaagcgttgatgaaaatgccagaagttaacgccatgtatccggagcttaagctgcatgccatcgggtgggttaagcataaatgtaagcctagtgccaaatggcccgaaattcaggcagagatgcgcatctggaaaaaacgtcgcgaaggtgaacgcaaggaaaccggaaaatacacatctgttgttgatctcgcccgcgccagaaccaatcaacagcacagtgaaaattcaacaggaaaaatcagcccggtcattgctgccattcatcgcgaatacaagcagacatggaaaacactggatgacgaactggcctacgctctctggcctggtgatgtggatgccggaaacattgacggcagcatccatcgctgggcaaaaaatgaagttatcgacaacgaccgcgaagactggaagcgtatctcggcatcaatgcgcaaacagcctgatgcccttcgctacgaccgccagactatttttggccttgtccgtgaacgtccgatcgacattcacaaagaccctgtggcactgaacaaatacattactgaatacctgactacaaagggcgtgtttgaagatgaaggaagaaatcagagcgcaactgatactctctcgtcgccagtaccagaaactgatgcagtggaaacggcaattccggacaacgaaaaaaccgaatgcaaagtggaagtcgaaccatctgtagagcgtgaggggccgttctacttcctcttcaccgacaaggatggcgaaaaatacggtcgcgcaaacaaactttctggtctggaaaaagcactagccttgggagctacggaaatcacaaaagaggaatacttcgcacgtaaaaacggcacgtactcaggttcacaacaaaatattggtgcatctgacacgaccgcacaaccagagccggtaaaagttaccgctgacgaagtaaacaaaattatgcaggcagccaatatcagccagcctgacgccgataagttgcttgctgcctctcgcggagaatttgttgcagggattagcgacccgaatgatccgaaatgggttaaggggatccagacccgcgattctgtaaaccagaaccagcatgaatcggaacggaactaccaaaaagcagaacaaaacagcccaaatgcgttacaaaacgagccagaaacgaaacagcctgaaccagtggcgcaacaggaagtggaaaaagtctgcaccgcctgcggtcagaccggcggcggcaactgccctgattgtggcgcggtgatgggcgacgcaacataccaggaaacattcgatgaagagtatcaggttgaagttcaggaagatgatccggaggaaatggaaggcgctgaacatccacacaaggagaacactggcggcaatcagcatcacgatagcgataattaa

SEQ ID NO: 466575 - DNA, 543 bp, Shigella boydii
atgatcgaccttgaaaccatgggaaaaaatcctgatgccccgatcatctcaataggtgcaatatttttcgatccgcaaaccggagatatgggaccggaatttagtaagactatcgttctggaaactgctggcggggtcattgatcgggacaccattaaatggtggcttaagcaatcacgcgaagcgcaatctgccattatgaccgatgaaatcccgttagatgatgcactgttacaattgcgggaatttatcgacgaaaactccggtgaattttttgttcaggtctggggaaatggagccaacttcgacaacacgattttgcgccgttcatacgaacggcaggggatcccctgcccgtggcgttactacaacgatcgcgatgtacgcacaatcgttgagctggggaaagccatagacttcgatgccagaactgctatcccattcgaaggtgagcgccataatgcacttgatgacgcccgttaccaggcaaaatacgtttcagttatctggcaaaaactgatcccgagtcaggctgatttttaa

SEQ ID NO: 466576 - DNA, 126 bp, Shigella boydii
atgaatcttttaatgcgcgctatattcagtctgctgttgctttttactctctctattcctgtcatttctgactgtgttgcaatggccattgaaagtcgcttcaaatatatgatgctacttttttaa

SEQ ID NO: 466577 - DNA, 228 bp, Shigella boydii
atgctttatataggcaacgtcggtgtaaatcaccgggggatgatagtgaaacacttacccgtagaaatgacgctatcttcggcaaccacgtatggcaaacatttgcgcaatacttcccgccaggacttgaaaaaccgtctgtgtagaaaacaccatagctatggtgttatctgccgacaacgccatccggagaagccgaatgacgttgtcggagtaagcgctggttaa

SEQ ID NO: 466578 - DNA, 267 bp, Shigella boydii
atgaaaaaattgatcaatgatgtgcaagacgtactggacgaacaactggcaggactggcgaaagcgcatccatcgctgacactgtatcaggatccggtgtatgtcacccgagctgatgcccctgttgcaggaaaagtcgccctgctgtcgggtggcggcagcggacacgagccgatgcactgtgggtatatcggtcaggggatgctttcgggggcctatccgggcgaaattttcacctcaccgacgcccgataaaatctttgaatga

SEQ ID NO: 466579 - DNA, 873 bp, Shigella boydii
atgcttcgcttgttaaccaaacgcggctgctggataacgctggcagctgtgccatttctcctttttcttgcagcgtggggagcagataaactctggcctctaccgctgcatgaagtcaatcccgcacgagtggtcgtggcgcaggatggtacgccgctctggcgcttcgccgatgctgatggcatctggcgttatccggtaacaatcgaagatgtgtctccacgttaccttgaagcgctgatcaattatgaagatcgctggttctggaagcatccgggggtgaatccattctcggtggcgcgcgcagcatggcaagatctcacttcgggacgggttatttctggtggcagcacgctcactatgcaggttgctcgtctgcttgatcctcaccccaaaacatttggtggcaaaattctccagctctggcgcgcgttgcaactggagtggcatttgtctaagcgtgaaattctgatcttgtatcttaaccgcgctccgtttggcggtacgttgcaggggatcggtgcggcaagttgggcttatctcggaaaatcgcctgcgaatttaagctattccgaggcggcaatgctggcggtgttaccgcaagcgcccagccgactgcgcccggatcgttggccggagcgtgccgaagccgcgcgtaataaagtgctcgaacggatggccgtgcaaggtgtgtggtcccgtgagcaggtaaaagagtcaagggaagaacccatctggctggcaccccgacaaatgccgcaactggcaccgctgttttcgcgcatgatgctcggtaaaagcaaaagcgacaaaatcgttactacgctggatgccggtcttcaacgacgtctggaagaactggcgcaaaactaa

SEQ ID NO: 466580 - DNA, 456 bp, Shigella boydii
gtgactggttctacggtaaaaatgggtgaatatagtgcagaacaaatcagaaacggtgccacaccggttccttttgatatttcacttcaaaactgcgtttgtgtgactaatattgagacaaaattagtttcaacaaaggttggtactgaaaacgggcaactccttggtaatactctcacaggtaatgacgcagcaaaaggagtcggtgtactcatagaaggtttagcaactagtaaaaatcctctaatgacattgaaacctaatgattcaaattctgtttataaagattacgacccgagaggcaaagacgatacaacaggaggagtttacccggatcaagatacaggtataacataccctctccatttccaggccacgctacaacaggatggaactataccaatagaagctggtgagtttaaagccaccagtactttccaggtaacctacccttaa

SEQ ID NO: 466581 - DNA, 1221 bp, Shigella boydii
atgtctatttataaaattcctcttccgctcaatattctggaagctgcacgagagcgtattacctggacactcaacaccctaccccgcgtttgtgtctcattttctggcggcaaagactctggtttaatgctgcatctgacagccgaacttgcccgacaaatgggcaaaaaaatctgcgttttgtttatcgactgggaggcgcaattctcttgcactattaactatgttcagtccctgcgcgagttgtacaccgatgtcatcgaagagttttactgggttgcgctcccgcttacgacgcaaaattccctttcacaataccaacccgaatggcagtgctgggaacctgatgtcgaatgggtgcgtcagcccccgcaagatgcgataaccgatcctgactttttctgcttttaccagccaggcatgaccttcgaacaatttgtacgtgagtttgccgaatggttttcacaaaaacgtccggcggcgatgatgatcggcatccgtgcggatgagtcctacaaccgttttgtcgccatcgccagtttaaataaacaacgttttgccgacgataaaccatggactacggccgcaccaggcggtcatagctggtacatttaccccatttacgactggaaagtggctgatatctggacctggtatgcaaatcatcaaagtctctgcaacccactgtataacctaatgtatcaggcaggcgttcctctgcgtcatatgcgaatttgcgaaccttttggcccggagcaacgacaaggattatggctctatcacgttatcgaaccggatcgctgggctgctatgtgcgcacgagtcagcggggtaaaaagtggcggcatttacgccggacatgacaatcatttctatgggcatcggaaaatcctcaagccagaacatttagactggcaagaatatgcattattgctgctcaatagcatgccggaaaaaacagctgagcattaccgcaataaaatcgccatttatttgcactggtatcagaaaaaaggcatcgaggttccacaaacccagcaaggggacattggcgcgaaagatatcccctcctggcggcggatatgcaaagttttactcaataacgattactggtgtcgggcattatcatttagtcctacgaaagcgaagaactatcagcgttataacgaacggataaaaggaaaacgtcaggaatgggggatactatgcaacaacgattaa

SEQ ID NO: 466582 - DNA, 150 bp, Shigella boydii
atgagtttctatgtattgtgcggcggtatcgtcgggctggtgctgaaagagtggaacaatgcaggtcgccgtccggtaacggtgttgagcctcggttgtgtggtgattattgtcgccgccaacatcgtcggcatcggcatggcgaattaa

SEQ ID NO: 466583 - DNA, 591 bp, Shigella boydii
atgtctgcatcttcggttaagccgttaaatgttcaattacccgcaataacccttatcctttttgcactctgtattgggatattttgttatctcgcacaatggatgagttatgaagaggtcgatcaatccgcacttatccatctcggcgcaaacgttgcgcctcttactttgtcgggtgaaccctggcgcttattgagcagtatctttctgcacagtagtgtttctcatctgctgatgaatatgtttgcattcctggtcgtgggaggcgtggcggaacagattctggggaaatggcgactcctgattacctggttattctccggcgtctttggtgggctcatcagcgcctgttatgcgttacgcgatagtgatcagatagtcatcagcgttggggcatccggggcaattatgggaatagctggcgctgcgatagcaacacagcttgcttcaggtgcgggcacataccataaaaaccagcggcgagtattttctctgttgggtatggtggcgctgacactgttgtatggtgcccggcaaacaggaatagataatgcttgtcacattggcggcctgattgcgggtggcgcgtag

SEQ ID NO: 466584 - DNA, 222 bp, Shigella boydii
atgcgtgatgatcgttttaattccctgaaacaggaattttccggcgttcctgatggtgcggctgatgcgctttcgtcaatgccagaacttattagagcggcttttttcttactttccacgagagaatataaatcaacggggcttgatgtactgaatatcgccgccgattatgctgatttcgtgacagaggttattttaagaaaaacgacggatggggattaa

SEQ ID NO: 466585 - DNA, 306 bp, Shigella boydii
atgagcgaaccaaaatttggtgaaaaactttacaagcacaacggacggatcacgattcagcaaataagcgcagctacaccaggctggtgggttgaaacagacgaaggatcctcacccgtggcatcatgggcgctttgtgtgcttagttaccctgaccgcgatgtgtatcaggatattcttcctgtgatatccactgataaaggcatgaagcccgtggacatcaaaaacatgggttttcagtgcgtaatgctcactgaaaaaatgatggaagagatgaaaaagaacaacgccggatcgcttcactga

SEQ ID NO: 466586 - DNA, 1158 bp, Shigella boydii
atgccgagaataatcgaattacgccagcagaaaaccgccattaaaaatcagatgcgcgacatgctggagaacgcggaaaaagaaaaccgcagccttaacgatgctgagggcgcaaaatttgacgaattacgcgctaaagctgaatcactcgataaagacatctcccgccttgaggccgttgctgacgaagagcgcagtaaaccaggcaaaaacagccagaccactgaccccgccgaactacgtcactacattctgacaggtgaaacccgcgcattgagtacaggcgttcccgctgatggtggttataccgttatccccgaactgaacaccgaaatcatgcgaatgctgacggatgaatccaccatgcgccgcatctgtaccgtgaagaaaatcagcagcaacgagtttaagcagcttgtttccgctggcggtgcgaccgttaaccacggtgaagagggtaaggcacgcgaacagaccagcaccccgcagattaacgaggtgagcattaagctgtatccggtctatgcgtacccgcgcaccacgcaggaaatcgtggatttttccgatgtggacatcctttcatggctgacgggcgagattggcgacaccttcacggaaaccgaagaaagcgatctggttgtgggcgacggtgacaaaaaagcaaaaggctttttatccgtaccccgtgcagagaagaacgacaaagagcgtgattttggtacgttgcaggtaattaaaccttccgaatctctggcgtggacatctgcggacccgctgatcgacctgaaatttgcattacgtaaaaaataccgcaaaaacgcggtctgggtggttaactccacgacggaggcaaaactccagaaggtgaagaacgcgaacggtgattacatctggcgtgaccgtttacaggcgggtgatcctgatacgttgctgggccttccggtcgaatatctggagtttatgccggataacgttattgccctgggtgacttcaaacgcggttactacattgttgatcacgaaacaggtgttcgcaccagaccggacaacctcacagagccgggcttcatcaaaattttcgcgcagaaatatttaggcggtggcgtggtggattcgaacgcgatcaagattctggaactgccacaggacgacgattaa

SEQ ID NO: 466587 - DNA, 573 bp, Shigella boydii
atgggtgaaaaaattatgaagagtatggaaatccggtcatcggaaatcaccaccagcggagccggtacgctgacgggctacattgttcgctgggataagctttcagaactgttatggggtgagttttacgaaaaattccagcggggggcgtttactgaatggcttgcggcgggtaatgacgttcgcggcctgtatgagcatgaccacagcatgttactggggcgcacccgttccggcacgctgaaactggaagaggacgaaacagggttacgctttgaactgaccccaccggataccagtacagggcgcgacgttatcgaactggttaaacgaggtgatatatccggcatgagctttggctttcgttcccgtaaggatgtatgggataccacaacagatccatgcgtgcgcaccgtgctggtggcggaactgtacgaaattaccgttacatccgtaccggcttaccctgattccgacgtggagctggcccgccgttccctgtatgagcagcaccccgaaaaaatgccgcgtgcggataatcgccgctggtgggcggatttagcgggggtgtga

SEQ ID NO: 466588 - DNA, 1176 bp, Shigella boydii
atgacgcttgatgagtttatggcgctggctggcacatcgaacacgggggcgggtgagtacgtatcatcggggacagcggaatcactgcccgccgtcatgaacgccgtgacggtcatctctgaggcggtggctaccatgccgtgttacctgtacctggtacgcaatgagaaggggaaggaggcccgcgagtggcttgattctcatccggtcgatcacatcctcaacgagcgcccgaacgcatggcaaaccccctaccagtttaagcgaatgatgatccgccactgcctgttaaacggtaatgcttatgcggtgattcagtgggggcgtgatggttttccggtcgctttgcatccttacccgccgcagtcggtgaacgttgagcagacaggtgagcataactggcgctactgcatcactgacgcctacaccggaaacacccgcaactatttaccgtgggaggttctccaccttcgttactccacggatgacggttttatggggcgctcacctgtaaccatctgccgcgaatcgctggggcttgggctggcccaacaacgccacggcgcgagcgtgatgcgtgatggcatgatggcggcaggggttatcacgtcaggcgaatggctggacggcgtgaagggcaaacaggcattagccgcgctggaacgctacaaaggggccagaaacgccggaaaaacgcccatccttgaagggggtatgagctatcagcagctgggcatgagtaatcaggatgctgaatggctggcctcccgtcgcttcaccattgaagacatcgcccgaatgttcaacgtctcgccgatttttttgcaggaatacagcaacagcacctacagcaatttcagcgaggcaagccgcgcatttctcaccatgacgatgcgcccgtggctggcgaactttgagaagcagataaaaaacgccctgctggtggcctcgcctgtacctggtatccggtatcaggtggagtttgacagcgcggacctgttacgggccacacctggcgaacgctttgccacctatgaacgcggcatcaaatccggcgttatgtgcccgaacgaagcccgcgaacgtgaagggctgtccccgcgtgatggtggtgatgagttcagccaggcatggaaacaggaagtaaaaatcagcgagggagaaaaaccggaatga

SEQ ID NO: 466589 - DNA, 339 bp, Shigella boydii
atgaacatagggcgactgcgtgacagggtaacgattcagaccctgaaacagaccagagccatgacgggcgaaatactcgaaacgtgggtggacggtcacacactctgggcaagcgtgaacatgatcagcagcaaggaggccatttcatcgggtgcagaactggcgactggaacggtaagggtatggatacgctacaggaaggacatcaacgccaccagccggataaaggtcaatacggggccgctggcggggcgtgtactgaatatcatcgggcagccgctgccggatgccgccaggacacgccttgaaattctttgtcgtgagggcgcggaaaaatga

SEQ ID NO: 466590 - DNA, 297 bp, Shigella boydii
atgacagaagaacttatcaccctggaagaagtgaaactccattgccgcatcgatggcgacgaggaagaccagttaatcagcggatacattgccgcatcgcttgaggcgtgccagatacacataggcaggcgctttgatgacgggctggagttcacgccagccataaagattggctgcatgatgtttatcgctcacctgtatgaaaatcgccagattgtcgcggataacgcaaaaacacgcgtacccatgacgattggtgtactctggacggcttaccgtgatgtgggggtgtactga

SEQ ID NO: 466591 - DNA, 441 bp, Shigella boydii
atgccgtggcaaccattaagacgatgcacagaaccaggctgtaacaggcgcgtgaagtccggcaagtgtgaggagcacaggcgggcggcatggcgtgcagaggatgccagacgaggacaccgccgcgcgcgtgggtactccagacagtgggacaaataccgcgccatgtatctgagtaaaaacccgttatgcgtgcgatgccttgagaaggggatatatacgcccgccgtggtggtggatcacattatcccgattaatggcggtgatgatgttctcttctggcccgaatggaaccatcaaccattgtgtcaggcgtgccataaccagaaaacgaaatggcttgatccggcaacaaaaagtaagcgtgccgcaggtggatttcgtgaagaggaagaacgggccgctaaccgcaataactggatgtatgacgctgatgaatga

SEQ ID NO: 466592 - DNA, 357 bp, Shigella boydii
atggcaagaccaccgaaagcccccgcctacctggatgatatcgccgtgaagcagtggcgggaaaaatcgcggcagcttgcggaacggggtgacctgactcccgccgactggagcaatctggaactgtattgcgtcaattactcgatataccggaaagccgtcgcagaccttgcggcgcgcgggttcagcattgttaacagtcagggcggagagagcagaaaccccacattaagcgcgaaatccgacgcggaaagagtgatgataaaaatggcctccttgctcggttttgacccgataagccgccgtaaaaatccaccggaaacagaagaagaggacgagcttgaccgcctggaataa

SEQ ID NO: 466593 - DNA, 1029 bp, Shigella boydii
ttgaccgcctggaataagtacgcagaagacgtaaaaacgggcaaaattccggcctgtaaacggctgaaacaggccgttaaacggtacttttcagaccttaaaagccccctttacacgttcgatcgtgaggttgtggatcggtttattgccttttccagggtgtgcccgcacgtaaaagggccgatgcgtggcagacccattgagctggagccgtggcagcagttcgcctttgcgtgcatcctcggctttaaggttaaggccaccggacggcgcaaatatacgagcgcctttatcgaagtgccgcgcaaaaatgcgaaatcaacgaccgccgcgattctggctaactggtttctgattatggagaacggtcagcaggatatctacaccgcagcggtgagccgtgaccaggcgcggatcgtctttgatgatgcgcgtcagatgtgccttttatcccgaccgttacgcaggcgggtgaatattcaggcgcataaggtgatacacccgaaaagcaacagcctgttaaagccgctggcagcaaaagcggcaaccatcgagggaacaaaccccagcctttccatcgtggacgaataccacttgcaccccgataacggcgtttattccgcgcttgagctggggatgggcgcacgtcccgaagggctgttatttgccattaccacatcaggcagcaacgtcgtttcagcctgtaagcagcactatgattattgctgccagatcctggacggcgaagaggttaacgattcaatttttgtactgatttacgaactggacgacgaaaacgaggttgatgatccggcgatgtggataaaggcgaaccctaatattgatgtttccgtggatcgtgaaaaactggcctcaaccatccagaaagcgcggggtattccgtcgcagtgggtggagatgatgacaaagcgatttaatatctggtgtcaggggactaccccgtggatgggtaacggcgcatgggctgagtgtgccggaacgttcacggaggaagatttacacggctag

SEQ ID NO: 466594 - DNA, 552 bp, Shigella boydii
atgctggtttcccgtcattatctgccggagttccagctacagaaccccgccaataaaaaccgcgccatctatcgtcagtgggctaaagcaggctggatacgcacaacgcctggcgactgcattgattacgaccggatcagagatgacatcatgcaggacgcggagaaatttaatatcaggctggtgggctttgatacgtggaacgccacgcatctcagaacgcaattacagggggcaggttttgaggtggagccgttcccgcaaacctacctcagattaagtccggcggcgaaatcgttcgaagtttttgttaaccgcagggtgattgtgcatcgtggcgatccggtgttgtcctggtcgatgagtaacgtcgtgatgcagagtgacgcgaacgccaatatcaagccgaacaagaaaaaatcaccgaacaagatagacccgagcgtggcggcgctgatggcgtttggtacattccaggcagagcatgaggattttgcttttgatataagcgacagccaccgccagaaactggaagaatttagcggggtgtaa

SEQ ID NO: 466595 - DNA, 282 bp, Shigella boydii
atgacagaagccgaaataacgggattaatccgccgcgttgccggaatcagccagcaggctgacgaacaggccacgcagccggacagcgtgacagccgaaaactatgcgcgtgttgttgctgaggtgatgcgccgtgatggtatagaacttaatggcgtggatatgcgcaacatacgaaccagagttcttgagttgcaggcctaccgtcgccgcgtggagatgtatcgggagaaggagaaaataacgtaccactggaagaagccggagcggttgcggcggtaa

SEQ ID NO: 466596 - DNA, 132 bp, Shigella boydii
atgtttaaaccgcacgttaccgttgcttgcgtagtgcacgcagagggtaaatttttagtcgttgaagagacgattaatggtaagcgttatggaaccaacctgccgggcatctggaagccgatgaaaccttag

SEQ ID NO: 466597 - DNA, 804 bp, Shigella boydii
ttgcaggtggaggctgcattaagaaaagggaaagaaccaccagcctatatacctaaatcggtgagcacgcaaacaaaagcaacacacctggcaatgatcaaggctattctgcgcgccgcagagcgagactggaaatggcttgaaaaagcacctgtaatcaaaatacctgccgtaaaaaacaaacgcgtgagatggctggaaaaagaagaagccaggagactcattgatgcatgttctgatcccctgaaatctgtagttaaatttgcactggcaactggcctgaggagatcaaacattattaatctggagtggcaacaaatcgatatgcagcgacgtgttgcctgggtaaaccctgaagacagtaagtcaaaccgcgctattggggtcgcactgaatgacactgcctgcaaggtgttgcgtgatcaaataggcaaacatcaccgctgggtgtttgtttataccactgctgccagaaggcctgacgggacaatgacaccaagcatcagaaagatgcgcctggactataacacatcgtggttaacagcatgtcgtcgggcaggaattgaaaatttccgttttcatgacctccgccatacctgggccagttggttaattcagtcaggtgtaccactgtcagtacttcaggaaatgggcggctgggagtctatcgaaatggtgcgtaggtacgcacaccttgcacctaatcatttgacagagcacgcgaggaaaattgacgacatattgggtgacgatgtcccaaatttgtcccaccctgaggtttttgaggatgcaaagaaagcataa

SEQ ID NO: 466598 - DNA, 210 bp, Shigella boydii
atgaatggtgccgtggtggataccgacattggctatcccttttcattaagtcttgatcgtaaccgtgaaggaatgcagtcctggcaattgggcgtcaactatcgtttaacgccgcaatttacactgacatttgcaccgattgtgactcgcggctatgaatccagtaaacgagatgtgcggattgaaggcacgggtatcttaggtgtatga

SEQ ID NO: 466599 - DNA, 168 bp, Shigella boydii
atgggcatccgcacatcaattgccttagtactttgcggatttatgctactggcattcgttattatctggttttatccgatcacggataaaaaattcaaagaaatcgtggttgaaattgataatcgtaaaaaagtgcagcagcaattaatcagcgatatcactaattaa

SEQ ID NO: 466600 - DNA, 381 bp, Shigella boydii
atgcgcgaaaaggattatgtcgtaattataggctcggcgaatattgatgtcgccggatattcacatgaatcattaaattatgcggattcaaatccaggtaaaataaaatttacgcctggtggagtcgggcgcaatattgcacaaaacctggcgttgctggggaacaaagcctggctactgagcgccgtaggcagtgacttttatggtcaatcgctgctaacgcaaaccaatcaatctggcgtttatgtcgataaatgcctgattgtgccgggagaaaatacgtctagttatttatcattactcgataataccggtgaaatgctggttgctataaatgacatgaatattagcaacgctattacagctgaatatctcgcatag

SEQ ID NO: 466601 - DNA, 984 bp, Shigella boydii
atgcctaaaaaaatgagaacaacccgtaatctattattaatggctacgctattaggtagcgcactatttgccagggctgcggataaagaaatgaccattggtgcaatataccttgatacccagggatattacgctggagtgcgtcagggcgttcaggatgcggcaaaagattcttcagtacaggtacaattaattgaaactaacgcccagggtgatatttcgaaagaaagtacctttgttgataccctcgtggcgcgtaatgtcgatgccattattttatcggcagtgtctgaaaatggcagtagccgtaccgttcgtcgcgccagtgaagcgggtattccggtgatttgctacaacacctgtattaatcaaaagggtgtcgataaatatgtctcggcgtatctggtcggcgatccactggaatttggtaaaaaactgggtaacgctgccgccgattattttattgccaataaaattgaccagccgaaaattgccgtcatcaattgcgaagcctttgaagtttgtgtgcagcgacgtaaaggatttgaagaagtattaaaatcccgcgttcccggcgcgcaaattgtcgctaatcaggaagggactgttttagataaagcgatttccgttggtgaaaaactgattatctccacgccggatctcaacgccattatgggggagtcgggcggtgcgacactcggcgcggtaaaagcggtacgtaatcaaaatcaggccggaaaaattgctgttttcggttcggatatgacaaccgaaattgctcaggagctggaaaacaatcaggtgctgaaagcggtagtggatatttccggtaagaaaatgggcaatgctgttttcgcgcaaacattgaaggttatcaataaacaagccgacggtgaaaaagtgattcaggtgccaatcgatctctataccaaaacggaagatggtaaacagtggctggcaacgcacgttgatggtctgccctaa

SEQ ID NO: 466602 - DNA, 327 bp, Shigella boydii; identical to SEQ ID NO: 11780

SEQ ID NO: 466603 - DNA, 507 bp, Shigella boydii
atgcaaaaatctattgggcaaccaagtgataacgaagaaactgagttcgaggaagttgaggaagagctaagtaacgagattatccaaaacccagatgcatttactcgcgtgcttgaccgaccagaaattcaggaaattgttgttgctcatcacgcattccagggaccacttccaccaccttatcttcttcgtgggtatcaggatattttacctgatgcccctgaacggattttccagttgacggaaaaagagtttgctcaccgccaaaaaatggaagaaaaggcccttgatggagcgataaaccgggataaacgaggacaattttatggtcttgctgcgactctttttacagtaacatgtgcaaccatattggggctaactggtcacgaaattttggcaggaacagtgatcggtactgttgtcgcagttgcgggtatttttgttcttcgaaaaaaaccaagcactaaaagcaaatctaaaaacgacaataaccacgatgaagaatag

SEQ ID NO: 466604 - DNA, 162 bp, Shigella boydii
atgaaaaaagcatttgctgcactgttcgttttgttgtctctggtggcttcaactcaggcctctgctggtcgttgtcagcacgacagcgatactgccgctgacggctcccgctgcggtgggcgctctgcggattcccgcccaggaggaggtggcattcgttaa

SEQ ID NO: 466605 - DNA, 225 bp, Shigella boydii
atgatgaatctcttcgttacttatcttaacctattagatacctttagtaacccttgcaggtataccaacagcaacagaatctggagcaatgtcagaaataactacactattagctccaattttaacattatttcctataactactttccccagaattttacaacccgatattctagtagccgttatttcagtatgcttaaattcaggtttcctattttggactaa

SEQ ID NO: 466606 - DNA, 717 bp, Shigella boydii
atgggtggaacctttgtcatactctttttgatattatcacgttatcaaaatttaaggatctcactaaaaacttttttggtatccttatgttctctattgcttcttttctccattttgcctgcactcattgaagcgaaatgggcaatgaggaccggtatatctctatcagtatttataagcaatatgagttcatatgttactccagagaattattatgctggcataaactatctgttaaatagatttcaacatgtcggccatttagcgttgatatatgaaaatgcagatgatatatttaaaaaatataacgcaggttattttagctcatattatatggatggcattcctcagtatcttcttgttaagatgtataacttagatatgtataagctcagcttttatcttgttcaatatttctttgatataacagaaccgacttggaatattaacacgggcgtggttggatggctttatatattaaggtatgaatccatactttttgcgttttatataatgttattgttgctggttccttattatgtagttagtagatttgctggtaagagaatgttgagtgttttggcttgcttttctattatttatttatttcacggatggttgggagcctatgttaacttagcattttacgcatgtataataagtctgcttgcaaatataagattatacagaactgtatatattccatgtgagaaatag

SEQ ID NO: 466607 - DNA, 1893 bp, Shigella boydii
atgtgtggattagctggtttccttgaatcaaatttaaatgataataatagtgctaaagttttacattcgatgggtgaatccatataccgaaggggaccagatggtacaggaatatggtttgaaaacattgagaataaaataaatgttggttttgttcatactcgattagctattattgatctctcagacgccggtcaacagccgatgcattctcactgcggtcgttatgtaattgcattcaatggtgaaatatataatcatcttgaactaagatatctattagaaagtaataatcatatttcctggcgtggccattctgatacggaaacgcttttggcatgctttggtatatggggtattgataagacattgcaggcatgtgttggaatgtttgcaatagccttatgggacaaaaaagaacatcggttaacattagcacgtgatagagttggtgaaaaaccgttgtactggggatggcaagatgatgcccttctttttggctcagaattaaaagcgttgaaaactcatccggcatttagtgcagaaataaacagagacgcactttgcttgctattaaggcataactatattcctgcaccacatacaatatatcgagggatccaaaaactacaaccgggccactatctaagtgttgagttatcaaatgatgaaagaaaggagacacttcatcagtactggtcatatgagaaagtagtacaagaaggattagtgaatcctttcatgggatcacctatacaagcagtagaacatcttgagtctttaatcgctcaaagtattaatggacagttaatttctgatgtccctcttggcgcttttcttagtggtggaattgatagtagtctgattgtgtctatcatgcagtctttatcatcatctccagtgaaaacattctctataggatttgatgataaaaaatatgatgaggctatctttgctgttgaagttgcccgtcatttaggtaccgatcacaccgaaatgtacgtaaatgacaaagatatacaggatgttattccacttttgcctgaagtgtattgtgaaccttttgctgatagttctcagttgccaacttttttggtcagtaaaatggcacagcaacatgttaccgtcgcgttgagtggtgatgcaggtgatgagttatttggcggatatacgccatatagctttacgccaaagtattggaattatgcgcgaaatataccattgcaaattagaaaatttgcttctaggtatattgacaaattgccagttaatccgaagtttaaaaaattaatagagtgtatggcagttcagaatccgcagcttttttacaggaatatcattagccattggcttaatcctgaagagttagtcaaaaactcgagtgagccatcaactgcatttagttcatctactacgttccctgtaaatggcggatatgttgactggatgatgtcggtagatgctcaagtctatatgacagatgatattttagtcaaagttgacagggctgctatgtataatagcctcgaaacccgagtgccattattggaccaccgtattatcgaatttgcttggcagttaccggtttctttaaagattaataatggtgtaggtaaatggcctctgcgagaaatactctataaacgagtaccgaaatcaatgattgaacggccgaaaaaaggattctctgtaccgctatcatcgtggttacgcggacctttgcgtgattgggcggaagagttgattgcttataaacgtctcgcagatgaaggatattttaatgttgctgctgtgagaagttgctggaatctgcatatccagggacaggctgactattcaagaaaattatggagcatacttatgtttcaatcatggttagaaaaccagaaatga

SEQ ID NO: 466608 - DNA, 1116 bp, Shigella boydii
atgaaagtcgttcatattataatcgatttgaatgttggtggggcggagctcatgcttcagcgtcttattaagcataccgctgataataatgttgaacatgttgtcatctctcttactgatattggcacactcggtgaggaaattctgaagagtggggtagatgtaaagtgcttaaacattaattccccaattaagtatgccaccagtttattgaagctttataagctatttactaaaattaagcctgatgttgttcatacctggatgtatcacagtgatcttattggtggtatctctgcgaaattagccggcgttaaaaaaataatttggtgtgttagaagtactgacattagtaaaggaggaaacaagcttacgcttctgataagatggttatgcgctaaaatatcatcgtttattcctgatactatcgtttatgctgcaaacgcttcgaaggaagttcatgaacagtgcggttatgataagaataaatcgttggtcattgccaatggatttgatttaactaaactatcgccagataaattttccagaagcgatttaagaaaagaaatcggcttagcagaaaatgatgttgtggtatgttcagttggtcgctatagtccagtaaaagatcactcaacctttatttcagcagctcttcaacttgcagaagaatttagtaatgtacgcttcttattagtcggtcgtggcttgaccacccagaataaaataataatgacacagcttagtgtaagctgtcactcagataaatttattcttcttggtgagcgtagcgatgttcctgcatgtttaaatgcttctgatattttttgccttcattcagtaacagaaggcttccctaatgtcttaggagaagcaatggcaatgggaattccttccgtgacttcaaacgttggtgatgccgcatttttacttgataaggttgattttgttgttccagccggaaactcgtatttattagcacagaaactgcgggaagttattttgttaagtcgaaaaaaccgcactaagttaggtcgtatattaaggctgcgaattgagaatgagttttctatggatactgtagccaataaatatttatccttatataaaaattaa

SEQ ID NO: 466609 - DNA, 1125 bp, Shigella boydii
atgaaaaagattgtttttataatcaataatgtcgatttcttaatatctcatcgattacctatcttactcgaggctcagaaaaatgggtttcaggttcatgtgattgctcctaattccaggaataatgagctactaaagaagcataaaataatgggtcatgatctctttctttccagaggaggtaataaccctttttatgatttatttactttgcttcagcttacaaaaattctgaaatttctcaagcccgaccttgtccatcttgtcacgattaaaccaacactttatggtgggattgctgccagaatcgccaaagtgcctcatgtcgttgcagctgtctctgggctgggaaccgtattcttgagcagaggaatcatcagtggcttacgtcgcttactggttacaaccttgtatcactccgctctgaaacataaaagaatacgcgttatctttcagaaccctgatgatcgtgagttacttgtgagcgcaggcatattaaaggtttccaattcctgtctgatcagaggttcgggggttgatttaagagagtatccttatcttcctgaaaaagttcacggtaagactgtagtaatggcctccaggctactaagggataaaggggtttatgagtttatcgaagccgctcgcttacttaaacaaaggaatgtagaggctgatattagaatcattggttctccagatacctgtaatccgacaagtatcactgaggctgaaataagcaaatgggcatcagaaaatattgttgaattctgtggatttagaagtgacattgctaagcagtactctaatgctaatgtaatatgcttgccctcatatcgagaagggttacctaaatgtctggttgaagccgcagcgtgtggtagggcagttgttacaactgatgtaccaggttgcagggatgcgatagtggcaaatgttactgggatgttagtcgcagttcgggatcctgtatcgttagcagatgcgattgagtttctgctaaaaaatccagatgaaagaataaaaatggggaaggcggggagattgttagctgaaaatgagtactcaatcgaacatatagtgaatcagcacttatccatttacaatgacttaattcactcctga

SEQ ID NO: 466610 - DNA, 351 bp, Shigella boydii
atgcatacctccgagttgctgaaacacatttatgacatcaacttgtcatatttactacttgcacagcgtttgattgttcaggacaaagcgtccgctatgtttcgtctcggcataaatgaagaaatggtgacaacgttagcggcactgactcttccgcaaatggttaagctggcagaaaccaatcaactggtttgtcacttccgttttgacagccaccagacgattactcagttgacgcaagattcccgcgttaacgatctccagcaaattcataccggcatcatgctctcaacacgcttgctgaatgatgttaatcagcctgaagaagcgctgcgcaagaaaagggcctga

SEQ ID NO: 466611 - DNA, 168 bp, Shigella boydii
atgagtcgtttagtcgtagtatctaaccggattgcaccaccagacgagcacgccgccagtgccggtggccttgccgttggcatactgggggcactgaaagccgcaggcggaatgtggtttggctggagtggtgaaacagggaatgaggatcagccgctaaaaaagtga

SEQ ID NO: 466612 - DNA, 2247 bp, Shigella boydii
atgctcactcgcctgcgcgaaatagtcgaaaaggtagccagcgcaccacgcctgaatgaggcgttaaatattctggttaccgacatctgtcttgcgatggatactgaggtctgttcggtctacctggccgatcatgatcgacgttgttactacctgatggcgacccgggggctgaaaaaaccacgcggtcgcactgtaacgctcgcgtttgatgaagggatcgtcggcctggttggcaggctggcggaaccgataaaccttgcagatgcgcaaaagcaccccagcttcaaatacatcccctccgtaaaagaagaacgtttccgcgcgtttttaggcgtaccaattattcaacgtcgccagttgcttggtgtactggtggtacagcaacgagagttgcgccagtatgacgaaagtgaagaatccttcctggtgacgcttgccacccagatggcagctattctttctcagtcgcagttgactgccttgtttgggcaatatcgccagacgcgaatccgcgcattaccggcagcacctggtgtggcgattgccgaaggctggcaggatgccacgttacctttaatggaacaggtgtatcaggcatcaacgctggatccggctctggaacgcgaacgattgaccggggcgctggaagaagcggcaaacgagtttcgccgctacagcaaacgctttgccgccggagcacaaaaagaaacggcggctattttcgatctttactcgcacctgctttcggacacccggctgcgtcgcgaattgtttgccgaggttgataaaggctcggtggcagagtgggcggtaaaaacggtcattgaaaaatttgccgaacagtttgccgcgctaagcgataactatctcaaagagcgggctggcgatttacgtgcgctgggtcagcgattgctgtttcatcttgatgacgctaatcaagggccgaacgcctggccggaacgtttcattctggtggcagatgaactgtcagcgacaactcttgctgagctgccccaggatcgcttagtcggtgttgtcgtgcgagatggcgcagccaactcccatgctgcgatcatggtacgtgcgctggggatccctaccgtgatgggcgcggatattcagccttcggtgctgcatcgtaggacgctgatcgttgatggctatcgcggtgaattgctggtcgatccggagccggtactgctgcaagaatatcagcggctaattagtgaagagattgagcttagccgtctggcggaagatgacgtcaatttacccgcgcagttaaaaagcggtgagcgtataaaagtcatgctcaatgctggtttaagcccggaacatgaagaaaaactgggcagccgtattgatggcatcggtctttatcgcactgaaatcccattcatgctgcaaagtggtttcccgtcggaagaagaacaggtggcgcagtatcaggggatgctgcaaatgttcaatgataaacccgtcaccttgcgtacgctggatgtcggagcagataagcagctgccttacatgccgatcagcgaagagaatccatgcctgggttggcgtgggattcgcattacgctcgatcagccggagatcttcttgatccaggtgcgggcgatgctgcgtgctaatgccgctacgggcaacctgaatattctgttgccgatggtcaccagcctcgatgaagttgacgaagcacgccgcctgattgaacgtgccggacgtgaagtcgaggagatgatcggttacgaaattcccaaaccacgtatcggcatcatgctggaagtaccgtcaatggtatttatgctgccgcatctggcaaagcgggtcgatttcatctctgttggcaccaacgatctgactcaatacattctggccgttgatcgcaacaatacccgggtggcgaacatttatgacagccttcatcctgcaatgttacgagctctggcaatgatcgcccgggaagcggaaatacatggtatcgatctccgtttgtgcggtgaaatagcgggcgatcccatgtgcgtggcaatcctcattgggcttgggtatcgccatctgtctatgaacggacgttctgtagcgcgggtaaaatacctgctgcggcgcattgattttgccgaagcagaaaatcttgcgcagcgtagtctggaagcgcaactggcgaccgaagttcgtcatcaggttgcagcctttatggagcgtcgcggcatgggcgggctgattcgcggagggttatag

SEQ ID NO: 466613 - DNA, 438 bp, Shigella boydii
atgtttgtagaagcattgaaacgccagaacccggcgctgatttccgccgcactaagtttgtggcagcagggcaagatcgccccggacagctgggtgatcgacgtggatcaggtactggaaaacggtaagcgactgattgagacggcgcggctttacggcattgaactgtatctgatgaccaagcagtttggccgtaacccatggctggcggaaaaattgctggcattaggttacagcggcattgtggcggtggattacaaagaggcgcgagtcatgcgccgcgctggtttgtcggtggcgcatcaggggcatctggtacaaatcccttgtcatcaggttgctgacgccgttgaacagggcaccgacgtcatcaccgtgtttactctcgacaaagcgcgggaagtttctgcggcagcggtgaaggccggacgtgtgtag

SEQ ID NO: 466614 - DNA, 267 bp, Shigella boydii; identical to SEQ ID NO: 462029

SEQ ID NO: 466615 - DNA, 306 bp, Shigella boydii
atgcgtttcagtacccagatgatgtaccagcaaaacatgcgtggcatcaccaattctcaggcggaatggatgaagtacggcgagcagatgtcgacaggtaagcgagtcgttaacccttctgacgatcccattgcagcatcacaagccgtagttctctcccaggcacaggcgcaaaacagccagtacacgctgggcgtactttcgccactcaaaaagtgtcactggaagagagtgtacttagccaggtcaccactgctatccagaatgctcaggaaaaaattgtctacgccagcaatggcaccttga

SEQ ID NO: 466616 - DNA, 333 bp, Shigella boydii
gtgcaaaaggccgtgccacgtaactacgatgattcgctgccgggtgacagtaaagcattcctcgcgcaactctcgctgcccgcccaactggcaagccagcaaagcggtgtgccacatcatttgatcctcgctcaggcggcgctggaatctggttgggggcaacggcaaatccgccgcgaaaacggcgagccgagctataacctgtttggtgtcaaagcctctggcaactggaaagggccagttactgaaatcaccacgactgaatatgaaaacggcgaagcgaagaaagtaaaagcgaagtttcgggtctacagctcgtatctggaagcatag

SEQ ID NO: 466617 - DNA, 474 bp, Shigella boydii
atggtggttccgctgcagatcggcgcgcgtgacgttgcgttcccgttcctcaacaacttaagcttctggtttactgttgttggtgtgattctggttaacgtttctctcggcgtgggcgaatttgcgcagaccggctggctggcctatccaccgctatcgggaatagagtacagtccgggagtcggtgttgattactggatatggagtctccagctatccggtataggtacgacgcttaccggtatcaacttcttcgttaccattctgaagatgcgcgcaccgggcatgaccatgttcaagatgccagtatttacctgggcatcactgtgcgcgaacgtactgattattgcttccttcccaattctgacggttaccgtcgcgttgttgaccctggatcgctatctgggcacccatttctttaccaacgatatgggtggcaacatgatgatgtacatcaacctgatttgggcctag

SEQ ID NO: 466618 - DNA, 366 bp, Shigella boydii
atgaggcgcttcgcaggcgcatgtcgtttcgttttcaatcgtgctcttgcacgtcagaatgagaatcatgaggccggtaataaatacatcccttacgggaaaatggcttcctggctggttgagtggaaaaatgccactgaaacgcaatggcttaaagatgccccgtcacagccattgcaacagtcactgaaagaccttgagcgggcttacaaaaacttcttccagaatcgggctgcttttccccgattcaaaaagcggggacagaatgatgtattccgctacccgcagggcgttaagctcgatcaggaaaacagccgtatttttctgccgaaactgggctggatgcgctaccggaacagccgttag

SEQ ID NO: 466619 - DNA, 411 bp, Shigella boydii
atggtcgggctggatgctggcgtggctaaactcgccacgctgtcagatggcacagtctttgagcctgtaaacagttttcagaaaaaacagaagaagctggcgagacttcagcgacagttaagccgcaaggtcaaattcagcaacaactggcagaagcagaaacgcaaaatacagcgactgcattcctgtatcgcaaatatccgcagggactaccttcacaaagtcacaacgaccgtcagcaaaaaccacgcaatgatagtcattgaggatttgaaggtcagcaacatgtcaaagtcagcagcgggtacggtcagcctgccggggcgcaatgtccgggcaaaatcaggtttaaaccgttcgatactggatcagggctggtatgaaatgcgccgccagcttgagtacaagtag

SEQ ID NO: 466620 - DNA, 294 bp, Shigella boydii
atgaaaccaacgacactactgcttattttcacttttttcgctatgccaggcatcgtatacgccgagtcgccttttagctcactgcagtccgcaaaagagaaaactacggtattacaagatttacgtaaaatttgcacgccacaggcgtcattatcagatgaagcgtgggaaaagttaatgttgtcagatgaaaacaataaacaacatatacgcgaggccatcgtggcgatggaacgtaataatcagagcaattattgggaagcgttgggtaaggtagaatgcccggatatgtaa

SEQ ID NO: 466621 - DNA, 159 bp, Shigella boydii
atgcgcgcttatcccgttttgcaccctatctggcaaaagcatttgctgaaactgctgccactggggggattattgaatcagaactggttgccattccagctatgcaaaaacggctggaaaaagaatatcagcaaccgatcagcgggcaactgttactga

SEQ ID NO: 466622 - DNA, 513 bp, Shigella boydii
atgattctggagaaaactgggcgcacctcgcataccctgattctggcccgcgcctcggcgatcccggtactgagcggcctgccgctggatgcgattgcccgttatgccgggcaaccggcggtgcttgacgcccagtgcggcgtgctggcgattaacccgaatgacgcggtgagcggttattatcaggtcgcacagacgctggcggataaacgccaaaaacaacaggcgcaggccgccgcgcagctggcctattcccgtgataacaagcgtattgatattgcggcgaatatcggcaccgctctggaagcgccaggcgcgtttgccaacggcgcggaaggcgttggactgttccgtactgaaatgctctatatggatcgcgacagcgcgccggacgagcaggagcaatttgaagcctaccagcaggtgctactggcagcgggcgacaagccgattatcttccgcacaatggacatcggtggcgataaaagcattccttatctgaatattccctag

SEQ ID NO: 466623 - DNA, 216 bp, Shigella boydii; identical to SEQ ID NO: 21701

SEQ ID NO: 466624 - DNA, 243 bp, Shigella boydii
atgtcgcgtaaaggtcactgttacgacaacgctccgatggaaagcttctggggaacgctgaaaaatgagagcctgagccactatcgttttaataaccgggatgaagccatctcagtaatacgggaatacattgagattttctacaatcgtcagcgtcgtcactctcgtctggggaatatctccccggcagccttcagggaaaaatatcatcagatggctgctaaaaaaaagaacaaatggtag

SEQ ID NO: 466625 - DNA, 267 bp, Shigella boydii
atgacaaacctgacactggatgtaaacattatcgatttcccatcaatccctgtggcgatgttgccgcaccgctgtagccctgagttgctcaactacagtgtggcgaaatttatcatgtggcgtaaagagcggggctttctcctgttaaccaaagccagacttttggcgtcgcctgggacgaccctgccaccaccgcaccgaaagcgtttcgctttgatatctgcggcagcgttagcgaaccgattcccgataatcgttatggtgtga

SEQ ID NO: 466626 - DNA, 177 bp, Shigella boydii
atggcaagcgatctcgccaatgaaggcattacgctgcgctttattttacaactctgtctggcgggcctggcgctgtttattctcgtccagctcgcaaaactctacgcccgacacaaacatgtggatctgtctgcttcgcgccgcagcccgcttactcacccaaaaaatgaaggatag

SEQ ID NO: 466627 - DNA, 252 bp, Shigella boydii
atgttgcgccctgtgctgattgccttcgcggtgggattttcagtcagtattgcgcagtatatgccgacgctgtggctgggcgcggggcgttttccgacgctcaccactgaggcggtggcattaagcagcggcggcagcaacggtattctcgccgcccaggctttatggcaactgttgttaccgcttattatttttgccctgaccgcgttagtcgcaaaatgggtaggttatgtcagacaaggactccgctaa

SEQ ID NO: 466628 - DNA, 651 bp, Shigella boydii
atgcgtaaacaaatcgttgccgataatattcacggtgaaaccggactggatggtccggtattcgagtcgctgacccgccaggcagaaagtacccacgcggtgaaatacatcattgataccctgatggcaagcgatggcgatatcactctggtgccggttggtccgctttcaaatatcgcggtggcaatgcgtatgcaacccgcgagcctgcccaaaatccgtgaaattgtgctaatgggcggcgcttacggtacaggcaacttcacgccatctgccgagttcaacatctttgctgatccggaagcagcccgcgtggtgttcacctccggcgttccattagtgatgatgggcctcgatctcaccaaccagactgtttgcaccccggacgtgattgcacggatggaaagggcaggcggcccggtgcacgacgccacctgcatcggttatctgattaaccctgatggcattaaaacccaggagatgtacgtcgaagtggacgtcaacagtggcccttgctatgggcgtaccgtctgcgacgagctgggcgttcttggcaagcccgctaataccaaagtcggcatcactattgataccgactggttctggggcttagtcgaagagtgcgtgcgcggctacatcaaaacccattaa

SEQ ID NO: 466629 - DNA, 153 bp, Shigella boydii
atgagcgcgctcaactccctgccattaccggtggtcaggctgctggcgttctttcatgaagagttaagcgagcggcgacccggccgcgtgccgcagatcgtgcaactctgggtaggctgcctgctggtgattctgatctcgatgactttttag

SEQ ID NO: 466630 - DNA, 627 bp, Shigella boydii
ttgcgtcatctgtgcccggatttctacggtgcgacttacgagaaaatgggcgaactgggcttcattcagtggccttgccgcgatacttcagatgccgatcaggggacttcttatctgtttaaagagaagtttgataccccgaacggtctggcgcagttcttcacctgcgactgggtagcgccaatcgacaaactcaccgacgagtacccgatggtactgtcaacggtgtgtgaagttggtcactactcttgccgttcgatgaccggtaactgtgcggcactggctgatgaacctggctacgcacaaatcaataccgaagacgccaaacgtctgggtattgaagatgaggcattggtttgggtgcactcgcgtaaaggcaaaattatcacccgtgcgcaggtcagcgatcgtccgaacaaaggggcgatttacattacctaccagtggtggattggtgcctgtaacgagctggttaccgaaaacttaagcccgattacgaaaacgccggaatacaaatactgcgccgtgcgcgtcgagccgatcgccgatcagcgcgccgccgagcagtacgtgattgacgagtacaacaagttgaaaactcgcctgcgcgaagcggcactggcgtaa

SEQ ID NO: 466631 - DNA, 213 bp, Shigella boydii
atgagtgatattatttacttgaccataaccggagaacaacaaggatgtatttcctctctttgtggaacgagcgcatcaataggtaatcgctggcagattggccatgaagatgaaatcttcgcgttctcgctctctaatagtattacgaatgcaggcaaagggtcacaattgcatggccttagtttctgtaaattcttattaacgctatggtaa

SEQ ID NO: 466632 - DNA, 510 bp, Shigella boydii
atgaaaataacgacagtcggcgtatgcataatttgcggaatttttccgttgctgattttgccccaattgcctgggacattaacccttgcgtttctgactctcttcgcctgcgtactggcatttatccctgttaaaaccgtccgttatatcgcgctgacgttgctgtttttcgtttggggcatattatcagcaaagcaaattttgtgggcaggagaaaccttaactggcgcgacgcaggatgcaattgttgagatcactgcaactgacggcatgaccactcattacggtcaaattactcatctacaaggtcgacgtatattccctgcgccaggccttgtgctgtatggcgaatatcttccgcaagcggtttgtgctggacaacaatggtcaatgaaactcaaagttcgtgcagttcatggccaacttaatgatggcggctttgatagccagcgttatgccattgcccagcatcagccgctcatcggccgctttctgcacaagtgtcattga

SEQ ID NO: 466633 - DNA, 216 bp, Shigella boydii; identical to SEQ ID NO: 10294

SEQ ID NO: 466634 - DNA, 957 bp, Shigella boydii
atgagtaaatcacacccgcgctggcgcttagcaaagaagatcctcacctggctgttttttatcgcggtgattgtgttgctggtggtctacgccaaaaaagtggactgggaagaggtctggaaggtcatccgcgactacaatcgcgttgcgctgcttagtgcggtcgggctggtggtcgtcagctatctgatttacggctgctatgacctgctcgcccgcttttactgcggtcacaaactggcgaagcgccaggtgatgctggtgtcgtttatctgctacgccttcaacctgacgctcagtacctgggtcggcggcattggtatgcgctatcgtttgtactcccgactagggttaccgggcagcactattacgcggattttctcgctcagtattaccaccaactggctgggctatattttactggcagggattatctttaccgcaggcgtggtggagttgccggatcactggtatgtcgctcaaactacgctgcgtattctcggcattggcttactgatgattatcgcggtttatttgtggttttgcgctttcgcgaagcaccgccatatgaccatcaaagggcaaaagctggtgctgccttcatggaaattcgccctcgctcagatgctgatttccagcgttaactggatggtaatgggggcgattatctggctgttacttggtcaaagcgtgaactatttctttgtactgggcgtgttactggttagtagtattgctggcgtcatcgtgcatattccggcggggatcggtgtgctggaagcggtgtttatcgcactactggctggggagcatacctcgaaagggagcattatcgccgcgctgctcgcttatcgcgtcctgtattactttatcccgctgctgctggcgctgatctgttacctgctactggaaagccaggcgaagaagctacgggcgaaaaatgaagcggcgatgtga

SEQ ID NO: 466635 - DNA, 948 bp, Shigella boydii
atgagactcaggaaatacaataaaagtttgggatggttgtcattatttgcaggcactgtattgctcagtggctgtaattctgcgctgttagatcccaaaggacagattggtctggagcaacgttcactgatactgacggcatttggcctgatgttgattgtcgttattcccgcaatcttgatggctgttggtttcgcctggaagtctcgtgcgagcaataaagatgctaagtacagcccgaactggtcacactccaataaagtggaagctgtggtctggacggtacctatcttaatcatcatcttccttgcggtactgacctggaaaaccactcacgctcttgagcctagcaagccgctggcacacgacgagaagcccattaccatcgaagtggtttccatggactggaaatggttcttcatctacccggaacagggcattgctaccgtgaatgaaatcgctttcccggcgaacactccggtgtacttcaaagtgacctccaactccgtgatgaactccttcttcattccgtgtctgggtagccagatttatgccatggctggtatgcagactcgcctgcatctgatcgccaacgaacccggtacttatgacggtatatccgccagctacagcggcccgggcttctcaggcatgaagttcaaagctattgcaacaccggatcgcgccgaattcgaccagtgggtcgcaaaagcgaagcagtcgccgaacaccatgtctgacatggctgcgttcgaaaaactggccgcgcctagcgaatacaaccaggtggaatatttctccaacgtgaaaccagacttgtttgctgatgtgattaacaagtttatggctcacggtaagagcatggacatgacccagccagaaggtgagcacagcgcacacgaaggtatggaaggcatggacatgagccacgcggaatccgcccattaa

SEQ ID NO: 466636 - DNA, 660 bp, Shigella boydii
atgaaactgcaaggggtaattttcgatctggatggtgtaatcaccgataccgcgcatctgcatttccaggcgtggcagcagattgccgctgaaattggcatcagcattgatgcgcagtttaacgaatccctaaaagggatcagccgcgatgagtctctgcggcgcattctgcaacacgggggcaaagagggcgactttaactcgcaggagagggcgcaactggcgtatcgcaaaaatctgctctatgtccactcactgcgcgagttgacggtcaacgctgttctacccggcattcgctctttgctggcagatctccgtgcacagcagatcccggttgggctggcttctgtctccctgaatgcgccgacgattttagcggcgctggagctgcgcgagtttttcaccttctgcgcggatgcttcccaacttaaaaactcgaaaccggacccggaaatctttctcgccgcctgtgcagggctgggcgtgccgccgcaggcatgtatcggcattgaagatgtgcaggcgggcattgacgccattaacgccagcggtatgcgctcggtggggatcggcgcgggcttaaccggggcgcaattactgttgccttcaacggaatcactcacctggccgcggttatcggccttctggcaaaacgtatag

SEQ ID NO: 466637 - DNA, 2268 bp, Shigella boydii
atgaccaggccagtaacgttatctgaaccccatttcagccagcataccctgaacaagtatgcatcgctgatggcgcaggggaacggctatcttgggcttcgcgccagccatgaagaagattacacgcgccagacgcgagggatatatctggcggggctgtatcatcgggcgggaaaaggtgaaatcaacgaactggtgaacctgcctgatgtcgtggggatggagattgccataaatggtgaggttttctcgttatcccgcgaagcctggcagcgtgaacttgactttgccagtggagaattacgccgtagcgttgtctggcgtaccagcaacggcacaggttacaccatcgccagccatcgctttgtttcggcagaccaactgccgctcattgtgctggaaatcactattacgccactggacgccgacgcgtcagtgctgatttcaacaggcattgacgccacgcagaccaaccacggtcgccaacatctcgacgaaacccaggtgcgggtgtttggtcagcatctgatgcaggggatctacaccacccaggatggacgcagtgatgtggccatcagctgttgctgtatggtgagcggtgatgtgcagcaatgctataccgccaaagagcgccgtttgcagcaacataccagtgcgcagcttcatgcaggcgagacagtgacgttgcaaaaactggtgtggatcgactggcgggatgacaggcaagccgttttagacgagtggggcagcgcgtcgcttcgccagcttgaaatgtgcgcgcagcagagttacgaccaacttcttgcagtatcaacagaaaactggcgtcaatggtggcagaaacgtcgtatcacggtaaatggcggcgaagcgcacgatcagcaagcgttagattatgcgctttatcatctgcgcatcatgacgcctgcccacgacgagcgcagcagcattgcggcaaaaggcttaaccggcgaaggctacaaaggccacgttttctgggatacagaagtatttttgttaccgtttcatctgtttagcgatccgacggttgcccgaagtttactgcgttatcgctggcacaacttgccaggcgcgcaggagaaagcgcgacgcaacggctggcagggcgcgctatttccgtgggaaagcgcgcgcagcggcgaagaagagacgccggaatttgccgccattaacattcgcaccgggctgcggcaaaaagtggcctcggcgcaggcggaacatcatctggtggccgatatcgcctgggcggttattcaatactggcagaccacgggggatgaaagtttcattgcgcatgaaggcatggcgctacttctggaaactgcaaagttctggattagccgcgcggtgagggttaacgaccgtctggaaattcatgatgttattgggcctgacgaatataccgaacatgtcaataataacgccttcaccagctatatggcgtattacaacgtccagcaggcgctgagtattgcccgccagtttggctgtagcgacgatgcgtttatccatcgcgccgaaatgttccttaaagaactgcggctgccagaaattcagcccgacggcgttttgccgcaggatgattcgtttatggctaagccggcgattaatctggcgaaatacaaagcggcggcggggaagcaaaccattctgctggattattcacgcgcagaagtgaacgagatgcaaatcctcaaacaagctgatgtggtgatgctcaattacatgctgccggagcagttctcagcggcatcgtgtcttgccaatctgcaattttatgaaccgcgcaccattcacgactcttcactgagtaaagcaatccacggcattgttgccgcacgctgtggcctgctgacccaaagttatcagttctggcgcgaggggactgaaatcgatcttggtgctgatccgcatagttgtgatgatggtatccatgctgccgcaactggcgctatctggctgggggcgattcagggttttgccggggtgagcgtgcgtgacggtgaattgcatctcaatccggcgttacctgagcagtggcaacagttgtctttccctctgttctggcagggctgcgaattacaggtcacgctcgacgcgcagcgtattgcgattcgaacttctgcgcccgtttcactgcgtttgaacgggcagcttatatccgtggctgaagaatctgttttctgtttgggtgattttattttgctcttcaatgggaccgctaccacacatcaggaggatgaatga

SEQ ID NO: 466638 - DNA, 1056 bp, Shigella boydii
gtgaaaagtgcaatgacaagctctccgctgcgggtcgcgataataggcgcaggccaggtggcggataaggttcatgcttcgtactactgcacccgcaacgatctggaactggtggctgtctgtgacagccgcctttcccaggcgcaggcgctggcagaaaaatacgggaatgcatccgtgtgggacgatccgcaggccatgctgctggcggtgaaacctgatgtggttagcgtctgctcacctaaccgttttcattacgaacataccctgatggcactggaagcgggctgccatgtgatgtgcgaaaaaccgcccgccatgacgccagaacaggcgcgggaaatgtgcgataccgcgcgcaaactgggcaaggtgctggcctacgactttcaccatcgttttgcgctcgatacgcaacagctgcgtgaacaggtgaccaacggcgttttgggagagatttacgttaccaccgcccgcgccctgcgtcgctgcggcgttcccggctggggtgtctttaccaataaagaactgcagggtggtggcccgctgatcgacatcggcattcatatgctggatgctgcgatgtatgtgctgggctttccggcggtgaaaagcgtgaatgcgcatagctttcaaaagatcggcacgcaaaagagctgtggtcaatttggcgagtgggatccggcaacttacagcgtcgaagattcgctgtttggcaccattgaacttcataacggcggcattctgtggctggaaacgtcatttgcactcaacatccgcgaacagtcgattatgaacgtcagcttttgtggtgataaagccggtgcgacgctgtttccagcacatatctacaccgataacaacggtgaattaatgacgctgatgcaacgggaaatggcagacgacaaccgccatttgcgcagcatggaagcctttatcaatcacgtacagggcaagcccgtgatgatagccgacgccgagcaggggtacatcatccagcaactggtggcggcgttgtatcaatccgcagaaacagggacgcgtgtggaattatga

SEQ ID NO: 466639 - DNA, 789 bp, Shigella boydii
atgaaaataggcacacagaatcaggcattctttccggaaaacattctggagaaatttcgttatatcaaagagatgggcttcgatggttttgagattgacggcaaactgctggtcaacaacatcgaagaagtcaaagcggcgatcaaagaaaccggtttacaggtgaccaccgcctgcggcggctatgacggctggattggtgactttatcgaagagcgtcgtcttaatggcttaaagcagatcgaacgcattctcgaagcgctggcagaagtggggggtaaaggtatcgtcgttccggcagcgtggggcatgtttaccttccgcttaccgccgatgacctcgccgcgcagcctggacggcgatcgtaaaatggtgagtgattccctgcgcgtacttgaacaggtcgccgcgcgtaccggaaccgtggtgtatctcgaaccgttaaaccgctatcaggatcatatgatcaacactctcgccgatgcccgccgttacatcgtcgaaaacgatcttaaacatgtacagattatcggcgatttctatcacatgaatatcgaagaagataacctggcgcaggcgctgcatgacaaccgcgacctgctcggtcatgtgcatattgcggataaccatcgctaccagccgggcagcggcaccctggatttccacgcgctgtttgaacagctgtgcgcggataactatcagggctatgtagtgtacgaagggcgtatccgggcggaagatcctgcccaggcgtaccgtgattcgttggcctggttgcgtacctgctaa

SEQ ID NO: 466640 - DNA, 1053 bp, Shigella boydii
atgaaaaagttagtagccacagcactgcgtgttgctgcgctggttgagtatgaagatcgggcgattttagctaatgaagtgaaggtccgcgtgcgtttcggcgcaccgaagcacggaacggaagtggtcgacttccgcgctgccagcccgtttatcgatgaagactttaacggcgaatggcagatgttcactccgcgtccggcagatgcgccgcgcggcattgagtttggcaaattccagcttggcaacatggtggttggcgacattatcgagtgcggcagcgacgttacagactacgcggtgggcgacagcgtatgcggctacggcccgctctccgagacggtcatcattaacgcagtgaataactacaagctgcgcaaaatgccgcaaggcagctcctggaaaaacgccgtctgttacgacccggcgcagtttgccatgagcggcgtgcgcgatgccaacgtacgcgtaggggattttgtcgtggtggtagggcttggcgcgatcggtcaaattgccatccaactggcgaaacgcgctggcgcatcggtggtaattggcgtcgatcctatcgcccatcgctgtgatattgcccgtcgccacggtgctgatttctgccttaaccccattggcactgacgtaggcaaagagatcaaaacgctgaccggcaagcagggtgccgatgtgattatcgaaaccagcggttacgccgacgcgttgcaatcggcgctgcgcggtctggcctacggtggcaccatctcctatgtcgcgtttgccaaaccatttgctgaaggatttaacctcggacgcgaagcgcatttcaataacgccaaaattgttttctcccgcgcgtgcagcgaaccgaacccggattatctgcgctggagccgtaagcgtattgaagaaacctgctgggaactgctgatgaacggttatctcaattgcgaagatttaatcgacccggtagtgacctttgccaacagcccggaaagctacatgcagtatgtcgatcagcatccggaacagagcatcaaaatgggcgttacgttttaa

SEQ ID NO: 466641 - DNA, 843 bp, Shigella boydii
atggcaacaaataaacgcacactcagtcgcatcggtttttactgcgggctggcgctgtatctcatcatcacgctgtttccattttttgtgatgctgatgacctcgttcaagggcgcgaaagaggcgatctcactgcatcctacgctgctgccgcagcagtggacgctggagcattacgtcgacatttttaacccgatgattttcccgtttgtcgactacttccgtaacagtctggtggtgtctgtggtttcatccgtggtggcggtattcctcggcattcttggggcttacgcgctttcccgcctgcgctttaaaggtcggatgaccatcaacgccagcttttacacggtgtatatgttctctggcattttgctggtggtgccgctgttcaaaatcatcaccgcgctgggcatttacgacactgagatggcgctgatcatcaccatggtgacgcaaactctgcccaccgccgtgtttatgctgaaaagctacttcgacaccatccccgatgagatcgaagaagcggcgatgatggatggcctcaaccgtctgcaaattatcttccgcatcaccgtgccgttggcgatgtccgggctgatatccgtgttcgtctactgctttatggtggcgtggaacgactatctatttgcgtcgattttcctctccagcgccagcaatttcaccttaccggtgggcctgaacgcgctgttcagtacgccagattacatctggggacggatgatggcggcctcactggtgaccgcattgccggtggtgattatgtatgcgctttcggaacgttttattaagagtggtttgaccgccggtggcgtgaagggctaa

SEQ ID NO: 466642 - DNA, 387 bp, Shigella boydii
gtggtgctgttcgccatctggcgctacttcccgtatgcctttatctcgtttctggcgattttgcagaccatcgacaaatcgctgtacgaagcggcagagatggatggcgctaatgcctggcaacggtttcgtatcgtcacgctgcccgcgattatgccggtcctgacgacggtggtgaccctgcgcaccatctggatgttctacatgttcgcggatgtttatttgctgacgaccaaggtcgatattctcggtgtatatctctacaaaaccgcctttgcctttaatgatttaggaaaagcggcggcgatctcggtggtgctcttcatcattattttcgctgtcattctgctgaccaggaaacgggtgaacctcaatggcaacaaataa

SEQ ID NO: 466643 - DNA, 453 bp, Shigella boydii
atgaacaggcttttttcaggtcgttccgatatgccctttgcgctgctgcttctcgcgcccagcttattactgctgggtggtctggtggcctggccaatggtgtcgaatatcgaaatcagttttttacgtctgccgctcaatcccaacatcgagtcaacctttgttggggtgagtaactatgtgcgtatcctctccgatcccggcttctggcactcgctgtggatgacggtctggtataccgcgctggtggtggcgggcagcaccgtgctcgggctggcagtggcgatgtttttcaaccgcgagttccgcctgcgcaaaaccgcgcgttcgctggtgatcctctcctacgtaacgccgtccatttcgctggtgtttgcctggaaatacatgttcaacaacggctacggcattgtgaactacctcggcgtcgatcttctgcatctctatgagtag

SEQ ID NO: 466644 - DNA, 615 bp, Shigella boydii
atgatgcaggcactgacctattaccgcgaccttgctgccaacactatgccgggttctaacgacatcatggaagtgaaagacgcctttatgaacggcaccgcgccgatggcgatttactccacctatatccttccggctgtgattaaagaaggcgacccgaaaaacgtcggtttcgtggtgccaaccgagaaaaactctgcggtctacggcatgttgacctcgctgaccattaccgccgggcaaaagaccgaagagacggaagcagctgaaaaatttgtcacctttatggagcaggcagacaacattgccgactgggtgatgatgtcgccaggtgctgcgctgccggtgaataaagcggttgtcactaccgccacctggaaagacaacgacgttattaaggcgctgggtgaactaccgaatcagctaatcggtgaactgccaaatattcaggtctttggtgcagtaggggataaaaactttacccgcatgggtgatgtgacgggttctggcgtggtgagctccatggtgcataacgtcaccgtgggtaaagccgatctccctggcacgctgcaagcgagccagaaaaagctggatgaactgatcgaacagcactaa

SEQ ID NO: 466645 - DNA, 630 bp, Shigella boydii
atgattaaatcaaaaatcgtgctgttatcagcactggtttcctgcgccctgatttcaggctgtaaagaagaaaataaaacgaatgtatccatcgaatttatgcattcttcggtggagcaggagcgccaggccgttatcagtaaattgattgcccgttttgaaaaagaaaaccttggcatcaccgttaagcaagtgcccgtggaagaagatgcctataacactaaagtcattactctttcacgtagcggttcgttgccggaagtgatcgaaaccagccatgactacgccaaagtgatggacaaagagcagcttatcgatcgcaaagcggttgccacagtcatcagcaacgttggtgaaggcgcgttttacgatggcgtactgcgtattgtgcgtaccgaagatggtagcgcatggaccggtgttcctgtcagcgcctggattggcggtatctggtatcgcaaagatgtgctggcaaaagcggggcttgaggagccgaaaaactggcaacagctgctggacgttgcacagaaactgaatgacccggcgaataaaaaatacggcattgcgctgcctacagcagaaagcgtgttgacggaacaatccttctcccagtttgcgttatccaactag

SEQ ID NO: 466646 - DNA, 429 bp, Shigella boydii
gtgccagcgatatatattcaaagtattcttggctcgcgtaatgattacgcaggtgtcgaaaaactcggatataaccgtgcgattaaccgtaaaaaatatcacagtaaagagataacccgagaactgaacgatgaagctacattaaggcatgcggtatatcatgagttgtcgcgtttaattacacttcgtcgcagccataacgagtttcatccggataataattttaccatcgatacgattaattcatccgtaatgcgtattcaaagaagtaacgctgatggtaattgtctgactggattgtttaatgtcagtaaaaatattcagcatgtaaatattactaatctgcatggtcgggatctgattagtgaagttgatatattgggtaatgaaataacgctgcgtccctggcaggttatgtggattaaataa

SEQ ID NO: 466647 - DNA, 210 bp, Shigella boydii
atgacggatggctggccgctgtatgaatcccgcctgaagggaaagctgcacgtaatcagcaagcgatatacgcagcgaattgagcggcataacctgaatctgagacaacatctggcaaggctgggacggaagtcactgtcgttctcaaaatcggtggagctgcatgacaaggtcatcgggcattatctgaacataaaacactatcagtaa

SEQ ID NO: 466648 - DNA, 216 bp, Shigella boydii
atggcggaaaatcgtgttgaggccaacgcccataatgcgggcggttgcccggcatccaacgccattcatggccatatcaatgattttctggtgcgtaccgggctgagaggcggtgtaagtgaactgcagttgccatgttttacggcagtgagagcagagatagcgctgatgtccggcagtgcttttgccgttacgcaccaccccgtcagtagctga

SEQ ID NO: 466649 - DNA, 441 bp, Shigella boydii
atggtccggcccatctgggctaatgtatttaactctgcactggcaacaataacagcagccattatctatctgtacccttctccactggtgtgtaatgccggcgcctttgttatcggtttctcagcagctggcggcattttacagctcggtgtttcggtcatgtcagagtttttcccaaaaagcaaagccaaagtcaccagtatttatatgatgatgggtggactggctaactttgttattccgctgattaccggttatctgtcgaacatcggccttcaatatatcattgttctcgattttactttcgcgctgctggccctgattaccgcaattattgtttttatccgctattaccgcgtttttattattcctgagaatgatgtgcggtttggcgagcgtaaatttagcacccggttaaacacaattaagcatagaggttaa

SEQ ID NO: 466650 - DNA, 426 bp, Shigella boydii
atggccataagcatcaagggtgttaataccggtgttattcgcaagagtaataatttcattgcactggcgctgaaaattaaagaacctcgcaataaagaatcgttgttctttatgtctgtcatggaactgcgcgacctgctgattgcgctggaaagtcgtctgcatcaaaagcataaactggatgctgctgcacgccttcagtatgagcaagctcgcgataaagtcattaagaaaatggcagaaaacatcccagaaattctggttgatgagcttaaaaatgccgatattaatcgtcgggttaacacgctggaacttaccgataatcaaggcgaaaatcttaccttcgtattaacgctacatgacggtagcaaatgtgagttagtcgtcaatgagttgcagattgaaatgcttgaagtggcacactga

SEQ ID NO: 466651 - DNA, 1212 bp, Shigella boydii
atgggctatcgctattcgacgtcgggtttctacaccctttccgacaccatgtataaacatatggatggctacgaatttaatgacggtgatgatgaagatacgccgatgtggtcgcgttattacaatttgttttacaccaaacgtggcaaactgcaggtcaatatctcccagcaattaggcgattacggttcgttttatttaagtggtagccagcaaacttactggcataccgatcaacaggatcggctattacagtttggctacaacacgcaaattaaagatctctcgctgggggtttcctggaactacagtaagtcccgtggtcaacctgatgctgatcaggtgtttgcactaaatttttccctgccgctcaatctgttgctccccaggagtaatgatagctataccaggaaaaaaaattacgcctggatgacctctaacaccagtatcgataacgaagggcacattacacaaaacctgggtttaacggagacactactcgatgacggtaacctgagctacagcgtgcaacagggatataacagcgaggggaaaacggctaatggtagcgccagcatggactacaaaggggcgtttgcagatgcccgagtgggctacaactacagcgataacggcagtcaacaacaactgaactacgctctttcaggcagtttagttgcccattcacagggcattaccctggggcaatcgctgggggaaactaacgtgctgattgcagcaccaggcgcagagaatactcgtgtggcgaacagcaccgggctgaaaactgactggcgcggatataccgttgtcccctatgccacttcttatcgggaaaatcgaatcgcacttgatgcggcatcgttaaaacgtaacgtggatcttgaaaatgcagtagtcaacgtggttcccaccaaaggggcgttggttctggcggagttcaatgcccatgcgggagcaagggtattaatgaaaatatcaaagcagggtataccgctgcgttttggcgcgatagcgacgctggacggcatacagactaatagcggcattattgatgatgatggctcgctctatatgtccggtttgcccgctcagggagcgataactgtacgctggggcgaagctcccgatcaaatttgtcatatcagttaccagcttaccgaacaacaaattaactctgcgattacgcgaatggatgccatatgcagataa

SEQ ID NO: 466652 - DNA, 138 bp, Shigella boydii
atgaaaaaaagtgtattgacggcgtttataactgtggtatgtgcaacgtccagcgttatggcagctgatgataatgctatcacggatggcaaagtaacatttaatggtaaagttattgctccagcttgtaccctgtag

SEQ ID NO: 466653 - DNA, 1554 bp, Shigella boydii
atggatatcattggcggacaacatctacgtcaaatgtgggacgatcttgcggacgtttacggtcataaaacggcgctgatttgtgaatccagcggcggagtcgttaaccggtatagttatcttgagttaaatcaggagattaaccgcacggcaaacctgttttatacgctggggattcgcaaaggcgacaaggttgcactacatctcgacaactgcccggaatttatcttttgctggttcgggctggcaaaaattggcgcgattatggtgccgattaacgcccgcctgttacgcgaggaaagcgcgaggatcctgcaaaatagccaggcgtgcctgctagtgaccagtgcgcaattctatcctatgtatcaacagattcagcaggaagataccactcaattgcggcacatttgcctgatagatgtggcacttcccgctgatgatggcgtgagttcgtttactcaactgaaaaatcaacaacctgccaccttgtgctatgcaccgccgctatcgactgacgatacggcggaaattctcttcacctccggcaccacctcccgaccgaaaggtgtggtgattacccattacaacctgcgcttcgctggatattactccgcctggcagtgtgcactgcgtgacgatgacgtctacctgacggtaatgcctgcgtttcatatcgattgccagtgtactgcggcgatggcggcgttttctgccggggccacctttgtgctggtcgagaaatacagcgcccgcgccttctggggacaggtacagaagtaccgcgccaccgttaccgaatgtattccgatgatgatccgtaccttgatggtgcagccgccttcagcgaacgatcggcaacaccgcctgcgggaagtgatgttttatctcaacttgtcggagcaggaaaaagatgcgttttgtgaacgcttcgacgttcgcttgctgacgtcttatgggatgacggaaaccattgtgggcattatcggcgatcgccctggcgataaacgacgctggccgtcgattggtcgggcggggttttgctacgaagcggagatccgcgacgatcacaatcgcccgctcccggcaggtgagatcggtgaaatctgtattaaaggcgtaccagggaaaaccatcttcaaagagtattttctcaacccgaaagccactgcgaaagtgctggaagccgacggctggctacataccggcgataccggatactgcgacgaagagggctttttttatttcgtcgatcgccgctgcaatatgatcaaacacggtggcgagaatgtctcctgcgtggagctggaaaatatcatcgccacccatccaaaaattcaggatatcgtggttgtgggtattaaagattcgattcgcgatgaagccatcaaagcatttgtggtgctgaatgaaggtgaaacattgagcgaagaggaatttttccgcttctgcgaacaaaatatggcgaaatttaaagtgccctcttatctggagatcagaaaagatctgccacgtaattgctcggggaaaataattagaaagaatctgaaataa

SEQ ID NO: 466654 - DNA, 477 bp, Shigella boydii
atgagtgaatcattacatctgacccgcaatggatcaattctggaaattacccttgatcgtccaaaagcgaatgctattgatgcaaaaaccagctttgaaatgggcgaagtatttctaaatttccgtgacgatccgcaattacgtgtcgccattattaccggtgccggagagaagttcttttccgcgggctgggatttaaaagcggcagcagaaggcgaagcaccggatgctgactttggcccgggtggatttgcgggattaaccgaaattttcaatctcgacaaaccggttatcgcagctgtgaacggctatgcctttggcggcggtttcgaactggcgctggcggcagattttattgtttgtgccgataacgccagcttcgccctgccggaagccagctgggcatcgttcctgacagcggcggcgtgctgcgtctaccgaagatcctgccgcctgccatcgtcaatgaaatggtga

SEQ ID NO: 466655 - DNA, 309 bp, Shigella boydii
atgaccggcagacgaatgggcgcagaagaggcgctgcgttgggggatagtcaaccgcgtggttagccaggcggaactgatggataacgcccgcgaactggcgcagcagctggttaacagcgccccgctggcgattgcggcgctgaaagagatcttccgcaccaccagcgaaatgccggtagaagaagcgtatcgctatattcgcagctgcgtgttgaaacactatccgtcggttctgcattcggaggatgccattgaagggccgctggcgtttgccgagaagcgcgatccggtgtggaaaggacgttaa

SEQ ID NO: 466656 - DNA, 393 bp, Shigella boydii
gtgagctattacgcctttgaggggttaattccggtggttcacccgacggcgtttgtccatcccagtgccgtcttgattggcgatgtgattgtgggagccggtgtctacatcggcccactcgcctcactgcgtggtgactacgggcggttgatcgtgcaagcgggagccaatattcaggatggctgcattatgcatggctactgcgacactgacaccatcgttggggaaaacgaccatatcgggcacggagcgatcctgcatggttgtgtgattggtcgcgatgcattggtcgggatgaacagcgtgattatggatggcgcggtcattggcgaagagagcattgttgccgccatgagctttgtcaaagcaggctttcacggcgagaaacgctag

SEQ ID NO: 466657 - DNA, 396 bp, Shigella boydii
atgtgtgaaggatatgttgaaaaaccactctacttgttaatcgccgaatggatgatggctgaaaatcggtgggtgatagcaagagagatctctattcatttcgatattgaacacagcaaggcggttaataccctgacttatattctgtcggaagtcgcagaaataagctgcgaagttaagatgatccctaataagctggaaggacggggatgccagtgccagcgactggtaaaagtggtcgatatcgatgagcaaatttacgcgcgcctgcgcaataacagccgggataaattagtcggcgtaagaaagacgccgcgtattcctgccgttccgctcacggaacttaaccgcgagcagaagtggcagatgatgttgtcaaagagtatgcgtcgttaa

SEQ ID NO: 466658 - DNA, 219 bp, Shigella boydii
atgactcgttttgaagcaattaaacaaggccatattaaaattgtggatatatcgatagtatgcaacttcaccgtcgataagtgtgagctaaatcctgcttatgtcatcaaaaatatcgattccccaaaagatttacttaatgggcaaaaaaaacggtcctcatcagagaaccgtattacttattcgatcaaattagcggatgaaaaatatccgccatga

SEQ ID NO: 466659 - DNA, 276 bp, Shigella boydii
ttgactcatcaacatggccccaatgaactggcgcgagcagtgctggaaggcgtgggttatgcgctggcagatggcatggatgtcgtgcatgcctgcggcattaaaccgcaaagtgttacgttgattggtggcggggcgcgtagtgagtactggcgtcagatgctggcggatatcagcggtcagcagctcgattaccgtacggggggatgtggggccagcactgggcgcagcaaggctggcgcagattgcggcgaatccagagaaatcgctcattga

SEQ ID NO: 466660 - DNA, 312 bp, Shigella boydii
atgcctcgttttgcagctaatttatccatgatgttcaccgaagtgccttttattgaacgcttcgccgcagcgcgaaaagccgggttcgatgctgtggaatttctgtttccctatgactactccaccctgcaaatccaaaagcaactggagcaaaaccatctgacactggcgctgttcaataccgctcccggagatattaatgcggggaatggggattatccgcccttcccggacgtgagcacgaagcacacgcagacatcgacctggcactggaatatgcattggcgctcaattgtgaacaagtccatgtga

SEQ ID NO: 466661 - DNA, 243 bp, Shigella boydii
atgtcgcgtaaaggtaactgttacgacaacgctccgatggaaagcttctggggaacgctgaaaaatgagagcctgagccactatcgttttaataaccgggatgaagccatctcagtaatacgggaatacattgagattttctacaatcgtcagcgtcgtcactctcgtctggggaatatctccccggcagccttcagggaaaaatatcatcagatggctgctaaaaaaaagaacaaatggtag

SEQ ID NO: 466662 - DNA, 615 bp, Shigella boydii
gtgattgaagtggagtttgtccatctggcggggctggaaagttatcccggtcagttgacgttacaggatacccccgggccaaatgaagccgggcaaccgcatctgcaaaaaatgcttaaccagcagctggcacgcgcctcggcggtactggcggtgctggattatacgcaactgaaatcgatctccgatgaagaggtccgtgaggcgattttggcggtggggcaatcggtgccgctgtatgtgctggtcaataagttcgatcaacaggatcgtaacagtgacgacgccgaccaggtgcgggcactgatttccgggacgctgatgaaaggctgtattacgccacagcagatatttccggtgtcgtcgatgtggggctacctggcgaatcgggcgcgctatgagttagccaacaacgctgggtggaagattttgcccatgccgcgctcggcaggcgctggcgtcatgccgatctggcggacctcgaacatattcgtcatgctgccgatcagttgtgggaagattctctgttcgcccagccaattcaggcgttgcttcatgccgcttacgctaacgcctcattgtatgctctgcgatctgctgcgcataaactgttga

SEQ ID NO: 466663 - DNA, 576 bp, Shigella boydii
atgtacacacagaccctgtatcagttaagtcaggaggctgaacgcctgttacagctttctcgccaacagttgcagttactggaaaaaatgcctctctctgtacccggagacgatgcggcacaactggctttaccctggagtcagcctaatatcgccgaacgttacgcgatgctgaataatgagttgcgtaaaatttcccgactggaaatggtgctggcgattgtcggtactatgaaagcagggaaatcaaccaccattaatgccattgttggtacggaggttctgcctaatcgtaatcgcccaatgactgcgctgccgacgcttattcgccatacgcccgggcaaaaggaaccggtactgcatttttcacatgtcgcgccaatcgattgtttaattcaacaattacaacagcgcctgcgtgattgcgatattaagcatctgaccgatgtgctggaaatagataaagatatgcgtgcgcttatgcagcggatcgaaaatggcgtcgctttcgaaaaatattatctgggtgcccagcctatttttcattgtctgaaaagtttgaatgatttagtgtga

SEQ ID NO: 466664 - DNA, 354 bp, Shigella boydii
atgcgtgatttccgcttcttcaccgtgctggatgacgatcggcataattatctggagatttccgctattcataatgaagaaggttatcgggagatccgtaaccggttatcgtcgcaatataacttaagtaatctggagccgaatattcagatctggaacgtggatttgcgcggcgaccgttcgctgacgctgcgttacattccacataatcgcgcaccgctggatcgggggcgcaaagaagtgctgaagcatgtgcatcgcctgtggggatttgatgtgatgctggaacagcaaaacgaagatggcagcgtcgagttgctggaacgttgcccgccaagaatgggaaatctgtaa

SEQ ID NO: 466665 - DNA, 528 bp, Shigella boydii
atgccattctatttcaggaaggagtgtccgttaaactcaggctacctcaaaggtcatcgggcattatctgaacataaaacactatcagtaagttggagtcattaccgacagcgcgaaggagatctggcggctatgagatgggaggatataagagatggcaggctatacgtggaacaacaaaaaacaggggcaaaaattcgcatttctctccccaccacgatttccagattgaatttaacacttgccgatgtactggataacttgaaaaaaataaacggtaaaaacgaaaaattactcggagggaagacagccaggacaatcgcagcacagttcaggattgcccgagacacatccggattgaaatgggaaggtgacccaccgccatttcatgaaatccgaagtttatccggtcgcctgcactcagcagaaaaaggcagtgatttcactcaggcgctccttggacatcgttcatccagcatgacggataaataccgtgacggacgagggagggaatggaaagacatttag

SEQ ID NO: 466666 - DNA, 303 bp, Shigella boydii; identical to SEQ ID NO: 458125

SEQ ID NO: 466667 - DNA, 264 bp, Shigella boydii
atggaaaccagcggcaatttcaacgaaccggcagaccatctggcgatctatctcgagttgttgagtcatctgcatttttcgctgggaggggggaccgttcctgcgcgaagaatcgacagtttgcggcaaaaaacactgacggcgctgtggcaatggttaccagagtttgctgcgcgttgccatcagtatgacagctttggtttttacgcggcactaagccagttattgctggtgttagtggagtgcgaccaccaaaacaaataa

SEQ ID NO: 466668 - DNA, 249 bp, Shigella boydii
gtgaaaaatttcctcactgctctttcagatagcatttgctcattatttattgttaatagtaatatggcatcaatctccttggggaatgaatccttttcaacagatgacgaccttgagtatgtttatttaataaacactggcaatcattatgatgtttacctccctcctgaactttttgctcaggcttataagttaaaaaataaggaaatgaatgcgcaactcgactatttaaatcgttatgcaatttaa

SEQ ID NO: 466669 - DNA, 468 bp, Shigella boydii
atgcacgggcatgattatgagcatcatcatcacgatcacgaacatcaccacgaccatggacatcatcaccatcacgaacatggcgagtatcaggatgcccatgcacgagcccatgccaatgacattaaacgacgctttgatggtagagaggtcaccaactggcaaattttgttatttggcttaaccggtggccttatcccctgcccggcagcaattaccatgctgttgatatgcattcagttgaaagccctgacactgggcgcaacactggtcgtcagtttcagcattggcctggcgttaacgcttgtcaccgtaggcgttggcgcagcaatcagcgttcagcaggtcgcaaaacgctggagcggatttaacactctcgctaaacgcgccccctatttttccagtctgttgattggcttagtcggtgtgtatatgggcgtacatggcttcatgggcataatgcgataa

SEQ ID NO: 466670 - DNA, 1398 bp, Shigella boydii
atgccgcgcactgtaacacataatccggatagccccaataatgacgatgttttagccgaatctgaaaaatgggacgcctgtaaacccccctataccagcgcacacatgaaaatctgtgttgctgctgccaaaatcatcctcgctgcttccggcgtggctcgccgttccaaatacgaaaaagagaactatctccgtatcgatttcagcaaagccggtaaggttacattttacgccgagtttccaaaaaagatgggcctcaagggtaaaaagctcggcgagtggccggagctcgctatccagctggcgcgcgaaaaagcgctaggtatggctgactgtggcttgcgggcagagtcagtacatgcagcgctggaaatgtaccgggatgacctcaaagccaaagtcgcccggcagaagctgagcccggacagtttcacaacctacggggtgcgtatcgaccggattaaagcaacgttcggcgagcgtgaggtgttcagcgacgtaacatacaatcggctggtggaagtgctggacgagtggatcgccactcgctcgaacaataacgccctggagttgtttgccgagctccgtcggttctggaagttctgcgcacctactctttgcaacggccgcaatgttgccgccagtctgccagatgattatgtttcctcccgcgtacagaaacctacccccacacggctttttaccgatattgaatcaatcgcccgactctggctcaatgttgctgcctgcacctctgtacaccagaagaatgctgttcgcttcatgatcatcactggcgttcgtccgattaatgtccataacctgcgctgggactacgttcacgaggaggctggtgaaattgtttatccggaaggggttatcggcatgcgaggggctatgaaaacacaaaaggcttcccgcctgccgataacgcctgagatccggcggattatcgacgagcagaaagcctggcgtgattcagttcctgagtgcaacagggattatgtatttttgcagccacgtgatccaatgcagccattttcaaaacgatcactggataagctggtgaaaacatacagcccggacggggctgtaaaaggaataaaacatgatgggactgttaaagggaaagacggtgcatttaatacgatgtgccgtaaattccttaagagcaatgttattgccttgatgaaggaaagaggctattcccgatcagaccgaagggaaatcagcctcctttgccttcaccactccagtaagtcagatgacccgatggcagaacattacgacttttctgatgagattttacaggaagagattgcgttaaagcgcgaagctttcgaggctcacgagcggagcatacttgcgcaggttgcattgctacggcggcgaggttaa

SEQ ID NO: 466671 - DNA, 933 bp, Shigella boydii
atgtttaccgcgattattgccgtatgcattctgtttattattggaattattttcgccaggctctatcgtcgcgcttcggcagagcaagcttttgttcgtactggtttaggtgggcaaaaagtggtgatgagcggtggcgcaatcgtgatgccgatctttcatgaaataatccccatcaatatgaatactctgaagctggaagtcagccgctcaaccattgatagcctgattacgaaagatcgtatgcgtgtcgatgtagtagtcgctttctttgtacgggtaaaaccgtctgtaaaaggcatcgccactgcggcgcagacgttggggcaacgcacgctatcaccagaagacttacgtatgttggttgaagataaatttgtcgatgccctccgtgcaacagctgcacaaatgaccatgcatgagttacaggatacccgcgagaacttcgtgcagggagtacaaaatactgtcgcagaagacctgtcgaaaaacggtcttgagctggaaagcgtttcacttaccaactttaaccagacctcgaaagaacatttcaatccgaacaatgcctttgacgccgaaggtttaaccaaactgattcaggagacggagcgccgtcgtcgcgaacgtaacgaagttgaacaggatgtagaagttgcggtgcgtgagaaaaaccgtgatgcactttcgcgcaagttggagattgaacaacaagaagcgtttatgacgcttgagcaggagcagcaggttaaaacccgtactgccgaacagaatgcacgtattgcggcttttgaagctgaacgtcgtcgtgaagcagagcagacgcgaattctggctgaacgacaaattcaggaaacggagatcgagcgcgagcaggccgtccgctcaagaaaggttgaggctgaacgtgaagttcgtattaaagagatcgaatag

SEQ ID NO: 466672 - DNA, 885 bp, Shigella boydii
atgaatgaacgtgaactgtccattattcgtgccctgggagaagaattcgccacggtgctggcggatttacagcgcacatttgaggagaagatgagcgcgcaggcacaagcgtttgaagagaaactggcttccctgtccgctctgttacagaagcatgtgacggtggatgaggttagccctgttctgcaggcgatggtggatgacgcagtgggggccattccgctaccgcgtgatggtcgcgattatgatccggaagtactgaagcaggcggtgaatgatgcggtcgcgaaaataccggtgccggcagacggcaaaagtatcacccccgatgatgtgcgtccgatgcttgagcagatggtgaaagaggctgtaagccatattcctgttccgcgtgatggtcgtgactacgatccggaagtactgaagcaggcggtgaatgatgcggtcgcaaatattccgcagccggcggacggtaaaagtctcaccccggatgatgtgcgtccgatgcttgaacagatggtgacggaggctgtaagccatatccctgttccgcgtgatggtcgtgactacgatccggatgttctgcagaaggcggttctggatgcggtgagtgccctgccggctccgcaggacgggcgtgatgccacggctctggaaatactccccgccattgacgttcaaaaatcctttccccggggcacgtatgccacacaccagggcggactctggcgggcgtatgaaaaaacgcacgggatgcggggatgggaatgcctggttgacggggtggcggatattgacgtcagcatgacgggtgagcggttgttctctgtggtggtccggcagagcagtggccagcgtacggaaaaacattttccctgccggtga

SEQ ID NO: 466673 - DNA, 462 bp, Shigella boydii
atgcgcaccgataccaacggtaaaggcgttatcaatatcctcagcgccgagaagctttatcagatgccgaaactgtacgccgccagcctgctgtggatgctttcagagttgtatgaacaattgccggaagcgggcgatctggagaaaccaaaactggtgtttttcttcgacgaggcacatctgctgtttaacgatgcaccgcaggtactgctggataagattgagcaggtaataaggcttattcgctcaaaaggcgtgggcgtctggttcgtttcgcaaaacccgtctgatattccggataatgtgctcgggcagctcggtaatcgcgttcaacacgctttgcgggcttttacgcccaaagatcagaaagcggtaaaagctgcggcgcaaaccatgcgggccaatccggcgtttgataccgaaaaggcaatccaggaactggggaccggtgacggaagatga

SEQ ID NO: 466674 - DNA, 627 bp, Shigella boydii
atgagcgaacccctattaattgcccgcacgccggacacagaactttttttactgccgggaatggctaaccgtcacgggctgattactggcgcaacggggacgggtaaaaccgttacgctgcaaaaactggcagagtcattgtcggaaatcggcgtgccggtgtttatggctgatgtgaaaggcgatctgaccggtatcgcgcaggcaggaacggcgtcggaaaaactgctcacaaggcttaaaaatatcggcgtcaatgactggcaaccgcatgctaatccggtggtggtgtgggatatctttggcgagaaaggccatccggtgcgggcgacggtttcagacctggggccgctgttgctggcgcggctgttgaatctcaacgatgtgcaatctggcgtgctgaatatcatcttccgtattgctgacgatcagggattgttgctgctcgactttaaagatctgcgggcgattacccagtacatcggcgataacgccaaatctttccagaatcagtacggtaatatcagtagcgcatcggttggtgccatccagcgcggtttactgtcgctggaaaagcaaggtgcggcgcatttctttggcgagccgatgctggatatcaaagactag

SEQ ID NO: 466675 - DNA, 273 bp, Shigella boydii
atgaactcgcataatattactaacgaatcattggcactggcattaatgctggtggtggtggcaaccttaattagccataaagaaaaactggcgctggagaaagatattttctggagcgtcgggcgcgcgataattcagctgattattgtcggctatgtgctgaagtatattttcagcgtggatgatgccagcctgacattattgatggtgttatttatctgctttaatgcggcgtggaacgcgcaaaaacgggtaatgctgccaacttactga

SEQ ID NO: 466676 - DNA, 600 bp, Shigella boydii
ttgccagtacacctcatactgtacgaaacgggccgggtgaaggaagccgggggcctggcccacgcccgccgaaaaatccatgacgaggatgtgcgccgtccgacagaaatgactcaggaagcgctcagacggatagcagagttatacgacatagaagcggagatacgtggcagtccggcagaggaacggcttgcagtcagaaaagccagaagcgtccagttgatgcagtcattgtacgactggatacagttgcagaggaaaacgctgtcgaaacatgcggagatggcgaaggcgttcgactatatcctgaatcactggaatgcgctgaacgagttctgtcgtgacggctgggtggaaatagacaacaacatcggtgaaaacgcgttacgatcggtggcggttggaagaaaaaattatctctttttcggctcagacaagggaggagaaagtgcggcgatcatctacagtctgctggtcacctgcaaacagaacgaagtggagccggaggactggttgcgcgaagtgatcgagaagctcaatgactggccgtcgaaccaagtgcatgaactgctgccctggaacttctcgtctgtaaaataa

SEQ ID NO: 466677 - DNA, 1110 bp, Shigella boydii
atgcaggcgacggcgcaatgtggcgttcccctggaagtgctggaaaatgcgttgcgtgaaaaaggttacaccacggggcattctccgcagtcaaagccgctggcgcagatgggcggcctggtagcaacccgcagtatcgggcagttctccacactctacggcgcaatcgaagatatggtcgttggtctggaggcagtgttggcagatggcaccgtcacacgcattaaaaacgtgccacgccgcgcggctggcccggacattcgtcacatcatcatcggcaacgaaggtgcattgtgctatatcactgaagtaacagtgaaaatctttaaattcaccccggaaaacaacctcttctacggctatatcctggaagacatgaaaaccggcttcaacatcctgagtgaaatcatggtggaagggtatcgtccgtcgatcgctcgtttgtatgacgctgaagatggcacccaacccttcacccattttgccgacggtaaatgtgtgctgatctttatggctgaaggcaatcctcgcattgcgaaggcgacgggcgaagggattgcggaaatcgttgcccgctacccgcagtgccagcgcgtggacagcaaactgatcgaaacctggtttaacaacctgaactggggaccggataaagttgctgccgaacgtgtgcagatcctcaaaaccggcaacatgggctttaccactgaagtgtccggctgctggagctgcatccacgaaatctacgaaagcgttattaaccgtattcgtactgagttcccgcacgccgacgacatcaccatgctgggcggtcattcctctcatagctatcagaacggcaccaacatgtacttcgtctacgattacaacgtcgttgactgtaagccggaagaggaaatcgacaagtaccacaatccgctcaacaagatcatctgtgaagaaaccattcgcctcggcggttcgatggtgcaccaccacggtatcggtaaacatcgcgttcactggagcaaactggaacacggcagcgcgtgggcgttgctggaaggactgaaaaagcagttcgatcctaatggcattatgaatacgggtactatctatccgattgaaaaataa

SEQ ID NO: 466678 - DNA, 1362 bp, Shigella boydii
gtgatactggttgtctggagattcagggggccagtctacgcagttaccgttaatctcaataaaatcggttttaattttactaccgatcaactctttttattaaccgcattaccctccgtttctggcgcattattgcgtgttccctactcctttatggtgcctatattcggtggacgccgatggacggtttttagtactgcaatcctgattattccttgcgtctggctcggaattgccgtgcaaaatccgaatactccttttgggatatttatcgttatcgctttgctatgcggttttgcaggtgcaaactttgcttcgagcatgggcaatatcagtttcttctttccaaaagccaaacaagggagcgctcttgggattaatggcggattaggaaacttaggtgtaagtgtaatgcagctggttgcaccgctggtcatttttgtacctgtatttgcctttctcggcgtcaatggcgtaccgcaggccgacggttcggtgatgtcgctggcgaatgccgcatggatttgggtaccgctactggcgattgccacgatcgccgcatggtcagggatgaatgatatcgccagttcacgcgcctcaattgccgaccagctccctgtcttacaacgcctgcatctctggctgctgagcctgctttaccttgccaccttcggttcgtttatcggtttttctgcgggttttgccatgctggcaaaaacccagttcccggatgtgaatattctgcgcctggcgttctttggcccatttatcggtgccatcgcgcggtcggttggtggtgctatttccgataagttcggcggcgtgcgggtgacgttgatcaactttatttttatggcgattttcagtgccctgctgttccttaccttaccgggcacaggctccggtaatttcatcgccttttacgccgtatttatggggctgtttctgactgcgggtctgggaagtggttctactttccagatgatcgccgtcatctttcgccagataaccatttatcgggtaaagatgaaaggcggtagtgatgagcaagctcagaaagaagccgtcaccgaaacggcggcggctctgggctttgggctttatctcagccattggcgcagtgggcggcttttttattccgcaggcgtttggcatgtcgctcaatatgaccggctctccggtcggcgcgatgaaagtgtttttaatcttctacatcgtttgtgtgctgctgacctggctggtttatggtcggcggaagttcagccaaaaataagagatcgatgcctgatgtacaaccgtgtcgcatccgacaaggcatcagatcccaattcattcctggagcaggagtcatgtcatgagtaa

SEQ ID NO: 466679 - DNA, 3741 bp, Shigella boydii
atgagtaaacttttggatcgctttcgctacttcaaacaaaagggcgaaacctttgccgatggtcacggacaggtgatgcatagcaaccgcgactgggaggacagctatcgccagcgttggcagttcgacaaaatcgtgcgttccacccacggtgttaactgtacaggctcctgtagctggaaaatctacgttaaaaatggtctggtgacctgggaaatccaacagaccgactacccgcgcactcgccctgacctgcccaatcatgaacctcgcggctgcccgcgtggcgcaagttactcctggtatctttacagcgctaaccgcctgaaatacccgctcattcgtaaacgactgattgaactgtggcgcgaagccctcaagcaacacagcgatccggtactggcgtgggcatcgattatgaacgatccgcaaaagtgcctgagctacaaacaagtgcgtgggcgcggcgggtttatccgctccaactggcaggaactaaaccagctgattgccgccgctaacgtctggaccatcaaaacctacggcccggatcgcgttgccggtttctcgccgatcccggcgatgtcgatggtttcttacgccgccggaacgcgttatctgtcgctgcttggcggcacctgtttaagtttctacgactggtattgcgacctgccgcccgcctcgccgatgacctggggcgagcaaaccgacgtaccggaatctgccgactggtataactccagctacatcatcgcctgggggtctaacgtaccgcagacacgtacgccggacgcccacttctttaccgaagtacgctacaaaggcactaaaaccatcgccattacccctgactactctgaagtggccaaattgtgcgaccagtggctggcaccgaaacaaggcactgatagcgccctggcgatggcaatgggccatgtgattttaaaagagtttcatctcgataatcccagcgactactttatcaactactgccgccgctacagcgacatgccgatgctggtaatgctggagcctcgcgacgatggtagctacgttcccgggcgcatgttccgcgcatctgacctggtggatggactgggcgaaagcaacaatccgcagtggaaaaccgtagcagttaataccgcaggtgaattggtagtgccgaacggttcgattggtttccgctggggagaaaaaggcaaatggaatctggaatccattgccgccggtacggaaaccgaattgtcgttaaccctgctcggtcaacatgacgctgttgcaggcgtggctttcccctactttggcggcattgaaaatccgcattttcgcagcgtaaaacacaatccggtgctggtgcgccaattgcccgttaaaaacctgacgttagtcgatggcaacacctgtccggtggtcagcgtttatgatttggtactggcgaattacggcctcgatcgcgggctggaagatgaaaacagtgcgaaagattacgctgaaatcaaaccgtacaccccagcctggggtgagcaaattaccggcgtgccgcgccagtatattgaaaccatcgctcgtgaatttgccgatactgcccataaaacgcatgggcgctcaatgattatcctcggcgctggcgtcaaccactggtatcacatggatatgaactaccgtgggatgatcaatatgctgatcttctgcggttgtgtcgggcaaagcggtggcggctgggcacactatgtcggtcaggaaaaactgcgcccgcaaaccggctggttgccgctggcctttgcgctcgactggaaccgaccaccacgccagatgaacagtacctcgtttttctacaatcattccagccaatggcgctatgaaaaagtctctgctcaggagttactttcaccgctcgccgatgccagtaagtacagcggtcatctgattgatttcaacgttcgcgccgaacgtatgggctggctaccttctgcgccgcagctggggcgtaacccgctcgggattaaagctgaagccgacaaggccggattatcccccacagaatttaccgcccaggcgctgaaatcgggcgatttacgtatggcctgcgaacaaccagatagcggcagcaatcatccgcgtaatttgtttgtctggcgctctaacctgcttggctcctccggcaaaggccacgagtatatgcagaagtatctgctggggaccgaaagcgggattcagggcgaggaactcggtgccagcgacgggatcaaaccggaagaagtcgagtggcaaactgcggcgattgaaggcaagctcgacctgctggtgacgctcgacttccgcatgtccagtacctgcctgttctccgatatcgttctgcccaccgccacctggtacgaaaaagacgatatgaacacctcggatatgcatccgtttattcatccgctttctgcggcggtcgatccggcgtgggaatcacgcagcgactgggaaatctacaaaggtatcgccaaagcattttcgcaagtgtgcgtgggtcatcttggcaaagaaaccgacgtggtattacaacccctactgcatgactctccggcagagctctcacagccgtgtgaagtgctcgactggcgcaaaggcgaatgcgatctgattccaggcaaaaccgcgccgaatattgtggcggtggagcgcgactaccctgctacgtatgaacgctttacctcgctcgggccattgatggacaaacttggcaatggcggtaaagggatttcgtggaatacccaggatgaaatcgatttcctcggcaaactcaattacaccaagcgtgatggcccggcacaggggcgtccgctgattgacaccgccattgacgcttcagaagtgattctggcactggcaccggaaaccaacggtcatgttgcagtcaaagcgtggcaggcgctgggcgagatcaccgggcgcgaacatacccatctggcgctgcacaaagaggacgagaagattcgctttcgcgatattcaggcgcagccgcgtaaaattatctccagccccacatggtccggtctggaaagcgatcacgtctcctataatgcgggatacaccaacgttcatgagttaactccgtggcgcacgctgtcgggacgccagcagctctatcaggatcatccgtggatgcgtgcttttggtgaaagcctggtggcttatcgcccgcctatcgacacccgtagcgtcagtgagatgcgccagatcccgccaaacggcttcccggaaaaagcacttaacttcctgacgccgcaccagaaatggggcattcactcaacctacagtgaaaacctgctaatgctgacgctctctcgcggtggaccgattgtctggatcagcgaaaccgatgcacgagaactgaccattgtcgataacgactgggtggaagtctttaacgccaacggcgcgctgacggctcgtgcggtggtcagccaacgtgtaccgccgggtatgaccatgatgtatcacgcccaggaacgcattatgaatattcctggttcggaagtaactggcatgcgcggcggcattcataactcggtcacccgtgtttgcccgaaaccgacgcatattattggcggttacgcgcagctggcctggggctttaactactacggcaccgtcggctcgaaccgcgacgaattcatcatgatccgcaagatgaagaacgttaactggctggatgatgaaggtcgcgatcaggtacaggaggcgaaaaaatga

SEQ ID NO: 466680 - DNA, 1545 bp, Shigella boydii
atgaaaatacgttcgcaagtcggcatggtgcttaacctcgacaaatgtatcggttgccatacctgttcggtgacctgtaaaaacgtctggaccggacgcgaaggcatggagtacgcatggtttaacaacgtcgaaaccaaaccgggcattggttatccgaaaaactgggaagatcaggaagagtggcaaggcggctgggtccgcgatgtgaatggcaagatacgcccgcgtctgggcagcaagatgggcgtaataaccaaaatcttcgccaacccggtggtgccgcagattgatgattactacgaacctttcaccttcgactacgaacatttgcatagcgcaccggaaggcaaacatatccctactgctcgcccgcgttcgctgattgacggtaagcggatggacaaagtgatctgggggccaaactgggaagaactgctgggcggagagtttgaaaaacgtgcccgagaccgcaacttcgaggccatgcaaaaggagatgtacgggcagtttgaaaacaccttcatgatgtacctgccgcgcctgtgtgaacactgcctcaatcccagttgcgtggcgacctgcccaagcggcgctatctacaaacgcgaagaagacggcattgtgctgattgatcaggataaatgccgtggctggcgtttgtgcattagcggttgtccgtacaaaaaaatctacttcaactggaaaagcggcaagtcagaaaaatgtatcttctgttatccgcgaattgagtcaggccaacccaccgtgtgctcagaaacctgcgtgggtcgcatccggtatctgggcgtgctgctttacgacgccgaccgcattgaggaagcggcgagcaccgagcgcgaagttgacctctatgaacgtcagtgcgaagtgttcctcgatccacacgatccctcagtgatcgaggaagccctgaaacaaggtattccacaaaacgtgattgaagctgcccagcgttcgcctgtctacaaaatggcgatggactggaaactggcgctaccgctgcaccctgaatatcgcaccctgccaatggtctggtatgttcctccgctgtcaccgattcagtcctacgcagatgcgggcggtttgccgaaaagcgaaggcgtgctgcccgccatcgaaagcctgcgtattccggtgcaatatttcgccaatatgttgagtgccggcgataccggtccggtactgcgggcgctgaaacggatgatggcgatgcgccactatatgcgttcacaaaccgtggaaggcgttactgatactcgtgccatcgacgaagtaggcctgagcgtcgcccaggtcgaagaaatgtatcgctatctcgccattgccaactatgaagatcgttttgttatcccgaccagccatcgggaaatggcgggcgatgccttcgcagaacgcaacggctgcggttttacctttggcgacggttgtcacggctcggacagcaaattcaacctgttcaacagtagccgtatcgatgccatcaacatcaccgaagtgcgcgacaaagcggagggcgaataa

SEQ ID NO: 466681 - DNA, 696 bp, Shigella boydii
atgcagatcctcaaagtgatcggcctgttgatggagtatccggatgagctgttgtgggaatgcaaggaggacgcgctggcgttgatccgccgcgacgcgccgatgcttacggatttcacccacaacctgcttaacgcgccgctgctggataaacaggccgaatggtgcgaagtgtttgaccgcgggcgcaccacgtcgctgctgctgttcgaacatgttcatgccgagtcccgcgatcgcggccaggcaatggtggacctgctggcggagtatgaaaaggtcggcctgcagctggattgtcgggaactgcccgattatctaccgctgtatctggagtatttaagcgtactgcctgacgatcaggcgaaagatggattgctcaatgttgcgccgatcctcgccctgcttggcggtcgcttaaaacaacgcgaggcaccgtggtacgcgttgtttgatgctctgctgcaactggcgggaagtacacattcaagtgacagtgtcacaaaacaagtaaacagcgaagagcgcgatgacacccgccaggcgcttgatgcagtgtgggaagaggaacaggtgaagtttattgaagataacgccacggcgtgtgacagctcgccgcttaatcaatatcagcgacgctttagccaggatgtcgcgccgcagtatgtcgacatcagtgcgggaggtgggaaatga

SEQ ID NO: 466682 - DNA, 681 bp, Shigella boydii
atgattcagtatctgaacgtctttttttacgatatctacccgtacatttgtgcgacggtgtttttcctcggcagctggctgcgctacgactacgggcagtacacctggcgcgcctcctcaagtcaaatgctcgataaacgcgggatggtgatatggtcgaatctgttccatatcggcattttggggattttcttcgggcacttgttcggcatgttaacgccgcactggatgtacgcgtggtttttgccagtggcagcgaaacaactcatggcgatggtgctcggcggtatttgcggtgtgttgacgttgattggcggcgcaggactgctgtggcgcaggctgacaaatcagcgcgtgcgtgccacttccactacgccggatatcatcatcatgagcattttgctgatccagtgtctgttggggctaagtaccataccgttttcagcacagtatcctgatggtagcgaaatgatgaagctggtgggttgggcgcaaagcattgtcactttccgtggtggatcgtcagagatgctcaacggcgtagcgttcgtcttccgcctgcatctggtgttgggaatgaccatcttcctgctcttcccgttcacccgactggtgcatgtgtggagcgcgccgtttgagtactttactcgtcgatatcaaattgtgcgttcgcggcgataa

SEQ ID NO: 466683 - DNA, 894 bp, Shigella boydii
atgaaaccgcaggtgtaccacgtcgatgcttttacctctcaaccatttcgcggcaattctgccggtgttgttttccccgccgataatcttagcgaagcgcaaatgcagcttatcgcccgcgagttaggccattcggaaactgcttttctgctgcacagcgacgacagcgatgtgcgcatccgctactttacgccaacggttgaagtgccgatttgcggtcacgcgacagtagctgcgcactatgtacgtgcgaaggtgttaggtttaggaaattgcacgatctggcaaacatcgctggcaggaaaacatcgcgtgactatcgaaaagcacaacgatgattatcgtatttcgctggaacaaggtacgccgggctttgaactgccgctggagggtgaagtacgcgcggcgattatcaacgcattgcatcttactgaagacgatattctgccgagtttgccgatccaggtcgcgacgaccgggcattctaaagtgatgatcccattgaagccggaagtggatatcgacgctctttcgcctgaccttaatgcgctgaccgctatcagtaaacagattggctgcaatggtttcttcccgttccagatccgtccaggcaaaaacgaaaccgatggtcgtatgttctcgcctgcgattggtattgtggaagatccggtgactggcaatgccaatggcccgatgggtgcatggttggtacatcacaacgtattgccccacgatggcaaggtgctgcgtgttaaaggcaatcaggggcgcgcattggggcgtgacggcgtgattgaagtgacggtgacaattcatgataaccaaccggaaaaagtcaccatttctggcgcggcggtgattttgtttcatgccgaatgggcaattaaactctga

SEQ ID NO: 466684 - DNA, 846 bp, Shigella boydii
atgacgcccattctgaatcactattttgcccgtattaactggtcgggagctgctgcagtcaatattgatacgcttcgagcattgcacctgaaacacaattgtaccattccgtttgaaaacctcgacgttttgctgccgagggaaatacagcttgatgatcaatcgctggaagagaaactggtgatagcccgtcgtggcggttactgttttgagcagaatggcgtgtttgagcgggtgttacgcgagctggggtttaacgttcgcagcttgttagggcgcgtagtgttatcaaatccgccagcattaccgccgcgcacccatcgtttgctgttggtggaactggaagaggaaaaatggattgctgatgtcggtttcggtgggcagacgctaaccgcgccgattcgtttagtttccgagctcgtgcagaccacgccacacggagagtatcggttgttgcaggagggtgatgattgggtgttgcagtttaatcatcatcagcactggcagtcgatgtaccgttttgatctctgcgagcagcaacaaagcgattatgtgatgggcaatttctggtcggcgcactggccgcagtcgcattttcgccatcatttgctgatgtgccgccatttgccggacggcggcaagctgacactgaccaattttcattttacccattatgaaaatgggcacgcggtggagcagcgaaatctaccggatgtggcgtcgttatatgctgtgatgcaagaacagtttggtctgggcgtggatgatgcgaaacatggctttaccgtggatgatttagcgctggtgatggcggcgtttgatacgcacccggaggcgggaaaataa

SEQ ID NO: 466685 - DNA, 570 bp, Shigella boydii
atgagccgattcatccccatagaattacaccatgccagccgtctgttaaatcatggcccaactgtcttgatcaccagtttcgatgagcaatcccagcggcgtaacattatggctgcagcctggtcaatgccggtggagtttgaaccgccacgcgtggcgattgtggtagataaatcggcatggaccagggagttgattgaacgtaacggtaaatttggcatcgttatcccgggcgttgcagcaactaactggacgtgggcggtgggaagtgtgtcggggcgtgatgaagataaatttaattgctatggcattccggttgtgagaggcccggtattttgtttgcctctggtcgaggaaaaatgtctggcatggatggagtgtcacctgctacctgcgacttctgcgcaacaaaaatacgacacgctgtttggcgaggtggtatcagcagcggcagacgcacgggtatttgtcgaaggccgctggcagtttgatgatgataagctcaatacgttgcatcatttaggtgctggcacgtttgttactagcggcaagcgtgttacggcaggttaa

SEQ ID NO: 466686 - DNA, 228 bp, Shigella boydii
atgccgcacatcgacattaaatgctttccgcgtgaactggacgaacaacaaaaagcagcacttgctgcagatattaccgacgttattattcgccatctgaacagtaaagatagctcgataagcattgctctacagcagattcaaccagaatcttggcaagctatctgggatgccgaaatcgagccccaaatggaggctttgataaagaaacccggttacagcatgtaa

SEQ ID NO: 466687 - DNA, 276 bp, Shigella boydii
atgaaaaaggttctgtttgccttatctgcgcttgcgctgacctcaacttccgtattcgcagctgatgcgggcgacggtactgttaaattcactggtgagattgttgacgccgcttgtgttgtgtctccagacactcaaaaacaagaagttgttctgggacaggtgaacaagtctgtgtttactgctcctggtgataaatccacagcaactccgttcaaaatcaaactggaaaactgcgatatctccacatttcaaaaatgtggaaatcagctttaa

SEQ ID NO: 466688 - DNA, 414 bp, Shigella boydii
atgatggcggcaagtaaagaagcgtcgctgaccgttgaaaaccataataaaaatgaagagtttttgattcagtcatggattgatgacgtgaatggcaataaaaaaacaccatttattattacaccgccgttattcaaacttgatcctgataaaaataacgtcttacgtatcgtcaatattgaagatactttacctaaagatcgtgaatccgtttactggattaatgtaaaagccattcctgcgaaaagcgctgaaaatgaaaataaaaacgtcttacagatagccgtgcgcacccgtctgaagttgttctaccgtccaaaaggtttgccgggaagcaacctcgaggcaatgaaacagttacgtttccaacgtcaaaataaccaaattgtggttaataacggctccgcttattga

SEQ ID NO: 466689 - DNA, 780 bp, Shigella boydii
atgaagaatactaaattactgctggcgattgcgacctctgcagcattactgacagggtgtcaaaatacccacggtattgataccaatatggctatcagctccggtttaaatgcctataaagcagcaacattaagcgatgccgatgcaaaagcgattgccaatcagggctgtgccgaaatggacagcggcaatcaagtcgcaagtaaatccagcaagtacggtaaacgtctggcaaaaatcgccaaagcattgggtaacaatattaatggcacgccggtcaactataaggtttatatgaccagcgacgtcaacgcatgggcgatggcgaacggctgtgtccgtgtctacagtggcctgatggacatgatgaatgacaacgaaattgaaggtgttctgggccatgaactgggccacgtcgcgttgggtcactcgctggctgaaatgaaagcttcttatgcgatcgttgccgcacgcgatgccatttcagctaccagcggtgtggcttcccagctttcccgctcacaattgggtgatatcgcagaaggcgctattaatgctaaatactcccgtgataaagagtccgaagcagatgatttctcctttgatctgttgaagaaacgtggcatcagcacccaggggctggttggcagctttgaaaaactggctagtctggatggcggtcgcacccagtccatgtttgactctcacccaccatcaacaaagcgtgcgcaacacatccgtgatcgtatcgcctctggggtaatgactccaacttactga

SEQ ID NO: 466690 - DNA, 963 bp, Shigella boydii
ttgcctgctattgaacgcgccagttggttgcgcaaaatctccgccgggatccgcgaacgcgccagtgaaatcagtgcgctgattgttgaagaagggggcaagatccagcagctggctgaagtcgaagtggcttttactgccgactatatcgattacatggcggagtgggcacagcgttacgagggcgagattattcaaagcgatcgtccaggagaaaatattcttttgtttaaacgtgcgcttggtgtgactaccggcattctgccgtggaacttcccgttcttcctcattgcccgcaaaatggctcccgctcttttgaccggtaataccatcgtcattaaacctagtgaatttacgccaaacaatgcgattgcattcgccaaaatcgtcgatgaaataggccttccgcgcggcgtgtttaaccttgtactggggcgtggtgaaaccgttgggcaagaactggcgagtaacccaaaggtcgcaatggtcagtatgacaggcagcgtctctgcaggtgagaagatcatggcgactgcggcgaaaaacatcaccaaagtgtgtctggaattggggggtaaagcaccagctatcgtaatggacgatgccgatcttgaactggcagtcaaagccatcgttgattcacgcgtcattaatagtgggcaagtgtgtaactgtgcagaacgtgtttatgtacagaaaggcatttatgatcagttcgtcaatcggctgggtgaagcgatgcaggcggttcaatttggtaaccccgctgaacgcaacgacattgcgatggggccgttgattaacgccgcggtgttggaaagggttgagcaaaaagtggcgcgcgcagtagaagaaggggcgagagtggcgttgggtggcaaagcggtagaggggaaaggatattattatccgccgacattgctgctggatgttcgccaggaaatgtcgattatgcatgagtaa

SEQ ID NO: 466691 - DNA, 216 bp, Shigella boydii; identical to SEQ ID NO: 21701

SEQ ID NO: 466692 - DNA, 216 bp, Shigella boydii; identical to SEQ ID NO: 21701

SEQ ID NO: 466693 - DNA, 174 bp, Shigella boydii; identical to SEQ ID NO: 262397

SEQ ID NO: 466694 - DNA, 393 bp, Shigella boydii
atggtaaaggaacgggtgtatagcctgaaacagtccgttattgatactgcttttgcggtggcaaatattgctgaatatcggcgtagcgtggcaattgatcttatcaacacgctaaatcccacggaggaacagctgttggttggtttgcgcacagcttacgccgactcggtttccccctcttatttgtacgatgtcggtccttatctgatttccagtgacgaatgtattcaggtaaaggagttcgagaaaaattattgtgcagatattatgcaggttgtgaagtatcgacatgtcaaaaatacagggtttatctcttttgacggtaaaaccttcgtctattacctctatccggtaactcacaatcgtagtctgatatttttgcttggtctgtag

SEQ ID NO: 466695 - DNA, 216 bp, Shigella boydii; identical to SEQ ID NO: 21701

SEQ ID NO: 466696 - DNA, 309 bp, Shigella boydii
atggaaaattcacgcatctctggggaacatttttttaccaccagtgataatacagcgttgttttatcggcactggcccgctttacagccaggggcgaaaaaggtcattgtcttatttcatcgtggccatgaacattctggtcgtctacaacatatcgttgatgaactggcgatgccagatactgctttttatgcatgggatgcccgggggcatggaaaaacttcggggccgcgtggttatagcccatctcttgcgcgttcagtgcaggatgtcgatgaatttgtccgttttgctgccagcgacagctag

SEQ ID NO: 466697 - DNA, 579 bp, Shigella boydii
atgcggaatggtgatgagaatgctgatgacattgcagggcgcttcaccgggacgtataccggagctgatgcgcgatcttgcaagtatgggacaacttgtgaaattaccgacgagaaggggaagggccttcccgagagtggtaaaggagaggccctggaaataccccacagccccgaaaaagagccagtcagttgcttaactgactggcattacagccagagcctgcgttttcataccaacgcgccgctggtcaatcagccggaactggcgaccttcgcggtaacggatgaggcgatttccagcgaacagctcaacgctctttccagcggcaccgctgttgcgccggaagcgggcgcgacgctgattttacaggtcgtcagcctgagcggcgggcgcatgctgcgccttactggcgcgggtattgccgaagaacgaatgatcgctccgcagctgccggagtgcattctgcacgaactcaccgagcgcccgcacccgttcccgctcggcatcgacctgatcctgacctgcggcgagcggctgctggctatcccgcgaaccactcatgtggaggtgtgctga

SEQ ID NO: 466698 - DNA, 165 bp, Shigella boydii
atgctgaaaacaatttcgccgttaatttctcccgaactattgaaagtgctggcacagatgggacatggagatgaaattattttttccgatgctcactttcccgcccattcgatgggaccgcaggtgatccgcgctgatggcctgttggtgagcgacttgctctag

SEQ ID NO: 466699 - DNA, 654 bp, Shigella boydii
gtggcgtatgaaaccacctcgtttgttaaagcctccattgaagacgtggtgaaaacgctgctggaagctatcgccctggttttcctcgttatgtatctgttcctgcaaaacttccgcgccacgctgatacccactatcgccgtgccggtggtgttgatgggaaccttctccgtactttacgccttcggttacagcgtcaacaccttaaccatgttcgcgatggtactggcgatcggtctgctggtggatgacgcaatcgtggtggtggaaaacgtcgaacgtattatgagtgaggaaggactcactcctcgcgaagacacacgtaaatcgatggggcagatccagggggcactggtcgggattgcgatggtgctttcggcggtatttgtaccaatggccttcttcggcggcaccaccggtgccatctatcgccagttctctattaccattgttgcggcgatggtgctgtcagtactggtagcgatgatcctcactccggctctgtgtgccacactacttaagccactgaaaaaaggtgagcatcacgggcaaaaaggcttttttgcctggtttaaccagatgtttaaccgcaacgccgaacgctacgaaaaagggtggcgaaaattctccaccgcagcctgcgctggattgtga

SEQ ID NO: 466700 - DNA, 198 bp, Shigella boydii
atgaaaaaacttgggcagtccctaaatgaagggaccaacagcggtaaaataaccggcatcattcataatgatgccctgttagttgtaattatgaagatttacgtcattaaaattgctgttcgtagtgtcagtcctatggtctggcatcagctgaggatcgtagccgatacatcactggcttcacgacattcgtgttga

SEQ ID NO: 466701 - DNA, 588 bp, Shigella boydii
atggcaaaaaccaaaacgcattcgtttaacctcagttttgaactggccgaacccctgcatatccgccaggtagatattaacccgcaaattgtctttagctatatcaagagcaagggcaacttgtcgttaaacaatggttatgaggagagcaataccggtgataaccaggtggtttataacggtaatctggtctcttacgatagcgttccagtggcagattttaataacccattaaagatctccttaaacatggatttcacgcatcaaccgagcgggttagtgtgggcgaatacgctggcctggcaagaagcgcgtaaagctcgcattatccttggtaagacaaatgcgcaatacaccagcgaatattcagattacaagcagtatgttgacgaaaaactggatagcagcctgacctgggacacccgcttgtcctggacgccacaatttctgaaacaacaaaacctgacgatcagtgccgatattctcaatgtactggatagcaaaaccgctgttgatacaacgaataccggtgtggcgacctacgccagtggccgtactttctggcttgatgtcagcatgaaattttaa

SEQ ID NO: 466702 - DNA, 369 bp, Shigella boydii
atgaaacgacttctgattcttacggcactcctgccgtttgtcggctttgcacagcccattaatactctgaacaaccctaaccagccggggtatcagatacccagccagcagcggatgcaaacccagatgcaaactcagcaaatccagcaaaaagggatgctgaatcagcaactgaaaacgcaaactcagttgcaacagcagcatttagaaaaccagataaacaataattctcagcgggtgttgcagtcacagccgggggagcgaaatcccgcccggcagcaaatgctgccggagaggagaaacggcgacatgctgaatcagcccagcacgccgcagcctgacattccgttgaaaactattgggccgtaa

SEQ ID NO: 466703 - DNA, 912 bp, Shigella boydii
atgccatcttacttaaattctgatggcgtttttagctcatttcatctaagcgagttggaaaatatgtctcctgatgaccttcatgaagaatatgggaatatatcattatttaattgggtgcacgcttatcaatgtttagtcgagttatctaaagaagaaatgagcaaaagagtttcatcgacaaaacctatacccctacagttggatcgctggctgatcataaaaagccgtgagagttggttatcattctttcaacgtaaggggattgcagcggatgcagcaaaaaaactgatagattattttaccttcaattcaaaatcacatgatcttaatgattgcccatttattccctgtatggacggtttatgcttaatgcctgcattaatagcaaatagctcagtgactcgctctctaatgtcattatttggttccaaaaaaatttctcaagcaagtaaagggcgatttcatgagcaacaatttataaaacaagttcgtgatgcggggattaaagcttctccaattgatgctcatgctaattatcagtgcgattgcgtgattctcctggatgattgtttgatttttacagaactaaaatcaaatggtcaaccaatatattatggtaagtactatcagcaagtgtgtaacatcgttggagatagctcattaatacatgatcataataataaatttatgcgttcttattttcaacaaataaatcgaatttctgaacattatcttaatcatcttgatgtgatcattaaagaattcgaactaccatcaacatggcaacccaaaggtgtgtataagcttattgttactacaactatgctcggtgggaaatatcatgtggatgatacatatgtagcggacaaatatgcattatctagttttttcaacgaatacctggagtga

SEQ ID NO: 466704 - DNA, 216 bp, Shigella boydii; identical to SEQ ID NO: 5123

SEQ ID NO: 466705 - DNA, 123 bp, Shigella boydii
atgcacattggacaggctcttgatctggtatcccgttacgattctctgcgtaacccactgacttctctgggggatgaaccgccccgggaatcctggagactaaacttcctgagaaagaggtaa

SEQ ID NO: 466706 - DNA, 216 bp, Shigella boydii; identical to SEQ ID NO: 5123

SEQ ID NO: 466707 - DNA, 564 bp, Shigella boydii
atggcgtcctgggcaacccgtacgcctgctatccgcgatattctctctgtctcgatcgctgaaatgggcggtgttctctttggtctgtcgatcggttcgatgagcggtattctctgctcggcgtggttagtgaaacgctttgggacacgtaatgtcatcctggtcacgatgtcctgcgcattgatcgggatgatgatattaagtctggcactctggctgacatcgcccctgctctttgccgttggtctcggcgtctttggggcaagttttggttctgcggaagtggcgataaacgttgaaggtgccgccgttgagcgagaaatgaataaaacggttttgccgatgatgcacggtttttatagcctgggcacgctggcaggcgctggtgtcgggatggcactgacggcctttggcgttccggcaacggtgcacattttattggcggcgctggtaggtatcgcgcctatttatatcgccattcaggcaatccctgacggtacggcgatggcacccagcatggcgaaaaaggcattcctttttatcgcgatatccagttgctgttga

SEQ ID NO: 466708 - DNA, 225 bp, Shigella boydii
atgtatgcagcggaaagtgaagtggtttatcagttttgttacagaggggagagttattcagtacctgaagatgatttgctctgttgttatccgtcgttgtcgggcgatggcagttactttttcacgctaaaggatgggacgtttttacggggagagcaggttaaagagacggtacgaaaaaatgtatctccccttgagcgttaccgtaagaacaaagaacgatag

SEQ ID NO: 466709 - DNA, 171 bp, Shigella boydii
atggcaattaatggcgctgcggcgactgttccattaagccccggagaacgcctgaatggacttaatcacattgcggaattaagggcgaaagtatttggcctgaatattgagtcagagcttgagcggtttattaaagatatgcgtgatccacgggatatcaataacaggtga

SEQ ID NO: 466710 - DNA, 390 bp, Shigella boydii
atggaaataaaaccagaagatgagttaagtaatattgttttatttccggtaaaagaggatgacccgcgtaatcaggttaattttctttatgagccatcggaaagaccatactgtcatcacgcctctgtccgggttgacgaaaaagagcgccaggtccgatgcaaaatttgcggtgcggttgtggagccatttgactggatgctctcagtggcgaaaagagaaaccagactgaaccgccccggggttcctggagagtgttttatctgtgaactcaggctgccagatcatcatttccgatggaagcataataagctttttctgcttctgccggaggagtatggcccagcctttccagcaatcgtcgattgttataccagtccacccacgtga

SEQ ID NO: 466711 - DNA, 762 bp, Shigella boydii
atggaaactgtttttgacgcactgaaagcaatgggaaaagccacatccacagaacttgctgcgcgacttgatatcagtcgtgaagaagtgctgaacgaactatgggaactgaaaaaggctggttttgttgataaaagcgcgtacacccggcgtgtggctgataacaacgttcagcaggaacagccagcgcaggcagaactgccggaagaaaccaccacagcaacagtagcgaaaatctcagagtgcgatttaaccgcgacgattgaacaacgcggaccacaaacggctgatgagctggctacattgtctggtaccacatcacgcaaagtggcttcaacgctggcaatggcaatcagcaaaggtcgtctgattcgcgtaaatcagggcggtaaatttcgttactgcataccgggcgataatttaccagcagagccgaaagcagcatcggtagcggaaactgatggtaaggcctttcctcagcccgcaggtgttgcattaccagtacaggaggctgcaacacaggaagatattaaaacagaaacggtggcggacattgtgcagtcgctgccattgttcaccgaaacgcgagcggatgacctggttttaccatcgctgcatatggcaaaccgcgaactgcgtcgggcgaaaagtcatctccagaagtgggagcgtgtctgcgccgcgctgcgggagctgaacaagcaccgggatattgttcgacagattactgatatttctcgccgtgttgcatcggaaaagtga

SEQ ID NO: 466712 - DNA, 162 bp, Shigella boydii
atgcagtcactttgtgatgttctggaaaaaacgctgcttcagttcgggcggggggaaacggcggagcagaaaacacgaaaccagaagaatctggttcatctgagaaaaatgattgatacagccaggctggctgaaaagctggaaaaacaaaaccggaggtaa

SEQ ID NO: 466713 - DNA, 1191 bp, Shigella boydii
atgacagataacacctttccggtgccataccgggtcgatgccgaacaggcagtgctggggtgcctgatggtaaacaccgacactgagcgtgcggggctggtgtattcgatgctgaaaccggagtcgttttacgttgcggcgcacagggttattttccgtgaaattcgcggacttttccgtgccggaaagcctacggacctgctcagccttgcgaacgtgatcgaggcgaaaaaactggatgctgagactggtggctttgcgtaccttgctgaaatcagcaggagtgccacgctatcggcgatggttcactacgccgggattgtgcgggaaaaatccatccagcggtacgcggtggaaaaattacatgcgtgcatcgggatcatgaatcagccgacagacacgagtgcgacagaacgacttggcgcagttcaacaggtcattggcacggtggcagagtatgccagaacaggaaaaacaggcggtctgcgcccggtaagtgatgtggttaacgactggattgatgatcttgagcgtcgcttttccagcccggagaacgcagcgggtctgacgctggggattagctttctggatcggcttatggcccccaaacatgtgctacgtggttcgctggtagtgattggtgcaaggccgaaaatgggtaaaagcgcctcgctgaacaggattgtgacgcattttgctctgaatcatcgtctgcccacactggtattcaccctggaaatgacagatcgcagcctggttgagcgcatggttgcgcaggaggcgagggtaaattctgaaattttttatgtcggtgccagtgatgactcggatatggcgcgggcgatggcgaaagccgcagaactggcagaatcaaacctgatgattgacagcacaccaggggtaacgctggcccatgtgatcgctgaatgccggaaggttaagcgtcagcgtggtgttgttggccttgtggcgatcgattacctgacgctgatgaaggcggaagccgcggagcgtcgtgatattgctttcggggatatcacaacgggcttaaaaaatctcgctaaagagctggactgcgtggttttacttctgacgcaacttaaccgaaaactcgaggacagggcagataaacgccccacaccaagtgacagtcgcgacaccgggcagattgaacaggattgcgatgtgtga

SEQ ID NO: 466714 - DNA, 243 bp, Shigella boydii
atgccatcagtgaaaattctgacggataccaggaaaaaaaatctgcggacgttctggcagaaattcggttttgaccagcagcgatgggagtcctatctgcgatacgttgctgagaactgtcgctggatgctggaagatcgtcccaatggcagcggtgggttctggaagcgtaaaaacctggattacctgatcaccgaacggtgctatgtcgctgtcaaagaggcgcgggcaaatgacagataa

SEQ ID NO: 466715 - DNA, 1314 bp, Shigella boydii
atgtctggaaatataggggcaaatccaggcattacttacaccgtgaaattgcgggaaggaattaaattccaggatggcaccgatttcaacgccgcggcggtgaaagcgaatctggatcgggccagcgatccggcgaatcatcttaaacgctataacctgtataagaatattgccaaaacggaggcgatcgatccgacaacggtaaagattaccctcaaacagccgttctcagcgtttattaatattcttgcccatccggcgaccgcgatgatttcaccggcagcgctggaaaaatatggcaaggagattggttttcatccggtgggaaccggaccgtatgaactggatacctggaatcagaccgattttgtgaaggtgaaaaaattcgcgggttactggcagccaggattgcccaaactggacagaataacctggtgtccggtggcggataacaacacccgcgcggcaatgctgcaaaccggtgaagcgcagtttgctgtccccattccctacgagcaggccgcactgctggagaaaaacaaaaatatcgagttgatggccagtccgtcaattatgcagcgttatatcagtatgaacgtgacgcaaaagccgttcgataacccgaaggtccgtgaggcgctgaattacgccattaaccgtccggcgctggtgaaagttgcctttgcgggctatgcaacgccagctactggtgtggtaccgccaagtatcgcctacgcgcaaagttataaaccgtggccttacgatccagtgaaagcgcgcgaattactgaaagaggcgggatatcccaacggtttcagtaccacgctgtggtcgtcacataaccacagcaccgcgcagaaagtgctgcaatttacccagcagcagttagcgcaggtcgggattaaagcccaggtgaccgcgatggatgccggacagcgggcggcagaagttgaaggtaaagggcaaaaagagagcggcgtgcggatgttctacactggctggtcggcttcaaccggcgaagcggactgggcgctatcgccactgttcgcctcgcaaaactggccaccgacgctgtttaataccgcattttacagcaataaacaggtggacgacttcctggctcaggcactgaaaactaatgatccggcggaaaagacccgcttgtataaggcggcgcaggatatcatctggcaagagtcgccgtggatcccgctggtggtagaaaaactggtgtcggcacacagtaaaaacctgaccggtttttggatcatgccagacaccggcttcagctttgaagacgcggatttgcaataa

SEQ ID NO: 466716 - DNA, 1116 bp, Shigella boydii
atggcgagcgtacagctgcaaaatgtaacgaaagcctggggcgaggtcgtggtatcgaaagatatcaatctcgatatccatgaaggtgaattcgtggtgtttgtcggaccgtctggctgcggtaaatcgactttactgcgcatgattgccgggcttgagacgatcaccagcggcgacctgttcatcggtgagaaacggatgaatgacactccgccagcagaacgcggcgttggtatggtgtttcagtcttacgcgctctatccccacctgtcagtagcagaaaacatgtcatttggcctgaaactggctggcgcaaaaaaagaggtgattaaccaacgcgtcaaccaggtggcggaagtgctgcaactggcgcatttgctggatcgcaaaccgaaagcgctctccggtggtcagcgtcagcgtgtggcgattggccgtacgctggtggccgagccaagcgtatttttgctcgatgaaccgctctccaacctcgatgctgcactgcgtgtgcaaatgcgtatcgaaatctcccgtctgcataaacgcctgggccgcacaatgatttacgtcacccacgatcaggtcgaagcgatgacgctggccgacaaaatcgtggtgctggacgccggtcgcgtggcacaggttgggaaaccgctggagctgtaccactatccggcagaccgttttgtcgccggatttatcggttcgccaaagatgaacttcctgccggtaaaagtgatcgccaccgcaatcgatcaagtgcaggtggagctgccgatgccaaatcgtcagcaagtctggctgccagttgaaagccgtgatgtccaggttggagccaatatgtcgctgggtattcgcccggaacatctactgccgagtgatatcgctgacgtcatccttgagggtgaagttcaggtcgtcgagcaactcggcaacgaaacccaaatccatatccagatcccttccattcgtcaaaacctggtgtaccgccagaacgacgtggtgttggtagaagaaggtgccacattcgctatcggcctgccgccagagcgttgccatctgttccgtgaggatggcactgcatgtcgtcgactgcataaggagccgggcgtttaa

SEQ ID NO: 466717 - DNA, 264 bp, Shigella boydii
atgatgattactctgcgcaaacttcctctggcggttgccgtcgcagcgggcgtaatgtctgctcaggcaatggctgttgatttccacggctatgcacgttccggtattggctggacaggtagcggcggtgaacaacagtgtttccagactaccggtgctcaaagtaaataccgtcttggcaacgaatgtgaaacttatgctgaattaaaattggatcaggaagtgtggaaagagggcgataagagcttctattttcgacactaa

SEQ ID NO: 466718 - DNA, 1077 bp, Shigella boydii
gtggcctattccgtcgcgcaacagaatgactgggaagctaccgatccggccttccgtgaagcaaacgtgcagggtaaaaacctgatcgaatggctgccaggttccaccatctgggcaggtaagcgcttctaccaacgtcatgacgttcacatgatcgacttctactactgggatatttctggtcctggtgccggtctggaaaacatcgatgttggcttcggtaaactctctctggcagcaacccgctcctctgaagctggtggttcttcctcttttgccagcaacaatatttatgactataccaacgaaaccgcgaacgacgttttcgatgtgcgtttagcgcagatggaaatcaacccgggcggcacattagaactgggtgtcgactacggtcgtgccaacctgcgtgataactatcgtctggttgatggcgcatcgaaagacggctggttattcactgctgaacatactcagagtgtcctgaagggctttaacaagtttgttgttcagtacgctactgactcgatgacctcgcagggtaaaggtctgtcgcagggttctggcgtcgcgtttgataacgaaaaatttgcctacaatatcaacaacaacggtcacatgctgcgtatcctcgaccacggtgcgatctccatgggcgacaactgggacatgatgtacgtgggtatgtaccaggatatcaactgggataatgacaacgacaccaagtggtggaccgttggtattcgcccgatgtacaagtggacgccaatcatgagcaccgtgatggaaatcggctacgacaacgtcgaatcccagcgcaccggcgacaagaacaatcagtacaaaattaccctcgcacaacaatggcaggctggcgacagcatctggtcacgcccggctattcgtgtcttcgcaacctacgccaagtgggatgagaaatggggttacgactacaacggcgatagcaaggttaacccgaactacggcaaagccgttcctgctgatttcaacggcggcagcttcggtcgtggcgacagcgacgagtggaccttcggtgcccagatggaaatctggtggtaa

SEQ ID NO: 466719 - DNA, 921 bp, Shigella boydii
atgaaaatgaataaaagtctcatcgccctctgtttatcagcagggttactggcaagcgcgcctggaattagccttgccgatgttaactacgtaccgcaaaacaccagcgacgcgccagccattccatctgccgcgctgcaacaactcacctggacaccggtcgatcaatctaaaacccagaccacccaactggcgaccggcggccaacaactgaacgttcccggcatcagtggtccggttgctgcgtacagcgtcccggcaaacattggcgaactgaccctgacgctgaccagcgaagtgaacaaacaaaccagcgtttttgcgccgaacgtgctgattcttgatcagaacatgaccccatcagccttcttccccagcagttatttcacctaccaggaaccaggcgtgatgagtgcagatcggctggaaggcgttatgcgcctgacaccggcgttggggcagcaaaaactttatgttctggtctttaccacggaaaaagatctccagcagacgacccaactgctcgacccggctaaagcctatgccaaaggcgtcggtaactcgatcccggatattcccgatccggttgctcgtcataccaccgatggtttactgaaactgaaagtcaaaacgaactccagctccagcgtgttggtaggaccactatttggttcttccgctccagctccggttacggtaggcaacacggcggcaccagctgtggctgcacctgctccggtgccggtgaagaaaagcgagccgatgctcaacgacacggaaagttattttaataccgcgatcaaaaacgctgtcgcgaaaggtgatgttgataaggcgttaaaactgcttgatgaagctgaacgcctgggatcgacatctgcccgttccacctttatcagcagtgtaaaaggcaaggggtaa

SEQ ID NO: 466720 - DNA, 153 bp, Shigella boydii
atggacattcttagtgaagaagaagtgaagtactataaaaaatcgctcatatcccaggaaggaagcataaaaaaaggtgcgccaggagacgcaccagttgttgcaaaatcagcactgtggggcgtaattaccccttgccttttacactgctga

SEQ ID NO: 466721 - DNA, 192 bp, Shigella boydii
atgatcaaagcaaatgcctggtatctttataaagagtggattcgtagtgatgatgtttcacctatatttatagaaactgaagaaaagttaagaacctttaacactaataaattaacacgaaacgataatatatttatcctgttctcctctgtcgatgatgggcctgttatggtggtaagctcccagcgctaa

SEQ ID NO: 466722 - DNA, 315 bp, Shigella boydii
atgaacgctaagataattgcctcgctggccttcaccagcatgttcagcctcagcaccctgttaagcccggcacacgccgaagagcaggaaaaggcgctgaatttcggcattatttcaacggaatcacagcaaaacctgaaaccgcaatggacgccattcttacaggatatggagaagaagctgggcgtgaaggtgaacgccttctttgccccagactacgcaggcattatccagggaatgcgcttcaataaagtggatatcgcctggtacggcaacctgtcggcaatggaagcggtggatcgcgccaacggctag

SEQ ID NO: 466723 - DNA, 627 bp, Shigella boydii
atgcaaaccatcaccatcgccccacccaagcgtagctggttctcgcttctgagctgggccgttgttctcgccgtgctggtcgtctcgtggcagggcgcggaaatggccccgcttacgctgattaaagacggcggcaacatggcaaccttcgttgccgacttcttcccgcccgatttcagccagtggcaggattacctcaccgaaatggtcttcgccatgctgttcgtggtcgccgtcggtctcggcccgttcgctggcgtgctggcgctatttatccacaccaccggcgtgctctccaagctgctttccgaagcggtggaagcgatcgaacccggcccggtagaaggcattcgcgccaccggcgccaacaagctggaagagatcctttacggcgtgctgccacaggtaatgccgctgctgatctcctactccctctatcgcttcgaatccaacgtccgctcggcgaccgtcgtcggcatggtcggtgcaggcgggatcggcgtcaccctgtgggaagcgattcgcggttttcagttccaacaaacctgcgccctgatggtgcttatcatcgtcacggtcagcctgctggatttcctctctcaacggttgcgtaagcactttatctga

SEQ ID NO: 466724 - DNA, 348 bp, Shigella boydii
atgataaagtatgcattagtcggtgatgtgggcggcaccaacgcacgtcttgctctgtgtgatattgccagtggtgaaatctcgcaggctaagacctattcagggcttgattaccccagcctcgaagcggtcattcgcgtttatcttgaagaacataaggtcgaggtgaaagacggctgtattgccatcgcttgcccaattaccggtgactgggtggcaatgaccaaccatacctgggcgttctcaattgccgaaatgaaaaagaatctcggttttagccatctggaaattattaacgattttaccgctgtatcgatggcgatcccggtaatgctgccaacttactga

SEQ ID NO: 466725 - DNA, 477 bp, Shigella boydii
atgacaaaagtattgctgtctcagccctcgcgcccagcgagccataactcaagccgcgcgatggtgtgggtgcgaaaaaatctgttctccagctggagcaatagcctgctgactattggctgcatatggttgatgtgggaactgatcccaccgttgctgaactgggcatttttgcaggctaactgggttggctcaacgcgtgccgactgcacaaaagccggtgcctgttgggtcttcatccacgaacgatttggtcagtttatgtatggactttacccacacgaccaacgctggcgaattaacctggcattactgattggccttgtgtcaatcgcaccaatgttctggaaaatactcccgcatcgcggtcgctatattgcggtctgggcggtgatttacccactgattgtctggtggctgatgtatggcggttttttggtcttgagcgggttgaaacccggcaatggggcgggctga

SEQ ID NO: 466726 - DNA, 225 bp, Shigella boydii; identical to SEQ ID NO: 133446

SEQ ID NO: 466727 - DNA, 282 bp, Shigella boydii
atggtcgcgaggagcggtaaaaagaataccttcctgattggcgctttgctgggaacctgcggttatctgctattcttctgggtttccgtctggtcactgccggtggcgttggttgcgttggccatcgcttcaattggtcagggcgttactatgactgtgatgtgggcactggaagctgataccgtagaatacggtgaatacctgaccggcgtgcgaattgaagggctcacctattcactattctcatttacccgtaaatgggtgatgctgccaacttactga

SEQ ID NO: 466728 - DNA, 216 bp, Shigella boydii; identical to SEQ ID NO: 21701

SEQ ID NO: 466729 - DNA, 270 bp, Shigella boydii
atgcaaactctgctgctgaaactctggcaggagacgggcaagcaggtgctgttgattacccacgatatagaagaagtggtgtttatggcgactgaactggttctgctttcatccggccctggccgtgtgctggagcggctgccgctcaactttgctcgccgctttgttgcgggagagtcgagccgcagcatcaagtccgatccacaattcatcgccatgcgcgaatatgttttaagccgcgtatttgagcaacgggaggcgttctcatga

SEQ ID NO: 466730 - DNA, 225 bp, Shigella boydii
atgtcgcgtaaaggtaactgttacgacaacgctccgatggaaagcttctggggaacgctgaaaaatgagagcctgagccactatcgttttaataaccgggatgaagccatctcagtaatacgggaatacattgagattttctacaatcgtcagcgtcgtcactctcgtctggggaatatctccccggcagccttcagggaaaaatatcatcagatggccgcttaa

SEQ ID NO: 466731 - DNA, 363 bp, Shigella boydii
atgaataaccagtatttacagtttgttcgtgagcaactcatgattgccaccgccgatttgagtggatcaacaaaagggcagcttgaggcctggcaggagaatgccatgtttgatacagggcgttacaggcgtaaaaaaatccggtaccgcgatgaagtgactggaaaaatgataacgcgggataatccaccaatcccgggaaagcaatcgctgggaagggggcgtcaattcctctcgtcagtccggttgagttttcgacatcatcgtggcggcgggctgttctgtctcttgaagaacatcataaagcctggttgttgtggtgttacagcgggagtatttgttgggaatatcagatcgcgataa

SEQ ID NO: 466732 - DNA, 216 bp, Shigella boydii; identical to SEQ ID NO: 21701

SEQ ID NO: 466733 - DNA, 1479 bp, Shigella boydii
atgtcgaaaaaatacatcatagggattgatggcggaagtcagagcacaaaagtggtgatgtacgatctggaaggtaatgtggtttgcgaaggtaaaggcttattacagccgatgcacacgcctgatgccgatactgcagaacatactgacgacgatttatgggcatcattatgttttgcaggtcacgatttgatgagccagtttgccgggaataaagaagatattgttggcatcggcctgggctccatccgttgctgccgtgcgttattgaaagccgacggcacgccagctgcgccgttgattagctggcaggatgcacgcgttacacgcccttacgaacatacgaatcctgacgtggcgtatgtcacctctttttcgggttatctgacgcatcgcttaaccggcgagtttaaagacaatatcgccaactattttggtcagtggccggtggattataagagctgggcatggagcgaagatgctgcggtaatggataagtttaatatcccccgtcatatgctgtttgatgtgcaaatgcctggcaccgtcctcggacatatcacaccacaagccgcactggcgacacatttcccggcaggactgccggttgtttgtaccaccagtgataaaccggtagaagctctgggggccggattactggatgatgaaactgcggtaatttctcttggcacttacatcgcattgatgatgaacggcaaagcactgccgaaagatccggtggcgtactggccgattatgtcttctattccgcaaacattgctgtatgaaggttacggtattcgcaaaggtatgtggacggtgagctggctgcgtgacatgttaggcgagtcgttaattcaggatgccagggcgcaggatctttcaccggaagatttactcaacaagaaagcctctagtgtgccacctggctgtaatgggctgatgacggtgctggactggctgaccaatccgtgggaaccgtacaaacgcgggattatgatcggctttgattccagcatggattacgcatggatatatcgttcgatattggaaagcgtggcgctaacgctgaagaacaattacgacaatatgtgtaatgaaatgaatcactttgcgaagcatgtgatcattactggcggcggttcgaacagcgatctgtttatgcaaatttttgccgacgtgttcaaccttccgttacgccgtaacgccattaacggttgtgcaagtctgggagcagcgattaatacagcggtaggtctggggctatacccggattacgcaacggctgttgataagatggttcgcgtgaaagatatctttataccgattgagagcaatgccaaacgctacgacgcgatgaataaaggcattttcaaagacctaaccaaacatactgatgtgatcctgaaaaaatcgtatgaagtgatgcatggggaattggggaatgtggattcgatccagagctggtcgaatgcgtaa

SEQ ID NO: 466734 - DNA, 528 bp, Shigella boydii
atgtcttctcatccgtatgtcacccagcaaaataccccgctggcggacgataccactctgatgtccactaccgatctgcaaagctatatcactcatgctaatgacacttttgtgcaggtgagcggctttaccttgcaagagttacaagggcagccgcacaacatggtgcgtcacccggatatgccaaaagcggcgtttgcggatatgtggttcaccctgaaaaaaggggagccctggagcggcatcgtgaaaaatcgccgcaaaaatggcgaccattattgggtgcgggccaatgcggtaccgatggtgcgcgagggaaaaatcagtggctatatgtcgattcgtacccgggcgacggatgaagagattgcggcggtggagccgctgtacaaagcgctgaacgccggacgtaccagtaagcgtattcataaaggcctggtggtgcgtaaaggctggctgggtaaactgccttcattaccgcttcgctggcgggcgcttgttttgaatggcagattgtgcgcccgatag

SEQ ID NO: 466735 - DNA, 267 bp, Shigella boydii; identical to SEQ ID NO: 462029

SEQ ID NO: 466736 - DNA, 282 bp, Shigella boydii
atggggcgcgtatttcacaccggcgtcgagcgtgtgctctttctgtttctgaatgattttattgaacaatttccaatgatccaccttggcgcccccatcaaaagagcgcatacaccacatattgaacccctgccttcggatcaccataccgctgcagattacttacgccagtttgatttgcttgtcctgaattttatctctcgcggtaattttgtcatactcccccgattatggagtaactctgaggttcacagatggttcgtcaataaagatcctaactag

SEQ ID NO: 466737 - DNA, 216 bp, Shigella boydii; identical to SEQ ID NO: 21701

SEQ ID NO: 466738 - DNA, 900 bp, Shigella boydii
atgaagcgtgaagaaatcgctgatctgatggcgtttgtcgtcgttgcagaggagcgtagcttcactcgtgcagcagcccgcctgagcatggcgcagtcagctttaagccagatagtgcgtcgtatagaagaacgattgggattgcggcttctgacgcgaaccacgcgcaacgttgttccaactgaagcgggcgagcatcttttgtctgttcttggccctatgttgcatgacatagattcagccttggcatccctgagcgagctgcagaaccgcccatccgggacaatacgtattactactgtagaacatgcagcaaaaacgatattgttaccagcaatgcgcacattcctgaaatcgcatcctgaaattgatattcagctcaccattgattatggtttgaccgatgtcgtttctgaacgttttgatgcaggcgtccgtctgggtggggagatggataaagatatgatcgccattcgaatcgggccagatataccaatggctattgttggctcaccggattatttttctcgccgaagtgttccaacgtcagtgtcacaattaatagatcatcaggcaattaatttgtatcttcccacatcgggtacagcaaatcgctggagattaatacgcggtggacgtgaagttcgtgttcgcatggaaggtcagcttttactgaatacgatagacctgatcattgatgctgcaattgatgggcatggattggcgtatctaccttatgatcaggttgagcgggctattaaagaaaaaaaactgatacgtgttttggataaattcacaccagatttacccggttatcacctgtactatccacaccgtcgacatgctggctcggcattctcattatttatagataggctgaagtataaaggtgctgtttag

SEQ ID NO: 466739 - DNA, 261 bp, Shigella boydii; identical to SEQ ID NO: 463924

SEQ ID NO: 466740 - DNA, 216 bp, Shigella boydii; identical to SEQ ID NO: 10294

SEQ ID NO: 466741 - DNA, 237 bp, Shigella boydii
ttgctggtgacactgcgtgccattcagggatttgccgtcggcggcgaatggggaggcgcggcgttgctttccgttgaaagtgcaccaaaaaataaaaaagccttctacagtagcggtgtacaagttggctacggtgtaggtttactgctttcaaccggactggtttcattgatcagtatgatgacaactgacgatcagctttttaagctggggctggcgcattcctttcctgtttag

SEQ ID NO: 466742 - DNA, 795 bp, Shigella boydii
atgaataataagggctccggtctgaccccagctcaggcactggataaactcggcgcgctgtatgagcaatctgtagtcgcattacgcaacgccattggcaactatattacaagtggcgaattacctgatgaaaacgcccgcaaacaaggtctttttgtctatccatcactgaccgtaacttgggacggtagcacaaccaatccccccaaaacgcgcgcatttggtcgttttactcacgcaggcagctacaccaccacgattactcgccctactctctttcgttcgtatctcaatgaacaacttacgttgctgtatcaggattatggtgcgcatatctcggtgcaaccctcgcagcatgaaatcccctatccttatgtcatcgatggctctgaattgacacttgatcgctcaatgagcgctgggttaactcgctacttcccgacaacagaactggcgcaaattggcgatgaaactgcagacggcatttatcatccaactgaattctccccgctatcgcattttgatgcgcgcgcgtcgatttttccctcgcgcggttgcgccattataccggtacgccagttgaacattttcagccgttcgtcttgtttaccaactacacacgttatgtggatgaattcgttcgttggggatgcagccagatcctcgatcctgatagtccctacattgccctttcttgtgctggcgggaactggatcaccgccgaaaccgaagcgccagaagaagccatttccgaccttgcatggaaaaaacatcagatgccagcatggcatttaa

SEQ ID NO: 466743 - DNA, 411 bp, Shigella boydii
atgaaaatgaatactgcgctgatagttgcactaatgtgtatgtggtatgcggtacccgctgctgcaaaagagactttactggctatgccacgtaattcaacagaacattgctatgcggagattaatgtgcacggaccatatggggtgtatttccgagtggtcccgcatccccccgggggaaagagctgggtcgaatgtaacagtgactactattactctgataaaccaccgggagtacagatactcggaacccgtgcagggtgtcgggtatacggaatctgcgggaccacctcgacactgcatgtggctggaagaggggttgtgtgtattaaaaatatatgcagtccacgtgggatgataattcacaggatacggaaacgtcctgtagtggctgtaagcgatgagatgtga

SEQ ID NO: 466744 - DNA, 588 bp, Shigella boydii
atgacgcaatctcgattgcatgcggcgcaaaacgcactagcaaaacttcatgagcaccggggtaacactttctatccccattttcacctcgcgcctcctgccggatggatgaacgatccaaacggcctgatctggtttaacgatcgttatcacgcgttttatcaacatcacccgatgagcgaacactggggaccaatgcactggggacatgccaccagtgacgatatgatccactggcagcatgagcctattgcgctagcgccaggagacgataatgacaaagacgggtatttttcaggtagtgctgtcgatgacaatggtgtcctctcacttatctacaccggacacgtctggctcgatggtgcaggtaatgacgatgcaattcgcgaagtacaatgcctggctaccagtcgggatggtattcatttcgagaaacagggtgtgatcctcactccaccagaaggaatcatgcacttccgcgatcctaaagtgtggcgtgaagccgacacatggtggatgtgtagtcggggcgaaagatccaggcaacacggggcagatcttgctttatcgcggcagttcattgcgtga

SEQ ID NO: 466745 - DNA, 855 bp, Shigella boydii
ttgcgtgaatggaccttcgatcgcgtactggcccacgctgatgcgggtgaaagctatatgtgggaatgtccggactttttcagccttggcgatcagcattatctgatgttttccccgcagggaatgaatgccgagggatacagttaccgaaatcgctttcaaagtggcgtaatacccggaatgtggtcgccaggacgactttttgcacaatccgggcattttactgaacttgataacgggcatgacttttatgcaccacaaagctttttagcgaaggatggtcggcgtattgttatcggctggatggatatgtgggaatcgccaatgccctcaaaacgtgaaggatgggcaggctgcatgacgctggcgcgcgagctatcagagagcaatggcaaacttctacaacgcccggtacacgaagctgagtcgttacgccagcagcatcaatctgtctctccccgcacaatcagcaataaatatgttttgcaggaaaacgcgcaagcagttgagattcagttgcagtgggcgctgaagaacagtgatgccgaacattacggattacagctcggcactggaatgcggctgtatattgataaccaatctgagcgacttgttttgtggcggtattacccacacgagaatttagacggctaccgtagtattcccctcccgcagcgtgacacgctcgccctaaggatatttatcaatacatcatccgtggaagtatttattaacgacggggaagcggtgatgagtagtcgaatctatccgcagccagaagaacgggaactgtcgctttatgcctcccacggagtggctgtgctgcaacatggagcactctggctactgggttaa

SEQ ID NO: 466746 - DNA, 954 bp, Shigella boydii
atgatgacagtctcccgggtgatgcataatgcagaatctgtgcgtcctgcaacgcgtgaccgcgtattgcaggcaatccagaccctgaattatgttcctgatctttccgcccgtaagatgcgcgctcaaggacgtaagccgtcgactctcgccgtgctggcgcaggacacggccaccactcctttctctgttgatattctgcttgccattgagcaaaccgccagcgagttcggctggaatagttttttaatcaatattttttctgaagatgacgctgcccgcgcggcacgtcagctgcttgcccaccgtccggatggcattatctatactacaatggggcagcgacatatcacgctgcctgagtccctgtatggtgaaaatattgtattggcgaactgtgtggcggatgacccagcgttacccagttatatccctgatgattacactgcacaatatgaatcaacacagcatttgctcgcggcgggctatcgtcaaccattatgcttctggctaccggaaagtgcgttggcaacagggtatcgtcggcagggatttgagcaggcctggcgtgatgctggacgagatctggctgaggtgaaacaatttcacatggcaataggtgatgatcactacaccgatctcgcaagtttactcaatgaccacttcaaatcgggcaaaccagattttgatgttctgatatgtggtaacgatcgcgcagcctttgtggcttatcaggttcttctggcgaagggggtacgaatcccgcaggatgtcgccgtaatgggctttgataatctggttggcgtcgggcatctgtttttaccgccgctgaccacaattcagcttccacatgacattatcgggcgggaagctgcattgcatattattgaaggtcgtgaagggggaagagtaacgcggatcccttgcccgctgttgatccgttgttccacctga

SEQ ID NO: 466747 - DNA, 219 bp, Shigella boydii
gtgctgccgctgtatcccgacatcagcccggaaattattgcgattgctatcggttcaggtgcgattggctgcactatcgttacggactcgcttttctggctggtgaagcaatattgcggcgctacgctcaatgaaacatttaaatactatacgacagcgacatttatcgcttcagtcgtcgctctggcgggcacattcctgctgtcatttatcatctaa

SEQ ID NO: 466748 - DNA, 312 bp, Shigella boydii
atgcaaaacagaaaatggattttgtcctcgctggtaatgacttttttcggcatccccatactgacgcaatttttggcggcggttgttgctatgctgggtgtcggacttgccggtattattgaagtttgtaatatccttatcacgccaacaagttaccttctgctcaacatttttatgctggcgctgggcgcattaatgctatttttctcggggcgagtatgggcaggcgatagtgcaccagaaaaaagagaaatagccgtctggcgacaatgtctttttttagtacccggtttattaatcctggttggctga

SEQ ID NO: 466749 - DNA, 189 bp, Shigella boydii; identical to SEQ ID NO: 7058

SEQ ID NO: 466750 - DNA, 429 bp, Shigella boydii
atgctcgttacgcccgtaaaataccgccttactgctttaactgttccgcgtgcgcatagccgcattcaccgcatcacaaaattcactttaaaaagggcggatatccgtttccgccgaatcaccagaaaagtgataacagagggcgttgcagcggggttgtcacttaagcgtatggtcaacctgacaacccagtgtcctcagcggggaaggaataaccccgccatacttaccgccgcgccatttcgcggattgccacaaccggaagcgcacggtcgaattaaatttaacgactacctacagagagacgaacttcgccgtgcgctttcgcgttatgccctgacttttcagggatatatccttttcagtaaactgtcagtgccggattcttatccgtgtccggcgcacgcactctacctcacctgtgaataa

SEQ ID NO: 466751 - DNA, 717 bp, Shigella boydii
atgtcaaccatagcaacatcacttggtagtaacattggttacatgaaaaacactatcagcgaacgtattcggaatcgtcgaaaagacgttggattaacccaacagcaggttgcgaaagcaatcggcatatctcgtgtatccgtaacaaaatgggaaaatggctcttcaaaacctgacggtgagaatttgtatctactgtcaaaattgctttccaaatctcctgaatggattctttatggaaaggacggtcacgataaaaccgatgatctgcgtctgaatcagtacccttacattagtgacaacatcgcccggttgcccgttttaacgtgggaacaggctggttattgggatatgagttgtccagtaaccaagattcctggtattaataactgggttgatgtcatgacaaaaaccgctgaaaactcttttttattgcatgttgagggagatgcgatgacaaactctaacggcctcccaaccatccccgacggatctaccgtgctgatcacaccatgctcaagtaacattagagaactggtgggaaaaataatcttaatccaattggaaggaacgccaaacgtaacactaaaaaaagttgcgattgacggaccaaacatctatctgttgtcactgaatccgctttacaaacccatcgaactgaatggtggttacaccattaaaggtaaagtttcacaaatacatcaatacttagactga

SEQ ID NO: 466752 - DNA, 168 bp, Shigella boydii
atgttcaaagatgatgttctgcgctatttcaaaaaaaagcgactagtagctgaggctcttggaatttcacatgtggctgttgtgcggtggaaagcagttattcccaaacttcgtgcaatggaactggatgaaccgccccgggtttcctggagagtgttttatctgtga

SEQ ID NO: 466753 - DNA, 345 bp, Shigella boydii
atgtcccagccagcgggtgatctggttattgatttgagtctggatgcggcccggtttgatgaacagatggcccgggtacgccgtcatttttccagtctggaggcggatgccagaaaaaccgccagtactgttgaacaggggctgagccgacaggcgctggctgcacaaaaagccgggatatcagtcggacagtataaggctgccatgcgcacactgcccgcacagttcacggatattgtcactcagcttgccggtggtcagaatcccttccttatcatgctgcagcagggggggggcagatcagcgattcattcggtggaccgctcagcctgcttaccctgctga

SEQ ID NO: 466754 - DNA, 342 bp, Shigella boydii
atggctaacgcctggctcagattatggcatgacatgccaaatgaccctaagtggcgaacaattgccagggtgtcagggcagccaattgcaacagtgatggcagtgtatatccacctcctggtgagcgcgtcacgaaatgtcacgcgaggtcacattgatgtcacgacagaagatttggcaagtgcgctcgacgtgacagaagaggtaattgattcaattttgcagacgatgcaggggcgggtacttgatggtgatttaatcactggatgggaaaaacgccaggtgctgaaagaggacaacggcaatatttcgcaaaccgcaaaatctcctgcagagcgctag

SEQ ID NO: 466755 - DNA, 216 bp, Shigella boydii; identical to SEQ ID NO: 10294

SEQ ID NO: 466756 - DNA, 1158 bp, Shigella boydii
atgacgaaacatgcctggtttttcctcctgccctcctttattctgatctccgcggctttaatcgccggttgtaacgataagggagaagagaaaactcacgtcggtgaaccgcaggttaccgttcatattgtgaaaacggccccgttagaagttaagactgaattaccaggccgcaccaatgcttaccgtatagccgaagttcgcccacaggttagcgggatcgtactgaatcgtaatttcactgaaggcagcgatgtacaagcaggccagtccctgtaccagatcgatcccgcgacctatcaggcaaattatgacagcgcgaaaggcgaactggcgaaaagtgaagccgccgccgccatcgcgcatttgacggtaaaacgttacgttccgctcgtgggtacgaaatacatcagccagcaggagtacgaccaggccattgctgatgctcgccaggccgatgccgccgtgattgccgcaaaagccacagtcgaaagcgctcgcatcaatctcgcttataccaaagtgactgcgccaattagcggacgtatcggcaaatcgaccgtgaccgaaggcgctcttgtcactaatgggcaaacgactgaactggcgactgtccagcagctcgatcctatctacgttgatgtgacccaatccagcaacgattttatgaggctgaagcaatccgtagagcaaggaaatttgcataaggaaaacgccaccagcaacgtagagttggtcatggaaaacggtcaaacctatcccctgaaaggtacgctgcaattctctgatgtgaccgttgatgaaagcaccggctccataaccctacgtgctgtcttccctaacccgcaacatacgcttttgccgggtatgtatgtgcgtgcacggattgatgaaggcgtccaacctgacgccattcttatcccgcaacaaggcgttagccgcacaccgcgtggtgatgcaaccgtgctgattgttaacgataaaagtcaggtggaagcgcgccctgtcgttgccagtcaggcgattggcgataaatggttgattagcgaaggtctgaaatctggcgatcaagtcattgtcagcggcctgcaaaaagcgcgtccgggagagcaggttaaagccactaccgatacccccgcagatactgcatcgaagtaa

SEQ ID NO: 466757 - DNA, 303 bp, Shigella boydii; identical to SEQ ID NO: 458125

SEQ ID NO: 466758 - DNA, 396 bp, Shigella boydii
atggaaaaagtttatgataccactagaattagtaatcttgctaacgacccgaaacagttttgttcttttttttgtgagtacataaaaagagatgatattagtatagatatcgccttggatgtgctgagaatatcttccatctattataatatattttcagttcagactgaagttgagtataacaatacattcaaaaaatgtattaatgagctagtaaactcatttcctgataacattgaactaatctctgagttcgagagtcaatgtaaaattatgcatgatataaataattctttctttgcggctacaaaatgtgctggtatttggcgtaaaaatacaaaaaaatcacatgcattaatacttaatctcatcatgttttgtgagatgtttttatga

SEQ ID NO: 466759 - DNA, 1971 bp, Shigella boydii
atgtctttggattccccgcaacgcttccacaaattctcaaaaaatcaaggcattaactatattgcatcgcaaaagctctcacaaaacaagattaataaatttaataattaccttttccgctggcagggcctggatggctcagaaattctgatgcataactttcctgaagacacgtatgatagccgagcacgtgctcgctctttagaatatattgaacaaaactataatgaaaaagagatctgtccctatgcgcttatggtgtatggtgtcggtgatggcggcgctggccccggtgaggaacatatagaacgattaacacgtatacgcaatattgatggcttacctcatgttgatttcagccgtgttgataagttcttcacttacgccgacgcctttcgcgaaagcttgcccattatttcaggtgaactttatttcgaggctcatcaagggcgctttacatcagagtcagcaactaaagctcataatcgaaatatggaaaataaattacatgatgctgaattttttacaactattactaataatatgacatcaattcttcgcagtgagtttgatgaaatatggaaagagatgctgaccttgcaattccatgacatccttcccggatcatgtatttcaagagtttatcttgaaactgaaaaggaatatattaaactagaagcaaaaaccgagaaaattatttctgatgcgcagtctactttattaagtaaaattgatacttcttcttataaagatccgcacattttatttaataccacctgttttgctcgtaacgaatggatcaatataaacaacaactggctcaaagcacgagtaaactcttatggttatgctgtgattgatccaaagaataagatcgtaaatggtctgaaggcagaatctcgaagtattgaaaataattacattaaacttcttttttcagaaaacggtgatttaatttcgctatatgataaaagatatggtaaagaatacattactgaaaatatgcacagtgagatccgtgcataccacgaagatgcaggttttttcgcggcctgggattttgcttcaaattatcgtgatggggaatcatatgttttactcgctgaaaaaatgacaagtgtaatcagcgggcctgaaactacgatgacgctgatttatcactacaattcctcttatcttcgcttcgcatttaccctgacacaagacagtccacgcgttgatgtccaaacttttattgattggcacgaacctaatgtttctctcaaagtcaaattcccggtgtcagtacaaacatctcttgcacaatgtcaaattcagttcggtgtaattgacagaccaacgcatagcgatgattcgttcgcttttgccaaagatgaaataccagcacatcactgggtcgacctttctgatcgagaaactggcatagctttaatagcaaaaaacaaatatggctatcgtgtcaaagaccagacgcttgaattaactttgctgcgttcgcagcataaacctggggaagttgttaagacagacaattatgataatttcctgattaataattttgcagatattggtaaacaaaaattcatattctccttatttcctcatcatggagattaccgtgtgggtggtgttattaatcaagcctatataatgaatcatcccttacaggtcgtccctgtcaaaccgcacccgggtgaattacccccttcactatcattttttgctatcgatactaacagcgttatcatcgaaacaataaaattagctgaagacggcgacggtataatcgtaagattatatgagagtcatggattagaaatttcagccatgctttcgtgggtatgtaattatcactacgttcaatatgtcgatcttcaagaaaataagttagatgacagtttttattgcaatcaatattgcaatcttgagttcaaaccttttgaaattatcacgctacgattaactcaatag

SEQ ID NO: 466760 - DNA, 216 bp, Shigella boydii; identical to SEQ ID NO: 21701

SEQ ID NO: 466761 - DNA, 330 bp, Shigella boydii
atgtcaaaaccccgatggaccattgaacagaaaaggcagctcgttgctgcctggcgcgccagtggtcttacacgtcagcaatactgtgaactcaacgatattcccttcacatcacttcgcgaatggccgcaggatgtcgcaaaagctgaacgccgggcaaatgaaccgaccgttcttcccgttcatattgcgccaccactgcatgctgatgtaccacagcccgtcacgaatgagccagtcacgctcttccttcccggtggagtacggatgtgctgtcagccgtcacaacttaccgatgtcttcagggcactcaaatatgctcagtcctga

SEQ ID NO: 466762 - DNA, 585 bp, Shigella boydii
atgaccacttttacaaaagagcagttaatcagtcatgttagtgaaaatgtaaaggcgatgaaatttgcagtaaaacagacagcattcaaaaattctctcgaggcaattgagttggatttagcactggcccttgttgctcaggcttcgctggaagcagagcccgtgctttatatgaatcgatttaccggaaagacattctcactggaagagcaacccggtgctgataaggaaccggaaatatacgtgccgctatatgctgccccgccagacagcgccgccatgcttcaggctggaaactttcgggaaaagaagggttcgtcaaccaataatattcgggaaatctcggaaacgtcaaccaaccatccggtaactctggatggttggataagctgtagtgagcgaatgccggatgacggtcagcacgtaattattttatgtgatagcgcattcgttctttatgcgcaatatcgagacggtgagttttttgatgtagtccgtgatggtgatgaatttttcgaaacacagagccgcaatgtaaccgactggatgccgctaccagaaccgccgcaggaggtgcgccaatga

SEQ ID NO: 466763 - DNA, 156 bp, Shigella boydii; identical to SEQ ID NO: 23896

SEQ ID NO: 466764 - DNA, 213 bp, Shigella boydii
atgctagacacatgtaggttagcctcttacgcgccgaaaggcaaggagaagcaggctatgaagcagcaaaaggcgatgttagtcgccctgatcgtcatctgtattaccgtcgtagtgacggcactggtaacgaggaaagacctctgcgaggtacgaatccgaaccggtcagacggaggttgctgtcttcacagcttacgaacctgaggagtaa

SEQ ID NO: 466765 - DNA, 180 bp, Shigella boydii
atgagctacgcactaaaaaaacacccgcgattgactattccccctcgcgataaaagcgttgtggcagctccgcgcccggctatcgatgaaaattgcactcatcgtgagcaggtgaaaaatgctttcgatttcggtttttctcgttacgagaaggcaatggaagaactttcaaaagtgtaa

SEQ ID NO: 466766 - DNA, 486 bp, Shigella boydii
atggctgagattgttgaaggagtgcactacctttcgtttgatgatcttaccgaaattaatcgccttttaattgagcttcaaacaccagatgaacctgttagtgtgctgagtgttgataatttaagttcttctcagtctcgtcccagcatggttcgatggtatgaacagactaatgacatgtttgtactggcatcagtattgattgaaagtctgattcagaatcatccatttgctaatgcaaacaaacgaacagctatgatggctggttatgtcttcttgttgttgaatggctatgagttaacagcaccaggcgatgaaatcgtggaaatggcagagggactggcctgcaaaacctatactcgagaagatctcgagaactggttgtgttattggtctcgtgcgtatgacagccgggaattatgtaaaacaggcgcaactgttgttttgtatgaaactatcaagcttaaaatagaacagcaaaactaa

SEQ ID NO: 466767 - DNA, 216 bp, Shigella boydii; identical to SEQ ID NO: 5123

SEQ ID NO: 466768 - DNA, 528 bp, Shigella boydii
gtgaatactgtggtcgcaacggcggcggcaattcttggctggatcttcggtgaatgggcgctgcgtggtaagccttcactgctgggggcgtgttctggcgcgattgccggtctggtcggcgtgacgccagcgtgcggctacattggggttggcggcgcgttgattatcggcgtggtagctggtctggcgggcttgtggggcgttaccatgctcaaacgcttgctgcgggtggatgatccctgcgatgtcttcggtgtgcacggcgtttgtggcattgtcggctgtatcatgaccgggatttttgccgccagctcgctgggcggcgtgggcttcgctgaaggtgtgacgatgggtcatcagttgctggtacagctggaaagcatcgccattacgatcgtctggtccggtgtggtggcatttattggctacaaattggcggatctgacggttggtctgcgtgtaccggaagaacaggagctagaagggctggatgtcaacagtcacggcgagaatgcctataacgcgtaa

SEQ ID NO: 466769 - DNA, 735 bp, Shigella boydii
gtggcggcgctggctggaactatcactgaaattaatacgccaacccgtggctgggtttcggtaactaatcctgctgcagctacggtgggcactccggcagaaactgatgcggagttacgtatccgccagtcgcaaagtgttgcgttgccatcaataaccccatttgaagcactggatggtgccgtttttaatgttacaggtgtaacccgccacaaactctatgaaaacgatactggttcggaggacggtaacgggttaccgccacactctgttgctgtaattgtggatggcggtgatgtgatggatattgctcaggctatcagagggaataaaggccaggggacagccactcacggtacaacatccgttacggttccggataaatacggcaatccccatgtaatcaaattctcgcgttccagtgatgtacctgtttatgcccggattaaattaaaagtttttacgggttatacctcacagatagggcagcagatccagcaggctatttccgactatatcaatagtctgatgattggtgattcggtccttttaagtcgcatttactcaccggcgaatcttagcgtggtgagtggcgggaatgcacgctattacgatattcaggaactgacgattgggaaatccccgggggctttgtcgtcatcaaacgttgatatcagatacaacgaatctgcgtcctgtaccccggaaaatatcgttataacggtggagtcatga

SEQ ID NO: 466770 - DNA, 681 bp, Shigella boydii
atgagcaaatacaccgaactaatcacgaactaccacgccaccaaacctaaatttcttgcacatgttgatctgatgacccggccgcttattgatgttgcggcggccaccagagggctgattactgcatttgatattgactctgcggttggtgtgcaacttgacattctgggattgtggatcggacgtagtcgtgttgtcagccagcttatctcaggtgtctatttcagctgggataccgacgggcttggatatgatcagggtgtatggcaggggccatatgatcctgattctggatacatgtatctcagcgatgaaacttatcgtgtcattcttaaagcgaagattgcgattaataactgggacggacggaatgattcgcttccggcaattcttgacgcggcaacagcaggatccgggctgcgaatgcagatagtcgataaccaggacatgacgatatcggtctgggtctttcctgatactgatatttcagatgtatcgcgtgagttaattgcggcaattaaacaggggtatctcacagtaaaagccgccggggtatgggcgggtggcattgaaacaccttcggtggaaaccccatcggaaggctcaaatttttttggttttgatatggataacgaatttatcagtggttttgatgtaggagcatggggagtattactctga

SEQ ID NO: 466771 - DNA, 216 bp, Shigella boydii; identical to SEQ ID NO: 466648

SEQ ID NO: 466772 - DNA, 216 bp, Shigella boydii; identical to SEQ ID NO: 10294

SEQ ID NO: 466773 - DNA, 216 bp, Shigella boydii; identical to SEQ ID NO: 21701

SEQ ID NO: 466774 - DNA, 258 bp, Shigella boydii
atgatcaagttatctgaaaaaggcgtgtttctcgccagtaataacgaaataattgccgaagaacatttcaccggcgaaattaaaaaagaagaagccaaaaaaggcactattgcctggtctattctctcttctcataatacgtccggaaatatggataaacttaaaattaagtttgattcattagcctctcacgatattacctttgttggtattgtacagaccgctaaagcgtccggggtaatgctgccaacttactga

SEQ ID NO: 466775 - DNA, 516 bp, Shigella boydii
atgagaagagtactctttagctgtttctgcgggttactgtggagttccagtggatgggcagctgaccctttgggaacgattaatatcaatttgcacggtaacgttgttgatttctcctgtaccgtaaacactgcggatattgataagacggtagatttaggcagatggcctacgacacaattactgaacgctggcgataccacggcactcgtcccttttagcctgcggctggagggatgtcctccgggttcagttgcgattttatttacgggaacgccggcatccgataccaacctgctggctctggatgatcccgcaatggcacaaaccgtcgccatcgaattacgtaatagcgatcgctcccggctcgcactgggggaggcgagcccgactgaggaagtagatgcaaatggcaatgtcacactaaacttttttgccaattatcgagcgttagccagcggtgttcggccaggtgtggcgaaagcggatgcgatatttatgatcaattataattaa

SEQ ID NO: 466776 - DNA, 1008 bp, Shigella boydii
atgaagataatctgcagattattattggcaatggcatgtttgtgtctggcaaacatatcctgggctactgtttgtgcaaatagtactggcgtagcagaagatgaacactatgatctctcaaatatctttaatagcaccaataaccagccagggcagattgttgttttaccggaaaaatccggctgggtaggtgtctcagcaatttgtccacccggcacgctggtgaattatacataccgtatttatgtcaccaactttattgttcaggaaactatcgataattataaatatatgcaattaaatgattatctattaggtacgatgagtctggttgatagcgtgatggatattcaatttcccccgcaaaattatattcgtatgggaacagatcctaacgtttcgcaaaaccttccattcgaggtgatggattctcgtttaatatttcgtttaaaggtcattcgtccctttattaacatggtggagatccccagacaggtgatgtttaccgtgtatgtgacatcaacgccttacgatccgttggttacacctgtttataccattagttttggtggccgggttgaagtaccgcaaaactgcgaattaaatgccgggcagattgttgaatttgattttggtgatatcggcgcatcgttatttagtgcggcagggccgggtaatcgacctgctggtgtcatgccgcaaaccaagagcattgcggtcaaatatacgaatgttgctgcgcaggcttatttaacaatgcgtctggaagccagtgccgtttctggtcaagcgatggtgtcggacaatcaggatttaggttttattgtcgccgatcagaacgatacgccgatcacgcctaacgatctcaatagcgttattcctttccgtctggatgcagatgcggcagccaatgtcacacttcgcgcctggcctatcagtattaccggtcaaaaaccgaccgaagggccgtttagcgcgctggggtatttacgcgtcgattatcaatga

SEQ ID NO: 466777 - DNA, 213 bp, Shigella boydii
atgtctcacaaatgtaggttagcctcttacgtgccgaaaggcaaggggaagcaggctatgaagcagcaaaaggcgatgttaatcgccctgatcgtcatctgtttaaccgtcatagtgacggcactggtaacgaggaaagacctctgcgaggtacgaatccgaaccggccagacggaggtcgctgtcttcacagcttacgaacctgaggagtaa

SEQ ID NO: 466778 - DNA, 234 bp, Shigella boydii
atgcacgttacagccaagccctccagttttcaatgtaatctcaaatgtgattactgtttttaccttgaaaaagagtcgcagtttactcatgaaaaatggatggatgacagcactctgaaagagttcatcaaacaatatatcgcagcgtctggcaatcaggtctattttacctggcaaggcggtgaacccactctggctggcctggattttttggtaatgctgccaacttactga

SEQ ID NO: 466779 - DNA, 207 bp, Shigella boydii; identical to SEQ ID NO: 24440

SEQ ID NO: 466780 - DNA, 1251 bp, Shigella boydii
atggatataatgagaagtgttgtggggatggtggtgttactggcaatagcatttctgttgtcagtgaataaaaatagcatcagtttgcgcacggttggagccgcactgctgctgcaaatcgctattggtggcatcatgctctacttcccaccgggaaagtgggcagtagaacaggcggcattaggcgttcataaagtgatgtcttacagtgatgccggtagcgccttcatttttggttcgctggttgggccgaaaatggatgtcctgtttgacggtgcgggttttatcttcgcctttcgcgtacttccggcgattattttcgttactgcgctcatcagtctgctgtactacattggcgtgatggggctgctgattcgcatccttggcagcattttccagaaagctcttaacatcagcaaaatcgaatcttttgtcgcagtcacaactattttcctcgggcaaaatgagatcccggcgatcgttaaaccgtttatcgatcgcatgaatcgcaacgagttgtttaccgcaatttgtagcgggatggcgtccattgctggttcgatgatgattggttatgccggaatgggcgtaccaattgactacctgttagcggcatcgctgatggcgatcccaggtggtattttgtttgcacgtattcttagcccggccaccgagccttcgcaggtcacatttgaaaatctgtcgttcagcgaaacgccgccaaaaagctttatcgaagcggcggcgagcggtgcgatgaccgggctgaaaatcgccgctggtgtagcgacggtggtaatggcgtttgtcgcaattattgcgctgatcaacggcattatcggcggaattggtggctggtttggtttcgccaatgcctctctggaaagtatttttggctatgtgctggcaccgctggcgtggatcatgggtgtggactggagtgatgccaatcttgcgggtagcctgattgggcagaaactggcgattaacgaattcgtcgcttacctgagtttctccccatacctgcaaacgggcggcacgctggaagtgaaaaccattgcgattatctcctttgcgctttgtggttttgctaactttggttctatcggtgttgtcgttggcgcattttcggctatttcgccaaaacgcgcgccggaaatcgcccagcttggtttacgggcgctggcagcagcaacgctttccaacctgatgagtgcgactattgccgggttctttattggtttagcttga

SEQ ID NO: 466781 - DNA, 243 bp, Shigella boydii
atgcttgatgagtacgggcgacggctttctgcccgtcagaaattaacccgcgagacgctggtattctttggcaatttcactcgccagaatggcgttgttgaacaccagctggatattggatttcaggctgtcaccgccggtcagctcagcaacgcgcgccagcaggaacagtgtactttctttaccaataacgccctgctcttcggcttcggcgacggcttgatctatggctgcattgggtga

SEQ ID NO: 466782 - DNA, 276 bp, Shigella boydii; identical to SEQ ID NO: 16135

SEQ ID NO: 466783 - DNA, 210 bp, Shigella boydii
atgacggatggctggccgctgtatgaatcacgcctgaagggaaagctgcacgttatcagcaagcattacactcagcgcattgagcgacataatctgaatctgagacaacatctggcaaggctgggacggaagtcactgtcgttctcaaaatcggtggagctgcatgacaaggtcatcgggcattatctgaacataaaacactatcagtaa

SEQ ID NO: 466784 - DNA, 150 bp, Shigella boydii; identical to SEQ ID NO: 461565

SEQ ID NO: 466785 - DNA, 225 bp, Shigella boydii; identical to SEQ ID NO: 462228

SEQ ID NO: 466786 - DNA, 321 bp, Shigella boydii
atgaaaaaaagaaattttagcgcagagtttaaacgcgaatccgctcaactggttgttgaccagaaatacacggtggcagatgccgccaaagctatggatgttggcctttccacaatgacaagatgggtcaaacaactgcgtgatgagcgtcagggcaaaacaccaaaagcctctccgataacaccagaacaaatagaaatacgtaagctgaggaaaaagctacaacgcattgaaatggagaatgaaatattaaaaaaggctaccgcgctcttgatgtcagtggatttgcccctatatttccagacatctgttatcacttaa

SEQ ID NO: 466787 - DNA, 558 bp, Shigella boydii
gtgaagtggcgaaagagtgaagatgcctacgatgaaaccaaaaactacacgccaatcaatgacgcaaaaattaaatatgctaagtggtcgctgttgcgggtctgtttgcataacgccgtcaccctgtgtaactgggtctggccaatgaccgtttcgccgctgaaaagccgtaattaccggggcgatctggcgcttgaagccaaattcttcaaagcgatcaccggcgaagagatgactcaggaaaaattagatttagctgcagagcgtatctttacgttgcatcgtgcctacacggtaaaacttatgcaaaccaaagatatgcgtaatgaacacgatcttatctgttcctgggtattcgacaaggatccgcagatcccggtctttactgaaggtactgacaaaatggatcgtgacgatatgcatgcttcgctcacgatgttctacaaagaaatgggctgggacccacagcttggtagtcccacccgcgaaacattgcagcgtctggggctggaagatattgccgccgatctggcagcacacaatctactgcctgtgtaa

SEQ ID NO: 466788 - DNA, 1077 bp, Shigella boydii
gtggcggctattgatcaggctggggaaaaccttgttcctctctctggcatgttgaatagccgtaaccacagcggcggtgcgggaactggcgcaattatgggttcgaaaaacctgaaagcgattgcggttgaagggacgaaaggggtcaacattgccgatcgtcaggagatgaagcgtctcaacgattacatgatgactgaacttattggtgcgaataacaaccatgtcgtgccaagtacgtcgcaatcgtgggcagagtattcagatcccaagtcacgttggacagcacgtaaagggctgttttggggcgcggctgaaggtggtccgattgaaacgggggaaattccgccaggcaatcagaacacggtcggctttcgtacctataaatccgtttttgacttaggtccggcggcagagaaatacacagtaaaaatgagtggctgccactcttgcccgatccgttgtatgacccaaatgaatattcctcgggtgaaagagtttggcgtgcccagcacaggtggtaacacttgtgtagccaactttgtccataccaccatcttcccgaacggtccgaaagattttgaagataaagacgatggccttgtgattggtaacttggttggtctgaatttgttcgatgactacggcctatggtgtaactacgggcagttgcatcgcgactttacttattgttacagcaaaggggtgttcaagcgtgttctgcctgctgaagagtatgcggaaattcactgggatcaactggaagcgggtgacgttaatttcattaaagatttttactaccgtctggcgcatcgtgtgggtgagctgagtcacctggctgatggttcatatgccatcgcagaacgctggaatttgggtgaagagtactggggctacgcgaaaaataaactctggtcgccgtttggctatccggttcaccatgccaatgaagcgtcagcgcaggtcggttccattgttaactgtatgttcaaccgtgactgcatgacacatacccatatcaactttattggttccggcttgccattgaaactgcaacgtgaagtggcgaaagagtga

SEQ ID NO: 466789 - DNA, 636 bp, Shigella boydii
atgggatctgatgcgaaaaacttgatgagcgacgggaatgtgcaaattgttaagaccggcgaggtcattggcgcgacgcaacttactgaaggcgagttgattgttgaagctggcggaagagccgaaaataccgtggtcacgggggctggctggttgaaagtggcaaccggtgggatcgccaaatgcacacagtacggtaacaatggcacgctatcggtcagcgacggtgccattgccacagatattgttcagtccgagggaggcgcaattagtctctctacgctcgctacggttaatggccgccatcccgaaggtgaattcagcgttgatcagggttatgcctgcggtttgttgctggaaaatggcggtaacctgcgtgtactggaaggacatcgcgcggaaaaaatcattctcgatcaagagggcggcctgttggttaatgggacaatctcagcggtcgtggtagatgaaggtggtgaattgttggtgtatccaggtggggaagccagcaattgtgatattaatcagggcggcgtttttatgctggccgggaaagccagtgatacgttgcttgctggtggcaccatgaataatctcggtggtgaagacggtgatgctgccaacttactgatttag

SEQ ID NO: 466790 - DNA, 207 bp, Shigella boydii
atgcggtatccaacccgcgaatatcagcgtgattcaccgtcggatttactgctacgtcgccctcagggaattaaacctaaaaagaaaatcgtcaaaattagagattccggtttgacacggaaagtcatatcagcgttaaccgaatgccgcattgacgattctcccgatgacagcgttacgttccatattgcgatcgtgaagccatag

SEQ ID NO: 466791 - DNA, 216 bp, Shigella boydii; identical to SEQ ID NO: 10294

SEQ ID NO: 466792 - DNA, 213 bp, Shigella boydii; identical to SEQ ID NO: 462242

SEQ ID NO: 466793 - DNA, 840 bp, Shigella boydii
atgttgaatgtagctattgaaaaccagaacgggtggaattatagtgcacctgcacctcataaaacgggggccgggattagcaccccgaaagttactcgagcgcataaccgcgctgaagcggtttttttatgcgtaatgcacagccacattcaaattatggtgaggcgtgcggggcagccgcaaggctggccgggttctcgagtgaccggtagtgctaaccctgtgcgtctcaccacccatgagattagcacctctgctggtgagttaattaacttatcacttgaggatgtcattatggctactaccctttctcaccctgacgtaaccatcgaaaatggtcgcgccgtcactacttctatttcgattgctgagttttttggcaagcagcatcaccatgttgttcaaaaaatagaatccctcgaatgttctgaactatttttaaccagcaacttttcgcgggttaaattcgaacaccgcggcaattcttataacgcctaccaaatcaccaaaaacggcttcgttttcctggtgatgggcttcacgggcaaaaaagccgccacattcaaggaagcctacattgctgagtttgaccgcatggaggccgaactgcgccagaataacaccccacctgctgacaagatgattccgggtgatggtcgcactctggttgttcacttcgacaaattcggcaatgtcgaattcaccgaaaccgttcctgatggcgcactggtctgtaccctggagactttccggttttatctggaaaaacagggctggactcttgtaaaccggggcgcaattaaaaacatgaccgtagagcagttgctttccttaaaataa

SEQ ID NO: 466794 - DNA, 249 bp, Shigella boydii
gtgtttgctgaggtcctgggctttttccatccagagctgcatgtagcaaaggaggatgatttcttcggctgtgaattgtggctgaatctgcggctgctgttcggttggtgctgtttttccctggctgaaatagcagtcttccagtttttcgaatacctcccacgcccgatcggtttcgagcatttttgcgtgacgggctgcgccgcgttctgtccagaggatgagggagcgggcatttttaccaactaa

SEQ ID NO: 466795 - DNA, 255 bp, Shigella boydii
atgcgcatttttaaaaacgcctggtttgagcgatttgcacgcaaaacaaaatatccgaccaatcactgcgcgaaattgttaaacaggctgataacgggcttatctcagcaaacctgggtaacggcgttatcaagcaacgtctgccacgagtcggtggcggcaaatctggcggttatcgcacaatcattttctatcgcgtcggcacaagggcctttttcgtatatgcatacgcaaaaaatgaacgtgaaaatataa

SEQ ID NO: 466796 - DNA, 207 bp, Shigella boydii
atgagtaaaaattaccgcagtgatgcgcttgcatccgtacatgaaatgatggaatcgcttcatgatatcggcgcagtaacgaaacagactatgcgagaattcgatgaaacttgtctccagccagcgccggtaatgtctccggaaaggatccgtgcactgcgcgaacgagagcatctgtctcaacctgtttttgccagatacctctag

SEQ ID NO: 466797 - DNA, 420 bp, Shigella boydii; identical to SEQ ID NO: 459063

SEQ ID NO: 466798 - DNA, 261 bp, Shigella boydii; identical to SEQ ID NO: 464411

SEQ ID NO: 466799 - DNA, 795 bp, Shigella boydii
atgtccggcagtgcttttgccgttacgcaccacgccttcagtagcggagcaggaaggacatctgatggaaatggaagccacgcaagcaccttaaaatcatcatcatacactaaatcagtaagttggcagcattacccagtaaggctacgaataaagcagttagtgtatggacaattaaactatgtagtgtccgtttacgacccgaacgataccaacgttgccgtcagaggcacccacaggacagcacggggctttctttcgcttgataagttcatcagttcaggtcccgatgctcagacctgggctgataggtatgttcgcaactgtgcaattgctattctgcccctattacctgtgggagttccaggggctattttcgcgggtattgcatcacgaatgccatttgcccctatacacccatcggcaatgttgttaataatggccacaggccagactcaacagcttattacattattcaaacagttgcccatactccctgaaaaagaaatcattgaaataataactgcgcagaatagcgttggtacacctgctttatttctggctatgatgaacggacatactgacaacgtaaaaatatttatgcaagaaattcagtcactgatatacaatcatatcattcatgaagataatctggttaaattactgcaaactaaaagtgctaacgaaacacttgggctctatatctccatgttgtatgggttcgatgaaacaatcgatatctttctgaatgcattaaccactccaatagcacaagagcttttaaacaaaaaatag

SEQ ID NO: 466800 - DNA, 432 bp, Shigella boydii
atgaaaacacgtgatggtgaaccaggggtgtttgctgcaatggaaaataatcaccctttgtgtgtcacacggttcctctctaaaattaatggcatcgcctttaaatacaagttgagcaaaactaacatcatggatttattaaaaggcgctacagcacatggaacccctgtattatacatcgccatgagcaagggtaatgaagacgtcgtgttatcttatatatcgacgctgaatatttttgcaaaaaaatattcttttagtcaacgtcagttattcacactgttggccgctaaaaatcatgacaacatgtcagctgttcatatagccattcatcataatcattataaaactgtagaaacatattatgctgctataaatgtaatcagccaaagcctgagttttagtgctgatgaactaaagacgtatttataa

SEQ ID NO: 466801 - DNA, 759 bp, Shigella boydii; identical to SEQ ID NO: 460809

SEQ ID NO: 466802 - DNA, 720 bp, Shigella boydii
atgttcaccctgtcattactgacaggaaatcctgctatagcgtatgaaacagataaagtatataaaataaccgttctgcatacaaatgaccaccatggacacttttggcgtaacaatcatggtgagtacgggttatcctcccaaaaaactctggtggacaatatccggcagaaagtaataaataatggcggaagtgttctattattatctggtggtgatattaacaccggtgtacctgaatcagaccttcagaaggctgaacccgatattcgtggaatgaatctaattggttatgatgcaatggccgtcggtaatcatgaatttgataatcctctaaatatattacgtcagcaggaaaaatgggccacatttcctttcctttctgctaacatatatcaaaaaagtacagggaggcgtttattcagtccatggaaaattttcatccgtcagaatttgaaaattgcagtcattggcttgacgacagatgatactgcgaaaacaggaaattctgaatattttactgatattgagttccgtcaacctgctgctgaggcgaggagtgtcattgatgaacttaatcagcaggaaaagccagatattattattgcggcaacacatatggggcactatgacaatggcgagtcaggttcgaatgctcctggtgatgttgaaatggctcgcagtttgccgactggctcatttgaggtgtactggcaatag

SEQ ID NO: 466803 - DNA, 225 bp, Shigella boydii; identical to SEQ ID NO: 462228

SEQ ID NO: 466804 - DNA, 225 bp, Shigella boydii; identical to SEQ ID NO: 462228

SEQ ID NO: 466805 - DNA, 216 bp, Shigella boydii; identical to SEQ ID NO: 10294

SEQ ID NO: 466806 - DNA, 999 bp, Shigella boydii
atgaaaaccgttagggagtccacaacgttgtacaactttctcggatcgcacaatccatactggcggttgacggaaagcagcgatgttttgcgcttttctaccaccgaaaccacagaacctgatcgtactttgcagttatctgccgaacaggctgctcgcatcagggaaatgacggtcatcacctccagcctgatgatgagtctgaccgtcgatgagagcgatctttctgtgcatctggtaggacgaaaaatcaataaacgggaatgggctggcaacgcgtctgcatggcatgacacaccggcagttgctcgtgatttatcacacgggctttcctttgctgagcaggtagtttctgaagcacattccgcaatagtgattctcgacagccgggggaatatccaacgcttcaatcggttatgtgaagattacactgggttgaaagaacacgacgtcattggccaaagcgtgtttaaactgtttatgagccgtcgtgaagctgcggcatccaggcgcaataaccgtgtattttttcgaagcggcaatgcatatgaagtcgaactgtggataccaacatgtaaaggccagcggctgtttctgtttcgcaataaatttgtccacagcggcagtggcaaaaacgagatttttttaatctgttccggcaccgacattaccgaagagcgccgcgctcaggagcgactgcgtattctggcaaataccgacagtatcaccggactgccgaatcgtaacgcaatgcaggatttaatcgatcacgctattaatcatgcagataacaataaagttggggttgtgtatcttgatttggataatttcaaaaaggtcaacgacgcctatgggcatttgtttggtgaccagttattacgcgacgtgtcattggctattttaagctgtctcgaacatgaccaggtgaagtggtcaacaaaaactggccaccgagttagagtttttccagtatcgattttccgattcgtttgggggtaa

SEQ ID NO: 466807 - DNA, 738 bp, Shigella boydii
atgcaaagaacgctgctaactgagggagtcgatatcacgtatctgaagcaagatgaatggcaccggacatccacggtgcttgtcgatctgaacgatcaaggggaacgttcatttacgtttatggtccgccccagtgcagatctttttttagagacgacagacttgccctgctggcgacatggcgaatggttacatctctgttcaattgcgttgtctgccgagccttcgcgtaccagcgcatttactgcgatgacggcgatccggcatgccggaggttttgtcagcttcgatcctaatattcgtgaagatctatggcaagacgagcatttgctccgcttgtgtttgcggcaggcgctacaactggcggatgtcgtcaagctctcggaagaagaatggcgacttatcagtggaaaaacacagaacgatcgggatatatgcgccctggcaaaagagtatgagatcgccatgctgttggtgactaaaggtgcagaaggtgtggtggtctgttatcgaggacaagttcaccattttgctggaatgtctgtgaattgtgtcgatagcacgggggcgggagatgcgttcgttgccgggttactcacaggtctgtcctctacgggattatctacagatgagagagaaatgcgacgaattatcgatctcgctcaacgttgcggagcgcttgcagtaacggcgaaaggggcaatgacagcgctgccatgtcgacaagaactggaatag

SEQ ID NO: 466808 - DNA, 300 bp, Shigella boydii
atgaagaatattgatgtcgttcagaaggtctgcgaaatattagatgaaatccaaccattgagtgaaggatcttacaaaaaactgattaattttgtaaaagacagaccggggcatgaccgtcggtatgccattgatgctaccaaaattacagagcatttaggttggcaaccaattgagacatttgagtctggtattagaaaaacagttcattggtatctacaaaataaagcttgggttgagtcagttaaaaatggaaattataaaaaatggcttactcagcagtatggagaaatgaaatga

SEQ ID NO: 466809 - DNA, 870 bp, Shigella boydii
atgaaaggaataatcctcgccggtggctctggtacaagactttatcccatcacgaagggaatatcaaaacagttgatgcctgtttatgataaacctatgatctattatccactttctgtattaatgctagcaggtatcaaagatatattaatcataacaacgcctgaagatctgaataattttcagcgattactcggcgatggtaaacgttttggtattaatctctcatttgaggtgcagttaaaacctgaagggttagcacaggctttcattattgggggggaatttataggcaatgatgcggtctgtttggcacttggagataatattttttatggacaaaactttagtccaaaactcaaagaggctgcacaattaattgatggtgcaaccgtatttggatatcaggtaaaagatccagaacgatttggtatcgtagagtttgacgctaataaaaaagcactgtctatagaagaaaaaccggcaaaaccaaaatcaaattatgcagttacaggtctttacttttatgataataacgtagttaacattgccaaaacaattaaaccttcagagcgcggcgagttagagattaccagtataaacgaagtctatcttcgcaatgggaaattgaatgttgagttgttggggcgaggctttacctggcttgataccggaacacatcaaagcatgttggaagcatctcattttgtggaaactatcgaacaacatcaaggtttcaaaatcgcatgtctagaagaaatcgccttgtacaatggatggctaaccaaagatgaagtattcaaaataggtaatgagtacaaaaaaaatggttacggtcaatatcttctctctttggttaaggacaaataa

SEQ ID NO: 466810 - DNA, 399 bp, Shigella boydii
atgcatcccactcaacgtaagctgatgaagagaataattctgtttctgtcactacagtttcccattacctatccagccatcgctgggcaggatattgaccttgttgccaatgtaaaaaacagcacttgcaaaagcggaatcagtaaccagggtaatattgatcttggcgtcgttggggtgggatatttttcagataatgttactcctgaaagctatcaaccaggtggaaaagagttcactgtcacagtatcagactgtgcattacagggaactggcgatgtgcttaatcagttacatattgattttagagcccttagcggtgtcatggctgcaggttcaaggcaaatatttgccaatgaagtcgcaaccgggggtgatgctgccaacttactgatttag

SEQ ID NO: 466811 - DNA, 603 bp, Shigella boydii
atgacatttaaaaatttacgttatggattatccagcaatgtcgttttggctgcctcattgttcagcgtaccctcttatgcggcaacagacagcattgggctgaccgtgattactaccgtagaaataggtacttgtaccgctacattagtaaatgactctgatcaggacatttctgttgttgactttggcgatgtatatatttctgaaatcaatgccaagaccaaagttaaaacattcaaactcaaattcaaagactgtgcgggtatccccaataaaaaagcacaaataaaattaaccaagcgagccacatgcgaaggtactgctaatgacggtgcggggttcgcaaatggatccacagccgcagataaagcaagtgccgtcgccgttgaagtctggagcaccgaaactccggcaacagggagcgcaacacaatttagttgtgtgacaccagcatctcaagaggtcactatctccaatgcagccaacgcggttgtttattatccgatgagtgctcgactggtcgtcgaaaaaaataaaaccgtaagcaatgtcactgcgggtaaattttctgcacctgccacatttacagtaacctataactaa

SEQ ID NO: 466812 - DNA, 867 bp, Shigella boydii
ttgaataatgaatggtgttcctttctcaaagaacatgaatttctggttggtatctcgatcgatggcccccaggagttacatgaccgttacagacgcagtaattcaggtaacggtacttttgcaaaagtgatagcagccatcgagcgtctgaaatcatatcaagttgagtttaatacgttaaccgtcattaataacgttaatgtccattaccctcttgaggtttatcattttttaaaatctatcggcagtaaacatatgcaatttatcgaattgctcgaaaccgggacgccgaatattgatttcagtggtcatagtgagaacacattccgtatcattgatttttctgtgcctcccacggcttatggcaagtttatgtcaaccatttttatgcaatgggttaaaaacgatgtgggtgaaattttcattcgtcagtttgaaagctttgtcagccgttttttggggaatgggcatacaagttgtattttccaggagtcctgcaaggataatctggttgttgaaagtaatggagacatttacgaatgcgaccattttgtctatccacagtacaaaattggaaacattaataaatctgaactcaaaacgatgaacagtgtacaactgacagcgcaaaaaaaacggatttcagcgaaatgtcagcaatgtgcatataaacctatctgcaatggcggttgtcctaagcatcatattactaaagtaaacaatgagactgtttcttatttttgcgaaggttataaaatccttttttcaaccatggtaccttatatgaacgccatggttgagttagctaagaacagagtaccgctttaccacattatggatgttgcaaaacaaatggagaataattaa

SEQ ID NO: 466813 - DNA, 303 bp, Shigella boydii
atgaaaaaaagaaattttagcgcagagtttaaacgcgaatccgctcaactggttgttgaccagaaatacacggtggcagatgccgccaaagctatggatgttggcctttccacaatgacaagatgggtcaaacaactgcgtgatgagcgtcagggcaaaacaccaaaagcctctccgataacaccagaacaaatagaaatacgtaagctgaggaaaaagctacaacgcattgaaatggagaatgaaatattaaaaaaggctaccgcgctcttgatgtcagactccctgaacagttctcgataa

SEQ ID NO: 466814 - DNA, 216 bp, Shigella boydii; identical to SEQ ID NO: 21701

SEQ ID NO: 466815 - DNA, 378 bp, Shigella boydii
atgcgctacttaaacacaaagaatctcattgcagcaggagtattactcgcctgcatgagcagcattgcctggggtgccatcatcccggaccgtacccgtatcataatgaatgagtcagataaaggggaagcattaaaacttactaatcaaagcaaaaatctaccctatctggcgcaaacatggatagaagatacgaaaggcaataaatcacgtgactttattgtcacggttccccctatggtacgtttaaatcccagtgagcaaattcaaataagaatgataagtcaggaaaaaattgctcaactgcctaatgacagagaaacgctcttctattttaacgtgcgagaaataccgccaaaaacagataaaaaaatgtga

SEQ ID NO: 466816 - DNA, 150 bp, Shigella boydii
atgctggaaaaatctctggcaacacttttcgcgttgttaattttagcaacgctgataaaccgttttctgctatggcggttaccggagagaaaagggggtgtagactggccccctgaatctccagacaaccagtatcacttaaataagtga

SEQ ID NO: 466817 - DNA, 207 bp, Shigella boydii; identical to SEQ ID NO: 24440

SEQ ID NO: 466818 - DNA, 228 bp, Shigella boydii
atgtctctggcgcaatgcccgggctttttattcgcacatcgtgaggaatgcaccgtggaaattaaaaaaatcattaatccccgttataccgaaagtggcgcagtagactgtgacgtttttttgacgacagggaccaggcagttccctgcacagccaccgctgatgatgtcgcaccgacgggtcagcaaatctggcaggaactacaaagtggcaaatggggtgagatag

SEQ ID NO: 466819 - DNA, 741 bp, Shigella boydii
atgaagaaattcttcagacattttctttttttaattctgtgcttgagttgttataccgcgagtgctggcactgatgataacgtaggatatattgttgggaatagttacggcgttggtccgtcagatcaaaaatggagagaaacagggccgaatggcgatgctactgtcatattcagatatgcaacaagtacaaataatttagttttctacaaaccgacgcagcttggacctacaggtgtaaaattacagtggagtcagttagataccgcttctggtggtggttttctttattgcaacagaagtgatagcacaagtggtagcgcaatgcgtattgaaaatgcaatggttgactcaggtaaaatgtatggctcccataaattatttaatacatcagttcctggtttgtattacacattattaatttcaaacatgtggtcagcttacggtaccgtaactaacgttagttcacctgggatatacattggtgactctgcagaacaatatttttcgtggtataatccaatcgaagacgtgttatattggagttgcaataatgcgaatagcacccgtaaatactgggctgtaggtggtatttatcagacccttacaattgaattctatacagatacaaactttgatccaacagtaactcaacagatcaaattatccagctcatcaaattatctgtattcatttaaagcctatggcgcagacggtgatgctgccaacttactgatttag

SEQ ID NO: 466820 - DNA, 636 bp, Shigella boydii
atgaaactgacaacacatcatctacggacaggggccgcattattgctggccggaattctgctggcaggttgcgaccagagtagcagtgatgcaaaacacattaaagttggcgttataaatggcgcagaacaagatgtcgcggaagtcgctaaaaaggtggcaaaagagaaatatggcctcgatgttgaactggtaggatttagcggttcgttgctaccgaacgatgcgacaaatcatggcgaacttgatgcgaatgtcttccagcatcgaccctttcttgaacaagataatcaggcgcatggttataaactggtagcggtgggaaatacgtttgtcttccctatggcgggttattccaaaaaaatcacaaccgtggcgcaaataaaagaaggcgcgacagtggcgatccccaacgacccgaccaaccttggtcgcgcacttttactgttgcaaaaagagaagctaattactctgaaagagggaaaagggttattacataccgcgctggatataaccgataatcctcgtcatttgcagattatggaactcgagggggcgcagcttccgcgcgtactggatgatcccaaatttgatgtagcgattatcagcaccacggtaatgactccaacttactga

SEQ ID NO: 466821 - DNA, 609 bp, Shigella boydii
atgacgttggcgttttttgcgctgataagttttctggcattgaaagaatattgtatgcttatatccgtacattttccgcggtggttatattgggttattcctcttaactatttgcttatcggttttaattgctttgagctgtttctgttattaatacctttggctgggtttctgatattagccacctggcgagtttttgtgggtgacccctccggttttctgcataccgtgagcgccattttttggggctggataatgaccgttttcgccttgagtcatgccgcctggttattaatgttgccatccatgaatatccagggcggggccttactggtgttatttcttttggcattaaccgcgtcaaacgatattgcacagtatttatgggggaaatcctgcggcagaagaaaagtggtccccaaagtcagcccgggaaaaacgctggaaggtctggtcggcggcgtaatcaccaccatgatagcgtcgatgatcattggaccgttactgacaccgctaaatacattacaggcaatattagcgggtttgttaattggtattagtggtttttgcggcgatgtagtgggtgatgctgccaacttactgatttag

SEQ ID NO: 466822 - DNA, 297 bp, Shigella boydii
atgtcttacgaaaaagttgaaatcatccgtagaaatgatggttcgatccgctttaacaataagatgccttatcacgttacgctgggttatatcggaacaaacggaatcacaatgttgccacaaacgcaaagtttaatggtaaccccttatagccatgcagatacgcagtttaaaaatgttccgtcagcttttcaggttggttatatcaatgattttggtggattaagtttttatgaaataaactgcccgacggttaataactcttgtaatgtttccgtagccaaacgagataaataa

SEQ ID NO: 466823 - DNA, 351 bp, Shigella boydii
gtgccaaaaccttctacccaggtagggcagaaagttctggataaaattttgaactataccaacaccgaaatgaaagaagcgatagcgcagcgtaaaccactggttaccaccgctgggccgcgtagtctgattttccgtggggccattaccggtgtagataccagcaaagaagggctgcaattctatgaagtgaaccgccccgggtttcctggagagtgttttatctgtgaactcaggctgccagatcatcgtttccgatggaagcataataagctttttctgcttctgccggaggagtatggcccagcctttccagcaatcgtcgattgttataccagtccacccacgtga

SEQ ID NO: 466824 - DNA, 429 bp, Shigella boydii
atggcgtttgacttctatcggatcaatagatttggtcaatgggagaaatattacaacattcaactccgcggcgcgctcttatcagcaatcaatcacctgtttactgagaacaatctggatacagaagccatcactgtcagttatgaatatatactctccaggcatctgattgctaatactgaatttagttatttggcatttcccgataactacaaccgtctgtttataccacggccaaaaactaaagctggtaatggttcaaaacacttaatagtaaagcggttggcagactgcttgctgctggcggcatatacaatgggaatatcgaagaattcagggaaacagcagacaagttggggggagatgcacctgctggttacgatcaatttatggataacaaagggttactcatcgctggtgcttcaatag

SEQ ID NO: 466825 - DNA, 354 bp, Shigella boydii
gtgcgcacagttgataactatatcgccctgctctgttcgttgttacgttttgcgtatcagtcgggatttatatcaaccaaaccatttgaaggagtaaaaaaattacagcgaaacagaataaagcctgacccgttatctaaaacagaattcaatgcattaatggaaagtgaaaaaggacagagccaaaacttgtggaaatttgccgtttactccgggcttcgtcacggggaactggcagctctggcgtgggaggatgtggatttcgagaagggaattgtgaatgtcagaagaaacctgacgatacttgatatgttcggtcccccaaaaacaaatgccgggatccggacggtatga

SEQ ID NO: 466826 - DNA, 225 bp, Shigella boydii; identical to SEQ ID NO: 462228

SEQ ID NO: 466827 - DNA, 249 bp, Shigella boydii
atgtcaaaaccccgatggaccattgaacagaaaaggcagctcgttgctgcctggcgcgccagtggtcttacacgtcagcaatactgtgaactcaacgatattcccttcacatcacttcgcgaatggccgcaggatgtcgcaaaagctgaacgccgggcaaatgaaccgaccgttcttcccgttcatattgcgccaccactgcatgctgatgtacctgaagtggtcaacaaaaactggccaccgagttag

SEQ ID NO: 466828 - DNA, 180 bp, Shigella boydii
atgttaaggccgctgtatttatttctaatctgtattttggatacttttttaatagataaagaaaagtatcccgaagagcaatgcgagttttgtctccagaagatgaaattcctaccggtattattgtattttttctctcctttattgtccgatttagcggtaatagattgcatgacataa

SEQ ID NO: 466829 - DNA, 219 bp, Shigella boydii
atggaagatttagcagatgttatttgccgagccttgggtatcccttcaattgatatcaatttgttcacctttttcatcactaaattgacagatattatctttacttatggccaaataaattataccatccgatttactatctgttactggaataatattttctgggaaattatcgtttccaaactcaagtgtttctatcgtccgtccgagaacaattaa

SEQ ID NO: 466830 - DNA, 243 bp, Shigella boydii
atggcactgaatattccattcagaaatgcgtactatcgttttgcatccagttactcatttctcttttttatttcctggtcgctgtggtggtcgttatacgctatttggctgaaaggacatctagggttgacagggacggaattaggtacactttattcggtcaaccagtttaccagcattctatttatgatgttctacggcatcgttcaggataaactcggtctgaagaaaccgctcatctga

SEQ ID NO: 466831 - DNA, 240 bp, Shigella boydii
atgatttcagcgaaacaaattaataacctgatatcgcaagagaagtttgatgttgatgcggcaatgaagaaagtgtctgaactggaaacgttggtggcgcaggccaaagaagcggataaaggcggcatgaatttctcgtttattaattcggcaggccagtatcaactcgaggctaaaaaatacgttcgccgcatcagagataaagtcccgtactctgaggtaatgactccaacttactga

SEQ ID NO: 466832 - DNA, 384 bp, Shigella boydii
atgggtctggataagatcgcgaataaaacgacagaatctcaggctgattttaaactggttgctagtgggtgcagcagtggcatcagttggattgataccactctgaccggaaatgcatcatcaagctcacctaagcttattataccgcagtctggtgattcatcttcgacgacaagtaatatcggtatgggtttcaaaaaacggactactgatgatgccactttccttaaacctaacagtgcggaaaagatacgctggagcacagacgagatgcagcccgataagggtcttgaaatgaccgttgcgctacgtgaaacagatgcagggcaaggcgtaccggggaattttcgtgcactggcaacgtttaatttcatctatcaataa

SEQ ID NO: 466833 - DNA, 216 bp, Shigella boydii; identical to SEQ ID NO: 21701

SEQ ID NO: 466834 - DNA, 327 bp, Shigella boydii
atgactaaaaatactcgtttttcccccgaagtccgtcagagggcgattcgtatggttctggaaagtcagggcgaatatgactcacagtgggcggcaatttgttccattgccccaaagattggctgtacaccggagactctgcgtgtctgggtacgccagcatgagcgggataccggaggcggtgatggcgggctcaccaccgctgaacgtcagcgtctgaaagagctggagcgtgaaaatcgtgaactgcgccgcagtaacgatatccttcgccaggcttccgcttattttgcgaaggcggagttcgaccgcctctggaaaaaatga

SEQ ID NO: 466835 - DNA, 354 bp, Shigella boydii
atgccactgctggataagctgcgtgagcagtacggggtcggaccgctatgcagcgaactgcatattgccccgtcaacgtattaccactgtcagcaacagcgacatcatccggataaacgcagtgcccgtgcgcagcgcgatgactggctgaagaaagagatacagcgcgtatacgatgaaaatcacaaggtatacggtgtaaagtctggcgtcagttgttacgggaaggtatcagagtggccagatgcactgtggcacgtctcatggcggttatgggacttgccggtgttctccggggtaaaaaggtccgtacgaccatcagccggaaagccgttgccgcaggcgaccgcgtaa

SEQ ID NO: 466836 - DNA, 327 bp, Shigella boydii
atgactaaaaatactcgtttttcccccgaagtccgtcagagggcgattcgtatggttctggaaagtcagggcgaatatgactcacagtgggcggcaatttgttccattgccccaaagattggctgtacaccggagactctgcgtgtctgggtacgccagcatgagcgggataccggaggcggtgatggcgggctcaccaccgctgaacgtcagcgtctgaaagagccggaacgtgaaaatcgtgaactgcgccgcagtaacgatatccttcgccaggcttccgcttattttgcgaaggcggagttcgaccgcctctggaaaaaatga

SEQ ID NO: 466837 - DNA, 354 bp, Shigella boydii; identical to SEQ ID NO: 466835

SEQ ID NO: 466838 - DNA, 417 bp, Shigella boydii
atggcggttatgggacttgccggtgttctccggggtaaaaaggtccgtacgaccatcagccggaaagccgttgccgcaggcgaccgcgtaaaccgtcagttcgtggcagaacgacctgaccagctgtgggtggctgattttacttacgtcagcacatggcagggcttcgtctatgtggcgtttatcattgatgtgtttgccggatacattgtggggtggcgggtctcatcgtccatggagacgacattcgtgctggatgcactggagcaggcgttatgggcccgtcgaccgtccggcacggtccatcacagtgataaaggttctcagaagtggcacactgaatttggccacctgaacagaggtgatatgctcaccccagaacaacacaggtgctccaatgaaaaaaagaaattttag

SEQ ID NO: 466839 - DNA, 483 bp, Shigella boydii
atgttgaatttactgttccatttaaaaatgaatggacgacagttctgttggttgattgtggggtctggttcacctgaactgcgggaacatttacagtatcagattgacagtatgggcatgcatgatgatgtttttattgctgacaatgtttttcctgccgcccccgtatatcgggttgccagtctggtggttctgccttcagaaaacgaatcgtttggtatggtactggcagaagcatcggcattttctgtgcctgtactggccagtcagattggtggaatccctgatgttattcagaacaaccagaccgggacattgttaccagcaggtaataagcacgcatggatgtgcgccctgaatgatttttttaatgaccctgggcgtttttatcagatggctcgccaggcaaaacaggatatagaagagcggtttgatattaataaaactgcgttaaaaatactcacattagcgaagcacaagtaa

SEQ ID NO: 466840 - DNA, 297 bp, Shigella boydii; identical to SEQ ID NO: 466822

SEQ ID NO: 466841 - DNA, 234 bp, Shigella boydii
atgttgggacttgaaccgaagaacacggcggtgcggagtccggagagtaacggaatagcagagagcttcgtgaaaacgataaagcgtgactacatcagtatcatgcccaaaccagacgggttaacggcagcaaagaaccttgcagaggcgttcgagcattataacgaatggcatccgcatagtgcgctgggttatcgctcgccacgggaatatctgcgtgaagtggcacactga

SEQ ID NO: 466842 - DNA, 468 bp, Shigella boydii
atggcatatgcaaaagctccatactatatggatatatatcctattatagagagagctttaaaaggaacagagagaaaggttagttctgtttgtttcaatgctattaacgatatactggattatctcgggatagaaaaaaatattgtcttctcaagtaatattgattatgacagatgtgctagtgcaactgataaactaattgggataacaaaagcattagaaagcaattactatattaatgcaagtggtggacaaaatctctacgattacgattattttaaaagcaaaaatattacgctcgcgtttattcaaatggatgatattgagtatacacagaatggaaagaatgctgagtttattcctaacttgtcaatattagatgtcttaatgtggtcttctccaaaaaatgtgttggaattgctaaataaatatactctgataacgagcgggcataattatggcaaatga

SEQ ID NO: 466843 - DNA, 327 bp, Shigella boydii
atgactaaaaatactcgtttttcccccgaagtccgtcaacgggcagtccgtatggttctggaaagtcagggcgaatatgactcacaatgggcgacaatttgttccattgctccaaagattggctgtacgccggagactctgcgtgtctgggttcgccagcatgagcgggataccgggggcggtgatggagggctcaccaccgctgaacgtcagcgtctgaaagagccggagcgtgaaaatcgtgaactgcgccgcagtaacgatatccttcgccaggcttccgcttattttgcgaaggcggagttcgaccgcctctggaaaaaatga

SEQ ID NO: 466844 - DNA, 327 bp, Shigella boydii
atgactaaaaatactcgtttttcccccgaagtccgtcagagggcgattcgtatggttctggaaagtcagggcgaatatgactcacagtgggcggcaatttgttccattgctccaaagattggctgtacgccggagactctgcgtgtctgggttcgccagcatgagcgggataccgggggcggtgatggagggctcaccaccgctgaacgtcagcgtctgaaagagctggagcgtgaaaatcgtgaactgcgccgcagtaacgatatccttcgccaggcttccgcttattttgcgaaggcgaagttcgaccgcctctggaaaaaatga

SEQ ID NO: 466845 - DNA, 216 bp, Shigella boydii; identical to SEQ ID NO: 21701

SEQ ID NO: 466846 - DNA, 309 bp, Shigella boydii
atgccattctatttcaggaaggagtgtccgttaaactcaggctacctcagggttgtaggcgcgtgggtatggaaccgaaataaagaaacggtggaaacctgccacgcaaaagcagtggtactggcaaccggcggtgcgtcgaaggtgtatcagtacaccaccaatccggatatttcttctggcgatggaattgctatggcgtggcgcgcgggtgatgctgccaacttactgatttcgtgtatgatggtgtttttgaggtgctccagtggcttctgtttctatcagctgtccctcctgttcagctactga

SEQ ID NO: 466847 - DNA, 204 bp, Shigella boydii
atggtgaggtacttcgggttccttgccaaccgggtgtgtggagagaagctgccgcaggtgtaccgtgctctggggatggataaacaggaaccagtggcgaaagtgtgctatgcacaaatggtgaaacagttcctgagtcgtgacccgttcgaatgcgtgctgtgtggcggccggatggtataccgccgggccatcgcggactga

SEQ ID NO: 466848 - DNA, 207 bp, Shigella boydii; identical to SEQ ID NO: 24440

SEQ ID NO: 466849 - DNA, 207 bp, Shigella boydii; identical to SEQ ID NO: 24440

SEQ ID NO: 466850 - DNA, 294 bp, Shigella boydii
atggccccccgcctgctcatcattgatgaaataggctatctgccgttcagtcagaaagaagcaaaactgttcttccaggtcatcgctaaacgttatgaaaagagcgcaatgatcctgacatccaatctaccgttcgggcagtgggatcaaacgttcgccggtgatgcagcactgacctcagcgatgctgggccgtatcttacaccactcacatgtcgttcaaatcaaaggagaaagctatcgactcagacagaaacgaaaggccggggttatagcagaagctaatcctgagtaa

SEQ ID NO: 466851 - DNA, 267 bp, Shigella boydii; identical to SEQ ID NO: 462029

SEQ ID NO: 466852 - DNA, 213 bp, Shigella boydii; identical to SEQ ID NO: 466777

SEQ ID NO: 466853 - DNA, 372 bp, Shigella boydii; identical to SEQ ID NO: 464557

SEQ ID NO: 466854 - DNA, 324 bp, Shigella boydii; identical to SEQ ID NO: 464561

SEQ ID NO: 466855 - DNA, 807 bp, Shigella boydii; identical to SEQ ID NO: 464586

SEQ ID NO: 466856 - DNA, 378 bp, Shigella boydii; identical to SEQ ID NO: 464587

SEQ ID NO: 466857 - DNA, 348 bp, Shigella boydii; identical to SEQ ID NO: 464590

SEQ ID NO: 466858 - DNA, 1128 bp, Shigella boydii
atgaaatcagttaatactaaaattaaaattgcacatctacaattaatgcccttgttaagtggtgtccagcgagtatctttgcaggaaattgaaaatttacctcctgagtattttgagattgatttaatatgtaaagagggtgggccgttagttgatgcgctaaataaaaaagttagaaagttctttatcccgactctttgtagaaatatttctccggttgaggatttaaaatccttgattagcttatataaaatattcaaaagagaaagatatgatattgtgcatacacactcttcgaaaacaggtattctaggaagaatagctgcacgtatggctaaagttccgtgtgttgtgcatacagttcatggttttgcatttgaaagtacgaaaaaacaggcaataaaaaatctatacaaatggctggagatgattggtgcaaaatgctctacaaaaataatatgtctccatgaggaagacaaaaatatatgtttaaatatactaaaaataaaagcagataaaattgtagttattccaaatggtgttgatataaataagttcactccagcaacgaataaaggtaaaataaaagaagaaatattaagcttgagagaatcaaattttgtttttactatggtaggacgattatggccacaaaaaaatcccttatattttgttgaggttgctaaacaaattataaaaaatgaactaatacccggttcgatttttgtactcgttggtgatggtgaattgatgagtgtaataaaagaacattatcttgaagatgagttgttacataataggttgttattattaggttggcgaaatgatatctcagatattttgaaagctagcgatgtattcgtactcccttctctttgggaaggaatgccattggccatactggaagcccaatcaacaggtttaccatgcgtagtatctaacattaatggaaataaatcattagttacgaataaagtcgatggctacttggttgaacttaacgatattaatagctttatcaacgcactagttaatattagtgaaaaaaatgtttatgccagaatgtctaataattgccgtgcaaaaatagttagtaattacaatataacacaaagaattgataattaa

SEQ ID NO: 466859 - DNA, 342 bp, Shigella boydii; identical to SEQ ID NO: 7923

SEQ ID NO: 466860 - DNA, 549 bp, Shigella boydii
atgcctttatatgaatggctaataaataaaagattgaggtatcagtacattacactgcttgcattctcgatcctggcattgcttgcactttacctattgtacagaaacacacctaaagtaagtgttaacttttttgatttttatcataaaaacttacgaggctatctcttctccggttttatttccgtgggttcatttttattgagcctgcatacctttgtcataataaatttacgcgataaggtttttgcaactcaggaatataaggagatttatagcattgccactggtatacctattgacaaaatcaatgatagtgtactttataaacctttagacaatttatcctcatttattaatacatcaatattatgttctatcacaacagcaattgcacaattcactattggactttcaactaatttatatgcatgcttattttgcgtatggcttgcaatactaacggtatttcttttattacattgcctcatcataatcagacaaaatattaaaattttattaaagcaacagagaaaaaaaggggggtaa

SEQ ID NO: 466861 - DNA, 798 bp, Shigella boydii
atgaaagttagaagcataggatttacaataaataacaataacaaaaatattaataccgttgacgtaatgaatgcttttatcaacgcatcaaacagagaacacagtcgcacagactatactcgtaaaattctcatttcggatgtgaatgatttctattatggattagttgtcacattcagaaaccaaaaaaagaactgtaagtcgcaatttgttgatggtaaattccagcttaaaattgaagatcttcaaggaagtgacaaacttgctaatttcaactttttcttaattaaaaaatctaatctttctggtctctatatgtatcaccacggttcatgcagtctgaacactctcttttctcatttagaaacaataagtaatgaatttatcagaaatcaaaataaagaagaaataaaaaaacttggtgataaaccaaaacaaaaagaagtaactgcaataaataaaaaatacaaaaaaagactgactttcagccttatgacaaataaaaacaacattcagagtgttttatgtcaattcaaagagattaaaagcacaagctttaaatttaattatatagattttaaaggtggaccaatgactgcgcttgaacaatttgttaacaccaccacaatagatatgaattttaattctagcgacagaacaaaagtgcaacaactatctcagaatctttcaaatatttataattctatgagtggagttgctaaagcacaggttattgcagtaaaccatgcaggaatagaaaaaaccattgattttatgaactgccctgtttttttttga

SEQ ID NO: 466862 - DNA, 177 bp, Shigella boydii; identical to SEQ ID NO: 3601

SEQ ID NO: 466863 - DNA, 129 bp, Shigella boydii
atgctgggtggggaaagtatgaaggaaaagaagactgctgcgccgtttgtcgtcacatttatcttcattggctatgcaagtcgtaatacaaggtgggacaaaactgagacacataaggcctcgcaatga

SEQ ID NO: 466864 - DNA, 1209 bp, Shigella boydii; identical to SEQ ID NO: 7876

SEQ ID NO: 466865 - DNA, 1434 bp, Shigella boydii; identical to SEQ ID NO: 7875

SEQ ID NO: 466866 - DNA, 774 bp, Shigella boydii; identical to SEQ ID NO: 7874

SEQ ID NO: 466867 - DNA, 1908 bp, Shigella boydii
gtgaacagccagacgcggacactgacgctcgaccgtgaaatcacgctgccatcctccggtaccacgctgataagcctggttgacggaagtggcaatccggtcagcgtggaggtccagtccgtcaccgacggcgtgaaggtaaaagtgagccgtgttcctgacggcgttgccggatacagcgtgtgggggctgaagctgccgacgctgcgccagcgcctgttccgctgcgtgagtatccgtgagaacgatgacggcacgtatgccatcaccgccgtgcagcatgtaccggaaaaagaggccatcgtggataacggggcgcactttgacggcgaccagagcggcacggtgaatggtgtcacgccgccagcagtgcagcatctgaccgccgaagtcaccgcagacagcggggagtatcaggtactggcccgctgggatacgccgaaggtggtgaagggcgtgagtttcatgcttcgcctgactgtggcagcggatgacggcagtgagcggctggtcagcacagcccggacggcggaaaccacataccgcttcacacaactggcgctggggaactacaggctgacagtccgggcagtaaatgcgtgggggcagcagggcgatccggcatcggtatcgttccggattgccgcaccggcagcgccgtcgcagattgagctgacaccggggtattttcagataaccgccacgccgcatcttgcggtttatgatccgacggtacagtttgagttctggttctcggaaaagcggattgcggatatcaggcaggttgaaaccagcgcgcgctatcttggcacggggatgtactggatagccgccagtatcaatatcaaaccgggccatgattattacttttatatccgcagtgtgaacaccgttggcaaatcggcattcgtggaggctgtcggtcaggcgagcgatgatgcggaaggttacctggattttttcaaaggccagataaccgaatcccatctcggcaaggagctgctggaaaaagtcgagctgacggaggataacgccagcaaactggaggagttttcgaaagagtggcaggacgctaacgataagtggaatgccatgtggggcgtcaaaattgagcagaccaaagacggcaaacattatgtcgcgggtattggcctcagcatggaggacacggaagaaggcaagctgagccagtttctggttgccgctaaccgtatcgcgtttattgacccggcaaacgggaatgaaacgccgatgtttgtggcgcagggcaatcagatatttatgaacgacgtgttcctgaagcgcctgacggccccgaccattaccagtggtggaaatccaccggcattttccctgacatcagacggaaagctgaccgctaaaaatgcggatatcagtggcagtgtgaatgcgaacgccgggacgctcaacaacgtcacgattaatgagaactgtcagattaaggggaaactgtcagccaaccagattgaaggtgatattgtcaaaacggtcagcaagtctttcccccgcacgagcacttatgccagtggcaccatcacggtaagaatcagtgatgatcagaaatttgaccggcaggtcatgataccaccagtgttattccgcggtggtaagcatgagaatttcaacagtaataaccaacagtcatactggtattcaacctgccggttaagagtgacccgcaatggtcaggagatttttaatcagtccacgacggatgctcagggcgtattttcctcagttatagatatgcctgccggacaggggacgctgacactgacattcaccgtatcttcatcaggagcgaataactggacaccaacaaccagtatcagcgatctgctggttgtggtgatgaaaaaatccacagcaggtatcagtatcagctga

SEQ ID NO: 466868 - DNA, 342 bp, Shigella boydii
gtgacgccaattaaacctgatgccacctttgtgactcagcgcgtctggtttggtgataagagcgaagtgaatctcggggcaggcgaagcgggctcagtgaccataccgcgtgggcagctgaaaaacctgaaggcgagctacacgttaacggaaccgcagcttaccgcaccgctgaaaaaaggtcaggttgtcgggaccattgatttccagcttaacggtaaatccattgaacagcgtccgctgatcgtgatggaaaatgtggaagagggcggattctttggtcggatgtgggatttcgtgatgatgaaattccatcagtggttcggcagctggttctcttaa

SEQ ID NO: 466869 - DNA, 996 bp, Shigella boydii; identical to SEQ ID NO: 466416

SEQ ID NO: 466870 - DNA, 291 bp, Shigella boydii; identical to SEQ ID NO: 464666

SEQ ID NO: 466871 - DNA, 297 bp, Shigella boydii; identical to SEQ ID NO: 7202

SEQ ID NO: 466872 - DNA, 198 bp, Shigella boydii; identical to SEQ ID NO: 7201

SEQ ID NO: 466873 - DNA, 285 bp, Shigella boydii; identical to SEQ ID NO: 7200

SEQ ID NO: 466874 - DNA, 390 bp, Shigella boydii; identical to SEQ ID NO: 7199

SEQ ID NO: 466875 - DNA, 195 bp, Shigella boydii; identical to SEQ ID NO: 464667

SEQ ID NO: 466876 - DNA, 600 bp, Shigella boydii
atgcgtaaattatgtgctgttattctgtccgcagtagtctggcaggtcgccgctgctacgccagcgagtgcagcagaacatcagtccacgctgagcgcggggtatctccatgcctcgacgaacgttcccggtagtgatgatctgaacgggattaacgtgaaataccgttatgagtttacggacgcgctggggctgattacgtccttcagttatgccaatgctgaggatgagcaaaaaacgcgctacagcgatacccgctggcatgaagattccgtgcgtaaccgctggttcagtgtgatggcggggccgtctgtacgcgtgaatgaatggttcagcgcgtatgcgatggcgggtgtggcttacagccgtgtgtcgactttctccggggattatctccgcgtaactgacaacaaggggaaaacgcacgacgtgctgaccggaagtgatgacggtcgccacagcaatacctctctggcgtggggggctggcgtgcagtttaacccgaccgaatccgtggccgttgaccttgcttatgaaggttccggtagtggcgactggcgaacggatgcatttattgttggtatcggataccgtttctga

SEQ ID NO: 466877 - DNA, 222 bp, Shigella boydii
atgatagttaagtttcatgccaggggaaaaggcggtggcagtggtccggttgattacctgctgggccgggagcgtaaccaggaaggggcgagagttctgcggggtgctcccgaagaggtgcgggaactcatcgatgccacgccgtttgcgaaaaaatacacctcgggggggggctgtcttttgcagagcagacactgccaccgggagagcgtgaaagggtga

SEQ ID NO: 466878 - DNA, 423 bp, Shigella boydii; identical to SEQ ID NO: 464688

SEQ ID NO: 466879 - DNA, 342 bp, Shigella boydii; identical to SEQ ID NO: 466452

SEQ ID NO: 466880 - DNA, 906 bp, Shigella boydii
atggtaatttcacaaattctaattttgtatgctgataaaaaacaaatttcaaattttgttaattttatttttctaatccagaccatttcattattattatattcaaatgaacttttccaaatgatgcgcggtttttttctttcagcccgctcagagcatctatatgagaattttagtgattcatattggtacagagatgcaacaatctcaaatcaaggatattctggatatgcattaggcgcacttcctttagtaattattgccgtccataacataatgaaatcaaaattctttagtattagatattttgttgcagtagtgtgttgcggattaggggtgtcagttgcaatgttaaatggtcgttcagtatttttgtttatcccattatatatgatatatcttatgctgaggcctaaagaaatatgtctgacatataaaataattcctgttattctgattattgtaagtgcaattattattgtacttacaaattttgatatatccagtaattttgttttggctttttttgaacaaaaggataaatcatatggcatagattcagttgatgatttaatgtataaccatactatcttacattttgatataacgttatttgggttgggaaaatatctactttccgatggttcagcatttgttagatctgatattggatactatagacaaatgggagtcggtggaatatctttggtgttattttatattttcagcatatggttagctgtaagatatgttatctatcgtgatttatcattatttattttattcataatattactggctaattttaagcaagaagcatttaataatgcaatgttaatgtatggtgcttttttactagcagcatattgggtagctcgggataaaatagagataacaaagaaatga

SEQ ID NO: 466881 - DNA, 303 bp, Shigella boydii; identical to SEQ ID NO: 459543

SEQ ID NO: 466882 - DNA, 1455 bp, Shigella boydii
atgaaaatacctgaagcagtaaatcatattaatgttcagaacaatattgatcttgttgatggaaaaataaatccgaacaaagatacaaaagcattacaaaaaaacatatcatgcgtaacaaactcatcctcttctggcataagtgaaaaacatttagatcactgtgctgatactgtgaaaagctttttaaggaagtctatagcagcgcaaagttatagtaaaatgttctctcaagggaccagtttcaaatcattaaatctttctattgaagcgccatctggagcacggtcatcatttcggtcacttgagcacctcgataaggtgtccagacactatctttctgaaataatacaaaaaactcatcctctttcttcggatgaacgtcacttgctctctattattattaattctgattttaacttcagacatcaaagtaacgctaacctgtcaaataatactcttaatattaagtcctttgataaaattaagtctgagaatatacaaacatataaaaacacattctctgaggatattgaagaaatagctaaccacgattttgttttttttggggttgaaatttccaatcatcaagaaacactcccactaaataaaacacatcatactgtggattttggtgctaatgcgtatatcattgatcatgactctccatatggatatatgacattaaccgaccactttgataatgctattccacctgttttttaccatgagcaccaatcatttttcttagataactttaaagaggttgtggatgaagttagcaggtatgtgcatggtaatcagggaaaaactgatgtgccaatatttaatactaaagatatgaggcttggaattgggttgcatcttattgattttataagaaagagtaaagatcaaagattccgagagttttgttataataaaaacattgaccctgttagtctggatagaattataaactttgtgtttcagcttgagtatcatataccaagaatgctaagcacagataacttcaaaaagataagactcagagatatatctttggaggatgccattaaagcatccaattatgaagaaattaacaataaggtgactgataaaaaaatggctcatcaagctcttgcttattctctaggcaatgcaaaatctgatatggcactttatttactatctaaatttaattttacaaaacaagatgtcgcagagatggagaaaatgaacaacaatatgtattgtgagctgtatgatgttgagtatttacttagtgaagatagtgccaactataaagtgctagaatattttattaataatggattggttgatgtaaacaaaagatttcaaaaagcaaatagtggggacactatgcttgacaatgcaatgaaaggcaaagattcaaaaacaattgattttttattaaaaaatggagcggtatcaggcaaacgatttgggaggtga

SEQ ID NO: 466883 - DNA, 1038 bp, Shigella boydii; identical to SEQ ID NO: 464708

SEQ ID NO: 466884 - DNA, 210 bp, Shigella boydii; identical to SEQ ID NO: 464558

SEQ ID NO: 466885 - DNA, 195 bp, Shigella boydii
atgaacaagcagcagcaaaccgtactcaacatggcgggattcataaaaggccagagcctgacgctgctcgaaaaactggacgcactcgatgctgacgagcaggccaccatgtgtgagaagctgcacgaactcgcagaagaactccagaacagcatacagacacgctttgaagtagaaaatagcacagatatataa

SEQ ID NO: 466886 - DNA, 1455 bp, Shigella boydii
atgaaaatacctgaagcagtaaatcatattaatgttcagaataatattgatcttgttgatggaaaaacgaatccgaataaagcaacaaaagcattacaaaaaaatatattacgcgtaacaaactcatcttcttctggcataagtgaaaaacatttagatcactgtgctaatactgtgaaaaactttttaaggaagtctatagcagcgcaaagttatagcaaaatgttttctcaagggaccagtttcaaatcactaaatctttctattgaagcgccatctggagcacggtcatcatttcggtcacttgagcatctcgataaggtgtccaggcactatatctctgagataatacaaaaagttcatcctctttcttcagacgaacgtcacttactttctattattattaattctaattttaacttcagacatcaaagtaactctaatctgtcaaataatattcttaatattaaatcctttgataaaattcagtctgaaaatatacaaacacataagaatacatactctgaggatattaaagaaatctctaaccacgattttgttttttttggggttgaaatttccaatcatcaagaaaaactcccactaaataaaacacatcatactgtagattttggcgccaatgcgtatatcattgatcatgactctccatatggatatatgacattaaccgatcactttgataatgctattccacctgttttttaccatgagcaccaatcatttttcttagataactttaaagaggttgtggatgaagttagcaggtatgtgcatggtaatcaggggaaaactgatgttccaatatttaacactaaagatatgaggcttggaattgggttgcatcttattgattttataagaaagagtaaagatcaaggattcagagagttttgttataacaaaaatattgatcctgttagtctggatagaattataaactttgtgtttcagcttgagtatcatataccaagaatgctaagtacagataacttcaaaaaaataaaactcagagacatatctttggaggatgcgattaaagcatctaattatgaagagattaacaataaagtgactgataaaaaaatggctcatcaggcccttgcttattctttaggcaataaaaaagctgatatagcactttatttactatctaaatttaattttacaaaacaagatgtcgcagagatggagaaaatgaacaacaatagatattgtaatctgtatgatgttgaatacttacttagtaaagatggtgccaactataaagtgctagaatattttatcaataatggattggttgatgtaaacaaaaaatttcaaaaagcaaatagtggggacactatgcttgacaatgcaatgaaaagcaaaaatccaaaaatgattgatttcttattaaaaaatggagcaatattaggcaaacgatttgagatatga

SEQ ID NO: 466887 - DNA, 150 bp, Shigella boydii
atgcgtgattttgagaattcctttgatgctgcccttgccagggtggacagaacgattgttgaagtgatggggctctgtgcgcagttcacctcgggggcacagtgtggcagcgaagttcagggggtttttgacgatccggagtgccggtag

SEQ ID NO: 466888 - DNA, 570 bp, Shigella boydii
atgacctacaaatacaaccccttctggcagcaacgtattcgtgagacggtgcggcacgcactgaatgttcatccccgcctgacggcattgcgggttgacctgcgtctcccggatgtaccggcagcaacggacgcagctgtgatatcccgcttcatcaatgccctgaaagcccgaatcgacgcttaccagaaacgtaagcatcgggaaggtaaacgcgtgcatcccacaaccctgcattacgtctgggcccgggagtttggggagtgcaaaggtaaaaaacactatcacctgatgctgctggtcaaccgggatacctggtgtcgtgccggcgattaccgcgctccgggatcactggccgggatgattaaacaggcgtggtgcagtgccctgggagtggataccggagatcataccacgctggcgcattttccggtcaggccggcggtgtggctggaacgcgatgatgacaccggctttcagcaggtgctggagcgtgctgactatctggcgaaggagagtaccaaagcttacggcaccggtgagcgcaactttggctgcagtcgtggctga

SEQ ID NO: 466889 - DNA, 192 bp, Shigella boydii; identical to SEQ ID NO: 464451

SEQ ID NO: 466890 - DNA, 507 bp, Shigella boydii
gtgcgggtattacttcgacctgttctggttccggaactcgggctggtggtccttaagccaggccgtgaatccatgccggtattccacaatacccgggtactggtggagccggaaccgaaaagcatgcgtaatctgccgtccggggtcgttcctgccgttcgccagccgctagtggaagacaaaacattgctgccgtttttcagtaacgcacgggtgattcgtgctgctggtggtgctggtgcattgtctgactggctgttgcgccatattaaatcctgccagtggccacacggcgattatcatcacagcgaaaccgtcattcaccgttatggtaccggcgcaatggtgttgtgctggcactgcgacaaccagttgcgtgaccagacatccgaatcactcgagcaacttgctcatcaaaacctgtcagcatggatgattgacgtcatcggtcacgcaataagcggtacgcaggagcgtgaattatctctggctgaattatcctggtag

SEQ ID NO: 466891 - DNA, 237 bp, Shigella boydii; identical to SEQ ID NO: 466453

SEQ ID NO: 466892 - DNA, 1404 bp, Shigella boydii
atgctgttcggtacccgttctgaaaaactgcgtcgtgaagttgaacaggctgaggccctgctgaaacaacgcgaacaggacagtgatcgttacagtgggcgggaagacgatccgcaggttccccgccagttgcgacagtctcgtcatcgtcgcccgttaccggagcatctgccccgcgaaataaatcgcctggagccagaagaaagctgttgcccggagtgtggcggtgagctggattatctgggggaagtcagcgcagaacaactggaactggtgagcagcgctctgaaagtgatccgcacagaacgggtaaaaaaagcctgtacaaaatgtgactgcatcgttgaagcaccggcaccatcccgtccgatagagcgtggtatcgcgggcccggggttacttgcccgcgtgttaacgggaaaatactgcgaacacctgccactgtatcgtcagagtgaaatttttgcccgtcagggtgtcgaactgagccgtgcattactctccaactgggttgacgcgtgctgccagttaatgacgccgctgaatgatgctctgtaccgttatgtgatgaacagccgcaaagttcacactgatgacacaccagtaaaagtgctggcaccgggcaggaagaaggcgaaaacaggatatatctggacgtatgtccgggatgacaggaatgccggttcgccagagcctccggcggtctggttcgcctactcaccggaccatcagggtaaacatccggagcagcaccttagtcccttccggggtatcctgcaggcagatgcgtttaatggttacgatcggctgttcagtgccgaacgagaaggcggcgcgttgacggaagcaggatgctgggctcatgcgcggcgcaaagtccacgatgtatatatcagtaccaaaagcgcgacagcggaagaagccctgaaactaatcggtgagctgtacgccatcgagcacgaaatacgcgggttgccggtgtctgaacgcctggcggtcaggcaaatgcagagtaaaccgctactgacttccctgtataagctgatgcaggagaaagaacagacgttatcgaaaaaatgccgtctgagagatgcgttccggtatatcaggaagcactgggttgcgttgtgcaacttcagtgatgatggtctggctgaggcggataataatgccgcggaaagagcgcttcgtgcagtctgtctcggaaagaaaaactttatgttcttcggcagcgatcacggtggagagcgtggtgcgctactgtacgggctgatcggcacctgccgactgaacggtatcgatccggaagcgtatctgcgctatatcctgagcgtactgccggaatggccttccaaccgtgttgacgaactcctgccatggaacgtagcactcaccaataaataa

SEQ ID NO: 466893 - DNA, 294 bp, Shigella boydii
atgcatatatcagtaatcgctatatatgactcaccgaaagagtctgaactattagttagtaatattaagcgatttttgaaaaacaccttttctgatgttaagtatgaaaatatatctgtcatattaacaccgaaagaagaatatgtttatacaaatgtacaacctgttaaggaaattaaatcggaatatttaacaaatgaagtaatatatgtatttctcgggatggctgtactagttgtcattcttttagtatgggcattcaaaacagggtggttcaagagaaacaaaatatga

SEQ ID NO: 466894 - DNA, 429 bp, Shigella boydii
gtggcctgtggtgcgcttagtctggggctgaatcattaccgtgataacgccattacctacaaagcccagcgcgacaaaaatgtcagagaactgaagctggcgaacgcggcaattactgacatgcagatgcgtcagcgtgatgttgctgcgctcgatgcaaaatactcgagggaattagccgatgcgagagctgaaaatgaaactcttcgcgctgacgttgccgctggtcgtaagcgcctgcgtatcaacgccacctgtccaggtcccgtgcgtgaagccaccggcaccgcccgcgtggataatgcaaccggcccccgactggcagacaccgttacacgggattatttcaccctcagagagcggctgatgacgatgcagaagcaactggaaggggcgcaggaatatatccgtactcagtgcctgaaataa

SEQ ID NO: 466895 - DNA, 1128 bp, Shigella boydii; identical to SEQ ID NO: 462714

SEQ ID NO: 466896 - DNA, 534 bp, Shigella boydii; identical to SEQ ID NO: 464756

SEQ ID NO: 466897 - DNA, 369 bp, Shigella boydii
ttgacctgtgcacagtggctctggaaaaaaatcattgccctgtacgagcaggccgccgaatgtgacggcgaggtggttcgtcccaaagaaccgaactggacagcctgggcaaacgaaattcgcctgatgtgtgtgcaggatggtcgtactcacaaacaaatctgcgagatgtacagccgcgtcagccgcgatccgttctggtgccgtaacgtgctcagcccgtcgaagttgcgggaaaaatgggatgagctttccctgcgcttatcgccgtccgtcagcacgtacaccgaaaaacgcgaagacccgtacttcaaagccagttacgacaacgtggactacagccagatcccggcaggattcagggggtga

SEQ ID NO: 466898 - DNA, 279 bp, Shigella boydii
atgactagtctaaaaactagtattaagactatcacttatttaagtgatactggttgtctggagattcagggggccagtctactttataagcaccacgttacagcgaatcacatcactcttacggcactggcgctttctctttttaccggattgctgttggtgttggtggcacaacccatcctctttttgctattgcccatcgtgctttttatccgtatggcgctcaatgcgctggatggcatgttggcgcgtgagtgggtaatgctgccaacttactga

SEQ ID NO: 466899 - DNA, 870 bp, Shigella boydii; identical to SEQ ID NO: 465525

SEQ ID NO: 466900 - DNA, 633 bp, Shigella boydii
atgaagaacagcgaaaatgagcttgctgagcaacttatagaacaaaccggcgataacactctgacgttaatggataaaggttattactcactgggactgttaaatgcctggagcctggcgggagaacaccgccactggatgatacctctcagaaagggagcgcaatatgaagagctcagaaaactgggtaaaggcgatcatctggtgaagctgaaaaccagcccgcaggcacgaaaaaagtggccgggactgggaaatgaagtgacagcccgcctgctgaccgtgacgcgcaaaggaaaagtctgccatctgctgacgtcgatgacggacgccatgcgcttccccggaggagaaatggcggacctgtacagtcatcgctgggaaatcgaactgggatacagggagataaaacagacgatgcaactgagcaggctgacgctgagaagtaaaaagccggagcttgtggagcaagagctgtggggtgtcttactggcttataatctggtgagatatcagatgattaaaatggcggaacatctgaaaggttactggccaaatcaactgagtttctcagaatcatgcggaatggtgatgagaatgctgatgacattgcagggcgctgaggtagcctga

SEQ ID NO: 466901 - DNA, 597 bp, Shigella boydii
ttgagaaaaggggagattggttgttcgttgagccattttaatattattagagattttgcattaaactccaaagaaaattggttgctaatcatggaggatgatgctgttccagagagtcaatttattcattttataaatgaatttgaaaataaacatgtaactacaaacgctgaagtaatattattaggtcattcaaaaacaagccgtaagcatatatttgttcaacgtttgaagcagcccctgcgtaactataaaaacataaacggaataagttttggtgaaaataaaaatgttaccctttgtgggacagttgcatatctaattaataaacaagccgccaacataatatctggtaatagccaaccgtattggcttgctgacgattggttcttattccaaaatatggggattagggtttatcatccacaaattccgctagtgtatgaagatctctcttatgatagctctacagaaaatgatatttattaccatcacaattttataaaagaacccctaaaaaatatcatacacataatcatagggcaatataaattctggaatgactctcgaaagttacggaaatcaaataataaatga

SEQ ID NO: 466902 - DNA, 597 bp, Shigella boydii; identical to SEQ ID NO: 464776

SEQ ID NO: 466903 - DNA, 528 bp, Shigella boydii
atgttctatttcccgttcatcttcttcgatcttttcttcggcgcgggccagtgcagagcgcaggaaggcctccgtctcttcaaccagactcagttgctggtctttctgacggagctggcattccagttctgcaatgcgaatgaggtatttttgattcatggccgtttttataatccggccatgacatttttacaacattgtcagtgcgttaaggcgggatgtttttggctgacgccagtccagcttatcgaggagcattgccagttgcgagcgggtaatggataccttgccgtcacgcacagcaggccagataaactggccttcctccaggcgtctggtgaacaggcacagatcatcagcatcagcccacaggattttaatcatgtcaccccgtcggccacggaagatgaacaggtgaccggagaagggattatcattcagcacatgctgtacctgttcacccagcccgttgaaagacttacggtaagcgtacagcctgaaccgtctggtcagaatctgacgaattag

SEQ ID NO: 466904 - DNA, 255 bp, Shigella boydii; identical to SEQ ID NO: 464791

SEQ ID NO: 466905 - DNA, 255 bp, Shigella boydii; identical to SEQ ID NO: 464791

SEQ ID NO: 466906 - DNA, 342 bp, Shigella boydii; identical to SEQ ID NO: 466452

SEQ ID NO: 466907 - DNA, 342 bp, Shigella boydii; identical to SEQ ID NO: 466452

SEQ ID NO: 466908 - DNA, 225 bp, Shigella boydii
atggcgctcaggagccagcgcccacctgccgggctaatccaccactctgatcgaggttcacagtactgcgcatacgattaccgggtcatacaggagcagtctggtctgaaaacatcaatgtcgcgtaaaggtaactgttacgacaacgctccgatggaaagcttctggggaacgctgaaaaatgagagcctgagccactatcgttttaataaccgggatgaatga

SEQ ID NO: 466909 - DNA, 303 bp, Shigella boydii
atgagcagaaaaacccaacgttactctacggagtttaaagccgaagccgtcaaaacggttcctgaaaatcagctttcgatcagtgaaggcgcttcccgattatctgttcctgaaggcactttaggacaatgggttaccgctgcaagaaaagggctcaatacaccaggctcccgcacagtggctgaactggaatctgaagttatgcaactgcgtaaggctttaaatgaagcacgacttgagcgagatatattaaaaaaagcaacagcgtattttgcccaggagtcgctgaaaaatacgcgttag

SEQ ID NO: 466910 - DNA, 234 bp, Shigella boydii
gtgtgtggagagaagctgccgcaggtgtaccgtgctctggggatggataaaccggaaccagtggcgaaagtgtgctatgcacaaatggtgaaacagttcctgagtcgtgacccgttcgaatgcgtgctgtgtggcggccggatggtataccgccgggccatcgcgggactgaatgtggaggggctgaagaaaaacgcgcgggatatcagtctgctgaggtatatgccggcctga

SEQ ID NO: 466911 - DNA, 195 bp, Shigella boydii; identical to SEQ ID NO: 465743

SEQ ID NO: 466912 - DNA, 303 bp, Shigella boydii; identical to SEQ ID NO: 464103

SEQ ID NO: 466913 - DNA, 246 bp, Shigella boydii; identical to SEQ ID NO: 466060

SEQ ID NO: 466914 - DNA, 378 bp, Shigella boydii
atggacgaacagtggggatacgtcggggctaaatcgcgccagcgctggctgttttacgcgtatgacagggtccggaagacggttgttgcgcacgtattcggtgaacgcactatggcgacgctggggcgtcttatgagcttgctgtcaccctttgacgtggtgatatggatgacggatggctggccactgtatgaatcccgcctgaagggaaagctgcacgtaatcagcaagcgatatacgcagcgaattgagcggcataacctgaatctgaggcagcacctggcacggctgggacggaagtcgctgtcgttctcaaaatcggtggagctgcatgacaaagtcatcgggcattatctgaacataaaacactatcaataa

SEQ ID NO: 466915 - DNA, 273 bp, Shigella boydii; identical to SEQ ID NO: 464593

SEQ ID NO: 466916 - DNA, 462 bp, Shigella boydii
atgaataagagattggaacgtgagctatttaaaacaatagttgagcatactcctctaatctcgattgatctcataattagaaacgataaaggagaggcgctgctggggctgcgcctgaatcgcccagcacaaaattattggtttgtgccaggagggcgaatttataaggatgagtcattcgagattgcatttaagcggataacatttgaagaggtgggcgttcaaattagtcttaatgatgccttatttctaggggtgtatgaacatttttacaatgataatttttctgaagcagaattttctacacactatgtagtgcatggatatgaaatccaacttaaacctcagcaacttcacctaccaacggtccagcataattcctacaagtggtttgatgtagtaacgttgcttaatagcactacagttcatcaatataccaaaaattattttataccaaggtaa

SEQ ID NO: 466917 - DNA, 1359 bp, Shigella boydii
atgcaaaccgttttagcgaaaatcgtcgcagacaaggcgatttgggtagaaacccgcaaacagcagcaaccgctggccagttttcagaatgaggttcagccgagcacgcgacatttttatgatgcgctacagggtgcacgcacggcgtttattctggagtgcaagaaagcgtcgccgtcaaaaggcgtgatccgtgatgatttcgatccggcacgcattgccgccatttataaacattacgcttcggcaatttcggtgctgactgatgagaaatattttcaggggagctttgatttcctccccatcgtcagccaaatcgccccgcagccgattttatgtaaagacttcattatcgacccttaccagatctatctggcgcgctattaccaggccgatgcctgcttattaatgctttcagtactggatgacgaccaatatcgccagcttgcagccgtcgctcacagtctggagatgggggggctgaccgaagtcagtaatgaagaggaactggagcgcgccattgcattaggggcaaaggtcgttggcatcaacaaccgcgatctacgtgatttgtcgattgatctcaaccgtacccgcgagcttgcgccgaaactggggcacaacgtaacggtaatcagcgaatccggcatcaatacttacgctcaggtgcgcgagttaagccacttcgctaacggttttctgattggttcggcgttgatggcccatgacgatttgcacgccgccgtgcgccgggtgttgctgggtgagaataaagtatgtggcctgacgcgtgggcaagatgctaaagcagcttatgacgcgggcgcgatttacggtgggttgatttttgtcgcgacatcaccgcgttgcgtcaacgttgaacaggcgcaggaagtgatggctgcggcaccgttgcagtatgttggcgtgttccgcaatcacgatattgccgatgtggtggacaaagctaaggtgttatcgctggcggcagtgcaactgcatggtaatgaagatcagctgtatatcgatacgctgcgtgaagctctgccagcacatgttgccatctggaaagcattaagcgtcggtgaaaccctgcccgcccgcgagtttcagcacgttgataaatatgttttagacaacggccagggtggaagcgggcaatgttttgactggtcactattaaatggtcaatcgcttggcaacgttctgctggcggggggcttaggcgcagataactgcgtggaagcggcacaaaccggctgcgccggacttgattttaattctgctgtagagtcgcaaccgggcatcaaagacgcacgtcttttggcctcggttttccagacgctgcgcgcatattaa

SEQ ID NO: 466918 - DNA, 378 bp, Shigella boydii; identical to SEQ ID NO: 466914

SEQ ID NO: 466919 - DNA, 744 bp, Shigella boydii; identical to SEQ ID NO: 463696

SEQ ID NO: 466920 - DNA, 177 bp, Shigella boydii
atgcaggtagccagtgagcatattgcgccgcttcaggatgctgcagatctgaaaatcgcaacggaggaagaaaactcgttgctggaagcctggaaaaagtatcgggtgttgctgaaccgtgttgacacatcaactgcaccggatattgagtggcctacagtacctgttatggaataa

SEQ ID NO: 466921 - DNA, 276 bp, Shigella boydii; identical to SEQ ID NO: 464627

SEQ ID NO: 466922 - DNA, 552 bp, Shigella boydii; identical to SEQ ID NO: 466088

SEQ ID NO: 466923 - DNA, 600 bp, Shigella boydii
atgacaacccagactgtctctggtcgccgttatttcacgaaagcgtggctgatggagcagaaatcgcttatcgctctgctggtgctgatcgcgattgtctcgacgttaagcccgaactttttcaccatcaataacttattcaatattctccagcaaacctcggtgaacgccattatggcggtcgggatgacgctggtgatcctgacgtcgggcatcgacttgtctgtaggttctctgttggcgctaaccggcgcagttgctgcatctatcgtcggcattgaagtcaatgcgctggtggctgtcgctgctgctctcgcgttaggtgccgcaattggtgcggtaaccggggtgattgtagcgaaaggtcgcgttcaggcgtttatcgctacgctggttatgatgcttttactgcgcggcgtgaccatggtttataccaacggtagcccagtgaataccggctttactgagaacgccgatctgtttggctggtttggtattggtcgtccgctgggcgtaccgacgccagtctggatcatggggattgtcttcctcgcggcctggtacatgctgcatcacacgcgtctggggcgttacatctag

SEQ ID NO: 466924 - DNA, 348 bp, Shigella boydii; identical to SEQ ID NO: 464879

SEQ ID NO: 466925 - DNA, 705 bp, Shigella boydii
gtgaatacacaacaactgaaaatgaagagtgcacctgtgctacctatttcctgtttgattatgggcgggactcagttatcacgtcattattatgtgaaaggcgagatattctttgcaatacaagtatgctttttgctttatctttccgatattgtgcatacattaataggtttgttcacattaggtgatgtcgcgcaaattcgaaaagggttgactgttattcagggtgacaattctatatttatgcttgtagagggcgtgatagcgaccattattgttggcttattcgccactatttacatccttaatattaaagatgcgcggaactcatcttattgccatctgacttttaaacaacagttatataagctctatgaggataaatttgcatttatagtcctaacgcccgcatttttagcgagtatagcattcattgttttacctattgtaattacagttcttgtatcgtttacaaactatgctgcgccaaatcacatcccaccaaagaacctggttgattgggttgggattaaaaatttcataatgttgtttaaatttaaaatatggtctgatacgtttctaggtgtcgctctctggacatttatttgggcaatttgcgcgacggtttttaccttcagttttggctttattctggctttagcactggctaaaaaaatatacgtttcgcaaaagtctggcgattga

SEQ ID NO: 466926 - DNA, 603 bp, Shigella boydii
atgatggcagtgatgccgtttaaacataataatctgcggcttctggggctgagtaacaaaatcctgctggctgatgagatccacgcctgtgacgcttacatgtcgtgcattcttgaagggctgatcgagcggcaggcgtgtggcggaaacagcgttattttgctttctgctacgttatctcaacagcagcgcgacaaactcgtcgccgcctttgcgcgtggtgcagagggccagcaagaagccccactcctgggaaaagatgattacccctggctgacgcatgtcacgaaaaccgatgtacattcgcaccgggtagcgacgcgcaaagaagttgaacgtagcgtgagcgtgggttggctccatagtgaacaagagtgtattgcgcgtatcgaatcggcggtaagtcaggggaaatgcatcgcctggattcggaattctgttgatgacgctattcaggtgtatcgtcagctgcttgcccgcggcgtcattcctgcttccagcctttcactttttcatagccgctttgcttttagcgatcgccagcgaattgaaacggaaacgctggcacgctttggtaaatattgtagtttacagagagcgtag

SEQ ID NO: 466927 - DNA, 1662 bp, Shigella boydii
gtgcgattatttgctcaattaagctggtatttccgtcgggaatggcgtcgctatctcggggctgtcgccttgcttgtcattatcgcgatgctgcaactggttccgccaaaagtggttggtattgttgtcgatggcgtgacagaacaacactttactaccgggcagatcctgatgtggatcgccaccatggtgctgattgccgttgtggtttatttcctgcgttacgtctggcgggtattgctgtttggtgcgtcttatcaactggctgttgaactgcgtgaagattattaccgtcagctaagccggcagcatcctgagttttacctgcgtcatcgcacgggtgacctcatggctcgtgcgaccaatgacgtcgatcgcgtcgtgtttgcagccggagaaggggtgctgacgctggtggattcactggtgatgggctgcgctgtgttgattatgatgtctacgcaaattagctggcagttgaccttatttgccctgttgccgatgccagtgatggcgatcatgatcaagcgcaacggcgatgccttgcatgaacgctttaagctggcacaggcggcgttttctagtcttaatgaccgcacccaggaaagcctcaccagtatccgcatgatcaaagcctttggcctggaagatcgccagtcggcgttatttgccgcggatgccgaagataccggcaaaaaaaacatgcgggtggcgcgtattgatgctcgtttcgacccgaccatctatatcgcgattggtatggcgaacttgctggcgattggcggcggtagttggatggtggtgcagggcagtttaacgctgggccagctcaccagttttatgatgtatttaggtctgatgatttggccaatgctggcgctggcatggatgtttaacattgtggaacgtggtagtgctgcatacagccgtattcgcgcgatgctggcggaagcgccggtggtgaacgatggtagcgaacccgtgccggaagggcgtggcgaactggatgtaaatattcaccagttcacgtatccgcagactgaccatcctgcgctggaaaacgtcaatttcgccctgaaacccggtcagatgctgggtatctgcgggccgactggttccggcaaaagtaccctgttgtcgctcattcagcgtcatttcgacgtcagcgagggggatattcgctttcatgatattcctctgacgaagttacaactcgatagctggcgtagccgcctggcggtagttagccagacaccgttccttttttccgacaccgtagcgaacaacatcgcgttgggttgcccgaatgccacccagcaagagattgagcatgtcgcgcggttagccagcgtacatgacgatattttgcgtctaccgcaaggttacgatacagaagtgggcgagcgcggcgtgatgctttccggtgggcaaaaacagcgtatctccattgctcgagcgttattagtcaacgcggaaatcctcatccttgatgatgcgctttcagcggtggacggacgcacagagcaccagatcctgcataacctgcgtcagtggggacagggaagaacggtaatcatcagtgcccatcgcctttcggcactgacggaagccagtgaaaatgtaatgaacgcatcccacacaattaaacacggagcagtatga

SEQ ID NO: 466928 - DNA, 411 bp, Shigella boydii; identical to SEQ ID NO: 466120

SEQ ID NO: 466929 - DNA, 378 bp, Shigella boydii; identical to SEQ ID NO: 460256

SEQ ID NO: 466930 - DNA, 225 bp, Shigella boydii
atgtcgcgtaaaggtaactgttacgacaacgctccgatggaaagcttctggggaacgctgaaaaatgagagcctgagccactatcgttttaataaccgggatgaagccatctcagtaatacgggaatacattgagattttctacaatcgtcagcgtcgtcactctcgtctggggaatatctcctcggcagccttcagggaaaaatatcatcagatgactgcttaa

SEQ ID NO: 466931 - DNA, 636 bp, Shigella boydii
atggggcaacaaaagcagcgtaatcgacgttgggttctggcctcgcgtccacatggcgcaccggttccggagaatttccgtcttgaagaagatgatgtcgccacaccgggtgaaggacaggtgttactgcgcacagtttatttgtccctggacccgtatatgcgtggacgtatgagcgatgagccatcttattcaccgcctgttgatattggcggcgtgatggtcggcggcacggtgagccatgttgtggagtcgaatcatcctgattatcagcctggcgactgggtgctgggctacagtggatggcaggactatgacatatccagtggtgatgatctggtgaaacttggcgatcatccgcaaaatccatcgtggtcgctgggtgtgctggggatgccaggctttaccgcttatatggggctgctggatatcggtcagcctaaagagggcgaaacgttggtggtagctgcggcgacaggtcctgtgggagcaacggtgggcaaatcggcaaacttaaaggttgcagggtggtggggggtgccggtggcgcggaaaaatgccgccatgctatcgaggtgctgggcttcgatgtttgtcttgatcaccacgcgggtgattttgccgaacaactggtga

SEQ ID NO: 466932 - DNA, 1602 bp, Shigella boydii
atgaacaatgaactccccgatgatattgtgctgcttaaagccatgttgcgtaagcaacagagtcggcttcgacagtatgcctgtcaggtcgcgggctatgaacaggaaattgaacggctgaaagcgcaactcgacaggttgcgtcgtatgctgttcggccagagttcagagaaaaagcgtcataagcttgaaaatcagatccgacaggcagaaaaacgactgtcggaactggaaaactggctgaacacagccagaaatcttctggaagatgcatcgtcagtcacagattcacctgacaccagtcccccgtcagaaaacccgatcgccagtaagcctgaatccccgggacgaaaatcttcacgaaaaccgctgccggcagaacttccccgggagacacatcgccttctgcctgctgaaaccagttgcccggcctgtggaggtgttctgaaagaaatgggggaaacaatctcagagcaactggatatcattaataccgcctttaaagttatcgaaaccatacgtcccaaactggcctgtagccggtgtgatgtcatcgttcaggcaccacttccccctaaaccgatcgaacgcggttatgccagtgcagggttacttgcacggatcctggtcagcaaatatatggaacatatccctttatatcgccagtcagaaatatacgcgcgacagggcgtggagctgagccgtaataccatggtgcgctgggtatcagaaatggcagacaaactccgtcctctgtatatagcgctgaatgactatgttctggaggcaggaaaggtgcacgcagatgacactccggtgaaagtactggccccggggaacggaaagacgaaaacgggtcgtctgtgggtatacgtcagggatgatcgtaatgcgggttcatccctgccggcagccgtctggttcgcgcattcggcagatcgcaaaggagaacatccgcagctccacctggcaaagtatcagggcgtactgcaggctgatgcctatgcaggttataacgtactgtacgaaacgggccgggtgaaggaagccgggtgcttggcccacgcccgccgaaaaatccatgacgaggatgtgcgccgtccgacagaaatgactcaggaagcgctcagacggatagcagagttatacgacatagaagcggagatacgtggcagtccggcagaggaacggcttgcagtcagaaaagccagaagcgtccagttgatgcagtcattgtacgactggatacagttgcagaggaaaacgctgtcgaaacatgcggagatggcgaaggcgttcgactatatcctgaatcactggaatgcgctgaacgagttctgtcgtgacggctgggtggaaatagacaacaacatcggtgaaaacgcgttacgatcggtggcggttggaagaaaaaattatctctttttcggctcagacaagggaggagaaagtgcggcgatcatctacagtctgctggtcacctgcaaacagaacgaagtggagccggaggactggttgcgcgaagtgatcgagaagctcaatgactggccgtcgaaccaagtgcatgaactgctgccctggaacttctcgtctgtaaaataa

SEQ ID NO: 466933 - DNA, 2790 bp, Shigella boydii
atggcccgtgaggtggaacaaacccgtctgcgcgtggatgccctgaatcagaaaatgcgcgaggaacaggcgcaggccagggcactggcggaggcgcaggataaagcggctgccgccttttatcgccagattgacagtgtgaaacaggccggtgcggggcttcaggaattacagcgtattcagcagcagatccgacaggccagaaacagtggcggggttggtcagcaggattatctggcgctgatttcggagatcacggcgaaaacccgtgccctgacgcaggcagaggaacaggccacccggcagaaagcggcgtttatccgccagcttaaagagcaggcaacccgccagaatctgtcgtcttctgagttgcttcgcgccagggcggctcagctgggggtaagcagtgctggagaagtgtatatccgcaaaatggagcgggcaggaaaagccacacattcgctggggctgaaaagtgcggcagcccggcgggagctgggggtgttaatcagtcagatggcgcgcggcaattttggtgcgctgaggggatccgggataacgctggctaaccgtgccggatggacaggcgcactgatgtcgccgaaaggcatgatgactggcggcgttattggcggacttgtcgcggcggtcctgggtctgggtaaagcctggcatgacggccggaaggagggcgaggaatttaaccgtcagctggcgctgacgggacattatgccggtgtcactgtcgggcagttgtggaaactcagccgggccatatccgggaatggtatcacgcaacatgcggcagccggtgcgctggcacaggtggtgggcagtggggcatttcatggaaacgatattggtatggtggcgaaagctgccgcacagatggagcgatcggttggccagtcggtcagcgataccataaatcagtttaagcggctgaaggatgatcctgtaaatgccgcgaaggcgctggacaatgcgctgcattttttgactgccactcagcttgagcagatacgcgtccttggggagcaggggcggtccagtgatgcggcccggatcgccatgtctgcgctggcagaggaaaccggtaaacgcacatctgatattgataataatctcaatgcgctgggtagtacgctgcaaaccttgtctgactggtggaagcagttctgggatgcggccatgaatattggtcgtgaagactcgctggatgcgcagattgatgcgttacaggaaaaaattcagcgcgcgaaaaaatatccgtggacaaacgcctccacacaggtggagtacgatcagcagcgtcttaacgatcttcaggagaaaaaacgccggaaggatttgcaggatgcaaaagcgcaggcagaacggaattaccaggagcaacagaaacgccggaatgctgaaaatgccgtgctgaaccggatgaatgaaacggaagctgcacgacatcagcgggaaattgcgcgtattaatgccatgcagtacgccgaccaggctgtcagggatgcggcgatacagcgtgaaaatgaacgttacgaaaaagccattaagaaaaatacacgggcaacccgtaatgatgaggccacccggttattgctgcagtacagtcagcagcaggcacaggtggaagggcagattgctgctgccagacagtcagcaggcattgccactgaaaggatgactgaagcgcataaacagcttctggccctgcagcagcgcatcagcgacctggacgggaaaaagctgacggcagatgaaaagagtgtgctggcccgtaagaatgagctgattcaggcgctgacgctgctggatgtgaaacagcaggagctgcagaaacagacagcgcttaacgacctgagaaaaaaaacggttcagctgaccagccagctggcagacaaagaacgtgcactgcgtgagcagcacaatctggatattgccactgcaggtatgggggataagcagcggcagcgctaccaggcacagttgcgcatccggcaggaataccggcaacagttgcaacagcttgagaatgacagtcgccagaaaggcacttacgggacggaggactaccggagggctgaggaggtgctgaaggggagcctgaagcgacaactgaatgaaaacaaacgctactggcaggaactggaagtggcgcagggcgactggaaaaacggtgccatgcgggcgtttcagaattttacggcggatgcggataatgcggcgggaacggcagaacagatgtttacagtggcattcagcagtgccggtaatgcactggcgacattctgtaccaccggtaagctgaattttaaatccttcacctcttccctgttgtcagatatggccagaattatggcacagatggccatgatgcaggcggtaaagggcgtcggttctttattcggcttcacgactaatgctgatggcggtgtttaccagtctgctgatttgagtcgctacagtggcacggtggttaaccgtccgacgttttttgcttttgcaaaaggagcgggtgtgatgggggaagcgggacctgaagccattctgccactgcgtcgcggtgctgatggtaagctgggggttgtggcggatactggtggttcaggcatggtgatgtttgccccgcagtacaacatcgggatcaataacgacggcacgaacgggcagataggtccggcagcactgaaggtggtttatgacctcgggaaaaaagcggccgcggactttatgcaacagcaggcccgtgatggtggccggttaagtggagcataccggtaa

SEQ ID NO: 466934 - DNA, 330 bp, Shigella boydii
atggagacgtttcgctggaaggtgcgcccggatatgaatgtggtatcagagccaaaagtggtggcagtgaagctgggtgatggttatgaacagcgtcgcccggcgggactgaataatctgctgtcgacttacagcgtgacgatacgtgttcgtaaaggtgaacacccacctttaaaagcctttctggaacggcacggtggcgtccgcgcatttcagtggacgccaccttatgactggaaaccgatcagggtggtttgtcgtaaatggtcggcaagcgtgggggcgttatgggtgactgtaacggccgattttgaacaggtggtgaactga

SEQ ID NO: 466935 - DNA, 1620 bp, Shigella boydii
atgttcaccctgtcattactgacaggaaatcctgctatagcgtatgaaacagataaagtatataaaataaccgttctgcatacaaatgaccaccatggacacttttggcgtaacaatcatggtgagtacgggttatcctcccaaaaaacgctggtggacaatatccggcagaaagtaataaataatggcggaagtgttctattattatctggtggtgatattaacaccggtgtacctgaatcagaccttcagaaggctgaacccgatattcgtggaatgaatctaattggttatgatgcaatggccgtcggtaatcatgaatttgataatcctctaaatatattacgtcagcaggaaaaatgggccacatttcctttcctttctgctaacatatatcaaaaaagtacagggaggcgtttattcagtccatggaaaattttcatccgtcagaatttgaaaattgcagtcattggcttgacgacagatgatactgcgaaaacaggaaattctgaatattttactgatattgagttccgtcaacctgctgctgaggcgaggagtgtcattgatgaacttaatcagcaggaaaagccagatattattattgcggcaacacatatgggtcactatgacaatggcgagtcaggttcgaatgctcctggtgatgttgaaatggctcgcagtttgccgactggctcattagcaatgattgtgggaggacattcacaagctcctgtctgcatggccagcgataataaaaaacagtggaattatattccggggacaacctgtgtaccagataaacaaaatggcatctggattgtacaagcgcatgagtggggaaaatatgtcggtcaggctgattttgaattctgtaacggtacaatgaaactggttaattatcagttacacccagttaatctcaaaatgagaattaccagagaagatggaaaaacggaattttctttttacacccccgaaattactgaagatccacagatgttatccttactgacaccattccagaataaaggcaaagcacaactggatgtgaaggttggggttgtgaacggacgtctggaaggggacagaagtaaagttcgttttgttcagaccagtatgggccatctgattctgagcgctctgacagaacgtattgacgcagattttgctgttgtcagtggtggggaaattcgagattccatagagagtggtaacatcacatacaaagatatactgaaagttcagccatttggtaatacggtagtaagtattgatttgacggggaaagaagtagctgactacctagctacagtggcacagatgaaaccggattccggagcctacccacaatttttgaataccagctttgtagtcaaaaaaggaaaaatcgaaatgctaaaaataaaaggtaaatcggttgaccttaacaaaaaatatcgtatgacaacatttagctttaatgctactggtggggatggctatccacgtattgataatagacccggatacataaataccggatttattgatgctgaagtacttatcgaatatatccgggaacattcaccgctggatgctgcttcatatgaaccaaaaggtgaagtcagttggcagtga

SEQ ID NO: 466936 - DNA, 303 bp, Shigella boydii; identical to SEQ ID NO: 465978

SEQ ID NO: 466937 - DNA, 381 bp, Shigella boydii; identical to SEQ ID NO: 458903

SEQ ID NO: 466938 - DNA, 912 bp, Shigella boydii
atgcaaaatggtgctaattttggcccctggcgattacgtaactattctacgtggacacgcaacgatcaggcgtcaagctggaacactatcagtagttatttgcaacgtgatatcaaggcgttgaagtctcagttgcttctgggagaaagcgccaccagcggcagtattttttccagctacacctttactggcgtgcaactcgcttccgacgataatatgttgccaaacagccagcgcggatttgccccaacggtacgcggtatcgcaaacagtagtgcaatcgtgactatcaggcaaaatggttatgtgatctatcaaagtaacgtgccagcgggtgcctttgaaattaacgatctctacccctcttccaacagcggcgatttagaagtcacgattgaagaaagtgacggtacacaacgtcgctttatccagccttattcttcattacccatgatgcagcgacctgggcatctaaaatatagcgcgaccgctggacgctatcgcgctgatgcaaacagtgatagcaaggaacccgaatttgctgaagccacggcaatatatggtttgaataatacttttacgctgtatggcggcctgctcggttctgaagattattatgcgctggggatcggtatcggcggcacacttggcgcactgggcgcgttgtcgatggatatcaacaggctgacacccaattcgataaccagcactcttttcatggctatcaatggcgtacgcagtacatcaaagatatcccggaaaccaacaccaatatcgctgttagctactatcgctataccaacgatggctattttagttttgatgaagccaatacccacaattgggactataacagtcgccaaaaaagtgaaattcaattcaacatcagccagacaatatttgatggggtaa

SEQ ID NO: 466939 - DNA, 204 bp, Shigella boydii
atgccgcagcttaaaggtgtgattaaaacgcccacgggagaaccgctggacggcgcaaccattacactaacctccatacacaaccgtgcagggattctgaaaagtgttttcagccatgtcaccacacagaacggggaatatgacttccccgttctgccgggtgtgtacagcgttcgcctgacacaaagcacacggcgcctttaa

SEQ ID NO: 466940 - DNA, 225 bp, Shigella boydii; identical to SEQ ID NO: 462228

SEQ ID NO: 466941 - DNA, 237 bp, Shigella boydii; identical to SEQ ID NO: 465696

SEQ ID NO: 466942 - DNA, 507 bp, Shigella boydii; identical to SEQ ID NO: 466890

SEQ ID NO: 466943 - DNA, 375 bp, Shigella boydii
atgacgaaagagttgacgggtaaagccctgtttatggcgctcaggagccagcgcccacctgccgggctaatccaccacaccgatcgaggttcacagtactgcgcatacgattaccgggtcatacaggagcagtctggtctgaaaacatcaatgtcgcgtaaaggtaactgttacgacaacgctccgatggaaagcttctggggaacgctgaaaaatgaaagcctgagccactatcgttttaagagccgggatgaggccatctcagtaatacgggaatacattgagattttctacaatcgtcagcgtcgtcactctcgtctggggaatatctccccggcagccttcaggataaaatattatcagatgactgcttag

SEQ ID NO: 466944 - DNA, 378 bp, Shigella boydii; identical to SEQ ID NO: 460256

SEQ ID NO: 466945 - DNA, 999 bp, Shigella boydii
gtgagtcatcctactgaaaacgatcaaaaaaaccaatcccccgatcctgcattatctgattacagccctaaagatgcccaatgggacgatgtgcgcgcgagcactgagcgggttagccagatgctttaccgcgctggcgagttcgaatcctgggcgcacaggatgcatgactgcaccggactgctgcgattcgcggagctggccgacacctcaacaggcgaaatcagcctaaagttacgttatgcggagttctgccacgccagacactgtcctatgtgccagatgaggagatctatcgtgtaccgtacaaggttcctcgaattcctgcctcagacgctctcagagcatcctaacgcccgttgggtatatctgacgctcactgtccccaatatgcccgtagaatcgcttagagaggctctgaagggcatgaacaaggcatggaacaagtttacccagcggaaggagttccggcctgtgtcaggctggatacgcacgacagaggtaaccagggagaagcaccgcaagggttatgcgcacccgcattttcactgtctgctgatggtgccgccgtcatttttcaacggtaaaaactacaccaagcaggcgcgttggcttgagatctggcgggagtgtatgcgggatgattctatcgagtcactggacattcgggcggtgaagggcggcgtagaaaaagcgctgttagacgcggttaaaacgttcacgtattccgtgaagcctgaagtgctggaagccgatccggattgggcgctggaatacttccgacaggttcacaagctgcgatttatcgcggcgggcggagcgctgaaagattcgatccggagagtcgacgagatgaccgacgaagagatgatttacacggacgacaacccgaagccggaggagccggaaaaagagctgaggcagttgggttattcatggcgccggcacgagctgaagtatcgccgttttacgaaagcagacagagccagtgaggggtaa

SEQ ID NO: 466946 - DNA, 273 bp, Shigella boydii
ttgggtattccgttaaagccaaagattggcactaagttgtatttcacctgcatcagatgtgactcagaaggtcttcgccaggtgaagggattgaaaaaaaacgcggagaattcagatgggagcatctgctatacgattaagtttctttgtgctgactgtggttatcttaacggggatttaaagccgatttggtacaacctgtattcatccggcgagattgtcggttacgggtttgattacgaaaaaacatgcgagctttatgcctcccgctga

SEQ ID NO: 466947 - DNA, 450 bp, Shigella boydii
atgactgccctgatcgctgtggaacatcaccccgccgggcttaccacgggtttcccatgccatttccagcgctttcatggtgagcctgctgtccggcgagaacgacatggcccagcccactggttttcttgcgaacaggtcgagaacaacggcgaggtacgcccagcgcttacccgtccagatataggtcacatcaccgcaccacacctgatttggttccgttacggcgaactgtcgctcaagatgattcgggatagcaacgtgctcatgaccgccacgcttataccggtgagtcggctgctggcaactgaccagccccagctctttcatgagtctgccagcaagccagcgccccatctggtagcctctctgggttgccattgtggcgatgcttcttgctccggcagagccgtggctgatgccatgcagttcaagtacctggctgcgtaa

SEQ ID NO: 466948 - DNA, 378 bp, Shigella boydii
atggacgaacagtggggatacgtcggggctaaatcgcgccagcgctggctgttttacgcgtatgacaggcaccggaagacggttgttgcgcacgtattcggtgaacgcactatggcgacgctggggcgtcttatgagcttgctgtcaccctttgacgtggtgatatggatgacggatggctggccactgtatgaatcccgcctgaagggaaagctgcacgtaatcagcaagcgatatacgcagcgaattgagcggcataacctgaatctgaggcagcacctggcacggctgggacggaagtcgctgtcgttctcaaaatcggtggagctgcatgacaaagtcatcgggcattatctgaacataaaacactatcaataa

SEQ ID NO: 466949 - DNA, 297 bp, Shigella boydii; identical to SEQ ID NO: 466177

SEQ ID NO: 466950 - DNA, 303 bp, Shigella boydii
atgaaaaaaagaaattttagcgcagagtttaaacgcgaatccgctcaactggttgttgaccagaaatacacggtggcagatgccgccaaagctatggatgttggcctttccacaatgacaagatgggtcaaacaactgcgtgatgagcatcagggcaaaacaccaaaagcctctccgataacaccagaacaaatcgaaatacgtaagctgaggaaaaagctacaacgcattgaaatggagaatgaaatattaaaaaaggctaccgcgctcttgatgtcagactccctgaactgttctcgataa

SEQ ID NO: 466951 - DNA, 528 bp, Shigella boydii
atgataagaatggatggaatttataaaaaatatctttcaataatttttgatccagcgttctatataaatagaaatcggttgaatttgccttctgaactgttagaaaatggtgtaatcagaagtgagatgaataatctcataattaataaatatgatctaaattgcgatattgaacctttaagcggggtaaccgctatgtttgttgccaactggaatttacttccagctgttgcttattttatcggtagtcaagagtctcggttaattaatcatagtgagatggttattagttattatgggggcaaaatcagtaagcaaggggaggccgctattcgaagtggtttttggcatcttattgcgtggaaggaaaatatatctgttggtatatatgaaagaataaacttattatttaatccaattgctttggagggaaattatacgcctgtagaaagaaatttgtcccgattaaatgaaggtatgcaatatgcaaaaaggcactttaccggtatccagacatcatgcctatga

SEQ ID NO: 466952 - DNA, 1218 bp, Shigella boydii; identical to SEQ ID NO: 464250

SEQ ID NO: 466953 - DNA, 156 bp, Shigella boydii
atgaaaaaaataattttctctaacgagagtgcagtctatgatgaacttatgattcatttcccatgccagccatcacctcatatttcaaatgatattatagggctggaggaactggatattgtatataatttttttccaaaagaaacaatggaatga

SEQ ID NO: 466954 - DNA, 867 bp, Shigella boydii; identical to SEQ ID NO: 466256

SEQ ID NO: 466955 - DNA, 378 bp, Shigella boydii; identical to SEQ ID NO: 460256

SEQ ID NO: 466956 - DNA, 150 bp, Shigella boydii; identical to SEQ ID NO: 464936

SEQ ID NO: 466957 - DNA, 378 bp, Shigella boydii; identical to SEQ ID NO: 460256

SEQ ID NO: 466958 - DNA, 378 bp, Shigella boydii
atggacgaacagtggggatacgtcggggctaaatcgcgccagcgctggctgttttacgcgtatgacaggctccggaagacggttgttgcgcacgtattcggtgaacgcactatggcgacgctggggcgtcttatgagcttgctgtcaccctttgacgtggtgatatggatgacggatggctggccactgtatgaatcccgcctgaagggaaagctgcacgtaatcagcaagcgatatacgcaacgaattgagcggcataacctgaatctgaggcagcacctggcacggctgggacggaagtcgctgtcgttctcaaaatcggtggagctgcatgacaaagtcatcgggcattatctgaacataaaacactatcaataa

SEQ ID NO: 466959 - DNA, 1128 bp, Shigella boydii
atgaacaacaataacacattgtacgtcgggttagatgttcacaaagaatcgattactgtcgcttatgctatcaattcagaacctgttgaactgatgggtaaaattggcacatcacctactgatattcagaatctttgtaaacgtctcaggtcaaagtcatcgcaggtcagtatcgtttatgaagcggggccctgtggttatggactttatcgtcggctggtgaaatccggttttgactgcatggtctgcgccccctcacttatcccgaaaaaaccgggggagcgggttaaaaccgatcgccgtgatgccatcagacttgtgcgttcactgcgtgcaggagatctttctgctgtctacgtacccggcattgaagatgaggcattccgggatttggcccgggcatgggcatctgcccgcgatgatttacggcatgcaaggcaacgtctgaaatcgtttcttctggttcatggggtccattatgtcgggcgagcagattggggccctgcacaccgacgctggctcagcaaatactcattcgaaagtccctggcgacaattagcttttgacgaacaccgtcgtacaatagaagaccggcaggcacaatgtgaacggctggaatccgccctgaaggaggccgttaccgaatggaggctgtatccggtagtagaggcgctgcaagccatgcgagggattcagtttattactgcggttggattaatttctgaactgggtgatctgacccgttttgaacatccacgacaactgatgtcatggtttggtatcacgccatcagaatattcatcgggtggaagcagacatcagggcagcattaccaaagccggaaacagctatgccagaaagctattggtcgaggcagcgtggagttaccgtcatccggcacgcatcagtccggcaatacaaaaaaggcaggaaaatttaccccgccccgtcattgacagagcatgggatgctcaactcaggctttgtaagaggtatcgaaaacttcaggccaaaggaaagaatgtcaatattacaattgttgctgttgcacgtgagctggcgggttttatctgggatatgggccgaatagcaatgtctgtcgcacaacaaccacaatatcacaaataa

SEQ ID NO: 466960 - DNA, 225 bp, Shigella boydii; identical to SEQ ID NO: 466503

SEQ ID NO: 466961 - DNA, 687 bp, Shigella boydii; identical to SEQ ID NO: 466167

SEQ ID NO: 466962 - DNA, 378 bp, Shigella boydii; identical to SEQ ID NO: 466914

SEQ ID NO: 466963 - DNA, 411 bp, Shigella boydii; identical to SEQ ID NO: 464954

SEQ ID NO: 466964 - DNA, 555 bp, Shigella boydii; identical to SEQ ID NO: 462745

SEQ ID NO: 466965 - DNA, 324 bp, Shigella boydii
atggataaaggttattactcactgggactgttaaatgcctggagcctggcgggagaacaccgccactggatgatacctctcagaaagggagcgcaatatgaagagctcagaaaactgggtaaaggcgatcatctggtgaagctgaaaaccagcccgcaggcacgaaaaaagtggccggaactgggaaatgaagtgacagcccgcctgctgaccgtgacgcgcaaaggaaaagtctgccatctgctgacgtcgatgacggacgccatgcgcttccccggaggagaaatggcggatctgtacagtcatcgctgggaaattgggtaa

SEQ ID NO: 466966 - DNA, 528 bp, Shigella boydii
atggggcattcagttctgcttgtctgcagggagaacagcaaaattgcttttgaagccagtaagtttggaattgatatcacattcgcgttatttcgaaacagtcttcacattcctactgtatggagattactcggaatagttcatagttttcagcccgatgcaatcgtttgtcacagtggacatgatagtaatattgttggtttggtacggttttttacctggaaacatccattcagaattatcaggcaaaagacatatttgacacgaaaaacaaaatttttttcaataaatcatttttgcgatgaggtgattgttcccggaacaaatatgaagacacatctggagcaggaaggatgtcgaactcgggttactgttgtgcctcctggctttgatttccaggaattatacgttgattcccgaaacagtttgcctccgagtgttctttcctggctggcgtcccgaagaggatgccccgtaattgctcaggtaggaatgttgcgcccggaaaaagggcacgaatttaggtga

SEQ ID NO: 466967 - DNA, 177 bp, Shigella boydii; identical to SEQ ID NO: 466208

SEQ ID NO: 466968 - DNA, 378 bp, Shigella boydii; identical to SEQ ID NO: 466948

SEQ ID NO: 466969 - DNA, 378 bp, Shigella boydii; identical to SEQ ID NO: 460256

SEQ ID NO: 466970 - DNA, 363 bp, Shigella boydii
atgattaaaatggcggaacatctgaaaggttactggccgaatcaactgagtttctcagaatcatgcggaatggtgatgagaatgctgatgacattgcagggcgcttcaccgggacgtataccggagctgatgcgcgatcttgcaagtatgggacaacttgtgaaattaccgacgagaaggggaagtggatttgcccctatatttccagacatctgttatcacttaacccattacaagcccgctgccgcagatattcccgtggcgagcgataacccagcgcactatgcggatgccattcgttataatgctcgaacgcctctgcaaggttctttgctgccgttaacccgtctggtttgggcatga

SEQ ID NO: 466971 - DNA, 381 bp, Shigella boydii
atgcggggagcggtggaacgccgcttcggcaacgatcttccgtcgtctccagtggagtggctgacggataatggttcatgctaccgggctaatgaaacacgtcagttcgcccggatgttgggacttgaaccgaaggacacggcggtgcggagtccggagagtaacggaatagcagagagcttcgtgaaaacgataaagcgtgactacatcagtatcatgcccaaaccagacgggttaacggcagcaaagaaccttgcagaggcgttcgagcattataacgaatggcatccgcatagtgcgctgggttatcgctcgccacgggaatatctgcggcagcgggcttgtaatgggttaagtgataacagatgtctggaaatatag

SEQ ID NO: 466972 - DNA, 378 bp, Shigella boydii
atggacgaacagtggggatacgtcggggctaaatcgcgccagcgctggctgttttacgcgtatgacaggctccggaagacggttgttgcgcacgtattcggtgaacgcactatggcgacgctggggcgtcttatgagcctgctgtcaccctttgacgtggtgatatggatgacggatggctggccgctgtatgaatcccgcctgaagggaaagctgcacgtaatcagcaagcgatatacgcagcgaattgagcggcataacctgaatctgaggcagcacctggcacggctgggacggaagtcgctgtcgttctcaaaatcggtggagctgcatgacaaggtcatcgggcattatctgaacataaaacactatcagtaa

SEQ ID NO: 466973 - DNA, 213 bp, Shigella boydii; identical to SEQ ID NO: 462242

SEQ ID NO: 466974 - DNA, 204 bp, Shigella boydii; identical to SEQ ID NO: 9795

SEQ ID NO: 466975 - DNA, 222 bp, Shigella boydii; identical to SEQ ID NO: 9794

SEQ ID NO: 466976 - DNA, 330 bp, Shigella boydii
gtggagacggtcgaaggggtggcgcaaaggttgaacgccaaaataatggggtctgtgcagccgatggccgagaaagccgctgtaagcgcccagaacgagcgaagagccaaggagctaagggaaaccctagcccagcagcaaaaacgcttacaggcccttcaggagccgtttaaggggctatccaaggatcaggtagcgggactgatccggcaggcggtgaaattgcggcaggagaacgagcaggagaagcaggagcgcgcccagcagatcaaagagcgattcaaggccaagcgggaacgggagcgcagcgaccgcagcaggggccgttaa

SEQ ID NO: 466977 - DNA, 705 bp, Shigella boydii; identical to SEQ ID NO: 8686

SEQ ID NO: 466978 - DNA, 510 bp, Shigella boydii; identical to SEQ ID NO: 9982

SEQ ID NO: 466979 - DNA, 657 bp, Shigella boydii; identical to SEQ ID NO: 9983

SEQ ID NO: 466980 - DNA, 705 bp, Shigella boydii; identical to SEQ ID NO: 8686

SEQ ID NO: 466981 - DNA, 381 bp, Shigella boydii
atgcgaacgatcaccacacgtgaacagttattagtgaacggaaaagtcagggaacggattgccacacatatcgtgacaggcgctcacgggtatgaaacgctttgcacaagtggttataacttacaatacaataaggaacgggtactgattgaaaactgcgaaaaggtggctgatggagaactgcctgtcacctgccacacctgtttttctatatggcaggatgtacaccggttcaaacctggtgactttgacacagaatcaggaaagggaaattggcactgttgcaaagttagcgatgaggcagccttttgtcttattcaaaggccttacatttcaaaaactctgcttaccaggcgcatttcgcccaggggatcaccataa

SEQ ID NO: 466982 - DNA, 981 bp, Shigella boydii; identical to SEQ ID NO: 239462

SEQ ID NO: 466983 - DNA, 423 bp, Shigella boydii
atggctgataatcgtaagtgctctttttatatttatccggaacgaaatgcagctgatcgggtggctgacaggtttcttgaaaaattgcctcagaaagaacgtggtcgggcaatgcgggccatgatgttgtgtggtgctgcattgatgaagcaggatgaacgattgccgttcctgatagctgaattcctgacagacagcacgtctatgcaggatattcaacgaattatcagtagtacgctaccacaacaggaaaatggtgaagttgttcgtttgctggaggcatttctgcagtctgccggtaataatgcaaaaacgatcctgcctgcggttgattctgctacgcaagaaatatctgctccagtcgatcagaatctcctggaaacaagaaacaacattaagaacttgtttccggatgatgaataa

SEQ ID NO: 466984 - DNA, 231 bp, Shigella boydii
atgacggtaagtattgtttcaccttccgcagcggctgtaaagccccgccgtcatccccgtttcagacgcgaagacatccccgcgccggaaattgaccccgtgctgaaagccttcgggcgacacatagcccggagttttcaccggggacgtggtgtacacatccccgccatgaaaaacacggctttcgggcaggtgctccgcacactcgaactgaaacgcgcttttaactga

SEQ ID NO: 466985 - DNA, 1362 bp, Shigella boydii
atgacattagcagcaatcaccatgaccgccccggaagctgccagccctgtacagatgtaccgcgcgacctactcaccggatgacaacaaactgcgcctgtatgccgcgtcacgcctcgacccggagacgtataaaaaagtccatgatgccggtttccgctgggcaccaaaacaagcgctgtttgtcgcgccagcctggacaccgggccgggaagatgtgctcctctcacttgccggagagattgtggatgaagacagcacgcttgctgaacgtcaggaagcacgggcggagcggtttaccggatacagtgggaagcgggccagtgaatctgcacaggcacttgatgaagtggaaagactggccgcgatgatcccgcccggtcagcccattcttgtggggcatcacagtgaacgccgcgcccgccgtgatgcgcagcgtattgaaaacggcatgaaacgtgccgtgatgctctttgatcgtgcggaatactgggaagagcgggcgcggtcggcactgcttcacgcgaagtataaagaacgtccggacgttcgctggcgtcgtatcaaaaaaatcgaagctgatttgcgcaaggctgaaaagaccatcgcgcagtcgcagaaatatctgacgatgtggcgggctgaatcgctggatctgaatatggcaaaactcatcagcagtcatgaccatatcagcgcctgtttcccgctggatatgtatccgcgcccggcagaaaaaagccagtatgaagggagccggtcgttatggtcggccctggatgatgacatcatcaccacggagcaggcccgcgaaattgcgatccgctgtcatgaacggcagattcagcatcagcaacgctgggttaaccactatcagaaccgcctgatctatgagcgtgccatgctggacgaaagcggcggcgtggttacccggacacaggattttgagccgggcggacaggttttcagccggggcgagtggctgactatcatccgcgtgaacaaaagcaacggggcggtgagttcagtcacaacgccaaattacagttttctcgggtacagcggcacgatgaaagtgacgcccgatcgcatcacggactacaaagcaccatcggcagaagaggctgccgtcgccagtcaggccgcgaagcgtccgccggtagtcaactatccgggggaaggtttccgggaaatgacaaaggcacagtgggccgccctgccccgggactgtaaggccgtgcgcagtgtggcagagacagaagaccacggggcataccgctaccgctgcacaatggataataatttccgcctggtgagtgtgtatatcaccgacatgaaaatcacggaaatcccacagaaataa

SEQ ID NO: 466986 - DNA, 564 bp, Shigella boydii
atgcacagtcagttaagagaacgtatccggctgctgcgcgcaaggctggataacgccgcgccggttgctgaaatccgggctgaatctcagctttttgtgacacctgccccggtctgtgatcgcctggtgacgctggcggaaatcagcaaccgggatcacattctggaaccctctgccggcaccggggccatactgcgggcgattcgggataccgcgccggaggccatgtgtgatgcggtggagagcaacagcgggctggtccggtatctgcgggaaaattttaacggtgtcagggtacagtgtggcgacttcatggaatggcagccggtgcagtattacagccggattatcatgaatccgccgttcagccacgggcaggatatccggcatatcctgcgggccttttccctgctgcgtccgggtggcgttctggtcgccgtctgtctcaacgggccacgccagcaggagaagctgttaccgttttctgacatccgcgaggagctgccgcgcgacacgtttgcttatacccatgttccgacgatgattattcgtctgcgcgcctga

SEQ ID NO: 466987 - DNA, 225 bp, Shigella boydii
atgacacagggcaggcgggaggataaatgtccgtctgcccgtgcaggaaaaagaccgcgcgccggtggcgctgaaaggggccgcgctgacgcgccgcccctttcattgcgcggacgttctgatgggggcttctgtcttttcagaacggtcatttgtctgttactgatgatgttgttgttcctgctactgctactgctactgttcttcttttttctgctgctctga

SEQ ID NO: 466988 - DNA, 234 bp, Shigella boydii
atgagcgaatatttcagaatatttcaggggctgcctgacggctcctttacccgcgaacaggctgaagccgttgccgcacagtaccggaatgtctttatcgaggatgatcagggaacgcattttcgcctggttgtccgcaataacagtggcctggtctggcgtacctggaattttgaggacggtgccgggtactggatgaaccatgtcatccggaatttcggcattcttaagtaa

SEQ ID NO: 466989 - DNA, 1965 bp, Shigella boydii
atgtcagttacagagtctaagacaaaaacggagcgtaaatccagccgtaaacctgcaaaaacgcaggaaacagtcctgtctgccctgctggcgcagacggaggaagtgagcgtgccgctggcctcgctgattaaatcaccgctgaatgtgcgcacggtgccgtattccgcagagtccgtcagcgaactggcggagtccattaagggcgttggcctgttgcagaatctggttgttcatgtcctgcctggtgactgttacggtgttgccgcaggtggtcgccgactggcggcactcaacatgctggcagagcgtggcatccttccggctgactggcctgtccgtgtgaaggtcattccgcaggagctggcgactgccgcatcaatgactgaaaacggtcatcgtcgggatatgcaccctgccgaacagattgccggatttcgtgcaatggcgcaggaaggcaaaacgcctgcacaaatcggtgatttgctgggctattcgccccgccacgttcagcgaatgctgaaactggcagaccttgcgcctgtcatcctcgatgcgctggcagaagaccgcatcaccacagagcactgtcaggcgctggcgctggagaacgacaccgcgcgtcaggtgcaggtgtttgaagccgcctgccagtcgggatggggcggtaaaccggaagtgcagaccattcgtcgtctggtgaccgaaagtgaagtggcggtggcggggaacagtaaattccgcttcgtgggggctgatgccttctcgccagacgaactgcgcaccgatttgttcagcgacgacgagggtggctatgtggactacgtggcgctcgatgccgccctgctggaaaaactccgggctgttgcagagtcccttcgggaagcagaaggctgggaatggtgcgccgggcgcatggagccagtcggtgagtgccgtgaggatgccggaacataccgctgtctgccggagccggaagcggtgctgacggaggcggaagaagaacgcctgaacaaactgatgacgcgttacgacgcgctggaaaaccagtgtgaggaatccgacctgctggaagcagaaatgaagctgatgcgctgcatggcgaaggtcagagcgtggacgccggagatacgtgccggaagcggtgtggtggtgtcctggcgttatggcaacgtgtgtgtccagcgtggtgtgcagttgcgcagtgaagatgacgcgactgacgacgctgaccgcacggaacaggtgcaggagaaagcgtcagtggaggaaatcagcctgccgttgctgacgaaaatgtcctcagagcgcacgctggcagtccaggcggcactcatgcagcagccggacaaatctctggcactgctggcatggacgctctgcctgaatgtgtttggcagcggggcgtacagtaaaccagcacaaatcagcctggaatgtgaacattactcgctgaccagcgatgcgccatcggggaaggaaggtgccgcattcatggcgctgatggcagaaaaagcccgtcttgctgccctgttaccggagggatggtcacgggacatgacgacattcctgtcactcagtcaggaggtgctgttatccctgctcagcttctgcactgcgtgcagcatccacggtgttcagacccgtgagtatggtcacacgtcacgcagtccgctggattcgctggagagcgctatcggattccacatgcgcgactggtggcagccgacaaaagcaaacttcttcggacacctgaaaaagccgcagattatcgcagccctgaatgatgcaggactgtccggtgctgcgcgggacgcggagaaaatgaagaaaggcgatgcggctgaacatgcagagttccacatgaaagacaaccgctgggtgcctggctggatgtgtacaccacgtccacaggcagagacggaaaccacggaataccgtgacaaccaggccgatgccgcctga

SEQ ID NO: 466990 - DNA, 435 bp, Shigella boydii
atgaaaactgaactgaccctgaatgtattacagaccatgagcgcacaggaatatgaagatatccgggctgccggaagtgatgaacgccgtgagctgacacacgccgtgatgcgggaactggatgcgccggacaactggacgatgaacggcgagtacggcagcgagtttggcggatttttccccgtccaggtccgtttcacgcctgcccacgaacgttttcacctggcgttatgttcaccgggcgatgtctctcaggtctgggtgctggttctggtgaatgccggtggtgagccgtttgcggtggttcaggtgcagcggcggtttgcaccggaagccgtcagccatttactggcactggcggcgtcactggatgcgcaggggtacagcgtcagtgacatcatccatatcctgatggcggaaggaggtcaggtatga

SEQ ID NO: 466991 - DNA, 720 bp, Shigella boydii
atgagcgcacgttcacaggcactggttcccctcagcacagagcaacaggccgcatggcaggcggtggcggagacggaaaaacgccgccatcagggtaacacgctggcggaatatccgtatgcgggggcgtttttccgctgtctgaacggaagccgcaggatatcgctgtctgacctgcgatttttcatgccgtccctgaccgcagaagaactgcgtggcaaccgttctcagtggctgtatgccgtcgatgtgctgattgaaacacagggcgaggtctgcctccttccccttcccggcgatgcagcagagcagttgttcccgtcagtgcggttccgtgtcagggaacgcagtcgccataaatccgcactggtcatgcagaagtacagccgccagcaggcacgggaggcagagcagaaaacccgtgcgtaccaggcgctggttgctcaggcagaaatcgaactggcgttccattcaccggaaacagtcggaagttggcatgcacgctggagtgaccgggtggcagagcatgacctggaaaccctgttctggcagtggggcgagcgttttccgtcactggccggaatggaacgctggcagtggcaggatatgccattctggcaggtcatcacagaggctggtatggcggcaagggaggccggtcatgccgtccgtgagatggagcggtggatggtgccgaacaaactccgggaggcggcgtga

SEQ ID NO: 466992 - DNA, 315 bp, Shigella boydii; identical to SEQ ID NO: 7698

SEQ ID NO: 466993 - DNA, 216 bp, Shigella boydii; identical to SEQ ID NO: 7699

SEQ ID NO: 466994 - DNA, 297 bp, Shigella boydii
atgagcgcattttcttttaacaccacttatcagccaacaggcgatcagcagaaagacgcaatcgcacaaatcgggatcatgcagaatcgtgctgttcaggcaaatcttgcatatcagagctgccgggattctggtgcactctttaaggtgctccaccaggtcaataatgagctgcatgacttactggatagcctggagaatcatactcctcttgtcagaaaacacgctgatgagttgatcgcgctgttactgcttttcactcggcaggttggtcagtcccgaactgacctgatttga

SEQ ID NO: 466995 - DNA, 822 bp, Shigella boydii
atgcgattagcttcccgttttggtcgatataattctattcgccgtgagcgcccgttaacggatgacgaattaatgcagtttgttccatctgtcttttctggtgataaacatgaatcccggagtgaacgttatacatatatcccaaccatcaatatcatcaataagttacgtgatgaaggtttccagccgttctttgcctgtcagagtcgggttcgtgatttaggacgccgcgaatacagtaaacatatgttacgtcttcgcagggaagggcatattaacgggaaagaagttcctgaaattatcctgcttaattcacatgatggttcatccagttatcagatgatcccaggaatttttcgttttgtctgcacaaatggcctggtgtgtgggaataattttggcgaaatccgcgttccacataaaggtgatattgtcgggcaggttattgagggagcgtatgaagtgctcggtgtctttgataaagtcactgaaaatatggaggcaatgaaagagatacatcttaacagtgacgaacaacatttatttggcagagctgcattgatggccaggtacgaagatgaaaataaaacgccagtgacgccagaacaaataattactccccgccgttgggaggataaacagaacgatctctggacaacctggcagcgggttcaggagaatatgataaaaggtggattatcggggcgaagtgcctccggtaaaaataccagaacaagagccattacaggcattgacggtgatatccgaatcaacaaagcattatggatgattgccgaaaagttcagggagtggaagtcatga

SEQ ID NO: 466996 - DNA, 510 bp, Shigella boydii
atgaaaaaatggatgttagtaatctgcctgatgtttataaatgggatctgcgaagccgccgattgctttgatcttgcaggtcgggattacaaaatagacccggatttactgagagcgatatcatggaaagaatcccgttaccgggttaatgccatcggtattaatccggtaacgggatatggcagcggactgatgcaggtagattcccagcattttaacgaactggcccgctatggaattaagccggaacatctgacaacagatccctgcatgaacatttataccggtgcttattatctggcaatagcctttaaaaaatggggcgtctcctgggaggccgttggtgcatacaatgccggattcagaaagaccgaacgccagaaccagagacgtcttgcctacgcatcagaggtttaccggatttatacctggataaagagcagtaaaggcatccgggttccgaccacgaagaaatcactttcccaaattaacagtgtgcataacaattaa

SEQ ID NO: 466997 - DNA, 384 bp, Shigella boydii; identical to SEQ ID NO: 25272

SEQ ID NO: 466998 - DNA, 690 bp, Shigella boydii
atgtatccgatggatcgtattcaacaaaaacatgctcgtcaaatagatctgctggaaaatctgacggcagttattcaggattatccaaatccagcctgtatcagggacgaaactggaaaatttattttttgcaatacgctgttttatgagtcatttcttacacaagatcaaagtgctgaaaaatggcttctgtcgcagagagatttttatgaattgatctctgtcacagagatggaagcatacaggaatgagcatacgcatcttaatcttgtagaggatgtttttattcagaacagattctggacaatatctgtccagccatttcttaatggacacagaaatattattctgtggcaattttatgatgctgctcatgttcgtcataaaaacagttataatcaaaaaacgattgtcagtgatgatatcagaaatataatcagaagaatgagtgatgattcttctgtatcatcatatgtaaatgatgtattttacttatatagcaccggaatcagtcataatgctatagcaagaatattaaacatatccatctccacatcaaagaaacacgcatctctgatatgcgactacttctctgtttctaataaagatgagttaatcatcttactctacaataaaaagtttattcattatttatacgagaaggctatgtgtatcataaatacgcgttaa

SEQ ID NO: 466999 - DNA, 396 bp, Shigella boydii
ttgaaaagatttggtacacgttctgcaacaggtaagatggtaaaactaaaattacctgtagatgtggaaagtctattaattgaggcaagtaacagaagcggaagaagtcgatcgtttgaggcagtaataagacttaaagatcatcttcaccgctatccaaagtttaacagggcagggaatatctatggtaagtcgctggttaagtatctgacaatgcgtctggatgatgaaactaaccagctacttattgcagcaaaaaatcgtagtggatggtgtaaaacagatgaggctgcagacagagttattgatcatttgatcaagtttcctgatttttataactcggagatattcagggaggcagataaagaggaagatataacatttaatacactctag

SEQ ID NO: 467000 - DNA, 366 bp, Shigella boydii
atgaatactgttttaagtgttcagggtgcttctgcgcccgtcaaaaagaaatcgtttttttctaaattcactcgtctgaatatgcttcgcctggttcgtgcagtgatcccggttgctgttctgatgatgttgttccctgagttagctatggcttctgctggcaaaggcacggacctgatggctaaaggtaacgatacggttaaggcgaccttcggtaaggactccagtatcgttaaatgggttgttctggctgaggtgctggtcggtgcggtcatgtacatgatgaccaaaaacgttaagttcctggtcggctttgccatcatctctgtatttattgctgtgggtatgaccgtcgttggcctctga

SEQ ID NO: 467001 - DNA, 312 bp, Shigella boydii
atgtcgggagacgagaataaacttaagaaatatcgtttcccggaaacactgaccaaccagagccgctggtttggcctgccactggatgaactgatccccgcagcagtctgtattggctggggtatcacaacatcaaaatatctgttcggtattggtgcagcggttctggtttatttcgggattaaaaaactgaaaaaagggcggggcagttcctggttacgtgacctgatttactggtatatgccaacagccctgctgcgcggtatttttcataatgttcccgattcgtgtttccggcagtggattaaatag

SEQ ID NO: 467002 - DNA, 567 bp, Shigella boydii
atggaacacggtgcccgtttaagtaccagtcgtgtaatggccatcgcctttatatttatgtcagtgcttattgttctcagcctctctgttaacgtcattcagggggtgaataactaccgccttcagaatgagcaacgcactgccgtgacgccaatgggatttaatgtgccctttgccgtgtcacagaacagtgccgacgcctcttatttgcagcagatggcgctgtcatttattgccctccgtctgaatgtctcaccggaaatcgtcgatgcctcacatcaggcgcttctgcaatatatccgcccgggtgcacagaaccagatgaaagttattctggctgaagaggcgaaactcattaaaaaagataacgtgaattctgcttttttccagaccagtgtccgtgtctggcctcagtatggtcgtgtggaaatccgtggaattcggaaaacatggattggtaactccgaaccttttactgatatcaaacattacattcttattctgaagcgggagaacggggtgacctggctggataatttcggggaaacagacgatgagaaaaaataa

SEQ ID NO: 467003 - DNA, 729 bp, Shigella boydii
atgagaaaaaataatacggcaataatattcggcggcctgtttttttcctgcagcgtgatggccggagccggtacgctggcccccaccgtggtgccaatggtgaacggtgggcaggccagtattgccatcagcaataccagcccgaatctgtttaccgttcccggtgaccggattatcgccgtgaacagtctggatggtgccctgaccaataatgagcagaccgcctccggcggtgtggtggtggccaccgtcaacaaaaagccttttacgttcattctggaaacagagcgtggtctgaacctttccattcaggccgttccccgtgaaggcgcggggcgtaccattcagctggtcagtgacctgcgcggaaccggagaagaagccggcgcgtgggaaacgtccacgccttacgaatccctgcttgtgaccatcagccaggctgtccgtggcggaaaattacccgccggctggtatcaggtgcctgtgacaaaggaaaccctgcaggccccggcggggctgtcttcagtggcagattccgtatggacggggaatcacctgaagatggtccgctttgtcgtggaaaataaaacgctgtctgccctgaatatccgggaaagtgacttctggcagccgggaacccgtgccgtgatgttcagccagcctgccagccagttactggcaggtgcgcgcatggatgtgtatgtcatccgtgacggggagggcaactga

SEQ ID NO: 467004 - DNA, 1452 bp, Shigella boydii
atggccagcatcaataccattgtgaaacgcaagcagtacctgtggctggggattgtggttgtcggtacagcctccgcgattggtggggcactgtatctgtctgatgtggacatgtccggtaacggtgaaaccgtggctgaacaggagcctgtgccggatatgaccggtgtggtggatacgacctttgatgacaaggtgcgtcagcatgccaccacagagatgcaggtgacggcagcgcagatgcagaagcagtatgaggaaatccgtcgtgagctggatgttctgaacaaacagcgcggtgatgaccagcgtcgtattgaaaagctgggacaggacaatgccgccctggcagagcaggtaaaagccctgggtgctaatcccgtcacggcgaccggtgagcctgtaccgcagatgcctgcctcaccgcccggcccggaaggcgaaccacagccaggaaacacccccgtatccttcccgccgcagggcagcgttgctgttccaccgccgacggcgttttatcccgggaatggtgtcacgccaccaccacaggtgacgtaccagtctgtgccggtgcctaaccggatacagcgtaaggtgtttacccgtaatgagggaaaacagggaccatcactgccgtacattccgtcaggaagttttgcgaaagccatgctgattgaaggggcggatgccaatgcctctgtcaccggtaatgaatccacggtgccgatgcagttgcgtatcaccggcctggtggaaatgccgaacagcaaaacgtatgacgcaacgggatgttttgtggggctggaagcctggggggatgtctccagtgagcgtgccattgtacgcacccgcaatatcagctgcctgaagggcggcaaaactattgatatgccgattaaggggcatgtcagcttccggggtaaaaacggtatcaagggcgaagtggtgatgcgtaacggcaaaatcctcggctgggcatggggcgcgggatttgttgacggtatcggtcagggaatggagcgcgcctcccagccggctgtcgggctgggggctactgccgcttacggggccggtgatgtcctgaaaataggtatcggtggcggtgcatcgaaagccgcacagacgctcagtgactactacatcaaacgtgctgagcagtatcacccggtgataccaattggtgcgggcaatgaagtgacggtggtgttccaggatggcttccagctgaaaaccgtggaggaaatggcgctggagcagtcacagagtacagcggaagagggtaacccggaaaaccctgtgccgaatcttccctcggcagaaagccacctgaacggttttaacaccgaccagatgctgaaacagctgggcaatctgaatccgcaacagtttatgtccggagacaagaacccgcagggcggggatgccggcagggagggcggaaatggcgggtga

SEQ ID NO: 467005 - DNA, 567 bp, Shigella boydii
atggcgggtgatgcactgacattccgtgtggcgtttgtcgttcgctggctgctgtgggtcgtcaggtttgtggttatctggccgctggcaacaatggccctgatggctctgtttgttttatggaaggacaacaccacgccggggaaattactggttaaggagattaacttcgtaagacaaacagcacctgccggacagttcccggtcagtgaatgctggttttcttcctctgattcttcaggcagatcagaaatacaggatatctgccattaccgcgcggctgatgctgcagattatgtcagagagactgaccgatcactgatgcaactggtcaccgcattctgggcaacgctggcacttatgtatatgtcgtttgcggcaggcaccgggaaatatccggtgcgacccggaaaaatgaaatgtatccgggtggtaaccgcagatgaacgtctgaaggacgtttatacggaagacgcttccctgccgggaaaaatcagtaaatgtcctgtttatcttcctgatgacagaacaaacagaaacaacggagataaaaatgaacatgcgtaa

SEQ ID NO: 467006 - DNA, 321 bp, Shigella boydii
atgaacatgcgtaatattaatgttattacagcccgcgctgtgccggataaaaacgtatcagatgattttatgcatgctgttctcagtaactgcaccacaaaaatagttcttcctgcaccggagaaattcagtcctgaatcattgccgcacaattttaatatggctgctgtcggcgtgatgaagaagggaatgtcgatgagtttattttcttctccggggcatattgtggttgccggacaatccggtggcggaaaatctgctccggtgaaagaactaatcgacagaattattcagaaatataaggaacccttcgatgaataa

SEQ ID NO: 467007 - DNA, 252 bp, Shigella boydii
atgaataagctggtttctgatggcagcgtcaaaaaaataaattatccggtgctgtatgaatccggaataacacctccgttatatgaagtcagtgcaccagaacctgatgcgggtgggaaacgcattgtggcatatgtttataaatcatcacggaatacggtttttgaaaatcctgatattgtaaaaatctgtacggtcagggatttgaagaaggattttgtgaactgcgatgagaaaggtgagggacaatga

SEQ ID NO: 467008 - DNA, 516 bp, Shigella boydii
atgaaacagatttctttatttattcctctgctggggaccttattactttccggctgtgccggaaccagtacggaatttgagtgtaacgccaccacatccgatacctgtatgacgatggagcaggccaatgagaaggccaaaaaactggagcagtcctcagaagcaaagccggttgcggcatcactgccgcgcctggctgaagggaacttccggacaatgccggtgcagaccgtcaccgcgaccactccgtccggcagcagacctgcggtgacggcacatccggagcagaaactgctggcaccacgcccgctgtttaccgctgcccgggaagtgaaaacggtcgttccggtcagttcagttgcaccggtaacacctccccgtccgttaagaacgggtgagcagacggcagcattatggatagcaccatatattgataatcaggatgtttatcatcagccatccagtgtgttctttgttattaaaccgtctgcgtggggaaaaccacgtattaattaa

SEQ ID NO: 467009 - DNA, 222 bp, Shigella boydii
gtgagtgatgaagccgatgaagcatattcagtgacagaacaactgaccatgacaggaataaaccggatacgccagaaaataaatgttcatggtattcctgtttatctctgtgaagcatgcggaaatcctattccggaagcccggcggaaaatatttcccggtgtgacgttatgcgttgaatgtcaggcgtatcaggaaaggcagaggaaacactatgcataa

SEQ ID NO: 467010 - DNA, 237 bp, Shigella boydii
atgcataaatcagaaaatgaaaaaatagattttattctggatgagcatgagcggatattcagaaaacagggttctttgtgtatggcactgggtaagggctttttagttatagctattctttgtggtgttgccacattctgtgtttctggcctgtatctgaaatccctgtacctgtccgttgcctgctgttgtggggtattcagtcgtatttttaattattacagcgtaccggagtaa

SEQ ID NO: 467011 - DNA, 2631 bp, Shigella boydii
atgagtaataacccacttgaggccgtcactcaggcggttaactccctcgtcacagcactgaaactgcctgacgaatcagcaaaggccaatgaagtgctgggcgaaatgagcttcccgcagttcagccgtctgctgccgtaccgtgattacaaccaggagtccggtctgttcatgaatgacaccacgatgggctttatgctggaagccattcccatcaatggggcgaatgagtccattgtggaggcgctcgaccacatgctgcgcaccaaactgccacgcggagtgccgttctgcatccatctgaagtccagccagcttgttggtgacagaattgaatacgggctgcgtgagttctcctggtccggtgaacaggctgaacggtttaacgccattacccgggcctattatatgaacgcggcagcgacacagtttccgctgccggaggggatgaatctgcccctgaccctgcgccattaccgggtattcttctcgtactgttctccctcgaagaaaaaaagccgggctgacattctggaaatggaaaacctggtgaaaatcatccgggcgtcgttacagggggccagtatcgccacacagacggtggatgcacaggcctttatcgatattgtcggggagatgattaaccataacccggactccctgtacccgaaaagacgtcagctggacccgtattctgatctgaattatcagtgtgtggaggacagttttgacctgaaagtccgggcggattacctgacgctgggcctgcgtgagaacggcaggaacagcacggcccgcatcctgaatttccatctggcccgtaacccggaaatcgccttcctgtggaacatggccgacaactacagcaacctgctgaacccggaactgtccatctcctgtccgttcatcctgacgctgactctggtggtggaagaccaggtgaaaacccacagcgaagccaacctgaagtacatggacctggagaaaaagtcgaaaacctcctatgccaaatggtttccctccgtggagaaagaggcgaaggagtggggggaactgcgtcagcggctgggctccggtcagtcttctgtcgtgtcctacttcctcaacatcacagccttctgcaaggacaataatgaaacggcactggaagtggagcaggacatcctgaacagcttccgtaaaaacggttttgagctgatttcaccgcgctttaaccacatgcgcaatttcctgacctgcctgccctttatggccgggaaagggctgtttaaacagctgaaagaggccggtgtggttcagcgcgcagagagctttaatgtggccaacctgatgccgttagtggcggataaccccctgacaccggcaggcctgctggcacccacctaccgtaaccagctggcgtttatcgatatcttctttaaggggatgaataacaccaactacaacatggcggtctgtggaacatccggggccggtaaaaccggactgatacagccccttatccgcagcgtgctggactccgggggctttgccgtggtgtttgacatgggggatggctacaagtccctgtgtgagaacatgggcggtgtgtatctggacggtgaaaccctgcgttttaacccgtttgcgaacatcaccgatatcgaccagtcagcggagcgtgtccgcgaccagttgtcggtgatggccagccccaacggtaacctggatgaagtgcatgaaggtctgctgctgcaggcggtcaaagcctcctggctggctaaaaagaacagggcgcgcatcgatgatgtggtggatttcctgaaaaacgccagtgacagcgagcagtatgccgggtcaccgaccatccgcagccgtctggatgaaatgattgtgctgcttgaccagtacactgccaacggcacttatggccggtattttaactctgatgagccgtccctgcgggatgatgccagaatggtggtgctggagctggggggactggaagaccgtccgtccctgcttgttgcggtgatgttctccctgattatctacattgagaacaggatgtaccgcacgccgcgtaacctcaaaaaactgaacgtcattgatgaggggtggcgtctgctggacttcaaaaatcacaaggtcggtgagtttattgagaaaggttaccgtaccgcccgccgtcataccggtgcctatatcaccatcacacagaacatcgtcgactttgactctgacaaggcctccagtgcggcccgtgcggcatggggtaactcctcctacaaaattatcctcaaacagagtgcgaaggagttcgcgaaatacaaccagctgtatccggaccagttccagccactgcagcgcgacatgattggtaagtttggtgcggccagagaccagtggttcagttccttcctgctgcaggtggaaaaccattcctcctggcaccgcctgtttgtggacccgttaagccgcgccatgtacagctctgacggcccggattttgagtttgtgcagcagaaacgtaaagaggggctgagtattcatgaggcggtgtggcagctggcgtggaagaagtcagggccggagatggcttcgctggaagcctggctggaagaacatgagaaatacaggagtgttgcatga

SEQ ID NO: 467012 - DNA, 387 bp, Shigella boydii; identical to SEQ ID NO: 28571

SEQ ID NO: 467013 - DNA, 633 bp, Shigella boydii
atgagatgccgggggctgattgccctgctggtatgggggcagagtgtggccgccgccgatcttggcacctggggcgatctgtggccggtaaaggagccggacatgctgacggtgatcatgcagcgcctgacggcactggagcagtccggtgagatgggccggaaaatggatgcctttaaggagcgggtggtccgcaacagtctgcggccccctgccgtgcccggtatcggaagcacggagaaatacagcagccggttgtttgacccgtccgtcagactggcggcggatatccgggataacgaagggcgggtgtttgcccgtcagggtgaagtgatgaatccgctgcagtatgtgccttttaaccagacgctgtatttcatcaatggcgatgatccggcgcaggtggcctggatgaaacgccagacgccgcccacactggagagcaaaattatcctcgtgcagggcagtatcccggagatgcagaagtctctggacagccgtgtttactttgaccagaacggtgtgctctgccagcgcctcggcattgatcaggtcccggcacgggtgagcgccgttcccggcgatcgcttcctgaaggtggaatttattccggcagaggagggcagaaaatga

SEQ ID NO: 467014 - DNA, 993 bp, Shigella boydii
atgaagcgaagcctgtggctgctgatgttattccttctcgccggtcatgtccctgcggcatctgcggattctgcctgtgaggggcgttttgtaaacccgatcacggatatctgctggagctgtattttcccgctctcgctgggcagtatcaaagtcagtcagggtaaggtccccgacacggcgaacccgtcgatgcccattcagatttgtccggcaccgccgccgctgttcaggcgtatcgggctggccattggttactgggagccgatggcgctgacggacgtcacccgatcaccgggatgcatggttaacctgggcttcagcctgccggcttttggtaaaacggcacagggaacggcgaaaaaggatgagaagcaggtgaacggggcgttctatcacgttcactggtacaaatacccgctgacgtactggctgaacatcatcacatcgctgggctgtctggaaggtggtgacctggatatcgcttatctttctgaaattgaccccacctggacggacagcagcctgaccaccattctcaatccggaagctgtcatctttgccaatccgatagcacagggggcctgtgcagcagatgccattgccagcgcctttaatatgcctctcgatgttctgttctggtgtgccggttcgcagggaagtatgtacccgttcaatggccaggtgagtaatgagtccagtccgttgcagtcctccctgctggtcagtgaacgcatggcgttcaaactacaccgtcagggcatgattatggaaaccatcgggaaaaataacgccgtctgtaatgaatatccgtccccaatcctgcccaaagaacgctggcgttatcagatggtgaatatgtatccggacagcggacagtgccatccgttcgggcgcagtgtgatgcgctgggagacgggaaaaaatccgcccaacacaaagaaaaacttcggctacctgatgtggcgtaaacgtaactgtgtatttctgtaa

SEQ ID NO: 467015 - DNA, 309 bp, Shigella boydii; identical to SEQ ID NO: 8672

SEQ ID NO: 467016 - DNA, 288 bp, Shigella boydii
ttgcagtcctccctgctggtcagtgaacgcatggcgttcaagctgcaccgtcagggcatgattatggaaaccatcgggaaaaataacgccgtctgtaatgaatatccgtccccaatcctgcccaaagaacgctggcgttatcagatggtgaatatgtatccggacagcgggcagtgccatccgttcgggcgcagtgtgatgcgctgggagacgggaaaaaatccgcccaacacaaagaaaaacttcggctacctgatgtggcgtaaacgtaactgtgtgtttctgtaa

SEQ ID NO: 467017 - DNA, 462 bp, Shigella boydii
atgtataaacaggcaacagaattaatgctgaactttaaagaccgcattctgattaagggggaagaaggtaccggcaagtcaactctcctgactgaaataagaatcagtgatagtgattcccggtattacaactttaaaactcttaacgctgcggggtataaccacctttgtgatgaaaatattgataattttgattttctgaatacacctgaaaagacgttaatccttgatggagtcaggctgtgtgaaaagaaaatgatatcaaaagttatcaggttaattaaacaggccaaaaaatatcataaacgcctggttgtggttgcagactcatgtgagtctgagtttatcgaactgttgtttgatggtgttattgtattgtccttcaattctgacagagaaaggagctgcaatgtttatacgccatcaaggtgtcgtaatacagataatatttatgccaggtag

SEQ ID NO: 467018 - DNA, 453 bp, Shigella boydii
atgagtaataatataaaatatggctccagaatacttgatatgggtgttctgctggagatgaaagcgcttgtgaatgcaaatggtggtgtgtcacggtgcattatggagtgccggcagcttgcctgtgaggtccgtcattcgcaacaattactggataagctgtcatgtattgacgactggctgtgccggttttcctcaataatgtatcaccgttttgataaagagcagattcagtggcgggaggaggtggacagggattatcccagagaaaaggtttatattttcagtcccgataatgtctccgtccataacaatgatattaaagactctgccaataacatatcaggaataaccgtgtcggttacagccagtaaaatatgcgcaggtcagaaagagtttgatgcttttttaaaactggcagaaaaactgagagaaaaccctacgggtaattaa

SEQ ID NO: 467019 - DNA, 639 bp, Shigella boydii
atgaactggaaaatatttgcgctttttgccctgactgcagggatgcatatcactgttcatgcctcagacaatgtgaacactcctgaaaaccgccagttcctgaagcagcaggaaaatttaagcagacaactgcgtgaaaaacctgaccatcagctgaaagcctgggcggagagacaggtgctggaaaacccccttcagcgttcagataaccatttcctggatgagctggttcgtaaacagcaggcttcgcaggacggaaaaccccggcagggtgccctgtattttgtgtcgttttccattcccgaagaggggctgaaacgaatgctgggcgaaacccggcattacggtattccggccacactgcggggcatggtgaacaacgacctgaaggccacggctgacgccgtgttgtccctggtgaaagacggcgcaactgatggtgttcagatcgacccgacgctgttttcacagtacggcattcgcagcgttccggccctggtggtgttctgcagccaggggcacgacatcatccggggaaatctgcgcgtcaggcaggcgctggagaaagtggccaccgcaggagactgccggcaggtggctcagggactgctggacggcaccggggataagtcgcaatga

SEQ ID NO: 467020 - DNA, 372 bp, Shigella boydii
atgagtttacctgcaggctattaccggattgacccggacatccgtgcactggtggccgcgatgaacgttcacggatttcgtacatatgcgtcctgtcaggggcatggtttccctgttacgaaactgccgccttatattgcctttgtctgtccggtaaaaaaggcggctcttcttgagcagcgactgcggcaggatgcggagtccatgatgccccggttgctgtggggctggtccgtcggggcttcttttaacagtgaccttcagctctgtttccggcttcagcctgaaggccctcatcactggtatcaccggtactgtcgtcgctcactgcgtgcagacttcaggacgctggtccgcttactgaatccgtaa

SEQ ID NO: 467021 - DNA, 423 bp, Shigella boydii
atggcgctgacaaagaaacagcgggaaaaactgcgtatgaaattcggcggtcgttgtgcgtactgcggctgtgaactgccggagaaaggatggcatgccgaccatgttcaggcggtgctccgcaagtcagagcagtgcatgaaggctgcagaaaagcgcattttcaggctgaaatccaccggtgatgttttcagaccggaggccgactgtccggaaaacctcgtcccggcctgtgcgccgtgcaacctgctgaaaacaacatattcgctggagatgttcagaacgcaggtgtccctgcaggttgaacgggggcgcagaagcagcgtgaatttcaggaccgcagaacggttcgggctgattcaggtggtgaacaaaccagtcgtgttctggtttgagcaatatcagagggagagtgaggtatga

SEQ ID NO: 467022 - DNA, 1809 bp, Shigella boydii
atgaaacgtcttctgccattgctgctggggctggcagtcagtgtggtacaggctgacagcaacagtgattaccgggcgggttctgattttgcccgtcagattcaggggcagggtacaggcagtattcagggctttaagccacaggagagtatccccggctataacgcgaatccggacgagacaaaatattacggtggcgtgactgccggcggggatggcggcctgaaaaatgacggcaccacggaatgggcgaccggtgaaaccggaaaaaccatcacagagtcattcatgaacaagccgaaagacattctttcaccggatgcaccgtttatccagaccggcagggatgtggtgaaccgggctgacagcattgtgggaaacaccgggcagcagtgcagtgcgcaggagattagccggagtgaatacacgaattacacctgtgagcgggatttacaggtggagcagtactgcacacgaactgcccgtatggagctgcaggggagtaccacatgggaaacccggacgctggagtatgaaatgagtcagctacctgcacgtgaagtgaatggtcagtatgttgtctccattacctctcccgttaccggtgaaattgtcgatgcgcattacagctggagtcgtacttacctgcagaagagtgtacctatgacaattacagtactgggaaccccactgagctggaatgccaaatactcagcagatgcctcatttacaccagtacagaaaacactgactgccggtgttgcttttacgtcatctcaccccgtccgggtcgggaatacaaaattcagacgtcatacggcaatgaagctgcgtctggttgtcagggtaaaaaaagcctcgtacaccccgtatgttgtctggtctgaaagctgcccgttcagcaaggagctggggaaactgacaaaaacagaatgtacggaggctggcgggaacaggacgctggtgaaagacggtcagtcatacagcatgtaccagagctgctgggcataccgggacacgtatgtcacacagtcagcagacaagggaacctgtcagacctacaccgacaatcctgcctgtaccctggtgtcacaccagtgcaccttttactccgaagaaggtgcctgtctgcatgaatatgccacgtactcctgtgagtcaaaaacatccgggaaagtgatggtctgtgggggagacgtcttctgtctcgatggcgaatgcgataaggctcagagcgggaagagtaatgattttgccgaagccgtttctcagctggcggcactggccgctgcaggtaaggatgttgcggcgctgaacggggtggatgtccgtgctttcaccggtcaggcgaaattttgtaagaaggctgcagccggatacagcaactgctgtaaggacagcggctggggacaggatatcgggctggccaaatgcagcagtgatgaaaaagccctggctaaagcaaaatcaaacaaactgaccgtcagtgtcggagagttctgttcgaagaaagtgctgggtgtctgcctggagaaaaaacgcagttactgtcagtttgattcgaagctggcgcagatagtccagcagcaggggcgcaacggacagctgcgtatcagttttggcagtgcgaagcatcctgactgtcgggggattacggttgatgagctgcagaaaattcagttcgacagactggatttcactaacttctacgaagacctgatgaataaccagaaaatcccggacagtggcgttctgacgcagaaagtgaaagagcagattgctgaccagctgaaacaggcaggacagtaa

SEQ ID NO: 467023 - DNA, 993 bp, Shigella boydii
atgaaagtcatattcacgtcgaaccgttttattgattttcttatccggcttttgattacagcgattgtcatttccccggtaattatctggtcgtgggatacggtaaaagaaaccacggcagacggtatgcttgctgctgctttcgttatcctttactccggtgtgctcctgtttattctgtatttttgtttttctgccctgacctgcagaaacctgatgatgaaagaaaaaatgatgaaaggaatgaagatgaataaagcattactgccactgttactctgctgctttatttttccggcgtcagggaaagatgcaggctggcagtggtataacgagaaaataaatccgaaggaaaaagaaaataaacctgtacctgcagccccccgtcaggagccggatattatgcagaaactggccgtactgcagacggcaacaaagcgtgcgctgtacgaagccattctgtatcccggcgtggataattttgtgaaatatttccggctgcagaattactggactcagcaggccgggcttttcaccatgagtgctaaaaaggccatgctggcacatcccgaactggactataacctgcagtacagccattacaacggcacggtgcggaaccagctggcggcagaccaggcgcagcagcgacaggccattgcgaaactggctgaacactacggcatcatgtttttttaccgggggcaggaccccatcgacgggcagctggcgcaggtcattaatggcttccgggatacgtatggtctgagtgttattcccgtttccgtggatggcgtgattaatccgctgttgccggattcccggactgaccaggggcaggcgcagcgcctcggcgtgaaatatttcccggccatgatgctggttgacccgaaacagggcagtgttcgcccgttatcatacggttttatttcgcaggacgacctggcaaaacagttcctgaacgtttctgaagattttaaaccgaatttttaa

SEQ ID NO: 467024 - DNA, 342 bp, Shigella boydii
atgcatacaggggatttgtgtttttttacaggtgccagcctgtttatcgtgggggttgttggttatttctttacaggaccaaataataaaggagtttatctgctgagctcgtttgtcttctttgtagtaaatgtcataagtgtatgtatgctgccagataatttcttgtttctttgtggtgcggttatgaatcagtgtgccgtaccggttgtttcaatggcagtcagtaccataccggttatcacgaagtttgacagattcagaaggatgtttgtttgtattatgttgtcagccatatggtctggagtgatgtggttttttattatttcattagtgaaatga

SEQ ID NO: 467025 - DNA, 144 bp, Shigella boydii
atgaaaaagttatcttttaaagaaaaactggaaatagtgagaaacatcataagagagtcattatcaggtaatgcggcttttgctttactggtgtattcattattgcactcccccccattaaaacctttgctgatttatttgtga

SEQ ID NO: 467026 - DNA, 285 bp, Shigella boydii
atgataagtaaacgcagattctctttaccccggcttgatattacgggaatgtgggtattttccctgggtgtctggtttcatatcgtcgcccgtcttgtttacagcaaaccctggatggctttttttctggcggagttgattgcggccatccttgtgctgttcggcgcataccaggtgctggatgcatggattgcccgtgtcagccgggaagagcgtgaggcactggaagccaggcaacaggccatgatggaagggcagcaggagggcggacatgtctctcactaa

SEQ ID NO: 467027 - DNA, 546 bp, Shigella boydii
atgtctctcactaaattactgccggtcattttgttgatgatggccacaggtgtgcaggcctccacccgggatgaaattgaacgactctggaatccgcagggcatggccgcgcagcctgcacaaccggcagcaggcacgtcagccagaacagaaaagtcggctccccgctggttccgcctcagcaacggcaggcaggttaacctggccgactggaaggtggtgctgtttatgcaggggcattgcccttactgtcaccagtttgacccggtactgaaacagctggcacagcagtacggcttttctgtttttccctacaccctggatggtcagggggataccgcctttccggaagcattaccggtgccaccggacgtgatgcagaccttcttcccgaatatcccggtggccacaccgaccaccttcctggtcaacgtcaacacgcttgaggcattaccgcttttacagggggcaacggatgccgccggttttatggcgcggatggataccgttctgcagatgtacggaggggaaaaaggtgcgaaataa

SEQ ID NO: 467028 - DNA, 288 bp, Shigella boydii
gtgcgaaataagcaggtggtgttactcattgccggaatatccggcatcgcgacgggaatcatcgtcagcctgaatattccctttatccgtcaggggcttttttatcccgccagccctgtggaaattgtcgtttcgctgtgtcttaccttttctgtttctgttgtgtttttggtgggggcaattgtgggatggatttttgtgtctgaaatatattacagccgcatgaccagcctgaataaattatcagaaatatcagagggaacttatgatgaaagaaaaaataaatga

SEQ ID NO: 467029 - DNA, 396 bp, Shigella boydii; identical to SEQ ID NO: 233317

SEQ ID NO: 467030 - DNA, 1374 bp, Shigella boydii; identical to SEQ ID NO: 28564

SEQ ID NO: 467031 - DNA, 2817 bp, Shigella boydii
gtgaatgaagtctatgtgattgccggtggtgagtggttacgcaataacctgaacgccattgccgcctttatgggaacccggacgtgggattccatcgaaaaaattgcgctcacattgtctgttctcgcggtggccgtgatgtgggtacagcggcacaacgtgatggatttgctgggctgggtggccgtgtttgtgcttatcagcctgctggttaatgtccgtacatcggtgcagattattgataacagtgacctggtcaaagttcaccgggtggataatgtgccggtcggactggcgatgccactttcactgacgacccgtatcgggcatgcaatggtggccagctacgagatgatattcacccagcctgacagcgctacctacagcaagacaggcatgctgttcggggcgaacctgattgtgaaaagcaccgattttctgtcccggaatccggaaatcatcaatctgtttcaggactacgtccagaactgcgtgctgggtgatatttacctgaaccacaaatacacgctggaagacctgatggcctccggtgacccctacacgctgattttttcccggcccagcccgctacggggcgtttatgacagcaataataatttcataacctgtaaagatgcgtcggtcacgctgaaagacaggctgaatctcgatacaaagacgggaggcaagacctggcattattatgtgcagcagatatttggcggcagaccggacccggacctgttattcaggcaactggtgagtgacagttacagttatttctacggctccagccagtctgccagccatattatgcgccagaacgtcaccatgaatgccctgaaagagggtatcaccagtaatgcagcccgtaacggtgataccgccagcctggtcagtctggccacgacctcgtcgatggagaaacagcgtctggcacatgtctccattggtcatgtgctgatgcgaaacctgccgatggtgcagaccattctggtgggcattaccattggtatcttcccgctcctggtactggcggctgtcttcaacagactgacgctgtctgttctgagaggctatgtgtttgctctgatgtggttccagacctggccgttgctgtatgccattctgaacagtgccatgacattctatgcaaagcagaatggtgcaccggtcgtgctctctgaactctctcagatacagctgaaatactccgatctggcgtccactgccgggtatatatctgtcatgatacccccgttgtcatggatgatggtaaaaggccttggcgcaggtttttccagcgtgtacagccatttcgcttcctctgctatcagcccgactgccagtgcggcaggcagtgtggttgacggtaattactcctacggcaacatgcagacggaaaacgtgaacggcttcagctggagcaccaacagcaccacgtcgtttggtcagatgatgtaccagaccggcagtggcgcaaccgccacacagacccgtgacggtaatatggtgatggatgcaagcggagcgatgtcccgtttaccggtcggtatcaatgcaacgcgtcagattgcagcggcgcaacaggaaatggcccgggaggcgtcgaacagagcagaaagtgccctgcatggtttcagcagcagtattgccagtgcctggaactcgctcagtcagtttggttctaaccgggggagcagtgattctgtcacaggtggtgctgacagtacgatgagcgcacaggactccatgatggccagccgtatgcgcagtgcagtggaaagctatgcgaaggcgcataatatcagtaatgagcaggcgacaagagaactggcatcgagaagtacaaatgcgtcgcttggcctttacggtgatgcttatgctaaagggcatttaggcataagtgtattgggtaacggtggaggggttggtctccaggccggagctaaggcaagcattgatggcagtgatcttgactcacatgaagccagtagtggttcacgggccagccatgatgctcgtcatgatatcgatgccagagctacacaagactttaaagaggccagcgattactttaccagccgcaaagtcagtgaatccggcagccatactgacaataatgccgattcccgcgtggaccagctgtctgcagccctgaactcagcgaaacagagttacgaccagtacacgacgaatatgacccgcagccatgaatatgctgaaatggcatcccgtactgaaagcatgagtgggcagatgagtgaagatttgtcgcaacagtttgcacagtatgtgatgaaacacgcaccgcaggatgccgaagctattctgacaaacaccaattcaccggagattgcagaacgccgccgggcgatggcgtggtcttttgtgcaggaacaggtgcagcctggtgttgataatgcctggcgtgaatcccgtggcgatattggtaaaggaatggagagcgtaccttcgggtggtggcagccaggatattattgctgaccatcaggggcatcaggccattattgatcaaagaacgcaggacagtaatatccgtaatgatgtaaaacatcaggttgataatatggtcacagaatataaagggaatataggtgatactcagaacagcatacgtggcgaggaaaatattgtaagagggcagtattctgaactacaaaatcatcataaaacagaagcattaactcagaataataaatataatgaagaaaagctggctcaggaaagaatacctggtgctgatagtccgaaagagcttttagagaaagcaaagagttaccagcataaagaataa

SEQ ID NO: 467032 - DNA, 522 bp, Shigella boydii
atgattacacaacaaattatcagtagtgagttggaagttttaaagaagcatattgactcaggagatattagaattccgtcactatggcaggggttaaaacccgggtttataatcatggggtggatgattttttgtcccttactaatgtcatttctaataacacaaaagacaagtgaaacactcactgctgtgttagccggaggatggcttggacttattattctgtttattgtggcaaggattagaatgttatatttctctctgccggaagaattcctaaagacatcatccgtaatgaggattatatcatcaaaactgaaagtgtatttcattgtgtatatgggaattatatttttatggtcttttttaggtggagggattatatacggttttggtgcaattttagtgacggttattatggcgttcttgattcaattagatatcggtagatatcaatttgttggtgttattgatgcaatcaatagttacgtcaaaaacaagaagttatcaagagtaaaataa

SEQ ID NO: 467033 - DNA, 735 bp, Shigella boydii
atgatgaaaacaaaaaaactaatgatggttgcactggtcagttccactctggccctttcagggtgtggtgcgatgagcacagcaatcaagaagcgtaaccttgaggtgaagactcagatgagtgagaccatctggcttgaacccgccagcgaacgcacggtatttctgcagatcaaaaacacgtctgataaagacatgagtgggctgcagggcaaaattgctgatgctgtgaaagcaaaaggatatcaggtggtgacttctccggataaagcctactactggattcaggcgaatgtgctgaaggctgataagatggatctgcgggagtctcagggatggctgaaccgtggttatgaaggcgcagctgttggtgcagcgttaggtgccggtattaccggctataactcaaattctgccggtgccacactcggtgtaggccttgctgctggtctggtgggtatggctgcagatgcgatggtggaagatgtgaactataccatgatcacggatgtgcagattgcagagcgtactaaggcaacggtgacaacggataatgttgccgccctgcgtcagggcacatccggtgcgaaaattcagaccagtactgaaacgggtaaccagcataaataccagacccgtgtggtctcaaatgcgaacaaggttaacctgaaatttgaagaggcgaagcctgttctcgaagaccagctggccaaatcaatcgcaaatattctctga

SEQ ID NO: 467034 - DNA, 738 bp, Shigella boydii
atgacatcagacaatatcgctgaatatgttggtgagaataatcaatttactgagaagcctgtaactgaataccccccggtgatacaggataatacagtgaccactaaagactatctgtacagcaataatattgatactgaccttttagtggttatcggagggcttattgttatattgtttctcatgatgcttatcatgtactttattaattctctcaggcataaggaattaactgaaatactgacaaaaatatcttttcctgaaaaatccgggagcaattcgcttaatccggaagcggtcagctgtaatttgttgtccctgtgtgtgttggcaccggtactctgtacacccagaaagctggcagaagtctccagggagatcatcgtggcgagtgcgcaggaaattgcatggacgccggggagcagtcgtattgatggtcatcagggcgaaaatattacctggtctctgtcatcgcagtctcctgccgataagtatgatctcatcaataaaacgtcccgtgtttctcctgacagtggccgtttttatgaaccggacacagttctggatcaccgtgaacgggtacgcctttttattcagatccagtttccgcacgggagtgactggtctgaagtattgcgcctgactgacattgttacagagaaggtctcttccggcgggactgcaggcgggtatcaccaccggcatacagggtacacctggtctgtttctgtgaattaa

SEQ ID NO: 467035 - DNA, 207 bp, Shigella boydii
atgggtgtcggcattcgacgagataaacagccagccgtttttctgatcttcccggacaccccgcatccagtcacggatggtaaaagactcaccgttatgctcaatcccctgcaggtaacggatggctttcacgtagttggtcagcacagcacgaatggaaatcgccgttttctcaattttctcttccaccaggttggccgccggtga

SEQ ID NO: 467036 - DNA, 267 bp, Shigella boydii; identical to SEQ ID NO: 462029

SEQ ID NO: 467037 - DNA, 543 bp, Shigella boydii; identical to SEQ ID NO: 464540

SEQ ID NO: 467038 - DNA, 501 bp, Shigella boydii
atgtcaattctgaaagcgggctttgtggcttccgttccggcggtttgcggttttatcggcggtgtgctgggtgggattatttccgactggctgatgcgccgcacgggatcgctgaacattgcgcgtaaaacaccgatcgtaatgggcatgttgctgtcgatggtgatggtgttctgcaactacgtcaacgttgagtggatgatcatcggctttatggcgctggccttcttcggtaagggcatcggggcgctgggttgggcagtaatggcagataccgcgccaaaagagatcagcggtctttccggtggcctgttcaacatgttcggtaacatttctggcatcgtcacgccaatcgcaattggttatatcgttggcacgactggctcctttaatggggcgctgatttatgttggtgttcatgccttaatcgcggtactgagctacctggtgctggtgggcgatatcaagcgtatcgagctgaaacctgtcgcggggcaataa

SEQ ID NO: 467039 - DNA, 657 bp, Shigella boydii
atgcctgcgatcaatgccaaacgtgtttaccggatcatgcgccagaatgcgctgttgcttgagcgaaaacctgctgtaccgccatcgaaacgggcacatacaggcagagtggccgtgaaagaaagcaatcagcgatggtgctctgacgggttcgagttctgctgtgataacggagagatactgcgtgtcacgttcgcgctggactgctatgatcgtgaggcactgcactgggcggtgactaccggcggcttcaacagtgaaacagtacaggacgtcatgctgggagcggtggaacgccgcttcggcaacgatcttccgtcgtctccagtggagtggctgacggataatggttcatgctaccgggctaatgaaacacgccagttcgcccggatgttgggacttgaaccgaagaacacggcggtgcggagtccggagagtaacggaatagcagagagcttcgtgaaaacgataaagcgtgactacatcagtatcatgcccaaaccagacgggttaacggcagcaaagaaccttgcagaggcgttcgagcattataacgaatggcatccgcatagtgcgctgggttatcgctcgccacgggaatatctgcggcagcgggcttgtaatgggttaagtgataacagatgtctggaaatatag

SEQ ID NO: 467040 - DNA, 657 bp, Shigella boydii
atgcctgcgatcaatgccaaacgtgtttaccggatcatgcgccagaatgcgctgttgcttgagcgaaaacctgctgtaccgccatcgaaacgggcacatacaggcagagtggccgtgaaagaaaccaatcagcgatggtgctctgacgggttcgagttctgctgtgataacggagagagactgcgtgtcacgttcgcgctggactgctgtgatcgtgaggcactgcactgggcggtgactaccggcggcttcaacagtgaaacagtacaggacgtcatgctgggagcggtggaacgccgcttcggcaacgatcttccgtcgtctccagtggagtggctgacggataatggttcatgctaccgggctaatgaaacacgccagttcgcccggatgttgggacttgaaccgaagaacacggcggtgcggagtccggagagtaacggaatagcagagagcttcgtgaaaacgataaagcgtgactacatcagtatcatgcccaaaccagacgggttaacggcagcaaagaaccttgcagaggcgttcgagcattataacgaatggcatccgcatagtgcgctgggttatcgctcgccacgggaatatctgcggcagcgggcttgtaatgggttaagtgataacagatgtctggaaatatag

SEQ ID NO: 467041 - DNA, 282 bp, Shigella boydii; identical to SEQ ID NO: 463486

SEQ ID NO: 467042 - DNA, 657 bp, Shigella boydii
atgcctgcgatcaatgccaaacgtgtttaccggatcatgcgccagaatgcgctgttgcttgagcgaaaacctgctgtaccgccatcgaaacgggcacatacaggcagagtggccgtgaaagaaagcaatcagcgatggtgctctgacgggttcgagttctgctgtgataacggagagatactgcgtgtcacgttcgcgctggactgctgtgatcgtgaggcactgcactgggcggtgactaccggcggcttcaacagtgaaacagtacaggacgtcatgctgggagcggtggaacgccgcttcggcaacgatcttccgtcgtctccagtggagtggctgacggataatggttcatgctaccgggctaatgaaacacgccagttcgcccggatgttgggacttgaaccgaagaacacggcggtgcggagtccggagagtaacggaatagcagagagcttcgtgaaaacgataaagcgtgactacatcagtatcatgcccaaaccagacgggttaacggcagcaaagaaccttgcagaggcgttcgaacattataacgaatggcatccgcatagtgcgctgggttatcgctcgccacgggaatatctgcggcagcgggcttgtaatgggttaagtgataacagatgtctggaaatatag

SEQ ID NO: 467043 - DNA, 3120 bp, Shigella boydii; identical to SEQ ID NO: 463065

SEQ ID NO: 467044 - DNA, 672 bp, Shigella boydii
atgttacagatagtcggcgcgctgattctgctgatcgcaggatttgccattcttcgccttttgttcagagcattaaccagcacagcgtctgcgctggcagggttcatattgctgtgtctgttcggtccggctttactggctggctatatcactgaacgcataacccggttattccatattcgctggctggcaggcgtatttctgacgattgccggaatgatcatcagcttcatgtggggacttgatggtaaacatatcgcactggaggctcatacttttgactctgtaaaatttattctgaccaccgctctcgccgctggtctgctggttcttcccgtgcagataagaaccattcagcagagcgggctcacacctgaagatatcagcaaggaaattaacgggtattactgctgtttttatactgcttttttccttatggcgtgttctgcatacgcaccattgatcgcattgcagttcgatatttcaccctcactgatgtggtggggcgggttgttgtactggctggctgcattagtgacgctgctatgggcggccagccagatccaggcgctgaaaagactgaccagtgccatcagccagacactggaagaacaaccggtgctcaacagtaatgaaccgccccgggtttcctggagagtgttttatctgtga

SEQ ID NO: 467045 - DNA, 351 bp, Shigella boydii
atgcgtatgattccagagtgcatagcctgcgtcaccatcaggttgtcctgtttcccaaccaagattacagtaacgctgatattcccgacactcatgagtatagaagttaagatctacttgttctggggggatttttcctttctcaatgtctttcagtctattgatcatcacttcatttatagggtcatgaccaaatctggctatgtgtttttcaacaatagcgataccttccctgttgattgttacgccatctgtcgtcagattttctattggaccaccggcaaggtcgggattaaatggtctgaaccgccccgggaatcctggagactaaacttcctgagaaagaggtaa

SEQ ID NO: 467046 - DNA, 543 bp, Shigella boydii; identical to SEQ ID NO: 464540

SEQ ID NO: 467047 - DNA, 771 bp, Shigella boydii; identical to SEQ ID NO: 465272

SEQ ID NO: 467048 - DNA, 297 bp, Shigella boydii
atggtgaggtacttcgggttccttgccaaccgggtgtgtggagagaagctgccgcaggtgtaccgtgctctggggatggataaaccggaaccagtggcgaaagtgtgctatgcacaaatggtgaaacagttcctgagtcgtgacccgttcgaatgcgtgctgtgtggcggccggatggtataccgccgggccatcgcgggactgaatgtggaggggctacgcgcgggatatcagtctgctgaggtatatgccggcctgacacaggctaagtgtgcccgggaatcggtgcaagtataa

SEQ ID NO: 467049 - DNA, 450 bp, Shigella boydii
gtgataactgaacgtcggaacgtattgctacaaggcgctggctggttattgttgctggccccgttttttttcttcacctatggatctcttaatcagttcaccgcggttcaggaccttaacagccatgatatccccagtcaggtattcggttgggaaacggcgatcccttttcttccctggactattgttccttactggagtctggatcttttatatggattttcgctgttcgtttgtagcacgacattcgaacagcgccgacttgtccaccggcttattctggcaacggtaatggcctgctgcggttttttgctctatccgctgaagtttagttttatccgtcctgaagtgagtggggtgacgggatggccattttcgcaacttgaactgtttgatctgccttataaccagtctccttcgctgcatattattctctgctggctactctga

SEQ ID NO: 467050 - DNA, 1284 bp, Shigella boydii
atgtcagtacccgttcaacatcctatgtatatcgatggacagtttgttacctggcgtggagacgcatggattgatgtggtaaaccctgctacagaggctgtcatttcccgcatacccgatggtcaggccgaggatgcccgtaaggcaatcgatgcagcagaacgtgcacaaccagaatgggaagcgttgcctgctattgaacgcgccagttggttgcgcaaaatctccgccgggatccgcgaacgcgccagtgaaatcagtgcgctgattgttgaagaagggggcaagatccagcagctggctgaagtcgaagtggcttttactgccgactatatcgattacatggcggagtgggcacggcgttacgagggcgagattattcaaagcgatcgtccaggagaaaatattcttttgtttaaacgtgcgcttggtgtgactaccggcattctgccgtggaacttcccgttcttcctcattgcccgcaaaatggctcccgctcttttgaccggtaataccatcgtcattaaacctagtgaatttacgccaaacaatgcgattgcattcgccaaaatcgtcgatgaaataggccttccgcgcggcgtgtttaaccttgtactggggcgtggtgaaaccgttgggcaagaactggcgggtaacccaaaggtcgcaatggtcagtatgacaggcagcgtctctgcaggtgagaagatcatggcgactgcggcgaaaaacatcaccaaagtgtgtctggaattggggggtaaagcaccagctatcgtaatggacgatgccgatcttgaactggcagtcaaagccatcgttgattcacgcgtcattaatagtgggcaagtgtgtaactgtgcagaacgtgtttatgtacagaaaggcatttatgatcagttcgtcaatcggctgggtgaagcgatgcaggcggttcaatttggtaaccccgctgaacgcaacgacattgcgatggggccgttgattaacgccgcggcgttggaaagggttgagcaaaaagtggcgcgcgcagtagaagaaggggcgagagtggcgttgggtggcaaagcggtagaggggaaaggatattattatccgccgacattgctgctggatgttcgccaggaaatgtcgattatgcatgaggaaacctttggcccggttctgccggtggtcgcatttgacacgctggaagaggctatctcaatggctaatgacagtgattacggcctgacctcatcaaatctatacccaaaatctgaacgtcgcgatgaaagccattaa

SEQ ID NO: 467051 - DNA, 240 bp, Shigella boydii
atgggacgctggcttgctggcaggctcatgaaagagctggggctggtcagctgtcagcagccgactcaccggtataaacgtggcggtcatgagcacgttgctatcccgaatcatcttgagcgacagttcgccgtaacggaaccaaatcaggtgtggtgcggtgatgtgacctatagtgtgcccggagttcagggcgggcatggatgcttaaatgaaccgcgagtctgtctggaatattga

SEQ ID NO: 467052 - DNA, 543 bp, Shigella boydii; identical to SEQ ID NO: 464540

SEQ ID NO: 467053 - DNA, 309 bp, Shigella boydii; identical to SEQ ID NO: 464192

SEQ ID NO: 467054 - DNA, 324 bp, Shigella boydii; identical to SEQ ID NO: 462444

SEQ ID NO: 467055 - DNA, 291 bp, Shigella boydii
atgctggtcactgacaccataacagaggccaccctgtacgaaaacgggctgtatacgcgccacatcagactcagtcgcccagtatctgacagcaaataccccttgccacccggatctcagctcattaaaaatatgaccttacgactgcgcctgcaggatcagcaggaagaaacatccgtgacattatttcagggaaaaatgagtaccgacggaaataactattacatcatcaaaggtaaagtaagctcagtacttctgttattaaaaatgctgcagattaatcacgcctga

SEQ ID NO: 467056 - DNA, 1161 bp, Shigella boydii
atgttgctctgcccgctcctggccggggcgaatcacccgggtctgctgtccgtccgacagcgtgacactgtcaccggaaaccgccgtcaccgtccagacgctgttggccacataaccgcgctcccggtcactcttcgtgaagcgcatccggtcaccggtccccacccggatggtgtccggggtgtacagtgtgacgccttcagccaccgcctcccggggcgaaatcagccgcgtgttaccttccgcatcctccagggttatcagcccgtcatccttactgataccggcaatccggtgatacacattatccaccagggcaagggcatccgggttattctcccaggtggagagacgacgcagctccccgtcacgtatattcgctgtgttcaggacaggcaccatgacctgcacctgccccagttctccggccttttcccgtgcatcatgaatcatgctgttcagtacgcgccggtcctcattcaggtgcgtgacaatcagcgtctgctcccgtgcttccggtgtcctgccggtatagtcgcggacaatggctgcatacagtgtcatggggacatccggaaaagcctcgcctttcagcatcgccttctgctgcgcttctgccagtttcgcttcctggctgtgactgaactccgtcacggagtgctccggtgcccatgcgccctccagacgtggcacctgagacggtttcacacgctcaagcccggacagcgccctttccacatcccggttaatcaggctgtataccgcctcccgcagttccggcgtctgacgcacaatctccttcatgatgaccacatcggcagcactgcgcgtctgctggagacggaaaggctgaccgggcgcgatggcctgcagctggtccgtgtcaccgctggccacagcccgaccgccaccggccgcaatcagggcgtatgcccgtgccatgtcggtattgcccaccatagagctctcatcgagaaggaacagcgtgttgctgaaatccggcgtttctccgctgcgctgctgcagctgcgtgtcatgcagaaaggacgccagcgtctgtgcatccacgccggcgctgcgcatctccccgaccgcacggtgtgtgggccccagccccacgacacggggacgttcactctccggcagcatgttcacggctga

SEQ ID NO: 467057 - DNA, 570 bp, Shigella boydii
atggcctgctgtgccggcgtgtgcagcccggctttctgcagactgatagcggtttccagcaatgtctcaccggcacgcgcctttatctgctcagaaaccaccgtaaaggagggatggcggacaagtttttccgcagtacgggtttcatccagtgaggaatacagccggacatcacgaccactgcgggccagaccgttcagggtggcattgtccattgccatctgtgtgacggaggcaaaaaccttcgcactgtcgctgacggaatgcccgggcgtttccacccagccgttctccagcttcagtgccgtgaacggtgaatcgctcacaggcagggtggccggttcagcccgtcccggcacaacaaccgtcatcgcatcttcactgacggatgccacctgcaggcggtcaccgccggagacgcggagtccgggaattttccctgtcaccctcagacgctcaccgtctgccaccggcattttttccggccggaacagcgaccagctgctgtccagggaagaaatacgcaccacctgcgtttcgccctgcgcattccgcagggtcaggctgtga

SEQ ID NO: 467058 - DNA, 1761 bp, Shigella boydii
ttggctttttcacatcgtccaaaagaaacatttccgttaattttaaatttcggcgcaacagaactggccctgcccgttgcccgcgtctggcaccgttttgcgggccagcgtaatctggctcgccagtggattttacaatggccggaacatacggctactgcacttattccactcgtctttgttaaaccctgcgacaacagcgaagcggcattatttgcccttcgtttactgtatgaacaaggacatagtgaattactgcaaacggttgcaaaccgctgggatcgcgctgatatgtggccagccctggaaaaaatacttacccagaacccgatggaaatttacccggcacgcattccaaaagcccctgatttctggcatccgcaaatgtggtccaggccgcgccttatcactaataatcaaactgttaccaatgacgctctggaaattatcggcgaaatgctgcgctttacccaggggggacgtttttatagcgggctggaacaactgaaaacgttctgccagccacaaacgctggcagcttttgcttgggatctcttcactgcgtggcaacaagctggtgcccccgcaaaagacaactgggcatttctggcgttaagtctctttggtgacgaaagcacggcacgggatctgacgacacagatcctcgcctggccacaagaaggcaaatctgcccgtgctgtcagcggcctgaacatccttaccctgatgaataatgatatggcgctgatacagctgcatcatatatcgcaacgggctaaatcccgccccttacgtgataacgcggcggaatttcttcaggtggtcgcagaaaatcgcgggctaagccaggaagagctagcggacagattagtcccaaccctgggccttgatgatccgcaggcgttgagttttgattttggtccccggcagtttaccgttcgcttcgatgaaaatctcaacccggttatctttgatcagcaaaacgttcgccagaaaagcgttccccgtttgcgcgccgatgacgatcaactgaaagcgcccgaggcactggcccgactaaaagggctaaaaaaagatgctactcaggtgagcaaaaacctgctcccgcgtcttgaaacggccctacgtaccacccgacgctggtcgctggcagattttcattctctgtttgttaatcatccctttacccgtctggttacccagcgattaatatggggggtttatccggcaaatgaaccgcgttgtttactcaaagcctttcgtgtggccgcagagggggagttctgcaatgcgcaagatgagccaattgacctgcctgcggacgctctgattggcattgcccacccgttagaaatgacagcagaaatgcgcagtgaatttgcacagctttttgccgattacgaaattatgccgccttttcgccagttgtcgcgccgcacggtgctgctcacacctgacgagtcaaccagtaacagcctgactcgctgggaaggtaaatccgctaccgttgggcaacttatgggaatgcgatacaaaggctgggagtcaggctatgaggacgcatttgtctataacctgggtgagtaccggctggtccttaagttttcacccggttttaaccactacaatgttgatagcaaagcgctaatgagcttccgttctcttcgagtgtaccgtgacaataaatccgtcacttttgccgaacttgatgtgtttgatttgagtgaggcgttaagcgcacctgacgtcattttccattaa

SEQ ID NO: 467059 - DNA, 420 bp, Shigella boydii
atggaacagaaagcattatctgcagaaccccgcagatcattttcaaatgagtttaaacttcaaatggttaaactggcttcacaaccaggagcctctgttgcccgtattgcccgggaacacgatatcaatgataacctgctgtttaaatggctcaggctctggcagaacgaagggcgcatatcgcggcgtcttccggtaacaacctcttctgacactggcgttgaattattacctgtggagataacgccggatgagccgaaagaacctgtggctgctcttactccgtctttatctactcagactacagttagtgccagctcctgcaaggtggagttccgtcacggtaacatgacgctggaaaatccttcaccagagctgctcacagtgttgatccgtgaactgaccgggaggggacgatga

SEQ ID NO: 467060 - DNA, 177 bp, Shigella boydii; identical to SEQ ID NO: 463175

SEQ ID NO: 467061 - DNA, 927 bp, Shigella boydii
atgcgaaatgattgtggtcatcgaaaactttatgacctcatcggcaaactgccagacctgatgaccgttgagcaggaagatattattcctaacgactacgccggtaacatgggatatctcattttcctccagcctgtcaccagcgaaaaattcgaacgcaaaccgatttactggatcctgagtgaagtcgcgaaacgtcttggacctgacgtctatcaaaagttcacagaaggtcgcacgcaggaacaatggttacaacatctgtacgccaaaatgcttgccaaagatccggcgttaccgtcttacgacgaactgaaaaaaatgggtatctataagcgtaaagatcccaatggccattttgtcgcctacaaagcatttcgtgacgaccccgaggcaaatccacttaaaacgccttccggtaagattgaaatttattccagcaggctggcggaaattgcccgtacctgggaactggaaaaagatgaagtgataagcccattgccagtttatgcctcaacctttgaaggctggaactcccctgaacgtagaaccttcccactgcaactgtttggtttccattacaaatcccgtactcactcgacctacggcaatattgatctcctgaaggctgcctgccgtcaggaggtgtggatcaaccctatagatgcgcagaaacgtgggattgccaacggcgatatggtgcgggtgtttaaccatcgtggcgaagttcggctaccagccaaagtaacaccacgtattctccctggagttagcgctatgggccagggagcctggcacgaggccaatatgtctggcgataaaatcgaccatggcggctgtgtgaatacgctaaccactctgcgcccttcaccactggcgaagggaaacccgcagcacactaatctggtcgagatcgaaaaaatataa

SEQ ID NO: 467062 - DNA, 210 bp, Shigella boydii; identical to SEQ ID NO: 9340

SEQ ID NO: 467063 - DNA, 543 bp, Shigella boydii
gtgaaagaaagcaatcagcgatggtgctctgacgggttcgagttctgctgtgataacggagagagactgcgtgtcacgttcgcgctggactgctgtgatcgtgaggcactgcactgggcggtgactaccggcggcttcaacagtgaaacagtacaggacgtcatgctgggagcggtggaacgccgcttcggcaacgatcttccgtcgtctccagtggagtggctgacggataatggttcatgctaccgggctaatgaaacacgccagttcgcccggatgttgggacttgaaccgaagaacacgtcggtgcggagtccggagagtaacggaatagcagagagcttcgtgaaaacgataaagcgtgactacatcagtatcatgcccaaaccagacgggttaacggcagcaaagaaccttgcagaggcgttcgagcattataacgaatggcatccgcatagtgcgctgggttatcgctcgccacgggaatatctgcggcagcgggcttgtaatgggttaagtgataacagatgtctggaaatatag

SEQ ID NO: 467064 - DNA, 657 bp, Shigella boydii
atgcctgcgatcaatgccaaacgtgtttaccggatcatgcgccagaatgcgctgttgcttgagcgaaaacctgctgtaccgccatcgaaacgggcacatacaggcagagtggccgtgaaagaaagcaatcagcgatggtgctctgacgggttcgagttctgctgtgataacggagagagactgcgtgtcacgttcgcgctggactgctgtgatcgtgaggcactgcactgggcggtgactaccggcggcttcaacagtgaaacagtactggacgtcatgctgggtgcggtggaacgccgcttcggcaacgatcttccgtcgtctccagtggagtggctgacggataatggttcatgctaccgggctaatgaaacacgccagttcgcccggatgttgggacttgaaccgaagaacacggcggtgcggagtccggagagtaacggaatagcagagagcttcgtgaaaacgataaagcgtgactacatcagtatcatgcccaaaccagacgggttaacggcagcaaagaaccttgcagaggcgttcgagcattataacgaatggcatccgcatagtgcgctgggttatcgctcgccacgggaatatctgcggcagcgggcttgtaatgggttaagtgataacagatgtctggaaatatag

SEQ ID NO: 467065 - DNA, 543 bp, Shigella boydii; identical to SEQ ID NO: 463215

SEQ ID NO: 467066 - DNA, 414 bp, Shigella boydii; identical to SEQ ID NO: 463211

SEQ ID NO: 467067 - DNA, 261 bp, Shigella boydii; identical to SEQ ID NO: 12476

SEQ ID NO: 467068 - DNA, 858 bp, Shigella boydii
gtgactgatcttcaacaaacgtattaccgccaggtaaagaacccgaatccggtgtttacaccccgtaaaggtgccggaacgctgaagttctgcgaaaaactgatggaaaaggcggtgggcttcacttcccgttttgatttcgccattcatgtggcgcatgcccgttcgcgtggtctgcgtcgacgcatgccaccggtgctgcgtcgacgggctattgatgcgctcctgcaggggctgtgtttccactatgacccgctggccaaccgcgtccagtgctccatcaccacgctggccattgagtgcggactggcgacggagtctgctgccggaaaactctccatcacccgtgccacccgggccctgacgttcctgtcagagctgggactgattacctaccagacggaatatgacccgcttatcgggtgctacattccgaccgatatcacgttcacaccggctctgtttgctgcccttgatgtgtctgaggatgcagtggcagctgcgcgccgcagtcgtgttgaatgggaaaacagacagcgcaaaaagcaggggctggataccctgggtatggatgagctgatagcgaaagcctggcgttttgtgcgtgagcgtttccgcagttaccagacagagcttaagtcccgtggaataaaacgtgcccgtgcgcgtcgtgatgcgaacagggaacgtcaggatatcgtcaccctggtgaaacggcagctgacgcgtgaaatctcggaaggacgcttcactgctaatggtgaggcggtaaaacgcgaagtggagcgtcgtgtgaaggagcgcatgattctgtcacgtaaccgtaattacagccggctgaccacagcttctccctga

SEQ ID NO: 467069 - DNA, 270 bp, Shigella boydii; identical to SEQ ID NO: 239458

SEQ ID NO: 467070 - DNA, 165 bp, Shigella boydii; identical to SEQ ID NO: 239457

SEQ ID NO: 467071 - DNA, 924 bp, Shigella boydii; identical to SEQ ID NO: 16120

SEQ ID NO: 467072 - DNA, 531 bp, Shigella boydii
gtggctctggtaacgaccagtatcccgatcccggctggccgtcctggccgccacatgaggcatgttccgcgtccttgcaatactgtgtttacatacagtctatcgcttagcggaaagttcttttaccctcagccgaaatgcctgccgttgctagacattgccagccagtgcccgtcactccctgtcgtctgggcgttcctctgggctaaacatcgacatgatccggcgcttaatatcgccgtccttgttgaccagcgtcttggtcacgaaggccgcgtattctttggcgttgtcgtaccctttccagacctcgtgggggtcaagagcgtaggcgcaaacccgcccagcgactgggattctgaccaaggcgcgttctgtctcaaggtacttgagccagttccgaatcgtgcgggtgctaacctccagatggtcagccaggaactgctgatcgcagacaacagcgccacaggtagggtcgatgtgttcagcgaagaaggcatacaggccagcggcccccgcattgccctttga

SEQ ID NO: 467073 - DNA, 657 bp, Shigella boydii
atgcctgcgatcaatgccaaacgtgtttaccggatcatgcgccagaatgcgctgttgcttgagcgaaaacctgctgtaccgccatcgaaacgggcacatacaggcagagtggccgtgaaagaaagcaatcagcgatggtgctctgacgggttcgagttctgctgtgataacggagagagactgcgtgtcacgttcgcgctggactgctgtgatcgtgaggcactgcactgggcggtgactaccggcggcttcaacagtgaaacagtacaggacgtcatgctgggagcagtggaacgctgcttcggcaacgatcttccgtcgtctccagtggagtggctgacggataatggttcatgctaccgggctaatgaaacacgccagttcgcccggatgttgggacttgaaccgaagaacacggcggtgcggagtccggagagtaacggaatagcagagagcttcgtgaaaacgataaagcgtgactacatcagtatcatgcccaaaccagacgggttaacggcagcaaagaaccttgcagaggcgttcgaacattataacgaatggcatccgcatagtgcgctgggttatcgctcgccacgggaatatctgcggcagcgggcttgtaatgggttaagtgataacagatgtctggaaatatag

SEQ ID NO: 467074 - DNA, 543 bp, Shigella boydii; identical to SEQ ID NO: 463215

SEQ ID NO: 467075 - DNA, 549 bp, Shigella boydii; identical to SEQ ID NO: 463548

SEQ ID NO: 467076 - DNA, 378 bp, Shigella boydii; identical to SEQ ID NO: 465226

SEQ ID NO: 467077 - DNA, 291 bp, Shigella boydii; identical to SEQ ID NO: 462600

SEQ ID NO: 467078 - DNA, 288 bp, Shigella boydii; identical to SEQ ID NO: 463938

SEQ ID NO: 467079 - DNA, 420 bp, Shigella boydii; identical to SEQ ID NO: 467059

SEQ ID NO: 467080 - DNA, 525 bp, Shigella boydii
atgatgattttgagtattctcgctacggttgtcctgctcggcgcgttgttctatcaccgcgtgagcttatttatcagcagtctgattttgctcgcctggacagccgccctcggcgttgctggtctgtggtcggcgtgggtactggtgcctctggccattatcctcgtgccatttaactttgcgcctatgcgtaagtcgatgatttccgcgccggtatttcgaggtttccgtaaggtgatgccgccgatgtcgcgcactgagaaagaagcgattgatgcgggcaccacctggtgggagggcgacttgttccagggcaagccggactggaaaaagctgcataactatccgcagccgcgcctgaccgccgaagagcaagcgtttctcgacggcccggtagaagaagcctgccggatggcgaatgatttccagattactcatgagctggcggatctgccgccggagttgtgggcgtaccttaaagagcatcgcttcttcgcgatgatggtaatgactccaacttactga

SEQ ID NO: 467081 - DNA, 210 bp, Shigella boydii; identical to SEQ ID NO: 9340

SEQ ID NO: 467082 - DNA, 654 bp, Shigella boydii
atgggacgctggcttgctggcaggctcatgaaagagctggggctggtcagctgtcagcagccgactcaccggtataaacgtggtggtcatgaacatgttgctatccctaactaccttgaaaggcagttcgccgtgaccgagccaaatcaggtgtggtgcggtgatgtgacctgtatctggacgggtaagcgctgggcgtacctcgccgttgttctcgacctgttcgcaagaaaaccagtgggctgggccatgtcgttctcgccggacagcaggctcaccatgaaagcgctggaaatggcatgggaaacccgtggtaagcccggcggggtgatgttccacagcgatcagggcagtcattatacgagcaggcagttccggcagttattgtggcgataccagatcagacagagtatgagccggcgcggaaactgctgggataacagcccaatggaacgcttcttcaggagtctgaagaacgaatggatgccggtggtgggttacgtaagcttcagcgaggcagctcacgccataacggactatatcgttggatattacagcgcactaagaccgcacgaatataatggtgggttacccccaaacgaatcggaaaatcgatactggaaaaactctaactcggtggccagtttttgttga

SEQ ID NO: 467083 - DNA, 210 bp, Shigella boydii; identical to SEQ ID NO: 9340

SEQ ID NO: 467084 - DNA, 303 bp, Shigella boydii
atgggaagacgaaggaaaaatcctgagcacgaaaaattacctccaaatgtatacccaaataaatatagttatgtatggaaaccaacatccagcgaatctgtaacactaaccgccatcaaggatggtttagctgctttatggaaaaagtatgaggaaactgtaaataatcgcgatcgtgcaatgacattcggtcgcttgtgggaaaaattcctcgccagcgcctattacagtgacctcagtccaagaacacaaaaagattatctgcaacatcaaaaaagttgcttgccgtattcggtaaggtga

SEQ ID NO: 467085 - DNA, 543 bp, Shigella boydii; identical to SEQ ID NO: 464540

SEQ ID NO: 467086 - DNA, 1719 bp, Shigella boydii; identical to SEQ ID NO: 463247

SEQ ID NO: 467087 - DNA, 210 bp, Shigella boydii; identical to SEQ ID NO: 462553

SEQ ID NO: 467088 - DNA, 771 bp, Shigella boydii; identical to SEQ ID NO: 465272

SEQ ID NO: 467089 - DNA, 1455 bp, Shigella boydii; identical to SEQ ID NO: 463559

SEQ ID NO: 467090 - DNA, 534 bp, Shigella boydii; identical to SEQ ID NO: 462447

SEQ ID NO: 467091 - DNA, 543 bp, Shigella boydii; identical to SEQ ID NO: 464540

SEQ ID NO: 467092 - DNA, 987 bp, Shigella boydii
atggatttcaatcgcaatcctgaagcggtgccgggtgacctgccgttctcattagatcgactggacgacgacgttcgcgcgtatctggaaaataacgacgctctggcaccatcgcccatcgaacggctgcaacgaatgaatccgctgtctatctcgctgtataagatgcacggttacgatctcaccacacagcctttgcagtttgccatgaataatcagcatatgaatggcggcattgaagtggatatctggggacaaacctccctgcccggctgtttcgccgtgggggaagttgctggcacacacggcgtcactcgccctagtggtgcagcattgaatgccgggcaggtttttgctgttcgtctggcacgttttattggttgcacgcaaaagcggtctgttgagggtgatgtcgcgcagctggtagcctcatctctgaatatagtcagagaagttatcgctcaggcactggcaaacgagaacggaatggcgctggtaacggtgaaagacaaaatccaggcgcgaatgtctgattacgccggatttatttgtcatgccgataaagttcgtcatgccacccgtgacgccctgctgctaagtgagtttgtacaacaacacggtttaaccatcaatcacgcaggcgaaattgccgaactgtttatgtggcggcatatgacgctgacttctgccgccgtattaacgcaattgacgcattatattgacgcaggtggtggcagtcgtggagcacggatggttattgatccacaaggcaaatgcctcccacaaactcgtcgcggcgcaaaagaagaatggcgttttcgctctgaacgtgctgaagacaaaaatcacagattaacgattcaatattcgcaaggttcttttattaccgaagtgaagtctttacgtatgcaaccgtgtattaaaggtatttactttgaaaaaaactggccagactttttaggtaatgctgccaacttactgatttag

SEQ ID NO: 467093 - DNA, 189 bp, Shigella boydii
atggcatttaaacactatgatgttgtcagggcggcgccgccgtcagatcttgcggaaaagctgacacataaactgaaagagggctggcagccgtttggtagtccggtggccataaccccttataccctgatgcaggcgattgcagcagaaggtgatgtggtggtcagtggtgcaactgagccggagtga

SEQ ID NO: 467094 - DNA, 327 bp, Shigella boydii; identical to SEQ ID NO: 5975

SEQ ID NO: 467095 - DNA, 420 bp, Shigella boydii
atggaacagaaagcattatctgcagaaccccgcagatcattttcaaatgagtttaaacttcaaatggttaaactggcttcacaaccaggagcctctgttgcccgtattgcccgggaacacgatatcaatgataacctgctgttcaaatggctcaggctctggcagaacgaagggcgcatatcgcggcgtcttccggtaacaacctcttctgacactggcgttgaattattacctgtggagataacgccggatgagccgaaagaacctgtggctgctcttactccgtctttatctactcagactacagttagtgccagctcctgcaaggtggagttccgtcacggtaacatgacgctggaaaatccttcaccagagctgctcacagtgttgatccgtgaactgaccgggaggggacgatga

SEQ ID NO: 467096 - DNA, 249 bp, Shigella boydii; identical to SEQ ID NO: 463591

SEQ ID NO: 467097 - DNA, 795 bp, Shigella boydii; identical to SEQ ID NO: 463984

SEQ ID NO: 467098 - DNA, 420 bp, Shigella boydii
atggaaacttaccctgaccctgatgatatccggaaaaatacagcagacatactgaaagcgttaaccgtggacaatattcctgagcgtcatggctttacggcggagctggcatcactggaaaactgcataagcgatgatgaatattgcttcaatgagttttgtgagacggggtgcgccttcctgaaagccttactgagaacccggctgagacttaaaagaaccgaccctgcgcatccgttgctgcccctcatctcttcgtcggtggaagcactcagggctcagcttaaggaaaatgaagcttatgtccgccttttaatcgggatggatgcggtctcccgatggaccgggcctctgttctgctttgccgctctgatgatactgattctggtgggaactgtgtttgcacacgtatggttttaa

SEQ ID NO: 467099 - DNA, 792 bp, Shigella boydii
gtggcggcaggccgtgccgttctccgtcaggcggggctggccgggggagacagccctgcacggtttattgcaccgggacgtaaatatccgcagccgtatgtggcactgccggcgtttgaccgtaacggcaggtccgccggtatctggctgaacccactgaccacggatgacggaaacgggctgcggggattcagtggtgaaggacgggtgaaaggcagcggggatgcgcagttcgtggccctgcagggcagccgtaacggagagagcctgctggctgataatatgcaggatggtgtccggattgcccgtgataatcctgacagcggtgtggtggtgagaattgccggtgaaggtcgcccgtggaatcccggtgccatcaccggcggtcgcgtgtggggggatatcccggataacagcgtccagccgggagccggaaatggcgaaccggtcacggcagaggtgctggcacagcggcaggctgaagaggccatccgccgtgaaacggaacgccgcgcagatgaaattgtcagaaaaatggcagagaacaaacctgacctgccggatggcaaaacagagcaggctgtcagggagattgccgggcaggaacgtgaccggactgccacttctgaacgggaagccgcgctgccggagagtgtgctgcgtgaatcacaacgggagcgggaagcggtccgggaggttgcccgggaaaatctgctgcaggagcgactgcagcagatggagcgggatatggtccgtgacctgcagaaagagaaaacgctgggcggggactga

SEQ ID NO: 467100 - DNA, 450 bp, Shigella boydii
atggagaaccgtctgagtgccgtacttgctgcaagggaagcagaaggtcgccagatggccagcctcttcgaaccggaggttgcctccggagaagacgtgactcaggctgaacagccacaacagccacaacagccacaacagccacaacagccacaacagccacaacagccagtgtcttctgtcatcagtgataagaagtcagatgcaggtgtgagtgttccggcaggggggatcgagcaggagctgaaaatgaaaccggaagaagagatggaacagcaacggccacccgggatcagtgaatccggtgaagtggtggatatggccgcttatgaggcatggcaacaggaaaatcatccgggcatccagcagcagatgcagcgtcgtgaagaggtgaacattaatgtgcaccgggagcgcggggaggatgttgagccgggagatgatttctga

SEQ ID NO: 467101 - DNA, 657 bp, Shigella boydii; identical to SEQ ID NO: 463703

SEQ ID NO: 467102 - DNA, 753 bp, Shigella boydii
atgtctggaaatataggggcaaatccatttggtgtatccaggagcggttattacaactgggtacagcatgaaccctcagacagaaaacaaagtgatgagcggctaaaactggagattaaggtggcacatatccgcactcgcgaaacatatggaacccggcggctccagacggagctggcagagaatggcatcatcgttggtcgtgaccgactggcacgtcttcgtaaggagctaaggctacgctgtaagcagaaacgcaagttcagagcgactacgaacccgaaccacaatctgccagttgcgccaaatctgctgaaccagacgttcgctcctacagcaccaaatcaggtctgggtggcggacctgacgtatgttgccacacaggagggatggttgtacctcgctggcatcaaagatgtttatacgtgcgaaattgtcggctacgccatgggagagcgcatgacaaaagagctgacaggtaaagccctgtttatggcgctcaggagccagcgcccacttgccgggctaatccaccactctgatcgaggttcacagtactgcgcatacgattaccgggtcatacaggagcagtctggtctgaaaacatcaatgtcgcgtaaaggtaactgttacgacaacgctccgatggaaagcttctggggaacgctgaaaaatgagagcctgagccactatcgttttaataaccgggatgaagccatctcagtagtaagcgtcaacggagcaccgtattga

SEQ ID NO: 467103 - DNA, 543 bp, Shigella boydii; identical to SEQ ID NO: 464540

SEQ ID NO: 467104 - DNA, 657 bp, Shigella boydii
atgcctgcgatcaatgccaaacgtgtttaccggatcatgcgccagaatgcgctgttgcttgagcgaaaacctgctgtaccgccatcgaaacgggcacatacaggcagagtggccgtgaaagaaagcaatcagcgatggtgctctgacgggttcgagttctgctgtgataacggagagagactgcgtgtcacgttcgcgctggactgctgtgatcgtgaggcactgcactgggcggtgactaccggcggcttcaacagtgaaacagtactggacgtcatgctgggtgcggtggaacgccgcttcggcaacgatcttccgtcgtctccagtggagtggctgacggataatggttcatgctaccgggctaatgaaacacgccagttcgcccggatgttgggacttgaaccgaagaacacggcggtgcggagtccggagagtaacggaatagcagagagcttcgtgaaaacgataaagcgtgactacatcagtatcatgcccaaaccagacgggttaacggcagcaaagaaccttgcagaggcgttcgagcattataacgaatggcatccgcatagtgcgctgggttatcgctcgccacgggaatatctgcggcagcgggcttgtaatgggttaagtgataacagatgcctggaaatatag

SEQ ID NO: 467105 - DNA, 672 bp, Shigella boydii; identical to SEQ ID NO: 465269

SEQ ID NO: 467106 - DNA, 420 bp, Shigella boydii; identical to SEQ ID NO: 467095

SEQ ID NO: 467107 - DNA, 792 bp, Shigella boydii
gtggcggcaggccgtgccgttctccgtcaggcggggctggccgggggagacagtcctgcacggtttattgctccgggacgtaaatatccgcaaccgtatgtggcactgccggcgtttgaccgtaacggcaagtccgccggtatctggctgaacccgctgaccacggatgacggaaacgggctgcggggattcagcggtgaaggtcgggtaaaaggcagcggggatgcgcagttcgtggctctgcagggcagccgtaacggagaaagcctgctggctgataatatgcaggatggcgtccggattgcccgtgataatcctgacagtggtgtggtggtaagaatcgccggtgaaggccgtccgtggaatcccggtgccatcaccggtggccgcgtgtggggggatatcccggacaacagcgtccagccgggagccggaaatggcgaaccggtcacggcagaggtactggcacagcggcaggctgaagaggccatccgccgtgaaacggaacgtcgcgcagatgaaattgtccgtaaaatggcagagaacaaacctgacctgccggacggcaaaacagagcaggctgtcagggaaattgccgggcaggagcgtgaccgggctgccataactgaacgggaagccgcgctgccggagagtgtactgcgtgaaccacaacgggtgcgggaagcggtccgggaagttgcccgggaaaatttgctgcaggagcgtctgcagcagatggagcgggatatggttcgtgacctgcagaaagagaaaaccccgggcggagactga

SEQ ID NO: 467108 - DNA, 327 bp, Shigella boydii; identical to SEQ ID NO: 5975

SEQ ID NO: 467109 - DNA, 585 bp, Shigella boydii; identical to SEQ ID NO: 460740

SEQ ID NO: 467110 - DNA, 657 bp, Shigella boydii
atgcctgcgatcaatgctaaacgtgtttaccggatcatgcgccagaatgcgctgttgcttgagcgaaagcctgctgtaccgccatcgaaacgggcacatacaggcagagtggccgtgaaagaaagcaatcagcgatggtgctctgacgggttcgagttctgctgtgataacggagagagactgcgtgtcacgttcgcgctggactgctgtgatcgtgaggcactgcactgggcggtgactaccggcggcttcaacagtgaaacagtacaggacgtcatgctgggagcggtggaacgccgcttcggcaacgatcttccgtcgtctccagtggagtggctgacggataatggttcatgctaccgggctaatgaaacacgccagttcgcccggatgttgggacttgaaccgaagaacacggcggtgcggagtccggagagtaacggaatagcagagagcttcgtgaaaacgataaagcgtgactacatcagtatcatgcccaaaccagacgggttaacggcagcaaagaaccttgcagaggcgttcgagcattataacgaatggcatccgcatagtgcgctgggttatcgctcgccacgggaatatctgcggcagcgggcttgtaatgggttaagtgataacagatgtctggaaatatag

SEQ ID NO: 467111 - DNA, 657 bp, Shigella boydii; identical to SEQ ID NO: 463703

SEQ ID NO: 467112 - DNA, 657 bp, Shigella boydii; identical to SEQ ID NO: 463703

SEQ ID NO: 467113 - DNA, 543 bp, Shigella boydii; identical to SEQ ID NO: 464540

SEQ ID NO: 467114 - DNA, 444 bp, Shigella boydii; identical to SEQ ID NO: 462753

SEQ ID NO: 467115 - DNA, 168 bp, Shigella boydii; identical to SEQ ID NO: 463300

SEQ ID NO: 467116 - DNA, 327 bp, Shigella boydii; identical to SEQ ID NO: 5975

SEQ ID NO: 467117 - DNA, 351 bp, Shigella boydii; identical to SEQ ID NO: 464002

SEQ ID NO: 467118 - DNA, 252 bp, Shigella boydii
atggattcagaaacagttcacggaacggtcaggtctggcgctggcagcgtgccggaagccgggccgttattctggaggtcagtggacgctggatggaagcggcagaagcatggcgacgggctgccggtgttgcgccccggacagactggcagcagtttgcccgaaaaagggctgaacactgccaccggcgcagccggggaagggtgtaacgaaaaaagcagccttcattactccagggattcagaaggctga

SEQ ID NO: 467119 - DNA, 543 bp, Shigella boydii
gtgaaagaaagcaatcagcgatggtgctctgacgggttcgagttctgctgtgataacggagagagactgcgtgtcacgttcgcgctggactgctgtgatcgtgaggcactgcactgggcggtgactaccggcggcttcaacagtgaaacagtacaggacgtcatgctgggagcggtggaacgccgcttcggcaacgatcttccgtcgtctccagtggagtggctgacggataatggttcatgctaccgggctaatgaaacacgccagttcgcccggatgttgggacttgaaccgaggaacacggcggtgcggagtccggagagtaacggaatagcagagagcttcgtgaaaacgataaagcgtgactacatcagtatcatgcccaaaccagacgggttaacggcagcaaagaaccttgcagaggcgttcgagcattataacgaatggcatccgcatagtgcgctgggttatcgctcgccacgggaatatctgcggcagcgggcttgtaatgggttaagtgataacagatgtctggaaatatag

SEQ ID NO: 467120 - DNA, 210 bp, Shigella boydii; identical to SEQ ID NO: 9340

SEQ ID NO: 467121 - DNA, 321 bp, Shigella boydii; identical to SEQ ID NO: 462743

SEQ ID NO: 467122 - DNA, 306 bp, Shigella boydii
atgtctgcttccgttgatcctgtcataaatgtaattgctaaaaatttgaatgttgaggcagtatcatctaaattagaatttatcgacaataaatcaacagggttattagaatataatcttactggtataaagcatttacaagttaataaccctgtaagtttgattgtcactgataatttcagtgatattaatcttattaaacttgcagatacagcagtgattatttcaaaagccaaagataaaaataaatggagagtactattaaatagatttggtgtctccaaagataaagtgaggtttatgtga

SEQ ID NO: 467123 - DNA, 330 bp, Shigella boydii
gtggagtggctgacggataatggttcatgctaccgggctaatgaagcacgccagttcgcccggatgttgggacttgaaccgaagaacacggcggtgcggagtccggagagtaacggaatagcagagagcttcgtgaaaacgataaagcgtgactacatcagtatcatgcccaaaccagacgggttaacggcagcaaagaaccttgcagaggcgttcgagcattataacgaatggcatccgcatagtgcgctgggttatcgctcgccacgggaatatctgcggcagcgggcttgtaatgggttaagtgataacagatgtctggaaatatag

SEQ ID NO: 467124 - DNA, 168 bp, Shigella boydii; identical to SEQ ID NO: 462763

SEQ ID NO: 467125 - DNA, 288 bp, Shigella boydii
ttgattcatggccgtttttataatccggccatgacatttttacaacattgtcagtgcattaaggcgggatgtttttggctgacgccagtccagcttatcgaggagcattgccagttgcgagcgggtaatggataccttgccgtcacgcacagcaggccagataaactggccttcctccaggcgtctggtgaacaggcacagaccatcagcatcagcccacaggattttaatcatgtcaccccgtcggccacggaagatgaacaggtgaccggagaagggattatctga

SEQ ID NO: 467126 - DNA, 123 bp, Shigella boydii; identical to SEQ ID NO: 463327

SEQ ID NO: 467127 - DNA, 447 bp, Shigella boydii; identical to SEQ ID NO: 462775

SEQ ID NO: 467128 - DNA, 381 bp, Shigella boydii; identical to SEQ ID NO: 458903

SEQ ID NO: 467129 - DNA, 132 bp, Shigella boydii; identical to SEQ ID NO: 463454

SEQ ID NO: 467130 - DNA, 282 bp, Shigella boydii; identical to SEQ ID NO: 463486

SEQ ID NO: 467131 - DNA, 519 bp, Shigella boydii; identical to SEQ ID NO: 463043

SEQ ID NO: 467132 - DNA, 447 bp, Shigella boydii; identical to SEQ ID NO: 462775

SEQ ID NO: 467133 - DNA, 3480 bp, Shigella boydii
atgggtaaaggaagcagtaaggggcataccccgcgcgaagcgaaggacaacctgaagtccacgcagctgctgagtgtgatcgatgccatcagcgaagggccggttgaaggtccggtggatggattaaaaagcgtgctgctgaacagtacgccggtgctggacagtgaggggaataccaatatatccggcgtcacggtggtgttccgggccggtgagcaggagcagacaccgccggagggatttgaatcctccggctccgagacggtgctgggtacggaagtgaagtacgacacgccgattacccggaccatcacgtcggcaaacatcgaccgtctgcgctttaccttcggtgtgcaggcactggtggaaaccacctcaaagggggaccggaatccgtcggaagtccgcctgctggttcagatacagcgtaatggtggctgggtgacggaaaaagacatcaccattaaaggcaaaaccacctcacagtatctagcatcggtggtggtgggtaacctgccgccgcgcccgttcaatatccggatgcgcaggatgacgccggacagcaccacagaccagctgcagaacaaaacgctctggtcgtcatacaccgaaatcatcgatgtgaaacagtgctacccgaacacggcactggtcggcgtacaggtggattcggagcagttcggcagccagcaggtgagccgtaattatcatctgcgcgggcgtattctgcaggtgccgtcgaactataacccgcagactcggcaatacagcggtatctgggacggaacgtttaagccagcatacagcaataacatggcctggtgtctgtgggatatgctgacccatccacgctacggcatggggaaacgtcttggtgcggcggatgtggacaaatgggcgctgtatgtcatcggccagtactgcgaccagtcagtgccggatggctttggtggcacggagccgcgcatcacctgtaacgcttacctgaccacacagcgtaaggcgtgggatgtgctcagtgatttctgttcggcgatgcgctgtatgccggtatggaacgggcagacgctgacgttcgtgcaggaccgaccgtcggataaggtgtggacctataaccgcagtaatgtggtgatgccggatgatggcgcgccgttccgctacagcttcagcgccctgaaggaccgccataatgccgttgaggtgaactggattgacccggataacggctgggagacggcgacagagcttgttgaagatacgcaggccattgcccgttacggtcgtaacgtcacgaagatggatgcctttggctgtaccagccgggggcaggcacaccgcgccgggctgtggctgattaaaacggagctgctggaaacgcagaccgtggacttcagcgtgggtgcagaagggcttcgccatgtaccgggcgatgtcattgaaatctgtgatgatgactatgccggtatcagcatcggcgggcgcgtgctggcggtgaacagccagacgcggacactgacgctcgaccgtgaaatcacgctgccatcctccggcaccacgctgataagcctggttgacggacaggggaatccggtcagcgtggaggtccagtccgtcaccgacggcgtgaaggtgaaagtgagccgtgttcctgacggcgttgccgaatacagcgtgtgggggctgaagctgccgacgctgcgccagcgcctgttccgctgcgtgagtatccgtgagaacgatggcggcacgtatgccatcaccgccgtgcagcatgtaccggaaaaagaagccatcgtggataacggggcgcactttgacggcgaccagagcggcacggtgaatggtgtcacgccgccagcggtgcagcacctgactgccgaagtcaccgcagacagcggggagtatcaggtactggcccgctgggacacgccgaaggtggtgaagggcgtgagcttcctgcttcgcctgaccgtgacagcggacgatggcagtgagcggctggtcagcacggcccggacgacggaaaccacataccgcttcaggcagctggcgctggggcgttacatgttgacggtccgggcggtaaatgcgtggggacagctgggcgatccggcgtcggtatcgttccggattgccgcaccggcagcgccgtcgcggattgagctgacgccgggctattttcagataaccgccacgccgcatcttgccgtttatgacccgacggtacagtttgagttctggttttcggaaaagcggattaccgatatcaggaaggttgaaaccacagcgcgctatcttggcacggggctgtactggatagccgccagtatcaatatcaaaccgggccatgattattatttttacgttcgcagtgtgaacaccgttggcaaatcggcattcgtggaggctgttggtcagccgagtgatgatgcatccggttatctggattttttcaaaggcgagatagggaaaacccatctggctcaggagctgtggacgcagattgataacggtcagcttgcgcctgacctggctgaaatcaggacgtccattaaggatgtcagcaatgaaatcacgcagaccgtcaataagaaactggaagaccagagtgcggcaattcagcagatacagaaggttcaggttgatacaaataataatctgaacagcatgtgggctgtgaagctgcaacagatgaaggacggacgcctttatattgcgggtatcggtgccggtattgagaatacgccagcaggaatgcagagtcaggtgctgctggcggcagacaggattgcgatgattaatcctgcgaatggcaacacaaagccgatgtttgttggtcagggcgatcagatattcatgaacgacgtgttcctgaaacgcctgacggctcccaccattaccagcggcggtaatcctccggcattttccctgacaccggacgggcggctgacggcgaaaaatgccgatattagcggtaacgtgaatgcgaactccgggacgctcaacaacgtcacgattaacgagaactgtcgggttctgggaaaactgtccgccaaccagattgaaggcgatctcgttaaaacagtgggcaaagctttcccccgggactcccgtgcaccggagcggtggccatcagggaccattaccgtcagggtttatgacgatcagccgtttgaccggcaaattgttattccggcggtggcattcagtggcgctaagcatgagagagagcatactgatatttactcctcatgccgtctgatagtgcggaaaaacggtgctgaaatttataaccgtaccgcgctggataatacgctgatttacagtggcgttattgatatgcctgccggtcacggtcacatgacactggagttttcggtgtcagcatggctggtaaataactggtatcccacagcaagtatcagcgatttgctggttgtggtgatgaagaaagccactacaggcatcacgattagctga

SEQ ID NO: 467134 - DNA, 387 bp, Shigella boydii
atggaaacgacattcgtgctggatgctctggagcaggcgttatgggcccgtcgaccgtccggcacggtccatcacagtgataaaggttctcagtatgtatcgctggcctacacacagcggcttaaggaagccggattactggcatcaacaggaagtacaggcgactcgtatgacaacgcgatggcggagagcatcaatggtctttacaaagcggaggtaatacaccgtaagagctggaaaaaccgtgcagaagtggaactggccacactcacgtgggtggactggtataataatcgacgattgctggaaaggctgggccacatccctccggcagaagcagaaaaagcttattatgcttccatcggaaacgatgatctggcagcctga

SEQ ID NO: 467135 - DNA, 447 bp, Shigella boydii; identical to SEQ ID NO: 462775

SEQ ID NO: 467136 - DNA, 447 bp, Shigella boydii; identical to SEQ ID NO: 462775

SEQ ID NO: 467137 - DNA, 288 bp, Shigella boydii; identical to SEQ ID NO: 462736

SEQ ID NO: 467138 - DNA, 972 bp, Shigella boydii
atgagggggcttgagaatgccatccgcaatctgaacagtcttgatacccgtatggtgccgcaggccagcgcatgggcagtaaaccgggttgctgcaaaagttgtctcggttgccacccggcaggtcgccaggaataccgttgcgggagataaccaggtgaaggggggccccctgaaactggtgcgtcagcgcgtccgggtatttaaagccagtccggcaggaaaaatgtatgcccgtatccgtgttaaccggggcaatctgcccgccattaagcttggcacaacatgccggcgtgccggtgacggactgaaggtggggaaatacttttttcgtggtgcgtttatccagcagctggcgaacggtcgctggcatgttctcaggcgtcttcctgaagcgtgttttgaaacaggaaaggacagtaaggggcggcccagaaaaaatcgtctgcccgtggaggttgtgaaaattccgctggccggaccgctgacacaggcatttgaggatgcccgcgatcgcatcattgaaacagctggggtatgccctgaaacagcaactgaggatacatttgggatgaacaggcacacacaaatccgccaggcagtactggcaagcctgaagggcgaatgcggggggaatgtcgtgctttttgacgggcttccggcatttattgatgcgcaggaactgcccgccgtggcggtgtggctgagtgatgcgcagtacaccggaaaaatgacggatgaggacgactggcaggctgttctgcatattgccgttttcgtccgtgcacaggcgccggattctgagctggatacgtggatggagaacaccatatttccggccatgaaggatattccggtgctttccggactcatcgacaccatgatcccactcggttttaactatcaacgtgataatgagatggccacctgggcgatggcggaaatcacgtaccagatcacgtacacgaattaa

SEQ ID NO: 467139 - DNA, 474 bp, Shigella boydii
atgccatcgggtgggttaagcataaatgtaagcctggtgccaaatggcccgaaattcaggcagagatgcgcatctggaaaaaacgtcgcgaaggtgaacgcaaggaaaccggaaaatacacgtctgttgttgatctcgcccgcgccagaaccaatcaacagcacagtgaaaattcaacaggaaaaatcagcccggtcattgctgccattcatcgcgaatacaagcagacatggaaaacactggatgacgaactggcctacgctctctggcctggtgatgtggatgccggaaacattgacggcagcatccatcgctgggcaaaaaatgaagttatcgacaacgaccgcgaagactggaagcgtatctcggcatcaatgcgcaaacagcctgatgcccttcgctacgaccgccagactatttttggccttgtccgtgaacgtccgatcgacattcacaaagaccctgtggcactga

SEQ ID NO: 467140 - DNA, 447 bp, Shigella boydii; identical to SEQ ID NO: 462775

SEQ ID NO: 467141 - DNA, 225 bp, Shigella boydii
atgtcacgtaaaggtcactgttacgacaacgctccgatggaaagcttctggggaacgctgaaaaatgagagcctgagccactatcgttttaataaccgggatgaagccatctcagtaatacgggaatacattgagattttctacaatcgtcagcgtcgtcactctcgtctggggagtatctccccggcagccttcagggaaaaatatcatcagatggctgcttaa

SEQ ID NO: 467142 - DNA, 210 bp, Shigella boydii; identical to SEQ ID NO: 463045

SEQ ID NO: 467143 - DNA, 447 bp, Shigella boydii; identical to SEQ ID NO: 462775

SEQ ID NO: 467144 - DNA, 414 bp, Shigella boydii; identical to SEQ ID NO: 463211

SEQ ID NO: 467145 - DNA, 447 bp, Shigella boydii; identical to SEQ ID NO: 462775

SEQ ID NO: 467146 - DNA, 852 bp, Shigella boydii
atgagtgaacgtctgagcattaccccgctggggccgtatatcggcgcacaaatttcgggtgccgacctgacgcgcccgttaagcgataatcagtttgaacagctttaccatgcggtgctgcgccatcaggtggtgtttctgcgcgatcaagccattacgccgcagcagcaacgcgcgctggcccagcgttttggcgaactgcatattcaccctgtttaccctcatgccgaaggggttgacgagatcatcgtgctggatacccataacgataatccgccagataacgacaactggcataccgatgtgacatttattgaaacgccacccgcaggggcgattctggcagctaaagaattaccttcgaccggcggtgatacgctctggaccagcggtattacggcctatgaggcgctctctgttcccttccgccagctgctgagcgggctgcgtgcggagcatgatttccgtaaatcgttcccggaatacaaataccgcaaaaccgaggaggaacatcaacgctggcgcgaggcggtcgcgaaaaatcctccgttgctacatccggtggtgcgaacgcatccggtgagcggtaaacaggcgctgtttgtgaatgaaggctttactacgcgaattgtcgatgtcagcgagaaagagagcgaagccttgttaggctttttattcgcccatatcactaaaccggagtttcaggtgcgttggcgctggcaaccgaatgatattgcgatttgggataactgcgtgactcagcactatgccaatgccgattacctgccacagcggcggattatgcatcgggtgacgattcttggggataaaccgttttatcgggcggggtga

SEQ ID NO: 467147 - DNA, 243 bp, Shigella boydii; identical to SEQ ID NO: 462704

SEQ ID NO: 467148 - DNA, 210 bp, Shigella boydii; identical to SEQ ID NO: 9340

SEQ ID NO: 467149 - DNA, 279 bp, Shigella boydii
atgagttatccctggagcgtgagcgccagccggaaatacaggaacgcacactggatggtccttcactgggatggtaatcagagacaggctaaaatgttgtcagcgcgtttccggtgcattttttgggataatggttggttcgggggggcaccgggaacgcgcttcagtcagaccttgctgaaaacacaggaacgcgttaaaacgcatacgggcgcgattctggtgtgtcttttgttgctgtgttttgcctctattgccagatcgcgctcattcccctga

SEQ ID NO: 467150 - DNA, 303 bp, Shigella boydii
atgagcagaaaaaaccaacgttactctaaagagttcaaagccgaaactgtcagaacggttcttgaaaatcaactttcgatcagtgaaggcgcttcccgattatcccttcctgaaggcactttaggacaatgggttaccgccgccagaaaagggctcggtactcctggttcccgcacggtggctgaactggaatctgaaattctgcaactgcgtaaggcgttaaatgaagctcgccttgagcgagatatattaaaaaaagcaacagcgtatttcgcacaggagtcgctgaaaaatacgcgttaa

SEQ ID NO: 467151 - DNA, 546 bp, Shigella boydii; identical to SEQ ID NO: 463588

SEQ ID NO: 467152 - DNA, 291 bp, Shigella boydii; identical to SEQ ID NO: 462600

SEQ ID NO: 467153 - DNA, 327 bp, Shigella boydii; identical to SEQ ID NO: 5975

SEQ ID NO: 467154 - DNA, 1455 bp, Shigella boydii; identical to SEQ ID NO: 465244

SEQ ID NO: 467155 - DNA, 612 bp, Shigella boydii; identical to SEQ ID NO: 15986

SEQ ID NO: 467156 - DNA, 1719 bp, Shigella boydii; identical to SEQ ID NO: 463247

SEQ ID NO: 467157 - DNA, 303 bp, Shigella boydii; identical to SEQ ID NO: 459543

SEQ ID NO: 467158 - DNA, 303 bp, Shigella boydii; identical to SEQ ID NO: 459543

SEQ ID NO: 467159 - DNA, 543 bp, Shigella boydii
gtgaaagaaagcaatcagcgatggtgctctgacgggttcgagttctgctgtgataacggagagagactgcgtgtcacgttcgcgctggactgctgtgatcgtgaggcactgcactgggcggtgactaccggcggcttcaacagtgaaacagtactggacgtcatgctgggtgcggtggaacgccgcttcggcaacgatcttccgtcgtctccagtggagtggctgacggataatggttcatgctaccgggctaatgaaacacgccagttcgcccggatgttgggacttgaaccgaagaacacggcggtgcggagtccggagagtaacggaatagcagagagcttcgtgaaaacgataaagcgtgactacatcagtatcatgcccaaaccagacgggttaacggcagcaaagaaccttgcagaggcgttcgagcattataacgaatggcatccgcatagtgcgctgggttatcgctcgccacgggaatatctgcggctgcgggcttgtaatgggttaagtgataacagatgtctggaaatatag

SEQ ID NO: 467160 - DNA, 447 bp, Shigella boydii; identical to SEQ ID NO: 462775

SEQ ID NO: 467161 - DNA, 261 bp, Shigella boydii
atgatctggcagcctgagttcacagataaaacactctccaggaaacccggggcggttcactggttcttcggtattcatggcgcgctggcgctgaccgcactggacaacggcattatgacgctgtgggcgctggaaaatatcgcgacctatcagcaatatggttccgtcgaagcggcgctggcagccggtaagaccttccatatctgggccaagccgatgctggactcctttattttccttggggcagtggtgcgactttag

SEQ ID NO: 467162 - DNA, 327 bp, Shigella boydii; identical to SEQ ID NO: 5975

SEQ ID NO: 467163 - DNA, 447 bp, Shigella boydii; identical to SEQ ID NO: 462775

SEQ ID NO: 467164 - DNA, 603 bp, Shigella boydii
atgatacctctcagaaaaggagcgcaatatgaagagctcagaaaactgggtaaaggcgatcatctggtgaagctgaaaaccagcccgcaggcacgaaaaaagtggccgggactgggaaatgaagtgacagcccgcctgctgaccgtgacgcgcaaaggaaaagtctgccatctgctgacgtcgatgacggacgccatgcgcttccccggaggagaaatggcggatctgtacagtcatcgctgggaaattgaactgggatacagggagataaaacagacgatgcaactgagcaggctgacgctgagaagtaaaaagccggagcttgtggagcaagagctgtggggtgtcttactggcttataatctggtgagatatcagatgattaaaatggcggaacatctgaaaggttactggccgaatcaactgagtttctcagaatcatgcggaatggtgatgagaatgctgatgacattgcagggcgcttcaccgggacgtataccggagctgatgcgcgatcttgcaagtatgggacaacttgtgaaattaccgacgagaaggggaagtgaaccgccccgggtttcctggagagtgttttatctgtga

SEQ ID NO: 467165 - DNA, 639 bp, Shigella boydii
atgatacctctcagaaagggagcgcaatatgaagagctcagaaaactgggtaaaggcgatcatctggtgaagctgaaaaccagcccgcaggcacgaaaaaagtggccgggactgggaaatgaagtgacagcccgcctgctgaccgtgacgcgcaaaggaaaagtctgccatctgctgacgtcgatgacggacgccatgcgcttccccggaggagaaatggcggatctgtacagtcatcgctgggaaattgaactgggatacagggagataaaacagacgatgcaactgagcaggctgacgctgagaagtaaaaagccggagcttgtggagcaagagctgtggggtgtcttactggcttataatctggtgagatatcagatgattaaaatggcggaacatctgaaaggttactggccgaatcaactgagtttctcagaatcatgcggaatggtgatgagaatgctgatgacattgcagggcgcttcaccgggacgtataccggagctgatgcgcgatcttgcaagtatgggacaacttgtgaaattaccgacgagaaggggaagggccttcccgagagtggtaaaggagaggccctggaaataccccacagccccgaaaaagagccagtcagttgcttaa

SEQ ID NO: 467166 - DNA, 303 bp, Shigella boydii
atgagcagaaaaaaccaacgttactctaaagagttcaaagccgaagctgtcagaacggttcttgaaaatcaactttcgatcagtgaaggcgcttcccgattatcccttcctgaaggcactttaggacaatgggttaccgccgccagaaaagggctcggtactcctggttcccgcacggtagctgaactggaatctgaaattctgcaactgcgtaaggcgttaaatgaagctcgccttgagcgagatatattaaaaaaagcaacagcgtattttgcacaggagtcgctgaaaaatacgcgttaa

SEQ ID NO: 467167 - DNA, 639 bp, Shigella boydii
atgatacctctcagaaagggagcgcaatatgaagagctcagaaaactgggtaaaggcgatcatctggtgaagctgaaaaccagcccgcaggcacgaaaaaagtggccgggactgggaaatgaagtgacagcccgcctgctgaccgtgacgcgcaaaggaaaagtctgccatctgctgacgtcgatgacggatgccatgcgcttccccggaggagaaatggcggatctgtacagtcatcgctgggaaattgaactgggatacagggagataaaacagacgatgcaactgagcaggctgacgctgagaagtaaaaagccggagcttgtggagcaagagctgtggggtgtcttactggcttataatctggtgagatatcagatgattaaaatggcggaacatctgaaaggttactggccgaatcaactgagtttctcagaatcatgcggaatggtgatgagaatgctgatgacattgcagggcgcttcaccgggacgtataccggagctgatgcgcgatcttgcaagtatgggacaacttgtgaaattaccgacgagaaggggaagggccttcccgagagtggtaaaggagaggccctggaaataccccacagccccgaaaaagagccagtcagttgcttaa

SEQ ID NO: 467168 - DNA, 351 bp, Shigella boydii; identical to SEQ ID NO: 464002

SEQ ID NO: 467169 - DNA, 447 bp, Shigella boydii; identical to SEQ ID NO: 462775

SEQ ID NO: 467170 - DNA, 327 bp, Shigella boydii
atgactaaaaatactcgtttttcccccgaagtccgtcagagggcgattcgtatggttctggaaagtcagggcgaatatgactcacagtgggcggcaatttgttccattgccccaaagattggctgtacaccggagactctgcgtgtctgggtacgccagcatgagcgggataccggaggcggtgatggcgggctcaccaccgctgaacgtcagcgtctgaaagagctggaacgtgaaaattgtgaactgcgccgcagtaacgatatccttcgccaggcttccgcttattttgcgaaggcggagttcgaccgcctctggaaaaagtga

SEQ ID NO: 467171 - DNA, 327 bp, Shigella boydii; identical to SEQ ID NO: 5975

SEQ ID NO: 467172 - DNA, 366 bp, Shigella boydii; identical to SEQ ID NO: 462747

SEQ ID NO: 467173 - DNA, 276 bp, Shigella boydii; identical to SEQ ID NO: 463307

SEQ ID NO: 467174 - DNA, 378 bp, Shigella boydii; identical to SEQ ID NO: 463278

SEQ ID NO: 467175 - DNA, 447 bp, Shigella boydii; identical to SEQ ID NO: 462775

SEQ ID NO: 467176 - DNA, 186 bp, Shigella boydii; identical to SEQ ID NO: 463326

SEQ ID NO: 467177 - DNA, 447 bp, Shigella boydii; identical to SEQ ID NO: 462775

SEQ ID NO: 467178 - DNA, 327 bp, Shigella boydii; identical to SEQ ID NO: 5975

SEQ ID NO: 467179 - DNA, 327 bp, Shigella boydii; identical to SEQ ID NO: 5975

SEQ ID NO: 467180 - DNA, 195 bp, Shigella boydii; identical to SEQ ID NO: 463581

SEQ ID NO: 467181 - DNA, 294 bp, Shigella boydii; identical to SEQ ID NO: 25632

SEQ ID NO: 467182 - DNA, 141 bp, Shigella boydii; identical to SEQ ID NO: 464176

SEQ ID NO: 467183 - DNA, 921 bp, Shigella boydii
atgaacaccacactgacacccgcagatctcgatccccgtcggcaggccatgctgctgtactttcagggataccgcgtagcccgcattgctgaaatgctgggcgagaaagttgcaaccgtttacagctggaaaaaacgcgacaagtggggtgactatgggcctctggatcagatgcagctcaccaccgccgcacgctactgccagctcatcatgaaggagcacaaagaagggaaagatttcaaagatattgacctgctggcgcgccagtctgagcgccacgcgcggatcggcaagtttaacaatggcggcaacgaagccgacttaaaccctaacgtcgccaaccgcaacaaaggcccacgccgtcagcctgaaaagaatgttttcaccgatgaccagattgagaagctggaaaaaaatttccattcctccatgttcaactaccagcgccactggtgggaagccggaaaaaccaaccgcatccgcaacctgctgaagtcacgccagatcggcgcgaccttctattttgcccgtgaagccctgattgacgccctgcttaccggacgtaaccagattttcctttctgccagtaaggcacaggcccacgtcttcaaacagtacatcatcgactttgccaaagaagtggaggtggagctgaaaggcgatccgatggtgcttcccaacggggccacactgtatttcctcggcaccaatgcccgcactgcccagagttatcacggtaacctgtatctggatgaatatttctggataccgaaatttcaggaagctacgcaaagtggcttctggtatggctattcacaagaaatggcggcagacctatttttccacaccatccagtctgacccacagtgcttatccgttctggtccggtgcgctgttcaaccgtgggcgcaacaaagctga

SEQ ID NO: 467184 - DNA, 156 bp, Shigella boydii
atgaaagtgaatggtgttactacatcaaaatatgaaggatggcgagggacgtttcagttatatagatataaaacggtagttctggtgcaccccaaaggatatctggcaggggaaatgattcatcgccaggccctaacgtcgtcttgtcaagattaa

SEQ ID NO: 467185 - DNA, 696 bp, Shigella boydii; identical to SEQ ID NO: 465667

SEQ ID NO: 467186 - DNA, 207 bp, Shigella boydii
atggaacgcttcttcaggagtctgaagaacgaatggatgccggtggtgggttacgtaagcttcagcgaggcagctcacgccataacggactatatcgttggatattacagcgcactaagaccgcacaaatataacggtgggttacccccaaacgaatcggaaaatcgatactggaaaaactctaactcggtggccagtttttgttga

SEQ ID NO: 467187 - DNA, 471 bp, Shigella boydii; identical to SEQ ID NO: 465583

SEQ ID NO: 467188 - DNA, 441 bp, Shigella boydii
ttgtacctcgctggcatcaaagatgtttatacgtgcgaaattgtcggctacgccatgggagagcgcatgacaaaagagctgacaggtaaagccctgtttatggcgctcaggagccagcgcccacctgccgggctaatccaccactctgatcgaggttcacagtactgcgcatacgattaccgggtcatacaggagcagtctggtctgaaaacatcaatgtcgcgtaaaggtcactgttacgacaacgctccgatggaaagcttctggggaacgctgaaaaatgagagcctgagccactatcgttttaataaccgggatgaagccatctcagtaatacgggaatacattgagattttctacaatcgtcagcgtcgtcactctcgtctggggaatatctccccggcagccttcagggaaaaatatcatcagatggctgcttaa

SEQ ID NO: 467189 - DNA, 420 bp, Shigella boydii; identical to SEQ ID NO: 465686

SEQ ID NO: 467190 - DNA, 192 bp, Shigella boydii; identical to SEQ ID NO: 464451

SEQ ID NO: 467191 - DNA, 207 bp, Shigella boydii; identical to SEQ ID NO: 24440

SEQ ID NO: 467192 - DNA, 384 bp, Shigella boydii
atggcaacaaaagaagaaaatctgaatcgtcttcgtcaactggctggcctgctggggcgcgaggcggatatgtcggggagtgctgcggatattgctcaacgtgtgtctgagtgggaagaggagcttgctgtttccccggagggcattatgcactctgatgagagcggggctgatcaaaatcacacagacgatggtgagcagttgaacaacacggatgctacggatgatgttaaagcggtccgtgtgcggaaatgcctgcatgtgatggggtattgcccggagacaggccgtcccgttgaactgacgtaccggggcatgcgtgttatggtgccatcaccactggcgacagccatgatacagcacggaacggctgagcatgcgtga

SEQ ID NO: 467193 - DNA, 435 bp, Shigella boydii
gtggtggaagattactgggcggatggcactattaccggtgattttaaatggctggacagtttctgcgggcaaatctggctgaatgccagtttgcagggggcggtgatcgcattattcaagtcaaaccagacggtcccctacaacaatgaagggcgggcgctggttgcagcgtcaatgagtgacgttatccagcagtacaaacgctggggagggatccgtgaaggggtgacactgacggaggcgcagaagaaacagattaacaatgttgtggaggcagatgtttcttcaacgttgtttgccaccggctattacctgtatatcggcgatatgcttccctctttgcgggcaacccgtagcagtccgtcctgtacgctctggtactgtgacggcggtagtatccagaaacttgttattgcatccacggaggtccagtaa

SEQ ID NO: 467194 - DNA, 207 bp, Shigella boydii; identical to SEQ ID NO: 24440

SEQ ID NO: 467195 - DNA, 252 bp, Shigella boydii; identical to SEQ ID NO: 464926

SEQ ID NO: 467196 - DNA, 276 bp, Shigella boydii; identical to SEQ ID NO: 464937

SEQ ID NO: 467197 - DNA, 210 bp, Shigella boydii; identical to SEQ ID NO: 9340

SEQ ID NO: 467198 - DNA, 252 bp, Shigella boydii; identical to SEQ ID NO: 464926

SEQ ID NO: 467199 - DNA, 519 bp, Shigella boydii; identical to SEQ ID NO: 464880

SEQ ID NO: 467200 - DNA, 348 bp, Shigella boydii; identical to SEQ ID NO: 464879

SEQ ID NO: 467201 - DNA, 777 bp, Shigella boydii
atgacattaaccgatcactttgataatgctattccacctgttttttaccatgagcaccaatcatttttcttagataactttaaagaggttgtggatgaagttagcaggtatgtgcatggtaatcagggaaaaactgatgtgccaatatttaatactaaagatatgaggcttggaattgggttgcatcttattgattttataagaaagagtaaagatcaaagattccgagagttttgttataataaaaacattgatcctgttagtctggatagaattataaactttgtgtttcagcttgagtatcatataccaagaatgctaagtacagataacttcaaaaaaataaaactcagagacatatctttggaggatgcgattaaagcatctaattatgaagagattaacaataaagtgactgataaaaaaatggctcatcaggcccttgcttattctttaggcaataaaaaagctgatatagcactttatttactatctaaatttaattttacaaaacaagatgtcgcagagatggagaaaatgaacaacaatagatattgtaatctgtatgatgttgaatacttacttagtaaagatggtgccaactataaagtgctagaatattttatcaataatggattggttgatgtaaacaaaaaatttcaaaaagcaaatagtggggacactatgcttgacaatgcaatgaaaagcaaaaatccaaaaatgattgattttttattaaaaaatggagcaatattaggcaaacgatttgagatatga

SEQ ID NO: 467202 - DNA, 1131 bp, Shigella boydii; identical to SEQ ID NO: 464945

SEQ ID NO: 467203 - DNA, 348 bp, Shigella boydii; identical to SEQ ID NO: 466508

SEQ ID NO: 467204 - DNA, 207 bp, Shigella boydii; identical to SEQ ID NO: 24440

SEQ ID NO: 467205 - DNA, 282 bp, Shigella boydii
atgcggaatggtgatgagaatgctgatgacattgcagggcgcttcaccgggacgtataccggagctgatgcgcgatcttgcaagtatgggacaacttgtgaaattaccgacgagaaggggaagggccttcccgagagtggtaaaggagaggccctggaaataccccacagccccgaaaaagagccagtcagttgctttactgactggcattacacacaggcggtgccttttatttttactgaagttcacaggaggtttatgtgtttaattctgacaacctga

SEQ ID NO: 467206 - DNA, 231 bp, Shigella boydii; identical to SEQ ID NO: 465010

SEQ ID NO: 467207 - DNA, 480 bp, Shigella boydii; identical to SEQ ID NO: 463183

SEQ ID NO: 467208 - DNA, 165 bp, Shigella boydii; identical to SEQ ID NO: 464985

SEQ ID NO: 467209 - DNA, 327 bp, Shigella boydii; identical to SEQ ID NO: 464915

SEQ ID NO: 467210 - DNA, 327 bp, Shigella boydii; identical to SEQ ID NO: 464915

SEQ ID NO: 467211 - DNA, 327 bp, Shigella boydii; identical to SEQ ID NO: 381935

SEQ ID NO: 467212 - DNA, 147 bp, Shigella boydii
atgatcatgattcttacggtcataactatcagatacggtagcgtagacatttccgtattgcccatcccaacgcccgttaaccgcgctgtttatggtatcggtgttcaggcctccgacggttacgccaagttctttatggctgaatga

SEQ ID NO: 467213 - DNA, 675 bp, Shigella boydii
atggcgcgtctgggggaaaacccggaaattcctccgttcatgatgtattcggaagtgctacaggaatcggtggtgcatttactggaaaccgacaaaatcagcggggccagcgcctccagcctgacaatctcggccgattccctgcgcaagatttacgacaatatggattactttgccagccgcattgtgttgcgtccgcaggagatttccaataacccggaaatcatccgtcgtctgggcgtcatcgctctgaacgtcggcctggagtttgatatttacgggcatgcaaattcaacgcacgtagccggggtcgatctgatgaacggcatcggcggcagcggtgattttgaacgcaacgcgtatctgtcgatctttatggctccgtcgattgctaaagaaggcaagatctcaaccgtcgtgccaatgtgcagccatgttgatcacagcgaacacagcgtcaaagtgatcatcaccgaacaagggatcgccgatctgcgcggtctttccccgcttcaacgcgcccgcactatcattgataattgtgcacatcctatgtatcgggattatctgcatcgctatctggaaaatgcgcccggcggacatattcaccacgatcttagccacgtcttcgacttacaccgtaatttaattgcaaccggctcgatgctgggttaa

SEQ ID NO: 467214 - DNA, 327 bp, Shigella boydii
atgactaaaaatactcgtttttcccccgaagtccgtcagagggcgattcgtatggttctggaaagtcagggcgaatatgactcacagtgggcggcaatttgttccattgccccaaagattggctgtacaccggagactctgcgtgtctgggttcgccagcatgagcgggataccgggggcggtgatggcgggctcaccaccgctgaacgtcagcgtctgaaagagctggagcgtgaaaatcgtgaactgcgccgcagtaacgatatccttcgccaggcttccgcttattttgcgaaggcggagttcgaccgcctctggaaaaaatga

SEQ ID NO: 467215 - DNA, 210 bp, Shigella boydii; identical to SEQ ID NO: 463045

SEQ ID NO: 467216 - DNA, 537 bp, Shigella boydii; identical to SEQ ID NO: 462223

SEQ ID NO: 467217 - DNA, 168 bp, Shigella boydii; identical to SEQ ID NO: 463879

SEQ ID NO: 467218 - DNA, 1050 bp, Shigella boydii; identical to SEQ ID NO: 463097

SEQ ID NO: 467219 - DNA, 213 bp, Shigella boydii; identical to SEQ ID NO: 462242

SEQ ID NO: 467220 - DNA, 216 bp, Shigella boydii
atggtgaaagaggtgctggatacgatgattgggctggcgcagtcgggtatgacaatgttgtgtgtaacacatgagatggggtttgcacgtaccgtcgctgaccgggtaatttttatggatcgtggggagatagtggaacaagctgcacctgatgaattttttacgcatcctaaatcagagcgtacgagggcatttttatcgcaggtaatccattaa

SEQ ID NO: 467221 - DNA, 570 bp, Shigella boydii
atgtcgaaaagcaatccgtctgaagtgaaattggccgtaccgacatccggtggcttttccgggctgaaatcactgaatttgcaggtcttcgtgatgattgcagctatcatcgcaatcatgctgttctttacctggaccaccgatggtgcctacttaagcgcccgtaacgtctccaacctgttacgccagaccgcgattaccggcatcctcgcggtaggaatggtgttcgtcataatttctgctgaaatcgacctttccgtcggctcaatgatggggctattaggtggcgtcgcggcgatttgtgacgtctggttaggctggcctttgccacttaccatcattgtgacgttggttctgggactgcttctcggtgcgtggaacggatggtgggtcgcgtaccgtaaagtcccttcatttattgtcaccctcgcgggcatgttggcatttcgcggcatactcattggcatcaccaacggcacgactgtatcccccaccagcgccgcgatgtcacaaattgggcaaagctatctccccgccagtaccggcttcatcattggccgcttggcttaa

SEQ ID NO: 467222 - DNA, 327 bp, Shigella boydii
atgactaaaaatactcgtttttcccccgaagtccgtcagagggcgattcgtatggttctggaaagtcagggcgaatatgactcacaatgggcgacaatttgttccattgctccaaagattggctgtacgccggagactctgcgtgtctgggttcgccagcatgagcgggataccgggggcggtgatggcgggctcaccaccgctgaacgtcagcgtctgaaagagctggagcgtgaaaatcgtgaactgcgccgcagtaacgatatccttcgccaggcttccgcttattttgcgaaggcggagttcgaccgcctctggaaaaaatga

SEQ ID NO: 467223 - DNA, 333 bp, Shigella boydii; identical to SEQ ID NO: 462152

SEQ ID NO: 467224 - DNA, 555 bp, Shigella boydii
atgaaaaaaacagcgggcatagcgatagcaacagcatctattcttttaacaaagcgttctaatgttgatacatatacagaaataaatagttacttaggcaaacttagaggtcaacaaaaacttcttgatggtatagacataatagaaataatatacattaagagaccttcaaaagacttagctaacttacgaaaggagtttaataaaactgtaagaaaaaattttcttatcaaactttcaaaaacctccgaagcatctggaagattcaacgccgaagaccttttaagaatgagaaagggcaatgttcctctaaattataatgttcaccataaactatctctagatgatggtggtactaatgatttcgaaaatttagtattaatcgaaaacgaaccatatcataaagtttttactaacatgcaatcacgaatagctaagggaatattagtaggtgaaagcaaaatcactccctgggccattccatctggctcaatttatcctcccatgaaaaatgtaatgaacgcatcccacacaattaaacacggagcagtatga

SEQ ID NO: 467225 - DNA, 546 bp, Shigella boydii
atggaagtcaacaaaaagcagctggctgacattttcggtgcgagtatccgtaccattcagaactggcaggaacagggaatgcccgttctgcgaggcggtggcaagggtaatgaggtgctttatgactctgccgccgttataaaatggtatgccgaaagggatgctgaaattgagaacgaaaagctgcgccgggaggttgaagaactgcgccaggccagcgaggcagatctccagccagggactattgagtacgaacgccatcgacttacgcgtgcgcaggccgacgcacaggaactgaagaatgccagagactcagctgaagtggtggaaaccgcattctgtactttcgtgctgtcgcggatcgcaggtgaaattgccagtattctcgacgggatccccctgtcggtgcagcggcgttttccggaactggaaaaccgacatgttgatttcctgaaacgggatatcatcaaagccatgaacaaagcagccgcgctggatgaactgataccggggttgctgagtgaatatatcgaacagtcaggttaa

SEQ ID NO: 467226 - DNA, 1926 bp, Shigella boydii
gtgaatatatcgaacagtcaggttaacaggctgcggcattttgtccgcgccgggcttcgctcactgttcaggccggagccacagaccgccgttgaatgggcggatgctaattactatctcccgaaagaatccgcataccaggaagggcgctgggaaacactgccctttcagcgggccatcatgaatgcgatgggcagcgactacatccgtgaggtgaatgtggtgaagtctgcccgtgtcggttattccaaaatgctgctgggtgtttatgcctactttatagagcataagcagcgcaacacccttatctggttgccgacggatggtgatgccgagaactttatgaaaacccacgttgagccgactattcgtgatattccgtcgctgctggcgctggccccgtggtatggcaaaaagcaccgggataacacgctcaccatgaagcgtttcactaatgggcgtggcttctggtgcctgggcggtaaagcggcaaaaaactaccgtgaaaagtcggtggatgtggcgggttatgatgaacttgctgcctttgatgaggatattgaacaggaaggctctccgacgttccttggcgacaaacgtattgaaggctcggtctggccaaagtccatccgtggctccacgcccaaagtgagaggcacctgccagattgagcgtgcagccagtgaatccccgcattttatgcgttttcatgttgcctgcccgcactgcggggaggagcagtatcttaaatttggcgacaaagagacgccgtttggcctcaaatggacgccggatgacccctccagcgtgttttatctctgcgagcataatgcctgcgtcatccgccagcaggagctggactttactgatgcccgttatatctgcgaaaagaccgggatctggacccgtgatggcattctctggttttcgtcatccggtgaagagattgagccacctgacagtgtgacctttcacatctggacagcgtacagcccgttcaccacctgggtgcagattgtcaaagactggatgaaaacgaaaggggatacgggaaaacgtaaaaccttcgtaaacaccacgctcggtgagacgtgggaggcgaaaattggcgaacgtccggatgctgaagtgatggcagagcggaaagagcattattcagcgcccgttcctgaccgtgtggcttacctgaccgccggtatcgactcccagctggaccgctacgaaatgcgcgtatggggatgggggccgggtgaggaaagctggctgattgaccggcagattattatgggccgccacgacgatgaacagacgctgctgcgtgtggatgaggccatcaataaaacctatacccgccggaatggtgcagaaatgtcgatatcccgtatctgctgggatactggcgggattgacccgaccattgtgtatgaacgctcgaaaaaacatgggctgttccgggtgatccccattaaaggggcatccgtctacggaaagccggtggccagcatgccacgtaagcgaaacaaaaacggggtttaccttaccgaaatcggtacggataccgcgaaagagcagatttataaccgcttcacactgacgccggaaggggatgaaccgcttcccggtgccgttcacttcccgaataacccggatatttttgatctgaccgaagcgcagcagctgactgctgaagagcaggtcgaaaaatgggtggatggcaggaaaaaaatactgtgggacagcaaaaagcgacgcaatgaggcgctcgactgcttcgtttatgcgctggcggcgctgcgcatcagtatttcccgctggcagctggatctcagtgcactgctggcgagcctgcaggaagaggatggtgcagcaaccaacaagaaaacactggcagattacgcccgtgccttatccggagaggatgaatga

SEQ ID NO: 467227 - DNA, 207 bp, Shigella boydii; identical to SEQ ID NO: 7021

SEQ ID NO: 467228 - DNA, 1602 bp, Shigella boydii
atgaaaacgtccaccattcccacccttctggggccggacggcatgacatcgctgcgtgaatatgccggttatcacggcggtggcagcggatttggagggcagttgcgggcgtggaacccaccgagtgaaagtgtggatgcagccctgctgcccaactttacccgtggcaatgcccgcgcagacgatctggtacgcaataacggctatgccgccaacgccatccagttgcatcaggatcatatcgtcgggtcttttttccggctcagtcatcgcccaagctggcgctatctgggcatcggggaggaagaagcccgtgccttttcccgcgaggttgaagcggcatggaaagagtttgccgaggatgactgctgctgcattgacgttgagcgaaaacgcacgtttaccatgatgattcgggaaggtgtggccatgcacgcctttaacggtgaactgttcgttcaggccacctgggataccagttcgtcgcggcttttccggacacagttccggatggtcagcccgaagcgcatcagcaacccgaacaataccggcgacagccggaactgccgtgccggtgtgcagattaatgacagcggtgcggcgctgggatattacgtcagcgaggacgggtatcctggctggatgccgcagaaatggacatggataccccgtgagttacccggcgggcgcgcctcgttcattcacgtttttgaacccgtggaggacgggcagactcgcggtgcaaatgtgttttacagcgtgatggagcagatgaagatgctcgacacgctgcagaacacgcagctgcagagcgccattgtgaaggcgatgtatgccgccaccattgagagtgagctggatacgcagtcagcgatggattttattctgggcgcgaacagtcaggagcagcgggaaaggctgaccggctggattggtgaaattgccgcgtattacgccgcagcgccggtccggctgggaggcgcaaaagtaccgcacctgatgccgggtgactcactgaacctgcagacggctcaggatacggataacggctactccgtgtttgagcagtcactgctgcggtatatcgctgccgggctgggtgtctcgtatgagcagctttcccggaattacgcccagatgagttactccacggcacgggccagtgcgaacgagtcgtgggcgtactttatggggcggcgaaaattcgtcgcatcccgtcaggcgagccagatgtttctgtgctggctggaagaggccatcgttcgccgcgtggtgacgttaccttcaaaagcgcgcttcagttttcaggaagcccgcagtgcctgggggaactgcgactggataggctccggtcgtatggccatcgatggtctgaaagaagttcaggaagcggtgatgctgatagaagccggactgagcacctacgagaaagagtgcgcgaaacgcggtgacgactatcaggaaatttttgcccagcaggtccgtgaaacgatggagcgccgtgcagccggtcttaaaccgcccgcctgggcggctgcagcatttgaatccgggctgcgacaatcaacagaggaggagaagagtgacagcagagctgcgtaa

SEQ ID NO: 467229 - DNA, 1320 bp, Shigella boydii
gtgacagcagagctgcgtaatctcccgcatattgccagcatggcctttaatgagccgctgatgcttgaacccgcctatgcgcgggttttcttttgtgcgcttgcaggccagcttgggatcagccgcctgacggatgcggtgtccggcgacagcctgactgcccaggaggcactcgcgacgctggcattatccggtgatgatgacggaccacgacaggcccgcagttatcaggtcatgaacggcatcgccgtgctgccggtgtccggcacgctggtcagccggacgcgggcgctgcagccgtactcggggatgaccggttacaacggcattatcgcccgtctgcaacaggctgccagcgatccgatggtggacggcattctgctcgatatggacacgcccggcgggatggtggcgggggcatttgactgcgctgacatcatcgcccgtgtgcgtgacataaaaccggtatgggcgcttgccaacgacatgaactgcagtgcaggtcagttgcttgccagtgccgcctcccggcgtctggtcacgcagaccgcccggacaggctccatcggcgtcatgatggctcacagtaattacggtgctgcgctggagaaacagggtgtggaaatcacgctgatttacagcggcagccataaggtggatggcaacccctacagccatcttccggatgacgtccgggagacactgcagtcccggatggacgcaacccgccagatgtttgcgcagaaggtgtcggcatataccggcctgtccgtgcaggctgtgctggataccgaggctgcagtgtacagcggtcaggaggccattgatgccggactggctgatgaacttgttaacagcaccgatgcgatcaccgtcatgcgtgatgcactggatgcacgtaaatcccgtctctcaggagggcgaatgaccaaagagactcaatcaacaactgtttcagccactgcttcgcaggctgacgttactgacgtggtgccagcgacggagggcgagaacgccagcgcggcgcagccggacgtgaacgcgcagatcaccgcagcggttgcggcagaaaacagccgcattatggggatcctcaactgtgaggaggctcacggacgcgaagaacaggcacgcgtgctggcagaaacccccggtatgaccgtgaaaacggcccgccgcattctggccgcagcaccacagagtgcacaggcgcgcagtgacactgcgctggatcgtctgatgcagggggcaccggcaccgctggctgcaggtaacccggcatctgatgccgttaacgatttgctgaacacaccagtgtaa

SEQ ID NO: 467230 - DNA, 768 bp, Shigella boydii
atgacgagcaaagaaacctttacccattaccagccgcagggcaacagtgacccggcttaccgccgccgtcgcatcatcatgcagaacatgcgtgacgaagagctggccattgctcaggtcgaagagatgcaggccgtttctgccgtgctcaagggcaaatacaccatgaccggtgaagccttcgatccggttgaggtggatatgggccgcagtgcggcgaacaacatcacgcagtccggcagcacggagtggagcaagcgtgacaagtccacgtatgacccgaccgacgatatcgaagcctacgcgctgaacgccagcggcgtggtgaatatcatcgtgtttgatccgaaaggctgggcgctgttccgttccttcaaagccgtcagggagaagctggatacccgtcgcggctctcattccgagctggagacagcggtgaaagacctgggtaaagcggtgtcctataaggggatgtatggcgatgtggccatcgtcgtgtattccggacagtacgtggaaaacggcgtcaaaaagaacttcctgccggacaacacgatggtactggggaacactcaggcacgcggtctgcgcacctatggctgcattcaggatgcggacgcacagcgcgaaggcattaacgcctctgcccgttacccgaaaaactgggtgaccaccggcgatccggcgcgtgagttcaccatgattcagtcagcaccgctgatgctgctggctgaccctgatgagttcgtgtccgtacaactggcgtaa

SEQ ID NO: 467231 - DNA, 396 bp, Shigella boydii
atgacgaaagatgaactgattgtccgtctccggtcgctgggtgagcaactgaaccgtgatgtcagcctgacggggacgaaagaagaactggcgctccgtgtggcagagctggaagaggagcttgatgacacggatgacgctgccggtcaggatacccctctcagaccggaaaatgcgctgaccggacatgaaaatgaggtggtatcagcacagacggataccgtgactgatgcggctgctctggtcacggttgtggcactggtgacgctgcataccgatgcacttcacgccacgcgggatgaacctgtggcatttgtgctgccggaaacggcgttccgtgtctctgccggtgtggcagctgaaatgacagagcgcggcctggccagaatgcaataa

SEQ ID NO: 467232 - DNA, 354 bp, Shigella boydii
gtggctgatttcgataacctgttcgatgctgccattgcccgcgccgatgaaacgatacgcgggtacatgggaacgtcagccaccatgacatccggtgagcagtccggcgcagtaatacgtggtgtttttgatgaccctgaaaatatcagctatgccggacagggcgtacgcgttgaaggctccagcccgtccctgtttgtccggactgatgaggtgcggcagctgcggcgcggcgacacgctgaccatcggtgaggaaaacttctggatagaccggatttcgccggatgatggcggaagctgtcatctctggcttgggcggggcgtaccgcctgccgttaaccgtcgccgctga

SEQ ID NO: 467233 - DNA, 579 bp, Shigella boydii
atggccataaaaggtcttgagcaggccgttgaaaacctcagccgtatcagtaaaacggcggtgcccggtgccgccgcaatggccattaaccgcgttgcttcatccgcgatatcgcagtcggcgtcacaggttgctcgtgagacaaaggtacgccggaaactggtaaaggaaagggccaggctgaaaagggccacggtcaaaaatccgcaggccagaatcaaagttaaccggggggatttgcccgtaatcaagctgggtaatgcgcgggttgtcctttcgcgccgcaggcgtcgtaaaaaggggcagcgttcatccctgaaaggtggcggcagcgtgcttgtggtgggaaaccgtcgtattcccggcgcgtttattcagcaactgaaaaatggccgctggcatgtcatgcagcgtgtggccgggaaaaaccgttaccccattgatgtggtgaaaatcccgatggcggtgccgctgaccacggcgtttaaacagaatattgaacggatacggcgtgaacgtcttccgaaagagctgggctatgcgctgcagcatcaactgagaatggtaataaagcgatga

SEQ ID NO: 467234 - DNA, 396 bp, Shigella boydii
atgaaacatactgaactccgtgcagccgtactggatgcactggagaagcatgacaccggggcgacgctttttgatggtcgccccgctgtttttgatgaggaagattttccggcaattgccgtttatctcaccggcgctgaatacacgggcgaagagctggacagcgatacctggcaggcggagctgcatattgaagttttcctgcctgctcaggtgccggattcagagctggatgcgtggatggagtcccggatttatccggtgatgagcgatatcccggcactgtcagatttgatcaccagtatggtggccagtggctatgactaccggcgcgacgatgatgcgggcctgtggagttcagccgatctgacttatgtcattacctatgaaatgtga

SEQ ID NO: 467235 - DNA, 741 bp, Shigella boydii
atgcctgtaccaaatcctacaatgccggtgaaaggtgccgggaccaccctgtgggtttataaggggagcggtgacccttatgcgaacccgctttcagacgttgactggtcgcgtctggcaaaagttaaagacctgacgcccggcgaactgaccgctgagtcctatgacgacagctatctcgatgataaagatgcagactggactgcgaccgggcaggggcagaaatctgccggagataccagcttcacgctggcgtggatgcccggagagcaggggcagcaggcgctgctggcgtggtttaatgaaggtgatacccgtgcctataaaatccgcttcccgaacggcacggtcgatgtgttccgtggctgggtcagcagtatcggtaaggcggtgacggcgaaggaagtgattacccgcacggtgaaggtcaccaatgtgggacgtccgtcgatggcagaagatcgcagcacggtaacagcggcaaccggcatgaccgtgacgcctgccagcacttcggtggtgaaagggcagagcaccacgctgaccgtggcattccagccggaaggcgcaaccgacaagagcttccgtgcggtgtctgcggataaaacaaaagccaccgtgtcggtcagtggtatgaccatcaccgtgaaaggtgttgctgcaggcaaggtcaacattccggttgtatccggtaatggtgaacttgctgtggttgcagaaatcaccgtcaccgacagttaa

SEQ ID NO: 467236 - DNA, 423 bp, Shigella boydii; identical to SEQ ID NO: 34805

SEQ ID NO: 467237 - DNA, 435 bp, Shigella boydii
gtgttcgacggtgagctgagttttgccctgaaactggcgcgtgagatggggcgacccgactggcgcgccatgcttgccgggatgtcatccacggagtatgccgactggcaccgcttttacagtatccattattttcatgatgttctgctggatatgcacttttccgggctgacgtacaccgtactcagcctgtttttcagcgatccggatatgcatccgctggatttcagtctgctgaaccggcgcgaggctgacgaagagcctgaagatgatgtgctgatgcagaaagcggcagggcttgccggaggcgtccgctttggcccggacgggaatgaagttatccccgcttccccggatgtggcggacatgacggaggatgacgtaatgctgatgacagtatcagaagggatcgcaggaggagtccggtatggctga

SEQ ID NO: 467238 - DNA, 249 bp, Shigella boydii
atggcaagacttattctgctcactgagtgggcaaaagaggaattcagtgaaccggtccctactccgagtacgttaagtaaatacgctaaagccggaatgatatttcctctccccaaaaaagttggaagacgctggcgagtggatccgcaagctcgctttgtcggaatggtaaacaagccggaggtgatcgccacagatcaccctgctttgaagaggatactggaagatggcgcgcccgcgaaaatataa

SEQ ID NO: 467239 - DNA, 324 bp, Shigella boydii; identical to SEQ ID NO: 13416

SEQ ID NO: 467240 - DNA, 477 bp, Shigella boydii
atgcttagtggtaaagacttaggccgagcgatagagcaggccattaacaaaaaaattgcatcaggagccgtcaaatcaaaggcggaaatcgcacgtcatttcaaagtccaaccaccatcaatccatgactggattaagaaaggttcgataagtaaagacaaacttccagaactatggcgtttcttttctgatgtggttggtccagagcattgggggcttaacgaataccccataccaaccccatccacttcagatacaaaaagtgaacttttagacataaacagcctttatcaagccgcctctgatgaaaaaaaagcaattgtggctttcatcttatctggaaatgctacggagcctagttgggttgattatgacgttcgcgcctacattgccgcaatggaaatgaaggtagctaactatctgaaaaatcaagaatcaaaacggaaaagccagaacatcaccaagacaggaacttaa

SEQ ID NO: 467241 - DNA, 276 bp, Shigella boydii
atgtcgactgaaaatgatgaaatcattaactccctgatacgccagattaataattttgataaagcattgcaacatgctgcggcgcgtagtgatataactcttttagcaatttcatttcttgcatctgttatggataaaaatgaagtcgtacgacagagtcttgttgattatatcgactcgcttcaacccggcactttcaatcatgagagcttcaatcatgagaaagagcatgttaagtctgtaattaattctcttattttgaatcaaaagaattaa

SEQ ID NO: 467242 - DNA, 201 bp, Shigella boydii; identical to SEQ ID NO: 8170

SEQ ID NO: 467243 - DNA, 213 bp, Shigella boydii
gtgtatgatggtgattttaaggtgcttgagtggcttccatttccatcagatgtccttcctgctccgctactgaaggcgtggtgcgtaacggcaaaagcactgccggacatcagcgctatctctgctctcattgccgtaaaacatggcaactacagttcacttacaccgcctctcagcccggtacgcaccagaaaatcattgatatggccatga

SEQ ID NO: 467244 - DNA, 552 bp, Shigella boydii; identical to SEQ ID NO: 458488

SEQ ID NO: 467245 - DNA, 252 bp, Shigella boydii
atgtttctgaaacaggatacgtttaattatgaaaaacagtccgtggtgctcagtgagctgtccgggctgcagagaattgaatatctgacgtttgttcagcagcgaacggcaaagtttgatgcacaggagggagaactgccggaggctgaacgacagattgcttttctgcgtatgggaatggatatcaatgcctggctggtttcccgctcactgtggaatgctgagcagtctcaggatgttgagacgctttga

SEQ ID NO: 467246 - DNA, 588 bp, Shigella boydii; identical to SEQ ID NO: 462635

SEQ ID NO: 467247 - DNA, 597 bp, Shigella boydii; identical to SEQ ID NO: 462420

SEQ ID NO: 467248 - DNA, 369 bp, Shigella boydii; identical to SEQ ID NO: 462503

SEQ ID NO: 467249 - DNA, 276 bp, Shigella boydii
atgatacatttattaaattaccaccttttgaagagcagaaacgaattgtggatcttctcgataaagctgagggtatacgccaaaaacgtgagcaatccatcaaactggctgatgattttttgcgtgctacgtttgctacaatgtatgggaatcctattacaaaccccaaaaaatggcctgtccatcttatgggagaaattattgaatttaaaggtggaaatcaaccacctaaaagtgattttatttttgaacctaaacagggttatattagattag

SEQ ID NO: 467250 - DNA, 303 bp, Shigella boydii; identical to SEQ ID NO: 24284

SEQ ID NO: 467251 - DNA, 438 bp, Shigella boydii; identical to SEQ ID NO: 13191

SEQ ID NO: 467252 - DNA, 327 bp, Shigella boydii
atgactaaaaatactcgtttttcccccgaagtccgtcaacgggcagtccgtatggttctggaaagtcagggcgaatatgactcacaatgggcggcaatttgttccattgccccaaagattggctgtacaccggagactctgcgtgtctgggtacgccagcatgagcgggataccgggggcggtgatggcgggctcaccaccgctgaacgtcagcgtctgaaagagctggagcgtgaaaatcgtgaactgcgccgcagtaacgatatccttcgccaggcttccgcttattttgcgaaggcggagttcgaccgcctctggaaaaaatga

SEQ ID NO: 467253 - DNA, 657 bp, Shigella boydii; identical to SEQ ID NO: 463703

SEQ ID NO: 467254 - DNA, 657 bp, Shigella boydii
atgcctgcgatcaataccaaacgtgtttaccggatcatgcgccagaatgcgctgttgcttgagcgaaaacctactgtaccgccatcgaaacgggcacatacaggcagagtggccgtgaaagaaagcaatcagcgatggtgctctgacgggttcgagttctgctgtgataacggagagagactgcgtgtcacgttcgcgctggactgctgtgatcgtgaggcactgcactgggcggtgactaccggcggcttcaacagtgaaacagtacaggacgtcatgctgggagcggtggaacgccgcttcggcaacgatcttccgtcgtctccagtggagtggctgacggataatggttcatgctaccgggctaatgaaacacgccagttcgcccggatgttgggacttgaaccgaagaacacggcggtgcggagtccggagagtaacggaatagcagagagcttcgtgaaaacgataaagcgtgactacatcagtatcatgcccaaaccagacgggttaacggcagcaaagaaccttgcagaggcgttcgagcattataacgaatggcatccgcatagtgcgctgggttatcgctcgccacgggaatatctgcggcagcgggcttgtaatgggttaagtgataacagatgtctggaaatatag

SEQ ID NO: 467255 - DNA, 657 bp, Shigella boydii
atgcctgcgatcaatgctaaacgtgtttaccggatcatgcgccagaatgcgctgttgcttgagcgaaagcctgctgtaccgccatcgaaacgggcacatacaggcagagtggccgtgaaagaaagcaatcagcgatggtgctctgacgggttcgagttctgctgtgataacggagagagactgcgtgtcacgttcgcgctggactgctgtgatcgtgaggcactgcactgggcggtgactaccggcggcttcaacagtgaaacagtacaggacgtcatgctgggagcggtggaatgccgcttcggcaacgatcttccgtcgtctccagtggagtggctgacggataatggttcatgctaccgggctaatgaaacacgccagttcgcccggatgttgggacttgaaccgaagaacacggcggtgcggagtccggagagtaacggaatagcagagagcttcgtgaaaacgataaagcgtgactacatcagtatcatgcccaaaccagacgggttaacggcagcaaagaaccttgcagaggcgttcgagcattataacgaatggcatccgcatagtgcgctgggttatcgctcgccacgggaatatctgcggcagcgggcttgtaatgggttaagtgataacagatgtctggaaatatag

SEQ ID NO: 467256 - DNA, 225 bp, Shigella boydii; identical to SEQ ID NO: 462228

SEQ ID NO: 467257 - DNA, 210 bp, Shigella boydii; identical to SEQ ID NO: 9340

SEQ ID NO: 467258 - DNA, 657 bp, Shigella boydii
atgcctgcgatcaatgccaaacgtgtttaccggatcatgcgccagaatgcgctgttgcttgagcgaaaacctgctgtaccgccatcgaaacgggcacatacaggcagagtggccgtgaaagaaagcaatcagcgatgttgctctgacgggttcgagttctgctgtgataacggagagagactgcgtgtcacgttcgcgctggactgctgtgatcgtgaggcactgcactgggcggtgactaccggcggcttcaacagtgaaacagtacaggacgtcatgcagggagcggtggaacgccgcttcggcaacgatcttccgtcgtctccagtggagtggctgacggataatggttcatgctaccgggctaatgaaacacgccagttcgcccggatgttgggacttgaaccgaagaacacggcggtgcggagtccggagagtaacggaatagcagagagcttcgtgaaaacgataaagcgtgactacatcagtatcatgcccaaaccagacgggttaacggcagcaaagaaccttgcagaggcgttcgaacattataacgaatggcatccgcatagtgtgctgggttatcgctcgccacgggaatatctgcggcagcgggcttgtaatgggttaagtgataacagatgtctggaaatatag

SEQ ID NO: 467259 - DNA, 156 bp, Shigella boydii
atggctttaccacgcaaattaaaacacctgaacctgtttaacgacgggaacaactggcaggggatcgttgagtcgctgacgctgccgaaattcacccgcaaatatgagaagtatcgcggcggcggtatgcccggagcggtggatgtggatctgtga

SEQ ID NO: 467260 - DNA, 213 bp, Shigella boydii; identical to SEQ ID NO: 462242

SEQ ID NO: 467261 - DNA, 657 bp, Shigella boydii
atgcctgcgatcaatgccaaacgtgtttaccggatcatgcgccagaatgcgctgttgcttgagcgaaaacctgctgtaccaccatcgaaacgggcacatacaggcagagtggccgtgaaagaaagcaatcagcgatggtgctctgacgggttcgagttctgctgtgataacggagagagactgcgtgtcacgttcgcgctggactgctgtgatcgtgaggcactgcactgggcggtgactaccggcggcttcaacagtgaaacagtacaggacgtcatgctgggagcggtggaacgccgcttcggcaacgatcttccgtcgtctccagtggagtggctgacggataatggttcatgctaccgggctaatgaaacacgccagttcgcccggatgttgggacttgaaccgaagaacacggcggtgcggagtccggagagtaacggaatagcagagagcttcgtgaaaacgataaagcgtgactacatcagtatcatgcccaaaccagacgggttaacggcagcaaagaaccttgcagaggcgttcgagcattataacgaatggcatccgcatagtgcgctgggttatcgctcgccacgggaatatctgcggctgcgggcttgtaatgggttaagtgataacagatgtctggaaatatag

SEQ ID NO: 467262 - DNA, 558 bp, Shigella boydii; identical to SEQ ID NO: 7519

SEQ ID NO: 467263 - DNA, 768 bp, Shigella boydii
atgtccggcagtgcttttgccgttacgcaccacgccttcagtagcggagcaggaaggacatctgatggaaatggaagccacgcaagcaccttaaaatcaccatcatacactaaatcagtaagttggcagcattaccaaagcgatcaaaaaagtgtcaacgtacgtctggaaaataaagggaataacccgttgcttgtccagagttggttagatactggcgatgacaacgctgagcctggcagtattacagtcccttttactgccacgccgccagtatcgcgtattgatgccaaacgtgggcaaacaatcaaattaatgtacacagccagcacctcactgcctaaagacagagagagcgtgttctggtttaacgtactggaagttccaccaaaaccagatgcagaaaaggtcgcgaatcaaagtctgctgcaactggcatttcgcacacgtataaaacttttctatcgcccggatggattgaagggaaatccctctgaagccccgttagccctgaagtggttctggtcaggttcagaaggtaaggcgtcattgcgagtgaccaatccaaccccttactacgtctcttttagcagtggtgatttagaagctagcggtaaacgctatccgattgatgtgaaaatgattgcaccatttagtgatgaggtcatgaaagtcactggccttaatggcaaagcaagttctgcaaaagtacatttttacgccattaatgattttggtggcaccattgaaggtaatgccagtctgtaa

SEQ ID NO: 467264 - DNA, 687 bp, Shigella boydii
ttgcagtttcatataaattctcccgatataaataacgaaaaagccgttctgcttgccagggatgaaacactcggcaattgccttaatttgacggaaattatccctcaggcttctgttcgttatgacgttaacgagcaacgtctggatatagacgttcctcaggcatgggtaatgaaaaattaccaaaactatgttgatccatcgttatgggaaaatggcattaatgcggccatgttgtcatacaacctcaacggatatcatagtgaaactcctggtcgaagaaatgacagcatttatgctgcttttaacggtgggatgaatttaggtgcatggcgactgcgtgcctcaggcaactacaactggatgaccgattctggcagtaattatgattttaagaatcggtatatacagcgtgatatcgcctcgctgcgttctcaactcattcttggtgagtcttatacaacaggcgaaacctttgattctgtcagtatccgcggcattcgtttatacagcgacagccgcatgttgcctccgacattagcgagttttgcgcctatcattcatggcgttgctaataccaacgccaaagtcactatgaagtggcacactgaatttggccacctgaacagaggtgatatgctcacctcagaacaacacaggtgctccaatgaaaaaaagaaattttag

SEQ ID NO: 467265 - DNA, 1002 bp, Shigella boydii
atgccaccctttaatattacacagaaagtatctgaggatagtaatgacttttcatttagttcagttaccaatagttctatattagaggatgtatcacttattgcatatccagaaaccaattctatattagtcaaaggtaatgatcagcaaatacagattattcgcgatattatcactcagttagatgtagccaaacgacatatagaattatcattatggataatcgatattgataaatctgaattaaataaccttggcgttaattggcaaggaacggcttcatttggtgattcgtttggtgcatcatttaatatgagctcatcagcatcgataagcactttggacggcaataagtttattgcttcagttatggcattaaatcagaaaaagaaagcaaatgtagtttcaaggccggtgattttgacacaagagaatattccggctatatttgataataacaggactttttatgtgtcattagttggtgagcgcaattcttcgttggagcatgttacgtatggaacattgataaatgttatacctcgcttttcatctcagggacaaattgagatgtctttaacgatagaggatggaacaggaaatagtcagtcaaattacaattataataatgaaaatacatctgtccttccagaagttggaaggaccaaaatcagtacaatagcgagagttccacaaggcaaaagtttgttgataggtggttatacgcatgaaacgaactctaacgaaatagtatctattccttttctctcctctattcctgtaatcggtaatgtgttcaagtataaaacaaggaatatcagtaatattgtaagggtttttctgattcaaccccgtgagataaaggagtcaagttattataatactgcagaatataagagcctcatatctgaaagagaaatacaaaagactacacaaataatcccatctgaaactactttgctggaagacgaaaaatcattggtttcatacttaaattactaa

SEQ ID NO: 467266 - DNA, 327 bp, Shigella boydii; identical to SEQ ID NO: 5975

SEQ ID NO: 467267 - DNA, 183 bp, Shigella boydii; identical to SEQ ID NO: 463949

SEQ ID NO: 467268 - DNA, 183 bp, Shigella boydii; identical to SEQ ID NO: 465217

SEQ ID NO: 467269 - DNA, 213 bp, Shigella boydii
gtgtatgatggtgattttaaggtgcttgcgtggcttccatttccatcagatgtccttcctgctccgctactgaaggcgtggtgcgtaacggcaaaagcactgccggacatcagcgctatctctgctctcattgccgtaaaacatggcaactacagttcacttacactgcctctcagcccggtacgcaccagaaaatcattgatatggccatga

SEQ ID NO: 467270 - DNA, 1872 bp, Shigella boydii
atgtttgagcggcttgatcttggcgttggcgaaacagtttatggtctgggagagcgttttactgccctggtgcgcaatggtcagacggtagagacctggaaccgggacggcggcacaagtactgaacaggcgtataaaaatatcccgttctatatgactaaccgtggctatggggtgctggtcaatcacccccagagtgtctcttttgaagtgggatcggagaaagtctccaaagtgcagttcagcgttgagagcgaatatctcgaatactttgttatcgacggtccgacgccgaaagcggtacttgatcgttatacccgttttactggtcgtccggcgctgccgcccgcatggtccttcggcctgtggctaaccacttcatttaccaccaactacgacgaagcgacggtaaacagctttatcgatggtatggcggaacgcaatctgccgctgcatgttttccactttgactgtttctggatgaaagccttccagtggtgcgattttgagtgggacccgctgactttcccggacccggaagggatgatccgccgcctgaaagcgaaagggctgaaaatctgcgtctggattaacccctatatcggtcaaaaatcccccgtctttaaagagttacaagagaaaggctatttactcaaacgcccggacggttcgctatggcagtgggataaatggcagccaggtctggcgatttatgactttaccaatccggatgcctgcaaatggtacgccgacaaactgaaaggtctggtcgcgatgggcgttgattgctttaagaccgactttggcgaacgtatcccaactgatgttcagtggtttgacggttccgatccgcagaaaatgcataaccattatgcgcacatctacaacgaactggtgtggaacgtgctcaaggacaccgttggtgaggaagaagctgtcttgtttgcccgctcggcctccgtcggtgcgcagaaattcccggtacactggggtggcgattgttacgctaactacgaatcaatggcggaaagcctgcgcggtggtttgtctattggcctttcaggttttggcttctggagccactatatcggcggctttgaaaataccgctccggcgcacgtttacaaatgctggtgcgcgtttggtttgctctccagccatagccgtttacacggtagcaaatcttatcgtgtgccgtgggcctacgatgatgagtcctgtgatgtggtgcgcttcttcacgcaactgaaatgccgcatgatgccgtatctgtatcgtgaagctgcgcgtgcaaacgcgcggggtacgccgatgatgcgggccatgatgatggagttcccggacgatccggcttgtgattaccttgaccgtcaatacatgttaggcgacaacgtgatggttgcgccggtgttcactgaagcgggcgatgtgcagttctacctgccggaaggtcgctggacacacctgtggcacaacgatgagctcgacggtcgttgctggcataaacagcagcacagcttcctgagtctgcccatttatgtgcgtgataacaccctactggcgctgggcaacaacgatcaacgtcccgattacgcgtggcacgaaggcacggcattccacctctttaatctgcaagacgggcatgaagccgtctgtgaagtgcccgctgctgacggatcggtgatctttactttaaaagcagcacgtactggcaacacgattactgtgactggtgcgggcgaggcgaagaactggacactgtgtctgcgcaatgttgtgaaagtaaatggtctgcaagacggttcgcaggctgaaagtgagcaggggctggtggtgaagcctcaagggaatgcgctgacaattacgttgtaa

SEQ ID NO: 467271 - DNA, 327 bp, Shigella boydii; identical to SEQ ID NO: 5975

SEQ ID NO: 467272 - DNA, 657 bp, Shigella boydii; identical to SEQ ID NO: 467104

SEQ ID NO: 467273 - DNA, 297 bp, Shigella boydii; identical to SEQ ID NO: 463264

SEQ ID NO: 467274 - DNA, 126 bp, Shigella boydii
atgctaccatctatttcaatcaacaataccagcgcaacttacccagaatccattaatgaaaataacaatgatgaagttaatggattagtacaagagctcaaaaacctttttaatggtaaggaataa

SEQ ID NO: 467275 - DNA, 327 bp, Shigella boydii
atgatcttcagcgcattaaaagaaatatatgatggagctcctagttttatcttcgataagatatcacacaaactcagacatacggtaacggaatttgatgagagcgggaaaagcgaaccaacggacttatttacctggtacggtaaagataaaaaaggcgactctctcgctattgtaattaaaaataaaaacggaaatgattacttatccctcggttactacgatcaggacgactaccacattcaaagaggaattcgtattaatggtgatagtctcacccaatattgtagtgaaaacgccaggagtgcttcagcgtggtttgggtaa

SEQ ID NO: 467276 - DNA, 657 bp, Shigella boydii; identical to SEQ ID NO: 464449

SEQ ID NO: 467277 - DNA, 657 bp, Shigella boydii
atgcctgcgatcaatgccaaacgtgtttaccggatcatgcgccagaatgcgctgttgcttgagcgaaaacctgctgtaccgccatcgaaacgggcacatacaggcagagtggccgtgaaagaaagcaatcagcgatggtgctctgacgggttcgagttctgctgtgataacggagagagactgcgtgtcacgttcgcgctggactgctgtgatcgtgaggcactgcactgggcggtgactaccggcggcttcaacagtgaaacagtacaggacgtcatgctgggagcggtggaacgccgcttcggcaacgatcttccgtcgtctccagtggagtggctgacggataatggttcatgctaccgggctaatgaaacacgccagttcgcccggatgttgggacttgaaccgaagaacacggcggtgcggagtccggagagtaacggaatagcagagagcttcgtgaaaacgataaagcgtgactacatcagtatcatgcccaaaccagacgggttaacggcagcaaagaaccttgcagaggcgttcgagcattataacgaatggcatccgcatagtgcgctgggttatcgctcgccacgggaatatctgcggctgcgggcttgtaatgggttaagtgataacagatgtctggaaatatag

SEQ ID NO: 467278 - DNA, 573 bp, Shigella boydii
atgaaaatacctgaagcagtaaatcatattaatgttcagaataatattgatcttgttgatggaaaaacgaatccgaataaagcaacaaaagcattacaaaaaaatatattgcgcgtaacaaactcatcttcttctggcataagtgaaaaacatttagatcactgtgctaatactgtgaaaaactttttaaggaagtctatagcagcgcaaagttatagcaaaatgttttctcaagggaccagtttcaaatcactaaatctttctattgaagcgccatctggagcacggtcatcatttcggtcacttgagcatctcgataaggtgtccaggcactatatctctgagataatacaaaaagttcatcctctttcttcagacgaacgtcacttactttctattattattaattctaattttaacttcagacatcaaagtaactctaatctgtcaaataatattcttaatattaaatcctttgataaaattcagtctgaaaatatacaaacacataagaatacatactctgaggatattaaagaaatctctaaccacgattttgttttttggggttga

SEQ ID NO: 467279 - DNA, 657 bp, Shigella boydii; identical to SEQ ID NO: 463775

SEQ ID NO: 467280 - DNA, 657 bp, Shigella boydii; identical to SEQ ID NO: 463703

SEQ ID NO: 467281 - DNA, 303 bp, Shigella boydii; identical to SEQ ID NO: 461506

SEQ ID NO: 467282 - DNA, 351 bp, Shigella boydii
atgttttctcaagggaccagtttcaaatcactaaatctttctattgaagcgccatctggagcacggtcatcatttcggtcacttgagcatctcgataaggtgtccagacactatatctctgagataatacaaaaagctcatcctctttcttcagacgaacgtcacttactttctattattattaattctaattttaacttcagacatcaaagtaactctaatctgtcaaataatattcttaatattaaatcctttgataaaattcagtctgaaaatatacaaacacataagaatacatactctgaggatattaaagaaatctctaaccacgattttgttttttggggttga

SEQ ID NO: 467283 - DNA, 195 bp, Shigella boydii; identical to SEQ ID NO: 463979

SEQ ID NO: 467284 - DNA, 213 bp, Shigella boydii; identical to SEQ ID NO: 462242

SEQ ID NO: 467285 - DNA, 840 bp, Shigella boydii; identical to SEQ ID NO: 462680

SEQ ID NO: 467286 - DNA, 327 bp, Shigella boydii; identical to SEQ ID NO: 5975

SEQ ID NO: 467287 - DNA, 213 bp, Shigella boydii; identical to SEQ ID NO: 462242

SEQ ID NO: 467288 - DNA, 228 bp, Shigella boydii; identical to SEQ ID NO: 462718

SEQ ID NO: 467289 - DNA, 267 bp, Shigella boydii
atgctcggtggccagtttattttgcgcaccacctgccggacgtttcagctcaagcagctctttttcaagatcgcttttgaggttttccagctcgctgagtttcccgttcagggtttccacctgcccggcaagcttgcctttttcctgctcaatcgcatccacgcgcttgtcgttctttgctttgaagtcgtcaaacttctgctgcagctcctgcgcgacctgttcgacatctttaatatctaccgccatcgtatttctcctgattag

SEQ ID NO: 467290 - DNA, 750 bp, Shigella boydii
atgaccaccagtcttatcctgccgcaaaccaccgacgccagtggattttatggcgcgacggtgaccagcggcggcgcgaagtggatgcacggcatgttgtcagacgcgttttaccagtatatgcaacaaatgcccgtcggcagcagctttacaatgaccatcaatgcctgtcagacctctgtgaactatgacgccagcagcggcgcgcgttgtaaggatcaggcctccggcaactggtatgttcgcaatgtcacccatacgaaagcagcaaatcttcggttaataaatacccactcgctggcggaggtatttatcaacagcgacggggtgccgaccctgggcgaagggaacgccgactgccggacacagaccatcggcagcctttcaggattaagttgtaagatggtcaactataccctgcaaacaaacggactcagcaacacctcaatccatatattcccggcgatcgccaactcgtcgttagcctcggccgtcggggcgtacgatatgcagttcagtctgaatggcagttcatggaaaccggtgagcaataccgcctattactacaccttcaacgagatgaagagcgcagactcgatctatgttttcttctcgagcaacttctttaagcagatggtgaacctcgggatgaagtggtcaacaaaaactggccaccgagttagagtttttccagtatcgattttccgattcgtttgggggggacccaccgttatattcgtgcggtcttag

SEQ ID NO: 467291 - DNA, 303 bp, Shigella boydii; identical to SEQ ID NO: 463187

SEQ ID NO: 467292 - DNA, 594 bp, Shigella boydii; identical to SEQ ID NO: 463274

SEQ ID NO: 467293 - DNA, 351 bp, Shigella boydii; identical to SEQ ID NO: 467282

SEQ ID NO: 467294 - DNA, 186 bp, Shigella boydii; identical to SEQ ID NO: 463326

SEQ ID NO: 467295 - DNA, 909 bp, Shigella boydii
atgccgcttgttggctgtgttttgactttgtcactgttggttttgcttatatttatggcagcaaaaggactgcgttatcaggccttgatgactagtctcaacggcgtaagatttagttttaattgctctatgaaagggttctggtgggtaacctttttcttgccgattttaatggccattgggatggggactgttttctttatctcgacaaagatgctacatgccaatagttcaagtagtgttattatatctgtggttctgatggcaatagttggtattgtttccattggtatttttaatggtactttatatagcctggtaatgagttttctctggagcaataccagtttcggtatacatcgtttcaaggtgaaattagatactgcgtattgtataaaatatgccatcctcgcatttttagctttattaccttttctcgctgttgctggttatattatcttcgaacaaatattaaatgcgtatgatagttctgtgtatgcaaatgatgatattgagaatttacagcaatttatggaaatgcaacgtaaaatgataatcgcgcagttaatctattattttgggattgctgttagcaccagttatttaacggtgtcgttgcgaaatcattttatgagtaacctgtcactgaatgatgggcgtattcgttttcgctcaactttaacgtaccacggtatgctttatcgcatgtgtgcgttggtagtgatatccgggattacgggcggtctggcttatccactgctgaaaatatggatgattgactggcaggcaaaaaatacgtatttgctgggcgatttggatgaccttcctggtaatgactccaacttactgatagtgttttatgttcagataatgcccgatgaccttgtcatgcagctccaccgattttga

SEQ ID NO: 467296 - DNA, 225 bp, Shigella boydii; identical to SEQ ID NO: 462726

SEQ ID NO: 467297 - DNA, 327 bp, Shigella boydii; identical to SEQ ID NO: 5975

SEQ ID NO: 467298 - DNA, 657 bp, Shigella boydii; identical to SEQ ID NO: 463703

SEQ ID NO: 467299 - DNA, 225 bp, Shigella boydii; identical to SEQ ID NO: 462228

SEQ ID NO: 467300 - DNA, 657 bp, Shigella boydii; identical to SEQ ID NO: 463703

SEQ ID NO: 467301 - DNA, 327 bp, Shigella boydii
atgactaaaaatactcgtttttcccccgaagtccgtcagagggcgattcgtatggttctggaaagtcagggcgaatatgactcacagtgggcggcaatttgttccattgccccaaagattggctgtacaccggagactctgcgtgtctgggtacgccagcatgagctggataccggaggcggtgatggcgggctcaccaccgctgaacgtcagcgtctgaaagagctggaacgtgaaaatcgtgaactgcgccgcagtaacgatatccttcgccaggcttccgcttattttgcgaaggcggagttcgaccgcctctggaaaaagtga

SEQ ID NO: 467302 - DNA, 327 bp, Shigella boydii; identical to SEQ ID NO: 5975

SEQ ID NO: 467303 - DNA, 807 bp, Shigella boydii
gtgcacgcagatgacactccggtgaaagtactggccccggggaacggaaagacgaaaacgggtcgtctgtgggtatacgtcagggatgatcgtaatgcgggttcatccctgccggcagccgtctggttcgcgtattcggcagatcgcaaaggagaacatccgcagctccacctggcaaagtatcagggcgtactgcaggctgatgcctatgcaggttataacgtactgtacgaaacgggccgggtgaaggaagccgggtgcctggcccacgcccgccgaaaaatccatgacgaggatgtgcgccgtccgacagaaatgactcaggaagcgctcagacggatagcagagttatacgacatagaagcggagatacgtggcagtccggcagaggaacggcttgcagtcagaaaagccagaagcgtccagttgatgcagtcattgtacgactggatacagttgcagaggaaaacgctgtcgaaacatgcggagatggcgaaggcgttcgactatatcctgaatcactggaatgcgctgaacgagttctgtcgtgacggctgggtggaaatagacaacaacatcggtgaaaacgcgttacgatcggtggcggttggaagaaaaaattatctctttttcggctcagacaagggaggagaaagtgcggcgatcatctacagtctgctggtcacctgcaaacagaacgaagtggagccggaggactggttgcgcgaagtgatcgagaagctcaatgactggccgtcgaaccaagtgcatgaactgctgccctggaacttctcgtctgtaaaataa

SEQ ID NO: 467304 - DNA, 327 bp, Shigella boydii; identical to SEQ ID NO: 467214

SEQ ID NO: 467305 - DNA, 705 bp, Shigella boydii; identical to SEQ ID NO: 463579

SEQ ID NO: 467306 - DNA, 210 bp, Shigella boydii; identical to SEQ ID NO: 463042

SEQ ID NO: 467307 - DNA, 213 bp, Shigella boydii
gtgtataatggtgattttaaggtgcttgcgtggcttccatttccatcagatgtccttcctgctccgctactgaaggcgtggtgcgtaacggcaaaagcactgccggacatcagcgctatctctgctctcattgccgtaaaacatggcaactacagttcacttacaccgcctctcagcccggtacgcaccagaaaatcattgatatggccatga

SEQ ID NO: 467308 - DNA, 657 bp, Shigella boydii; identical to SEQ ID NO: 463775

SEQ ID NO: 467309 - DNA, 657 bp, Shigella boydii
atgcctgcgatcaatgccaaacgtgtttaccggatcatgcgccagaatgcgctgttgcttgagcgaaaacctgctgtaccgccatcgaaacgggcacatacaggcagagtggccgtgaaagaaagcaatcagcgatggtgctctgacgggttcgagttctgctgtgataacggagagagactgcgtgtcacgttcgcgctggactgctgtgatcgtgaggcactgcactgggcggtgactaccggcggcttcaacagtgaaacagtacaggacgtcatgctgggagcggtggaacgccgcttcggcaacgatcttccgtcgtctccagtggagtggctgacggataatggttcatgctaccgggctaatgaaacacgccagttcgcccggatgttgggacttgaaccgaagaacacggcggtgcggagtccggagagtaacggaatagcagagagcttcgtgaaaacgataaagcgtgactacatcagtatcatgcccaaaccagacgggttaacggcagcaaagaaccttgcagaggcgttcgagcattataacgaatggcatccgcatagtgcgctgggttatcgctcaccacgggaatatctgcggcagcgggcttgtaatgggttaagtgataacagatgtctggaaatatag

SEQ ID NO: 467310 - DNA, 657 bp, Shigella boydii; identical to SEQ ID NO: 463703

SEQ ID NO: 467311 - DNA, 657 bp, Shigella boydii
atgcctgcgatcaatgccaaacgtgtttaccggatcatgcgccagaatgcgctgttgcttgagcgaaagcctgctgtaccgccatcgaaacgggcacatacaggcagagtggccgtgaaagaaagcaatcagcgatggtgctctgacgggttcgagttctgctgtgataacggagagagactgcgtgtcacgttcgcgctggactgctgtgatcgtgaggcactgcactgggcggtgactaccggcggcttcaacagtgaaacagtacaggacgtcatgctgggagcggtggaacgccgcttcggcaacgatcttccgtcgtctccagtggagtggctgacggataatggttcatgctaccgggctaatgaaacacgccagttcgcccggatgttgggacttgaaccgaagaacacggcggtgcggagtccggagagtaacggaatagcagagagcttcgtgaaaacgataaagcgtgactacatcagtatcatgcccaaaccagacgggttaacggcagcaaagaaccttgcagaggcgttcgagcattataacgaatggcatccgcatagtgcgctgggttatcgctcaccacgggaatatctgcggcagcgggcttgtaatgggttaagtgataacagatgtctggaaatatag

SEQ ID NO: 467312 - DNA, 210 bp, Shigella boydii; identical to SEQ ID NO: 463498

SEQ ID NO: 467313 - DNA, 459 bp, Shigella boydii
atgcttccatcggaaacgatgatctggcagcctgagttcacagataaaacactctccaggaaacccggggcggctcactggttcttcggtattcatggcgcgctggcgctgaccgcactggacaacggcattatgacgctgtgggcgctggaaaatatcgcgacctatcagcaatatggttccgtcgaagcggcgctggcagccggtaagaccttccatatctgggccaagccgatgctggactcctttattttccttgggggcagtggtgcgactttaggcctgatcctggctatctttatcgcctctcgccgtgctgattatcgtcaggtggcaaaactggcgctgccgtccggcatcttccagattaacgaaccgattctgtttggtctgccaattatcatgaacccggtgatgtttatccgtaagcgtaaactgaccgccgtatgtagccattaa

SEQ ID NO: 467314 - DNA, 327 bp, Shigella boydii; identical to SEQ ID NO: 5975

SEQ ID NO: 467315 - DNA, 444 bp, Shigella boydii; identical to SEQ ID NO: 462753

SEQ ID NO: 467316 - DNA, 540 bp, Shigella boydii
atgcctgcgatcaatgccaaacgtgtttaccggatcatgcgccagaatgcgctgttgcttgagcgaaaacctgctgtaccgccatcgaaacgggcacatacaggcagagtggccgtgaaagaaagcaatcagcgatggtgctctgacgggttcgagttctgctgtgataacggagagagactgcgtgtcacgttcgcgctggactgctgtgatcgtgaggcactgcactgggcggtgactaccggcggcttcaacagtgaaacagtacaggacgtcatgctgggagcggtggaacgccgcttcggcaacgatcttccgtcgtctccagtggagtggctgacggataatggttcatgctaccgggctaatgaagcacgccagttcgcccggatgttgggacttgaaccgaagaacacggcggtgcggagtccggagagtaacggaatagcagagagcttcgtgaaaacgataaagcgtgactacatcagtatcatgggtaagcgtcaacggagcaccgtattgacgcttatttattggtga

SEQ ID NO: 467317 - DNA, 303 bp, Shigella boydii; identical to SEQ ID NO: 461506

SEQ ID NO: 467318 - DNA, 327 bp, Shigella boydii; identical to SEQ ID NO: 467222

SEQ ID NO: 467319 - DNA, 498 bp, Shigella boydii; identical to SEQ ID NO: 16552

SEQ ID NO: 467320 - DNA, 372 bp, Shigella boydii; identical to SEQ ID NO: 16551

SEQ ID NO: 467321 - DNA, 378 bp, Shigella boydii; identical to SEQ ID NO: 16550

SEQ ID NO: 467322 - DNA, 126 bp, Shigella boydii; identical to SEQ ID NO: 16549

SEQ ID NO: 467323 - DNA, 1617 bp, Shigella boydii; identical to SEQ ID NO: 16548

SEQ ID NO: 467324 - DNA, 1527 bp, Shigella boydii; identical to SEQ ID NO: 16547

SEQ ID NO: 467325 - DNA, 1668 bp, Shigella boydii; identical to SEQ ID NO: 16546

SEQ ID NO: 467326 - DNA, 2109 bp, Shigella boydii; identical to SEQ ID NO: 16545

SEQ ID NO: 467327 - DNA, 822 bp, Shigella boydii; identical to SEQ ID NO: 16544

SEQ ID NO: 467328 - DNA, 219 bp, Shigella boydii
atggggaatctttaccggagtgtgagccaaatcactcgcgataagtttgagcgaacaatgccacaggcgtattgttgttgggcttataatttctccggtaaggaataccatgtatacgcgaaatttattatccggtgcgccgtaagccgtctcgggggtatccatgagcaagccgcacttatggcaggaggcgcggggcactggtggagacacagctaa

SEQ ID NO: 467329 - DNA, 3072 bp, Shigella boydii
gtgagcagcaaagtggaacaactgcgtgcgcagttaaatgaacgtattctggtgctggacggcggtatgggcaccatgatccagagttatcgactgaacgaagccgattttcgtggtgaacgctttgccgactggccatgcgatctcaaaggcaacaacgacctgctggtgctcagcaaaccggaagtgatcgccgctatccacaacgcctactttgaagcgggcgcggatatcatcgaaaccaacaccttcaactccacgaccattgcgatggcggattaccagatggaatccctgtcggcggaaatcaactttgcggcggcgaaactggcgcgcgcctgtgctgacgagtggaccgcgcgcacgccggagaaaccgcgctacgttgccggtgttctcggcccaaccaaccgcacggcgtctatttctccggacgtcaacgatccggcattccgcaacatcacttttgaccagctggtggcggcctatcgcgaatccaccaaagcgctggtggaaggtggtgcggatctgatcctgattgaaaccgttttcgacacccttaacgccaaagcggcggtttttgcggtgaaaacggagtttgaagcgctgggcgttgagctgccgattatgatctccggcaccatcaccgacgcctccgggcgcacgctctccgggcagaccaccgaagcattttacaactcattgcgccacgccgaagcgctaacctttggcctgaactgtgcgctggggcccgatgaactgcgccagtacgtgcaggaactatcacggattgcggaatgctacgtcaccgcccacccgaacgccgggctgcctaacgcctttggtgaatacgatctcgacgccgacacgatggcaaaacagatacgtgaatgggcgcaagcgggctttctcaatatcgtcggtggttgctgcgggaccacgccgcaacatattgcagcgatgagtcgtgcagtagaaggattagcgccgcgcaaactgccggaaattcccgtagcctgccgtttgtctggcctggagccgctgaacattggcgacgatagcctgtttgtgaacgtgggtgaacgcaccaacgtcaccggctctgctaagttcaagcgcctgatcaaagaagagaaatacagcgaggcgcaggatgtggcgcgtcagcaggtggaaaacggcgcgcagattatcgatatcaacatggatgaagggatgctcgatgccgaagcggcgatggtgcgttttctcaatctgattgccggtgaaccggatatcgctcgcgtgccgattatgatcgactcctcaaaatgggacgttatcgaaaaagggctgaagtgtattcagggcaaaggcattgttaactcaatctcgatgaaagagggcgtcgacgcctttatccatcacgcgaaattgttgcgtcgctacggtgcggcagtggtggtgatggcctttgatgaacagggacaggccgatactcgcgcacggaaaatcgagatttgccgtcgggcgtacaaaatcctcaccgaagaggttggcttcccgccagaagatatcatcttcgacccgaacatcttcgcggtcgccaccggtattgaagagcacaacaactacgcgcaggactttatcggcgcgtgtgaagacatcaaacgcgaactgccgcacgcgctgatttccggcggcgtatctaacgtttctttctcattccgtggcaacgatccggtgcgcgaagccattcacgcagtgttcctctactacgctattcgcaatggcatggatatggggatcgtcaacgcggggcaactggcgatttacgacgacctacccgctgaactgcgcgacgcggtggaagatgtgattcttaatcgtcgtgacgatggcactgagcgtttactggagcttgccgagaaatatcgcggcagcaaaaccgacgacaccgataacgcccagcaggcggagtggcgctcgtgggaagtgaataaacgtctggaatactcgctggtcaaaggcattaccgagtttatcgagcaggataccgaagaagcccgccagcaggctacgcgcccgattgaagtgattgaaggcccgttgatggacggcatgaacgtggtcggcgatctgtttggcgaaggcaaaatgttcctgccacaggtggtcaaatcggcgcgcgtcatgaaacaggcggtggcgtatctcgaaccgtttattgaagccagcaaagagcagggcaaaaccaacggcaagatggtgatcgccaccgtgaagggcgacgtccacgatatcggtaaaaatatcgttggcgtggtgctgcaatgtaacaactacgaaattgtcgatctcggcgtgatggtgcctgcggaaaaaattctccgtactgctaaagaagtgaatgctgatttgattggcctttcggggcttatcacgccgtcgctggacgagatggttaacgtggcgaaagagatggagcgtcagggcttcaccattccgttactgatcggtggcgcgaccacctcaaaagcgcacacggcggtgaaaattgagcagaactacagcggcccgacggtgtatgtgcagaatgcctcgcgcaccgttggtgtggtggcggcgctgctttccgatactcagcgcgatgattttgtcgctcgtacccgcaaggagtacgaaaccgtacgtattcagcacgggcgcaagaaaccgcgcacaccaccggtcacgctggaagcggcgcgcgataacgacttcgcttttgactggcaggcttacacgccgccggtggcgcaccgtctcggcgtgcaggaagttgaagccagcatcgaaactctgcgtaattgcatcgactggacaccgttctttatgacctggtcgctggccgggaagtatccgcgcattctggaagatgaagtggtgggcgttgaggcgcagcggctgtttaaagacgccaacgacatgctggataaattaagcgccgagaaaacgctgaatccgcgtggcgtggcgtggtgggcctgttcccggcaaaccgtgtgggcgatgacattgaaatctaccgtgacgaaacgcgcacccatgtga

SEQ ID NO: 467330 - DNA, 252 bp, Shigella boydii
atgaagaaagtttttctttgcgccatcttggcctccttaagctatccggctatcgcctcatcattgcaggatcaactctctgctgtagcagaagcggaacagcaaggtaaaaatgaagagcaaaggcagcatgacgaatgggtcgcggagcgcaacagggaaatccagcaagagaagcaacgtcgcgcaaatgcccaggtcgccgctaacaaaagagcggcaacgtcgcgcaaatgcccaggtcgccgctaa

SEQ ID NO: 467331 - DNA, 168 bp, Shigella boydii; identical to SEQ ID NO: 463879

SEQ ID NO: 467332 - DNA, 333 bp, Shigella boydii
atgacgagcaaagaaacctttacccattaccagccgcagggcaacagtgacccggctcataccgcaaccgcgcccggcggattgagtgcgaaagcgcctgcaatgaccccgctgatgctggacacctccagccgtaagctggttgcgtgggatggcaccaccgacagtgctgccgttggcattcttgcggttgctgctgaccagaccagcaccacgctgacgttctacaagtccggcacgttccgttatgaggatgtgctctggccggaggctgccagcgacgagacgaaaaaacggaccgcgtttgccggaacggcaatcagcatcgtttaa

SEQ ID NO: 467333 - DNA, 366 bp, Shigella boydii; identical to SEQ ID NO: 463085

SEQ ID NO: 467334 - DNA, 297 bp, Shigella boydii; identical to SEQ ID NO: 463086

SEQ ID NO: 467335 - DNA, 468 bp, Shigella boydii
gtgagcgcgtttgatctggcctttttgagcaatcgtgggctttatattccgtcaccgcagctgggagacggatttattgcgtttatcctagctgttgttatggctatagtcctttctgttgggctattccgctttaataaaacataccagataaagaccggacaactgcgccgcacctggccgttcgccgcagtgttgatcatcggtttgcctttactggcgcaatggctttttggcgcagcactacactgggatgtcccagccctacgaggctttaacttccgcggcggaatggttttaattcctgaactggcagccttaacgctggcactttcggtttatacctctgcatttatcgccgagattatccgcgctgggatccaggcagtgccttatggtcaacatgaagcggctcggtcactggggttacgctacgccaggtcattattccccaggcactgcgagtga

SEQ ID NO: 467336 - DNA, 255 bp, Shigella boydii
gtggtttatcaccgcagccgtgacgcgcaggccgctggcgtggcgtggggtgaagccgatatcactgcgatcaaacgtctttccgatatgggcttcaaagtcaccgtcaccggtggcctggcgctggaagatctgccgctgttcaaaggcattccaattcatgtgtttatcgccggtcgcagcatccgtgatgccgcttctccggttgaagccgcgcgtcagttcaaacgttccatcgccgaactgtggggctaa

SEQ ID NO: 467337 - DNA, 1359 bp, Shigella boydii
atgcaaaccgttttagcgaaaatcgtcgcagacaaggcgatttgggtagaaacccgcaaacagcagcaaccgctggccagttttcagaatgaggttcagccgagcacgcgacatttttatgatgcgctacagggtgcacgcacggcgtttattctggagtgcaagaaagcgtcgccgtcaaaaggcgtgatccgtgatgatttcaatccggcacgcattgccgccatttataaacattacgcttcggcaatttcggtgctgactgatgagaaatattttcaggggagctttgatttcctccccatcgtcagccaaatcgccccgcagccgattttatgtaaagacttcattatcgacccttaccagatctatctggcgcgctattaccaggccgatgcctgcttattaatgctttcagtactggatgacgaccaatatcgccagcttgcagccgtcgctcacagtctggagatgggggggctgaccgaagtcagtaatgaagaggaactggagcgcgccattgcattaggggcaaaggtcgttggcatcaacaaccgcgatctgcgtgatttgtcgattgatctcaaccgtacccgcgagcttgcgccgaaactggggcacaacgtaacggtaatcagcgaatccggcatcaatacttacgctcaggtgcgcgagttaagccacttcgctaacggttttctgattggttcggcgttgatggcccatgacgatttgcacgccgccgtgcgccgggtgttgctgggtgagaataaagtatgtggcctgacgcgtgggcaagatgctaaagcagcttatgacgcgggcgcgatttacggtgggttgatttttgtcgcgacatcaccgcgttgcgtcaacgttgaacaggcgcaggaagtgatggctgcggcaccgttgcagtatgttggcgtgttccgcaatcacgatattgccgatgtggtggacaaagctaaggtgttatcgctggcggcagtgcaactgcatggtaatgaagatcagctgtatatcgatacgctgcgtgaagctctgccaacacatgttgccatctggaaagcattaagcgtcggtgaaaccctgcccgcccgcgagtttcagcacgttgataaatatgttttagacaacggccagggtggaagcgggcaacgttttgactggtcactattaaatggtcaatcgcttggcaacgttctgctggcggggggcttaggcgcagataactgcgtggaagcggcacaaaccggctgcgccggacttgattttaattctgctgtagagtcgcaaccgggcatcaaagacgcacgtcttttggcctcggttttccagacgctgcgcgcatattaa

SEQ ID NO: 467338 - DNA, 1035 bp, Shigella boydii; identical to SEQ ID NO: 458389

SEQ ID NO: 467339 - DNA, 1449 bp, Shigella boydii
ttggcgaaagatgcgcagaaattcgcagccaaagtctttcatgccgataaaacctattttgtgctgaacggcacatcggcagcgaataaagtggtgacgaatgcgctgttaacgcgtggcgatctggtgctcttcgaccgtaacaaccataagtcgaatcatcacggcgcgctgattcaggcgggggcgacgccggtctatctggaagcttcacgcaacccgtttggtttcattggcggtattgatgcgcactgttttaatgaagagtatctgcgccagcaaattcgcgacgttgcgccagaaaaagccgagctgccgcgcccgtttcgcctggcgattattcagctgggaacctatgacggaactgtctataacgcccgtcaggtgatcgataccgttgggcatctgtgtgattacattctgtttgattccgcgtgggtcggttacgaacagtttatcccgatgatggcggatagctcgccgctgctattagaacttaacgaaaacgatccggagatctttgtgactcagtcggtgcacaaacagcaggcgggattctcacagacgtcgcagatccataaaaaagataaccatatccgcggacaggcgcgtttttgcccgcataagcggttgaataacgcctttatgctccatgcttctaccagccctttctatccgctgtttgctgcactggatgttaacgccaaaattcatgaaggggagagtgggcgtcggctgtgggctgagtgcgttgagttgggtattgagtcgcgcaaggctattcttgcgcgctgtaagctgttccgcccgtttatcccgcccgttgttgatggcaaattgtggcaggattatccgacatcagtgttagccagcgaccgccgttttttcagttttgagccgggggcgaagtggcacggctttgaaggatatgccgcggatcagtattttgttgatccgtgcaagctgttactcactacaccaggtatcaatgccgaaaccggcgaatatagcgactttggcgttccggcgacgattctggcgcactatctgcgtgagaacggcattgtgccggagaagtgcgatctcaactccattctgttcttattaactccggcggaaagccacgagaagctggcacaactggtagagatgttggcgcagtttgaacagcatattgaggatgactcgccgctggctgaggtgttgccgagcgtttataacaaatatccggtgcgctatcgcgactacactttgcgccagttgtgtcaggagatgcacgatctgtatgtcagtttcgacgtcaaagacctacaaaaagcgatgttccgccagcagagtttcccgtcagtggtgatgaacccccaggatgcgcatagcgctgatatgactttccgtgtcaaaccggaatctctaattttgacgattttctttttaggtttaattccctga

SEQ ID NO: 467340 - DNA, 381 bp, Shigella boydii; identical to SEQ ID NO: 458903

SEQ ID NO: 467341 - DNA, 252 bp, Shigella boydii; identical to SEQ ID NO: 467245

SEQ ID NO: 467342 - DNA, 126 bp, Shigella boydii
atgacaacatggtcgtatgatgcgctgggcgcgggggcggagagggttctgtcgctgagcggtatggggaccattgagaatgccggggatgatgatcatgaggcgctgacgccggaaaagtcctga

SEQ ID NO: 467343 - DNA, 441 bp, Shigella boydii; identical to SEQ ID NO: 463153

SEQ ID NO: 467344 - DNA, 369 bp, Shigella boydii; identical to SEQ ID NO: 462503

SEQ ID NO: 467345 - DNA, 327 bp, Shigella boydii; identical to SEQ ID NO: 5975

SEQ ID NO: 467346 - DNA, 225 bp, Shigella boydii; identical to SEQ ID NO: 465861

SEQ ID NO: 467347 - DNA, 1035 bp, Shigella boydii
atgaataatgatatggcgctgatgcagctgcatcatgtatcacaacgggcgaaatcacgccccttacgtgaaaacgcagcggaatttcttcaggtggtcgcagaaaatcgcgggctaagccaggaagagttagcggacagattagtcccaaccctgggccttgatgatccgcaggcgttgagttttgattttggtccccggcagtttaccgttcgcttcgatgaaaacctcaacccggttatctttgatcagcaaaacgttcgccagaaaagcgttccccggttgcgcgccgatgacgatcaactgaaagcgcccgaggcactggcccgactaaaagggctaaaaaaagatgctactcaggtgagcaaaaacctgctcccgcgtcttgaagctgccctacgtaccacccgacgctggtcgctggcagattttcattctctgtttgttaatcatccctttacccgtctggttacccagcgattaatatggggggtttatccggcaaatgaaccgcgttgtttactcaaagcctttcgtgtggccgcagagggggagttctgcaatgcgcaagatgagccaattgacctgcctgcggacgctctgattggcattgcccacccgttagaaatgacagtagaaatgcgcagtgaatttgcacagctttttgccgattacgaaattatgccgccttttcgccaattgtcgcgccgcacggtgctgctcacacctgacgagtcaaccagtaacagcctgactcgctgggaaggtaaatccgctaccgttgggcagcttatgggaatgcgatacaaaggctgggagtcaggttatgaggacgcatttgtctatgacctgggtgagtaccggctggtccttaagttttcacccggttttaaccactacaatgttgatagcaaagcgctaatgagcttccgttctcttcgagtgtaccgtgacaataaatccgtcacttttgccgaacttgatgtgtttgatttgagtgaggcgttaagcgcacctgacgtcattttccattaa

SEQ ID NO: 467348 - DNA, 372 bp, Shigella boydii; identical to SEQ ID NO: 462525

SEQ ID NO: 467349 - DNA, 372 bp, Shigella boydii; identical to SEQ ID NO: 462525

SEQ ID NO: 467350 - DNA, 240 bp, Shigella boydii; identical to SEQ ID NO: 36218

SEQ ID NO: 467351 - DNA, 327 bp, Shigella boydii; identical to SEQ ID NO: 16555

SEQ ID NO: 467352 - DNA, 537 bp, Shigella boydii; identical to SEQ ID NO: 16554

SEQ ID NO: 467353 - DNA, 474 bp, Shigella boydii; identical to SEQ ID NO: 52832

SEQ ID NO: 467354 - DNA, 525 bp, Shigella boydii; identical to SEQ ID NO: 16553

SEQ ID NO: 467355 - DNA, 225 bp, Shigella boydii
atgtcgcgtaaaggtcactgttacgacaacgctccgatggaaagcttctggggaacgctgaaaaatgagagcctgagccactatcgttttaataaccgggatgaagccatctcagtaatacgggaatacattgagattttctacaatcgtcagcgtcgtcactctcgtctggggaatatctccccggcagccttcagggaaaaatatcatcagatagctgcttaa

SEQ ID NO: 467356 - DNA, 372 bp, Shigella boydii; identical to SEQ ID NO: 462767

SEQ ID NO: 467357 - DNA, 327 bp, Shigella boydii
atggcgaagcccttctgcgccgacgctgaaatccacggtctgcgtctccagcagctccgttttaatcagccacagcccggcgcggtgtgcctgcccccggctggtacagccaaaggcatccatcttcgtgacgttacgaccgtaacggagaatggcctgcgtgtcctccacaagctctgtcgccgtctcccagccgttatccgggtcaatccagttcacctcaacggcattatggcggtccttcagggcgctgaagctgtagcggaacggcgcgccatcatccggcatcaccacattactgcggttataggtccacaccttatctga

SEQ ID NO: 467358 - DNA, 210 bp, Shigella boydii; identical to SEQ ID NO: 9340

SEQ ID NO: 467359 - DNA, 225 bp, Shigella boydii; identical to SEQ ID NO: 462228

SEQ ID NO: 467360 - DNA, 780 bp, Shigella boydii; identical to SEQ ID NO: 462684

SEQ ID NO: 467361 - DNA, 303 bp, Shigella boydii; identical to SEQ ID NO: 463444

SEQ ID NO: 467362 - DNA, 495 bp, Shigella boydii; identical to SEQ ID NO: 462705

SEQ ID NO: 467363 - DNA, 576 bp, Shigella boydii; identical to SEQ ID NO: 462676

SEQ ID NO: 467364 - DNA, 195 bp, Shigella boydii; identical to SEQ ID NO: 463979

SEQ ID NO: 467365 - DNA, 225 bp, Shigella boydii; identical to SEQ ID NO: 462228

SEQ ID NO: 467366 - DNA, 714 bp, Shigella boydii
gtggcacatatccgcactcgcgaaacatatggaacccggcggctccagacggagctggcagagaatggcatcatcgttggtcgtgaccgactggcacgtcttcgtaaggagctaaggctacgctgtaagcagaaacgcaagttcagagcgactacgaacccgaaccacaatctgccagttgcgccaaatctgctgaaccagacgttcgctcctacagcaccaaatcaggtctgggtggcggacctgacgtatgttgccacacaggagggatggttgtacctcgctggcatcaaagatgtttatacgtgcgaaattgtcggctacgccatgggagagcgcatgacaaaagagctgacaggtaaagccctgtttatggcgctcaggagccagcgcccacctgccgggctaatccaccactctgatcgaggttcacagtactgcgcatacgattaccgggtcatacaggagcagtctggtctgaaaacatcaatgtcgcgtaaaggtcactgttacgacaacgctccgatggaaagcttctggggaacgctgaaaaatgagagcctgagccactatcgttttaataaccgggatgaagccatctcagtaatacgggaatacattgagattttctacaatcgtcagcgtcgtcactctcgtctggggaatatctccccggcagccttcagggaaaaatatcatcagatggctgcttaa

SEQ ID NO: 467367 - DNA, 372 bp, Shigella boydii; identical to SEQ ID NO: 462525

SEQ ID NO: 467368 - DNA, 531 bp, Shigella boydii
atgctaagaattaaacattttgacgctaacgaaaaactacagattttatatgcaaagcaactctgcgagcgtttttcgattcagacattcaaaaataaatttacaggcagtgaaagtttagtcactcttacttccgtgtgtggggattgggtaattcgtattgatacattatcttttttgaaaaaaaaatacgaggtattttcaggattttctacacaagaatctttactgcatttatcaaaatgtgtctttatagagtcgtcatctgtattttcgattccagaactgtctgataagattactttccggatcacgaatgaaatccagtatgcaactactgggagtcatttatgctgtttttcctcttctttaggtattatttattttgacaagatgccggtattacgtaatcaagtttctcttgacttattgcatcatcttttagagttttgcttaggttcatctaatgtaaggctggctactttaaaaagaattcgtactggtgatatactgtctcttatacacatctga

SEQ ID NO: 467369 - DNA, 342 bp, Shigella boydii; identical to SEQ ID NO: 462701

SEQ ID NO: 467370 - DNA, 555 bp, Shigella boydii; identical to SEQ ID NO: 462745

SEQ ID NO: 467371 - DNA, 381 bp, Shigella boydii; identical to SEQ ID NO: 458903

SEQ ID NO: 467372 - DNA, 372 bp, Shigella boydii; identical to SEQ ID NO: 462525

SEQ ID NO: 467373 - DNA, 378 bp, Shigella boydii; identical to SEQ ID NO: 462742

SEQ ID NO: 467374 - DNA, 180 bp, Shigella boydii; identical to SEQ ID NO: 461173

SEQ ID NO: 467375 - DNA, 366 bp, Shigella boydii; identical to SEQ ID NO: 462747

SEQ ID NO: 467376 - DNA, 366 bp, Shigella boydii; identical to SEQ ID NO: 461917

SEQ ID NO: 467377 - DNA, 180 bp, Shigella boydii; identical to SEQ ID NO: 461173

SEQ ID NO: 467378 - DNA, 291 bp, Shigella boydii; identical to SEQ ID NO: 467055

SEQ ID NO: 467379 - DNA, 372 bp, Shigella boydii; identical to SEQ ID NO: 462525

SEQ ID NO: 467380 - DNA, 372 bp, Shigella boydii; identical to SEQ ID NO: 462525

SEQ ID NO: 467381 - DNA, 327 bp, Shigella boydii; identical to SEQ ID NO: 5975

SEQ ID NO: 467382 - DNA, 495 bp, Shigella boydii; identical to SEQ ID NO: 463228

SEQ ID NO: 467383 - DNA, 429 bp, Shigella boydii
atggtgtcgcactggttcagtgccagtcagtggcagctaccgaacgaaagcgattatctgaaattacagtcgctgtttgcccgggtggcagaagagaaacatcagcgcggtgaactggaaaagccccaccaccagctggtggatacgtatacgtcactgaaccggcagtatgtggagctgcagagtgaatataagcatctgcggcggtattttggtgtgacggcgcaggtgccgtacacggatgtgtggacacataaaccggtgcagttctatcccgggaaacatccgtgcgaaaaaccggcagaaatgctgcagcagataatcagcgcaagcagtcgtccgggagacctggttgcagattttttttatgggctcaggttcaacggtaaaagctgcactggcgctcgggcgtcgtgcgattggcgttga

SEQ ID NO: 467384 - DNA, 327 bp, Shigella boydii; identical to SEQ ID NO: 5975

SEQ ID NO: 467385 - DNA, 381 bp, Shigella boydii; identical to SEQ ID NO: 462769

SEQ ID NO: 467386 - DNA, 291 bp, Shigella boydii; identical to SEQ ID NO: 462600

SEQ ID NO: 467387 - DNA, 327 bp, Shigella boydii; identical to SEQ ID NO: 462700

SEQ ID NO: 467388 - DNA, 291 bp, Shigella boydii; identical to SEQ ID NO: 467055

SEQ ID NO: 467389 - DNA, 186 bp, Shigella boydii; identical to SEQ ID NO: 463326

SEQ ID NO: 467390 - DNA, 663 bp, Shigella boydii; identical to SEQ ID NO: 461715

SEQ ID NO: 467391 - DNA, 675 bp, Shigella boydii; identical to SEQ ID NO: 467213

SEQ ID NO: 467392 - DNA, 2115 bp, Shigella boydii
atggcagataatccagacccttcatcgctcctgccggacgtgttttcaccggcgacccgcgactggtttcttcgcgcctttaaacagccgaccgctgtccagtcgcaaacctggcatgtggcggcgcgaagcgaacatgcgctggtgattgcaccgaccggctccgggaaaacgctggcagcatttctctacgccctcgatcggctcttccgcgaaggcggcgaagatacccgcgaggcgcataagcgtaaaacctcacgcatcctctatatttcaccgataaaagctctgggcaccgacgttcagcgcaacttgcagctcccgttgaagggtattgccgatgaacggcggcggcgcggcgaaacggtaattattgatgaagtccacgcggtagcgggcagtaaacgtggtgcgcatctggcgttaagtctggagcggctcgatgcgctgctccacacctcagcacagcgaattggcctttctgccactgtgcgctcagccagcgatgtggcagcctttcttggtggcgatcgcccggttacggtagtcaacccgcccgcaatgcgccatccgcagatacgaattgtcgtaccggtcgccaatatggatgatgtctcatcggtcgccagcagcaccggcgaagacagccatgccggccgggaaggctccatctggccatatattgaaacgggtatccttgatgaagtgttgcgccatcgctcgaccattgtctttactaattcacgtgggctggcggaaaaactgacggcacgattaaatgagctttacgccgcacgcttacagcgttccccgtctatcgccgttgatgcggcccatttcgagtcgacctccggcgcaacctctaaccgtgtacaaagtagcgacgtttttattgcccgctcacaccacggctccgtctctaaagaacaacgagcaatcaccgagcaggcgctgaaatcgggtgagttacgctgcgtggtcgcaacctccagtctcgaactggggattgatatgggcgcagtggatctggtgattcaggtggcaacgccgctttctgttgccagtgggttacaacgcattggtcgcgccggacatcaggttggcggtgtatctaaagggctgtttttccctcgtacccggcgtgacttagtcgattccgcagtcattgtagagtgtatgttcgcaggcaggctggaaaacctgacaccgccgcataatccactcgacgtccttgcgcagcaaaccgttgccgccgcggcgatggaggcattacaggtagacgaatggtactcccgcgtacgccgtgccgcaccgtggaaagatctgccaagacgtgtttttgacgccacgctggatatgctttccgggcgctatccctctggcgatttttctgcttttcgccccaaactggtctggaacagggagaccgggatattgaccgtccgacctggcgctcaattgttggcggttaccagcggcggcaccattccggatcgtggcatgtatagcgtgttattacccgaaggtgaagaaaaggccggttcgcggcgggtgggtaaactggatgaggagatggtatatgagtcgcgggtgaacgacattatcactctcggcgctacctcatggcggatccagcaaatcacccgcgatcaggtgattgtgactcctgctccgggtcgttctgcccggctccccttctggcgtggtgaaggtaacggacgtccggctgaattaggcgagatgatcggcgattttcttcatttactggcggatggcgcgttcttttccgggactattcccccgtggctggcagaagaaaatacgaacgccaatattcaggggttgattgacgagcaacgcaacgcgacgggcatcgttccggggagtcgccatctggtcctcgaacggtgccgtgatgaaattggcgactggcgtattattttgcactctccctatggaagacgggtgcatgaaccctgggcgctgacgcgtctgtggtcgccagtgatgacggcattgttgcgcgcattcctgacactgatggtaaattgcccgacgccgcgatttttttgtttgaaccagaaaagttgctgcaaattgtccgcgaggcggtag

SEQ ID NO: 467393 - DNA, 333 bp, Shigella boydii; identical to SEQ ID NO: 462152

SEQ ID NO: 467394 - DNA, 342 bp, Shigella boydii; identical to SEQ ID NO: 463479

SEQ ID NO: 467395 - DNA, 252 bp, Shigella boydii; identical to SEQ ID NO: 467330

SEQ ID NO: 467396 - DNA, 168 bp, Shigella boydii; identical to SEQ ID NO: 463879

SEQ ID NO: 467397 - DNA, 366 bp, Shigella boydii; identical to SEQ ID NO: 463085

SEQ ID NO: 467398 - DNA, 1050 bp, Shigella boydii; identical to SEQ ID NO: 463097

SEQ ID NO: 467399 - DNA, 204 bp, Shigella boydii; identical to SEQ ID NO: 462297

SEQ ID NO: 467400 - DNA, 351 bp, Shigella boydii
atgcatacctccgagttgctgaaacacatttatgacatcaacttgtcatatttactacttgcacagcgtttgattgttcaggacaaagcgtccgctatgtttcgtctcggcataaatgaagaaatggcgacaacgttagcggcactgactcttccgcaaatggttaagctggcagaaaccaatcaactggtttgtcacttccgttttgacagccaccagacgattactcagttgacgcaagattcccgcgttaacgatctccagcaaattcataccggcatcatgctctcaacacgcttgctgaatgatgttaatcagcctgaagaagcgctgcgcaagaaaagggcctga

SEQ ID NO: 467401 - DNA, 150 bp, Shigella boydii; identical to SEQ ID NO: 462111

SEQ ID NO: 467402 - DNA, 309 bp, Shigella boydii; identical to SEQ ID NO: 463480

SEQ ID NO: 467403 - DNA, 2706 bp, Shigella boydii
atgctgattccgtcaaaactaagtcgtccggttcgactcgaccataccgtggttcgtgagcgcctgctggctaaactttccggcgcgaacaacttccggctggcgctgatcacgagtcctgcgggctacggaaagaccaccctcatttcccagtgggcggcaggcaaaaacgatatcggctggtactcgctggatgaaggtgataaccagcaagagcgtttcgccagctatctcattgccaccgtgcagcaggcaaccaacggtcactgtgcgatatgtgagacgatggcgcaaaaacggcaatatgccagcctgacgtcactcttcgcccagcttttcattgagctggcggaatggcatagcccactttatctggtcatcgatgactatcatctgatcactaatccagtgatccacgagtcaatgcgcttctttattcgccatcaaccagaaaatctcaccctggtggtgttgtcacgcaaccttccgcaactgggcattgccaatctgcgtgttcgtgaccaactgctggaaattggcagtcagcaactggcatttacccatcaggaagcgaagcagttttttgattgccgtctgtcatcgccgattgaagccgcagaaagcagtcggatttgcgatgacgtttccggttgggcgacggcactacagctaatcgccctctccgcccggcagaatacccactcagcccataagtcggcacgccgcctggcgggaatcaatgccagccatctttcggattatctggtcgatgaggttttggataacgtcgatctcgcaacgcgccattttctgttgaaaagcgccattttgcgctcaatgaacgatgcgctcatcacccgtgtgaccggcgaagaaaacgggcaaatgcgtctcgaagagattgagcgtcaggggctgtttttacagcggatggatgataccggcgagtggttctgctatcacccgctgtttggcaacttcctgcgccagcgctgccagtgggaactggcggcggagctgccggaaatccaccgtgccgccgcagaaagctggatggcccagggatttcccagcgaagcgattcatcatgcgctggcggcaggcgatgcgctgatgctgcgcgatattctgcttaatcacgcctggagtttgttcaaccatagcgaactgtcgctgctggaagagtcgcttaaggccctgccgtgggacagtttgctggaaaatccgcagttagtgttattgcaggcgtggctaatgcaaagccaacatcgctatggcgaagttaacaccctgctagcccgtgctgaacatgaaatcaaggacatcagagaaggcaccatgcacgcagaatttaacgctctgcgcgcccaggtggcgattaacgatggtaatccggatgaagcggaacggctggcaaaactggcactggaagagctgccaccgggctggttctatagccgcattgtggcaacctcggtgctgggtgaagtgctgcactgcaaaggcgaattgacccgctcactggcgctaatgcagcaaaccgaacagatggcacgccagcacgacgtctggcactacgccttatggagtttaatccagcaaagtgaaattctgtttgcccaagggttcctgcaaaccgcgtgggaaacacaggaaaaagcgttccagctgatcaacgagcagcatctggaacagctgccgatgcatgagtttctggtgcgcatccgagcacaactgttatgggcctgggcacggctggatgaagccgaagcgtcggcgcgtagcgggattgaagtcttgtcgtcttatcagccacagcaacagcttcagtgcctggcaatgttgattcaatgctcgctggcccgtggtgatttagataacgcccgtagccagctgaaccgtctggaaaacctgctggggaatggcaaatatcacagcgactggatctctaacgccaacaaagtccgggtgatttactggcaaatgaccggcgataaagccgccgctgccaactggttgcgtcatacggctaaaccggagtttgcgaacaaccacttcctgcaaggtcaatggcgcaacattgcccgcgcacaaatcttgctgggcgagtttgaacctgcggaaattgttctcgaagaactcaatgaaaatgcccgcagtctgcggttgatgagcgatctcaaccgtaacctgttgctgcttaatcaactgtactggcaggccggacgtaaaagtgacgcccagcgcgtgttgctggacgcattaaaactggcgaatcgcaccggatttatcagtcattttgtcatcgaaggcgaagcgatggcgcaacaactgcgccagctgattcaactcaatacgctgccggaactggaacagcatcgcgcgcagcgtattctgcgagaaatcaatcaacatcatcggcataaattcgcccatttcgatgagaatttcgttgaacgtctgctaaatcatccggaagtgccagaactgatccgcaccagcccgttgacccaacgtgaatggcaggtcctggggctgatctactccggttacagcaatgagcaaattgcgggcgagctggaagtggcggcaaccaccatcaagacgcatatccgcaatctgtaccaaaaactcggcgtcgcccaccgtcaggccgcggtacaacacgcgcagaaactgctgaagatgatgggatatggggtgtga

SEQ ID NO: 467404 - DNA, 831 bp, Shigella boydii; identical to SEQ ID NO: 462438

SEQ ID NO: 467405 - DNA, 210 bp, Shigella boydii; identical to SEQ ID NO: 9340

SEQ ID NO: 467406 - DNA, 225 bp, Shigella boydii; identical to SEQ ID NO: 133446

SEQ ID NO: 467407 - DNA, 1299 bp, Shigella boydii
atgacgccggtgcaggccgccgcgcttccggcgatccttgccggaaaagatgttcgcgtgcaggcgaaaaccggcagcggcaaaacggcggcttttggcctcggcttgttacagcaaattgatgcgtcgctatttcaaacccaggctttagtgctgtgtcctacgcgtgaactggcggatcaggtggcaggtgaattgcgtcggctggcgcgttttctgccaaataccaaaattttgacgttgtgcggtggtcaaccgttcggtatgcagcgtgattcgttgcaacatgcgccgcatattatcgtggcaacgccgggtcgtttgctggatcacttgcaaaaaggcacggtatcactggatgcgctgaatactttggtgatggatgaggccgaccgcatgctggatatgggatttagcgatgccattgatgatgtcatccgttttgcgcctgcatctcgacagacgcttctgttttcggcaacctggccggaagccatcgccgtaatcagcggacgagtgcaacgcgatcctttggcgattgaaattgactcaacagatgctttgccacccattgaacaacaattttatgagacatccagcaaaggcaaaattcctctgttgcaacggttattaagcttgcatcagccatcctcttgcgtggtgttttgcaataccaaaaaagattgccaggctgtctgcgacgcgctgaatgaagtagggcaaagtgcattgtcattacacggcgatttggagcaacgcgatcgcgatcagaccctggtacgttttgctaacggtagcgcccgtgtactggttgcgactgatgttgctgcgcgtggtctggatattaaatcgcttgagctggtggtgaactttgagctggcgtgggaccctgaagttcatgtacatcgcatcggccgtacagctcgtgcaggaaatagcggtctggcgatcagtttctgtgctccggaagaagcacagcgggccaatatcatttctgacatgttgcagataaaacttaactggcaaacgccgccagctaatagttccattgtgccgctggaagcagaaatggcaacgttgtgtatcgatggcgggaaaaaagccaaaatgcgcccgggtgatgtattaggtgcactgacaggagatatcgggcttgatggcgcagatattggcaaaatcgccgtgcatccggcgcatgtctatgtcgcggtccgtcaggctgttgctcataaagcatggaaacagttacagggcgggaagattaaaggaaaaacgtgccgggtgcggttattaaaataa

SEQ ID NO: 467408 - DNA, 240 bp, Shigella boydii; identical to SEQ ID NO: 193348

SEQ ID NO: 467409 - DNA, 210 bp, Shigella boydii; identical to SEQ ID NO: 9340

SEQ ID NO: 467410 - DNA, 840 bp, Shigella boydii; identical to SEQ ID NO: 24210

SEQ ID NO: 467411 - DNA, 972 bp, Shigella boydii
atggcggaaacgctgggtgagcaatatgacccggtactgccatctcccctgcgccagtcttcagcccgtaaaccgttacctgcctcacttccccgtgaaacccgggtcatccgtccggaagaggaatgctgcccggcctgtggtggcgaactcagttctctgggatgtgatgtgtcagagcagctggagcttatcagcagcgcctttaaggttatcgaaacacaacgtccgaaactggcctgttgccggtgtgaccatatcgtgcaggcaccggtgccttcaaaacccattgcacgcagttatgccggagcggggcttctggcccatgttgtcgctggaaaatatgcaggctatctgccgttataccgccagtcagaaatataccgtcgtcagggcgtggagctgagccgtgccacactgggtcgctggaccggtgccgttgctgaactgctggagccgctgtatgacgtcctgcgccagtatgtgctgatgcccggtaaagttcatgcggatgatatccccgttccggtccaggagccgggcagtggtaaaacaagaactgcccggctgtgggtctatgtccgtgatgaccgtaacgccggttcggaaatgcctccggcggtctggttcgcgtactcaccggaccggaaaggtatccatccacagaatcatctggccggttacagcggagtgcttcaggccgatgcttacggtggttaccgggcgttgtacgaatccggcagaataacggaagccctgctgcgtatcggtgaactgtatgccatcgaggcagaagtccggggatgttcagcagaacagcgtctggcggcaagaaaagccagagccgcgccactgatgcagtcactgtatgactggatacagcaacagatgaaaattcactcgctgaaaatggaatgtctccacggagaacactattatccatcgggaaatagtgcgggcaacagtgtttag

SEQ ID NO: 467412 - DNA, 732 bp, Shigella boydii
atgtctgagtttgcacgttgccattatgggtatatacaaatccctccagtgacaactttccgcgccgacggaccagaaactcccgaagaagaaaaaggttactggtttcatgcttatcaacccgaagatctttgtaccatccataacccaatgggagatttgcaggattttatcgcattggttaaagatgctaaaaaatttggtatcgatatcattcctgattatacatttaactttatgggaatcgggggtagtggtaaaaatgacctggattatccctctgctgatatacgagcgaagatcagtaaagatatagaaagcggtatccctggctattggcaaggtcaggttttgattccattcattaaagatccagtaacaaaagaacgtaaacaaatccatccagaagatatacatctcactgcaaaagacttcgaagcaagtaaagataacatctctaaggatgaatgggaaaacctccatgcattaaaagaaaagcgtttaaatggaatgcctaaaacaacacccaaaagtggccaggttattatgttgcaaaatcaatacgttcgagaaatgcgaaaatatggcgtacgaggtttacgttatgatgcggcaaaacactcaaaacatgaacaaatagagaggtcgataatcccaccgcttaaaaattataatgagcggttacacaatactaatttatttaacccaaaatatcaaaaaaagccgttatga

SEQ ID NO: 467413 - DNA, 276 bp, Shigella boydii; identical to SEQ ID NO: 462624

SEQ ID NO: 467414 - DNA, 351 bp, Shigella boydii
atgcgcgctgccgtcgctgccgcgggtaacttccgttgtgcggatccagccctgaacaggcaggaactccttgcgaaccttcatacgctgaaaagctgcattcatccggttcagcatctcgcccagttccccaatcgcacagttgcgcacggtcagggtcaggaacatccagcgggcatcagggtaatccgccacgatacgcggcagggactggtagaaacgggcttgccacatcagggagcgcctccactggcagacaggacagtgccggacacggcagaaatgcgcctcacgcagcctcagacgcgtttctccggtttccttgagggtagaccacccgaaacgcagtaa

SEQ ID NO: 467415 - DNA, 594 bp, Shigella boydii; identical to SEQ ID NO: 463274

SEQ ID NO: 467416 - DNA, 873 bp, Shigella boydii
gtgaagcctgagggctgggataaccagtggaagggcgacgatgattacctgaagtggctggaccagtgtctggcgcagttctggcgggtgctgaaacctgccggaagtctttacctgttctgtggtcatcgcctggcatctgatatcgaaatcatgatgcgtgaacgcttcagtgtgctgaaccatattatctgggcgaagccgtccggacgctggaacggatgcaacaaggaaagcctgcgggcgtatttccccgccacagagcgcattctgttcgcggaacattatcaggggccgtatcgtccgaaagatgccgggtatgcggcgaagggcagtgcactgaaacagcatgtgatggccccgctgatttcttactttcgtgatgcgcgcgcggccctggggataacggcaaaacagattgcagatgccacaggaaagaaaaacatggtgtcgcactggttcagtgccagtcagtggcagctaccgaacgaaagcgattatctgaaattacagtcgctgtttgcccgggtggcagaagagaaacatcagcgcggtgaactggaaaagccccaccaccagctggtggatacgtatacgtcactgaaccggcagtatgtggagctgcagagtgaatataagcatctgcggcggtattttggtgtgacggcgcaggtgccgtacacggatgtgtggacacataaaccggtgcagttctatcccgggaaacatccgtgcgaaaaaccggcagaaatgctgcagcagataatcagcgcaagcagtcgtccgggagacctggttgcagattttttttatgggctcaggttcaacggtaaaagctgcactggcgctcgggcgtcgtgcgattggcgttga

SEQ ID NO: 467417 - DNA, 138 bp, Shigella boydii; identical to SEQ ID NO: 463485

SEQ ID NO: 467418 - DNA, 948 bp, Shigella boydii
atgggatttgacttctatcgaataaatagatttggtagattggaaaagtattattatatacaactaagaggcgcttttttatcggctattcatcaccagatcattgaaaaccaactggatacagaaacaataactattagttatgaatttatcctctgccaacatcttatcgcaaataccgagttcagctatttggcactccctgaaaattataaccgattgtttttaccaaattcaaaaaaccaaacaaataatcgtttcaaaacgttaaacagcaaagctattggcaggctacttgctgctggtggcgtatacaatgggaacattgaaggattcagagatactgcggaaaaactgggtggagatgcaataaaaggctatgatcaaatactaaatgaaaaaacagcgggcatagcgatagcaacagcatctattcttttaacaaagcgttctaatgttgatacatatacagaaataaatagttacttaggcaaacttagaggtcaacaaaaacttcttgatggtatagacataatagaaataatatacattaagagaccttcaaaagacttagctaacttacgaaaggagtttaataaaactgtaagaaaaaattttcttatcaaactttcaaaaacctccgaagcatctggaagattcaacgccgaagaccttttaagaatgagaaagggcaatgttcctctaaattataatgttcaccataaactatctctagatgatggtggtactaatgatttcgaaaatttagtattaatcgaaaacgaaccatatcataaagtttttactaacatgcaatcacgaatagctaagggaatattagtaggtgaaagcaaaatcactccctgggccattccatctggctcaatttatcctcccatgaaaaatgtaatgaacgcatcccacacaattaaacacggagcagtatga

SEQ ID NO: 467419 - DNA, 186 bp, Shigella boydii; identical to SEQ ID NO: 463326

SEQ ID NO: 467420 - DNA, 378 bp, Shigella boydii; identical to SEQ ID NO: 462742

SEQ ID NO: 467421 - DNA, 231 bp, Shigella boydii
gtggcagatgccgccaaagctatggatgttggcctttccacaatgacaagatgggtcaaacaactgcgtgatgagcgtcagggcaaaacaccaaaagcctctccgataacaccagaacaaatcgaaatacgtaagctgaggaaaaagctacaacgcattgaaatggagaatgaaatattaaaaaaggctaccgcgctcttgatgtcagactccctgaacagttctcgataa

SEQ ID NO: 467422 - DNA, 366 bp, Shigella boydii; identical to SEQ ID NO: 461917

SEQ ID NO: 467423 - DNA, 180 bp, Shigella boydii; identical to SEQ ID NO: 461173

SEQ ID NO: 467424 - DNA, 210 bp, Shigella boydii; identical to SEQ ID NO: 9340

SEQ ID NO: 467425 - DNA, 327 bp, Shigella boydii; identical to SEQ ID NO: 467214

SEQ ID NO: 467426 - DNA, 210 bp, Shigella boydii; identical to SEQ ID NO: 9340

SEQ ID NO: 467427 - DNA, 207 bp, Shigella boydii
atggcggagagcatcaatggtctttacaaagcggaggtaatacaccgtaagagctggaaaaaccgtgcagaagtggaactggccacactcacgtgggtggactggtataataatcgacgattgctggaaaggctgggccacatccctccggcagaagcagaaaaagcttattatgcttctatcggaaacgatgatctggcagcctga

SEQ ID NO: 467428 - DNA, 354 bp, Shigella boydii; identical to SEQ ID NO: 466835

SEQ ID NO: 467429 - DNA, 207 bp, Shigella boydii
atggcggagagcatcaatggtctttacaaagcggaggtaatacaccgtaagagctggaaaaaccgtgcagaagtggaactggccacactcacgtggatggactggtataataatcgacgattgctggaaaggctgggccacatccctccggcagaagcagaaaaagcttattatgcttccatcggaaacgatgatctggcagcctga

SEQ ID NO: 467430 - DNA, 168 bp, Shigella boydii; identical to SEQ ID NO: 462763

SEQ ID NO: 467431 - DNA, 372 bp, Shigella boydii; identical to SEQ ID NO: 462547

SEQ ID NO: 467432 - DNA, 207 bp, Shigella boydii
atggcggagagcatcaatggtctttacaaagcggaggtaatacaccgtaagagctggaaaaaccgtgcagaagtggaactggccacactcacgtgggtggactggtataataatcgacgattgctggaaaggctgggccacatccctccggcagaagcagaaaaagcttattatgcttccatcggaaacgatgatctggcagcctga

SEQ ID NO: 467433 - DNA, 288 bp, Shigella boydii; identical to SEQ ID NO: 462736

SEQ ID NO: 467434 - DNA, 372 bp, Shigella boydii
gtgctggatgcactggagcaggcgttatgggcccgtcgaccgtccggcacggtccatcacagtgataaaggttctcagtatgtatcgctggcctacacacagcggcttaaggaagccggattactggcatcaacaggaagtacaggcgactcgtatgacaacgcgatagcggagagcatcaatggtctttacaaagcggaggtaatacaccgtaagagctggaaaaaccgtgcagaagtggaactggccacactcacgtgggtggactggtataataatcgacgattgctggaaaggctgggccatactcctccggcagaagcagaaaaagcttattatgcttccatcggaaacgatgatctggcagcctga

SEQ ID NO: 467435 - DNA, 207 bp, Shigella boydii; identical to SEQ ID NO: 467432

SEQ ID NO: 467436 - DNA, 207 bp, Shigella boydii; identical to SEQ ID NO: 467432

SEQ ID NO: 467437 - DNA, 210 bp, Shigella boydii
atggatgttggcctttccacaatgacaagatgggtcaaacaactgcgtgatgagcgtcagggcaaaacaccaaaagcctctccgataacaccagaacaaatcgaaatacgtaagctgaggaaaaagctacaacgcattgaaatggagaatgaaatattaaaaaaggctaccgcgctcttgatgtcagactccctgaacagttctcgataa

SEQ ID NO: 467438 - DNA, 225 bp, Shigella boydii; identical to SEQ ID NO: 133446

SEQ ID NO: 467439 - DNA, 378 bp, Shigella boydii; identical to SEQ ID NO: 465177

SEQ ID NO: 467440 - DNA, 1389 bp, Shigella boydii; identical to SEQ ID NO: 463923

SEQ ID NO: 467441 - DNA, 252 bp, Shigella boydii; identical to SEQ ID NO: 467330

SEQ ID NO: 467442 - DNA, 291 bp, Shigella boydii; identical to SEQ ID NO: 463080

SEQ ID NO: 467443 - DNA, 327 bp, Shigella boydii; identical to SEQ ID NO: 467252

SEQ ID NO: 467444 - DNA, 1140 bp, Shigella boydii
gtggcgtctgctgcatggcgagtcgaaaaaagctacatcaacagcctcggtgcactgactggcggtcaggcgctgcaacaggcgaaagcgggtattgaagcagtctatctgtcgggatggcaggtagcggcggacgctaacctggcggccagcatgtatccggatcagtcgctctatccggcaaactcggtgccagctgtggtggagcggatcaacaatactttccgccgtgcggatcagatccaatggtccgcgggcattgagccgggcgatccgcgctatgtcgattacttcctgccgatcgttgccgatgcggaagccggttttggcggtgtcctgaatgcctttgaactgatgaaagcgatgattgaagccggtgcagcggcagttcacttcgaagatcagctggcgtcagtgaagaaatgcggtcacatgggcggcaaagttttagtgccaactcaagaagctattcagaaactggtcgcggcgcgtctggcagctgacgtgacgggcgttccaaccctactggttgctcgtaccgatgccgcggatctgatcacctccgattgcgacccgtatgacagcgaatttattaccggcgagcgtaccagtgaaggcttcttccgtactcatgcgggcattgagcaagcgatcagccgtggcctggcgtatgcgccatatgctgacctggtctggtgtgaaacctccacgccggatctggaactggcgcgtcgctttgcacaagctatccacgcgaaatatccgggcaaactgctggcttataactgctcgccgtcgttcaactggcagaaaaacctcgacgacaaaactattgccagcttccagcagcagctgtcggatatgggctacaagttccagttcatcaccctggcaggtatccacagcatgtggttcaacatgtttgacctggcaaacgcctatgaccagggcgagggtatgaagcactacgttgagaaagtgcagcagccggaatttgccgccgcgaaagatggctataccttcgtatctcaccagcaggaagtgggtacaggttacttcgataaagtgacgactattattcagggcggcacgtcttcagtcaccgcgctgaccggctccactgaagaatcgcagttctaa

SEQ ID NO: 467445 - DNA, 216 bp, Shigella boydii
atgaaaacccgtacacaacaaattgaagaattacagaaagagtggactcaaccgcgttgggaaggcattactcgcccatacagcgcggaagatgtggtgaaattacgcgattcagtcaatcctgaatgcaccctggcgcaactgggcgcggcgagaatgtggcgtctgctgcatggcgagtcgaaaaaagctacatcaacagcctcggtgcactga

SEQ ID NO: 467446 - DNA, 252 bp, Shigella boydii; identical to SEQ ID NO: 467245

SEQ ID NO: 467447 - DNA, 1335 bp, Shigella boydii
atgccagattttttctcctttattaacagcgtcctttggggatcggtaatgatttacctgctcttcggcgcaggttgttggttcacttttcgcaccggatttgtgcagtttcgctacatccgccagtttggcaaaagtcttaaaaatagcattcatccacagccaggcggtttaacctcatttcagtcattgtgtaccagtcttgcggcgcgcgtgggtagcggcaacctggccggcgttgcgctggctattaccaccggtggacctagagccgtcttttggatgtgggttgccgcgtttatcggcatggcgacctcgtttgccgaatgttcccttgcacaactttataaagaacgtgacgtcaatgggcagtttcgtggcggaccggcatggtatatggcgcgcgggctggggatgcgttggatgggcgttctgttcgccgtctttttgctcatcgcctacggcataattttcagcggagttcaggcgaacgccgttgcccgagccctgagtttttcttttgattttcccccgctggtgacaggcattattctcgctgtctttgctctgctggcaatcactcgcggtcttcatggcgtcgcccggctcatgcaggggtttgtcccgttgatggcgataatctgggtgctgaccagcatggtgatttgcgtaataaatatcgggcaacttccccacgtcatttggtctatttttgagagtgcttttggctggcaggaagcggcaggcggcgcggcgggatataccttaagccaggcgattactaacggttttcagcgcagtatgttttccaatgaggcgggaatgggttcgacgccaaacgcggcagcggcagcggcgtcctggcctccgcatccggcagcgcaagggattgtccagatgattggcatttttatcgacaccctggtcatctgtacggcaagcgccatgctgatattactggcgggtaacgacacaacctacatgccgctggaaggtattcagcttatccagaaggcgatgcgggtgctaatgggttcctggggtgctgagtttgttaccctcgtggttattctgtttgccttcagctccatcgttgccaactacatttatgccgaaaacaatctcttctttttacgcctgaacacccctaaagcgatctggtgtttgcggatctgcaccttcgcaacggtcatcggcggcaccttgctaagccttccgctgatgtggcaactggcagatatcataatggcctgcggtaatgactccaacttactgatagtgttttatgttcagataatgcccgatgaccttgtcatgcagctccaccgattttga

SEQ ID NO: 467448 - DNA, 210 bp, Shigella boydii; identical to SEQ ID NO: 9340

SEQ ID NO: 467449 - DNA, 225 bp, Shigella boydii; identical to SEQ ID NO: 133446

SEQ ID NO: 467450 - DNA, 1386 bp, Shigella boydii
atgaaggccagtgataaaccccgccagctggcggtcccctttgcgagtaccggagataaaaaccgtatcccggacaaggcgacacagcagaccagagagagcggtaatgctgcgtatgattcaggttttcctccggtgaccatgacagcggtctcagcgggaggtataccgccacacggcaaggattttaacggtctgatgtacgatattaccgcagcaatacggttcgcccaggctggcggtttgtacacgtataatgccggttttgcgggggccattggtggatatgcaaaaggagccattctcgccggagtcgcaacaacagcggtctggctgaataccacagacgataacctgaccgatcctgaaggctccgacagtgcgggctgggtaaatcttcttgaggatccgaaaaggatattcctgcggcagaagaacaatctgtcagaccttcagaataaagggacggtacgggataatcttcaggtttacagtaaagagcagtcagatcaacgctatgttcatcgggaaggcgataaaataaccggagagctgaaaatccgtggtgttaatgcgctgaggattttcaacgaagcttttggcctgatttttcgtcgttcggaagagtgcctgcaccttattcccaccagtgaaggtcagggggaaaatggcgatattggtcccctgcgcccgttcaccattaatttgcggacgggtgaaatatccatgtcgcataaagtgtctgttggcggtggttcgcaggtcaatggtgcgctgggtatcggcgttcagaacgccctgggggggaattcaattgttcttggtgataatgacaccggatttaaacagaatggagacggtattctggatgtttatgctaatagtcagcgtgtattccgctttcagaatggagtggctattgcttttaagaatattcaggccggaactgccagaaaattcacgttatccagcgccaacaactccacgaaaaatgcagcgttttatttgtggggtaatccatccaggtctgttgttgcagagcttggcgatgattcaggctggcattttttcagccagaggaatacagataacagcatcacgttcgccgtaaacggacaggtaattccgttaaattacggaaacttcgatgcccgctataaatatcgaacagagggggtacaggatgtacggtatggccatgaaatgtattacagccccggcagtaacaccgtttcgtggagatttcgcgcaccttcgggacacgggctgtcagggatagcgatatcggataccggccgtgactcagcggataacgtcaacggcgtgtattaccgcccgcttcagaaactgattaatggcacctggtataacgtggcgagtgtttaa

SEQ ID NO: 467451 - DNA, 576 bp, Shigella boydii
ttgttttttggggttgaaatttccaatcatcaagaaaaactcccgctaaataaaacacatcatactgtagattttggcgccaatgcgtatatcattgatcatgactctccatatggatatatgacattaaccgatcactttgataatgctattccacctgttttttaccatgagcaccaatcatttttcttagataactttaaagaggttgtggatgaagttagcaggtatgtgcatggtaatcaggggaaaactgatgttccaatatttaacactaaagatatgaggcttggaattgggttgcatcttattgattttataagaaagagtaaagaacaaggattccgagagttttgttataacaaaaacattgatcctgttagtctggatagaattataaactttgtgtttcagcttgagtatcatataccaagaatgctaagtacagataacttcaaaaaaataaaactcagagacatatctttggaggatgcgattaaagcatctaattatgaagagattaacaataaagtgactgataaaaaatggctcatcaggcccttgcttattctttag

SEQ ID NO: 467452 - DNA, 573 bp, Shigella boydii; identical to SEQ ID NO: 467278

SEQ ID NO: 467453 - DNA, 156 bp, Shigella boydii; identical to SEQ ID NO: 463258

SEQ ID NO: 467454 - DNA, 189 bp, Shigella boydii; identical to SEQ ID NO: 467093

SEQ ID NO: 467455 - DNA, 372 bp, Shigella boydii; identical to SEQ ID NO: 463301

SEQ ID NO: 467456 - DNA, 327 bp, Shigella boydii; identical to SEQ ID NO: 5975

SEQ ID NO: 467457 - DNA, 126 bp, Shigella boydii; identical to SEQ ID NO: 467274

SEQ ID NO: 467458 - DNA, 327 bp, Shigella boydii; identical to SEQ ID NO: 467275

SEQ ID NO: 467459 - DNA, 600 bp, Shigella boydii; identical to SEQ ID NO: 462692

SEQ ID NO: 467460 - DNA, 714 bp, Shigella boydii; identical to SEQ ID NO: 467366

SEQ ID NO: 467461 - DNA, 771 bp, Shigella boydii; identical to SEQ ID NO: 465272

SEQ ID NO: 467462 - DNA, 342 bp, Shigella boydii; identical to SEQ ID NO: 462701

SEQ ID NO: 467463 - DNA, 327 bp, Shigella boydii; identical to SEQ ID NO: 5975

SEQ ID NO: 467464 - DNA, 243 bp, Shigella boydii
atgtcgcgtaaaggtaactgttacgacaacgctccgatggaaagcttctggggaacgctgaaaaatgagagcctgagccactatcgttttaataaccgggatgaagccatctcagtaatacgggaatacattgagattttctacaatcgtcagcgtcgtcactctcgtctggggaatatctccccggcagccttcagggaaaaatatcatcagatgactgctcaaaaaaagaacaaatggtag

SEQ ID NO: 467465 - DNA, 291 bp, Shigella boydii; identical to SEQ ID NO: 467055

SEQ ID NO: 467466 - DNA, 429 bp, Shigella boydii; identical to SEQ ID NO: 467383

SEQ ID NO: 467467 - DNA, 291 bp, Shigella boydii; identical to SEQ ID NO: 467055

SEQ ID NO: 467468 - DNA, 207 bp, Shigella boydii; identical to SEQ ID NO: 467427

SEQ ID NO: 467469 - DNA, 291 bp, Shigella boydii; identical to SEQ ID NO: 467055

SEQ ID NO: 467470 - DNA, 303 bp, Shigella boydii; identical to SEQ ID NO: 463318

SEQ ID NO: 467471 - DNA, 186 bp, Shigella boydii; identical to SEQ ID NO: 463326

SEQ ID NO: 467472 - DNA, 426 bp, Shigella boydii
gtgaaagaaagcaatcagcgatggtgctctgacgggttcgagttctgctgtgataacggagagagactgcgtgtcacgttcgcgctggactgctgtgatcgtgaggcactgcactgggcggtgactaccggcggcttcaacagtgaaacagtacaggacgtcatgctgggagcggtggaacgccgcttcggcaacgatcttccgtcgtctccagtggagtggctgacggataatggttcatgctaccgggctaatgaaacacgccagttcgcccggatgttgggacttgaaccgaagaacacggcggtgcggagtccggagagtaacggaatagcagagagcttcgtgaaaacgataaagcgtgactacatcagtatcatgcgtaagcgtcaacggagcaccgtattgacgcttatttattggtga

SEQ ID NO: 467473 - DNA, 195 bp, Shigella boydii; identical to SEQ ID NO: 463581

SEQ ID NO: 467474 - DNA, 168 bp, Shigella boydii; identical to SEQ ID NO: 462763

SEQ ID NO: 467475 - DNA, 789 bp, Shigella boydii; identical to SEQ ID NO: 466535

SEQ ID NO: 467476 - DNA, 183 bp, Shigella boydii
atgttggaagcatctcattttgtggaaactatcgaacaacatcaaggtttcaaaatcgcatgtctagaagaaatcgccttgtacaatggatggctaaccaaagatgaagtattcaaaataggtaatgagtacaaaaaaaatggttacggtcaatatcttctctctttggttaaggacaaataa

SEQ ID NO: 467477 - DNA, 1104 bp, Shigella boydii
atggaaaagccaatctttgtaacgcaacctaatttaccaccgctagaggagtttataccatatctggaaatcatttggcagaataagcaatttacaaataatggtccaatgcatcaaaaattagaaaaaaaattatgcgagtttcttggtgttgaatacattagtctatttaataatgggactattgcgcttataaccgcagtacaggctttgggtgttaaaggcgaagtaattaccacaccatattcctttgtagcaactgcacactccttggtcttaaatgggcttaaacctgtttttgtcgatattgatcccaaaaccttaaatatcgatccgagaagaattgaagaggcgattacccctgaaacgcaggcaataatgccggtgcactgctatgggaatccttgcgatacacaagctattgctgatattgcgcaaaaatataatttaaaggtcatttatgatgctgcgcatgcctttggcgttgaagatgatgatggaagtgttcttcgccatggagatctaagtgtcttaagtttccatgcaactaaagtgttcagcacttttgaaggcggagctattgtgtgtaatagtaaagaaatgaaagaaaaaattgatagactaaaaaactttggttatatcgatgaaactaacatcaatatcattggctctaatggaaaaatgagcgaagttaatgctgctttcggcttgctacaattagaacatatggatacttttctacgtggtcgaatgaatgctgacatgttttatcggcagaaacttaaagatatcactggtataagcatagtaattcccagcggccagaaaatatcgaatttttcatatttccctatattggttgaatctgattttccgttatctcgtgatgaactatttaattatctgaagaaccagaatatttttgcaagacgttatttttatcctgttataccagattttcaagcgtatttgaatgtaggtgaagtctgtgatgtcaagaatgcccgtgaaatagcctcgaaagtgctttgcctaccgatgcatgcagaattgagctctgatatcttagaatatattgtaagtacgattagggagattaaatga

SEQ ID NO: 467478 - DNA, 441 bp, Shigella boydii; identical to SEQ ID NO: 466548

SEQ ID NO: 467479 - DNA, 1809 bp, Shigella boydii; identical to SEQ ID NO: 466574

SEQ ID NO: 467480 - DNA, 150 bp, Shigella boydii; identical to SEQ ID NO: 466582

SEQ ID NO: 467481 - DNA, 132 bp, Shigella boydii; identical to SEQ ID NO: 466596

SEQ ID NO: 467482 - DNA, 591 bp, Shigella boydii; identical to SEQ ID NO: 466583

SEQ ID NO: 467483 - DNA, 330 bp, Shigella boydii
ttgagattttctacaatcgtcagcgtcgtcactctcgtctggggaatatctccccggcagccttcagggaaaaatatcatcagatggctgcttaaaaaaagaacaaatggtagtgtccgctattgccagtacacctcagactggctttgtcgtggcaacccggaaactcagaaggcgatttggtttaatctgcaaaacggcgtgcttatcggtgcgatcacgctgaatcaggggcgtgagattcgcccaattcgcaaatggatccagagcggcaaaacgtttgatgcgaaactgctgatagatgagaacatcgcgcttaaatcactgtaa

SEQ ID NO: 467484 - DNA, 603 bp, Shigella boydii
gtggcaagtaagtttcagaatcggttagtgggcacgatcgtgctggtggcgctgggggtgattgtacttccagggctgctggacgggcagaaaaaacattatcaggatgagtttgcggctatcccgctggttccaaaagcgggcgatcgcgatgagcctgatatgatgccagccgccacccaggcgttgccgacgcagccgccggaaggcgcagcggaagaggtgcgggcaggtgatgccgcagcaccgtcgctcgatccggccactattgcagccaataacaccgagtttgaaccggaacctgcaccggtcgccccaccgaagccgaaaccggtcgtggaagaaaaagcagcgccaacgggtaaagcctatgttgtgcaactgggtgcgctgaaaaatgccgataaagtgaatgagattgtcggtaagctgcgcggtgccggttatcgggtttatacgtcgccatccacgccagtgcagggtaaaattacccgtattctggttgggccggatgcctcgaaagataagctgaaaggttcgctgggtgagttgaagcaactttctggcttaagtggcgtggtaatgggctatacgccgaattaa

SEQ ID NO: 467485 - DNA, 474 bp, Shigella boydii; identical to SEQ ID NO: 466617

SEQ ID NO: 467486 - DNA, 333 bp, Shigella boydii; identical to SEQ ID NO: 466616

SEQ ID NO: 467487 - DNA, 261 bp, Shigella boydii
gtggtgattatctgggggctaacttttgcattggttcccgtcggctggtcaacgtggatcacccgctcgctggccgatcaggcagaaaaagccgggtctattcaggtggcggttattcagcttgctaatacctgtggcgcggcaatcggcggttatgcgctggataatattggtctgacttcgccgttgatgttgtccggcacattgatgttgctgactgcattgttggttactgcaaaggtgaaaatgaagaaatcctga

SEQ ID NO: 467488 - DNA, 513 bp, Shigella boydii; identical to SEQ ID NO: 466622

SEQ ID NO: 467489 - DNA, 510 bp, Shigella boydii; identical to SEQ ID NO: 466632

SEQ ID NO: 467490 - DNA, 372 bp, Shigella boydii; identical to SEQ ID NO: 11381

SEQ ID NO: 467491 - DNA, 441 bp, Shigella boydii; identical to SEQ ID NO: 466649

SEQ ID NO: 467492 - DNA, 303 bp, Shigella boydii; identical to SEQ ID NO: 458125

SEQ ID NO: 467493 - DNA, 138 bp, Shigella boydii; identical to SEQ ID NO: 466652

SEQ ID NO: 467494 - DNA, 312 bp, Shigella boydii; identical to SEQ ID NO: 466660

SEQ ID NO: 467495 - DNA, 276 bp, Shigella boydii; identical to SEQ ID NO: 466659

SEQ ID NO: 467496 - DNA, 615 bp, Shigella boydii; identical to SEQ ID NO: 466662

SEQ ID NO: 467497 - DNA, 564 bp, Shigella boydii; identical to SEQ ID NO: 466707

SEQ ID NO: 467498 - DNA, 261 bp, Shigella boydii
atgacgccaaccattgaacttatttgtggccatcgctccattcgccatttcactgatgaacccatttccgaagcgcagtgtgaggcgattattaacagcgcccgtgcgacgtccagttccagttttttgcagtgtagtagcattattcgcattaccgacaaagcattacgtgaagaactggtgacgctgaccggcgggcaaaaacacgtagcgcaagcggcggagttctgggtgttctgtgccgactttaaccgccattaa

SEQ ID NO: 467499 - DNA, 1113 bp, Shigella boydii
atgaccgccttaaataaaaaatggctttcgggtctggttgcgggtgctctgatggccgtctctgtcggcacgctcgcggctgaacaaaaaacactccacatttataactggtctgattatatcgcccctgacacggtggccaattttgaaaaagaaaccggtattaaagtcgtctacgatgttttcgactctaacgaagtactggaaggtaaattaatggcgggtagcaccggctttgacttggtggttccatctgccagctttcttgaacgccagttgactgcgggagttttccagccgctggacaaaagcaaattgccggagtggaagaatctcgacccggagctgctgaagctggtcgccaaacacgatcccgacaataaatttgctatgccctatatgtgggcgacgaccgggattggctataacgttgataaagttaaagctgtgctgggcgaaaacgcgcccgtcgatagctgggacttgatcctcaaacctgaaaatctggaaaaactgaaaagctgcggtgtctctttcctggatgcgccagaagaagtttttgctaccgtgttgaattatctcggcaaagatcccaacagcactaaagcggatgattacaccggaccggcaaccgatctgctgttaaagctgcgcccgaacattcgttatttccattcatctcaatacattaacgaccaggcaaacggcgatatttgcgtcgctatcggctgggcaggtgatgtctggcaggcgtcaaaccgcgcgaaggaagcgaagaatggagtgaatgtctcgttctcgattccaaaagaaggggcgatggcgttctttgatgtattcgccatgcctgcggatgccaaaaacaaagacgaagcctatcagttcctgaattacctgctgcgcccggatgtagtagcgcatatttccgaccatgtgttctatgccaacgccaataaagcagccacgccgctggtgagtgcggaagtccgtgagaacccgggtatttatcctccggcggacgttcgtgcgaagctattcactctgaaagtacaggatccgaaaatcgaccgtgtgcgcacccgcgcgtggaccaaagtgaagagcggaaaataa

SEQ ID NO: 467500 - DNA, 216 bp, Shigella boydii; identical to SEQ ID NO: 466648

SEQ ID NO: 467501 - DNA, 264 bp, Shigella boydii; identical to SEQ ID NO: 466667

SEQ ID NO: 467502 - DNA, 249 bp, Shigella boydii; identical to SEQ ID NO: 466668

SEQ ID NO: 467503 - DNA, 933 bp, Shigella boydii; identical to SEQ ID NO: 466671

SEQ ID NO: 467504 - DNA, 468 bp, Shigella boydii; identical to SEQ ID NO: 466669

SEQ ID NO: 467505 - DNA, 501 bp, Shigella boydii
atgggcgatccccgtgatgaagagaacgctctcggaccaatggctcgttttgatttacgtgatgagctgcatcatcaggtggagaaaaccctggcgcagggtgcgcgtttgttactgggcggggaaaagatggctggggcaggtaactactatccgccaacggttctggcgaatgttaccccagaaatgaccgcgtttcgggaagaaatgtttggccctgttgcggcaatcaccgttgcgaaagatgcagaacatgcgctggaactggctaatgatagtgagttcggcctttcagcgaccatttttaccaccgacgaaacacaggccagacagatggcggcacgtctggaatgcggtggggtgtttatcaatggttattgtgccagcgacgcgcgagtggcctttggtggcgtgaaaaagagtggctttggtcgtgagctttcccatttcggcttacacgaattctgtaatatccagacggtgtggaaagaccggatctga

SEQ ID NO: 467506 - DNA, 282 bp, Shigella boydii; identical to SEQ ID NO: 466736

SEQ ID NO: 467507 - DNA, 258 bp, Shigella boydii; identical to SEQ ID NO: 459939

SEQ ID NO: 467508 - DNA, 216 bp, Shigella boydii; identical to SEQ ID NO: 21701

SEQ ID NO: 467509 - DNA, 372 bp, Shigella boydii
gtgctggatgcactggagcaggcgttatgggcccgtcgaccgtccggcacggtccatcacagtgataaaggttctcagtatgtatcgctggcctacacacagcggcttaaggaagccggattactggcatcaacaggaagtacaggcgactcgtatgacaacgcgatggcggagagcatcaatggtctttacaaagcggaggtaatacaccgtaagagctggaaaaaccgtgcagaagtggaactggccacactcacgtgggtggactggtataacaatcgacgattgctggaaaggctgggccacatccctccggcagaagcagaaaaagcttattatgcttccatcggaaacgatgatctggcagcctga

SEQ ID NO: 467510 - DNA, 393 bp, Shigella boydii; identical to SEQ ID NO: 466694

SEQ ID NO: 467511 - DNA, 1635 bp, Shigella boydii
atgggcagtgaatattaccggaccctgcagaatggcggacgtcatgccgctgctgccgcacgggaacagcgccgcgcccttgcagaactgaacagtcagttgacggaaattcgcggttctgctgtcggaatggctggcgcatttgccggtgcctttgccaccggacacctgatttcgctggccgatgagtggggttccgtgaatgcccgtctgaaacaggcatctcagtcatcggatgaattctcgtcatcacagaaagtgctgatggatatcagtcagcgaacaggtaccgcgttttcggataatgcggccctgtttgcccgttcggctgcctcgatgcgtgaatatggttacagtgctgatgatgtgctgaaggtgacggaggccatttcgacaggactgaaactgtcaggggctggagttgcggaatccggttcggtgatcacccagttcagccaggcactggcacagggtgtactgcgtggcgaagaatttaatgctgttaacgaaaatggcgaccgggtgatccgcgcgcttgctgcggggatgggtgtggcccgtaaagatctgaaggcaatggcggatgacggaaaactgacagcggataaagtagtccctgcgttaatcagccagctggggatattacgtgatgaatatgcggccatgccggaaacggtttccggtagtatcacgaaggtggaaaacgcctttatggcctgggtgggcgaagtgaatgaggcctgcggggtgacaaaaatgctctccggcgtgctgaacggtgttgccggacagattgataatgtggcaacagctgtgggggcgctggttgccgtcggggttgcccggtactttggcaatatggcctccggagcgatgtctgccacggcaggacttgtgacggctgcacgtaatgaagttgcactggcggaagcacagttcaggggaacgcagattgccacggcgcgggcaagggcagccgtgtaccgtgctcagcaggccgtggcggcagcccgcgggacggagatgcagattgctgcagaggcccgtctggcggccacacaggaacgcctgaacagaaatattgctgccagaagcgccgcccagaatgcgctgaacagtacaacggcggtgggctcacgtctgatgagcggtgcgctggggctggttggtggcgtacccggactggtgatgctgggggctgcagcatggtacacgctgtaccagaatcaggagcaggccagggagtctgcgcgccagtatgcactgacgatagatgaaatcgcgcataaaacgccgtcaatgtctttgcctgaagcctcagataatgaaggacgaacacgggcggcgctgacagagcagaaccggctgattgatgaacaggctagtcgggtgaaatccctgcaggaagaaatcgcaggatatcagtatgttctggcgaacccgggctggacgaccggtgacggattcatgataaaccatctgacctcggtgaagaccgtaacggaagggcttgctcaggcaacagagcagcttgccgttgagcagtcccgtctggcactgatgcaggaaaaagcgcagtccattcaggatgtgcttgccgggctggaagaccgtcgtgtggcgttaattcgttag

SEQ ID NO: 467512 - DNA, 165 bp, Shigella boydii; identical to SEQ ID NO: 466698

SEQ ID NO: 467513 - DNA, 372 bp, Shigella boydii; identical to SEQ ID NO: 11381

SEQ ID NO: 467514 - DNA, 147 bp, Shigella boydii
atgacgcaacaaatcaccctcattaaagacaaaattctctccgataactatttcaccctgtggatttgcccctatatttccagacatctgttatcacttaacccattacaagcccgctgccgcagatattcccgtggcgagcgataa

SEQ ID NO: 467515 - DNA, 588 bp, Shigella boydii; identical to SEQ ID NO: 466701

SEQ ID NO: 467516 - DNA, 372 bp, Shigella boydii; identical to SEQ ID NO: 11381

SEQ ID NO: 467517 - DNA, 216 bp, Shigella boydii
atggcggaaaatcgtgttgaggccaacgcccataatgcgggcggttgcccggcatccaacgccattcatggccatatcaatgattttctggtgcgtaccgggttgagaagcggtgtaagtgaactgcagttgccatgttttacggcagtgagagcagagatcgcgctgatgtccggcggtgcttttgccgttacgcaccaccccgtcagtagctga

SEQ ID NO: 467518 - DNA, 267 bp, Shigella boydii
atgttgggacttgaaccgaagaacacggcggtgcggagtccggagagtaacggaatagcagagagcttcgtgaaaacgataaagcgtgactacatcagtatcatgcccaaaccagacgggttaacggcagcaaagaaccttgcagaggcgttcgagcattataacgaatggcatccgcatagtgcgctgggttatcgttcgccacgggaatatctgcggcagcgggcttgtaatgggttaagtgataacagatgtctggaaatatag

SEQ ID NO: 467519 - DNA, 216 bp, Shigella boydii; identical to SEQ ID NO: 5123

SEQ ID NO: 467520 - DNA, 216 bp, Shigella boydii; identical to SEQ ID NO: 10294

SEQ ID NO: 467521 - DNA, 1104 bp, Shigella boydii
atgagtcgtcattacggcttaatgatgcgcgttcactgtatccgctcaatttgccgtacgctgctgccgttgatgcaggaaaacgaaaagttgtatcaattgccgggtagtgaactgctgttagtgctgagcgggccggaaacggaagggcgactccagcatatggttaacatcctgaatagtcggcaaattcactggaacaataccgggctggatatgggctatggtgctgcctgggggcgttttgatggaaatcaggaaaccctgcaacccttgttggggcagttaagctggctggcggagcaatcctgcgcacatcatcatgtgctggcgctggatagcagagaggagatggtttccgggcagaccactaaacaggtgctattgctgaataccattcgcacggcgttagatcagggtgatttgctgctctacgcccagccaattcgcaacaaagagggtgaaggttatgatgagatcctcgcgcgactgaaatatgacggcggcattatgaccccggataagtttctgccccttattgctcagtttaaccttagcgcgcgttttgatttgcaagtgctggaatccttgttgaagtggctggcaacacacccttgcgacaaaaaaggaccgcgcttttcagtcaatttaatgccgctcacgctgctgcaaaagaatattgccgggcggattattcgtctgtttaagcgttatcacatctccccgcaggaggtcattcttgagatcaccgaggagcaggcgttttctaacgcagaaagcagcatgtacaacatcgagcagctgcataagtttggtttccggattgcgattgatgactttggcaccggctatgccaactacgaacggttaaagcgtttgcaggctgatatcatcaaaattgatggcgtctttgtgaaagatattgtcacgaacacgctggatgcgatgattgtgagatcaattaccgatctggcgaaagcgaagtcattgagtgtggtcgcggagtttgtcgagacgcaacagcagcaggctctattgcataagctcggggtgcaatatctgcaagggtatttgattggtcgcccgcagccattagctgattaa

SEQ ID NO: 467522 - DNA, 276 bp, Shigella boydii; identical to SEQ ID NO: 16135

SEQ ID NO: 467523 - DNA, 282 bp, Shigella boydii; identical to SEQ ID NO: 466727

SEQ ID NO: 467524 - DNA, 477 bp, Shigella boydii
atgtccggcagtgcttttgccgttacgcaccacgccttcagtagcggaacaggaaggacatctgatggaaatggaagccacgcaagcaccttaaaatcaccatcatacactaaatcagtaagttggcagcattacctgccttacccgccaacggtgaacacttactggcgacgtcgtggcagcacatattttgtatcaaaagtcggtgagcgttatcgccgtgatgtggcgcttattgttcgccagcagcaactgaaattaaacctgtccggaaggccggcaatagaaattattgcagagccaccggataagcgccgtcgtgacctggacaatatcctgaaggcaccactggatgtactgacgcatgcggggctgctcatagacgacgagcagtttgatgaaattaatattgtgcgcggtcagcttgttcctggtgggcggttggggataaaaatcacagaactggagtacgcatga

SEQ ID NO: 467525 - DNA, 216 bp, Shigella boydii; identical to SEQ ID NO: 21701

SEQ ID NO: 467526 - DNA, 528 bp, Shigella boydii; identical to SEQ ID NO: 466734

SEQ ID NO: 467527 - DNA, 309 bp, Shigella boydii
atgctttttggttatggactgctgcaactgctgtttatgctacgtctgatgccatggtatctctcccagccatttaatgcttcattctggagtttctcgttcggcgtatctgcactggcaaccaccggtttgcatctggggagtggcagcgaaaatggatttttccatacgctggcggtaccgctgtttatctttaccaattttattattgcaatactgctcatccgtacttttgcgcttctgatgcagggaaaattgttagtcagaaccgagcgcgctgttttaatgaaagcagaggacaaagaatga

SEQ ID NO: 467528 - DNA, 372 bp, Shigella boydii; identical to SEQ ID NO: 11381

SEQ ID NO: 467529 - DNA, 372 bp, Shigella boydii; identical to SEQ ID NO: 11381

SEQ ID NO: 467530 - DNA, 951 bp, Shigella boydii
gtgaatttccaacaactaaagataatccgcgaggctgcacgtcaggattacaacctgacagaggttgcgaatatgctttttacctcacagtccggcgtcagccgtcatattcgggaactggaggatgaacttggcatcgaaatatttgttcgacgaggtaagcgactgctgggcatgactgaaccgggcaaagcattactggtcattgcagaacgtattctgaatgaagccagtaatgttcgtcggcttgcagacctgtttaccaacgatacgtctggcgttctcactattgcaacgacgcatactcaggcacgttatagtttggcagaggtcattaaatcttttcgcgaacttttcccggaggttcggctcgagctaatccaggggacgccacaggaaattgcgacgttgttgcataatggtgaagctgatattggtatcgccagcgagcgtttgagtaatgacccgcagctcgtcgccttcccgtggtttcgttggcaccatagtttgcttgttccactcgatcatcccttgacgcaaattacaccattgacgctggaatcaatagcgaagtggccgttaatcacttaccgacaggggattacggggcgctcacgtattgatgacgcatttgcccgcaaaggtttgctggcagatattgtattaagtgcgcaggattctgatgtcattaaaacctatgttgctcttgggcttgggatcggaatagttgccgaacaatccagcggtgaacaagaggaaaagaatttaatccgcctggatacgcggcatctttttgatgctaatactgtctggttgggactgaagcgaggacaacttcagcgtaactatgtctggcgctttctggaactttgtaatgcaggactttcagttgaggatatcaagcggcaggtgatggaaaacagtgaagaggaaattgattatcagatatag

SEQ ID NO: 467531 - DNA, 345 bp, Shigella boydii; identical to SEQ ID NO: 466753

SEQ ID NO: 467532 - DNA, 312 bp, Shigella boydii; identical to SEQ ID NO: 466748

SEQ ID NO: 467533 - DNA, 183 bp, Shigella boydii
atggcaaatgcctgtgcctggcggcacgacgctaaaccgactgaacgcttgctttccccatttcaggaacacataacgttcgtggttgcgctccatttccaggcgtacgttttcttcaaatgcctcatcatcaccaaaacgatcgacggtcaccgagtggtcaatgaccaggtcgaccggtga

SEQ ID NO: 467534 - DNA, 516 bp, Shigella boydii
atgggcgactggctgcgtcagcatccacagcagcatatttcgatcaatcttgaatccaccgtgctcacctcggaaaaaatcccgcaattgctgcgtgaaatgatcaatcactatcaggttaatcccagacagatcgcgcttgaactcactgaacgcgagtttgccgatccgaaaaccagcgccccgataatttctcgctaccgggaggcgggccatgaaatttatcttgatgattttggtacgggatattcaagtttaagttatttacaggatctggatgtcttcattctgaagatcgataaatctttcgttgatgcgctggaatataaaaatgtcacgccgcatatcatcgaaatggcaaaaacactgaaactgaaaatggtagcggagggaatcgaaaccagtaaacaagaagagtggctacgccagcatggcgtgcactacggtcagggctggctctacagcaaggcattaccgaaagaagatttcttacgctgggccgagcaacatttgtga

SEQ ID NO: 467535 - DNA, 372 bp, Shigella boydii; identical to SEQ ID NO: 11381

SEQ ID NO: 467536 - DNA, 372 bp, Shigella boydii; identical to SEQ ID NO: 11381

SEQ ID NO: 467537 - DNA, 243 bp, Shigella boydii
atgctgacagatatctttaacagtaattaccagtgttatggctatcgtcgcctgcatgcgatgctcaggcatgagggggggctgctatcagaaaaggttgtacgcagacttatggtggaggaacagcttgtcgtcagtcgtaaccgtcgtcgtcgctacagctcatattgtggagaaatcggaccggctccggataaccttatcgccagagattttaaggcggagcaacctaatcagaaatag

SEQ ID NO: 467538 - DNA, 372 bp, Shigella boydii
gtgctggatgcactggagcaggcgttatgggcccgtcgaccgtccggcacggtccatcacagtgataaaggttctcagtatgtatcgctggcctacacacagcggcttaaggaagccggattactggcatcaacaggaagtacaggcgactcgtatgacaacgcgatgtcggagagcatcaatggtctttacaaagcggaggtaatacaccgtaagagctggaaaaaccgtgcagaagtggaactggccacactcacgtgggtggactggtataacaatcgacgattgctggaaaggctgggccatactcctccggcagaagcagaaaaagcttattatgcttccatcggaaacgatgatctggcagcctga

SEQ ID NO: 467539 - DNA, 1077 bp, Shigella boydii; identical to SEQ ID NO: 466788

SEQ ID NO: 467540 - DNA, 213 bp, Shigella boydii; identical to SEQ ID NO: 466777

SEQ ID NO: 467541 - DNA, 1056 bp, Shigella boydii
gtgcgggtattacttcgacctgttctggtaccggaactcgggctggtgatcgttaagccgggccgtgaatccatgccggtattccacaatacccgggtactggtggagccggaaccgaaaagcatgcgtaatctgtcgtccggggtcgttcctgccgttcgccagccgctggcggaggataaatcattactgccatttttcagcgacgaacgagtgattcgtgctgctggtggcgctggcgcattgtctgactggctgttgcgccatattaaatcctgccagtggccacacggcgattatcaccacagtgaaaccgtcattcaccgttatggtaccggcgcaatggtgttgtgctggcactgcgacaaccagctgcgcgaccagacctccgaatcactcgggcaacttgctcaccaaaacctgtctgcatggatgattgacgtcatacgccatgcaatgaatggctcgcaggaacgggaattatcgctggctgaattatcctggtgggaggtccgcaatcaggtggcggacgcgctaccggaagcggtattacgtcgttcgcaggggttgcgtgcggaaaaaatccgctcaatgtaccgtgaaagcgacatcgtaccgggagagcagatcgccaccagcatactgaagcagcgcacaaaaaatcttgcgccgctgcctcacgcccaccagcaaaacccgccacaggaaaagacggtggtcagcattgccgttgatccggagtcaccggctcagtatctccagcgccagaaatcacaacgggaagagatgcctgtatacacgcgctgggtaaaaacgcagaaatgcatgacgtgtggcaatcaggcagatgatccgcatcacatcattggtcatggactgggagggatgggaacaaaggctgatgatttgtttgttattccgctgtgccgtaaatgccatagcgaactacacgccggggtaaaagattttgaagaaaaacacggcagccagctgttgttgctgattcgttttttaatgcacgcgagaaattcgggtgttctgaagtggaaagcataa

SEQ ID NO: 467542 - DNA, 372 bp, Shigella boydii
gtgctggatgcactggagcaggcgttatgggcccgtcgaccgtccggcacggtccatcacagtgataaaggttctcagtatgtatcgctggcctacacacagcggcttaaggaagccggattactggcatcaacaggaagtacaggcgactcgtatgacaacgcgatggcggagagcatcaatggtctttataaagcggaggtaatacaccgtaagagctggaaaaaccgtgcagaagtggaactggccacactcacgtgggtggactggtataacaatcgacgattgctggaaaggctgggccatactcctccggcagaagcagaaaaagcttattatgcttccatcggaaacgatgatctggcagcctga

SEQ ID NO: 467543 - DNA, 693 bp, Shigella boydii
atggctgttcaaatttctgtcgaaaacctttcccctgttacctataaccagatccccgtaattactactgaactgttggctcacctttacggaacaaaaatcaaaaacatttctgataactttctgaacaacacgacgcgattcatgcccggaaagcattactttaaaattgaaaaaaacgaattacgcgagtttaagaacagacccgaaacaatcgggttagttggtaaaaatgcccgctccctcatcctctggacagaacgcggcgcagcccgtcacgcaaaaatgctcgaaaccgatcgggcgtgggaggtattcgaaaaactggaagactgctatttcagccagggaaaaacagcaccaaccgaacagcagccgcagattcagccacaattcacagccgaagaaatcatcctcctttgctacatgcagctctggatggaaaaagcccaggacctcagcaaacacctgtatcccattatgaaagagctgaactcctcatacacgaacaagctgtatgacattgcgtttgtgaaccgccccgggtttcctggagagtgttttatctgtgaactcaggctgccagatcatcgcttccgatggaagcataataagctttttctgcttctgccggaggagtatggcccagcctttccagcaatcgtcgattgttataccagtccacccacgtga

SEQ ID NO: 467544 - DNA, 267 bp, Shigella boydii; identical to SEQ ID NO: 462029

SEQ ID NO: 467545 - DNA, 867 bp, Shigella boydii; identical to SEQ ID NO: 466812

SEQ ID NO: 467546 - DNA, 432 bp, Shigella boydii; identical to SEQ ID NO: 466800

SEQ ID NO: 467547 - DNA, 372 bp, Shigella boydii; identical to SEQ ID NO: 11381

SEQ ID NO: 467548 - DNA, 129 bp, Shigella boydii
atgactaaaaatactcgtttttcccccgaagtccgtctgaagtggcacactgaatttggccacctgaacagaggtgatatgctcacctcagaacaacacaggtgctccaatgaaaaaaagaaattttag

SEQ ID NO: 467549 - DNA, 303 bp, Shigella boydii; identical to SEQ ID NO: 458125

SEQ ID NO: 467550 - DNA, 771 bp, Shigella boydii
gtgcaattagaatcttgcgaatggctgcaatacctgaatctcagccataatcaattaactgatattgttgcaggtaataaaaatgaactcttactgctggatctatcccataataaactaacaagtttacacaatgacttatttcccaacttgaatacgttacttattaacaacaatttgctttctaaaattaaaatattctatagcaacttctgcaatgttcagacattaaacgctgctaacaaccagttgaaatatataaatcttgatttcctgacttatcttccatctatcaaaagtttaagactggacaataataaaataacccacattgatactaataatacatccgatattggaactttattccccataataaaacagagcaaaaacttaaattttttaaatgtttctgggaagaacaattgccctactatgcagctcatgttatttaatttgttttccccagcacttaagcttaatactggcctggcaattctttcgcctggtgcatttgaagttcactctgacggaatagatgtggataacgaattgtttcactatcctattaaaaaagcatataccccatataatatacacacttacaagacagaggaagttgtaaaccagaggaatataaaagttaaaaacatgaccttagatgaaataaacaatacttactgtaataacgattattacaatcaggcaataagagaggaaccgatagaccttctggacagatcgttttcctccagttcatggcctttttag

SEQ ID NO: 467551 - DNA, 441 bp, Shigella boydii
atggctaaccatctgtcagaaatcgcagcagcaggcgaaaaggcacaacagaagtcccgggataatctggggctgaaaagtgcggccacgatggaagcacagagcgacatttacgaccggacaaaaggccgtctggcgatacccggcgcattcggctttgggtgtgcttttctgcctgaagatgttatccgttttgacactaagagtgatttcctggcctgggtaaggaatgcgctgccaggtgagtattccgttgctggccgcctgggcatcatacccgacacacggtttgaaggggtgctcagcatccggtggactgatgcacgccctgagacaacagaaccgcggtacagagccaaatcccttactttttacggcattaacggccccatttatcacacccgctactgctactggcccatatccagactgactgggtga

SEQ ID NO: 467552 - DNA, 372 bp, Shigella boydii; identical to SEQ ID NO: 467542

SEQ ID NO: 467553 - DNA, 216 bp, Shigella boydii; identical to SEQ ID NO: 10294

SEQ ID NO: 467554 - DNA, 216 bp, Shigella boydii; identical to SEQ ID NO: 10294

SEQ ID NO: 467555 - DNA, 372 bp, Shigella boydii; identical to SEQ ID NO: 11381

SEQ ID NO: 467556 - DNA, 480 bp, Shigella boydii; identical to SEQ ID NO: 463183

SEQ ID NO: 467557 - DNA, 372 bp, Shigella boydii; identical to SEQ ID NO: 11381

SEQ ID NO: 467558 - DNA, 243 bp, Shigella boydii; identical to SEQ ID NO: 464973

SEQ ID NO: 467559 - DNA, 351 bp, Shigella boydii
ttgcagaggaaaacgctgtcgaaacatgcggagatggcgaaggcgttcgactatatcctgaatcactggaatgcgctgaacgagttctgtcgtgacggctgggtggaaatagacaacaacatcggtgaaaacgcgttacgatcggtggcggttggaagaaaaaattatctctttttcggctcagacaagggaggagaaagtgcggcgatcatctacagtctgctggtcacctgcaaacagaacgaagtggagccggaggactggttgcgcgaagtgatcgagaagctcaatgactggccgtcgaaccaagtgcatgaactgctgccctggaacttctcgtctgtaaaataa

SEQ ID NO: 467560 - DNA, 303 bp, Shigella boydii; identical to SEQ ID NO: 458125

SEQ ID NO: 467561 - DNA, 372 bp, Shigella boydii; identical to SEQ ID NO: 11381

SEQ ID NO: 467562 - DNA, 303 bp, Shigella boydii; identical to SEQ ID NO: 458125

SEQ ID NO: 467563 - DNA, 303 bp, Shigella boydii; identical to SEQ ID NO: 458125

SEQ ID NO: 467564 - DNA, 216 bp, Shigella boydii; identical to SEQ ID NO: 21701

SEQ ID NO: 467565 - DNA, 351 bp, Shigella boydii; identical to SEQ ID NO: 463831

SEQ ID NO: 467566 - DNA, 246 bp, Shigella boydii
gtggcccgcctgtccccggtggtcatgctggcaaaatctgtcgcggcacaaacacatatggcgtggagcgatgccgataatcagcaggtgaaactgtcgatgccggaactggaagaactggcggcagcaatggtgcaggcgcaggtcgatcgcaacgatgagatttatcgccgtcagcgtgaaatgaaagaggagctgagcggtctggatgatttggcttcaattcgggcgtttgacgttgagtaa

SEQ ID NO: 467567 - DNA, 303 bp, Shigella boydii; identical to SEQ ID NO: 458125

SEQ ID NO: 467568 - DNA, 372 bp, Shigella boydii; identical to SEQ ID NO: 11381

SEQ ID NO: 467569 - DNA, 339 bp, Shigella boydii
atgttcttcatgctaatccccacaattattgtacttgctcgtaattttggtggagttggcgcgggttatgcctggttaatagttaatgtcttttatctttttgtatggactgcattggttcatcataaattaatacccggattacatctctcttggttaatgagtatcggtatgataacaattcctaccggtattattgtattttttctctcctttattgtccgatttagcggtaatagattgcatgacataattgtgctgggcttaatatcaattttggctctgatggtttcaatagtatcatgctggctaatcaaaagaatgaatctcggggtgtaa

SEQ ID NO: 467570 - DNA, 216 bp, Shigella boydii; identical to SEQ ID NO: 5123

SEQ ID NO: 467571 - DNA, 372 bp, Shigella boydii; identical to SEQ ID NO: 11381

SEQ ID NO: 467572 - DNA, 372 bp, Shigella boydii; identical to SEQ ID NO: 11381

SEQ ID NO: 467573 - DNA, 372 bp, Shigella boydii; identical to SEQ ID NO: 11381

SEQ ID NO: 467574 - DNA, 372 bp, Shigella boydii
gtgctggatgcactggagcaggcgttatgggcccgtcgaccgtccggcacggtccatcacagtgataaaggttctcagtatgtatcgctggcctacacacagcggcttaaggaagccggattactggcatcaacaggaagtacaggcgactcgtatgacaacgcgatggcggagagcatcaatggtctttacaaagcggaggtaatacaccgtaagagctggaaaaaccgtgcagaagtggaactggccacactcacgtgggtggactggtataacaatcgacgattgctggaaaggctgggccatactcctccggcagaagcagaaaaagcttattatgcttccatcggaaatgatgatctggcagcctga

SEQ ID NO: 467575 - DNA, 267 bp, Shigella boydii; identical to SEQ ID NO: 467518

SEQ ID NO: 467576 - DNA, 240 bp, Shigella boydii; identical to SEQ ID NO: 466831

SEQ ID NO: 467577 - DNA, 216 bp, Shigella boydii; identical to SEQ ID NO: 21701

SEQ ID NO: 467578 - DNA, 297 bp, Shigella boydii
atgcgtaaagtttgtgcagccattttgtccgcagccatctgtctgtccgtatccggtgcgcctgcatgggcgtctgaacatcagtccacactgagcgcggggtatcttcatgcccgtacgaacgctcccggcagcgataatctgaacgggattaacgtgaaataccgttatgagtttacggacgcgctggggctgattacgtccttcagttatgccaatgctgaagatgagaaaaaacgcactacagcgatacccgctggcatgaatattccgttcgtaaccgctggttcagcgtaa

SEQ ID NO: 467579 - DNA, 306 bp, Shigella boydii
atggcggggccgtctgtgcgcgtgaatgaatggttcagcgcgtatgcgatggcgggtgtggcttacagccgtgtgtcgactttctccggggattatctccgcgtaactgacaacaaggggaaaacgcacgacgtgctgaccggaagtgatgacggtcgccacagcaacacgtctctggcgtgggggctggcgtgcagtttaacccgaccgaatccgtggccattgatattgcttatgaaggttccggcagtggcgactggcgcactgacggtttcatcgtgggtgtcggttataagttctgattag

SEQ ID NO: 467580 - DNA, 129 bp, Shigella boydii
atggcggaaaatcgtgttgaggccaacgcccataatgcgggcggttgcccggcatccaacgccattcatggccatatcaatgattttctggtgcgtaccgggttgagaggcggtgtaagtgaactgtag

SEQ ID NO: 467581 - DNA, 156 bp, Shigella boydii
atgactaaaaatactcgtttttcccccgaagtccgtcagagggcgattcgtatggttctggaaagtcagggcgaatatgactcacagtgggcggcaatttgttccattgccccaaagattggctgtacaccggagactctgcgtgtctgggtatga

SEQ ID NO: 467582 - DNA, 129 bp, Shigella boydii
atggcggaaaatcgtgttgaggccaacgcccataatgcgggcggttgcccggcatccaacgccattcatggccatatcaatgattttctggtgcgtaccgggcagagaggcggtgtaagtgaactgtag

SEQ ID NO: 467583 - DNA, 303 bp, Shigella boydii; identical to SEQ ID NO: 464103

SEQ ID NO: 467584 - DNA, 543 bp, Shigella boydii; identical to SEQ ID NO: 464540

SEQ ID NO: 467585 - DNA, 132 bp, Shigella boydii; identical to SEQ ID NO: 466066

SEQ ID NO: 467586 - DNA, 543 bp, Shigella boydii; identical to SEQ ID NO: 464540

SEQ ID NO: 467587 - DNA, 624 bp, Shigella boydii
atggcagtacgaaaactcaccactgggaaatggctttgcgaatgttaccctgccggacgaagtgggcgtcgtgtgcgtaaacaattcgccaccaaaggcgaagcactggcttttgagcgccacacgatggaagaaaccgaagcaaagccctggctgggtgaatcagtggatcgtcgaacactgaaagacgtggttgagctatggttcaaactacatggtaaatctctgacagctgggcagcatgtctatgacaaattgctgttgatggttgacgctctgggcaatcctcttgcaaccgatctcacctctaaaatgtttgcccactatcgagataaacgcctgacaggcgagagctacttcagcgagaaatggaagaaaggagcaagcccggtcaccattaacctggagcaaagctatctaagtagtgtttttagcgaactatcccgtctgggcgaatggtcgtatccgaacccactggagaacatgcgaaaattcaccatcgcagaaaaagagatggcatggcttacccatgagcagattgttgaattgctggctgattgcaaacgtcaggacccaattctggcactggtagttaagatatgcttaagcacaggcgcacgctag

SEQ ID NO: 467588 - DNA, 657 bp, Shigella boydii
gtgataaccgcactcatcaccgcgataggtccaggtgcaggtgttggccagcatgatacgtcccggaaaaacagcgccatccgtttccgtcggcgtggacagtacaaaggaggcactcaccgcgctcagttcgctgcactgctcgatgcgccagcggctgatcacctcctgctccggatcggcgtcactgtttccgttgacgaagttcaccgcatccagaaaacgggcgtaaaccttacgccggaccaccgttccgccgaccagactctgcatatcttccaccataccggtgaccataccgtacaggttagaaaccgtcagcgtggggcgcgtactggtgcctttgccattcagttcaaaaccactcccctgaatgggatacggctgatactgtcgcccctgccaggtgaccggctcacctttttcgttctgctcattacagaaaaaataacgttctccaccgacctctgtcagatcgatttcccagagcaccacgctggccgactgctccgcacgggtgcattcattcagtgtttcctgccggatatcctgcatcagttcaccacctgttcaaactctgcgctgaactcaacacgcagcatactgacccgcgacgaccattttgcgcaggtcacctttatctgccgccactcataa

SEQ ID NO: 467589 - DNA, 213 bp, Shigella boydii; identical to SEQ ID NO: 466090

SEQ ID NO: 467590 - DNA, 237 bp, Shigella boydii
atgcttaatccgttgctcctcaacatttaccgtttatttcagcgtaaaaaaatatcaacacccacagttgggcagtggtacaccacgccagcagggcatgttctacgtgtcagcctggttgaccgtgaatgtcagaaggtgatttgtgaaccgctgggccgtaattaccgcgtcagtatgccgcttatagcctttcgctccggaaaaaacatgaagcatctcggaggtgcagcatga

SEQ ID NO: 467591 - DNA, 207 bp, Shigella boydii
atgcgaaagctgaaaatgatgctcttcggcgcaagcttgataatggtggtcgggtgttcgtcaaaggaaaatgccctgtgccatcctcagccgaaacctccagcgcctccggcatgggcaatgatgccaccgtcgaactctctccagttgctggacgaaacgttctcggtatccgggacggaatcatcagcgaccaaacagcactga

SEQ ID NO: 467592 - DNA, 543 bp, Shigella boydii; identical to SEQ ID NO: 464540

SEQ ID NO: 467593 - DNA, 795 bp, Shigella boydii
atgaacctggcccgctatctggttattcaggggatcaaaagtaaaaagattcgtgcgcgctgtgcgctacgcccattggatgttgcaggcttgagccagcttctggtgcaggtttccaacttgattgtcgattgcccggaaattcagcgtctggatattcatcctttgctggcttctggcagtgaatttaccgcgctggatgtcacgctggatatctcgccgtttgaaggcgataacgagagtcggctggcagtgcgcccttatccgcatcagctggaagaatgggtagaattgaaaaacggtgaacgctgcttgttccgcccgattttgccagaagatgagccacaacttcagcaattcatttcgcgagtcaccaaagaagatctttattaccgctactttagcgagatcaacgaatttacccatgaagatttagccaacatgacacagatcgactacgatcgggaaatggcgtttgtagcggtacgacgtattgatcaaacggaagagatcctcggcgtcacgcgtgcgatttccgatcctgataacatcgatgccgaatttgctgtgctggttcgctcggatctcaaagggttaggcttaggtcgacgcttaatggaaaagttgattacctatacgcgagatcacggactacaacgtctgaatggtattacgatgccaaacaatcgtggcatggtggcgctagcccgcaagctcgggtttaacgttgatatccagctcgaagaggggatcgttgggcttacgctaaatcttgcccaacgcgaggaatcatga

SEQ ID NO: 467594 - DNA, 321 bp, Shigella boydii
ttggcagcattacccaaatttgttcgccatcagtcagacgattacccgcataaccccaacactgaggacttaagccaattctcttatacggtgagaaataacgattattcgcttgtctatacagtagaaaacaatcagttaggtctctacaaactgacggatctacagcaaaaagataaccttgccgccgccaatccgcaggtcgttaaagagatgcaaggcgtggtaagagagtttatcgacagcagccagccaccgcttagcgaggtaaatcaggagaagtttaacaatatcaagaaagcactaagcgaagcgaaataa

SEQ ID NO: 467595 - DNA, 165 bp, Shigella boydii; identical to SEQ ID NO: 466100

SEQ ID NO: 467596 - DNA, 705 bp, Shigella boydii; identical to SEQ ID NO: 466103

SEQ ID NO: 467597 - DNA, 180 bp, Shigella boydii; identical to SEQ ID NO: 464650

SEQ ID NO: 467598 - DNA, 543 bp, Shigella boydii; identical to SEQ ID NO: 464540

SEQ ID NO: 467599 - DNA, 291 bp, Shigella boydii; identical to SEQ ID NO: 466110

SEQ ID NO: 467600 - DNA, 411 bp, Shigella boydii; identical to SEQ ID NO: 466120

SEQ ID NO: 467601 - DNA, 1050 bp, Shigella boydii
gtggcgaaaaatctgcaatggagccacgatgctaaatgcctgaaatccggtcaactggaaggcatggaaattaaggctgatttaagccagtccgcattagtcatttcattgccacaggcttacctcgaatatacttatcccgactgggatccgccttcacgttgggatgacggcatctccgggatcgtcgcggactacagcatcaacgcacaaacccggcacgaagaaaatggcggtgatgatagtaacgagatcagcggcaacgggacggtcggggttaacctggggccgtggcgtatgcgtgctgactggcagactaactatcaacatactcgcagtaatgatgacgatgaattcagaggcgatgaaactcaaaaaaaatgggagtggagtcgctactatgcctggcgggcgttaccatcattaaaagccaaactggcgctgggcgaggattacctcagatccgatatttttgatggttttaactatgttggtggcagtgtcagtactgacgatcaaatgttgcctcccaatctgcgcggctacgcgccagacatttccggcgtggcacacaccacagcaaaagtgaccgtcagccagatggggcgtgtgatttacgaaacgcaggttccggctggaccgtttcgtattcaggatcttggtgattctgtctccggtacgttgcatattcgcattgaagaacagaacggccaggtgcaggaatatgacatcagcaccgcctcgatgccatacctcactcgtccaggtcagattcgctataagatcatgatgggccgtccgcaagagtggggacaccatgtcgagggtgaattttttctggtgctgaagcttcctgggggatcgctaacggctggtcgttatatggcggcgcactgggagatgaaaactatcagtctgcggcgcttggcgtcggtcgcgatttgtctacattcggcgcggtcgcgtttgatgttactcactcgcacaccaaactggataaagacaccgcttatggcaaaggttcgctggacggtaactccttccgtgtga

SEQ ID NO: 467602 - DNA, 378 bp, Shigella boydii
atggacgaacagtggggatacgtcggggctaaatcgcgccagcgctggctgttttacgcgtatgacaggctccggaagacggttgttgcgcacgtattcggtgaacgcactatggcgacgctggggcgtcttatgagcttgctgtcaccctttgacgtggtgatatggatgacggatggctggccactgtatgaatcccgcctgaagggaaagctgcacgtaatcagcaagagatatacgcagcgaattgagcggcataacctgaatctgaggcagcacctggcacggctgggacggaagtcgctgtcgttctcaaaatcggtggagctgcatgacaaagtcatcgggcattatctgaacataaaacactatcaataa

SEQ ID NO: 467603 - DNA, 405 bp, Shigella boydii; identical to SEQ ID NO: 464304

SEQ ID NO: 467604 - DNA, 3042 bp, Shigella boydii
atggaccagatagccaacctggtcattgatttggggattgatgcggcagagtttaaaaatgaaattccccgtatcaaaaaccttctgaatggtgcagccggtgatgcagaacggtcttctgcccgtatgcagcgttttatggagcgtcagactcaggcggcccggcagacaatgcatgcggcttcttcggctgcaacagcagcatcagcccatgcgcagacggtggagaagaatgcacgggctcatgaacgcatggcccgtgaggtggaacaaacccgtctgcgcgtggatgccctgaatcagaaaatgcgcgaggaacaggcgcaggccagggcactggcggaggcgcaggataaagcggctgccgccttttatcgccagattgacagtgtgaaacaggccggtgcggggcttcaggaattacagcgtattcagcagcagatccgacaggccagaaacagtggcggggttggtcagcaggattatctggcgctgatttcggagatcacggcgaaaacccgtgccctgacgcaggcagaggaacaggccacccggcagaaagcggcgtttatccgccagcttaaagagcaggcaacccgccagaatctgtcgtcttctgagttgcttcgcgccagggcggctcagctgggggtaagcagtgctggagaagtgtatatccgcaaaatggagcgggcaggaaaagccacacattcgctggggctgaaaagtgcggcagcccggcgggagctgggggtgttaatcagtcagatggcgcgcggcaattttggtgcgctgaggggatccgggataacgctggctaaccgtgccggatggacaggcgcactgatgtcgccgaaaggcatgatgactggcggcgttattggcggacttgtcgcggcggtcctgggtctgggtaaagcctggcatgacggccggaaggagggcgaggaatttaaccgtcagctggcgctgacgggacattatgccggtgtcactgtcgggcagttgtggaaactcagccgggccatatccgggaatggtatcacgcaacatgcggcagccggtgcgctggcacaggtggtgggcagtggggcatttcatggaaacgatattggtatggtggcgaaagctgccgcacagatggagcgatcggttggccagtcggtcagcgataccataaatcagtttaagcggctgaaggatgatcctgtaaatgccgcgaaggcgctggacaatgcgctgcattttttgactgccactcagcttgagcagatacgcgtccttggggagcaggggcggtccagtgatgcggcccggatcgccatgtctgcgctggcagaggaaaccggtaaacgcacatctgatattgataataatctcaatgcgctgggtagtacgctgaagtatctgtctgatttatggaatcggttctgggatgcggccatgaatattggtcgtgaagactcgctggatgcgcagattgatgcgttacaggaaaaaattcagcgcgcgaaaaaatatccgtggacaaacgcctccacacaggtggagtacgatcagcagcgtcttaacgatcttcaggagaaaaaacgccggaaggatttgcaggatgcaaaagcgcaggcagaacggaattaccaggagcaacagaaacgccggaatgctgaaaatgccgtgctgaaccggatgaatgaaacggaagctgcacgacatcagcgggaaattgcgcgtattaatgccatgcagtacgccgaccaggctgtcagggatgcggcgatacagcgtgaaaatgaacgttacgaaaaagccattaagaaaaatacacgggcaacccgtaatgatgaggccacccggttattgctgcagtacagtcagcagcaggcacaggtggaagggcagattgctgctgccagacagtcagcaggcattgccactgaaaggatgactgaagcgcataaacagcttctggccctgcagcagcgcatcagcgacctggacgggaaaaagctgacggcagatgaaaagagtgtgctggcccgtaagaatgagctgattcaggcgctgacgctgctggatgtgaaacagcaggagctgcagaaacagacagcgcttaacgacctgagaaaaaaaacggttcagctgaccagccagctggcagacaaagaacgtgcactgcgtgagcagcacaatctggatattgccactgcaggtatgggggataagcagcggcagcgctaccaggcacagttgcgcatccggcaggaataccggcaacagttgcaacagcttgagaatgacagtcgccagaaaggcacttacgggacggaggactaccggagggctgaggaggtgctgaaggggagcctgaagcgacaactgaatgaaaacaaacgctactggcaggaactggaagtggcgcagggcgactggaaaaacggtgccatgcgggcgtttcagaattttacggcggatgcggataatgcggcgggaacggcagaacagatgtttacagtggcattcagcagtgccggtaatgcactggcgacattctgtaccaccggtaagctgaattttaaatccttcacctcttccctgttgtcagatatggccagaattatggcacagatggccatgatgcaggcggtaaagggcgtcggttctttattcggcttcacgactaatgctgatggcggtgtttaccagtctgctgatttgagtcgctacagtggcacggtggttaaccgtccgacgttttttgcttttgcaaaaggagcgggtgtgatgggggaagcgggacctgaagccattctgccactgcgtcgcggtgctgatggtaagctgggggttgtggcggatactggtggttcaggcatggtgatgtttgccccgcagtacaacatcgggatcaataacgacggcacgaacgggcagataggtccggcagcactgaaggtggtttatgacctcgggaaaaaagcggccgcggactttatgcaacagcaggcccgtgatggtggccggttaagtggagcataccggtaa

SEQ ID NO: 467605 - DNA, 330 bp, Shigella boydii; identical to SEQ ID NO: 466934

SEQ ID NO: 467606 - DNA, 213 bp, Shigella boydii; identical to SEQ ID NO: 36005

SEQ ID NO: 467607 - DNA, 543 bp, Shigella boydii; identical to SEQ ID NO: 464540

SEQ ID NO: 467608 - DNA, 186 bp, Shigella boydii
atggacaacgacaaaattgatcaacacagcgacgaaattgaagttgagagcgaagaaaaagagcgcggcaaaaaaatagaaatagatgaagatcgactcccctcccgggcgatggcaattcatgaacatatccgccaggatggtgaaaaagagctggaacgcgacgcaatggcactactgtggtga

SEQ ID NO: 467609 - DNA, 294 bp, Shigella boydii; identical to SEQ ID NO: 25632

SEQ ID NO: 467610 - DNA, 396 bp, Shigella boydii
gtgagctggtctctcagtacacgccctgatgctgaactggtcaacactatgctggatagcgctgtcgaaacgttaaatgctggcgaacgaccggtgatacacagtgacagaggtgggcattatcgctggccaggctggctggaaagagtgaatgcagcaggtcttattcgctccatgtcccgtaaaggatgttcacctgataatgctgcatgcgaaggctttttcggcagactgaaaacggaaatgtattatgggcgtaaatggtcgggcatcacgccagaaaagttcatgcagcaagtggatgcttacatcagatggtataacgagcggcgtataaaattatcgctgggtgccgtcagccccaaaatgtaccgccaacaatgcgggctggaatga

SEQ ID NO: 467611 - DNA, 225 bp, Shigella boydii; identical to SEQ ID NO: 462228

SEQ ID NO: 467612 - DNA, 933 bp, Shigella boydii
atgaaacatattcaaatccgcaatagtgatatggcctggcatattgctgccaatattcagtttccaccaaattttgatgagtcaaaacagtatccggcgattatcagcgtccatccttttggcagttgtaaggagcagacgtctggcaatatctatggcaaagcattggctgaaaaaggctatctcgttctcgcttatgacgccagtttccagggagaatctggtggggagcctcgctggatagaagatccgacacagcgcgtagaggatattagccgtgttatcgattatgcagtaactctgccatatgttaatgctgaacgtattggcgtgcagggagtgtgtgggggtggtggctatgccattaatgccgcgctgacagaaaaacgaattaaagcagtagtgagtattacgggtgttaatatcgggcgtctttttcgggaaggtttcagcaattacgatccgattggcgcattgaatgcaatggcgtcgcaacgaaccaaagaggctcgtggtggagaattacagatcaacgaattacttcccgccagcctggatgcagcaaaagcccatggactgaccgaacgcgatgtttatgaagcaattgactactataaaacaccacgcgggcaacaaccgggaggtgcgacaaatatgttgttctcacatgcacagaaaacgctggcctgggatgccttcgcatttactgaagtgttactgactcagccggtgatggtagtagttggtgaaaaagtcggtgccttcggtgcttatcgtgatggactggaagtctatggccgggcgatggtttcgcaggatcgtcagttagtttcattacccgatttctcacattatgaactgtatgacaaaccggaagcagttcaggaggcgctggaaaaagttattccttttttcaacccccatctgggataa

SEQ ID NO: 467613 - DNA, 543 bp, Shigella boydii; identical to SEQ ID NO: 464540

SEQ ID NO: 467614 - DNA, 543 bp, Shigella boydii; identical to SEQ ID NO: 464540

SEQ ID NO: 467615 - DNA, 588 bp, Shigella boydii; identical to SEQ ID NO: 466144

SEQ ID NO: 467616 - DNA, 402 bp, Shigella boydii; identical to SEQ ID NO: 463160

SEQ ID NO: 467617 - DNA, 843 bp, Shigella boydii
atgttgcagcttaacgagaataaacagtttgcatttttccaaagactggcatttccgctgcgtatctttttgctgattctggtgttctcaatatttgtcattgcagccttggcgcaatattttacggccagttttgaggactatttaacgcttcatgtacgcgacatggcaatgaatcaggcgaaaattattgcctccaatgacagtgtcatctctgcggtgaaaacgcgtgactacaaacggatggcgaccatcgctaacaaattacaaagagataccgattttgattatgtggtgattggcgaccggcactcgatccgcctttaccatcctaatccggagaaaattggttatcctatgcagttcaccaaacagggcgcgctggagaaaggggagagctacttcattaccgggaaagggtcaatggggatggcgatgcgcgccaaaacgccaatctttgatgacgatggaaaagtcatcggcgtggtgtcgattggctacctggtgagtaaaatcgatagctggcgggctgagtttttattaccgatggcaggtgtgtttgtcgtgctgttagggattctgatgttgctgtcgtggttcctggccgcgcatatccgtcggcagatgatgggcatggagccaaagcaaatcgcacgcgtggtccgtcagcaagaggcgctgtttagttcggtttatgaagggctgattgcggtggatccgcacggttacattaccgccatcaatcgtaacgcaagaaagatgctggggctgagttcccccggacggcaatggttgggtaaacccattgctgaagtggtcaggcccgccgatttctttacctga

SEQ ID NO: 467618 - DNA, 543 bp, Shigella boydii
gtgaaagaaagcaatcagcgatggtgctctgacgggttcgagttctgctgtgataacggagagagactgcgtgtcacgttcgcgctggactgctgtgatcgtgaggcactgcactgggcggtgactaccggcggcttcaacagtgaaacagtacaggacgtcatgctgggagcggtggaacgccgcttcggcaacgatcttccgtcgtctccagtggagtggctgacggataatggttcatgctaccgggctaatgaaacacgccagttcgcccggatgttgggacttgaaccgaagaacacggcggtgcggagtccggagagtaacggaatagcagagagcttcgtgaaaacgataaagcgtgactacatcagtatcatgcccaaaccagacgggttaacggcagcaaagaaccttgcagaggcgttcgaacattataacgaatggcatccgcatagtgcgctgggttatcgctcgccacgggaatatctgcggcagcgggcttgtaatgggttaagtgataacagatgtctggaaatatag

SEQ ID NO: 467619 - DNA, 543 bp, Shigella boydii; identical to SEQ ID NO: 464540

SEQ ID NO: 467620 - DNA, 180 bp, Shigella boydii; identical to SEQ ID NO: 464956

SEQ ID NO: 467621 - DNA, 543 bp, Shigella boydii; identical to SEQ ID NO: 464540

SEQ ID NO: 467622 - DNA, 543 bp, Shigella boydii; identical to SEQ ID NO: 464540

SEQ ID NO: 467623 - DNA, 267 bp, Shigella boydii; identical to SEQ ID NO: 464426

SEQ ID NO: 467624 - DNA, 543 bp, Shigella boydii; identical to SEQ ID NO: 464540

SEQ ID NO: 467625 - DNA, 306 bp, Shigella boydii; identical to SEQ ID NO: 464418

SEQ ID NO: 467626 - DNA, 249 bp, Shigella boydii
atgaagatacgccagcagcgatgcgcgatatggggcagcaatggccttgccaataatctgtttaatgacattcgcatgttcccaaaaccaaaggggatgcgctgggctacgtttgacaggaagcgggcagagttatcagttatggagatggcttactggcaggcattcagcccggtagtggacagaatcacgggcgttattgagcgtaaagcaggaaaagcagccagaggcattggcctgactctataa

SEQ ID NO: 467627 - DNA, 369 bp, Shigella boydii; identical to SEQ ID NO: 465353

SEQ ID NO: 467628 - DNA, 318 bp, Shigella boydii; identical to SEQ ID NO: 463829

SEQ ID NO: 467629 - DNA, 213 bp, Shigella boydii; identical to SEQ ID NO: 466078

SEQ ID NO: 467630 - DNA, 687 bp, Shigella boydii; identical to SEQ ID NO: 466167

SEQ ID NO: 467631 - DNA, 543 bp, Shigella boydii; identical to SEQ ID NO: 464540

SEQ ID NO: 467632 - DNA, 543 bp, Shigella boydii; identical to SEQ ID NO: 464540

SEQ ID NO: 467633 - DNA, 357 bp, Shigella boydii
atggttaaactggcttcacaaccaggagcctctgttgcccgtattgcccgggaacacgatatcaatgataacctgctgttcaaatggctcaggctctggcagaacgaagggcgcatatcgcggcgtcttccggtaacaacctcttctgacactggcgttgaattattacctgtggagataacgccggatgagccgaaagaaccggtggctgctcttactccgtctttatctactcagactacagttagtgccagctcctgcaaggtggagttccgtcacggtaacatgacgctggaaaatccttcaccagagctgctcacagtgttgatccgtgaactgaccgggtggggacgatga

SEQ ID NO: 467634 - DNA, 543 bp, Shigella boydii; identical to SEQ ID NO: 464540

SEQ ID NO: 467635 - DNA, 543 bp, Shigella boydii; identical to SEQ ID NO: 464540

SEQ ID NO: 467636 - DNA, 543 bp, Shigella boydii; identical to SEQ ID NO: 464540

SEQ ID NO: 467637 - DNA, 465 bp, Shigella boydii
gtgcgcattgccgggcgtgatgcaggtgaaaccgaattatctgcccgtcttaatgagccgctggcaaatggtgccgtgatccatatcgtgccgcgtctggcgggagctaaaagtggcggtgtgtttcaggtggtgctgggggcggcgttgattgcggtggcatggtggaaccctgtgggctggctgggtgccgcggctgtatcgggcatgtatgcggcaggggccagtatgatcctgggcggtgtggcgcagatgctggcaccgaaagccaggacgtccacggcagccagtacagataacggcaaacagaacacctatttttcctcactggataacatggttgctcagggcaatgttttgcctgttctgtacggtgaaatgcgtgtggggtcgcgggtggtttctcaggagatcagcacggcagacgaaggggacggtggtcaggttgtggtgattggtcgctga

SEQ ID NO: 467638 - DNA, 213 bp, Shigella boydii; identical to SEQ ID NO: 464797

SEQ ID NO: 467639 - DNA, 648 bp, Shigella boydii
atgcaactggtgaagttccagaccgcacaaattaatgccctgcacgggacgttactggagtttggtgaaaccatccacaaaggccgggcagcgatggagcgggagttccccgaagcactggaacggatgaaagagagactgccaccgtatctcattatggttctggaaaaccagtacaaccgactgaatgagctggactcactgatagaggatattgaaaaacagcttaccagcgtggcgaggcagaatgaaacctgtaagcggttgctggatattcctggcgttggaccacttattgcgacggcagcggtggccaccatgggggaagcatcagcgtttaaatcggggcgagagttcgccgcatatgttggtctggttccaaaacaaactggctccggagggaaagtacgtctgctggggataagcaaacgtggtgacacttatctcaggacattatttatccacggtgcaagagcggtggcattagtagctaaagagcctggcccgtggataaccgaactgaaaaaacgtcgtccagccagtgtggcaatcgtcgccatggcaaacaagctggcacgaacagtatgggcgataaccgcccatgaccgtaagtatgacaggaaccacgtcagtatcagaccatattaa

SEQ ID NO: 467640 - DNA, 543 bp, Shigella boydii; identical to SEQ ID NO: 464540

SEQ ID NO: 467641 - DNA, 543 bp, Shigella boydii; identical to SEQ ID NO: 464540

SEQ ID NO: 467642 - DNA, 342 bp, Shigella boydii
gtgcgcattgccgggcgtgatgcaggtgaaaccgaattgtctgcccgtcttaatgagccgctggcaaatggtgcagtgatccacatagtaccgcgtctggtgggagctaaaagtggcggtgtgtttcaggcggtgctgggggcagctgttatggcggttgctatatggatgccgggggtaggaattatggcgagtaatctgctgttttctctcggtgccagtatgacgcttggcggtgttgcacagatgctggcaccgaaagccagaactccccgtacacagacaacggataacggcaaacagaacacctgtttctcctcactggataacatggttgcctag

SEQ ID NO: 467643 - DNA, 351 bp, Shigella boydii; identical to SEQ ID NO: 464002

SEQ ID NO: 467644 - DNA, 357 bp, Shigella boydii
atgccactgctggataagctgcgtgagcagtacggggtcggaccgctatgcagcgaactgcatattgccccgtcaacgtattaccactgtcagcaacagcgacatcatccggataaacgcagtgcccgtgcgcagcgcgatgactggctgaagaaagagatacagcgcgtatacgatgggaatcatcaggtatacggtgtggtaaagtctggtgtcagttgttacgggaaggtatcagagtggccagatgcactgtggcacgtctcatggcggttatgggacttgccggtgttctccggggtaaaaaggtccgtacgaccatcagccggaaagccgttgccgcaggcgaccgcgtaa

SEQ ID NO: 467645 - DNA, 447 bp, Shigella boydii
gtggcgttcatcattgatgtgtttgccggatacatcgtggggtggcgggtctcatcgtccatggaaacgacattcgtgctggatgctctggagcaggcgttatgggcccgtcgaccgtccggcacggtccatcacagtgataaaggttctcagtatgtatcgctggcctacacacagcggcttaaggaagccggattactggcatcaacaggaagtacaggcgactcgtatgacaacgcgatggcggagagcatcaatagtctttacaaagcggaggtaatacaccgtaagagctggaaaaaccgtgcagaagtggaactggccacactcacgtgggtggactggtataacaatcgacgattgctggaaaggctgggccatactcctccggcagaagcagaaaaagcttattatgcttccatcggaaacgatgatctggcagcctga

SEQ ID NO: 467646 - DNA, 213 bp, Shigella boydii; identical to SEQ ID NO: 36005

SEQ ID NO: 467647 - DNA, 291 bp, Shigella boydii
atgagtttaaacttcaaatggctcaggctctggcagaacgaagggcgcatatcgcggcgtcttccggtaacaacctcttctgacactggcgttgaattattacctgtggagataacgccggatgagccgaaagaaccggtggctgctcttactccgtctttatctactcagactacagttagtgccagctcctgcaaggtggagttccgtcacggtaacatgacgctggaaaatccttcaccagagctgctcacagtgttgatccgtgaactgaccgggtggggacgatga

SEQ ID NO: 467648 - DNA, 291 bp, Shigella boydii; identical to SEQ ID NO: 467647

SEQ ID NO: 467649 - DNA, 213 bp, Shigella boydii; identical to SEQ ID NO: 466078

SEQ ID NO: 467650 - DNA, 186 bp, Shigella boydii; identical to SEQ ID NO: 462789

SEQ ID NO: 467651 - DNA, 357 bp, Shigella boydii; identical to SEQ ID NO: 467633

SEQ ID NO: 467652 - DNA, 219 bp, Shigella boydii
atgactaaaaatactcgtttttcccccgaagtccgtcaacgggcagtccgtatggttctggaaagtcagggcgaatatgactcacaatgggcgacaatttgttccattgctccaaagattggctgtacgccggagactctgcgtgtctgggtacgccagcatgagcgggataccggaggcggtgaggtgggctcaccaccgctgaacgtcagcgtctga

SEQ ID NO: 467653 - DNA, 330 bp, Shigella boydii; identical to SEQ ID NO: 461591

SEQ ID NO: 467654 - DNA, 264 bp, Shigella boydii
atggcggatctgtacagtcatcgctgggaaattgaactgggatacagggagataaaacagacgatgcaactgagcaggctgacgctgagaagtaaaaagccggagcttgtggagcaagagctgtggggtgtcttactggcttataatctggtgagatatcagatgattaaaatggcggaacatctgaaaggttactggccgaatcaactgagtttctcagaatcatgcggaatggtgagtaatgctgccaacttactgatttag

SEQ ID NO: 467655 - DNA, 213 bp, Shigella boydii; identical to SEQ ID NO: 36005

SEQ ID NO: 467656 - DNA, 123 bp, Shigella boydii
atgcccgatatggccgttttccccaacgatggtgtcagtgtcgcagtagccatgcataatgcagccatcctgaatattggctcccgcttgcacgatcaaccgcccgtagtcaccacgcagtga

SEQ ID NO: 467657 - DNA, 693 bp, Shigella boydii; identical to SEQ ID NO: 465816

SEQ ID NO: 467658 - DNA, 174 bp, Shigella boydii; identical to SEQ ID NO: 464844

SEQ ID NO: 467659 - DNA, 276 bp, Shigella boydii
gtggcttctgtttctatcagctgtccctcctgttcagctactgacggggtggtgcgtaacggcaaaagcactgccggacatcagcgctatctctgctctcactgccgtaaaacatggcaactgcagttcacttacaccgcctctcagcccggtacgcaccagaaaatcattgatatggccatgaatggcgtcggatgtcgcgccagtgcacgcattatgggcgttagcctcaacacgattttacgtcacttaaaaaactcaggccgcagtcggtaa

SEQ ID NO: 467660 - DNA, 525 bp, Shigella boydii; identical to SEQ ID NO: 465573

SEQ ID NO: 467661 - DNA, 303 bp, Shigella boydii; identical to SEQ ID NO: 459543

SEQ ID NO: 467662 - DNA, 213 bp, Shigella boydii; identical to SEQ ID NO: 462242

SEQ ID NO: 467663 - DNA, 126 bp, Shigella boydii; identical to SEQ ID NO: 465426

SEQ ID NO: 467664 - DNA, 300 bp, Shigella boydii; identical to SEQ ID NO: 465758

SEQ ID NO: 467665 - DNA, 201 bp, Shigella boydii; identical to SEQ ID NO: 465760

SEQ ID NO: 467666 - DNA, 267 bp, Shigella boydii; identical to SEQ ID NO: 464426

SEQ ID NO: 467667 - DNA, 1593 bp, Shigella boydii
atgacgcccgaaagaaacggttcgtatatggtgaaagcatccctggcgaatggatcctcttatgagaaggatctggtggtaatcgatcaaaaactgacactctcggcgtccagcccgcttatcggtgtcaattccccaacaggtgcaactctgacggcaacgctaacttctgcaaatggcactccagtggagggtcaggtcatcaactttagcgtaacgccagaaggtgcgacgttaagtggcggaaaagtgagaaccaactcttcaggtcaggctccagtcgttctgaccagcaataaagtcggtacatatacggtgactgcatcgttccataacggtgtaacaatacagacacagacaatcgtgaaagtcactggcaactcaagcaccgcccatgttgctagctttatcgctgctccatcgactatcgccgccaccaacagtgatttaagtaccttaaaggcaacggttgaggatggcagtggtaacctgatcgaaggtttaactgtgtacttcgccttaaaaagcggctctgccacattaacgtcattaacagcggtgaccgatcaaaacggaatcgcgacaacaagcgtgaaaggagcgatgacaggtagcgtcacggtaagcgcagtcacgaccgctggtggaatgcaaacagtagatataacgctggtggctggcccggcagacacctcgcagtccgtccttaagaacaatcggtcatcattgaaaggagactttaccgatagtgctgagctacatcttgttctgcacgatatatcaggcaatccgatcaaagtttctgaagggctggaatttgtgcagtcaggtaccaacgtgccctatgtgcaagttagtgcaattgactacagtaaaaatttctcaggcgagtacaaagccactgttacaggcggcggagagggtatcgcaacgctgatccctgtattgaatggtgttcatcaagctggtctgagtaccacaatacaattcactcgcgcagaagacaaaataatgagcggtacagtgtcagtcaatggtactgacctaccgacaactacattcccttcgcagggattcaccggggcgtattatcagttgaataatgacaactttgcccctggaaaaacggcggctgattatgagttttcaagctctgcctcctgggtcgatgttgatgctaccggtaaagtgacatataaaaatgtcggcagcaattgggaaaggattacggcgacgccaaaatcaggaggccctagctatgtatacgaaatccgtgtgaagagttggtgggtgaacgccggcgatgctttcatgatatacagccttgctgaaaatttttgcagtagcaatagctacacacttccccgtgcagatcatttaaaccatagtcgttcccgaggcatcgggtcactgtacagtgaatggggagatatggggcattacacgactgaggctggttttcaatcaaatatgtattggtcatctagtcccgcaaactcaaacgaacaatacgtagtttccctggcaacaggtgatcaaagcgtatttgaaaagcttgggtttgcttatgcgacatgttataaaaacctctga

SEQ ID NO: 467668 - DNA, 195 bp, Shigella boydii
atgctggctactacccctacccaaaaaccgcaatttatctggattatcgccgcagttcgccgcgattgcccgacaattaccgccaaaattcatcatattgctgccgagtctgaacgcgatgctcgccgttctctggtgcgcgatcacatctgcttttttgctggtcgtatccgcatggaggtggcacatgattaa

SEQ ID NO: 467669 - DNA, 639 bp, Shigella boydii; identical to SEQ ID NO: 465403

SEQ ID NO: 467670 - DNA, 342 bp, Shigella boydii; identical to SEQ ID NO: 460954

SEQ ID NO: 467671 - DNA, 834 bp, Shigella boydii
atggataaatttttacgtaaaatatcaacgctcttagtttatctttttttaatctgcaactctattcttgtgcttgggccagtgatatggacgataatggcatcttttaaaaaagggaataatctatttagttcaacatttagtggcatcgagtttacatttgaccactacataacgttgttcacggatacgccatatatgcagtggtatttgaacactttcattcttgctaccgctaacatgttaatttcactgttcgttgtgacgatgaccgcctacgttttttcaaggtatcgatttcatggaaagcgtaatacgttaatgagtattcttgtattgcaaatgtttcctgcatttttatcaatgactgccatttatatcctgctatcaaaggccaatttgatagacacatatactgggttgcttctggtttatgtaaccggttcattgcccttcatgacgtggttggtaaaaggttattttgatgctattccaacttctttggatgaggccgataaaatagatggagcagggcatctgactatttttattcagataatattgccattggctaagccgattctcgttttcattggattagtttcgttcactggaccatggatggacttcattttgccaacgttggtgcttcgtagtgaggataaaatgaccctggcgattggcatttttagttggattgcttctaattcagcagagaattatacgctttttgctgctggggcgcttttagttgcagtacctatcacattgttatttgtattcacacagaagcatataactactggacttgttagcggtgccgttaaggaataa

SEQ ID NO: 467672 - DNA, 213 bp, Shigella boydii; identical to SEQ ID NO: 462242

SEQ ID NO: 467673 - DNA, 819 bp, Shigella boydii; identical to SEQ ID NO: 465850

SEQ ID NO: 467674 - DNA, 435 bp, Shigella boydii; identical to SEQ ID NO: 467193

SEQ ID NO: 467675 - DNA, 294 bp, Shigella boydii; identical to SEQ ID NO: 25632

SEQ ID NO: 467676 - DNA, 372 bp, Shigella boydii
gtgctggatgctctggagcaggcgttatgggcccgtcgaccgtccggcacggtccatcacagtgataaaggttctcagtatgtatcgctggcctacacacagcggcttaaggaagccggattactggcatcaacaggaagtacaggcgactcgtatgacaacgcgatggcggagagcatcaatggtctttacaaagcggaggtaatacaccgtaagagctggaaaaaccgtgcagaagtggaactggccacactcacgtgggtggactggtataacaatcgacgattgctggaaaggctgggccatactcctccggcagaagcagaaaaagcttattatgcttccatcggaaacgatgatctggcagcctga

SEQ ID NO: 467677 - DNA, 666 bp, Shigella boydii; identical to SEQ ID NO: 464939

SEQ ID NO: 467678 - DNA, 342 bp, Shigella boydii; identical to SEQ ID NO: 460954

SEQ ID NO: 467679 - DNA, 645 bp, Shigella boydii
atgcaggcggtgaatgccgtgctgtatggcaaatacaccatggaaggggatcagtttgatactgtcgaggtggatttcgggcgctctgaaggaaataacattgagctggctgacggtaaaaaatggtctgagcaggaccgtgatacgtttgatccgacgcatgatattgacctctactgcgatcaggccagcggccttgtgaatatcgccattatggacggtacggtctggcgtctgctgaatggctttaagctgttccgcgaaaaactggatacccgtcgcggctcaaattcacaactcgaaacggcagtgaaagacctgggggcggtggtgtccttcaaggggtattacggcgatctggccattgtggtggcgaaaacgtcttatgtggcagaggacggtaccgaaaaacgttatctgccggagggcacactggtcctggggaatacggcagcagagggcattcgttgctatggtgccattcaggatgcgcaggcgttgtccgaaggtgtggtggcctcttcccgttatccgaaacactggctgactgtgggcgatccggcccgtgaattcaccatgacgcagtccgcaccgctgatggtgctgccggatccggatgagtttgtggtggtacaggtgaaataa

SEQ ID NO: 467680 - DNA, 318 bp, Shigella boydii
atggtgcagtacacccgtaacagtttttacatcccactaatgactcgcctgcgcccgatggggatcactgtcgatgttgaaacagccaaccgccacggtctgcgctggctgcacgatgtcgctaaccaacgaaagcatgaaacaatccaggcccgtccctgcgatcgctggctcgaagagcagcagtccatgctggcactgcctccggagaaaaaagagtatgacgtgcatcctggtgaaaatctggtgaacttcgataaacacccccagcatcatccactctccatctacgactcattctgcagaggagtggcgtga

SEQ ID NO: 467681 - DNA, 249 bp, Shigella boydii; identical to SEQ ID NO: 465618

SEQ ID NO: 467682 - DNA, 267 bp, Shigella boydii
atggcgacgctggggcgtcttatgagcttgctgtcaccctttgacgtggtgatatggatgacggatggctggccactgtatgaatcccgcctgaagggaaagctgcacgtaatcagcaagcgatatacgcagcgaattgagcggcataacctgaatctgaggcagcacctggcacggctgggacggaagtcgctgtcgttctcaaaatcggtggagctgcatgacaaagtcatcgggcattatctgaacataaaacactatcagtaa

SEQ ID NO: 467683 - DNA, 399 bp, Shigella boydii; identical to SEQ ID NO: 464751

SEQ ID NO: 467684 - DNA, 342 bp, Shigella boydii
atggcgctcaggagccagcgcccacctgccgggctaatccaccactctgatcgaggttcacagtactgcgcatacgattaccgggtcatacaggagcagtctggtctgaaaacatcaatgtcgcgtaaaggtcactgttacggcaacgctccgatggaaagcttctggggaacgctgaaaaatgagagcctgagccactatcgttttaataaccgggatgaagccatctcagtaatacgggaatacattgagattttctacaatcgtcagcgtcgtcactctcgtctggggaatatctccccggcagccttcagggaaaaatatcatcagatggctgcttaa

SEQ ID NO: 467685 - DNA, 174 bp, Shigella boydii
atgccagcgggtatcgctgtagtgcgtttttttctcatctttagcattggcataactgaaggacgtaatcagccccagcgcgtccgtaaactcataacggtatttcacgttaatcccgttcagattatcgctgcctggcatatcagtatgggtctgaagatacccggcgcttag

SEQ ID NO: 467686 - DNA, 267 bp, Shigella boydii; identical to SEQ ID NO: 464426

SEQ ID NO: 467687 - DNA, 324 bp, Shigella boydii; identical to SEQ ID NO: 465528

SEQ ID NO: 467688 - DNA, 396 bp, Shigella boydii; identical to SEQ ID NO: 5305

SEQ ID NO: 467689 - DNA, 249 bp, Shigella boydii; identical to SEQ ID NO: 461985

SEQ ID NO: 467690 - DNA, 165 bp, Shigella boydii; identical to SEQ ID NO: 461984

SEQ ID NO: 467691 - DNA, 129 bp, Shigella boydii; identical to SEQ ID NO: 465571

SEQ ID NO: 467692 - DNA, 129 bp, Shigella boydii; identical to SEQ ID NO: 465571

SEQ ID NO: 467693 - DNA, 267 bp, Shigella boydii; identical to SEQ ID NO: 464426

SEQ ID NO: 467694 - DNA, 129 bp, Shigella boydii; identical to SEQ ID NO: 465571

SEQ ID NO: 467695 - DNA, 216 bp, Shigella boydii
gtgcggaaaaacggtgctgaaatttataaccgtaccgcgctggataatacgctgatttacagtggcgttattgatatgcctgccggtcacggtcacatgacactggagttttcggtgtcagcatggctggtaaataactggtatcccacagcaagtatcagcgatttgctggttgtggtgatgaagaaagccactgcaggcatcacgattagctga

SEQ ID NO: 467696 - DNA, 534 bp, Shigella boydii; identical to SEQ ID NO: 464817

SEQ ID NO: 467697 - DNA, 141 bp, Shigella boydii
atgtttccgcaatcgctgatgaggctgtatgacggggtgggggggcgttttcaggacaaacccgaccccgccgggcaccgaccgcctcctcaaatttttatgcacgggaattttttgaaaaataatctggcgaaaaaataa

SEQ ID NO: 467698 - DNA, 234 bp, Shigella boydii
atgcgtgatatttatcttgaaacaatagaccgcgcatttagtgcccttgcttacgctgaaggtatgtacgaaatattgcgcatatggcttgaaacacttggcgacaatgaacgcgacaaacaaaaattaagaattgccacggcattaataacgcttcttgagcctgtaataatggaactgcaagaaatagatctattgcacgacagatataaagaacagcacaccggagaataa

SEQ ID NO: 467699 - DNA, 222 bp, Shigella boydii
atgcgtgatgatcgttttaattccctgaaacaagaattttccggcgttcctgatgatgcggctgatgcgctttcgtcaatatctgaaattatgcgggtggcttttttctttctttgcactgatgagcacagaggtacagggctaaatattcttgatattgccgctaactatgctgatttcgtgacagaagctgttttaagaaaaacaacggacggggattaa

SEQ ID NO: 467700 - DNA, 258 bp, Shigella boydii
atgtgcaataacatccgtccggacgcagccgccgccgcactcactacgctgatgcacgcgcttattgatattgaatgcacggcagagcttgcacaaaaggaagaacgggaggaatacacattgttcgccctggaatgtatccgatacatcgcaacgcggtcgctgaatgacgctaaaaatattcttgttgctgattgtgaaaatgggggggtgcccctattaagttgtcaagcatgttatgacccctgcggggtataa

SEQ ID NO: 467701 - DNA, 432 bp, Shigella boydii
atgagaaatcataccacacacccgcaagggcggggctcgcacaacctgaataaatacatctggcgttttatcgccctgagcacggcacaaccgcgcgtgattaccattgaggccaccagcgaacaggaagcacgccagcaatccccggctggctgcgtgatggtattcgctgcccgtattcgccaagggggtaggcttatgagccaggaaatcacactacaacaggcagcagaacgcgcccaccaaatcgaagttatttgcgcactggcagaggattaccctggcatgatgaccgacagcgaatcaggggcaatcatcggcttacttaaacgccttagcggtgaggtctgcgtattcctgagcgatgaacaggaaagaagaacgcttatttctaacgaaaaaaaatgcggaggggtacaccatgtgcaataa

SEQ ID NO: 467702 - DNA, 180 bp, Shigella boydii
atggcgacaaaagcagtaaacgcaaaatcacaaaccgttgcggcaagggttccgcatgaagttatgaacaatgttgaggcggtaaaaatgcctggcgaaagtacggggcaatttgttactgcagcattaaaacgagaagttgaatatcgccagcggcgcaaggccaaagaaccagagtaa

SEQ ID NO: 467703 - DNA, 672 bp, Shigella boydii
atgattctcaaaattagcaatttcattgacgcaagcaatacaaaagggcctatacgcgttgaagatacagagcatggacctatattggtagcacagaaattcaacctaaaggatctctttttcagaacattaagcactattaatgcaaagataaattcacagatattaaatgaacaactaaaaaattatcgactagcgaatcaaaaatccttattgcttttcctcaagacattagctagcgaaaaatctacagaaagtgcgtttgccgcctatgaagcagtcaaaaattcaattcaacattcttttacaggtaaagacatcaaattaatgttgaataccgcagagagttttcatggcatcggtacagccaaaaatcttgaaagacatttagtgtttcgttgctggggaaatagaggcataacccatttagggcataccagtatcagtataaaaaacaatttactacaggaaccaactcatacctatctcagctggtatcccggcgggaatgttacaaaagatacagaaataaactacctttttgaaaaacgctcaggttacagtgtcgatacctataaacaagacaaactaaatatgatttcagaatttcctgctttaagaacattaagtgccataccagcacagttttcagatttactgattaatttataa

SEQ ID NO: 467704 - DNA, 426 bp, Shigella boydii; identical to SEQ ID NO: 464866

SEQ ID NO: 467705 - DNA, 294 bp, Shigella boydii; identical to SEQ ID NO: 25632

SEQ ID NO: 467706 - DNA, 1635 bp, Shigella boydii
atgattactggcgacttaaaaagtaaaatcgacggactatgggaagatttctgggtgggtggtatcaccaacccgctgaccgtaatcgaacagatcacctatctgatgtattcccggatgctggatacccaggaacaacgcgacgaaaagcgtaaacaaatcgcgggtattgattttaaaccgcgttttgcgccagaacagcaggagttccgtttcagtcactatagcaaccttggctcggatgagatgatggaagtggtgcgcgatggcgtattccagcatttccgtcagctcggccaggccgatgcttcgaaggtgacgctgctgggcaactttatgaaagatgctcgtctggagattgttaagccgtcattgctgaccaaagcggttgaggtaatcaaaaacctgccattggatcgcggcgacaccaaaggcgacctttacgaatacttgttaagcaagctgacaactgccggaatcaacggacagttccgcacaccgcgccacattatccgcacgatggttgaaatgatggagccgaacccggcccgaggcgagacgatttgcgatcccgcctgtggcaccggtggttttctggcaaccagctatgaatatctgctggagaagtacagctcgctggaatccattcatactgagattggcaccaacgaacgtggcgagctggaagagcaaaaaatctttaccggcgatctgctgacaccgtggcgtaaccatgtggataacaacatgttccacggttacgactttgacaccacaatgctacgtatcgccgccatgaacctgattatgcacggcgtggatgcgcctgatatccactatcaggacacaatgagccagagtttcagcacaaacttcccgcaggccagtaaaaacgccttcaacctgattctggcgaacccgccgtttaccggttcactggacgaagaagatatcgactccacgctgtcggcaatggtgaaaaccaaaaaaaccgaactactgttcctggcgcgtattctgcaaatgctgaaagtgggcgggcgcagtgccactatcgtgccgcagggcgtgctgtttggctctagcaaggcgcaccagtcacttcgcaaaacgctggtggaagataaccaactggaagcggtgatcaatctgccttctggtgtatttaaaccttacgctggcgtggcgacggcgatcctgatctttaccaaaggcggtcaaacggatgaggtctggttctacgatctacaaaatgacggctacagcctggatgataagcgcaacccgataaaagacaacgatctgccgcatctgctggcaagctggaagcattaccgtactttacgcgggctaccggttgataactttatgggtaagaagttagcctcgttgcttaaacagcagtacccggaagggattaatgctggcgttgattttaaagatcgcacgcaggcggcgtttgttgtaccgaaagcggatattgctgcgcagaaatacgatctatccatcaaccgttataaagaagtcgtgtatcaggcggaggaatatgaagatccgaaggtgatattgaagcggttaaaggatctggaaaaagagattctggcggatttggatgagctggaggggatgctgtga

SEQ ID NO: 467707 - DNA, 219 bp, Shigella boydii; identical to SEQ ID NO: 465432

SEQ ID NO: 467708 - DNA, 468 bp, Shigella boydii; identical to SEQ ID NO: 461580

SEQ ID NO: 467709 - DNA, 471 bp, Shigella boydii; identical to SEQ ID NO: 465583

SEQ ID NO: 467710 - DNA, 819 bp, Shigella boydii; identical to SEQ ID NO: 465850

SEQ ID NO: 467711 - DNA, 819 bp, Shigella boydii; identical to SEQ ID NO: 463221

SEQ ID NO: 467712 - DNA, 819 bp, Shigella boydii; identical to SEQ ID NO: 463221

SEQ ID NO: 467713 - DNA, 1230 bp, Shigella boydii
atggcttatgattacatcagccccacgcgttgggatgaggggattaacgcgctcaccatcaactacgatttttctggttcacatacactacgttcagattatggttcacaagagacagataccagttatctcaatctgcgcaatggactgaatattggaccgtggcggctacgtaattacagtactttaaacaccagcgatggccgtgcggaatacaactccattagtacctggatacagcgcgatattgccgcgttaagaagccagattatgattggtgatacgtggacggcgagcgatattttcgacagtacgcaaattcgcggcgcgcgtttgtatactgataacgatatgctacccgccagccagaatggctttgctcctgtggttcgtgggattgcaaagtccaacgccaccgtcatcattcggcagaatggctacgtgatttatcagtctgccgttccagaaggtgcttttgagatcaccgatctcaacaccgccagtacaggtggcgatttggacgtaaccatcaaagaagaagacggtagcgaacaacgattcacccaaccttatgcttcattggcgattcttaaacgtgaaggtcagacagatgttgatgtcagcgtgggtgaattgcgcgatgaagacggatttacaccggacgtccttcaggcgcaaatacttcatggtttttcccacgggatcactttatatggaggtatgcaggctgctgaaaattatggttctgcagctctgggtgtcggtaaagatcttggcgctttgggcgcaatttctttcgatgtgacacatgctcgtgcgaattttagccatgatgatacagaaacgggtcagtcatatcgctttctctattcaaaacgatttgacgacacagacactagcttgcgcctggttggctatcgttactccaccgagggctactataccctcaatgagtgggcatcgcggcgcaacagccctgaagacttttgggaaacaggtaaccgacgtagtcgcgtggagggaacgctaacgcagtcgttggggagagattatggcaatttatacctgacattaagccggcaacaatactggcataccgatgatgtcgaacgattaatgcaatttggctacagcagtagctggtggatttgcccctatatttccagacatctgttatcacttaacccattacaagcccgctgccgcagatattcccgtggcgagcgataa

SEQ ID NO: 467714 - DNA, 468 bp, Shigella boydii; identical to SEQ ID NO: 19402

SEQ ID NO: 467715 - DNA, 819 bp, Shigella boydii
atgtgtcaggtatttggtgtatccaggagcggttattacaactgggtacagcatgaaccctcagacagaaaaccaagtgatgagcggctaaaactggagattaaggtggcacatatccgcactcgcgaaacatatggaacccggcggctccagacggagctggcagagaatggcatcatcgttggtcgtgaccgactggcacgtcttcgtaaggagctaaggctacgctgtaagcagaaacgcaagttcagagcgactacgaacccgaaccacaatctgccagttgcgccaaatctgctgaaccagacgttcgctcctacagcaccaaatcaggtctgggtggcggacctgacgtatgttgccactcaggagggatggttgtacctcgctggcatcaaagatgtttatacgtgcgaaattgtcggctacgccatgggagagcgcatgacaaaagagctgacaggtaaagccctgtttatggcgctcaggagccagcgcccacctgccgggctaatccaccactctgatcgaggttcacagtactgcgcatacgattaccgggtcatacaggagcagtctggtctgaaaacatcaatgtcgcgtaaaggtcactgttacgacaacgctccgatggaaagcttctggggaacgctgaaaaatgagagcctgagccactatcgttttaataaccgggatgaagccatctcagtaatacgggaatacattgagattttctacaatcgtcagcgtcgtcactctcgtctggggaatatctccccggcagccttcagggaaaaatatcatcagatgactgcttaa

SEQ ID NO: 467716 - DNA, 1455 bp, Shigella boydii; identical to SEQ ID NO: 465481

SEQ ID NO: 467717 - DNA, 132 bp, Shigella boydii; identical to SEQ ID NO: 465690

SEQ ID NO: 467718 - DNA, 387 bp, Shigella boydii; identical to SEQ ID NO: 464918

SEQ ID NO: 467719 - DNA, 294 bp, Shigella boydii; identical to SEQ ID NO: 460208

SEQ ID NO: 467720 - DNA, 819 bp, Shigella boydii; identical to SEQ ID NO: 465817

SEQ ID NO: 467721 - DNA, 276 bp, Shigella boydii; identical to SEQ ID NO: 464937

SEQ ID NO: 467722 - DNA, 819 bp, Shigella boydii; identical to SEQ ID NO: 463221

SEQ ID NO: 467723 - DNA, 468 bp, Shigella boydii; identical to SEQ ID NO: 19402

SEQ ID NO: 467724 - DNA, 1197 bp, Shigella boydii
gtgaactggattgatccggacaacggtcatgagacggcgacagagcttgtggaggacacgcaggccattctccgttacggtcgtaacgccacgaagatggatgcctttggctgtaccagccggggacaggcgcaccgcgccgggctgtggctgattaaaacggaactgctggaaacgcagaccgtggacttcagcgtcggcgcagaagggcttcgccatgtaccgggtgatgtcattgaaatctgcgatgatgattatgccggtatcagcaccggtggtcgcgtactggcggtgaacagccagacccggacgctgacgctcgaccgtgaaatcacgctgccgtcctccggtaccacgctgataagcctggttgacggaaatggcaatccggtcagcgtggaggttcagtccgtcaccgacggcgtgaaggtgaaagtgagccgggttcctgacggcgttgcagaatacagcgtgtgggggctgaagctgccgacgctgcgccagcgcctgttccgctgcgtgagtatccgtgagaacgacgacggcacgtatgccatcaccgccgtgcagcatgtgccggaaaaagaggccatcgtggataacggggcacactttgacggtgaccggcgcggcacggtgaatggtgtcacgccgccagcggtgcagcatctgaccgccgaagtcaccgcagacagcggggaatatcaggtgctggcgcgatgggacacgccgaaggtggtgaagggtgtgagcttcctgcttcgcctgaccgtggcagcggacgacggcagtgagcggctggtcagcacagccaggacgacggaaaccacataccgcttcaggcagctggcgctggggaattacagtctgacagtccgggcggtaaatgcccgggggcagcagggcgatccggcgtcggtatcgttccggattgcggcaccggcagcgcctgtcactattgaactgataccggggtattttcagataacggcggtcccgaaactggctatatatgacccgacggtgcagtttgagttctggttttcggaaaagcggattgcggatatcaggcaggttgaaaccagcgcccgctatcttggcacggcgctgtactggatagccgccagtatcaatatcaggcgggccatgattattatttttacgttcgcagtgtgggtaatgactccaacttattga

SEQ ID NO: 467725 - DNA, 1272 bp, Shigella boydii
gtgtatgacccgacggtacagtttgagttctggttttcggaggcaaaaatcgcagacacatctcaggtggaaacctctgcccgttatctggggaccggcagtcagtggagtgtatccggcccgcacattaagcccgggaaggatttctggttttacgtgcgcagcgtcaacctggtggggaaatctgcttttgtggaggccagtggacgggccagcaatgatgcagaagggtatctggggctgtttcgggaaaaaataggaaaactgcatctggctcaggggctgtgggagctgatagacaacagccagcttgcggatgagatggcggagatgaagaccaccatcaccgaaacccgcaatgaaatcacacagacggtcagtaaaacgctggaggaccagagcgccaccatacagcagatacagcgcgtgcagaaggacacaaatgatgaccttgctgcactttacatgctgaaggtacagaaaacaaaaaatggcataccctatgttgccggtattggagcggggattgaggatactgatggccagcccctgagcaacatactgctgctggctgaccgtattgcgatgattaacccggaggacggcaacaccacgccgttatttgtggcgcaggggaatcagttgttcatgaacgatgtgttcctgaagcggctgtttgcggtgagtatcacctcgtccggcaatcccccgacgttttccctgacgccggagggcaggctgaccgcaagaaatgctgatatcagcggtaacgtgaatgcgaactccgggacgctcaacaacgtcacgattaacgagaactgccgggttctgggaaaactgtccgcgaaccagattgaaggcgatctcgttaaaacagtgggtaaggcttttccgcgggactcccgggcaccggagcggtggccatcagggaccgttaccgtcaggatttatgacgatcagccttttgaccggcaaattgttattccggcggtggcattcagcggcgctaagcatgagagagagcatactgatatttactcctcatgccgtctgatagtgcggaaaaacggtgctgaaatttataaccgtaccgcgctggataatacgctgatttacagtggcgttattgatatgcctgctggtcacggtcacatgacgctggagttttcggtatcagcatggctggtgaataactggtatcccacagcaagtatcagcgatttgctggttgtggtgatgaagaaagccaccgcaggcatcagtatcagctga

SEQ ID NO: 467726 - DNA, 819 bp, Shigella boydii; identical to SEQ ID NO: 464408

SEQ ID NO: 467727 - DNA, 234 bp, Shigella boydii; identical to SEQ ID NO: 464402

SEQ ID NO: 467728 - DNA, 819 bp, Shigella boydii; identical to SEQ ID NO: 465850

SEQ ID NO: 467729 - DNA, 960 bp, Shigella boydii
atgaagcgtgaagaaatcgctgatctgatggcgtttgtcgtcgttgcagaggagcgtagcttcactcgtgcagcagcccgcctgagcatggcgcagtcagctttaagccagatagtgcgtcgtatagaagaacgattgggattgcggcttctgacgcgaaccacgcgcagcgttgttccaactgaagcgggcgagcatcttttgtctgttcttggccctatgttgcatgacatagattcagccctggcatccctgagcgagctgcagaaccgcccatccgggacaatacgtattactactgtagaacatgcagcaaaaacgatattgttaccagcaatgcgcacattcctgaaatcgcatcctgaaattgatattcagctcaccattgattatggtttgaccgatgtcgtttctgaacgttttgatgcaggcgtccgtctgggtggggagatggataaagatatgatcgccattcgaatcgggccagatataccaatggctattgttggctcaccggattatttttctcgccgaagtgttccaacgtcagtgtcacaattaatagataatcaggcaattaatttgtatcttcccacatcgggtacagcaaatcgctggagattaatacgcggtggacgtgaagttcgtgttcgcatggaaggtcagcttttactgaatacgatagacctgatcattgatgctgcaattgatgggcatggattggcgtatctaccttatgatcaggttgagcgggctattaaagaaaaaaaactgatacgtgttttggataaattcacaccagatttacccggttatcacctgtactatccacaccgtcgacatgctggctcggcattctcattatttatagataggctgggtaatgactccaacttattgatagtgttttatgttcagataatgcccgatgactttgtcatgcagctccaccgattttga

SEQ ID NO: 467730 - DNA, 477 bp, Shigella boydii
atgatggaactgcaacatcaacgactgatggcgctcgccgggcagttgcaactggaaagccttataagcgcagcgcctgcgctgtcacaacaggcagtagaccaggaatggagttatatggacttcctggagcatctgcttcatgaagaaaaactggcacgtcatcaacgtaaacaggcgatgtatacccgaatggcagccttcccggcggtgaaaacgttcgaagagtatgacttcacattcgccaccggagcaccgcagaagcaactccagtcgttacgctcactcagcttcatagaacgtaatgaaaatatcgtattactggggccatcaggtgtggggaaaacccatctggcaatagcgatgggctatgaagcagtccgtgcaggtatcaaggttcgcttcacaacagcagcagatctgttacttcagttatctacggcacaacgtcagggccgttataaaacgacgctttga

SEQ ID NO: 467731 - DNA, 318 bp, Shigella boydii
atggtgcagtacacccgtaacagtttttacatcccactaatgactcgcctgcgcccgatggggatcactgtcgatgttgaaacagccaaccgccacggtctgcgctggctgcacgatgtcgctaaccaacgaaagcatgaaacaatccaggcccgtccctgcgatcgctggctcgaagagcagcagtccatgctggcactgcctccggagaaaaaagagtatgacgtgcatcctggtgaaaatctggtgaacttcgataaacaccccctgcatcatccactctccatctacgactcattctgcagaggagtggcgtga

SEQ ID NO: 467732 - DNA, 384 bp, Shigella boydii; identical to SEQ ID NO: 467192

SEQ ID NO: 467733 - DNA, 273 bp, Shigella boydii; identical to SEQ ID NO: 461110

SEQ ID NO: 467734 - DNA, 372 bp, Shigella boydii
gtggtgtgggtcggtaaggatgtgacaggcattgaaccccgtaacgccagtgttattgaagttcctgatattaccgccaaccgccgcattaccgcgccgggttactggttttaccgcaatgatgaatttgtccttgactacagactcaaagcggaagatgagcgtgatgcccttctggctcaggtcagtgcccggacaggggaatgggaagaagacctgttgctggggttaatcagcgacgaagataaagaaaagctgaaagcctgtcgtatttacgcgaaatcgctgcaggcgatggatttcagcaccatcacagataaagccacatataacgccatcaactggccggagcgtcccgatgccgcagcttaa

SEQ ID NO: 467735 - DNA, 789 bp, Shigella boydii
gtgataccaaaaataattcattactgctggttcggtcgctctccattgtcggaattaacaaagcagtgcattgcaagctgggagaaatattgtcctgaatataaaatcataagatgggatgaaaataatgtcgatttgaattcttgttcttttgttagacaagcttataaagaaaaaaaatgggcgttcgtttctgattatgtaaggcttaaagtggttaatgaatatggcggtatctatcttgatacagatgttgaattaataaagccattagatgatttgttaatatatcctgcatatataggctttgaaattaacaaggaatggtatgtaaattctggtttagggttcggttctgttaataataatccggttttagaatcattaattatggagtatgaaaatattaattttgtaaatgaggatgggactctaaatataacgccgtgccccataagagaaacaaaagcattaacaaaaataggtttaattcctgatggtcaatgtcaatcttttgataatatagtgattttttctgcagattatttttgtcctgtatctataacaggtgagagaaatttttctgataaaacatattcaatacatcattacgatgctagttggttttctgagcaaaagagaaaaggcctgcaacgtaaaaagagatttataaaactattcggcaacctaataggcacatatattaataaaccttttatttttgtagatgaatgtcgcgagttcggattagttaaagcaatcaagaatatgcgttccaattttccttaa

SEQ ID NO: 467736 - DNA, 318 bp, Shigella boydii; identical to SEQ ID NO: 464994

SEQ ID NO: 467737 - DNA, 657 bp, Shigella boydii
atgaaaaaatttaatattaaatctttgactctcttgattgtattgttaccattgatagttaatgctaataatattgactctcatttattagaacaaaatgacatagcgaaatatgttgctcaaagtgatacggtaggatctttttttgaacgtttttctgcgttattaaattatcctattgttgttagcaaacaagctgcaaaaaagagaatatctggggagtttgatttatctaatccagaagaaatgcttgaaaaaatgacattacttgtgggactcatatggtataaagatggaaatgcattatacatatatgactctggagaattaataagcaaagttattttgctggagaatatatcacttaattatcttattcagtatctgaaggatgctaacctttatgatcacagatatcctataagaggaaacattagtgataaaacattctatatatctggtcctccggcattggttgaactggtagctaatacagcaactttgcttgataagcaggtttcttctattgggacagataaagttaattttggggttataaaattaaaaaatacatttgttagtgacagaacttataatatgagaggggaggatattgtctgtctcttatacacatctccgagcccacgagactcctga

SEQ ID NO: 467738 - DNA, 327 bp, Shigella boydii; identical to SEQ ID NO: 464915

SEQ ID NO: 467739 - DNA, 324 bp, Shigella boydii; identical to SEQ ID NO: 465528

SEQ ID NO: 467740 - DNA, 450 bp, Shigella boydii; identical to SEQ ID NO: 465724

SEQ ID NO: 467741 - DNA, 420 bp, Shigella boydii; identical to SEQ ID NO: 464991

SEQ ID NO: 467742 - DNA, 420 bp, Shigella boydii
atggaacagaaagcattatctgcagaaccccgcagatcattttcaaatgagtttaaacttcaaatggttaaactggcttcacaaccaggagcctctgttgcccgtattgcccgggaacacgatatcaatgataacctgctgttcaaatggctcagtctctggcagaacgaagggcgcatatcgcggcgtcttccggtaacaacctcttctgacactggcgttgaattattacctgtggagataacgccggatgagccgaaagaaccggtggctgctcttactccgtctttatctactcagactacagttagtgccagctcctgcaaggtggagttccgtcacggtaacatgacgctggaaaatccttcaccagagctgctcacagtgttgatccgtgaactgaccgggaggggacgatga

SEQ ID NO: 467743 - DNA, 468 bp, Shigella boydii; identical to SEQ ID NO: 466669

SEQ ID NO: 467744 - DNA, 270 bp, Shigella boydii; identical to SEQ ID NO: 466546

SEQ ID NO: 467745 - DNA, 150 bp, Shigella boydii; identical to SEQ ID NO: 466582

SEQ ID NO: 467746 - DNA, 591 bp, Shigella boydii; identical to SEQ ID NO: 466583

SEQ ID NO: 467747 - DNA, 582 bp, Shigella boydii
atggcattcagaatgagtgaacaaccacggaccataaaaatttataatctgctggccggaactaatgaatttattggtgaaggtgacgcatatattccgcctcatacaggtctgcctgcaaacagtaccgatattgcaccgttagatattccggcaggcttcgtggctgttttcaacagtgatgagtcatcgtggcatctctttgaagaccatcggggtaaaacggtttatgacgtggcttccggcgacgcgttatttatttctgaactcggtccgttaccggaaaatgttacctggttatcgccggaaggggagtttcagaagtggaacggcacagcctgggtgaaggatacggaagcagaaaaactgttccggatccgggaggcggaagaaacaaaaaacaacctgatgcaggtagccagtgagcatattgcgccgcttcaggatgctgcagatctggaaattgcaacggaggaagaaacctcattgctggaagcctggaaaaagtatcgggtgttgctgaaccgtgttgatacatcaactgcacctgatattgagtggccgacttcacctgcagagtaa

SEQ ID NO: 467748 - DNA, 132 bp, Shigella boydii; identical to SEQ ID NO: 466596

SEQ ID NO: 467749 - DNA, 438 bp, Shigella boydii; identical to SEQ ID NO: 466613

SEQ ID NO: 467750 - DNA, 513 bp, Shigella boydii; identical to SEQ ID NO: 466622

SEQ ID NO: 467751 - DNA, 510 bp, Shigella boydii; identical to SEQ ID NO: 466632

SEQ ID NO: 467752 - DNA, 1212 bp, Shigella boydii; identical to SEQ ID NO: 466651

SEQ ID NO: 467753 - DNA, 138 bp, Shigella boydii; identical to SEQ ID NO: 466652

SEQ ID NO: 467754 - DNA, 159 bp, Shigella boydii; identical to SEQ ID NO: 6188

SEQ ID NO: 467755 - DNA, 819 bp, Shigella boydii; identical to SEQ ID NO: 9287

SEQ ID NO: 467756 - DNA, 477 bp, Shigella boydii; identical to SEQ ID NO: 459487

SEQ ID NO: 467757 - DNA, 264 bp, Shigella boydii; identical to SEQ ID NO: 466667

SEQ ID NO: 467758 - DNA, 933 bp, Shigella boydii; identical to SEQ ID NO: 466671

SEQ ID NO: 467759 - DNA, 501 bp, Shigella boydii; identical to SEQ ID NO: 467505

SEQ ID NO: 467760 - DNA, 963 bp, Shigella boydii; identical to SEQ ID NO: 466690

SEQ ID NO: 467761 - DNA, 393 bp, Shigella boydii; identical to SEQ ID NO: 466694

SEQ ID NO: 467762 - DNA, 1635 bp, Shigella boydii; identical to SEQ ID NO: 467511

SEQ ID NO: 467763 - DNA, 165 bp, Shigella boydii; identical to SEQ ID NO: 466698

SEQ ID NO: 467764 - DNA, 588 bp, Shigella boydii; identical to SEQ ID NO: 466701

SEQ ID NO: 467765 - DNA, 654 bp, Shigella boydii; identical to SEQ ID NO: 466699

SEQ ID NO: 467766 - DNA, 546 bp, Shigella boydii
atgtccggcagtgcttttgccgttacgcaccacgccttcagtagcggagcaggaaggacatctgatggaaatggaagccacgcaagcaccttaaaatcaccatcatacactaaatcagtaagttggcagcattaccgtgaatttgaacgtagctggacattgaaaccattcattaccaaacctgaaaatccgattataggaaatgatgtctggataggaaatgatgttgtattgaaaggtggcatcgcaataggtgatggtgctgttattgctgccaattccgttgttaccaaagatgtgcccccatatgccatagttgcaggagttcctgcaaaaataatcagatttaggtttgattcaaatgttattgatgaactgttgagaataaaatggtggaattataactactcagatcttccggataataacaagtgtgatgatataaattattttgttgaagagatgaatcgattgatatcagatggaaatattcaagagagggactataaaaaattcaatctttctgaggtattcagaggcctataa

SEQ ID NO: 467767 - DNA, 528 bp, Shigella boydii; identical to SEQ ID NO: 466734

SEQ ID NO: 467768 - DNA, 216 bp, Shigella boydii
atggcggaaaatcgtgttgaggccaacgcccataatgcgggcagttgcccggcatccaacgccattcatggccatatcaatgattttctggtgcgtaccgggttgagaagcggtgtaagtgaactgcagttgccatgttttacggcagtgagagcagagatagcgctgatgtccggcggtgcttttgccgttacgcaccacgccttcagtagctga

SEQ ID NO: 467769 - DNA, 309 bp, Shigella boydii; identical to SEQ ID NO: 467527

SEQ ID NO: 467770 - DNA, 342 bp, Shigella boydii; identical to SEQ ID NO: 466754

SEQ ID NO: 467771 - DNA, 267 bp, Shigella boydii
atggtgaggtacttcgggttccttgccaaccgggtgtgtggagagaagctgccgcaggtgtaccgtgctctggggatggataaacaggaaccagtggcgaaagtgtgctatgcacaaatggtgaaacagttcctgagtcgtgacccgttcgaatgcgtgctgtgtggcggccggatggtataccgccgggccattgcggggctgaatgtggaggggctgaagaaaaacgcgcgggatatcagtctgctgaggtatatgccggcctga

SEQ ID NO: 467772 - DNA, 216 bp, Shigella boydii; identical to SEQ ID NO: 21701

SEQ ID NO: 467773 - DNA, 312 bp, Shigella boydii; identical to SEQ ID NO: 466748

SEQ ID NO: 467774 - DNA, 267 bp, Shigella boydii; identical to SEQ ID NO: 467771

SEQ ID NO: 467775 - DNA, 546 bp, Shigella boydii
atgttagatcagtttgaaaatcggtatcctgatctattaaaggaagtcttccgacatgtgactatacagagaatttctgaggtattacaaagattgcttggagaaaatatttctgttcgcaatttaaaacttattatggagtctttggcgctttgggctcccagagaaaaagatgtcataacattagttgaacatgtccgtgcatcactttctaggtatatttgtagtaaaatagctgtttctggtgagattaaagttgtgatgctttccggatatattgaggatgcaataagaaaagggataaggcaaacctctggtggctctttcttgaatatggatatagaggtttcggatgaggtaatggaaactttagcacatgctttgagagaattgagaaatgcaaaaaaaaatttcgttcttttggtatcagtagatatacgtaggtttgttaaaagacttatagataacagatttaagagtatactcgttatatcgtatgctgagattgatgaagcatataccattaatgtattaaagactatttag

SEQ ID NO: 467776 - DNA, 1479 bp, Shigella boydii
gtgatccagtcttttcttaagcaagtaagtactaagcctgaattaattatattagtgcttatggttatgatcattgctatgttgatcataccattacctacataccttgttgattttttaatagggcttaatattgtacttgctattctcgtttttatgggatcattttatattgaaagaatattgagtttttctacattcccttcggttttgttgataacgacattatttcgtctcgctttatcaataagtactagtcgactaattttagttgatgcggatgcgggtaaaattattactacatttggccagtttgtcattggtgatagtctggctgtaggttttgttattttttcaatagtaactgttgtgcagttcattgttataacaaaaggatctgaaagggttgcggaggtagctgctcgcttttctcttgacggtatgccggggaaacaaatgagcattgatgcggatttaaaggctggaattattgatgccgcaggagctaaagaaagacgcagtattctggaacgtgagagtcaattgtatggttcatttgatggagcaatgaagttcattaaaggtgatgcaattgctggcatcattattatttttgtcaatttaataggaggtatttctgttggtatgagtcaacatggaatgtctctatctggtgcattatctacttataccatactaactattggtgacggattggtctctcagattcctgctctgttaatttctataagtgcaggatttatcgttacaagagttaatggtgatagcgataatatgggacgtaacataatgtcccagatatttgggaatccttttgttctcattgttacatcagctcttgccttggcgatagggatgttgccaggttttccgttttttgtttttttcctgatagcagttactttgacggctttattctattataaaaaggtcgtagaaaaagaaaaaagtctgtctgagtctgattctagtggctatactggtacatttgatattgataatagccatgactcatctttggcaatgatagaaaatctggatgctattagttcagaaaccgttcctttaattttattatttgccgaaaataagataagtgcaaatgatatggaaggtcttattgaaaggataagaagtcagttctttattgattatggtgtcaggcttccaactattttatatagaacaagcaatgagcttaaggtcgatgatattgttttgttaataaatgaggtgcgtgccgatagttttaatatatactttgacaaagtgtgtattacagatgaaaatggagatatagatgctctaggtattcctgttgtttcaacttcatataatgaacgtgttatttcttgggtagacgtttcatatacagaaaatctaactaatattgatgctaaaattaaaagtgctcaagatgaattttatcaccagttgtcacaagctttattatgttag

SEQ ID NO: 467777 - DNA, 213 bp, Shigella boydii; identical to SEQ ID NO: 466777

SEQ ID NO: 467778 - DNA, 1056 bp, Shigella boydii; identical to SEQ ID NO: 467541

SEQ ID NO: 467779 - DNA, 372 bp, Shigella boydii; identical to SEQ ID NO: 11381

SEQ ID NO: 467780 - DNA, 417 bp, Shigella boydii
atggaagggtttttttttgtccgaaatcaaaatataaaattcagtgataatgtgaactatcattatcgctttaacattaatagttgtgcaaaatttcttgctttttgggactatttcagtggtgctctagtagagcatagccatgctgaaaaatgtattcatttctatcatgagaatgatcttcgggatagttgtaataccgaatcgatgcttgataagttaatgttaagattcatcttttcatctgaccagaatgtaagtaatgcactggctatgatacgaatgactgagtcatatcatttggttctttatcttctgagaactattgagaaagaaaaggaggtaagaataaagagtctgacagagcattatggtgtgtcggaggcttattttagatctttatgtagaaaagcctag

SEQ ID NO: 467781 - DNA, 189 bp, Shigella boydii; identical to SEQ ID NO: 467093

SEQ ID NO: 467782 - DNA, 150 bp, Shigella boydii; identical to SEQ ID NO: 461565

SEQ ID NO: 467783 - DNA, 771 bp, Shigella boydii; identical to SEQ ID NO: 467550

SEQ ID NO: 467784 - DNA, 210 bp, Shigella boydii
atgacggatggctggccgctgtatgaatcacgcctgaagggaaagctgcacgttatcagcaagcgttacactcagcgcattgagcgacataatctgaatctgagacaacatctggcaaggccgggacggaagtcactgtcgttctcaaaatcggtggagctgcatgacaaggtcatcgggcattatctgaacataaaacactatcagtaa

SEQ ID NO: 467785 - DNA, 210 bp, Shigella boydii; identical to SEQ ID NO: 467784

SEQ ID NO: 467786 - DNA, 1020 bp, Shigella boydii
atgaaatatacaccggttggcgttgatatcgcaaaacatgtcattcagattcacttcatcaatgagcacacaggtgaagtggttgataaacagttgcgtagacaggattttctgacgttcttcggcaaccgtgagccatgcctgattggtatggaggcctgtggaggttctcagcactgggcacgggaactgacaaaacttggtcataaagtccggttgttgcaggcccgcttcgttaaggcattcgtcatgggcaataagaatgatgtgatggatgcccgggctatctggatggcggttcagcagccgggtaaagaaatcgccgtaaaaacagaagaacagcagtcggtactggttctgcaccgtacccgcatgcaactggtgaagttccggaccgcacaaattaatgccctgcacgggacgttactggagtttggtgaaaccatccacaaaggccgggcagcgatggagcgggagttccccgaagcactggaacggatgaaagagagactgccaccgtatctcattatggttctggaaaaccagtacaaccgactgaatgagctggactcactgatagaggatattgaaaaacagcttaccagcgtggcgaggcagaatgaaacctgtaagcggttgctggatattcctggcgttggaccacttattgcgacggcagcggtggccaccatgggggaagcatcagcgtttaaatcggggcgagagttcgccgcatatgttggtctggttccaaaacaaactggctccggagggaaagtacgtctgctggggataagcaaacgtggtgacacttatctcaggacattatttatccacggtgcaagagcggtggcattagtagctaaagagcctggcccgtggataaccgaactgaaaaaacgtcgtccagccagtgtggcaatcgtcgccatggcaaacaagctggcacgaacagtatgggcgataaccgcccatgaccgtaagtatgacaggaaccacgtcagtatcagaccatattaa

SEQ ID NO: 467787 - DNA, 357 bp, Shigella boydii
atggccacaggccagactcaacagcttattacattattcaaacagttgcccatactccctgaaaaagaaatcattgaaataataactgcgcagaatagcgttggtacacctgctttatttctggctatgatgaacggacatactgacaacgtaaaaatatttatgcaagaaattcagtcactgatatacaatcatatcattcatgaagataatctggttaaattactgcaaactaaaagtgctaacgaaacacttgggctctatatctccatgttgtatgggttcgatgaaacaatcgatatctttctgaatgcattaaccactccaatagcacaagagcttttaaacaaaaaatag

SEQ ID NO: 467788 - DNA, 228 bp, Shigella boydii; identical to SEQ ID NO: 466818

SEQ ID NO: 467789 - DNA, 372 bp, Shigella boydii; identical to SEQ ID NO: 11381

SEQ ID NO: 467790 - DNA, 513 bp, Shigella boydii
atgaatcaaaaatacctcattcgcattgcagaactggaatgccagctccgtcagaaagaccagcaactgagtctggttgaagagacggaggcctttctgcgctctgcactggcccgcgccgaagaaaagatcgaagaagatgaacgggaaatagaacatctgcgggctcagacagaaaaactgcgtcgtgaagttgaacaggctgaggccctgctgaaacaacgcgaacaggacagtgatcgttacagtgggcgggaagacgatccgcaggttccccgccagttgcgacagtctcgtcatcgtcgcccgttaccggagcatctgccccgcgaaataaatcgcctggagccagtgaaccgccccgggtttcctggagagtgttttatctgtgaactcaggctgccagatcatcgtttccgatggaagcataataagctttttctgcttctgccggaggagtatggcccagcctttccagcaatcgtcgattgttataccagtccacccacgtga

SEQ ID NO: 467791 - DNA, 210 bp, Shigella boydii
atgacggatggctggccgctgtatgaatcacgcctgaagggaaagctgcacgttatcagcaagcgttacactcagcgcattgagcgacataatctgaatctgagacaacatctggcaaggccgggacggaagtcactgtcgttctcaaaatcggtggagctgcatgacaaggttatcgggcattatctgaacataaaacactatcagtaa

SEQ ID NO: 467792 - DNA, 522 bp, Shigella boydii
atgattaaaatcgttaacgaggacttacatgcttttactaaaaatggcagtttcgctagtaaagttaaatgcacaattataagccatacttttcatctagtgctcatgatacgcttagggcagtttctatcaaagatacctgtgatcggcgcattttttagattggtcattgaatattccataagaatcatattttctagtgatataagtctaagggcaaggattggtggtggattagtaataatgcatggccatgatatcgttattggaagagatgttgtcataggcagaaattgtaaaattctgaatggcgtcactttaggtaataaggacacggaatcaacagaaaaccagcaaccagtagtgggtgataatgtgataattggtactggagctaaaattctggggaaagtagttataggaaataatgttaaaattggagctaatagtgtagttatttctgacattgctccagattctgttgctgttggtatacctgcaagggttactaaaggtatctaa

SEQ ID NO: 467793 - DNA, 372 bp, Shigella boydii; identical to SEQ ID NO: 467542

SEQ ID NO: 467794 - DNA, 372 bp, Shigella boydii; identical to SEQ ID NO: 11381

SEQ ID NO: 467795 - DNA, 216 bp, Shigella boydii; identical to SEQ ID NO: 21701

SEQ ID NO: 467796 - DNA, 249 bp, Shigella boydii; identical to SEQ ID NO: 466827

SEQ ID NO: 467797 - DNA, 276 bp, Shigella boydii
atggttctggaaagtcagggcgaatatgactcacagtgggcggcaatttgttccattgccccaaagattggctgtacaccggagactctgcgtgtctgggtacgccagcatgagcgggataccggaggcggtgatggcgggctcaccaccgctgaacgtcagcgtctgaaagagccggaacgtgaaaatcgtgaactgcgccgcagtaacgatatccttcgccaggcttccgcttattttgcgaaggcggagttcgaccgcctctggaaaaagtga

SEQ ID NO: 467798 - DNA, 186 bp, Shigella boydii; identical to SEQ ID NO: 462789

SEQ ID NO: 467799 - DNA, 378 bp, Shigella boydii; identical to SEQ ID NO: 460256

SEQ ID NO: 467800 - DNA, 639 bp, Shigella boydii; identical to SEQ ID NO: 465403

SEQ ID NO: 467801 - DNA, 705 bp, Shigella boydii; identical to SEQ ID NO: 465404

SEQ ID NO: 467802 - DNA, 378 bp, Shigella boydii
atggacgaacagtggggatacgtcggggctaaatcgcgccagcgctggctgttttacgcgtatgacaggctccggaagacggttgttgcgcacgtattcggtgaacgcactatggcgacgctggggcgtcttatgagcttgctgtcaccctttgaagtggtgatatggatgacggatggctggccactgtatgaatcccgcctgaagggaaagctgcacgtaatcagcaagcgatatacgcagcgaattgagcggcataacctgaatctgaggcagcacctggcacggctgggacggaagtcgctgtcgttctcaaaatcggtggagctgcatgacaaagtcatcgggcattatctgaacataaaacactatcaataa

SEQ ID NO: 467803 - DNA, 201 bp, Shigella boydii; identical to SEQ ID NO: 465760

SEQ ID NO: 467804 - DNA, 219 bp, Shigella boydii; identical to SEQ ID NO: 465432

SEQ ID NO: 467805 - DNA, 297 bp, Shigella boydii; identical to SEQ ID NO: 461859

SEQ ID NO: 467806 - DNA, 1050 bp, Shigella boydii
gtggcgaaaaatctgcaatggagccacgatgctaaatgcctgaaatccggtcaactggaaggcatggaaattaaggctgatttaagccagtccgcattagtcatttcattgccacaggcttacctcgaatatacttatcccgactgggatccgccttcacgttgggatgacggcatctccgggatcgtcgcggactacagcatcaacgcacaaacccggcacgaagaaaatggcggtgatgatagtaacgagatcagcggcaacgggacggtcggggttaacctggggccgtggcgtatgcgtgctgactggcagactaactatcaacatactcgcagtaatgatgacgatgaattcagcggcgatgaaactcaaaaaaaatgggagtggagtcgctactatgcctggcgggcgttaccatcattaaaagccaaactggcgctgggcgaggattacctcagatccgatatttttgatggttttaactatgttggtggcagtgtcagtactgacgatcaaatgttgcctcccaatctgcgcggctacgcgccagacatttccggcgtggcacacaccacagcaaaagtgaccgtcagccagatggggcgtgtgatttacgaaacgcaggttccggctggaccgtttcgtattcaggatcttggtgattctgtctccggtacgttgcatattcgcattgaagaacagaacggccaggtgcaggaatatgacatcagcaccgcctcgatgccatacctcactcgtccaggtcagattcgctataagatcatgatgggccgtccgcaagagtggggacaccatgtcgagggtgaattttttctggtgctgaagcttcctgggggatcgctaacggctggtcgttatatggcggcgcactgggagatgaaaactatcagtctgcggcgcttggcgtcggtcgcgatttgtctacattcggcgcggtcgcgtttgatgttactcactcgcacaccaaactggataaagacaccgcttatggcaaaggttcgctggacggtaactccttccgtgtga

SEQ ID NO: 467807 - DNA, 309 bp, Shigella boydii
atgagcagaaaaaaccaacgttactctaaagagttcaaagccgaagctgtcagaacggttcttgaaaatcaactttcgatcagtgaaggcgcttcccgattatcccttcctgaaggcactttaggacaatgggttaccgccgccagaaaagggctcggtactcctggttcccgcacggtggctgaactggaatctgaaattctgcaactgcgtaaggcgttaaatgaagctcgccttgagcgatatatattaaaaaaagcaacagcgtattttggtaagcgtaaactgaccgccgtatgtagccattaa

SEQ ID NO: 467808 - DNA, 291 bp, Shigella boydii
atgtatcagggcctgggctgggaaatgctggactggccggtcaatcctgacagcatcattaacggcagtgacaataaaattgcactggcagcacgcccggtaaaagcgattaagcccccaactcctgcagtacgcgcatcatgggtacataaaacgggggcgaccggcggatttggtagctatgtcgcgtttattccagaaaaagagctgggtatcgtgatgctggctaacaaaaactatcccaatccagcgagagtcgccgcctgtcagattctcaacgctctacagtaa

SEQ ID NO: 467809 - DNA, 600 bp, Shigella boydii; identical to SEQ ID NO: 465782

SEQ ID NO: 467810 - DNA, 303 bp, Shigella boydii; identical to SEQ ID NO: 459543

SEQ ID NO: 467811 - DNA, 132 bp, Shigella boydii; identical to SEQ ID NO: 465690

SEQ ID NO: 467812 - DNA, 366 bp, Shigella boydii
gtgcgtaaagtcaggcatcagttgttacgggaaggtatcagagtggccagatgcactgtggcacgtctcatggcggttatggggcttgccggtgttctccggggtaaaaaggtccacactaccgtcagccggaaagccgttgccgcaggcgaccgcgtaaaccgtcatcaaggcaatgtgccgcgtactccgggtggcccgcagcggctggtatacgtggtgtcagcggcggacaaggataaacacacgtcagcagttccgtcagcactgcgacagcgttgtccgcaaggcttttacccagtccagcgttacggtgccccacgcctgacggatgaactgtgtgctctggttaccactttaacgtaa

SEQ ID NO: 467813 - DNA, 213 bp, Shigella boydii; identical to SEQ ID NO: 462242

SEQ ID NO: 467814 - DNA, 480 bp, Shigella boydii; identical to SEQ ID NO: 463183

SEQ ID NO: 467815 - DNA, 480 bp, Shigella boydii; identical to SEQ ID NO: 463183

SEQ ID NO: 467816 - DNA, 303 bp, Shigella boydii; identical to SEQ ID NO: 464760

SEQ ID NO: 467817 - DNA, 480 bp, Shigella boydii; identical to SEQ ID NO: 464912

SEQ ID NO: 467818 - DNA, 345 bp, Shigella boydii; identical to SEQ ID NO: 464381

SEQ ID NO: 467819 - DNA, 189 bp, Shigella boydii; identical to SEQ ID NO: 462047

SEQ ID NO: 467820 - DNA, 480 bp, Shigella boydii; identical to SEQ ID NO: 463183

SEQ ID NO: 467821 - DNA, 180 bp, Shigella boydii; identical to SEQ ID NO: 461173

SEQ ID NO: 467822 - DNA, 276 bp, Shigella boydii; identical to SEQ ID NO: 461950

SEQ ID NO: 467823 - DNA, 318 bp, Shigella boydii; identical to SEQ ID NO: 464994

SEQ ID NO: 467824 - DNA, 258 bp, Shigella boydii
gtggcagaggacggtaccgaaaaacgttatctgccggagggcacgctggtgctggggaatacggcagcagaggggattcgttgctatggagccattaaggatgcacaggcgttgtctgaaggagtggtggcttcttcccgttacccgaaacactggctgaccgtgggcgatccgtcctgtgaattcaccatgacgcagtccgcgccgctgatggtgctgccggatccggatgagtttgtggtggtacaggtgaaataa

SEQ ID NO: 467825 - DNA, 810 bp, Shigella boydii; identical to SEQ ID NO: 464809

SEQ ID NO: 467826 - DNA, 639 bp, Shigella boydii; identical to SEQ ID NO: 465403

SEQ ID NO: 467827 - DNA, 177 bp, Shigella boydii; identical to SEQ ID NO: 464860

SEQ ID NO: 467828 - DNA, 360 bp, Shigella boydii; identical to SEQ ID NO: 464873

SEQ ID NO: 467829 - DNA, 300 bp, Shigella boydii; identical to SEQ ID NO: 465758

SEQ ID NO: 467830 - DNA, 288 bp, Shigella boydii
atgggggttggtccggtccatgtgatggaacgccacatcggcaatcatgccccgactgacaaagttttcccggacaaaagcgagaacggtttcccgtgcggcctcgcgggaaatctcacggggaatggcgagttcaatctcccttgccagctgggagttccggcgctgttcggctttctcgaccgcattccagagaacggaacggtcaccacaccaggacggtgcattcgcaggggtgagaatgaccgcatcatcaacgccgcgtttacgggtgtaatcgtgggttaa

SEQ ID NO: 467831 - DNA, 267 bp, Shigella boydii
atgagcagaacactcgaacagaagattgccgaagctgaggccagattgcagcgcctgaaggcgaagagccggagcctggacacggcgcaaaaagtcattgtgggggctgccatgctggcgagggtacggaggccggaagaagcgcaactgcgtgcgttcctgctccagttcctgcgaaaggaagtcacaagacaggccgatgtgaaccggatacaacctctgattaacgagctggagaagctacccaaaccacctgcgaaaccgtag

SEQ ID NO: 467832 - DNA, 174 bp, Shigella boydii
atgccggattctttaaatacaggggaaagtatgaaaaaaataacagggattattttattgctttttgcagccattattctggctgcttgtcaggcaaactatatccgtgatgttcagggcgggactgtatcaccgtcatcaactgctgaactgaccggagtagaaacgcagtaa

SEQ ID NO: 467833 - DNA, 258 bp, Shigella boydii
atgggacttaaattaaatttaacttggtttgataagaaaactgaagattttaaaggggaagagtattctaaagactttggtgatgatggttctgtcattgaaagtcttggaatgcctttaaaggataacattaataatggcgggtttgatgttaaaaaatcatgggttccgttgttgcagccatattttaaaaataaaattgaagtagataagtactggtatcaaatttcatttgattatcgggatggtaactggtaa

SEQ ID NO: 467834 - DNA, 1641 bp, Shigella boydii
atgagcggtggagatggacgtggccacaacagtggcgcacataacacaggtggtaacattaatggcggccctacggggcttggtggaaatggtggggcttctgacggctccggatggagttcggaaaataacccatggggtggcggttccggtagtggtgttcactggggaggtggctccggccatggcaatggtggggggaatggtaattccggtggtggcagcaactcatccgtagcagcagtggcatttggttttcctgctttggcagctcctggtgccggaacactgggtatcgccgtctctggtgaggctttatctgcggcaatagcggatatctttgcagccctgaaaggcccgtttaaattcagtgcatggggtattgcgctttacagcattctgccatctgaaatagcaaaagatgacccgaaaatgatgtcaaagattgtgacgtcattaccggcagaaaccgtgacgaatgtccaggtcagtacacttccgctggaccaggcaacggtcagagtgacgaagcgtgtaacagatgttgtgaaggacaaacgacagcatattgccgtggttgcgggtgtacctatgagtgtgcctgttgtaaatgctaaaccaacacgtactcctggtgtatttcgcgcatcatttcctggtgtcccttctctgacacttagcactgtcaaaggccttccggcgtcaacaacccttccccgtggtattacggaggataaaggccggactgcctctcctgcaggatttacctttggtggtggttcacatgaagcggtgatccgttttccgaaagaaagtgggcagaagccggtttatgtatcagtaacagatgttcttacctctgcacaggtaaaacaacgtcaggatgaagagaatcgcctccagcaggaatggaatgacacacatccggtagaagtagctgaacgcaattatgaacaggctcgcgcagaactgaatcaggctaataaggatgttgccagaaatcaggaacgacaggctaaagctgttcatgtttataattcgcgtaaaagtgaacttgatgcagcgaataaaacttttgctgatgcaaaggctgaaataaagcgattcgagcgatttgctcgagaaccaatggctgctggtcacagaatgtggcaaatggcagggcttaaggcccagcgggcacagacggatgtaaataataagaaggctgcatttgatgctgccgcaaaagagaagtcagcagcagatgctgcattgagttctgcgatggaaagcaggaagaagaaagaagataagaaaaggagtgctgaaaataaattaaacgaggaaaaaaacaagcctcgcaagggagttaaagattacggtcatgattatcatcccgctccaaagaccgaagaaataaaggggttgggggaattaaaaaaagcacctaaaaaaacacctaaacaaggtggtggtggtagacgtgaccgctggattggtgataaaggccgtaagatttatgaatgggactcccagcacggtgagcttgaagggtatcgtgccagtgatggcgaacacatcggggcatttgacccaaaaacgggtaaacaaattaaaggtccggatccgaaagggcgaaatattaaaaaatatctttaa

SEQ ID NO: 467835 - DNA, 624 bp, Shigella boydii
atgtattccggtgcgacggtccggcatgtactggaacagatgcgccaggggtggccctcttacggttttccggcgctgccgcatcactggccggataatttttatttcagcgacgaccgcaggcccgtagcctctccgctgccgtcagcgcaccgggtggacgtcaccgcttatgcggtaccggggcaactcatgcccgttgtattttcgacagagcgaaacagcaggaagctgaatctgctgttgtgcaaagggccggaggaaatgcttgtcggatttgtgcgccaggaggacgggctgcgtcccgttcttgtgcttccgtcgccggattacagtcatctgatggtcagcaccatcacagagaacgggatacacctggcaggctacggtgaggccataaaccgtgatgctgatactccgtacccaccggaaccgcacctgatgcagttccggcttaagggctgtcaggacacgctttttgctgccatcaacaaaccggaagagatgccggattatctcttccgtcaactcggttttaatcagacctggcatgagtggaagcgggacgaacagcacaggcaacaacaacgccgccccgggcacttccggggtatgagtatgtga

SEQ ID NO: 467836 - DNA, 1110 bp, Shigella boydii
atgcggtggatcctgttcatcctcttctgcctgctgggcgcacctgcccacgcggtatccatacccggcgttacaaccacaacgacaacggactcaacgactgaaccggccccggaaccggatatcgaacaaaaaaaagcggcctatggcgcactggcggatgtgctggataacgacacctcgcgtaaagaattgatcgaccagttgcgtactgtcgccgcgacgccccctgcggaaccggtcccgaagatcgtgccgccgacgctggttgaagagcaaaccgtgctgcaaaaggtcaccgaagtcagccgccattatggtgaagccctttccgcccgcttcgggcaactttatcgcaatattaccggctccccgcataagccgtttaatccacaaacattcagcaatgcgctgacccatttttcaatgttagcggtattagtgtttggtttttactggctgattcgcctgtgcgcactgccgctgtatcgcaaaatgggcctgtgggcgcggcaaaaaaatcgtgagcgcagtaactggttgcagcttccggcgatgattatcggggcgtttattatcgacctactgttactggcactgacattatttgtcggccaggtattaagcgacaacctgaatgcaggcagtcgcaccatcgctttccaacaaagtttgtttctcaacgcctttgccctgattgaatttttcaaagctgtactacgcctgattttttgcccaaacgtggctgaactgcgcccgttcacgattcatgacgagaccgcccgttactggagtcgtcgcctgagctggttaagcagtttgataggttatggcctgattgtggccgtgccgattatctctaatcaggtgaatgtacagataggtgcgctggcgaacgtcatcattatgctgtgcatgaccgtctgggcgttgtacctgatctttcgcaataaaaaagagattacccaacatttgctcaactttgcggagcattcgctggccttttcagcctgtttatccgcgcctttgcgctggtgtggcactggctggcaagcgcctattttatcgtgctgtttttcttttcgttgttcgatccgggcaacagcctga

SEQ ID NO: 467837 - DNA, 819 bp, Shigella boydii
atgtgtcgggtacctggtgtatccaggagcggttattacgaccgggtacagcatgccccctcagacagaaaacaaagtgatgagcggctaaaactggagattaaggtggcacatatccgcactcgcgaaacatatggaacccggcggctccagacggagctggtagataacggaattatcgtcggtcgtgacagactggcacgtcttcgtaaggagctgaggctgcactgtaagcagaaacgcaagttcagggcgaccacaaactctgaccacaatctgccggttacgccgaatctgctgaatcagaactttacgcccacagcacctaatcaggtctgggtcgcagatataacgtatgttgccacccgggaaggatggctgtatctcgccggcgtcaaagatgtttatacgtgcgaaattgtcggttacgccatgggagagtgcatgacgaaagagttgacgggtaaagccctgtttatggcgctcaggagccagcgcccacctgccgggctaatccaccactctgatcgaggttcacagtactgcgcatacgattaccgggtcatacaggagcagtctggtctgaaaacatcaatgtcgcgtaaaggtaactgttacgacaacgctccgatggaaagcttctggggaacgctgaaaaatgaaagcctgagccactatcgttttaagagccgggatgaggccatctcagtaatacgggaatacattgagattttctacaatcgtcagcgtcgtcactctcgtctggggaatatctccccggcagccttcaggataaaatattatcagatgactgcttag

SEQ ID NO: 467838 - DNA, 462 bp, Shigella boydii
atgctaagtacagataacttcaaaaaaataaaactcagagacatatctttggaggatgcgattaaagcatctaattatgaagagattaacaataaagtgactgataaaaaaatggctcatcaggcccttgcttattctttaggcaataaaaaagctgatatagcactttatttactatctaaatttaattttacaaaacaagatgtcgcagagatggagaaaatgaacaacaatagatattgtaatttgtatgatgttgaatacttacttagtaaagatggtgccaactataaagtgctagaatattttatcaataatggattggttgatgtaaacaaaaaatttcaaaaagcaaatagtggggacactatgcttgacaatgcaatgaaaagcaaaaatccaaaaatgattgattttttattaaaaaatggagcaatattaggcaaacgatttgagatatga

SEQ ID NO: 467839 - DNA, 1104 bp, Shigella boydii; identical to SEQ ID NO: 465681

SEQ ID NO: 467840 - DNA, 303 bp, Shigella boydii; identical to SEQ ID NO: 459543

SEQ ID NO: 467841 - DNA, 189 bp, Shigella boydii; identical to SEQ ID NO: 463227

SEQ ID NO: 467842 - DNA, 1020 bp, Shigella boydii
atgaaatatacaccggttggcgttgatatcgcaaaacatgtcattcagattcacttcatcaatgagcacacaggtgaagtggttgataaacagttgcgtagacaggattttctgacgttcttcggcaaccgtgagccatgcctgattggtatggaggcctgtggaggttctcagcactgggcacgggaactgacaaaacttggtcataaagtccggttgttgcaggcccgcttcgttaaggcattcgtcatgggcaataagaatgatgtgatggatgcccgggctatctggatggcggttcagcagccgggtaaagaaatcgccgtaaaaacagaagaacagcagtcggtactggttctgcaccgtacccgcatgcaactggtgaagttccggaccacacaaattaatgccctgcacgggacgttactggagtttggtgaaaccatccacaaaggccgggcagcgatggagcgggagttccccgaagcactggaacggatgaaagagagactgccaccgtatctcattatggttctggaaaaccagtacaaccgactgaatgagctggactcactgatagaggatattgaaaaacagcttaccagcgtggcgaggcagaatgaaacctgtaagcggttgctggatattcctggcgttggaccacttattgcgacggcagcggtggccaccatgggggaagcatcagcgtttaaatcggggcgagagttcgccgcatatgttggtctggttccaaaacaaactggctccggagggaaagtacgtctgctggggataagcaaacgtggtgacacttatctcaggacattatttatccacggtgcaagagcggtggcattagtagctaaagagcctggcccgtggataaccgaactgaaaaaacgtcgtccagccagtgtggcaatcgtcgccatggcaaacaagctggcacgaacagtatgggcgataaccgcccatgaccgtaagtatgacaggaaccacgtcagtatcagaccatattaa

SEQ ID NO: 467843 - DNA, 276 bp, Shigella boydii; identical to SEQ ID NO: 464937

SEQ ID NO: 467844 - DNA, 1131 bp, Shigella boydii; identical to SEQ ID NO: 464945

SEQ ID NO: 467845 - DNA, 312 bp, Shigella boydii
atgattaaagccgtaagtgaaatagaaaagaagataaataaatataatttacaaaagtatctgaataacgagtttcaattgtttaagttaaaacaaaaaatttggtttatatctataagtaagttaaatgttaatgataatgtatggaatctctttcctgaaacaaatccatatatatcaaaggtaaatgtgcttttttattataaaatagtgctttttcttgatagtattaaactgcgttttttttcaaataagatcatttatctcattggattggtgcaggctttattacaagaaaggaaagagaagtga

SEQ ID NO: 467846 - DNA, 480 bp, Shigella boydii
gtggcggacctgacgtatgttgccactcaggagggatggttgtacctcgctggcatcaaagatgtttatacgtgcgaaattgtcggctacgccatgggagagcgcatgacaaaagagctgacaggtaaagccctgtttatggcgctcaggagccagcgcccacctgccgggctaatccaccactctgatcgaggttcacagtactgcgcatacgattaccgggtcatacaggagcagtctggtctgaaaacatcaatgtcgcgtaaaggtcactgttacggcaacgctccgatggaaagcttctggggaacgctgaaaaatgagagcctgagccactatcgttttaataaccgggatgaagccatctcagtaatacgggaatacattgagattttctacaatcgtcagcgtcgtcactctcgtctggggaatatctccccggcagccttcagggaaaaatatcatcagatggctgcttaa

SEQ ID NO: 467847 - DNA, 267 bp, Shigella boydii; identical to SEQ ID NO: 464848

SEQ ID NO: 467848 - DNA, 267 bp, Shigella boydii; identical to SEQ ID NO: 464848

SEQ ID NO: 467849 - DNA, 276 bp, Shigella boydii; identical to SEQ ID NO: 464846

SEQ ID NO: 467850 - DNA, 528 bp, Shigella boydii
atgttctatttcccgttcatcttcttcgatcttttcttcggcgcgggccagtgcagagcgcaggaaggcctccgtctcttcaaccagactcagttgctggtctttctgacggagctggcattccagttctgcaatgcgaatgaggtatttttgattcatggccgtttttataatccggccatgacatttttacaacattgtcagtgcgttaaggcgggatgtttttggctgacgccagtccagcttatcgaggagcattgccagttgcgagcgggtaatggataccttgccgtcacgcacagcaggccagataaactggccttcctccaggcgtctggtgaacaggcacagaccatcagcatcagcccacaggattttaatcatgtcaccccgtcggccacggaagatgaacaggtgaccggagaagggattatcattcagcacatgctgtacctgttcacccagcccgttgaaagacttacggtaagcgtacagcctgaaccgtctggtcagaatctgacgaattag

SEQ ID NO: 467851 - DNA, 303 bp, Shigella boydii
atgagcagaaaaaaccaacgttactctaaagagttcaaagccgaagctgtcagaatggttcttgaaaatcaactttcgatcagtgaaggcgcttcccgattatcccttcctgaaggcactttaggacaatgggttaccgccgccagaaaagggctcggtactcctggttcccgcacggtagctgaactggaatctgaaattctgcaactgcgtaaggcgttaaatgaagctcgccttgagcgagatatattaaaaaaagcaacagcgtattttgcacaggagtcgctgaaaaatacgcgttaa

SEQ ID NO: 467852 - DNA, 303 bp, Shigella boydii; identical to SEQ ID NO: 467166

SEQ ID NO: 467853 - DNA, 228 bp, Shigella boydii; identical to SEQ ID NO: 464473

SEQ ID NO: 467854 - DNA, 591 bp, Shigella boydii; identical to SEQ ID NO: 466583

SEQ ID NO: 467855 - DNA, 720 bp, Shigella boydii
atgccggagaggcggagacgtcagccagcgatgccggcacatcagcccgtgaggcggcaacccgtgcgactgatgctgcagattcagcacgtgcagccaacacgtcagccggacaggccgcgacgtcggctcaggaggctttttccagcgcaggaacggcatcagcaaaagcctctgaggcatcgaaaagtgctgctgcagagtcctcaaaaagcgcggcggccaccagtgccggtgcagcgaaaacgtcagaaacgaatgcggcagccagcgttaccgccgctgaaaaatcggcagaaagcgccgcatcgtctgcttcaacagccacaacgaaggctggcgaagccactgaacaggccagtgcagcagcgaggtctgcttccgcagcgaagacatccgagacgaacgcgaaagcgtcggaaaccagcgcagaatcctcaaaaacggctgccgcatcgtccgccagttcggcagcgtcatcggcatcatcggcgtcagcttcaaaagatgaggcgaccagacaggcgtcagcagcgaagggcagcgccacgacagcatccacgaaggcgacagaggcagctggcagtgcgacggcggcagcacagagcaaaagtacggcggaatccgcggcaacgcgcgccgagacagcggcaaaacgggcagaggatattgcatccgccgtggcgcttgaggatgcaagtacgacgaaaaaggggatag

SEQ ID NO: 467856 - DNA, 132 bp, Shigella boydii; identical to SEQ ID NO: 466596

SEQ ID NO: 467857 - DNA, 513 bp, Shigella boydii; identical to SEQ ID NO: 466622

SEQ ID NO: 467858 - DNA, 438 bp, Shigella boydii; identical to SEQ ID NO: 466613

SEQ ID NO: 467859 - DNA, 333 bp, Shigella boydii; identical to SEQ ID NO: 466616

SEQ ID NO: 467860 - DNA, 204 bp, Shigella boydii
atgcgcgcaccgggcatgaccatgttcaagatgccagtatttacctgggcatcactgtgcgcgaacgtactgattattgcttccttcccaattctgacggttaccgtcgcgttgttgaccctggatcgctatctgggcacccatttctttaccaacgatatgggtggcaacatgatgatgtacatcaacctgatttgggcctag

SEQ ID NO: 467861 - DNA, 261 bp, Shigella boydii; identical to SEQ ID NO: 467487

SEQ ID NO: 467862 - DNA, 153 bp, Shigella boydii; identical to SEQ ID NO: 466629

SEQ ID NO: 467863 - DNA, 441 bp, Shigella boydii; identical to SEQ ID NO: 466649

SEQ ID NO: 467864 - DNA, 138 bp, Shigella boydii; identical to SEQ ID NO: 466652

SEQ ID NO: 467865 - DNA, 276 bp, Shigella boydii; identical to SEQ ID NO: 466659

SEQ ID NO: 467866 - DNA, 198 bp, Shigella boydii
gtgaaaacgataaagcgtgactacatcagtatcatgcccaaaccagacgggttaacggcagcaaagaaccttgcagaggcgttcgagcattataacgaatggcatctgcatagtgcgctgggttatcgctcgccacgggaatatctgcggcagcgggcttgtaatgggttaagtgataacagatgtctggaaatatag

SEQ ID NO: 467867 - DNA, 468 bp, Shigella boydii; identical to SEQ ID NO: 466669

SEQ ID NO: 467868 - DNA, 264 bp, Shigella boydii; identical to SEQ ID NO: 466667

SEQ ID NO: 467869 - DNA, 249 bp, Shigella boydii; identical to SEQ ID NO: 466668

SEQ ID NO: 467870 - DNA, 408 bp, Shigella boydii
ttgttaaccgcccatctctggacgttagtcggcttatcaattgtgccaggctgctttagctggctatgggcagcaaaacgttggggggctttgccttgcctgacggcgaatttgctggtgcaggctatcagtgtgctgcttactctcgccagcgactctcctctcttgcttatcattagtagtatcggttttggcggtacctttatgggcacgacatctctggtgatgactatcgcccgccaactgagcgttccgggaaatctcaatcttttaggctttgtgacgctcatttacggcaatggaacatcggcgcttgccggcgccactctctgcggcgcggcggcgttgtttattgctgcgcttatcagcacagtacaattatttaagctgcaagtggtcacttcatga

SEQ ID NO: 467871 - DNA, 972 bp, Shigella boydii; identical to SEQ ID NO: 459940

SEQ ID NO: 467872 - DNA, 501 bp, Shigella boydii; identical to SEQ ID NO: 467505

SEQ ID NO: 467873 - DNA, 1635 bp, Shigella boydii
atgggcagtgaatattaccggaccctgcagaatggcggacgtcatgccgctgctgccgcacgggaacagcgccgcgcccttgcagaactgaacagtcagttgacggaaattcgcggttctgctgtcggaatggctggcgcatttgccggtgcctttgccaccggacacctgatttcgctggccgatgagtggggttccgtgaatgcccgtctgaaacaggcatctcagtcatcggatgaattctcgtcatcacagaaagtgctgatggatatcagtcagcgaacaggtaccgcgttttcggataatgcggccctgtttgcccgttcggctgcctcgatgcgtgaatatggttacagtgctgatgatgtgctgaaggtgacggaggccatttcgacaggactgaaactgtcaggggctggagttgcggaatccggttcggtgatcacccagttcagccaggcactggcacagggtgtactgcgtggcgaagaatttaatgctgttaacgaaaatggcgaccgggtgatccgcgcgcttgctgcggggatgggtgtggcccgtaaagatctgaaggcaatggcggatgacggaaaactgacagcggataaagtggtccctgcgttaatcagccagctggggatattacgtgatgaatatgcggccatgccggaaacggtttccggtagtatcacgaaggtggaaaacgcctttatggcctgggtgggcgaagtgaatgaggcctgcggggtgacaaaaatgctctccggcgtgctgaacggtgttgccggacagattgataatgtggcaacagctgtgggggcgctggttgccgtcggggttgcccggtactttggcaatatggcctccggagcgatgtctgccacggcaggacttgtgacggctgcacgtaatgaagttgcactggcggaagcacagttcaggggaacgcagattgccacggcgcgggcaagggcagccgtgtaccgtgctcagcaggccgtggcggcagcccgcgggacggagatgcagattgctgcagaggcccgtctggcggccacacaggaacgcctgaacagaaatattgctgccagaagcgccgcccagaatgcgctgaacagtacaacggcggtgggctcacgtctgatgagcggtgcgctggggctggttggtggcgtacccggactggtgatgctgggggctgcagcatggtacacgctgtaccagaatcaggagcaggccagggagtctgcgcgccagtatgcactgacgatagatgaaatcgcgcataaaacgccgtcaatgtctttgcctgaagcctcagataatgaaggacgaacacgggcggcgctgacagagcagaaccggctgattgatgaacaggctagtcgggtgaaatccctgcaggaaaaaatcgcaggatatcagtatgttctggcgaacccgggctggacgaccggtgacggattcatgataaaccatctgacctcggtgaagaccgtaacggaagggcttgctcaggcaacagagcagcttgccgttgagcagtcccgtctggcactgatgcaggaaaaagcgcagtccattcaggatgtgcttgccgggctggaagaccgtcgtgtggcgttaattcgttag

SEQ ID NO: 467874 - DNA, 165 bp, Shigella boydii; identical to SEQ ID NO: 466698

SEQ ID NO: 467875 - DNA, 654 bp, Shigella boydii; identical to SEQ ID NO: 466699

SEQ ID NO: 467876 - DNA, 1986 bp, Shigella boydii
atggcatggctgaaacagtcgcatcagtatgacagtaatctgctcagtcatcagtatctttcgttggcaactccccgttatgatgtcatttttgttgatgaagttcaggatatgacgcctgttcaactgcaactggtactgaaaacgctacgtcatcccggtcagtttttactctgtggtgatgccaatcagatagttcatccgagctttttctcatggagttcgctcaaaagtctctttttccggcagcaacagggaaacgatacaaccgttaatatcctgcaggcgaattaccgtaacgggcaccacgtcactgcactggctaaccggttgctgagactcaaacaggtccgctttagtgctattgatcgggaaagtcaccattttgtcagaagctgcggtcaggcagaagggaccatccggttgctggacgacagggaagagacaaagcaggaactgaatgccaaaacctcactttcgaatcgtgtagcggtcattgtgatgcatccggaacagaaagcacaggcgcgatgctggttcagtacgccgctggtcttttcggttcaggaggttaaggggctggaatacgaaacggtgatcctttacaatatagtaagcgctgcccggcaggcatttgatgatatttgcgagggtcttacaccggctgatcttgagggcgaggcccgttattcccgtccgcgggacaggcaggatcgttcagcggaaatctataaattttttaccaacgcgctgtatgttgcgctcacccgtgctacacacaatgtgtatcttgttgaacagcaggtggagcatcctctgtggagtctgcttgcgctcacgcatcaggaagagcctctgaatctgcaggaagagatttccagccgtgatgagtggcagaaaaccgcacatctgcttgaaaaacaggggaagcaggagcaggcggacaccatccgtagccggatcctgcagacatctgagatgccatggcagattatcaccgcagaggatgcacgacagtggaaacagcatatcctcgcaggtacagccgataaaaccatacaactacaggcgctggagtacagtctgatttattccctgttcccgctgtataatgcactgtaccgggaagattttaagcccacaaggcagcccagaacgaagactctgcagttactggagctgaagtatttccggccatactcaatgaataacccggttgccgtgttgcgggatattgaacgttatggtgttgatcaccgttcgccgtttaatcttactccgctgatgtcagcagcccgggcaggtaatattgcactggttcagttactgctggagcgtggtgcagatcccttgctgaccggtaattacgggctggcggcttatcatcaagttctgtcagcggcggtcagtacgccccgttatgcgcaacagaaaagtgcgcagttgtataccctgctgaaacctgaaagtctgtcactgcaggtggaaggacgcctcatcaaactggacaaccggcagatggcaatgtttctggtgatcctgatgcaggcgctgttccacacgcatctgggaagtgctctgtttttttcggaagccttcagtgcggcacaactggcagagtgtgtggttcatcttcctgaagcgttgctgccggaacgccgcaaacgaaggagttatatcagcagccagctctctcaacatgaagttaacagcaaaaatccttatggaaaaaagctttttctgaggctgaaccacggacagtatattcttaacccggggcttaaaataaggcagggtgatgtgtggcgcgcggtttatgagttgcagtcaccggaagatctggggcatgatttgcagacttatctgcaggatatgtcaccggaattagtggatatgctgggagggaagaagggtttttacgaacgcagtgaaaagtctgtcggatactgggtgggggggatccgtcgtgccgctcaaaaagcgtga

SEQ ID NO: 467877 - DNA, 588 bp, Shigella boydii; identical to SEQ ID NO: 466701

SEQ ID NO: 467878 - DNA, 297 bp, Shigella boydii
atgctgacgaaagaaccatcatttgcatcgctgctggtaaaacaaagcccggcaatgcactacggtcacggctggatcacgggtgaggatggaaaacgctggcatccatgtcattcacaagatgaattgctgtctgaattgaccacgaggaaacggagaaagtccaaatgtatgcggcagaaagtgaagtggtttatcagtttcgttacagaggggagagttattcagtacctgaagatgatttgctctgttgctatccgtcattgtcgggcgatggcagttactttttcacgttaa

SEQ ID NO: 467879 - DNA, 222 bp, Shigella boydii; identical to SEQ ID NO: 10540

SEQ ID NO: 467880 - DNA, 597 bp, Shigella boydii
atgttaacatcaaagtacccaagtgagatcaaaataaatcccaataaaggtggtaaggctgcgattgagcgattagtcgaagcctatggctttacgacacgacaggctttagctgatcacttggaagtatcaaaaagcacactagcgaacaggtatttgcgggatacatttcctgctgactggataatccaatgtgctcttgaaacaggaacctccctcaaatggttaactaccggacaaggccttaagcaaagctcgctgacagcagctacagaagagcttgttaagtttcgccttgccgcaggcaaaatgattgaagacggttcatatgtcttcgattcatcatttcttcctgcaaacctttcatcaccaattgttgttcaggatggactcgtcacatacatttgtgatcaaaaattttctgaagtacttgatggaaactggttaatcaatatcgacggaacctattccattcgaaaaatcacaaggcttcctaaaggaatgattaaaattacaacagcagagaatagctttgaatgtgcattttctgatattgaagtggttgcttgtataagaagtacaatagtctcgaattaa

SEQ ID NO: 467881 - DNA, 1677 bp, Shigella boydii
atgaattcatttgccatcgttatactcttattagcatttctcgcccctgttctagctgtaatattatttaaacaaagtaaaaaacacaaagcggctatagacaacctgacagctaacaacatagccctttctaaccaactgattgaaaatcaagaaaaactagcacagaccgtacgagaattatcagagcttgaagggcgagcagcaccattgtggcaatacgaagaattgcacagcgcagtaatggatgcagagaataagataaaaaatgcggactcaatagccaagcaaaaaatagatgaagcccaaattaaggcggctaaaacagtaaacgaagcaaattatcaagctcagatgacaataagcaacgctaatagcgaagctatagcaatcaccaaagacgctcgcgatgcacgcctgaaagccaaagaacgtcttgataatgctaataataaagcaaatgagctaatctcaaatgctaatgacaatgcagtaaaaattatttctgatgcagaagaaagagcaaaggagattgctggttcagcatatgaggctaaagagtttgcagaaaaatatgaagcagttgcaaaatcaatgaaaaataaaattgaaggttatggtgatgaatggatcatccctaaccgtagtgtacttgatgagctggcagaaaattatgaatttacagatgcaggcaaggaattacaaaaagccagagagttaaccaaatcattaataaaaactaataaagctgcttcgtgtgattatgttgagcaaaacaggcgtaatactgccataaactttgttttggatgccttcaatggaagagttgacagtattttatcaaaagtcaaacacaacaattttggaaaactttcccaagaaataaaagatgcatttcaactagtaaattacaatggctctgcctttaggtccgcaaaaataagtgacatctatcttcaggcaagactcaacgagctaaaatggggtgtagcagttaatgaaattatgctcgaagaaaaagaagagcaaagaaggattaaagaacagcttcgtgaagaggaaagagctcgtagagaatatgaaaaagcgataaaagaagctgaaaaagaagaaaaagctattcagcaagctataaataaagcaacgaaagaacttatgcttgcaaatgaagaacaacgcttagctttagagcaaaaaatagctgaactacagttaaaatatgaagaagctgaagctaaaaatcaacgagctatttctatggctcaacaaaccagatcaggccacgtctatatcattagtaatattggttcatttggcgaagatgtatataaaattggaatgacacgccgccttgaaccacttgatcgtgttcgtgaactcggagatgctagtgttcctttttcgttcgatgttcatgcgatgatttatagtgatgatgcaccatcattagaaaaccatctgcataaagttttcaacgaaaagcaggtcaataaaattaactcacgaaaagagttttttaacgtaaatttaaaagaaatcaaatcagttattgaagacatgaacatcaacgcccactggacaatgtttgcagaggcgaaagaatatagagagtctctatctattgagcaggagcgcaaagcagccacttccgccaacgatgaactacatgttgcttag

SEQ ID NO: 467882 - DNA, 564 bp, Shigella boydii; identical to SEQ ID NO: 466707

SEQ ID NO: 467883 - DNA, 291 bp, Shigella boydii
atgcgaggcaaggaaaataatcatcacgcccaggtatgcggcgaggaacaatttaccggctggcaacgacatcagaacttgctgtacagctgtttcgccgcccagtgtttccagcacctgtgggacgttgattacgccattgataaactgatgaatggcatagctttccattacgccgaagaagaaccagcaaccgacggtgctgccgaggatcagtccccagataacttctttaatcttacgaccgcgggaaacgcgggtgacaaacattgctacgccaggggtgtatga

SEQ ID NO: 467884 - DNA, 1104 bp, Shigella boydii; identical to SEQ ID NO: 467521

SEQ ID NO: 467885 - DNA, 282 bp, Shigella boydii; identical to SEQ ID NO: 466727

SEQ ID NO: 467886 - DNA, 198 bp, Shigella boydii
gtgaaaacgataaagcgtgactacatcagtatcatgcccaaaccagacgggttaacggcagcaaagaaccttgcagaggcgttcgagcattataacgaatggcatccgcatagtgcgctgggttatcgctcgctacgggaatatctgcggcagcgggcttgtaatgggttaagtgataacagatgtctggaaatatag

SEQ ID NO: 467887 - DNA, 528 bp, Shigella boydii; identical to SEQ ID NO: 466734

SEQ ID NO: 467888 - DNA, 309 bp, Shigella boydii; identical to SEQ ID NO: 467527

SEQ ID NO: 467889 - DNA, 1470 bp, Shigella boydii
atgttttctataaaactaggacccagaaatttacctatcgacaaccccacattgttatcatggaacattactgacggggatctaaattctaaattaaatacattagaatatctaaactgtataacaaatattattaattcttgtggagtttaccctcaaggattaaaagacagagaaattatatcaacttttcacgcagaaaaagttattaatgatctgttaaaaaacgattataaaatttccctttctccagatacaacttaccgagagttgaataaagcagcacagcgtagcattacagcgccagacaggataggagaaggaaaaacatgggtttatcaacgagatacaatggttgaaagaggtgataacagcggtatttatcagtatggtcctgctgaacacttcacccacattatatctgacaaaccttccccaaaagataaatatgttgcatatgctattaacattcctgactatgagctggcagccgatgtatataatattaacgtgacgtcaccttccggacagcaagaaacatttaaaatactaatcaatccagaacatctacggcaaacacttgagcgtaaatctcttactgctgttcagaaatcacaatgtgaaatcattacctccaaaaaacctggcgaagcgattcttcatgcttttaatgccacctaccagcaaatcagggaaaatatgtctgagtttgcacgttgccattatgggtatatacaaatccctccagtgacaactttccgcgccgacggaccagaaactcccgaagaagaaaaaggttactggtttcatgcttatcaacccgaagatctttgtaccatccataacccaatgggagatttgcaggattttatcgcattggttaaagatgctaaaaaatttggtatcgatatcattcctgattatacatttaactttatgggaatcgggggtagtggtaaaaatgacctggattatccctctgctgatatacgagcgaagatcagtaaagatatagaaagcggtatccctggctattggcaaggtcaggttttgattccattcattaaagatccagtaacaaaagaacgtaaacaaatccatccagaagatatacatctcactgcaaaagacttcgaagcaagtaaagataacatctctaaggatgaatgggaaaacctccatgcattaaaagaaaagcgtttaaatggaatgcctaaaacaacacccaaaagtggccaggttattatgttgcaaaatcaatacgttcgagaaatgcgaaaatatggcgtacgaggtttacgttatgatgcggcaaaacactcaaaacatgaacaaatagagaggtcgataaccccaccgcttaaaaattataatgagcggttacacaatactaatttatttaacccaaaatatcaaaaaaaaagccgttatgaattacatggaatacctggtaacttgtcagttggatga

SEQ ID NO: 467890 - DNA, 153 bp, Shigella boydii
atgttaatcaatatccgtctttctgatgggatacttgagattgtggaacccggttttgatgcaagggtttggagatctccaccaaatgaaaaggcttttatcgttttcatgagtaaagaaaaatcaatggcacttaaatcatctctctcataa

SEQ ID NO: 467891 - DNA, 591 bp, Shigella boydii
atggtaatcattttcaatgactttctatttaactatcaacaagatgaacaattagcaatggcatatatggccgctctcccgttcagcagacctttagtttactgggatggccaagtattaaaatcaacgactgaaattaaaaattatgatgggtccacgcgtgtcggcggtgaggcgtggcttaataaaggttgctctacctatcagcagctctacaatgaattccacgcattatatatagataaagcaggaatatggagcgcatttgagggtgtatttgcaactaaaaacgttctggcctttagtcgtggggattctgtgaacattaatcactctcctcatgatggactagttataataaataaaggaaacgaagaagttgaaggtacctggcctaacaaattgcaacctggaatatacaaaaacatggggagtaatagcgttaacattattattaataatacccgaaaaattatcccccctggtaaagtatttacgcttagaggcggaactctaaatatcaatattcctgggcgtagcgctcttcttttagggaaaacaggagaaccgccgaactatctctatttataa

SEQ ID NO: 467892 - DNA, 138 bp, Shigella boydii
atgaatgcactgatcgccgtacaaaataacgctgtcgattcaggccaggactatagcggattcactctcatcccgtcggcgcaatccccgcgtctgctggaactcaccttcaccgaacagactagactggccccctga

SEQ ID NO: 467893 - DNA, 378 bp, Shigella boydii
atgtcccagccagcgggtgatctggttattgatttgagtctggatgcggcccggtttgatgaacagatggcccgggtacgccgtcatttttccagtctggaggcggatgccagaaaaaccgccagtactgttgaacaggggctgagccgacaggcgctggctgcacaaaaagccgggatatcagtcggacagtataaggctgccatgcgcacactgcccgcacagttcacggatattgtcactcagcttgccggtggtcagaatcccttccttatcatgctgcagcaggggggggcagatcagcgattcattcggtggaccgctcagcctgcttaccctgctgaaggaggaacttctcgggatcagggatgcctctga

SEQ ID NO: 467894 - DNA, 312 bp, Shigella boydii; identical to SEQ ID NO: 466748

SEQ ID NO: 467895 - DNA, 342 bp, Shigella boydii; identical to SEQ ID NO: 466754

SEQ ID NO: 467896 - DNA, 219 bp, Shigella boydii
atggcaaaagtatttacacaagaagagcgggaaaaaattaaagggcaggttgttgagctagtacgccggagtgggcgcgagacgttacggcaactggaagccaagacaggtgcgacaagatatctgatgagcgttcttgccagagagctggttgccagtggcgatgtatacgactctggttacgggttattcccgtctgaacaggcgcgtaaggactag

SEQ ID NO: 467897 - DNA, 276 bp, Shigella boydii; identical to SEQ ID NO: 16135

SEQ ID NO: 467898 - DNA, 150 bp, Shigella boydii; identical to SEQ ID NO: 461565

SEQ ID NO: 467899 - DNA, 1077 bp, Shigella boydii
gtggcggctattgatcaggctggggaaaaccttgtttctctctctggcatgttgaatagccgtaaccacagcggcggtgcgggaactggcgcaattatgggttcgaaaaacctgaaagcgattgcggttgaagggacgaaaggggtcaacattgccgatcgtcaggagatgaagcgtctcaacgattacatgatgactgaacttattggtgcgaataacaaccatgtcgtgccaagtacgtcgcaatcgtgggcagagtattcagatcccaagtcacgttggacagcacgtaaagggctgttttggggcgcggctgaaggtggtccgattgaaacgggggaaattccgccaggcaatcagaacacggtcggctttcgtacctataaatccgtttttgacttaggtccggcggcagagaaatacacagtaaaaatgagtggctgccactcttgcccgatccgttgtatgacccaaatgaatattcctcgggtgaaagagtttggcgtgcccagcacaggtggtaacacttgtgtagccaactttgtccataccaccatcttcccgaacggtccgaaagattttgaagataaagacgatggccttgtgattggtaacttggttggtctgaatttgttcgatgactacggcctatggtgtaactacgggcagttgcatcgcgactttacttattgttacagcaaaggggtgttcaagcgtgttctgcctgctgaagagtatgcggaaattcactgggatcaactggaagcgggtgacgttaatttcattaaagatttttactaccgtctggcgcatcgtgtgggtgagctgagtcacctggctgatggttcatatgccatcgcagaacgctggaatttgggtgaagagtactggggctacgcgaaaaataaactctggtcgccgtttggctatccggttcaccatgccaatgaagcgtcagcgcaggtcggttccattgttaactgtatgttcaaccgtgactgcatgacacatacccatatcaactttattggttccggcttgccattgaaactgcaacgtgaagtggcgaaagagtga

SEQ ID NO: 467900 - DNA, 210 bp, Shigella boydii; identical to SEQ ID NO: 466783

SEQ ID NO: 467901 - DNA, 180 bp, Shigella boydii
atgcgctacttattaattgtaattatatttattataggttttagtgcattacctgtatgggcaatggactgctatgctgaacatgaagggggaaataccggtaatgactccaacttactgatagtgttttatgttcagataatgcccgatgaccttgtcatgcagctccaccgattttga

SEQ ID NO: 467902 - DNA, 240 bp, Shigella boydii; identical to SEQ ID NO: 466831

SEQ ID NO: 467903 - DNA, 342 bp, Shigella boydii
atgaatcaaaaatacctcattcgcattgcagaactggaatgccagctccgtcagaaagaccagcaactgagtctggttgaagagacggaggccttcctgcgctctgcactggcccgcgccgaagaaaagatcgaagaagatgaacgggaaatagaacatctgcgggctcagatagaaaaactgaaccgccccgggtttcctggagagtgttttatctgtgaactcaggctgccagatcatcgtttccgatggaagcataataagctttttctgcttctgccggaggagtatggcccagcctttccagcaatcgtcgattgttataccagtccacccacgtga

SEQ ID NO: 467904 - DNA, 165 bp, Shigella boydii
atgccgatcatagcaccaatttcccgtgacgaacgacgcctgatgcagaaagccatccataaaacacatgataaatctatgttctgcgctttgataattttgacgatgccgttgagtggtaagcgcccagagaagtacgtagcggaaggattattttacagctga

SEQ ID NO: 467905 - DNA, 300 bp, Shigella boydii; identical to SEQ ID NO: 461638

SEQ ID NO: 467906 - DNA, 372 bp, Shigella boydii
gtgctggatgcactggagcaggcgttatgggcccgtcgaccgtccggcacggtccatcacagtgataaaggttctcagtatgtatcgctggcctacacacagcggcttaaggaagccggattactggcatcaacaggaagtacaggcgactcgtatgacaacgcgatggcggagagcatcaatggtctttacaaagcggaggtaatacaccgtaagagctggaaaaaccgtgcagaagtggaactggccacactcacgtgggtggactggtataataatcgacgattgctggaaaggctgggccacatccctccggcagaagcagaaaaagcttattatgcttctatcggaaacgatgatctggcagcctga

SEQ ID NO: 467907 - DNA, 276 bp, Shigella boydii
gtggcttctgtttctatcagctgtccctcctgttcagctactgacggggtggtgcgtaacggcaaaagcactgccggacatcagcgctatctctgctctcactgccgtaaaacatggcaactgcagttcacttacaccgcttctcaacccggtacgcaccagaaaatcattgatatggccatgaatggcgttggatgccgggcaaccgcccgcattatgggcgttggcctcaacacgattttacgtcacttaaaaaactcaggccgcagtcggtaa

SEQ ID NO: 467908 - DNA, 327 bp, Shigella boydii
atgactaaaaatactcgtttttcccccgaagtccgtcaacgggcagtccgtatggttctggaaagtcagggcgaatatgactcacaatgggcgacaatttgttccattgctccaaagattggctgtacgccggagactctgcgtgtctgggttcgccagcatgagcgggataccgggggcggtgatggagggctcaccaccgctgaacgtcagcgtctgaaagagccggagcgtgaaaatcgtgaactgcgccgcagtaacgatatccttcgcaaggcttccgcttattttgcgaaggcggagttcgaccgcctctggaaaaaatga

SEQ ID NO: 467909 - DNA, 147 bp, Shigella boydii; identical to SEQ ID NO: 465857

SEQ ID NO: 467910 - DNA, 186 bp, Shigella boydii
gtggctaccggtgaagacgttgttcctgcttctgaactggccgctgcaataaagcagattaatcagcttcagcgtttactgggcaagaaaaccatggaagttgagatcctcaaagaagcggtggagtatgcgcaatcgcgaaaatggatagcgcatgtgcccttgttaccttcggacaaggaatag

SEQ ID NO: 467911 - DNA, 165 bp, Shigella boydii
gtgaaaacgataaagcgtgactacatcagtatcatgcccaaaccagacgggttaacggcagcaaagaaccttgcagaggcgttcgagcattataacgaatggcatccgcatagtgcgctgggttatcgctcgccacgggaatatctgcgtgaagtggcacactga

SEQ ID NO: 467912 - DNA, 207 bp, Shigella boydii
atgacgcttgcagaacgtcttatacagaaaggtttcgacgagggttttaaagaaggttttaaacaaggttttaaacaaggggctcttgaagtggcgcgggaaatagcctgccggcttcgggatataggctggccgccggaacggattcaggaggtcacgggactttccggtgaagaactgaaaaagctgtttcctgatgagcagtag

SEQ ID NO: 467913 - DNA, 333 bp, Shigella boydii
gtgagtgatagtgcggtaagaaagaaaagtgaggtacggcaaaagacagttgtcaggacactcagattctctcctgttgaggatgaaaccatcaggaaaaaagctgaagattccggacttactgtatctgcttacatccgaaatgcagcactgaataagcgaattaactcccgtacagatgatgcttttctgaaggagttaatgagactgggaaggatgcagaagcatctgtttgttcaaggaaaaagaaccggtgacaaggaatacgcagaagtgcttgttgccataaccgaacttacaaatacattgcgtaaacagttaatggaaggttga

SEQ ID NO: 467914 - DNA, 2700 bp, Shigella boydii
gtgaatgcagtcattccgaaaaagagaagggacggcaagtcttcgttcgaagacctggtatcctacgtctctgtccgggatgacatgaccgatgaggaactggatttatcttcttcttcgcaggctgaacaaccgcaccgaagccgtttcagtcgccttgttgattatgcgacacgtcttcgaaatgagtcattcgtggcgctggttgatgtcatgaaggacggctgcgaatgggtcaacttttatggtgtcacctgctttcataactgtacttctcttgaaactgccgctgcagatatggagtacattgcccggcaggcacactatgcaaaagatgacactgatcctgtttttcactacatcctttcctggcagtcacatgaaagcccgcgtccggaacagatttatgacagtgtacgtcatacgctgaaatcactcggccttgccgaccatcagtatgtctctgccgtgcatactgatacagataatctgcacgtccatgtggctgttaaccgggtacaccctgaaacgggttatctgaaccggttatcatggagtcaggaaaaactcagtcgtgcctgccgtgagcttgaactgaagcatggttttgctccggataacggttgctgggtccatgcgccgggaaatcgtatcgttcgcaaaactgccgttgaacgtgatcgccagaacgcttggacacgcggaaaaaaacaaacttttcgcgagtatgtcgcgcagacagcggtcgctggtttacgcagtgaacctgtaaatgactggttatccctgcatcgtcgtcttgcggaagatggtctgtacctgtctcagatggacggaaaatttctggtgatggatggctgggatcgcaacagggaaggtgtacagcttgactcgtttggtccctcctggtgtgcagaaaaactcatgaaaaaaatgggtgactacacgccagtaccaaaagacattttcagccaggtggaagcaccaggacgctataatccggacttcattgcagctgatgttcgcccggaaaaaatcgctgaaacagaaagtctgcagcagtatgcctgtcgtcatcttggagaacgtctgccgaaaatggcacgggaaggacggctggaaaactgccaggctattcaccgcacactggctgaagcgggattatggatgcgtgttcagcatggtcacctggttatctgtgacggttatgatcataaccagactcccgttcgtgctgacagcgtatggtcactgctgacgctcgacaatgtgaatcaactcgatggtggctggcagcctgtaccaacagatattttccgccaggttactccaacagaacgcttccgtggtcgtcgtatggagagctgtcctgcgaccgataaagaatggcaccgtatgcgtacaggtacggggccgcagggggctatcaaacgcgaactgttttctgacaaagaaagtctgtggggatacagcatcagccattgtagccctcagattgaagaaatgatcacacagggtgagtttacctggcagcgttgtcatgagctgtttgcacaacagggactgatgctacagaaacaacatcacgggcttgttgtcgttgatgcctttaatcatgagcaaacgccggtgaaggccagcagcattcatcctgatctgactctggggcgtgcagagccacaggccggaccttttgtgagtgccccagcagatttgtttgacagggtgcaacctgaaagtcgctataacccggagctggctgtcagtgacaggtacggggtcagcagtaaacgtgacccaatgctgcgccggcagcgacgtgaagccagagctgaggcccgtgctgacctgcgtgcccgctatctggcatggcgtgaacaatggcgtaaaccagatctgcgttatggggaacgttgtcgggaaattcatcaggcatgccgtctgcggaagtcacacattcgtgcgcagtacgatgatccggcattacgtaagctgcattatcacattgcagaagttcagcgaatgcaggcattgatcaggctgaaagaagacatcaggaatgagcggctgaaacttattgctgacgggaagtggtatccaccctcttaccgtcagtgggtcgaaattcaggctgctcagggagacagggctgctgtatcgcagctgagaggctgggattatcgcgatcgccgtaaagataagtcacgcacaacgacaacagaccgctgtgtcgtgctttgtgaaccgggcggaacgccggtatacggtaataccggtgatctcgaggcccgtttgcagaagaacgggagtgttcgtttccgtgaccgtcggacgggagagtttgtctgtacggattatggtgacagggttgttttccgtaatcaccatgaccgcaatgcgctggcagataaactggatttgattgcaccggtattattcgggcgtgatccacgcatgggttttgaaccagaaggaaacgacaaacaatttaaccaggtctttgctgaaatggttgcctggcataatgtgacaggccgtaccggtcacgaagactacaggattacgcgaccggacgtggatcatcaccgtgaaggaagtgaacgctactaccgcgattatatcgcggcgcacagcaacgatgacgcatcactgcctccgccggagcaggataaacgctgggaaccgccttctccaggttaa

SEQ ID NO: 467915 - DNA, 2292 bp, Shigella boydii
atgagtgaacatcgcgttaaccccgagcttttacaccgtacagcctggggaaatcctgtctggaatgcactccagagtctcaatatctatggcttttgcctggtggcaagtcttgtggccagttttatctggccacttgcattaccggcatgtctgttgttcacactgataacgatgctggtatttagtctgcagcgatggcgctgccctcttcgtatgcccatgacgctggaatgtgctgacccgtcacaggacagaatgattaaaagaagtcttttcagcttctggccaaccctgttccagtatgaggtcattctggaatcaccggccagcggcatattctatgttggttatcaacgcgtcagggatattggcagggagttatggctgagtatggacgatctgacccgccatataatgtttttcgccaccaccggtggcggtaaaacggaaaccatctttgcctgggcgattaacccactttgctgggcaagaggattcacccttgtcgatggcaaggcacagaatgatacggcaagaacgatctggtatctggccagacgctttggacgtgaagacgatgtggaagtcattaacttcatgaacggaggaaaatcccgcagtgaaatcattctgagtggtgaaaaaacgcgtcctcagtcaaatacctggaatcccttctgttacagcactgaggcattcacagcggagacaatgcagtcaatgctgccccagaacgtccaggggggcgagtggcagtcccgggccattgccatgaataaggcactggtatttggtactaaattctggtgtgtgcgcgaaggcaaaacaatgtcgctgcagatgctccgtgaacatatgactctcgaagggatggccaaactttactgtcgtggcctcgatgatcagtggccggaagaagctatcgcaccgttacgtaactaccttcaggacgttcccggtttcgacctgtcgctggtcaggacaccatcagcctggacggaagaacccagaaaacaacatgcttatctctccgggcagttttctgaaactttcagcacattcacggaagcattcggggatatttttgctgaagattccggtgatatcgatatccgtgacagcattcacagcgacaggattctgatggtaatgatccccgctctggatacatcagcgcatacaacgtctgctcttggacgaatgtttatcacccagaaaagtatgattctcgcccgtgatttgggctaccgcctcgaaggaactgattccgatgcactggaagtcaaaaaatataaggggcgtttcccttatctgtgtttccttgatgaagtgggggcatactatacggaccgtattgctgtggaagccactcaggtgcgttcactggattttgctctgattttgatggcacaggaccaggaacgtatagaaggacagacaacagccacgaatactgcaacactgatgcagaacacggggacaaaatttgccggcaggattgtcagcgagggtagtacggccagaacgctgaaaagcgccgccggtgaagaagccagggcgaggatgaacaacctgcagcgtcaggacggcatatttggtgaatcatggattgacagcccacaaatcagcatcctgatggaaagcaagataaatgttcaggagttgattgaacttcatcctggcgagttcttttctattttccggggagaaaccgtaccatcagcatcattcttcatccctgacgatgagaaaagctgcagcagcgatcccgttgttataaacaggtatatcagcgtggatgcgccacgcctggaccgtctccgccgtcttgttccccgtactactcaacgtcgaataccgtcaccggaaaatgtcagtgccatcattggcgtcctgactgcaaaaccctccagaaaaagacgaaaaattcgcacagagccgcacacgatcgtggatacattccagcaacgcattgcaggacgtcaggcggctatggcaatgctggaagagtacgacacagatatcaacgcacgtgaaagtgccttgtgggaaacagcggtgaatacgcttaaaacgaccacacgggaagaacgacgaattcgctatatcacgctgaacagaccagaactacctgaaacaaaagaggaaaatcagatatcagtgagagcagaaagagcaggtataaacctgttaacgcttccacaggacaataaccacccgacagggcgtcctgtaaacgggtttcatcataaaaaaaccaaccgtccggactgggacggaatgtactga

SEQ ID NO: 467916 - DNA, 1071 bp, Shigella boydii
atgacaatcgagtactttgcaacacgcattgcaaaacatatttccgtgcaggcaatctggccggatggcaggacagaaattattgccgtccttccacgggatgccctgtcagggctggtaacacgaaataatcaactgattcatatagcctttgacgccatgggcacccgtaacagagaaaccgtcctgattgataaacaggagcataacgctgaccagatacttacagctattgattcctgcctgcgccttgaatatctgatggaacgccgcttcagcagaacacctttgttccgtggcataatcgccagcgttgtgctgttcgtaatggcaacgattggcttctctctgttccgctatgttgatcgtgtattctgggatgatacaacgcctgaagcagtacagacagcaggtgagccacgactgctaccccctcacctgaatcacactgtgccattaaatgaaggcattcaactcccggttcccccgaaaaaagacgtccaggtcccggagaaaacaatcacaagcaaaaatccggaagccgcagctgcgcgacataatctggctactgttctgaagcggaacgccgatcggggcatgtttaccatcaacctgtcatccggtcatgaacgaaccctgttcgcatttctcgatcctgcctgtcctaactgcagacttctggagccggccttaaaacgcctggccagcgacttcaatgtcgttatctacccggtttcagttattggtggagaggaatccaccgaccgtgtggcaccactgctgtgtgaaaaagatgctcagaaacgtgctgccggctggcaccgactgtattccgcagataacggaatgatgacgccatcagaagaaacaacgcctgcagatgaaacatgcctgaaagcagccagagctgcgattgatgttaacaatgtcgccttccgtaagttcggatttgccggtaccccatgggtgctgtccgacacgggctggcatctgcctactggaattctgcaggaaactggcacgcttaatttattcctgaaaaccaccgacagcgagtctggccatgagtga

SEQ ID NO: 467917 - DNA, 1209 bp, Shigella boydii
atgtcttacaatcgacagcctgtcgcagaagatcctatgcagatatggggcgctgttggtgtccttcttatcctgctgctattcgttatatggttattcttgccggaagtggtttacgccagctgcctgattcttcataccttatggggactggttgactggggaccatttcataactatgcagcaccacgatacaacctgcttgccatgaccggtaacaacgccgccaacataagctatagccagtgggttaacgtcatggagcagaccataggtattctgtggatgtacctcttacctgtgacactctggtgtttgtgggagtggtatcaacatccgggacaaagtcgtttcacccgcagaccagtagatattacccgactgccacacatctttgcttcgttgtcccctgctatcgcccctgtactggcagatggtgatccggaaaaactctttcatggtggcaaacgacctgaacggcgggttgctctcaccccggaagcatttgtcgagcagcatactctcatcaccaatatgcagctcgatgttgcagctgcaagacgatgtttcatggcccagttgggtaaacctttaacgtcctggaaagacatggcaccacatgaaaaagcgctctttgccatatttggtcttcagtatttcctggatgatcgtaaggcagcattaaagctcatggatacactgaacctctcatgcagaattaaaagcaaacgggacagtgggaaattctgtacccctgtttattcactggccaaatcagctttccagagagtgattaaaagcaacggagcacagcaatggctgaaacaacatcgctacgtccgcagtgggctggtctggctgtatgcacatgacctgcggcttacgccacccaactggatttggctgaaaggcgtggacaggacgctgttttatgcattacaccgcgccaataccacgaaaggatttattgaaggcgctggcgtggtggccgttgcacgtgcagaggccgaagccatgcgttttggtcttccctgccctgaaccctgtgttgatgaagcggtggaaggcttacggcgggatatgctcagtctcggtcttatctgggatgaaccacaaccagatcgcgaccggaaacgccgcatcctgaccaactggtccctcaccgacgacatcctgccccgcacacctgctacagacaacgaattctga

SEQ ID NO: 467918 - DNA, 252 bp, Shigella boydii; identical to SEQ ID NO: 8512

SEQ ID NO: 467919 - DNA, 177 bp, Shigella boydii; identical to SEQ ID NO: 244289

SEQ ID NO: 467920 - DNA, 210 bp, Shigella boydii; identical to SEQ ID NO: 8510

SEQ ID NO: 467921 - DNA, 651 bp, Shigella boydii; identical to SEQ ID NO: 8509

SEQ ID NO: 467922 - DNA, 2169 bp, Shigella boydii
gtgaaaattttacttcgcgcactctgtgcaggccttgctatatcctcactgccggcaatggcttcagtgacctatcaggatattgtgtctgccgcaaccaatcctgacgatctgtctcgccaggcgctggtcacgatattcggtgatgtagtcaccaatccactgtcaaccagcgcccccactctgatcggaagcatgttcggggcgttcaacagtatcatcgccgtacttgccgttgtctggtttatgttcattggtatccgtcatgttgtgcgttcggggcatcagggacaggtattcagcaccggacgcgatatcgtcggcacactgagtgtcgttgcaggttttctgatgatcgttccaaccggaaatggctggagtatcgctcagctcattatgttatggggcgcatcgataatgggagttgggtccgccaatgtgatggtgcaacttgccgctgataatatcgcaaatggttattcaatgactgtacagccagttcaggcatccacacgaacagcagcgcgtggcatttttgaaatggaactgtgtaagtatgcggttaacgcaggactaaatgattttaatcagacggccaaatcctcgacttcactgatgacagaatcagctaaagccgccagtggtaattacactgtcacggtatccaatggcagcggtatctgtggttcagccagcctgtcagtagaaggaaacggaacaacagatcaatcgacgattggaaaattctttaatcccttcagtaaaaacgaatacagcggtgttatctcagcacaacgtgcagccatggataatatgattagcgacatggacaacgctgccagtgagtttgtgacaacatttctggaaaaaagaaattctggcaacggaacattgccggatatcgagacacggattcagagagcagccgacgagtatgaacgcgctgtacaaaaatcgctacctattgataacggagaacaatccaggaaagaagctctcaagtcttatctcacaacctatggatgggtgacgcttggcgcgtggtatcagacctttgccactgctaaccagcgtctggcagagctggctgacagagctccagctgtaacttcaatgtcatcacttggggaagttggcgatactgatttatttagtgctgttatgggggcatacaagactcaattacagaactccacatatactccaacgataggaacgataacaactcaagatgaaagtaatgcagctaatagcacagacccacaaagtgtggtcatgaaaagtatagcgccaaccatattaaaatggacaaaccaagctgctactgaatggtcaggaacaggaacaaccagcaaccaagttaacccattaattaagatgaaaaacatcggcgattatacattgggtacaacagaaattctctggacaggatatacaactgtcagagttctcgcgacaatgggtgataactctattttcggaaaggctgttaatttgttctctggattacctaaaggatttgttgctctgctggatgctgcagctcccccaatatatttcttgttgttcctgttgttttgtgcgggtttttccttatcaatttacctaccatttataccattcattttctggatgacaggcattgggaactggatagtaagcgtattaataggatgcaccgccgggcctctgtgggcagcaacacatctaggaacatcagaggacagaggaagtcgggcagcttacggatatatatacttaattgacagcatgataagaccacctctcatggtattcggtttcttttttgcctctgtcgccatcattgccgtcggcacaatattaaactcactgtttggcgcagcactagttaacgtacaggtaaaatcattaacagggatattcagccttgccgggttcctgctaatttacgcccgtatgtgtacaacgtctgtagctgcaatatttgctttacaagcatatcttcctgaccatgttatcaatttcttgggtggtagagatggtgtaaatactcttggcaacctcacctcatcagtaaaagatatttttgcaggttctaatagaaatattagacacagccctggagttagagaggacagactaaaaaatgtcacaaaggatgataataaagatggaataaaaggataa

SEQ ID NO: 467923 - DNA, 585 bp, Shigella boydii; identical to SEQ ID NO: 8507

SEQ ID NO: 467924 - DNA, 1203 bp, Shigella boydii
atgcaaagaaaaacattactcgcagcccttatagctatcctgaatggaacggcataccaggctcatgcttattcagtcaccgtcgtcgccagccgtcccgttgaacagcaggtcgtccccagaatggaggccatcaaaggtgtgctgagtgacatactgagtacccagacagccacgggtaccgctatcaatcagaactctgaaaagctggcaagtgtcattgcccagaacggacaggcgacacgtcagcagatgattttcagtaatgaaactcagcgcctcgaggaggcacggaaaagcttcaccgtgccagactccatctgcagtgaatccgcatcagggattgcaacagaaagcaaaagtgcctcagcatccgcagcctcaaaactcagtaaaggtggcggtgtgagcaaccgtagcatccgcgaccgtctggccagcgcagcaaactctcccgtgcgggaagcttatgatggcgcggccatacacgccagttactgtacagaagcagaatatgcacgttttggaggaaccgccgtttgtccttctgtgggcgaaataccaggtggagacagtcaggtacgctcgatttaccacggcgcaggtacagcggacacacctgcagcactgacatgggatcagaagcaaatagatgcagcgacggcttacatgaaaaacacttcccgcccctctgccggtcgtgctctgggtaaaggagaagtgaatacccagagtgggcgaacctacgtcggactccagaacgaatacaacggcatcattgattctgcgtcgaatccccaactgacgctgattgctgacagcacgcctgatgaaagcacacgtaaagcactggctgaaacactgcagtcagactcagcggccgcttacttcgaccaggtggcttcaccagaagcaaaagcacggggatatatgagtacccgtgagtttgaagcttttgaggctggccggcgctacgccaacacagcatacctggtggatttacaggaaatgcagggagataacctgctccgtgaactggtaagaatcactgcgcaaatgaactggcagctgaacgacctgaaagaacagatccgccagggtaatgtcatctctggacagcaactggctctgaccgcccgccagtattatgaaaaacaactcggtagccttgagaaaacaatcaatcaggcaaacgcacgttga

SEQ ID NO: 467925 - DNA, 615 bp, Shigella boydii
atgtgtacaattcatatcaccccacgctgccggagacctgccagagggcaggtatttcttaaaaaacttgaggtaaaaggtgacagtttctcattcactctgccgtcacgtgtcttcaggttacatccggcccccaatcccagagtgatatacgcctcggatgccagaacacagggaaaggttacaggcatgcggctgttgttgccgtccagcacagatgagctgataacaacggcaatatggcaggtttctgtcccggatgaagcaccattcgacgttcagcatgtcatccagtggatactcccttcaccgctggcttcgctgatgtccgatgacacctggttatggccatctgttcccggaacgccggcactgagtgccggtgactggcctgttatggatactgacccttccaccttacggcgcgtcagacgtcgttctttcagcatcatcgataaccggaacaggaaaggttatatcaccaggcgatatcagtgtttcccactggccccactacctgaagacagaaaatacgacagccttcctgaccttgtgctccaccccgagcaggagacaataaaatgcaaagaaaaacattactcgcagcccttatag

SEQ ID NO: 467926 - DNA, 3045 bp, Shigella boydii
atgaacataaaccgtttaatcttcactatcgaagactgtctgaacacgctatcccgtttctctgtcgcaagcagttttgttgagtattgcgatttacgtactgtaataggtctggacagacaggatcgtgaacgtcgcccatggctgaattcgccctatattgcagccacaaagcgtggagaatatctctctgtctttgaagtcagcggtgctttcagggaaatggatgaagcatccgaccagactggcccaggttcactggaatcgctgatcaccagcatgagtgacagcctgaatacggcatataaaaacagcggtcataaaatcagcttcgtttttgagcgtgatcctgacatggggaaagaagaaatcgaagacatggtcgccccacaaaagcgctcactggctaatacaggtatccagttacaggatgtggtcgatgagaaagtcacaacactgtccccatggctggtccgggagcgttgctggctggcgatctggagtggacccgaccttatcagcaacagcgatcgcaccgcccatgatgagcttgtcagaagactggctgaacgggtaccgaaagcacgctttgcccagtccccctggcagtggaccttatctgcactgaaaatccgccacgaagcttttcttgataatgtggaacaggcactgagacattcatctgatggcctgattctccggctactggatatacacgaggtcgggcgtgaaatacgtcgtcagacagaacggcacagcacaccgcgtaactggcaaccccacctgcctgaagatgcccagccagcgggatatcgctggactgacgatgaatccgtactacatgctccttcattgcatttgcagttattcaacactcaggtgaccacacagggcaacctggttcaggcgggtggactctggcacggaatggtatcgattactttacctccgcaaaatctgcagacgtttaacgaactggtccgtgccgtcccccgcgcagtcccctggcgcatcagaatggatctgatgcccggcgggatgaaggctcttaatctgaagaaaacgcttctgacttacagcagcttcatttctgccgttcgtccaatgtatgaatccgttatgaccctggcggcaacggatgaaaaagaacctgtctgcataatgaccatcatggcctccacgtggggaaaaacacgtgaaatatgcacacgaaaccaggccattctgaaatcggccattgaaggctggggcgtatgtggcaccacgacaacatttggcgatccccgacgcgcctgggtgaataccattctcgcggcatccggaggctccggcccggttcccctgtatcccccgttgtcacatgccatctcgcttttcccgcttaacagggcaggctctgtctggcgaggcaaagggaatctgatgttacatacagaagacggttccgcatttgaggttggtctggcgtcatcccaacaaaataaacatacagaactggcaccaggcgatccgggactgggtaaatcagttctgattaatacgttgtcggaaatacagatatcatctgctcagaaaaacctgcccttcattgcctatatcgataagggatacagtgctcagggactggttcagcttattcgcgacagtcttcctccggaaagaaaagacgaagctgtcggtattattctgagcaatgatccggaatacacccgtaacctttttgacgtgatgtacggcgctaaaaagcctattacgccggaaaagaatttcatgtcatctgtgctgtgtgctctctgtgtcgataccggtaccggtcaaccctgtaaccccggagacacccgacaaattatcaaccagcttatcgagctggcttttaaagagtacggtgaaaataatccgcgactttatcgcgcctcaacggaagaactggtggattcagcactgcaggactcgggactgtatgaaaaacatgatgcaacctggtgggccagatcaacctggttcgaagtccgggatatgctccacaatgccgggtatatcatggcggctcagcgggcacattatcaggcaatgccccagcttcccgaagtgtcctcgatgctgggccataccagtctcagggatgttttcggtactgttcagcgtgatggttcaaacgaacttctgctggactacatccgccgcgctctcgagcagggacataacgactaccccatgatatccgggtatacccggtttatgatcaacccggaaacccgggtcatcgctgtcgatctgaataatgttgccggtgacaaaacgcctgcaggcaggcttaaaaccggcatcatgtacctgcttgcaggtcagatcgccggtggtgacttcaccctgccacaatacagggatgaagtgttaaagcagcttccacgggaataccatgaaatcgctcttaaacgtattaaccaacttgatcaggaggttaagacaaaagtttatgatgaactgcataacgcccggggcattgacttcatctgggaaaatctggatacccaggagcgtgagcaacgcaagtttgctatccgcacggttctgagtacgcagtatctgagggactacccggaaagcgttcttaagtcagcaaatactctctggttactgcgctacaaacccgaagatatccccgtactgagggataacttcaacgtgcctgaatttatgctgaaacgcttcctgaaaatgccggaaggcccggcaccagatggtagtggtgttcctgttctgggagtattcagggtaaaaagtggcacgcttgcgagaatactcaaatttaccgtcggtccactggagctatgggcgctgaactcatcgccaaaagacagtgccctgcgtaaaacactgacaaataagttaggttcagttcgggcacgtaagattctggccgaaaacttccccagaggttctgcaacgtcattaattgagcaccgggcgggccaacataacagtgacaatgttattgaagaactggcctcggagctcatccgaaaacagggatacaatctctga

SEQ ID NO: 467927 - DNA, 801 bp, Shigella boydii; identical to SEQ ID NO: 8503

SEQ ID NO: 467928 - DNA, 189 bp, Shigella boydii; identical to SEQ ID NO: 8502

SEQ ID NO: 467929 - DNA, 405 bp, Shigella boydii; identical to SEQ ID NO: 8501

SEQ ID NO: 467930 - DNA, 528 bp, Shigella boydii; identical to SEQ ID NO: 8500

SEQ ID NO: 467931 - DNA, 705 bp, Shigella boydii
atgaaacctgaaacagaaatagatgaaaccggcagcttcggtgaacccgaagagaaacccgcccctttctggaaacgttccgtctgggggatatctgtagcaacatgggggctatgtgcagtcgtattgctcgcagccatatggtatctgttcctgagagcaccatcggaaacaggcatgcctccgtttaatgatgcggatgctggcgtacagacctggcaaaccacacaagaatcatcaccttccgttcagtccactgagaccatgactgtccggacaggagaagatatgagccagcttgcccgggatgtaaaaacagagctggataaccgcgatgaaaaaattcaggcaacactgaatatgcttcacgacagcattaacaagctgggcgaagctataaaaaaggatgaagaatacgcacaggaaacgcgccgtcagttggatgatatccggagccacctgaacggaatgatgacacagaaaagcgtcaccgaatcctcttccacaccgcatccagcaaagaaaaaaacgtcgtctgtacttaacggaatgaaaatcatgtcgatggaaactggcatggcctggattcgctggcagggtagtacctgggctgtcagagaaggtcagactctgggcaatgtggtgatccagcggattgatccgacgacccggaccatcatcaccagtgcagggacgttacgctga

SEQ ID NO: 467932 - DNA, 1290 bp, Shigella boydii; identical to SEQ ID NO: 8498

SEQ ID NO: 467933 - DNA, 984 bp, Shigella boydii
atgcaatcacgttatttactgagcacactgctcctggtgtgcagcgccgccacgtctgcagataacgcaggatggcagaacgcacgcacaccacaaacgacaaattctgccagcgatcacgttcagaacgcctcccaaaacaccggaggtgttccggcaacactggtaaaaggtgagctgcctgcccccgggcaggccagcccgctggtacaggatgcggcaagacttgattctgagctctccgccgatgagattcgctcactacgcagtctcatggcggataacgagcgggccatcaatgcgcccatcaccagtgttgtaccccgtatcagctctctgacagttaatctgtcccccggtgccagccttcctcttgttcgcacagccatgaacaacctgagcgtagtgacatttaccgatatcaacggttcaccatggccacaatccgatcctccttataacgcggcaccaaaactctttgatgtgcagtacaacgagaacatggtgacaatcacaccattgcggccatgggcatccggaaacatttctgtctacctgaaaggtctgtcggtaccggtcatcctgaacgtaaccagtggcgaaacagatacgccgtcatccagtcaggaaatggacagtcgtctggatctgcgaataccacggcagggaccaaccagcccggttgtctccatcccgacggataaaatcgccctgcatgatgcaacattacaggcatttctggatggtattcctccccgggacccttcagttaagaggctgaaattcacaggtaatgtcccggatacaacgatctggcaacacggcgatgacctactggttcgttcccgggcgatgttgcgcgatgaatttgaacagaccttgtcctctgccgacggaactcatctctggaaacttcccgtcaccccactactgactttctctgtgaatggccagtccgttcacgtgacaccagaactggagtaa

SEQ ID NO: 467934 - DNA, 693 bp, Shigella boydii; identical to SEQ ID NO: 79108

SEQ ID NO: 467935 - DNA, 348 bp, Shigella boydii; identical to SEQ ID NO: 8495

SEQ ID NO: 467936 - DNA, 3768 bp, Shigella boydii
atgccgtctgtatcccgctaccgcacctggcttgccgtgcctgcagatgaaatagaagatctcaaaaaagcacatcccccgatgaacgggcacacgcccgtcatctgggacaaggagcacaaactctggttcgcccgcccgggggcggacctgtccaggctggaccgctggctgccccggccacaggacgtctccatgaacggcagtgatccggtcaccgagtttgcccaggttctggagaatgccggactggttctgaaagaactgccggtcatggatgggaaaatccaccgtgtcccgaccgccgatgacaaaaaaggacaaaaaagtggcgcatatcgcggattcctggacggcagacctgccggctggtacagggattatcgcagcgcggatgattcgccgatcacctggaccttctccggcggagaacagacagatccccgcgcaagactccacctgaaagcgcattcaatgcaacgcagggaggacgcggagcgggaactgaaagcacagtacaaccgacaggccgcgtatgcccgccgctatgtcaacaaatggccgcaggccacagcacatgaatacctgacccggaaaggcattcaggctgcaccgggggtgcgggtaaacaacaaaaatgaactggttattcccttcagtaaccgtaacggcgcgatacgctcttaccagcgtattccggtcaccggggggaaggatgcccgcatcctgaaagattcagagaaaaccggtaactggtttgcgctgggcacaccgcgcaacggtcagccggtactgtttgccgagggctatgccactgcggcctccctgcacgaagccacgggccttccggtactgatgacggtggatggaggcaacatgattgccgttgccgaaaatgcccggcaaaagtggacgcaaagcccctttatcttctgtgccgacaacgatcatgcaatccgggttaacaaaggtatcgtcagtgcaacaaaagccgcagaactgacaggaggatcggtcatctttcctgcgttcaccgatgccgaaaaagcgcaggggctgaccgatttcaatgacctggacgcaagccggggacgggccgcttttcagcatgtcatcaacgcccagttagaacacatcggggtttccacccccaacagtaacaccccggaaatccgcgaggcactggtgatcggcaacctcgtttttacaccggtccacactgaggaaaaaaccatgactccgacagaatatcctgaaacatcacccgatacagggcacagccatgaccagggaccttctctgccgtccgccacgcagcaggaacaaccagctgcttccagcagtaacattgctgatgaaacacagtcatttaccagtcacgccactgaaaataacggcaaagatgagcggcacgctgataacgttcaggcgcaaacggaaagctctgtagttcaggactcccctgcagaatcaccggcgtccccggaaagtacaacggcatctgcccctgatgaacccgctcatccggcggaacctccggaaaaagttgtctcggtggccacagataaagactggcgtgaatttgaagccgaactgtcacaaccggaaaaaaacgagtcacaacaggaatccgacacttcacctgaaataccggcccctgctgccgcccccgcatcccctgaagacagtacctcatctgaaaccatgaatgaatcagccgagccatcaccttcccctgatgcagtcaaagaggaaatgaccgtgatgacggagcctgatgacaaacaaagcaccggaatatccccggatactccccgggaagaggcggtcaaccatgtaactgaagacattccccttcagccagagccgttccttcctgagtcagatggccccgaagaatacgaaaactacagcgcatatcaggagctgatgaacaatgaaaatcctgagcatctgcaggaaaatagtgatatgccgtcgcaaccggacacagaccacgttcaggcagatgagtcagaacttcaggccacaacagatactgcagaaccggctgtccgggatgaccccactccacagcaacctgttcagagcacatcaccttctgataatactttatcgtttctcgacaaagcgcgtggcttttttacgcgtaaaaaaacggattcacaggcacatgagaacagtgatcccacgccctcagcggaaaccacgacgactccaccgatacctgacagtattgtctacgccccggaacgttctgatgcaccgatatcgctcaacatggacgaaattcttaaagagcttgactgggaaaaacgagcagacagaaccgtcctgtacaaactggatggcaaacctgccttcattgaccgggtaaaccggctggaaatggtcaacggtgccagcaatgacgatcgcagcgttctggccgcacttgctgtggccaccaaattttatgggggcgtcatagagctgacgggcagtgatgcctttaagcaaaaagcaatgcagttgattatcgagcacaacatcgatgtccggatgaaattgccagatcaacgggctgaactagaaaaattacgcaaggaaatggctgtcagtaaggatgctgttgtcacccataagccaacaccggaacttaaccggaatacccctgaacaaccagcagtcccagaccctgttcaggaaaaagaagccacacaatccccggcgtccccagtagcccctgaagcatcaaccgtcagcaccgtccctgcatcatcaccggctgaacctggcaaaacggcagatgcggcacaaggtgaagaaccaccaggaaaacttcgcccgggagagagcgtgactgccgtactgcacaattttggtcgtgctgaatatgcacccggcaaaggagagagtttctttgttgagcttaaaaaccgcagtggcagcaaactctactggggggagcaactggaaagtctggtcaaaaaccatcagaaaggtgacgtggtgacactgacacttcagaaccgcgaacaattcatcctcccgggagagcaaaaagcacgtttccggaataagtggtccatggagtcagttaccaacgggatctcggtatcacatgataatccggataaaggtcagcgtattcaggcgattccggtcgaaacctttatgaaagtggctgcgcaaatcagccaggggtggcccgaagagatgaaagcgttacgtatgccagaaaacgtcggctcacatctgtttatcggtgaagaccgacatccggtctccgcgccacagaacgcaaatcaggtaacagaaataaccagcgcagcccctgacaagctgacacctgttctgggatcagtggataaggatacgcgtgaactcaacctgctacttgtccagagtgccgatgaacatctgcagggtgtggtccggctgaacggtacattgtatccggcactggccaccccatcagccgacaacagtcagctggttatcaatgcgctgaccgacaaaggtttacgctttgcaggttatggtgaagcggtaaaccacgatgctgacagcacgaatcgccccgcaccggagcttatgcagtttcatctgaaaacccgggaagaaccgctttttgctgctgtctacacgccggaaaaacaacctgatgcgttgtaccggaacctgggcttcgagcagtcatggcagcagtggtccaacagccaaaagccggaggacaggcaggaaaaaactctgcatcaggatctctcccacagccccggccgatga

SEQ ID NO: 467937 - DNA, 552 bp, Shigella boydii; identical to SEQ ID NO: 79111

SEQ ID NO: 467938 - DNA, 291 bp, Shigella boydii; identical to SEQ ID NO: 79112

SEQ ID NO: 467939 - DNA, 1149 bp, Shigella boydii
atgaatattcctgatgagtttggtctttttccgtttcagcgtttcactgcagatgaactacggcatttctttgtctggtgtgccgcacataaagtcagtgatgtggatctgaccggcgggtcacctgtatctgtcagtcgctttggccgacgggtgcgttgttccagtgcaacgttaccaaccacactcatgtcctccctgattgatgaactgttcggtcgggaagtcattccccgcgttctggcaggcaatccggttgacaggacgatacagattaacggggatgcatccgggcgctatggtcttaaacgcggagaacgcatccggttacgctctcacctcattcagggcacatctggtgcggaggagaaagcaatctcaataaccatgcgtgtcatcccgacagaaataccggacattctctccatgaacattgaaccagacctgcttgaagcaatggtctgcaaaagcggtctgggatttgtatgtggtgaaaccgggtcaggaaaatcaacgctgtgttcagcactgtaccgttacattatggacaatttccccgacgccaaaatcgtgacatatgaagacccggtggaatatatcctgggaaatgaaaacgatctgctcccaccgcatcaggcagaaatcgggcgtgatgtggtcagttttgctgccggactgcgttctgctgtacgacgtaatcccgaaattatcggtgttggtgagatcagggataacgaaaccgccgacgcagcggtacaggcaggcaacaccgggcattactgcctgagcaccatgcatacgaaatctcctggtgaaacgctggcacgtcttcttgggctgtttccccctgtcatcagggattcgatggcctgggctgtcctgtcactgttgcagttcattctggttcaagttctggtcagaacaaatgacggtggtcgtaaagccgtccgggaatatatcgtcattaacgatgagcttcgcgacaatctttccggaatgccgcatgcagagtgggggcatcacattgatgccataatccggcaggagaagcgccgtatccgggaccagattctggaaatgtatatccggaatgaagttgaccgaagagaagcgattctttttatcccgccaggggagttacggtcatga

SEQ ID NO: 467940 - DNA, 819 bp, Shigella boydii
atgaaagcactcacctctctccttttgccagtaatactgcttactggttgttcttcttcccctaccatctcgccaggtggtgtcaatacgccaccacctgacattaatgcatggcttaaaccacgaagtgaaaagccggatagtctgtcagaaacacgctggaaaatgctgaccgacgcaggtaaaacgcttggatttcgtggtggcaaggctcagcgttcatgggagctgattcaggcgctcaacgcccgggaaagcacacttaatgccttatacgatttccggccactgattagcccggaaggctggctaccaccggttattgatgaagcacaggacgtagctcatatcacgccagatcaaatccggacctcttcccgggtctggaccatcattcgccctgaacgctttgtcagcaatccaccgggctggcgtgactggcttctccgggggctttcaacaacagccactccgggtacagaaggcagcgtcgttccagaagacagcgtgcaacgaaaagtgtgggaaaccgcattacggcagggatggcaggaaggaagacaaaacgccgacctgacgcttgaagccaaccagaaaaccctcacccgtgattaccggggcatgatgctgtactcacttctctggcgtcagggcatgatcacccgtccggatgtttctgatcaaatgcaaaccgttacaggtgacgggaaaaaactggtcactggagatcgtgttcgtcgccttaaaaatcatgcggaattcaatcttcagaaatctcactggcgtccgcttataggcactgaaggaggctcccgatga

SEQ ID NO: 467941 - DNA, 459 bp, Shigella boydii; identical to SEQ ID NO: 79115

SEQ ID NO: 467942 - DNA, 585 bp, Shigella boydii
atgatgaaaccacgttcttcttattcaaaaacagtattcattcttttattttctgttttcctggtagctgcagtgacaaaagcaaaaagctcgcttcccgatatcaccctggaacaggcaaaagaaatgaatgctgataacaccgttattttccttttccgccatggagaacgttgcgaccgttcagatatgccctgttattcggataagagcggaatcactattaccggtacagagaaagcacagcaggaaggtattaagttcgcaacaatcttcagtgaatatgatatttactccagcaatgcggtaagaaccatacaaactgcaaaattcttctccggtaaagaacccgtcgttatggacagtttatcagactgcaataatgatctttataagacgcttgaatcaatcgcaagagaatctcataaaaggaacatagtaataatgacacataatcattgtttatcatttctggccagagataggctcggcaagaaattcaaaccggcgtaccttgatgccctgatcatgcattacgatggtacccggctcatacttgacggaaaatacaacaaagaggcatag

SEQ ID NO: 467943 - DNA, 1200 bp, Shigella boydii
atgaagaaaaatcatattacccgcaccatcattgcatctgctgtattattttcctttaacgctgcagcagcgacgtcatattttgaagcgcgtaacgatgcaatgggtggcaccggggtagcatcttcccattatggtgtggcacctctggcaaacccggctttactgacaaagcacaacagcaatgatgatttcagccttcttctgccgtctgttggggcacaagttgctgatcctgatgatgtatcaaataaagctgatgatgttaaagatgactgggatttgtttgacagtgctgtagataaccagcatggcgtacaacaggcagcggcaaatcttaaacatcgtctgcaggaattccgcaatatcaatgcagatgctcaggtaggtgtatcagctgtagcagccatggcaaatgacactctgccgtttgcccttatggtcaagtcttacggaactgtcagcgtaaacggaaaagtaaacgatgcagacctggattatctggacaaagttgccaatggaacaattaccgacgtcgataagaatgccctgacctcacgcgcattcgggcgtgcagctgtaattaccgacgtcggaatttcatttgccaaagaactggaaacggccggacaaaaatggtctcttggcgtcacaccaaaatatcagcgtgtggacctgtttaactacaacgtaacggttcgtgattacgacaaagacgattttgacggtgacaagtaccacaacacgaaaaacggattcaacgccgatattggtgcttatacagacctgaatgacaactggactgtcggtcttgttgcccagaacatcattccacgcagtattgatactaaagtcgtcaatggctttaaagaaaccttcaaagttcgtccgcaggcaaccgccggtgtatcctggcataatgacctgtttaccactgctcttgacattgatctgactcctgccagtggcttcacttctgacagcaaacgtcagtttgcaagtgttggtgctgaatttaacgcatggaaatgggcgcaattgcgtgccggttatcgtcagaacatggcatcaaactccggaagcgccttcaccgctggcgttggtatctctccatttgacgtcgtacatatcgatgtttccggcctggtaggaactgaccacgattacggtgcaatggcacaacttcagttcactttctga

SEQ ID NO: 467944 - DNA, 825 bp, Shigella boydii
atgagactgaatacgaccggtattgcggcccgaatgatgctctcgctggacaaaaaagcaatcggcgaaaaactcatcaacggtcgtcagataaacccgacacctctgcaggtccgttacccacaaggggtaagagaagttctggggataatgagcgaacaattagccatatccaccgctgatttaacccgaatcctgcttgaggatgctcttcataatatgtttatgcctgcggataacaccacaggaaacataataagcagaattgaatacatcatgctgtcgcatgatataaatgcgccattactggcaacattgctgtcgccatggaatatccgctccacggttatacaggacccggccagacttgcagactatctttcagctgacgctctcgaacatcttgctgaatgttttaatctcaatccggactggctgaatggccatgaaaactatccgatagcgttgtccggtgaatggccagatactgctgataatttcagaatgcttattaatgatagcagcaacactgaagttattttctggcatagtttccccttcgcaggaaacacgaaaagagaatattgcggggtaatattgagacagaaaaaagaaataaatggctctgtaatatatccggcactatcattatcaccaacacttctgaacgatgaaaaaagaaaatggttaactgaatatacaaccaggcagaatacaacaatgtctttgcgacgcgtcacgttgagacctggccttgccgggaaccttattacagggcaaatactacctgttagcttatttaatacgtctctattaccctggtaa

SEQ ID NO: 467945 - DNA, 1155 bp, Shigella boydii
atgccgtctccacgcatccgtaaaatgtccctgtcacgcgcactggataagtacctgaaaacagtttctgttcacaagaaagggcatcaacaggagttttaccggagcaatgttatcaagcgatatcccattgcccttcggaatatggacgaaataacaaccgttgatattgctacatacagagacgttcgtttagcagaaatcaacccccgaacgggtaaacccattacaggtaatactgtacgtcttgaactcgcccttctgtcatctctgttcaatattgctcgtgttgaatggggaacctgtcgtactaacccggttgaactggttcgcaagccgaaagtatcctccggacgagatcgccggctaacgtcttcagaagaacgtcgcctttctcgctatttccgcgaaaaaaatctgatgttgtatgtcattttccatcttgcccttgaaacagccatgcggcagggcgaaatactggccttacgttgggagcacattgatttgcgccacggtgtggctcatttacctgaaaccaaaaacggtcactcacgggatgttcctctgtccagacgtgcccgtaactttcttcagatgatgcccgttaatctccacggcaatgtttttgattacaccgcatccggctttaaaaatgcctggagaatagccacacaacgacttcgcatcgaggacctgcattttcacgatctacggcatgaagcaataagccgcttcttcgaactgggtagcctgaatgtaatggagattgctgcaatatcaggacatcgttccatgaatatgctgaaacggtatactcatcttcgtgcatggcaactggtcagtaaacttgatgcccgccggcggcagacacaaaaagtggcagcatggtttgtgccgtatcctgcccatatcacgaccatcgatgaagaaaatgggcagaaagcgcatcgtattgagatcggtgattttgataaccttcacgtcactgccacaacgaaagaggaagcagttcaccgcgccagtgaggttttgttgcgtacactggccattgcagcacagaaaggcgaacgtgtcccatctcccggagcgttacctgttaacgaccctgactacattatgatttgccctctgaacccgggcagcaccccgctgtaa

SEQ ID NO: 467946 - DNA, 1293 bp, Shigella boydii
atgaaaaaatatgaccgaggctgggcatcgctggaaattggcgcggctttattgattgttatgatcatagttgcctggggtgcaggcatatggcaggactatttaaaaaccaaaggttggcaggctgaagctcgtcttgtcagcaactgggccagtgcagcccgctcttatatagggaaaaactacacaactctccaggccagtagtaccacaacaacccctgccgttatcacgacaaccatgctgaaaaataccggctttttatccagcggctttactgagacaaacagcgaggggcagcggttacaggcatatgtagttcgaaacacccaaaacccggaattactacaggcaatggttgtatccagtggtggcaccccttatccagtgaaagcacttatccagatggctaaggatattaccactggtcttggtggatatatccaggacggcaaaacagccacaggtgcattacgttcctggtcagtagctttaagtaattatggtgccaaaagcggtaacgggcatattgccgtactgttatcgacagatgaacttagtggtgcagcagaggacactgatcgtctttacagattccaggtcaatggtcgccctgacttaaacaaaatgcacacggccattgatatgggatcaaataacctgaataacgttggggcagtaaatgcccagactggtaatttcagcggcaatgtgaatggtgtaaatggcactttcagcggtcaggtaaaaggcaatagcggaaactttgacgtaaatgtcaccgctggcggtgatatcagaagtaataatggttggttaattactcgtaacagcaaaggctggctcaatgaaactcacggtggcggattttatatgtccgatggatcatgggttcgaagtgtaaacaacaagggcatctataccggcggtcaggtgaaaggcggtactgttcgtgctgatggtcgcctttatactggtgaatacttacaactggaaagaactgccgttgctggcgcatcatgttcgcctaacggccttgtaggccgcgataatacaggggcaatactttcgtgccaatccggtacgtgggggacaataggtggaaaactcaaagttactcagctttccaccacaggttatctggggcaattcgacttctgtgccattgccagaatgggcaacgcagaggatgcccactactgccaggtagttgagagcccagcaggttcacgcaaatggtacaaatacgagcataagacaggttgtattgcgtcgtgtgtaacgctcaattaa

SEQ ID NO: 467947 - DNA, 657 bp, Shigella boydii
atgcagacaatcgtaggcataagtctctcccctgtttatatcctcccattgatgttcatattttccattattggacgaactctgttattcagagttcgttattttttatctgatacagaacatctctggtataagacacacactgcagttctgtcaggaatatggctatatagtatagctgtggcattaattattttatcgccatcccaacttctctaccgtattcatgctgttcttattctttcgttcatgctgcaaatggcagtaacggatgcactaacaggcctcttacctggtacattcaccaggcgttttttaatcgctggaatattatcacaaatcacaactgatatatggtggctccgtgcaacagaaattgtctctgccgcaattgtcttattctgtctgcataaactggttaaccgccatcgtcttaatattggcacaggagacctgtggcttattgcaggtattaccgcatggtcagggctatataacgccatatggagtgtgttgctgggcgcaggaggatttgtcttatggcattcaacatggtgcataaaaggacataaagaaggcccactgggtccatggctgtgtcttggccatgtccttttgctactggataatctttatcaaccactatgggtaatctga

SEQ ID NO: 467948 - DNA, 561 bp, Shigella boydii
atgtccgggggtaaagtgcccctcagacttatttcattaatcctgctttgttctcttatttatcccgcccgagcttcatacatcgcccccaaacaaatctggactaacaagtgggacaattgctttgccgccgccggcgcacgctatcaaattgaaccattattgttgaaggccatttctgccggggaatcttcattgaagccgggcgcaattaacataaataaggacagaaaaacaggcaaagccagtagtacggattatgggttgatgcaaataaactcaacccatattccaaagcttataaagatgggcgtaatcaaaaagtctgaggatttaattaccaaaccatgtcttaatatccatataggaagctggatactggcaagacattttcagatatgtggcgtcagctggaattgccttggatcatacaatgccggattccgtaaggacagacatgaaacaagagagcaatatgctaataaagtatggagaatttatcgtgacatgaaagggatatgccttcccgggcagggaggcagacaatgcagacaatcgtag

SEQ ID NO: 467949 - DNA, 615 bp, Shigella boydii
atgttaatccaaaatattgatgttaacgctctgaagaaaaatgagaaagaaacgtctcatgacaaaggctggggtattatggaacagggtgcaatagcacttgttgtaattatcgtacttgcccttgtttttggtggattgtatatgttgcgttcacgaaccggtgtggcaaatgaaagttcgaacatacagacaatcatcacaagtactcaggggctgctaaaaggtagcgatggatatacgtttaccagtggagccaaaatgacgggtgctctcattcagatgggtggcgtacccaagaccatgacagtgcgtggtactccatcatcaggtacagcaacgctctataactcatggggcggtgccgtaactgttgctccggcttcaacatcaggtttcaacaatggttttaccgtcacctatgaaaaagtcccacaggatgcctgtatccagattgccacacaaatcagtcgtactggtttaactaacggtattaccctgaacagtacgactcacaatgatggaaaagtcactactgaagaagccagtgcgcaatgcacagctgataatggcagcactggtacaaacaaactaatcttcaccatcaatggctaa

SEQ ID NO: 467950 - DNA, 1086 bp, Shigella boydii
atgcgtgaaatgaatttcagtcaacggctgagacgtttcattgtcagaaaaacgttcagcgccccctacagggtgcagttttacgaagctctgcgttttctgctggaaaataaacagccattaaagaccgcactggaacagatgcgggatgcctggacagactttggacgaaaatggcatccctttgctgaactggccacagactgtattgagtctcttcgtgaaaacagtggcgaaaactctctggaatatactcttggtttatgggttccccaggaagaggctgcagtaatcagtgccggaataagaagtggttccattgtggatgcattacaatttgccaccacacttacagatgccaaaaagcaactccatcaggccatatggcaaatggctatttacccggtggggttgttaatcatgatgacggggacattatatgttcttaatacagagctaatacctgtactgagcaaaataagctcccctgattcatggagtggtgctcttggttttctctatggattatctttgtttgtcgataattacggcgctatatgtgccgttctttttgcagtggtcacaggtgtaatatcatggtctctgaaaaactggaaaagccgctctttggctgacaatataatgccatggagtatttataaggatatacagggggcagcattcctcctgaatatggctgcacttctgaaagccaaaatgacaacgctcaactcactgaacgttcttcaggactttgcatcaccatggttaagcacacgccttgacagcattatttaccgcgtacgccagggggatcaccttgggctggctttgcgtcagtgcggttatcagttcccatccagggaagcagccaacttcctgtctttattacagggagatggcgcaacggagctaatcggcaattatggccaacggtggcttgtacaaacgctggagcgagtaaaaaaacgagcagctgttgtgcgtttaattatgctgatatttcttgtcatgtcactcctgttactggtcatggccgttgtagacattcagtctattggcgacaacagtatgggtaatctttaa

SEQ ID NO: 467951 - DNA, 1554 bp, Shigella boydii
atggacaaatataatttgaaggatgctctcctttttatatcccggggagacacccatgaaattctcatcgaaacaaatcagcgaacaagacctgacgtacagagtaatctccaggaactgctaaacttataccctgacatcatcccaaaagtagtctcgctgtctgagttacaggaagccggtcaggatgatgaaaataaaggtccgaaagaacggattattcatctgaaagatcttgcagatgtcagtgaaagtgagaagaaagttctctcctattttgaaacggccagaaaacttggtgcttcagatattcattttttaatttcagagtctattttcaaagttcgcatgagaatattcggtgaactgcaaactgtagatgaagatcaacctgcgttgggttattcactttgcgcaacagccattctgtcaatggctgatgtgactgaaaccagtttcttccctcaaagggaacaggatgcgcgcctgtccccacaattaatgcgaaaaataggaatatttggtgcacgatacagtcacagacctacgggagatggtctgattgcagttatgcgcctgatacccgatgacggagacaaagttcccacgtttaagcaactgggctttataccggagcaaatccggttgctgaacgtcatgctgcgccgcccggaagggaaaatagttctgtctggtccaacaggttcaggtaaatcaacaacgttacgcagtgcctgccgtgtatatcttgacgataatcaggggcgacacctgctgacgatcgaagatccgctggaaggacagattctgggggcaacacaaaccccgattatctgtgacaaatccgacgaagaggccgtcaaactggcatggagtcgtgctatttcatcggcaatgcgacttgaccccgatgccatcatggaaggggaaatgcgcgatcttgtctcgatgatgtcaacaacctacgcggctcagaccggtcacatcgttctgacgacattacatacaaactcagctctgggtataccggagcggatgattacgatgggtatgaatgccgatcttatttgcgatgcgcaattactgattgggatgatcagccagcgtcttgtaccaactctgtgtccctcctgccgtattccatgggaaaagcgagtacctgaacttagcgaagacgaccgcgcttaccttgagcggcactgcaataaagattcactctgcagtacagataatatctggttccgaaatcctcacggatgctccgactgtaatcacgacgtaattattaacggcagaaagcgcggtgaaataggtaaaggcctcaccggcaggaccgtaattgctgaagtgatagaacctgataatcgcttatttcagattctgaaaacacgcggcaaagttgcagcacgtaaatactggcttgaaaacatgcatggcatcagtcgtgtggagcatctgcttcgccgtatcaatgaaggcctggtggaccctcttgaagccgacagaatcatccctctggacgaagacgaacgcctcagcatcgatgatgcctaa

SEQ ID NO: 467952 - DNA, 453 bp, Shigella boydii
atgcgtccaggtaaatcactcattattccatccatatttttcttctccggtttttcatttgcaacaacacaacctcttgtcacaataggagaacttgaagcacaacaaaaccggaatattcttttacaggcaaaagttcagggcgcacagctacagaaacaactcgaagaatcagatgttaatctgtcatctgaaactgtttcaggtttctctggtatgactgcctctttgccatcagtttcagagcagccgacatctaaaaacagaaaggaattgcccgttattatggaaataaacggcaaagataaacgtcttcatgccgttcttcgcatggctgatggacgtcagacaagcgtcaccactggtagccagcttccgggtacatccgtcacggtgaagtcgatctcattgtctggcgtcacgttaagtgatggcaccacccttactttctga

SEQ ID NO: 467953 - DNA, 1296 bp, Shigella boydii
atggctgatgaagatatcaacccggtagtgcttctcgcagatcctaaagtaaatcatcgcgtgtgggctgcctgtcttaaatggactcctgtcgtaaaaaaacagcgcgtcccctcacatcataaacacaagtctcatgtaaaacccagacggcttacctccctgaaagtgactgtaggcagcagaaattcccgtggaaagatcagccgccttaccggcacaggaatactgaccaggccagaacgcaatcattatttttccctggcactggctttctgctcatgggtcagaaatggatacggtgtcttccggtacagcgataaggagctcttattccttgcttccattaatggccagcctgccgttatggctgacttatcaggaaatgatgccgatgttgcccaaaaggtcagcctttttctggcgatgaacgaagagccccccgaaaaatggcaggttgtatcgtctctggaacatcctgataactgggaaagtattattacccggttatcatcagcagacctccgccgttgcaaacttactgtcggcaatcgcagcaaattcacactgcctgccgtactgtttttagtagcagccggcgcaggcacagtattctggatgactcagccagagcctgatgtcggaccgaccgccgaggagatagctgcacgggcaagattacagtttaaaaagcccgaaccaccaccggagctcccgcatccatgggcgtcacaacctgtaatcaatgattttctgaaagcctgcgcggaccttcgaaaaccatcaccggtcgcgctagaaggctggaaacttaccggtggaacatgtactcccgagacattcacactgatttacgaacgacagccaggaggaactattgaaggctttctggcaagaagcaaagaaatctttaatgttattcctgactttaaccttaaagatggtgcacgcctggcttctgtaacccggctactgccttccctgccccgcagggatgaggcagtccctgccccctcagaacaactgatgcgggtgttcacgtggtttcagaaaaaacagttaacgccggccattaatgaaatagccataccggaaccattaccaggtaacgatggtgaaccagcccctgttcagaaatggaaagaatatcagttcagtttatcaacgcctgtaaatcctgatgagttgttccctttatttcaggataccggcgttcgtctgagcaatatccattttgaattaaacggcggtactttcagttattcctcagaaggtcatatttatgcgtccaggtaa

SEQ ID NO: 467954 - DNA, 1683 bp, Shigella boydii
atgaaaaaatcacaccagcgttcaatgaagctggcggtgctcccctgcatgatcgccgtcgctctttccatctccggatgtactttcagcgaaatcaacaaaatgcagaaaaaagcacaggaagactcagcacatgcacgggaaaaggtatcagccctttcggcccgtaaatcgcaggctcttacctggctcgataatcaatggataaaccctgttccggtcgctcaggtatcaagagagaaaaaacaaacagctccagcctgctacatcacgcaggcaagaaaaggagagatcactctgcaggaactggggcaacgtattactgccgtatgcggcatccctgtgatcatcacgcctgacgcagccaattcaactcttgaaggaggcgctacccgccagatgacaggaacactaccagcaccagatgaaaatggacgtctaccgttaagcagcctgggcagcacaacaatgactacctccactcagccattaacgctgaataacctcatgtggcagggagatatcaatggtcttctggatctgatggccagccggagtggtctgtactggcgcatggataatggtcggattgtattctatctgactgaaaccagaacgtatccacttcatatgctgaacaccaaaaccagcagcagttccagtgtcagctctggctcaacaagcacaatgggggcaacaggaggccaggataactcagcatccggtgatgcaacgtcctctcagagcacaaccgttggtcaggaatacgatctgtatgaagatatccggaaaactattgaagcaatgctgacaccagaaaaaggccgttactggttatctgcatcgagctcaacgctgacagtcactgatactccagctgtccaggaagccgtcgcacgatatgtagacgaacaaaacagtattatgaaccgccaggtagccctgaacgtacaggttctgagcgtcagcaataccagaaacgaacagttcggtctggactggaaccttgtttataaatcgctacattccgccggagcaacgttgaacaatgcaagcggagattttacaggcgctacatctgcaggcgtatcaattctggatacggcaacagggaatgccgccaaattcagcggttccagccttctgattaaagcactgagtgaacaaggcgatgtcagcgttgtaacttcacaagaaagcactgtcacaaacctgacgccggtacctatccagatggcagatcagacagtttacgtcgcccagtcagcaacaactacgactacggatgtaggagcaacaacaacattaacaccgggcatgatcaccactggattcaatatgaccctgctgcctttaattcagaaaacaggcaatctccagttgcagatgaactttaatctgtctgatcccccaactatccgtagctttacgtcaaaagacggaaacagttacatcgaaatgccatataccaaactgcgttcactgagccagaaggtcaatctgaaagaagggcaatcacttgtcgttactggtttcgatcagaacaatacgacgacaagtaaagccggtacatttacgccagcaaatccattatttggtggttcacaaaccgggaaaaatgaacgcagcacgcttgtgatcatcattaccccgactttcccgtcaggaggcaataatggctga

SEQ ID NO: 467955 - DNA, 438 bp, Shigella boydii
atgggatggctggtcatggccgtcggcctgaccattctgattatcactggtagctaccagaatcagaagatgtctgaaaccacaaacgcccagcaatatgcaagtgcgtctgtatgggcaagtcagatactaatgattgctaatagaatcaatgatatcagatacgtatcaggccagcaggacggagtaatttcctcagataaactggctctccctgtcactccggactcccgaattaaacatcagttacaacaggggcgtctgtgggtatggatgcctgaacaaccaggacttgttgaaactttgcgttcaaaaagtcgtggttctgcactaatagggatcttccaaaacgggcaactcacctggctatcaggaactgcaaccggtctgacacccccggcaggcattactgctggttctgtcgtctacgttaactaa
